United States Patent Application Publication US 2014/0057251 A1 - sequence listing, part 121

SEQ ID NO: 222997 - DNA, 1104 bp, Cannabis indica
ttatactcagatcataagagcttgaagtatctttttactcaaagggattcgaatttgaggcaaagaagatgggttaagtatacggaggactatgatttcacttcgcaaaaccaccgtaggaaagctaatgttgtagctgatgcactaagtagaaagcctcatggtactttggcatgtttggctgaggactagaaaaagacaatgataatgggtgattaaaagttgcaatactatgaaggggaagaggtagcttgtatctctaatatagtggctacaccattcttacttcaataatttaagcaacgtcagtggcaagatgaaaaactgagacttatttcgaactgaatccataatgttgagcagctagatgggtggacagttaatggaaaagggtacctataatataagggaagactagttgttgtagatatccctatcttagggagtccattttgatcaaggcccataggtcaaagtttattgtacattctataagtacaaagatgtaccacgatttgaggaggcaatattggtggaaatgtatggaaagagatgtggctagctttgtagttaagtgtatagtttgtcagcaagttaaggtcgagtatcagagaccttcaagtttacttcaacctttgcctattccagtatagaagtgggatacgattacaatggactttatttactggattgccattaagacctttgaagcatgacactgtttgggtgataggtgatcgtttgactaagtcttctcattttattccagtcagaaaagattacaagcttaccaggctagctcgactttatgtagaagatatatttacactacatggagtgccttacaacattgtttttgatagagatcctcgatttacatcaaggttttgaaaggccttccaataagccttaggaaatgaaattcacttgagtactgcccatcatcccactactaaaaaaaggggattttgcgtcgatcaaaaaatttggtcaaacttgttgaccgacacaaaagtcaacccacacttttttccttcagttatccaccgacacaaataattattaattagcatcggttatatatccgacgctaaaacaaaaacc

SEQ ID NO: 222998 - DNA, 3013 bp, Cannabis indica
tttttttgttcttcggtctttggtgtaatgggtataatggttgtaaagtgcaggttcgaaggctttctgcatgtgagacaatgggttctgcagaaaccatctgtagtgataagactggaaccttaactttaaatcaggtttgaaggtcttttttattttatttttctgtgtgtagcgaaaatgtacaattttactaaagattctcgaccaattgaattagttgactgtttagtataattttacactgcctttatattgtgtgcaaacaaatatgcagacttgactgaaactctttttttccctggctggttatagatgactgttgttgaggcctatgttggtcgggagaaaattgctcctgctgataacaagtcacagttgtctacaatgctctcttctttactttttgaaggcattgctcaaaatgccaatggtggtgttttcgtacccaaggtatttagtatccattgctgacatattgaatttaagtgaaatatgcttccaagttcataaaaaaagggactaaactaaaactaggaagatattcatttcaatgtggtaatcttgattctatttttggtcaaaccaattttttgaagatctaaatgctctcattatacatgtgaaatctaataatttttattaattatatatgcaaaataatattaaaaaagcataagtatttaagatagaaatatgatgcttagctttctttgattcaaactttataaacatagatttttgaataattattttagttttatttgttttgattaattacaaagtttgttttattttaaattaagatgtggaaattcaaatccttaaaaattgtttactaattttcttaaaattgaaaactagaagtcatatttcactcacacccagaggacatcatagtattttctcttgcttattcactatgggtagttgtgcttatgttttaaggttctaacaaggtgcatgctgcctattcatctgtagggtgggggcgaagtagaggtttctggatcaccaacagaaaaggccattctttcctggggaattcaggtcagtttttgtaagctaatttctcttgctttatacatagcacttctattaacagtattttattattatttgcagctgggaatgaattttgaagctgttagatcagaatctacaattatccatgtttttccattcagctcagagaaaaagcgagggggtgttgcagttaaacttgtaagatacatttttttttataaaaattataataataataataatataaacaagggtgtattgagaaaagatgaaataaatcatctgagatacaacctatatgccagtaaaccaacctataattttaatctcattaaacaagggtgtataacaacctgcaacctataccaacctataattctaatcactgcaacgtaaaccaacatataatttaaatctccagataggttggtataggttgctgcataatgaaaaggattgacaattcctttcttggcttggttgggagattggaaattttattgtgtaatgttttggctttcttttttaagcaatggaaagggaaaaaaattgctcgttgttctttgtattaggaatcatgaatgattaaattgttcattgttgcatgtcatgagagcttacctttattagtaaaaatcgagagataactgtgtaactttatacacatggtagagtgatgtttatctttaatgttctcatttatattgtttgcagcccgactctcaagttcatgtacactggaaaggagctgctgaaatagtgttggcttcatgtacgcagtatattgatgagagcaatcaggcagtagccatggatgaagaaaaggtttaagaatttggttgcattttaaagctttaattatttgtatatgtttgcatttatgtatcactagtatatggtaggggttgggctttcgtttgcttccaatgtgactagtaaaaaggttggagtattgctattaaattttagatccttccacactctcaaaatctcatttcattcatctattataatttgtaattcttgtagacatgacgtttaattgtttataagtttccaagtagttggcaagatctttttcagagttttctctcaaccttccactttttttcttcttgtttaaatatatctgcttcttttctaaaattctttttaccatgttctgatggtttggtttcaattctcaagacattttttcccttttaaataacttttttattaacaatttgtctttgtttgcaggctctttatttcaggaaagccatcgaagaaatggctgcaaaagctttacgttgtgttgctattgcatacagaacatgcgagctagaaacagttccaactgatgaagaacaactttctcgctgggcattgcctgagaatgatcttgttctcattgctatagttggtattaaggtatttggtcctaggaagcaaaattggataatgtttcatgtccttgctgcttttggcaatttttctgagattcgtcatggaacctacataggaatatgctagattttcctgccccccaaaatattgtcaccactctattttgacaccatataatcaatatgccctccttaactgctggctaatcagtgtttcctacatgtctagctgattgtattatgcctattattttacttaacttcctgattcttgtaactttaaatgtcagcaaatacactggtacttttcacattggatttcttgttcatttgcattgttattttccctttttctgttgtatgttatgtgttagcttcttcttatcgcatatgtacattgcaatgcaggacccttgtcggccgggggttagaaatgcagttgaactatgccaaaatgcaggcgtcaaggtattaatcactgatccagtttctaggcataacttttctgaagttgtgctcaagtgcaagcatagtttttaaaaaatgcagagttactagtgctcatctgtatttatactcatggtttaatattttctaac

SEQ ID NO: 222999 - DNA, 959 bp, Cannabis indica
tatcacttgtgtgtaggaaacataaatgatagatattgcacaaaactaaaagactcccataatagcttatctcaacacttgagaagttcaaagcaatagaaacgaggctcaattgatgatgagaaaagatgcacgatacatcatagtggaaggtgtaatgtacagaagcggcttctccatgccattattaagatgtgtgacgaaaagagtagctgcacgacttctgtcagaagtacatgaaggattttatagtagttacgttggagatgagaagttgacaagtttataaaagaaaatactaatgcaaggatatttttggcctattatggtggagattcaattgcccttgtaaataagtgggacaagtgctagagattttttaagattccttgagaatccccaaatgagttaatatagatgaaaagtccatggaatttttccatatggcgaaaagactttatgggacagtttcccaaagaaaaaggtggagtacaatatgcaatgctcgtggtaaattacttcatcaaatggacacaatgcgagcctttagcaacaataacatctaataaggtactagattttgtagtaaagaacgtgatatgcctgtacggacttctgtataagattctctaggacaatggtaagcagttccatagccagatgttcacaaacttctatacgacacatggaatcatcaagagtttcttcgtagtagcacaccctcaaataaataggtaactcaaagcagtcaataagacactcaaagacaccatgaaaaaacagctcaaagaagttaaagggaattcgtcaaaggaactataagaagtattgtggttgttcaaaacaacagaaaggacgacaactgggaagccaccattttccatggcttattgttatgaggcaatgctgcccatggagttttaacccccaccccaaagaagactaacttacgatcaaga

SEQ ID NO: 223000 - DNA, 1312 bp, Cannabis indica
aaccatagctgcttctcgcaccacatccggaggtttagaagctattaaatcaaaaaaccagcagctgaattcagtatagtttgcaccagcagcgctcactatagataaggaccagcacgattgactaaagctacagccaagaagaatgtgaaatattgtttcagcagaaaaattacaaaatggacacatcatttcaatattcacatgctttgtgttcagctgaactttagttggaagacaccccgatgttgcacgccataagaaatgttgaaccttttgaggaatatccaattgccacagctttttaaagccatctgtgttctgcaccaagtcagccgtggtagtttcctgctgcaaataagagtaagcactcttaattgtatacaaaccagatgaagactggttccaaaaccagagatcttcttccacagagtcgctgagttgaattgccataattagctctttatccctctcttcaaataaatcattcaacacctctatatctcagtttttctgtccaaccgaaaacaaattagagaccattttatctaccagagcagggtggctggaaacgatgaagggattttggttgtggggaagccacggatcacgcagtatactaacagatgtcccacctccaatcgatcttcttgcaccagcacaaaccaggtccttggcttctaaaatgcttcgccaaatataattgggatttggacccatctcagccgtgaggtatgtacccgtaggatagtatcgagctttgtaaatcatgctaaccaaagaattctcattggtcaataatctccatccctgttttccaagaaacgaaagattataattacgaaggtcccgaaagccaataccaccctcatacttgtggcgacaaagtttcttccaactcatccaactcactcccttactagaagaattagactgagatttccaccagaatttggacatcattccttcaagattagagcagatttccttagtgagtaagaagacactcatagcataacaaggcaacgcttgggcgacagactttaaaagaacttctttgcctgctttagataaaaatctactctcccaagagaatattttcttctgcattttatctttaaggaaaccaagtattgcattcttgtttcgacccattgtacaaggtaatcccaaatacatactattttccatggcttcattcatacccagagtagtacacaatcctgcccgagtaccttcattaacatttttactgaaaaaaatagaggacttggcttgattaacctgttgacccgaggctctttaatacaca

SEQ ID NO: 223001 - DNA, 2017 bp, Cannabis indica
tatatgtatttattaaaatttaagttaactgaaaaagttttaatttatcatgtttttcgataaaccctttatttagcaaaggtgtctacagtaattagaaaattaatgtagtgtgcctaatcaagtagggcattgtaatttggtattagagccaccaggttattcaccaaagaccgtcaagatatgtacagttatcattagagacaatctcgactaacgtttcagtaagcctttacttgtttagtaatttatatatgattaattaaaaaagtatgattggaagcatattagcaatatgttagttgaataattcattgtctaataagtttctatgtatgcattagtaaatacaaatagaaccatcacccaacctacatatttaccaagatttttcggaaactaattaaataagagctaaagaaataataaatgcaaagaagataaaattttttacgtggttcaggcattaatgagtcttagtccacgagtcaatgtattttcctgaagaggcttgtatggtattttatagtagtggttacaagaaaaccctgaatctgccctcttattttctcttgatggagaagaaagcttagagaaaattaggcaaagcttcgactatcaattttttgatcccccctttgcatgaaaatcaatgagtatttctaggctaaattgtgggtatggacatgcccatgatctgcctagaatttttgtaaaaaggcgactattgggataaaatacatgtaaagaactgatttttgggaccccaagaaggttcttgctcgtgtggagaagcagctggataatagggaccatcgttggtactagacgcgtgttgcccaagagtttcaccttgtaaaggagatgcctagacaaactgtcaggcgaaaaggtatatccagaggtggggtgtgcgcactaccatgttttgacaggggacaagatttgatgctctgtcaaaagagtgttggttttacgatactaaatcagatatgcagcgaaaaggtttcgtattatctaattatcattgtaccatagcccaaatgatctctagatgtgtacattaaatcaaaacaataaatagtaagtttagaataaatacctctttatgactatcagggtatccttgaaacttttcgtatgttgtatcccttaatctagatgatgagaaaatttcaattagattcacactagtatcttccaaatcattctatcacacacaagggatagcgtgaactattaggttaaagtgtagaactttgtttttgttgagttctcaacacttgagcaagaacagatgagagaaaaatcaatttcctttttctctctataattttgaaaattatggttcaaagtaatgttctgatttctcaaaccagacttctatttataatagttaataaccctttaatttaaatatctataaccgaattcggttactgatatttatgagggaatctatcaactacttgagagaatatctcaataatcttgaaatatctataaccacttttttaaattagatatttacctaattgaattaattaaataattaattaacccaaaaagacaaactccatagtgacaggacatatgcttaggcacctaacttgttgtttaggacaagattggtatcttttgtcctcacaacttttgtctcaacaaatcttatcttgccaaattttatcttaacaaattttatcttttcgctttttaagtaatttgaaaattatttatttattataaaaaataaataattactattttgtcaattcaaaatagattttctgaataattttatacaactctttatccctactcttgacagtatttcatagtggcaattcggagaccataggcctataattctaagctctaataaactagattatttattaagtatcatcaactaaataattcttgtttattaactccaccattacttcactataaatgtagaattgaacatttagtaattataaaattatatttactgagtttaactgcagtgtccatt

SEQ ID NO: 223002 - DNA, 941 bp, Cannabis indica
cttatgttcgatttatgggccagcaagtaaccatttttttgtccaagtcattattaaaaattttctgatgtaccccaacaatataaagatcaaatgattaatcgataagggtgagtgatttttaattatcaatggtttaattttttataaggtcatttaagaattactataaatccttatttttttatcatgcagttttattttaatattgatgggaatccctttcaagacctactaattgggactctatatacgaagatggcaaagaggtataatgagagaaagaccattagacataggtggtttaagcaatattactctaaatcggaagattgggagaaagttcttgacctgaccacttgaataaggagagttggaagtctatttgcaaattgttcattagcaaaaaatttatgaatccctcaaaaaaaaaaaaaaaaaaagcaatagacaattgatgaaatattcaatgcaaggtagaagatcgatggcttctatacgtcacaactttgtaagtaataatatttatcatttatttttaagatataatttattttaaaacacatcatatactcttttatttatttattttttaaatagggtggtcctccagaagaacatgtggtcgatgcatggaaggtggctcatacgaaacaaccgtctagtcgttttgtcaaatgaagtcgctgcagaagattttgtaagtaaataaaatattgtattgttaaattttaaatatttatcatttatttaagtaagaactttataagtaataatatttatcatttatttataaaatataatttattttaaaacacatcatatactcttttatttattattttttaaatagagtggtccaccagaagagcatgtggtcgatgcatggaggggtggctcatgcgaaacaaccgtctagtggttttgtcaacgaagtcgct

SEQ ID NO: 223003 - DNA, 1700 bp, Cannabis indica
gacccaaagctaagataagaaccaaacccaaacaataacacaaacttagactgagaccttgactaggactgggacctgagacttggacatgaaccttgaccgggacctagaccgggacctaaacctgacctggtcttaaaccctcgtcaagacctgagacccgcaacccagaccaagatccagaccctgacaaggacctgaacctgaaccgagaccaagactgggaccgagactggacccgaatccagaccaagacctggactaaaagcaagactcaggacttaaacccgaacttggacctagactaggacctaagaaccagacttggataggggacctagaccagggacctaggccccggaacccaaacccaaatctaaatccaagactcgaacccaacccaagacttgacctagacctgggagtccgaagtcagacctagacctgcagccgaaacctgccctaaacccaaacaaggataggaacttagacacgaacccaaaccatgaccaaacctgaacctggactcaaacccaaaattggacctgaacctgggacctacacccggatctgaacttaaacccagaccgggatcaaaacccaagacttagacctggaacgaatcccagactcatatcgagctcaaaaactgggactcgaacccgaacctagaccaagacccaggaccctaacccacacccggagcccgatccagacctagaacaagatccgaacccaaacccaaactcaaaccaggactcaaacgccgacacgaacacgaacactgacccaaactcaaacccaaacttgagctcagaattccaagtggaactggaaggaaactaggactacgaccaggaccaggacaaggagcaggactgagacacgagcccaaacccaaataaaaacccagaccgagacccaaacccaaaacgcgactaggacccaaacttgaacctagaacaggacccaaacctagaccaaaactaggacctagacccataatcgagatagggaccagggcaacgaaacaaggacagagacccaagacccgaccaaagacctagacttgaaccgaaccaagactcgagatcaggatttggaactcgggcccagatccaaacctaggaacaaactcgaacatagccccagaccttaactaagaccgaaactcgggcccagacacggtcgtgtacccagactaggactgagagccgaacccaaacaaggacccgaacctagacctaggacccaatccaagaccctaactcggatgtagatagggatcctgatacgaactttgacccagacccaggcctggacctgcacccgggacccaaacttggacctgaaatgacccctgacccagaccgagatgtgaacctggacccaaacccaatcccagactctgattaggacttacaccctgacccaaacccggaaccaaacccgaaccaagacactgaatcaaaatcaaaattgggactaggagctaaagccaaacatggacccagactgggacttaggactcggacctggatgagggacttggacctaggccttggaacccagacctagatcagaacttaggactcggatccaaaatagaccataaccaagccccaaaactcgagcttagacccaatcccggacctggtcccgaacccacactaggacagagactcgaacccgaacccaaa

SEQ ID NO: 223004 - DNA, 1772 bp, Cannabis indica
tcataattaaacataaacaactgctgatttccaaattaactaagcgggctttacatataatttagtgtactgatccactatataggtgatctttactggtagaaaatgagctgacttcgtgaaacggtccactatgacccatatttaatcaaacattctcgtggttctaggcaaaccaaccacgaagtccatcgcaatatcctcccacttccatttaggatgggctaatggttgcaataaccctacggcctctgatagctttaatttgctgccaggttaaacactttgatacgtactctaccacatctcttttcatcccataccaccaaaaataggatttcaaatcatgatacattttggtggttcccgaatgcaacgaataaggtgcagtgtgggcttcatcaaggattttcttcttaagctcaccattttgaggaacacaaactcgagctttatatagtaacattccattatttgagattgaaaagtccttaggtcgaccggccaatacctcatctcaaatttttactagctcaggatcttccaactgcacccttctgattctttctaataaatccgattgaagtgtcagatcgtgtaacttttccactacaaactcaattttcgcattaaccctttctgaggctacttgaggagctatcatcacgatgttgaaaacctgcccgggagctcttctacttaaagcatgtttcacatcattggctttctcggggtgatataaaatctcgcagtcgtaatctttgaccaattccacccaccgtctctgcctcatatttaaaactttctgggtgaagaagtacttgagactcttatgatctgtgtaaatctcgcatttttcaccataaaggtaatgaccccatatttatagagaaaatactacagcagcaagctataaatcatgtgttggatagcgttgctcagaatccttcagttgacgggaggcataggctatcactctatcagcttgcatcagaacacatcccaaacactgtctagatgcatcacagtaaacaaaaaacttttcgcgatatgatggcaaagctagcattggtgctgttatcaattgttgtttcaactcctgaaaaacttgcctcacacttgtctgactatatgaatcattgattcttcttagttaactcggttactggcatagaaatcttagactttgacaaaatgtcgataatgtcctgctaaactgagaaaactttgcacttccatcacagattttggccttcgccaatttttcactgattcaatctttcccaggtcaaccatgattccatcttttccaataatgtgccctagaaaagacacctatgacaaccaaaattcacattttttgaattttgcatacaacttatgatctttgagtcattgtaataccatttggagatgtttctcatgctcctcttctggttgagagtacacaaggatgtcatcgataaacattataacacagttatcgaggaaatccttgaatactctattcatgagatccataaagggtggaagagcatttttcaatccgaatgacattaccgaaaactcatagtgcctatatctagttcaaaacgcagtctttcgtatatcctcttcctgaattctcagctgatgataacccgatcgtaggtctatctttgaaaacatagtcttcccctaaagctgatcaacaaatcatcaattctaagcaatgggtacttgctcttgatcgtcagcttattcaattcccgataatcaatacacattctgag

SEQ ID NO: 223005 - DNA, 1900 bp, Cannabis indica
ccaacaatctcaatagtttaatataaatttttaacgggcttaaaaatttaaaaatatgatttgatacacgtcggaagcaaaaatcttaaatagattaataataataataataataataataataataataataataatatcaaagctccaccttgtatattagtataatgtcacttgggtatatgtttactttgttttactttaactccccattctttcaattcgttgcattttagttcgacttcatctttcttttaattatcactttttaagaaaaaaaaaacatcattttatcaattagaacaattatgtaacatagtagatatacattccacaaaaatattactcctaaaaataatttaaaatattacataaaaatctagcaaaacaatgaactactttattaacagaataataaacaaaaattaaagacacattacatcaaaaaacaatttcttatgatcattaacaaccaaactaagtagaaaagtcatcgaaagatgattgtgaatagcttgaacagtaattaaacaatctatctcgagcaccaccatctgtcactattgaatctcaagccatcttaacacctccttgatgccaattgcttttacaagttagggctccatcaactcatcccgacaacaagtgtgagccattagcacatgattgtgatgatccctcacctatctaaacagacctgtattggtcagttatgttgaacaaggcaacattcacattaatcttgagcttagtctcgtaagactttacctaagaactagcaccattggtggaaccaattgtaatggtgcaaaagcatcttttcattgggcattctttcattggccaataaagattctagatgaagctactacctcctcactttattatgccaataggcccgattggggtaatgttgttcaaacaacaacttgcaggagagtattagggcaaatccaatgcaagctaccttttaactacgttggtggaccctattttttaattataatacttttaaactaaccaatcaaaaaaaataataataacagtagcatcgctgctattgtccaacagctttcaaatgtttatatttgaaaaagaaagaaaatgcagagaagataaaaaaaggtaaaactcagctcataggaggctgagggcatttgcattcaatatatacttagggatacaatcattgagccactgtgatgaagacaagtggcaacaaacaataggaaaatgcataaccaaaaagatactctagtacaattcaatgattacacagaaattcaaataacagaaaggaatattcaaattccctaatgcacaatgctgacagcaaagcaagactcctctgtgatgagtagcagggaaagctatggtgaacctcaattctcaacaccacccctcaaacgaagggggaagcaatcacaccgagtttggaaatgagcagatgaaaccttgagtgaggcaaggctttagttagacagtctgcaatttgatccgaggaaggaatgtatctcacttcaagttctttctttaaaattttgtctcgaacaaagtgaacatcgagttcaatgtgtttagtccgtgcgtggtagactggattggaagtaagagcgcttgcactcatattgtcgcaccaggtaacagatactccaggcagtgggaaccccaactcttttaataaggattcgatccaagtaatctcagcagtgacaacagccagagctctatattcggactcggtgctcgatcttgaaacaactgcttgcttcttagaagaccatgaaactagtgtgtctccaagatacacacaatatccaacaaccgactttctgtcatctatgcaacatgcccaatcggcatctgaaaaaccagcaatgtttagcttgtgactatgaca

SEQ ID NO: 223006 - DNA, 2172 bp, Cannabis indica
aattgactctcttattaaccgttaggaaaaacctcttttgtagtagtggtggcagataggggtgcttcgcccagggtcaatgcgagctcgattatacctttgctagaaatattgtcgctagtaaatctgcatagatttaccatacaaggttccaatttggccttttcgagccccatcttcttcagtgtttccctgtaaaggatgttcattgaactcccgttatttatcagcgccctctttacccttttattggcaagctagatagtaatcaccaatggatcgacatgagggtacctcacgttcttctcatcttcctccgaaaatatgattggaggttcttcaacttttaccttcttggaaggttctggagaaaatactgactgctcatttcttatttccttgacgtacctcttttgggcattgttgctctctcctgcattatgtggccctcccaaaaaaaccaggatgtcctctccttcaacatgagggggttgtaatccctggttgtttgggttgttgggcaaattgggctagttatgtcgatttccatgtctcttcacatactgcttgaagtggccccgagcgatgagactttctatctcatccttcaactgacggcactcgtctgctgtgtgcccaatgtctttatggtacttccagtacctggtcgaatctcttttatgcctcgagtgcctcaagggcccgggtttgctgaaggcaaccttgtgatcatgcgcgaggtaaatattttcccgagtttcattaagcgcggtaaaaatagtataaactggcacgcacttgtcgtgcttcttttgtttctttttatccttggacgaccccttagaattgtcatttctctttgagctagaggcccttgagttatcaactctagtcgagacagtacttgttgaaacattactgggtttgcttcctgagccagtttttaacaagttcatctcttttcgaacttcttattttcggacaaacacctgagccctctcgttgaactcagtgatgttcttcactagacgaccctgtaagtcgtcccacaattcgcccccagcggtggatagattagtagtgatccccgcctgaagggcagtaagttgtgtactatcatccagatttctaactctagcagcagtcgtgctaaaaccacttaagtatgccttaagtgtctttcctggctgttgctttatgttggttagcgaggacgcctcgggtcgcctatcccttgcggcctggagctgctttttgaagtccttggacagctgttcccaggaagtaacagaatgatgagtaaatttgttgaactagctgcttgctgcccaaactagcgaggcaggaaacaaaatacaatgtaaattgtttgtaacattacttgctcgcattattgtgttgaagttattcaaatgcaagaccagattggtggtcccatcatatgatgagacgtgagggtttttaaatccctagggaaaatgagtattcatgatgtctggattgtacggctcgagttcctcgtctgagtcgtatcaagattgttttcctagttcccccacttgatacctcctgaacttatcctccaacttgtgtattcgcaattggataagatcctcttgctttggactgagttgttggtgaagatcaggttttctctgattcaagtgctctcgcaaaatctggttaggaataattactagtaaacctcgttctactcacagactgtgccctacttacggacctcgtcttgctcatggacttcgtcctactcatggacctcgtccttgagtgacttgtagatttactagttcccgtgctttcttgatcattagcacgacgagcactctctcctcctcgagttgatcgactgtgggtccttgagcgccccgaggtcacacttacttcttcgtgccctgttcttccccctgggcattgttcgttatgtttcccccactaggatttgtatgagccctctccttatgggtccaggatgaacactagtgatttcgcactggtgacctacgttccccaggttatgtcccaggatcttcctccttttcgcgaggaatttcctgttcgttagtttctggttgcctcccattctcatttctatgagatggttcattttcacaggttgttcttcctgagtagtttcctgtctcctggttcgtg

SEQ ID NO: 223007 - DNA, 1915 bp, Cannabis indica
tgtttaatttttgggtttccattaagaaaatgcatttgttcttgacttgtgtaaaagattcatagaaaatctaggcttgaaacattgtagttttctctgtaatagttcgtacggcttcatagtttacgacattttgcctttaatctcacatttttcgtctttcaccttgctcattcgaagcttcgtgaaatttaacccttaacccaaagatttcaaacttctggattttgacttaatttttatgcattttttgcccttttaatctgttgggtggtcctggtcggtgctgtttactgtttatggttcgatatcctggccaaatactcatctcgtgtgttgtcttttgtagctgaaccctagtgagttttggggaggcgaacactgaattggccaggatttgcctcaacttctgtacgaggatcaaccttgtcttcttgacagtccgtcctcttcaagtgacagactttctaactcgagctttgaagattgggaggtgagtagtgatcgttctactactctagaacccgtagtaaaacatcgctcctactccgagcagatcacaggagaagggtacgactgcttcattttggaattgaggaagggttggaggcattatcttccatccaactggacatacattgtttggccaagtgttgctgatacccttcctattatccaagttctggtaactttggtatcccaattgctctccctgccatcgatgttgcacgatacacacaataatatccgtccaggaagaggatgatggcccgcacaaagaagacgatgcaaaaagtcaacgcatctgatcctcatgtggctcaggtcgccacattgccaagtgccgagcaggatccgccgccatgaggagaaagatcatgagggggacattgaggtccaggagatagaggagtaggacaacgtccgtcctggtagccctcccgaggttggggaggaacgagtggttgaaactccaaattttggaatgtataatgaggccggggagccagtgtctgcggaggttgacgtcttggttgagggggaggactatgtcaccgatgagcttactgaagcagttccccacaagaggcaaagtgccttaggtgccagatgggtgacccctccgtccaaaataagtgaggcacgcatgagggccgtaggtaaggctgggtacctgggcgaacttgagtgttacgtctcctcttcgaaacaccgagcaagtaacccacaaaaatggttttgtgcctggtcaggcgatcataccaagcaaggggcaatggtgcccgtgcacccgtacttcaagagggtgacaaattattttcacctttgtccgacacagttcactcctaagggcattaagtatttgtctgccctgttcgtccactagccattcaaggatggggtgtgtcatccccacatgaggttaactagttttttggtctgaagtctacccctaagcaaaggaggttggggtacttctacttctctcagccagatttcaagtggctgacgggcactgtggacaaggatgttagcaagatcgagggttttgttgaggagtattacctcgtggaaggcatggataccacctatactcggttttaacagatccgatatattactgtccacccctcgcattgacatttagggatagggctcaaaagattgtccaactgctagatgctgctcggaatatcaatttgttgacctcagaggacatctttgtgaagtacatgctttatccggaaaactttatgccctagcctatgaaggggaagaagaagaagtccagggctggccaggctgcgggagcccaacaagagaaggagctcagtcaacttaagtgtgaggctatgttgaagggtgatgctggagccaagcagtatgctcacgaatattctgagcaggagaagga

SEQ ID NO: 223008 - DNA, 1665 bp, Cannabis indica
gttcctactgttacctaagctcaaaatgaagatctattacagcccctgtatgatgaggaaattaaaagagcactcttccaaatgcaccctgataaatctccaagactagacggaatgggaccgggttttttccaaaaacactaggatattgtcgggtctgatgttgtctctatggtaaaacaattctttgattctggcattcaatgacacaaatcttgtacttatttcgaagaagaaaacccctacttctatgagcgacctttgacccatagccctctgtaatgtgctgtataaagttgcttcaaaagtcttagccaaccgaatgaagaccattattgactgtgttatctccgacacttagagtgcgtttattccagagcgtcttatttctgataatataatggttgctttcaaagtgatgcattatttgaagcgcaaaactaaaggcaaacagagatacatggtcgtgaaaatagatatgtctaaagcatatgactgtgtggagtggtcatatctcaagactgttatgcgctgcatggggtttgctgattgttcgataaacttgttacttgaatgtgtctcaacggttcgatattcggttgttcatggagttcatatgatgggacctatagttccttctcgcggtattcggcagggtgatcccctctcaacttatctctttattatttgtgctgaaggtttctccactctaattaaacgttacgaatctcgttgtcttctgagaggttgtcgtgttactcgtggcgctccttcagtcactcatatgttgttcgctgatgatagttattttttttgtcaagcctatcctgatgctgctgctcgtgtcataactctcctgcgaaccttcgagaaagcttcaggccaacaagtaaaccttgataagtccttgatttcttttagtaccaatactgatgtcggtactcatgctgacatgtgctctattttgaatatgagtgctgctaccgataatagcatgtatcttggtcttcccagtactattggcagaaacaaaacatctattttgggctttttgaagaataagataaagtctagaatcagcagttgggacggtaagcttctatcttgggccggaaaagaagttctctgcaaatctgttgtccaatccctgcctttctatgctatgagtgtcttcttgttgcctgtcaaaacttgtactgaaattgaacatcttatggctcaattttggtggaagactacttctagcaaaagtcgcggtattgtctggacgaactgggatcatatggcctctcacaaaaatcaaggtggtcttggctttcggcgacttcttgacttcaaccttgctatgttagctaagcaaggatggcgattttcgccagcagaatttacaaagctcgttattttccaagaggtgattttctgacggctgagttgggaaataatcccagttttatttggcgaagtatctagagcgctcatgatcttcttaaattgggtgttagaagaacaattgggactagacagcaaactagtatcttacgccacccttgacttcctttgcctaataatccgtatgtgtcctcttcgcatcccgctcttatgaatcaaatcctcaatcttagaaatctcctacttttatgggcaaatctgacttagagtttaaat

SEQ ID NO: 223009 - DNA, 2448 bp, Cannabis indica
gagaaccattctatataaatgaggattttcaagcttatttggaatttcagcagaaacaattttgtcataactttcaagtgaatatatttttgcactgggtttcaaaattagtaaaaaattgaacatgcagaagtcctattttttggaactctattacatacacagaagcagctataggtccaaatatttgttttttcaataacttttattttaattcttctaattttgctctaaatattcttgcaaccaaatctggacgattttgagcttcatcattttcatgtaattctttttttatttctaaccagctcggattgcatgtcatagtcaagaatatatctagttttccaaatcgttgtactaatgtcattgcatccatatatctttttctcatgtctctaggacctccaataaatgatgatggcaaaacagttctatgtctaactttagatccttgattctcacccatctctaagctatcaatgattccctgacataggtcagctctcatatcatcttgctttaaacgaaaatagtctagcctagatgtttcaagcttaacatacatatcaacaatatatagttgcaaaagtcggcctgctcgtaagatcattattttttctccatctctaatttgtaatttctaacaataatattttctacaacaaacttcatctgttttttgctttctaacaaattctttttgtaataaatcagtgggtgaccctataaccgataaagcaactgattcatcatactttgtttgaggttgggatttcgagctatgattaatcttttttattcctcgacaccatccactttctccatatgggaacaataaaggatattgtagtggatcatagcagccataataatagtctaccttatgtgaaaatcctgcctcagtggtaacagtaatatctcgccatctatgttctcctaatgactcatcattcacccatacagcagcaacttgtgacactgaaagattattgtacactctttgatctagatcaacatctaatcttattctaatcttataattctctaaattaggaaaatcccttaagcttctaaagaatttagtataaggattaactttcaatatgtgaacaagtttagttaagatagagaagttaaatttggttgaagagtgcaatcgatattctaactcttgttcagtgtcataaaaaaaaagttgaagatgagaaggttgtttttcaaatggtaataactcatttatgaaatggtaaatttgtccttgtacgcgaaatgtataaacacctttattatttttgcaagggtttttatcatatttaataccacatgatgtaaatgcaaaagtattattgtaagtccgtgcatatttttgaaactcttttgcttcatcagtggctaaagtaagaagattgtacaattcatcacagacattattagacaatagagaaatagttccatctgcacaacaaaaaccttttggctcataattaaatttctttgcaaaacaatatttacaaatagattcagatttcaatatatcaggtttatcaacaatattttgtaaagtagaaacatgatggtttcttttcaaaacatatgaatgggtatttgttgatgttgaacctataaaaagtttaaatattaataacttttacaaaattaagttaatttatggttaaagaaaatcaacataacaaaaaactattctcaccaacttcaaaagttgttgggtaattggtatgtctccttctcttaatcatttgacattaggattggtgggagaaacacacacttccttagggtgttgtagttgtgttggatttttgccttgatgtttctttaatgcatagacatccctttttctttttctaatttcctcttttttgtcttcagttaagttgctataccaacttctcttttttattttatcacccatcttataaataatacctcttaaataaaataacatacagtgtaggactaataaaattatatataaaaaaacaaatatcacaatatgtagagcaatatctggatgcccaaataattatatatcataaattttaaaagaaaaccacaaaacttttaaaatagtgttaattatcaaataaatagaaaatgcatatcccatcttcaagaatagaagtgattcaatttgtttctatacgcaattcattacattacataaagtaaaaagcagatcaaaatagtttgtattaatatccatttctctaaaaggcaagaaaacttaccaatttacactttaggatttgctataaaactctgagctttgaagcttcagaaccaaaatgaagatataaatctgaaaattaatacaatcatgctataagctattcatagaaaaagatgaaaaaaaaaagcccaaaagtaaagtaaactattacaacaaatcagtgagagatatgtctccatttaaaatgtcctaaa

SEQ ID NO: 223010 - DNA, 1614 bp, Cannabis indica
tgcatacattagacttccaactgctgaagcataaggaacccttctcatgtcctctatctcttgaggatcagtgggagactgttccttagatagacgaatactatgtctagaaggcatcactgcccctttggtatttgtcattgagaatctctctaacacttgatcaatgtatgttgtttgagagagcaagggatctgttcttcgggtttctgatgatctctggatgaataatttcgattttagattttattttttgatttgaacatgagctagacttcttgaggcttgaatggctatgaacccctatgtttggtatgattaattttaagcaaattttagcaactttgcctttgttcattcaagtaagcttgttgtttattaattgttattttttggccatgagtaacaatttactaagctagatctggttctagaaaggcttgatctagtagttacaacttggatgaagcaaattaattcctagtattaggtttttcttagtaaatggaataggaatattttatttgccttgcataacttgaaaattgatgtttaaatgttgttcttcaatctggttgatataggaatatattgatttaagtagtagaacttaattggtgagttttggaaaattttcaaaaacatagaagaatttatgttatctctgtgcaaaattgctaaagtaatgctatagcaagcctgtagcaattgggaaaaacttgactagtggggattagttattcaagccactttttaatatattacatttcttgtaagcaattttctagtaatagtagtgttattttaggcaggtttaattacaattattttaaaattgaatatttttccttttacaataagttgtaattagttggttttacatcatattttgtttacaatccctgtaaagatgatcttatttaccgctctacccttcaatgtattttatccttaaaacacttagttacctataaataatatttcagtaaactaatataattactgaaatgagatctcaatcatttctctctattcagccaagctcgaaggaaatcatcgtttcacttctaaatacttataaaagttataaattctatatctatgatcagtgctcccactcaattgaactaccatgttcccaagatgtaagtatccgttagaaccattggttagcttccatgaacaacttgatgaagataaataatacaactaagctcaacctaccatatcaggattacgatcaatagaccaaagatcaaccagtgatattgactatcttatccaagttcaatattggtccaatccaatgtatactccatacatctaatactggtaaagtttgccaatgccctggaaaggacataacacttatacaaggtgtaagtataccttatcgccgattatcatgccagtctaaatctagtgaactgacaaatcatgggaattaaattttgagcatataatcatgattatactctattatgctgacgacactataatcatgaacatatatatatatatatatatatgttttgaacttaatagaatttatacattaaatatataatcatgaaataaatcatgtgaactatgcaacataaaatgatttctaat

SEQ ID NO: 223011 - DNA, 3956 bp, Cannabis indica
tcacatgttatggtagctaatgctaaatacaaattgagtcctaaaattggtggcggtgggaagcggaaaatggaagtggagggagatattggttgtgtgaagaagggacggttggaagagcaatctgacatggctcccgaagatttcactttgttattggcgaagcctgcggagctggctcgccaagagccatgagtttactatgttggaacgcccggggactggggaaccctggtgcgttgacggccttgcgaacaattgttcgtaagttctccccaagtttagtgttcttgtctgaaactaaactttatggtggttgggcggaaggtgtacgacgacatgtgaattttccaaatagttttcatgttgattgtgtggggaaaagtggtggcttgttattaatgtggaatgacgattgggaggtgtcggttaagtctttttcggttggccatattgatgctttggtacagtgtccgggtaggaggttgtggaggtttactgggttttatgggaatcctaaggcgagtagtagatccgattcgtggaggttattgtgtcgactcaaggacttgtttgctcttccttggatatgtggtggggattttaatgagatcttgtccattactgagaaaaagggtggtgctgatcgtagtctgtctgctatgtcggagtttcaacaggcgctggataagtgttccttagttgatatggggtatgacggacaatgctttacatggcttaataaaaggcaaggtgcggcgcatgttcaagaaaggcttgatcgtttctgttgtaatcaggattggcatgatttgtttccttctggtaatgtctgcactggggattttattcactcggatcatagaccagtggtggctactttagaaaatgtggttcgcgttcagaaaaaggataaaaaaagggggttcaggtttgaaacgcattggttgaaagatgaggaatgtcatgacattgttcaccagtcttggtcggcacaggatggtcctttggagagtcaagatagcattattgatattttcgggaggtgtgccgataggttgggagcatggaataagagtaagtttggttcgatacctaagcttgtgagagagactcagaaacagttggatgatctccttagtgtggcggcgcctatggttcgaatggatgaggttaaaaggcttgagactacacttaacgagcttttggccagggaggagtgttattggaagttgcggtcgcgtgcggattggttggccttgggggataggaatactaaatattttcataataaggcgacgggaaggaagaagaagaatgctattgtggagattatgactaacggtggacgaaaattgtgtgtggaagaagatattgtgggtgagattgagagatattttggtacaattttttcttcggcttctcttacagtgcaacaaggggagagtggaatcgcccatattgatacccaaataactccggaggagtgcgccatgcttcaggagccttttacgggtgacgatgtgttgagtgcggtatgtgctattggtgcaacaaaggccccggggccggatggatttcatgctattttcttccattggcatattattggccctcgggtttcagctgtgtgtcttgcaattttgaatggtcagcaatcggttaggaagtttaataagtccaatgttgtgttgattccgaaaatagttaaaccttcgtttgtcaaggagtatcggcctattagtctttgtactgtcatgtataaaattgtggcgaaggcgttggctttgaggttgaaaggtacattatcaccgctgatctcttcgtttcagagcgcctttgtgccggggcgtgctattcatgataatgttatggtgggttttgaattgttgcactctctttttaagaaaaataatggtgttagggggtttatggccttgaaattggatatgagtaaggcgtatgatagggtggagtggtcctttttacgggctattatgtgtaagtttggcttccctggacgctgggtggaccttgttatggattgtgtcagtacgacggagtatgggtttttggtgaatggaaggccacgggggtgtgttgtgccgactagggggttgagacaaggctgtccactctcgccttatttgtttcttttttgtgctgaggcgttgtcttctctgctccgtcacgctgaagtgagtggtgagttgatgggttttcgatgttcaaggtctgggccgagggtgtctcatcttttctttgcggatgacagtttgatttttggaagagccaatgggagggaggcggagtctatccgtcggattttgcaatgttatgagttggcgtctggtcagcaagtcaattttgataaatctgctatcacattcagtccgaatgttttacctgcggatcgtgcgagtgtattgggtatattaggcttggggtcagttgctactcatgataagtatttgggcctcccaactgttattgggcgaaacaagaagcgaacctttgcgagtatttgtgataaggtccagaagcgggttcgtgggtggaagaggagtttcttttctgcgggtgggcgtgagattcttattaaggccattttgcaagcagtgccaaactatttgatgagtatgttccagcttcctgtggcgacttgcgataaactgcggtccatcatattacaattttggtggggtactaagaatgataaaaggaagattgcttgggtgaagtgggacaatgtttgtcaaccaaagcagaacaaaaagcgaaagggggggttaggattcaaggatcttgtgctctttaatcaagctatggttgccaaacaagtttggcggttaatgcaagcccccaattcgttggcgggccgtgtcttgaaatacaaatattttcccaatacgtctattttggatgctagagaccgccagggttcgtctcatctttggtcaagtttgatatgggggttaaagttgctgaactcggggatgcggaaagtggtaggggatggtcgtagtgtggatgcgtttcgagatccatgggttcccaggcctagatcgtttcgcccgatctcgcctgctcctactgatggtattatggtgagtgactttattggtatggatggggcttgggacattccgacgttgtcacagtattttctgaggttggatgttgatgtcatccttggcattcctttgacgggtgggcgatgtgaagatcgttggtgttggcattatatttcgaatgggtgctatactgtgaaaagtggttatgcggtcgctcttgatatggttagtgataggaatgggagttcttctggggacctggctcattggtggaatgggatgtggaatttgcgggtaccgcaaaaggtcaaaatttttctttggcgtatgtatcatcgggctcttccgactaattcccagcttcttaagcgtaagcttccgattcagccactttgtcacagatgtggtgaggaaacagagactccagaacatgcattagtcttttgctcttctttgtggcctttgtggtctaagcttcgcctttggagggtgctctatcatgggaggtttgggtcgttagcggagttgcttgtttatctttttgaggtgcttgataagaatgattttgcgttattggcgatggtttggtggtgggtgtggtatgataggaactctgtgttgtttggcaaaatgcaatctagattggaagtgcttgatgtgttagctagggaggcttgggaggagtttgtggggtgggggtgagttcgggggggcgggtcctgggttcttcgagtgtgggtgcgacggggtggtgtgataggggtggtcgtgatgggcagggggtgtcacggtggcaggggagaggtgggccgaggagggatcgatggtggcctcctgaggagggggagttggtgttgtttgtggatgcggcggtcactccgg

SEQ ID NO: 223012 - DNA, 1369 bp, Cannabis indica
ataatataattcctcaattattcataattatttaattaggattttgctaatctatttctaaattctaaggttttatatatgtaatgtataaggtaaatgtattatccctactccttatcccacaaccatctttttaaatttactttgcccattgcctatatgattacttcctttaagaataacacttgagattttctccataatgtgggtatgttttaattgtgagtttttaagatttttccaacacggcagaccgttattttatttacctttcgataatgttgtagatactagtagtaatgaaatatttttatatgtaaatttaatatgatattattagtttttatattcaagccacactttatcatgcaagcttatggtcaaaatagtttattattttttgttatctaaaggtaataacatatattgttgtgatagacatgcttattgttgagataaatagtttaagtcttttaaccttttcaaatacttttacataaatgtttcaagcttttgctagagacccttgtttacaccaaaagtatacctgatgttgtggatatcaatgcttgacacttgtcaagaaagatgaaattttggagttgagtagtctcaagtcatagcaagttagcctaggaggggtctctagcactgcgcccaggttgactttgggaactccgggatggaagttttgtgtaaagaccgcttaactttaatatgaaaattaagagataattagggttttactcagaattagacttttagttataatttatgaatttatggagatatatgtgaattctaggtgtattatttatcctatatataaaatttcacgtgtttcatattctatgctcggtaacaatagaacgcgatgtttagccaatagagtcacattttcttatggtttagtattttagttatagtgggaaaatatagattaatattggttatatcatgattattcgaggtattagttttaatcaaattaccccgaggtggtaaggatgccctttggcttaggcaatggcaaaatagtctttttgccatttgatttttttgtactttagtggtattatcttatgatttataatatgaagtttttagtaaatagattagataagtaataagatttatccttttattcaaaaattagaaaattagaaagataaaacttcctctctctccaatactctctctttctctcgattccttgagaaaccagcagcaatctagaattttctcaacttgattcaaggtattctaaccagatttttagagattcaacccaaggtaaacaccatagctccttttttgtttttgtttttcttatgtttaagttaggttttatgcatgaattttggactta

SEQ ID NO: 223013 - DNA, 2263 bp, Cannabis indica
atcatgaggtgtgttactagtgtctccttttcggtgttaatcaatggagaaagatttggcaaattccatccatcctagggtcttcgccaaggtgattctctatccccatacctcttccttatttgttcggagggtctatcttgcttacttcaagaagccgagagggctgggaaaatcacaggggttcggtttggaaggaatgaggttacaatttctcatcttttctttgcggacgatagctttgtattttttgaagggaaggagacggaatgtgagacaatgactacaattttccagcggtatgaaaggctttcgggtcaaaaaataaatcttgcaaagtcagaagtgagtacgggcagaagtatatctaaaccattgggccaacatcttgccaacacacttggggttcggttggtccctaatcatgccatctatttggggctgccaagttacataggaaggaaaaagaaagaggtttttgaggtcataaaggataaagtttggagtaaactcaaagggtggaaagcttcaatgttctcccaagcgggaaaagaaatccttataaaagcggtgatacaagctcttcctagctatttcatgagttgctttcgtcttccaaagaagttgatcaacaatcttcattctttggctgccaatttttggtggggagacacaaaggaacataaaaaactccattggagcacttgggacaagatgcgtaaaccaaaagaagagggaggattgggtttctgtagtctcgctgaatttaatcaagctattttagccaaacaagggtggcgcctcattcataaacctcactctttgttagcaagagttttgaagaatagctactaccctaacacttcctttcttaatgcaaagtgcccccaaaatgcatcttgcatttggaaaggaattgtttggggaagggagattattcatgaaggtgcccggtggagagttgggaatggtagaaccattcgagtttggaaagataagtggttgccacggtctaatggtataattgtacaccgacaaatagatgcaaatcccaatatcactgtgagcagcctgcttaataccaaggatgagtggaatgtggatacactgaacaattactttcataaggaggatgttccttggatattagggatttccatagatactcactcggaggacatgttagtttggccttttactaaggatggacaatacattgtgaagagtggatatagagtagctagggagataaaacttgctcctacccgatgctccaatatggacaaaactcatgcttggtggaagatgtggtggaatctgaatttgcctccacgaatgaaactctttggttggaaaatgtgtcgaaattggctcccggcaaagtctaatcttgttcatagaggtatgaaaattgaccctacttgtaactactgtggtcggtttgaagaatctctcccccatgctctttggacttgtgaaaaggttaaaagagtttggaaacttatgccttcttacaagttaattaaggaatgtcgagggcattcaatgatggatttgcttgtggagtttagacataagctagctaaggaggagtttgaagatgttgttaaggttctttaggcaatttgggagaatcgaaatagacattggaccaatcaaaactatatgaatggggctcgcttactagattgggtcttcagtagctatccgagagagaaccaggagaaggacaatctccctactgtgcagcctactgctcctacaaatcagtggcaagctcctcctattggtacctattgtgtgcattgtgatgcagctgtccaaccgaaccaagcatgggtggggctgggctatgtgtggagggattggttgggaaatattgtatctgctggtatgcattatattcctgcttcctgcactgtaaatgttgctgaagcaaaggcagttgctgctgctatacaggatcgaccgaagagcttgcaccagccgtatgagatcagatcagattgtaagcttctggtagatgcaatctcagcacatggcagctcccttggtgatatgcagccggttgtgaatcaaataaagcgacacccagagttttcccattgtacaaagttctgccatgtaaaaagagtccaaaatgtaggtgctcatagcttagctaagagaagccttgatagaaaattaacccattctttttacaattcttttccgaattggttagccaatgtatgtaaggttaacctctcccattctttgtaag

SEQ ID NO: 223014 - DNA, 2571 bp, Cannabis indica
catcacaatttaattttatccaccccagaggaggaggcctccaaatcccctccaaagaaggggttggggaaggcaagacaacctcatgaagttctgcataagaagaactaatcaggtcaatacatttcaaaatattcgggcgaatgttgtcatgaataagctcattacgaattctccagatagtttcaacaacaaccgaggcatacaaaaacacttcctccactcgaatccccctattattaagattccagatgaatttgacccaatcccaaactcgaatcccagcattacaaataggatatatgccccatggagaggaacgccaaaaatgcattgccacatcacatgacaagaaaagatgttccattgattcctcccctaaaccgcacaaagggcaattggtatcctcaatgtggaatcttcttccaagcacagctctcataggaagcgcattagagagaatgcaccaccaaaggatcttatgcctctccaaaagtttgctattccatagcttgttccatagcgccggagcaaccgcacaatgctgagctctctccaaagcttgggacagataagccgatttgcaagtaaattgtccttttttctccaaagtccaaatccatctatcattccccaggcccgaaggtttaccgcctttgatgattgcagacaccgtttccttatcaaaaagtccagttagtttttggatgtcccaatctccattagcgagcaaaaggtcagccacacagttatcattggttaagatcccgcttcttggttttgggataaaacctttaagatgaggaatccaaggatccctccaaatattagtcgaccttccattagtcacagatttacaagccccttttactaaaatagattttgctttcacaacatttttccagaaccaagaatccgagtctttgtagctacatctgagaaagtccttccccttaaggtacttggcttctaaaattttgcagcataaggattgagatctatttaatagattccaaccccacttggcaaggaacgccagattcatctccttcgttttccgaaaacctaaaccacccaaagacttaggaaggcaaagtttatcccaagcctttagatggagaccatgatttcctctttcaaaaccccaccagaaatctcggactaacccatcaatcctcgacaccattcgaccagatagtcttgttgtttgcatggcatataaaggcatcgataaacccacagacttaattagggtagcacgaccggccttcgacagagtcttagccttccaaccctgcaatttagaagtgagattgtccagaataaagttaaagtcagcatccttctgtcgagacctgaaaagaggcaaccccaagtagtttatagcaccttccggtgaattaatccccaacccttcttttatccctctcctcataccatcaggagtatttttactgaagaaaattgacgttttgagtttattcactttctggccagaccaagagcaaaacctctccaaacaattccagacactatttgcttcatttaaattagccctacccaccaggataaggtcatctgcaaagaacaggtgggtaataataggacctcccctactaagtttaataccatgtatgttaccctgcccaagagcttcttccagaagtctcgagagaacctctgcagcacagataaacaggtaaggggagagggggtcgccctggcggaggccacacgatggcaaaatctggccaacttggcccccattcaagcaaatgttaagagtggaggtggtaatacattgcgaaatccaagaacgcagcttcagagggaagccaacgcactccatagcgtggtcaatgaatctccaactcagcctgtcataagctttaaccagatcaattttaattgcaaagtatccttccctacctttctttcttttgaaggaatggatgatctcctggacaattacattattatcttggatatttctaccaggaacaaaagcagcttgagtagggcagattatagaaggcagaataggtttgattctattcgcaactaatttggatatgactttatagataacgttgcaaagagaaataggtcgaaattgactagggctcttcgggtttgtgaccttaggaatcaagactacatttgtagtatttattcctttatgcatatgaccatttctaaaaaaatccgaaactgcttcacagaaatcatcacccacagactcccaataatgtttgaagaaaagaactgacattccatccggccccggagccttatgactattcatggcaaacaaagtcctcttaatttcatccctgtcagggcactgaagggtcccctcttggtcctctacagataacctctcatggaacaactgcctgcaatccatactctggtcaagctgagttccttcaaaaatacctttaaagaagtcggtaaattcgcgaccaatagagtctctatcggtgagccaaacattattttgctcaaaatactttcaatggcatttctcctgcctctgatcgctgctgataagaaaaagaacttcgagca

SEQ ID NO: 223015 - DNA, 1988 bp, Cannabis indica
tttttttttttgtaagcatcaacatcttctcaaaattgatttatcttgataagttaccttttaaaaattgatatcttattcattgtgttttgtccttgatcttgaaggattttcttaaattggctatttttgaaaagtatcttagttatcctagtttccttttatttttttaaaaaatatgattttggaaaaagaatggagcggtttcctttgtgttcgtgggctagtagtttctttttaaattttaagttggtttcctcttttgattctctctcacatgattatataaatcaagttcttttgtcatttattttcataacctacctgattcctattcctttgtgtttctgcttctttgttcttctttcagattaccttggctaagacaaagaacctagggcaaccaaaaagggtggaagaatctgatgctagcccctcgaatgctcctcctgctgctccaattttgttgcctgctgctgcaactgcaccgaacccaggagattcatcgcttcctcagcgtgaatctcaagccgaaacaaattcccaagcaagttgtaaggaaatctgtgcgtccccacaaattttgcacttcatcgtcttcttcgtcgaaggggtctccatcttgtcctactgcatctcctcatgctacttcaagtaagggagttgcagcctcaactctaacaggcccttccactcgcactcgtgcccagcaggcgtctctcggaaaggaactttgatctaaacgaagccatgacagacccattcattctgccaagaagctgaaaatgaatcccccttcggcttctttgagttctgaagaagaagaacctatggaggtttcctctaatgactccgagacaaaatccgtgtttatcccatctgaaaaagaactcccagaagattttggagtctcctctgacagtgaagaaactgaactcgaacccaagcctcctttgaccaaatctgctccagcacctcctcgtgcatcttcagcagccaaagcttctactgctgccaaaggcaagcagcctatgaagagttcatctcctggtaatatttctccatctcaagccatcaattccggattttactatcgtgataatgagcgtgattggaatatttatgctacccaaaagtttaaaagtgaaaggaaatatgatttgcatgctcataggatgtatggtattgttaagtttgtccaataccatcattgggaaaatactcttactggttttgagggatatattgatggaattgtcaaagaattttatgctaacttgtctgatgattatcctgatgagaattctgaattctttcgtaaagtgtatgttagaggacattggttttcatttgctgaaaaatatatttccaaggctttgcaactaccaggagatgtgacaaatgctataatgtccatggatcgccatcttgctcactgaactcactagtgcatgggttgggtggaaatctagacagagtcttcgaattacacatattacttatgctcatgcttctctcataaggtttgcacttagcaattggttcccaattccaactaaactgtggtgtctcaagatgtggcctcatttctctttcgtatcacctcggaagcatacatcaacttggcttcctatatcttggatcagattatgtcatttcgaagaggtaaaaagcgaactcataaggttgtgtttcctaacttaatctataaaattttgtcctctcagaaagatgtggcctactctcatgaaacacttgagcccccttactggcaccatattccatccctcggagtattttgatggagcttttcccaagcgtcctaaagctggtactgctgttgctgttggcgcaagcacgagttctgctcatgcagatgtccaagaggtcaagcatgaggtccatctagtgaacaatcatcttgcttccatggaggaggttcagcaagagatgtccaagcagctatcctctttgatcaagctctatgg

SEQ ID NO: 223016 - DNA, 834 bp, Cannabis indica
aataatgggcatcagtgaaccgcagttgattaaagattcctaaactataatatgttgttgactgttttattcatagctaagtgatcttaattctttgtacaacataagtcacaacctcatttatgaataaggaatttttcgatatttatatataaattattcaacatcaactattaataatttaacattcatacatatatcaaaatattcaactattataaataatgataaatgtctttacaggcttttcagggtataaaccctaacaataccagtgccaatctcacctcatcacatatggatatatgtttatgattacaagcaaaattactctaaaaatgtaataatacaataaaaaaaatttagagtgattagcaaactcacttagaaaaaataaatacaaattttatctcaaagtgtgtaaaaaatattttgttgaatttttaaactaaggaagcttttagaaatcacttgaaagattttgtatatgtaataaattctcagccaacccttaattttgagagagaatagagtttatatagagtttgggagaaaactagccatatttagatgctgggcatggaaacatatgcaactctgcgcttatctgatcgttaggttggaatcaaaagcgtgaactgacccatccagtcgtctggttcccaattgagggtccggataagggggaggagagaattttcattttttttgggccctcatacgcttataacgcctagctcgttattcgatataaatctcaatcacgtgcaaactttctactctcatgataaatttaacatgcaaaaggcattaaacacagaaaccctataagct

SEQ ID NO: 223017 - DNA, 1896 bp, Cannabis indica
caaagttcgatgagtagagtatgaagtactacataaacaatcactataacagaaaaattgaatgaaaaatccttaaatctaacaatttcaatagttcagggagaatttttaatggtcaaaaaagttcagggggcatgatttggtacatgtcaaagttcgggagaaaaaaaaatcctaattagccaaaaaaaaattaactaatttggtcataacacctttaagtggttattattaagttttaatttgataaaaaaataagttcaagatctattttgcattagtttgaaaaatacatgatctgaattatcatttaaccaaacatagaattcaatcagtaacttttataaactacgcgattcaaaatagtatttactcaaaatgtgagatttagaacactgaaacaaccaactctactgcctcgacagctgacagttatttcggttggtagttatttcggttaagtggttactaacctactgctatatatatgcattcaacaatagaaagaaagagagagagaaatcaagttggaggagtgaggttaatacacaaagatgaaagagaactattgtgatatgaattctcttcagatttgaggatgttattaggctgttctggttcaagtttttaaacagcttttgagctccgtttcttgtaactggtgtgcatcaccattagagtactttgtgtccttgactctctatttgtgtaagttgtaatctttgccatttatcaataaagatatcacagccaattgagcttttttctacccggggatcaggtccaagttttatccaaaacttgtgactggacctcgttaatcttgttgtcattttacttttctggttttataatctttctggtttaacattctaagccattttcttcttgcattgtgttcttgttggtgcttgagtgcacaataaatggtatcagagcactagggagatcagggatttgtttcaagaactctgtgcaagaaattaagattggtgcataatggcttcaactagattcgaggtggacaaattcacaggcacaaatgacttcagtttgtggaggattaaaatgaaagcgtttcttgttcatcaggggatttcagaggcatttgatattgaagctatgaaggagatagatgacaagaaaaggaaagctgagactgaatctaaggctcacagtgccatacttctcagtcttggagatgaagtcttatgagaagtgtctagtgaagaaaaggctcttggattatgggacaaattggctgctatctacatgaaaagatctctagccaataaattatatctcaagaagaagttgtatactcttagaatggaggaatccaaggagcttcgaagacatcttgatgataacaaccagattattcttgatctgaataatcttggagtaaatattgaagaggaggaccaagcattcattctacttagttcatttccaaagatgtatgaacactttgtagataccatcttgtatggaaaggacaccttgacaatgacagaagtcaaggctgcattgtgttcaaaagaaggatgatcgagcagataacagtggggatggattgttcattgcaaaaggagaatttcagaagaaagattacaaggggcacaagaattcttataacaatagcagagacaaaaatgacaggtttaaacctaaggctgcagtaggtaaacaatgctattattgtaagaaagaaggtcattttcgtgatgattgtttggcacttaaggctaaactgaaaagacaaaagaatcgtggaaagaatggagaagctgacatagcagatggctatgaatcaactgaagttctagttgtgtctagtaacacaacagatggggcctggatcttggattcaaaatgttctttcgacatgacacc

SEQ ID NO: 223018 - DNA, 1161 bp, Cannabis indica
aaagaacaaacctatactacactttatcctaatagcccacaccattccttgtgtccagtgaaacgatttggaagacactagtgggagttcaaattgcattatctggattaagggatacaacatacgagaagttttgaggataccctgatattcatcaaaatgtattaactctaaacttactatttattgttttgatttaatttacacgcatgtggagatccattgggatatggtacaataataatcaaataatacgaaactcttccgctgcatacctaatttagtactaggattttaatttgctaacatgtatgtttgattattacataaataatctaacatcctaaaatataaaaatcataaaatgacgtgtagcacatataaagtttaggattccttacattgatggcaacgaaaataattgactcatttcattcaatcactgtaacccttgattccctttatgtagaagggtataacgaagtgatgaacttggattgctttccttaactcaaacaacaacaaactaaaaagtcttccacacagatctgagtaccaccatgaatagagtgggctggtactcaatagactatagggctgaatataagaaagtgtttgagagactacgaattttgaattctataaggaaaatacagcttttactgaatcactcaaaattatggttaataatctcattaattaaagctccatctcatttcttatatatgctcttaatagggttaggtttgattcgatggggtaggaaaatataatggacttaaaaatcaattaattgagtctacaaggtagtattatcctaaataatgtgaggacgacgtgcctatgaaatcaagctctcactaattagttcttaaatttacttagtaaatatcctaacatatcaattcctcctaacttcagtatagatttagaattgcactctttattacatagaatgctctatataccaaatatagttacactataattatctattgttccaatctaaataatcaatgatcctctatagacggtttatattgagcaaggacaaatttaccattttaccatttagtgtattttatctttaaaacacttagcttcttgtaatgatatttcagtaaactattataattactaaaatgagtactccaccattta

SEQ ID NO: 223019 - DNA, 2435 bp, Cannabis indica
tacaaaaaatcacaatgtagtgaagaaaaaagttgtgtattgaaagatactatgccaagttaactcccttttgttgggactggagaagatgcatacactaattatgagaatattcttaagaaaagttgaacactgaaaaatgaacaaaaaatcacaatggagtgaaagaaaaaaagacatctattgaaagatactatgactggaggaatattcttgagaaaagttgaaccctaaaaaatcgtcaaacaccacaaagaaattaacaaatcacaatgtagtgaatgataaaaagtcatctattataatgattctataaaaagttaactcccttttgctgagattggagacgatgcagacactaattatgataatattcttcaacaaagctgaaccctgaaaaatcatcgaacaccccaagcaaaaaacatgaacaaaacatcacaatgtagtgaaagataaagagtcgtctattaaaagatactatgtcaagttaactcccttttgttgggatttggagaagatgcaaacagtaattatgaaaacattcttcagaaaagttgaaccctgaaatcaatcaaacaccccaagcaaagacttgaacaaaaaatcacaatgtagtgaggtaaaaagtcgtctatttaaagatatcatgacaagttaactcccttttgttaggacgggaaaaaatgcaaacaccaattatgagaatattcttcagaaaagctgaaccctgaaaattcattgaacaccccaagcagagacatgaacaaaaaatcacaatgtagtgaaagaaaaaaaaatagtctattaaaagataactacgacaagttaactcccttttgctaggactagaagaatattcttgagaaaagctgaaccctaaaaatcgtcgaacaccccaagcaaagaaatcaacaaaacatcacaatgtagtaaaagataaaaagacaactattgaaagatactatgacaagttaactcccttgttggggctgagaaagaatcaaacgctaattataagaatattcttgagaaaagctgaaccctgtaaaatcatcaaacaccctaaacaaaaaacatgaacaaaaaatcacaatgtagtgaaagataaagaatcgtccattgaaagatattatgtcaagttaactcccttttgttaggactggagaagatgcaaacactaattatgaaaatattcttcagaaaagttgaaccctgaaaattagtcaaacaccccaagcaaagacatgaacaaaaattcacaatgtagtgaaagataaaaaatcatctattaaaagatactatgacaagttaactcccttttgctgggacgggagcagttgcagacaccaactatgagaatatttttcaaaaaagctgaaccccaaaaattcattgaacaccccaagcagagacttgaacaaaaaatcacaatgtaatgaaaaaaaaaaattgtcatttaaaagatgttatgacaagttatttctttttcgcagggactcaagaagatgcagatactaattatgagaatattcttaagaaaagctgaaccctgaaaacacccaagcaaagacataaaaaaaacacaatgtagtgaaaaggtaataaaacataatgaacaaaaggaaaggtaattaaaaaagatgatatgtcaaacccaaaaagatgaaaagctacaattttgaataacttgacttcgaaaaaacaaaatgaaagaataaggttggtgaagacattcatagacatttataaaacaatccatccagtaaagaaggcccaatgaccatcacctgaaactaacgtatttaaaaaaatgaaatcaaaaattaagcaagatgaaaagactacgcaaaacagactgaaattttgagatgattaaatataaatctctcccatgcataaaaaccaatcaagaacaaagttgtcaagtaaatattaaacagacacaagacaatcgttgcagccaaagacatcctctcaaacaagtgcaccatgaaagactaaaacctaagagcctgaataatgaaaaattatgcatgaagacaagtttcaattttatatttagcagaaacttccacagtatgaataaaagagagaacacatacttaatcataagcaaaaaacgaaaacaaacatgaaagaaacaaataaaaggttatttggaccaagaaactacccacgaaatattaaaggaatcaatcatcttcctaaagcttgtaaattgccaacaaagatcctgaaattaacaaaaaataaataaaatatacaagcaatagcttgcatgtacctgaaaaaaaaaattagggaaagacaaaaagcttcaacaaaaattaaaataaatgacttttcaaacctccaatgaaatcatgcttgcttccccacataagaactgctggcctcccataatttttgataaatatgatcaatttatgtat

SEQ ID NO: 223020 - DNA, 1895 bp, Cannabis indica
aagtgtgcttttttgtctatgggttttgggctcgaccaaaccttttgtacgcacttgatggtaaattaataacatgctaatatatttaactcaatttgaattttgaaataaatatctttagtcatttattgaccaaaaatatgtctattagcgtaataacttacatcaaagctattatattgatctaatccgatctttagcttaacattaaataaaataaattgtataaattaaaagtcgtactttcaatagtggtcatctgacctgagtacttgaagattttatccgaacctttgggcgtggtccgcccagaaggccattcacttaagaaaaaatgttctcgtgtttcatactttacattgtcatctgacctggtacttctaatggtagtattttcttaaatgttccccattccaataccgtggtaccagaacgagttgcattttttcatcatacttacccaatttgtatgcccctgatttaagaacttcgaccacctgatatggtccttcccagttaggtccgagcacacctgttgtactgtcttgggtgtttaaaaatactcttcttaagaccctatttcccacaaagaatttccaagccttcacttgtttgttgaaataccgagctactttttgctgatgggccattagttttaagtttgttgtggttctcatctcttcaatttcatcaagtgatttggcaaggagtacatgattggcttcttggctatacatcaatcttttgtgggatggtggttcgagttctatgggtagcatagcttcatatccatatgacatggcaaatggagtttgtccgattgccattttctcaatagtctggtatgaccaaagaacttcaggaagttccttcggccagtttcctttaacatcctcaagtcttttctttaatgtatccttcaatgtcttgttgactgcttcaactagaccattttctttgggatgcgccactgcggagaaacttttgatgatgccatggttcgtacagaaatcagtgaaggattggttgtcaaattatttgccattgtccgaaactattttgtacgacaatctaaaccggcagattatgttcttcacaacaaagtcttgcacttttttgaacgtaatggttgctaatggctcggcttctgtccacttggtgaagtaatcaactacgaacactacatattgcacacaacctttgcccatgggtaattgtcaaatcaggtcaattccccaaatgggaaaaggccaaggactttgcatttgagttaacctgttgggcggtgctcggggtatcttcaaaaatctctagcatttataacattttttaacataggccttggaatctttgatcatcctcggccaaaaataaccttgccctacaattttcttaaataaactctgaccagcagcgtggtttccacaaaatccatcatgtacttcagacaaaagtcgtgtagcttcttcttgggtaacacatctgagcaatggcatggagaaactttgtctgtacataattccctctagtatgatgtaccgtgcagccttccttctcatcttttgagcctcatttctattatctgagagtttctcagtgttgaggtaggttcctattggtgtcatcaagtttggggatgtattaatcatttcaatctcttctgtgcaagtgatgctacgttctttgagaaactgaataggaatcaggtttgctctatcacttacgttactactcgcaagccgagataatgggttagcactcgtgttttcttcccttggaattttcctgagtgcatatcttttgaattgtgcgagcagatcgtgtattttgctcaaatatgctatcatcttttcccctcgagcctcgtattctccagatacatgatttaccaccag

SEQ ID NO: 223021 - DNA, 2990 bp, Cannabis indica
taacttttacgttttttttttttttgaaaataagcgtaaattatattgaaaaatactagacctcatggtcattacataagatgttttccggaacagaagtgatcgggaccgatccatacacttggtgggtaaaagcccacttagcgacattgtgtgccgcatagttacatgtcctactaacattagaaaaattacaacacattaaagaaggagaagacttagaacaaaaggagacatagttctcaagtgcccaatgggacaccttcccattgagagcgttgattactagtctcgagtcactctccacaattacataattatacttcaaatctaacgctaccgatactgccaagcaacaggccgccgcttctccacaaagagcttctgagaattccaaccgggacgtatggatagaaattactcttcccagatgattcctggccacaacagctgtgcacatactctccaaacccacgcgaacatcacaatttaattttatccagtccagaggtggaggcatccatctatccttcaccagcggcggaggactaggcaagagagaagtatgtgcctctgcaaaagaagaacgaatatggtcaatacattttaaaacattaggagcacaattattatgtatcacgtcgttgcgcattctccatatattgtccaccaccagcgaggcataaagaaaaacctcctccactcggatgccccgcccattaaggctccaaatgaactttacccaatcccaaacccgaataccggtatcgccaacagggaagatcccccacggagaagaacgccataagtgcatcgctacatcgcaggtaagaaatagatgttccatagtttcctcacccataccacacatcggacagcttgtattatcaatctgaaatcttcttttaatcactgctcgaatagggagagcttgggaaaggatgcaccaccagagaaccttttgacgttccatgatgttactattccaaagcttattccaaagagcaggggcaacattacactggggagctctctccatagcctgggctagataagccgatttactagagaaacgcccattactttccaaagtccacacccaactatcctttcccgatccagggggggtccatttttctgaatcgcaaaaaccgtctcctgatcgaacagactttttagcttaacgatgtcccaccctcccgaaggcaaaagaagttcagcgacacaaatattatccgtatcaacacatccatttggtttcgggacgaaacctttcaagtgagggatccacgggtccctccatatgctagtgtctcttccatcagccaccctcttgcaggcccctttccggatgattccactagctttgacgacgttcttccagaaccaggaatctgaatctttgtacttgcattggagaaagtccttaccccttaggtatttggctttgaggatcttacaacataaggactggctccctgtcagtaaattccaaccccacttagccagaaaagcaaggttcatttctttggttttccgaaatcccagtccccctaacgactttgggagacaaagtttatcccaagctttgagataaaggccctggttccctttctcaaagccccaccagaaatcgcgaaccaaaccatcgatcctattcacaagtcgattagacaatttggtggtctgcatggcatagatgggcatcgacagacccacagatttgattagagtagcccttcccgctttcgataatgttttagccttccacccctgaagtttggatgtgagatggtcaaggatgaaattaaaatcagcatctttttgccttgatctgaaaagcggcaagcccaaatacttaagaaccccctcaggagtgccaatacctaaagcttccttgattcctctcctcataccaatcggggtatttttactaaagaaaattgaagtcttaagtttgttaaccttctgcccagaccacgaacaaaacttgtccagacaatcccaaaaggatttagcttcatttatgttagcccggcccaccaaaatgaggtcatcagcaaagaaaatatgggataacaccggcccccccctgcttagcttaatcccatgaataaccccctttccaatctcatcttctaaaagtctagagagcacttccgctgcacagatgaagaggtagggggataacgggtcgccctggcgaataccgcacgagggcgcgatctttcctaccggccctccattgagacaaatgttaagggaggcagtggaaatacactgagcgacccaactgcaaaatttttgggggaaaccgaaacaaccaagaacatgatcaatgaagttccaactgagcctgtcataagctttagccaggtcaatcttgatcgcaaagaaaccttcttttcctctcttcttattgaacgagtggataatttcttgcaccagcacattattatcttgaatattccttcctggaacaaaagcagcttgggttgggcaaatgagcgaggggagaataggcttgattctatttgcaatgattttagagatgaccttatacagcacattgcaaagagaaatgggcctaaattgattcggtctcgtcgggttttgcaccttaggaatcagcacaacattcgtggaattcactcccttgtgcattctacccgaggcaaaaaaatcagcgacagcatcacagaaatcattccctacagactcccagtagtgtttgaaaaacaaaacagacatcccatcaggccctggggctttatgattgctcatggcaaaaagagtacttcttatttcttctcgggatgggcccccgaccatcccaacctggtcctcatgagaaatcctttccctaaataggtagccacaatttagaggcctagcattgttgggtccagagaagatacccctgaaaaaatccaagaactcctgacctattgattcccggtcatttaaccaaacattatgtttgttcaaaa

SEQ ID NO: 223022 - DNA, 1379 bp, Cannabis indica
gtaaaatatattccaacatcatgatgcgtaaaaccataagaacaaatatcgtggaatatcacaggatgtcgaaaaattgatacaaactgataaaaaagaagttcatagaactatttaaaattctcatactaatgtattattttagactattttgctataattgccatttttgattttgtagtggtgattgtgggatgtacaccattgaatacatcgaacacctcatgatgaatcgatcattagagcagattaaggatgatcagatgtcagtgtacagagaacggtggggtgtgaacctgttctaccagaacctcacttaatgattgaagtagaaaagtaggagcttatcattaagttttttatattgtaagttattgtttttctgtaattaatttatatatcactaattgtcaaaaacaatgtcgctacatattgtgaagtacatcgctatatatcattaatggcatcacaatattacaaaatacatttggaatgaaattccaaattttaatgttatgtcgatacacatcgcacgataaatcgtcttatgtagctaaaatttcatttaatacttcatttgaaataaatgtattatgtcggtgatgttgtcgtgaaaatgtcgataaacatcgtaaattagccaaataatatatgtctctatgtcaataacaatgtcgataaaaagttaaaaaatgtcgacaaataaagacaaatttcccccaagatagcagctccttacaatgttgccaactttttcgaaacatgtcgataaaaatatcgaaaaaagtcacaaaaatcatacatagtaagtataaattggcacatctagtaaacttagtcgctacatgtcgcaaaatgtcgttaaaagctatccctaaccttcagcataccttaatgtcgctatatatcacttatatcgcaaattatcgttaaaacacgaagaaaaaaaactagaaaacgcataattctggcagctcgagtttcaagaataagacaactaacataaaagaacgatatgtgtaaatctattcattttaacctaaatacaactaattcaataataaatactaaataaattacatatccattgcttttttaaaaagttaaaccagttggaagtttgggttgctcttacataattagttgtcaagcaaagtttatggacttcggcaaatgatgctccggcaatgcaggcaagtgtgtgtgtgactttgtagagaaagagtggcaagaatgagatgagaagggaaaaagttttacaccaaaaatacaaaatacacactttattacatatatatcttcacacggttaaaccaacattaatattcatcaactttattttattacacttttaccacttgcacacacactccatgcag

SEQ ID NO: 223023 - DNA, 3760 bp, Cannabis indica
aaaaaaaaaaaggaaaaagtaactgtcctcaaagccaattgaataggattgataacatttagaaaatactatatgaaactatcggtattttccacaaagaaataacagtgatttgtataattaaaatcaaattttggttacccagtgtaaaattctctaaataataattgattaatttttattaatctgttatttcacaatgattaaaataaatattattttctctaaaataaatttctctctttaatgatatttaagaataatattataattaactaaggaatatagttttatctaataaaactaaatagttaaataatattaattatacaattcataattatcataattaatcaaaataataagttcttaaattactattttgctattaagaatttatttttcatagaaattaattcttactccaatttattcatcaaataaaatcttcccctgtacagtgttgtataggggtgactcggggaccatgcacctatatttcgctccaataattacttaattattatcgatctaatcaatagaataatctaatttattaattctattattactccactataaatatggaattacacttgggggtactacaagccctctaccccacgcatctaaccagctcgtgtggttcaccagttccaccgactagactcttagagtgattcagtcaatacagagacacgcttgaagtaggtggtgtgctatccctattggcctgggcccttccccataaggccccattgtcggggcataagcgccctcttgatacccatatgcgaggcaccgtcttagccttccctgaccaggattgatcccacacatgtagtgtttgtgatcggcctactcaactttgtatcgatcgaaaggcagggcggcatagcccccaaccaagggagtggttacgtccattatgtccccccttattcccaacatgctatagttagaattatatttacaaaattcttacttgtagtctattgatataatcaatataagcaatttacccttcaattattagttcataatttgtgtaatattccaaaaatctaattatatttaataatgcatattttattaagtatggaatgatatgtatatttggtgtataaatagacaagattatagtcttattaagttaattaagtaataattaaagaatttaatagaagtgaataaataagcgtactttattaattatagagattttattaggctatgttggtaaaataaatgatatttgtgaatgagaatatttttaggctcaccaatcgtagaaactcgattcggccagaaatatcacgacagtaatagtttgagattttcttatatcgaaaagttttagttagtattgttttttattggggtgtttcggggtagttggttatgaccatcttacccttaaatctacttagaaactagtaaaggtaaaatagtcttttacttaagttttatgggttttgtcctagatgaatttctagaaatccttagctaattttggatacggttagtgattaattaagcctttaataaaataaaaggaaagacatatatcctaagctatcaaccttctcattttccttctctctttctaccttcgaccctagaagaccaagaaccaagctgaagttttcatctttctgcagcaattcaccaaggaaaacagttaggaatcagatagaagttgatggaaacggattaaggtaaccctagaatcttactgttcttgaatttagtaggaagtgttgggtttaagtgtagttttctttaattcatttctgtatagtatgggaggtgttagatttcattcttgagctttattttctatagtttgaagttaatttagtgatcatagtagttgtttagagtgggaatgtcaagtttgagttttgaaactcaagcttgagcttccatgatggttctttgtttttagtgtaactttgatttttgggtgtttggttatgttctattcatggtattggactgatttatgaagtttggttaagtttggataggtttagaaggagttgggtttgaaaaccccaagtttgggtgtttctatagagaaaatggtaagtcatttttacaaaatactacaaaaacggtggaccatttttcccaggcaaaaccatataaaacgatgagctgtatggggtgatatttccaacacctaaattttttgttttatcgatatttaaggtattgccatgctatttatcgataggcaaacttctagttttaagtttaagccttaaaacggttaaagaaataagttgtttatcagattaccgttgttgtgacataaggcccgggatcatctagtattttccacttaagttaaccggcacgagtgtatttggacttgaggtaagaaaatttaattcgtaccacatcgcatgtcaagatatgatactattattattgtctgtgaatcaattgctatcaagaataaggtactgtaattaccgtttataagaaaagagttattactctattgggttgtctggcaacaatgtgaaagagagtactactctaattgaaactgttgttaggtttctcacttgtcggttatctcatcaagtaacgacggtaacatttggaagttggattaagtatcatggttgtcttactaaaaaaataataagaatgattattttatgaggtaacgactatagtttgtcttattagacaagaacttgaatattaatggatgtttaattacttgagattgtttaagttgtgttatactgtaattctctactttgaattagtattgattatatagctagttataagaatattgttaattattgttacatgttatttataagtttgtttttcccgctttatttgttgagtctttgtgactcacaggtactttgtggtgcaagtaagaaaaggactagattggggcaaccatgagttagaggtcttccctaacaaatgtacatatcagcttatccggtcagcggtgtcgagtagtcaagtttttggtttatgtcaactctgaagagtataagtgttagttgtaaaattttaatagaatttttgttaatagtttactttaaaatgggcttcccaatcgtaattatagtacaatgccaaagttttttttatatatttaaaataattacataaattttttaattaaatcacaattttcttttaaatcgttagtttattattataaactaaattgtaaaagtacacacgtgacgtctctacaggttaggacgttacaattagagttggtcaaatttactattttacccttctagttatctcacttgattccttatgtaccatcaattcaatgtgaacagttaatctataacttattatagatttggatccaactgttagtactcctagaattaactctataaaggaactaatattcgatctgttaggaaagcttggattccactattgtataacatgtttctagccactcgtgttatcaagctcccaaaatagaagttgtaagaatcatcttctctgagaaactttaacaagtgaatcaaagaacttaaagttcatgtacacccaggattcaggctgatctactaataattatcattgtgatatgaataactctttcatggtaaacgacacattaatgaaagatatttattacagattggtccagtcatgcataatctaattatacacaacacatttactacatgtctatccacatatgtgatccgaattaaaatcacacacacacacaaacacacacaca

SEQ ID NO: 223024 - DNA, 2126 bp, Cannabis indica
tgttaacacagatttttgttaacaaaaattgagcctaaacagtgataaacatccacagaataatgaaaacagtaaagaaatacaaagagtagaatgaacacgaaggtttttttacgtggttttgcagttaaaattctgcacagtccaggagtcaatcttattagatttttgatatttttctagggcattttctcttatgaatttttcgtaccttttcaatctaacttacctctatttataattagattgtcaagcagttaatgagagagttgactgtaatctttacaacaattatcccctgaaatcgtggggtttaattacatatcacgtaatataaatgcggttagtatttgaatatcacactgtgattagtccgcttttactgggtcaaagtaaacgtatattaaacacattataaatcataacgttctgggatgtctcgataggaactcagttccaatgaccttgatagtgagttggagattttacctctatctctccgaggttgataatgtaaacctcatcgcttcttcgcttgaagatataacgcttcattttgacaatcacggttcttaataacaaggagtactttggtagttaaaatcatttgaatgtcagcttctgcttgagagaaccaactcttcaagactataaatctcattgaaagatgtctgaagctggttggtgaaagtaccaggagtgtgccttcttatagcgagataggcgccttactattagttgcttgggttcgcctgttatacttagttgatatactgtatattacacgctaagtgtcttcgtagtcattacgcctcgcttacgtgtactcaagcgtaatgaggttgatgtctcgccttatgcatccaatgccgtatggtttctcgttaatgcatgaggtaacagtttgcatatctttatctcgcataagaccttatagtcagtaattataaatatactctgtaacttccgcatttcatgagttattccattttcaagtataattattgtttcatgcatcgatccatattctttttaatttgacacgtgtcctccttttaaacgatggccgaactttgggtaaaacaacatctatttcataacatctactccaatcatattttctttgattgcaagagtagtattatcagctatagaatatgcgcatagggtcgacatgcaatttaaatctttttcaatcatgatgtcattaatgttgtatgtaagctcttttgtgtgattgataattcacaattctaaaagagtgggcctatgatctgtaagaaattcatcagcatgtcaataacatgaagtgactacctgactagtgatagtaaagaccttaggattgataactctaaaatgctggttgcctcaaattataaaaacataagcatcaaacctttgtttaaggttgagagaccatgaaccaattaattagggcttttcatagagatgtaccaatctataaaacgagaagctcgagtggttttgctgaactagtggaagaattcagagtaaggaacatcgtgtccttaaaggcacatatggtagccagacccaaaaatttctaaacgaagttgggaacaagttgaatcatcaaaattctagtaagggggagaatgtaggcagtagaggatgaacatgaatgcgcaaaagttccatgtactttccactcactagaatcccaccattggtcattttgagatcttacagactcttacttaattcatccattgtcaatatacagaaggttactccatttgaaatagggtatcgagagcagatatccccaaaaactgactcgtactcaagaatgaaatcgaggtcaaccaagggtgaagttttctccgtagtagatttgatttgttattggaggctcttgaggccattgcaaaagtatgagaagaacaaagagaaaatgagctaaggaaatcagactaagaaaaatatgaaggatgaaatggaagattgaaaataagaaaaatatcacggaagttacttaaattcttgactcatcctttaaaaaaatatttgaagatttaaatttgaattggaattaaatggaaatattaaattaattagaaagggtggagacagtttctcaaaaatttgaatgattatctatt

SEQ ID NO: 223025 - DNA, 3748 bp, Cannabis indica
cattgttctctccactaataattgaatattgaattatgccaatttactatacatattttctctctacttcactatatctaatctccattaattaataatggattaattccattactctattcttaaattttattgtaatgacgagcaaataaaaacaagtataacaattaaatatttgattaggcatatttgggctgggccgatcacatcattatataacctttctattctttggttttattttctcttttgatttagaataactcaactctcattttaatataatttaaatataaaaattgcatggtaatgacttgacatgagctgatgatgtacatgcttgttttccttgtcatgggttttttcttttcattttcatttttggcgtgtttgatatttatcacaattcaaaattagatgggtcaaactcaaagaggcttcttacaacttttctaatttctatctatctagacaaagtactttcatttttaaaatgattctctaagatcaaaatttactaatctctagacctttctttgtacaggccttttccctttacttacttttggtaaaaaatggttggacaaaaagcatgttggcagagtttcgttgtttatggttcaaataaatttgaaatagtttttaaaaacaaaagcttttgagtgtgtgtcttcattcaaattcagaaaagaaaataagagaaaaaaaaagtgatcttaaacactcaaataagccaaaaccaaagctaaaatttgaaaatctgttatttggtaagaaatacattgtatgtaatgctgtacaacaagttcaatcttaatcaactcagcaaatctgatttgatgagctcaaaatcaaatcaaatttatatataatttaatttcggttgaggcaattgggttgggttttgttgtgatttgagaaaagacataaaacattagtagtaatgtgttgttgtgttgtgtcttattaattaagtgaaaaagaatggttattataaggtacgttttgcctctaccaaatctcatttgtattacaaagaaagaagaaaagaatgaaatgaaatggttaagcttctttcctctttttgacttttttcagcgttttactctcgcaacgcactgtctaccatgcatatttcattgtcataattgtcttgtctttttactaattttgcatcagaagttgtttaggaataggatcgattgaacagatttgcaatttggaaaaaagaaaaaaagaaaaaacactttacctaaaatcttcctattaccgcaatgtgacaggttgttttttttttatttgttgttttgcctttcaactataatagtaagtagtgaaatgagtaaatatgctgttagctttcaggctgtatatttctcacatgcacattcattctttctcttattcttttttctttctgctacactctatatattgtcattgtcaccactaatatggttataacataaatactttttcaaacttgtgtaaattgtaaatattattttttactcatttaatataaaaagtcatggcatatacctcaacatcatgttacaacctctcagtcaaccttcacgctcgaaaacataggttagaatattttttttttcaatttttttttcacaagagtgtttgttatacttacaacatcattcctgtaaatttttaaaaaatttcaaatggtttacagtattgaaaatacatttgaagttttttgaacgcgcgtggtaaactggaatatcaggaactctgttttcgatactgtaaattatttggaatgtttcaaaaatttacagagattgtactgtaactgttaaggaatatagttagttatggttgttagaattggttattttctgttagttatctgaactgtcataacaaactcttctctttgcttttgctgttgtaactgtgtatataactcatctcttgtaatcagttcattttcatagttgaataacagagtttctttcttgagtttctttctctcttcgtttctgttatttcaccttatcatggtatcagagcattttcgttcatatcgtcttcaacacagctacaatgaataccttcttcaccggcggcaatggaggttcgtctcaaaccggcgctcttgctcctaatcttccttgatccactcctgttactgtttctcactctctctccgttctacttgacgaacacaactatcttccatggaagcatcaagtatttgcagcaatcaaaggaagtcgactacagggattcctcgatcctctgcttactcctctaaaatttctctctgaagcagatcggcactccggtacagttagccctgagtacaaagactgggagcagcaagacaatatactcgtctcctggctattatcgtccatgtctaagaaaattctcactcgaatggtagggtgcgacacgacatcttagatctgtatcaccttaaaagagtattacacagctctaaacagagctaatattggacagtaccgtactctgcttcgaaatgccaaaatgcaaggttccctgggtgattatcttctcaaaatcaaaagattagtcaatcttttagcatccattggccacatgatctctccctctgaacacattgaggcgatctttaatggtcttactagtgactacaatgtgttcattacatcactcaacacaagaactgataactacagtgttgttgaaattgaagccttacttatgacacaagaggttcgcctggaaaaatcagctcaaaaactggatatctctaaacctgaggcaaatcttgcacatactaaaccattcactggtggtagatgtaccttttcttcaccttatctttcaaattcgactaagactggcttcaattctatgtctcgaggaaaccagatgcagaatagcagtatgcaatactctgctcattaccttctccctggatttggtccacaagctcctgctactgcgactcgaggaggtcaatctcgtggcactcaacaatccaagagaggtgctttttctcattgcaagaatcaatactcaccttggggccaaaaggttcagtgtcagctaagccatagactcggacacacagttgccaaatgcttctatagatttgacaaatcattccaaggaccagaaactctgcaatcttttgcaggaagtgccaatattgctgaagctgctcaactttatgcatatgcaatttaagttaagggcaatttcaaagtcgatttctaatttttttttaattgttaataattgtttgagcttttaaataggttcatgctttaattgattgtcatcttagaatttttataattaaaagtcatgtcaaggtcacttttaattatcatagagaatatgacctagattaactagattgcacgattgtgaatttgtagctgatgaatgcttattttatgcattcttttactcttatttgttcttgttttttttgggttgtatcttgagtttttagttagatttaagggtgtttacacatttggtatcctgtattttatctaaatacaaatttagtatcttgtatttttaataatgcttattttggtatcctgtattttaaaatcaaacctatttggtaccctaaatttaaatttttttgataaaatttaatcaatagtctaaaattttatgaattctgaattcaaatttatttatttgattatatataactgagaacggtttggttaaattaataaaactgtattgattaaattttattttagggtaccaa

SEQ ID NO: 223026 - DNA, 1085 bp, Cannabis indica
atgataatacctattaaaaaaaacaagagttgaaaagctcaccaattctatgagaattaacaggcaaatactgagtaacaggatttttgattactcgcaaaagtttcgtgtgagttttttcatcctttatacttagcttttgtaacaattgcgctgcaaaaataaaaataaaataaactgtgaatatatttataaacacaaaactaaagaagtctataaataaggcaactaattatttggctcgtgctgcttgttctttttcaggtaatcgattcaattggagtttgtcctgaccgatcttcatactattttgttagcagattaacaaagaaataagtaacactaaataaattaaagaaaagtgaagttatatgatagtgaattagtagttaattaattattacttacagatgagaccataaaaacgtttggatgttcttggcaaatgagtttgaggtttgacttgaattagaacccttttctcagttcttatgtataacccttttactcttcctgctttgttaagtgtactatctaatatggccaaaagagcctatacatatacacacacattttccaaattaattaattaattaactacaataataattaatctcaattaattaatatatatataaatatatatatatacatatgaaagaataaacaaacctgatggacaatatctggtcgataatcactttcactttttttatgtttgtttaagaaatctttgtgatctgaggttaaaagctggtaactctgttgtcaaaaatatagaaagacaatttgttaaatataaaataagaaaaaaaaaaaaaaagaatgttaatttcaatctctcattacgatctcttagtcaacttctacgatcgaaaatcacatgctaaaatatttttaattttttttcattagctgtattcggttgtattcatagttgcatattacagtctattaaagtgtgttcaaaaaactcctgtaaatgctataactactaaaataaaatattctagtattagattataataagaaattgactctaacagtaacagttcttatattaaaaatgtatataaatatatata

SEQ ID NO: 223027 - DNA, 7297 bp, Cannabis indica
aaagttcagggggcatgattttgcacatgtcaaagttcgaggggtataatttagtagatatcaaagtccgaggagcatgatttagctcatggacaatcaccgaattagttaaattgaatgaaattggacaaaattccttataaagtcaataatctcaatagtttaggagaaatttttaattgccagaaaagttttggaagcatcatttagtacatgtcaaaattcagggaacaaaaatcctaatagttagcctataaacatattattaaagactaaaacattactaatcatatatataatttatagagcattgctattaggcactagtggtgcctagcacattctcgatatgtcgcgttacgattgactatcgatactccctaaaagctattatattaaattatatgagacccaatacatacttagttggatcaatagcaaaaaatattgacacatagaatagtgttaggcaccactggtaccctttagcatttctcatatttataatcacatacacgtttgttaaagaaagatttttattagatttataaatattaatctatctatatataaaataatatattatgaatataagagtttattttataataacttttttttaataagtagattaaaattctatatatacaacacattaaaaaaaatttgatcctaataataataattatttaaaaatatagtgaataaaattttaaaaaaaatatggagttttgatatgtagtaattacataaaattattaatactaacattttattaatattatatgttagaactattttatttgagttattaatttttttattataattttaaaaacaagttaaaataattacaaagagtgactatattactaagtttatataaataacggaagcatatattatgtaccatcatatatataattcacgattcaagagcgtacacactctagtacttgtggggtatataataattagtgaatattcataatgacaaacttaaacaaataaaaaaattaagaataacatttaatatatgtagaaaacttagtcaaccgagcataagtaagattttgcttttatacatagatagttgttgttctcattaatttgtttaagaaaaagatttgaaccgagtccataaattaatattgttgtaaagaactgagtctgtgttttttcttttcttgtaaggagaactcatcagtcagtagtgttgtgtaatcaataaagtgaggaagtgaataaaatgtccttaggggagttcaaatagaagtaaggctcaaattatttgtgctgatatactctataattttttagtgtgaactttattattattattttgcttatctttgctttcctaacaaataccattaatactaggaataatgtaacaaacaaaataacaacaacaatctaaacacatattaaaaaacacttaataaagtccttgactacactcatttggaactacaaccaaccaaccaaccaaacacataatcaaaaataacatgcatataaaaggaagaagaaacttaatgaaaatcaataataagtcgtagctgatcatatatatgaacttctcttacggacgtaggttgttaattcttagtgcttaggaggagcaagaccagccttgagcttttgaatagtgtcaacatcagtcttgaaagagatagccaacacattatcatccaaaccagatgcaaacaaagtgtttggaagagaaactgtcccagcattggcactcccaaaagccgaaacagccacagcagaattctgaggatcagagttgtactggaaatgcaccaatccctttggaaacacaaaaatgtctcctacctgtagagactgcgtgtaaagcttatttgctgtgtcgacgaaacccacttcgagactgccatcggtgaggaggagaagctcggcggagcggggatgagtgtgtggcgggttagcggtcatgggcgggaactgaagaacagcatagccaacgctttggccgttgagagcggggaactccgccatgctcactttggtgcccttaaaggtcgcgggcgggtccgctcccattaaggattccaagccagtgaatgtgaagaagctcccatcgaccccttggctagcattgattggtagtacgaaatctgttaggatatctgggtccccagccattgtcatttcaagatatccaaagtagaacactattaagagtagtgagaataaagtgggagatgatgcttttgaggccatgattaaagggtgtgacaattgagagagctttcaaaattattattatttatttggtttggtgttgtgtgttttggatatgctaatcatactttgaaagaagctatttatagaatggtgtatacaatgaagagaacaataattttaggagagtactataggttggacctttagctaggccggcttatatgtacataatgtacacaatgaatatatattgttcttgtactcgacagttgtacgtagctgtgttgcctattttcaaggcaaaggtaccaaaaaaaaggtcacaaacaatgacctttgcttgttaataattgaaatagaattaattgaataaatggatcaaagtttacaattaatatgtttgattgtttaacggcccatcttataaaaggacatatattatcatcaaattaatgtttttcataccaaattgcacaatttgtaatagctattattcgttatttgttttgttaaagaaaagctattattctttcaacttttaagaaaagaattcttattgatgtgtaactactactaaaaaaacgctgattttccaacaatttaattaaacaatcggaaaatttattcccattgatttttaaaaccgtaatttatttgattgtcgcgaatactgggtagaataggcgcgacaattgaaaaatatcggcaacaaaaaaaaaatcaaatggtttaaaatcgtcagctatagttgctactataaaccacggtttaaaaccgtcaactatcctatagcgacaattttaaacaaaaaaaaaaaaatattaaaatctaagattatctcagatctacaacaacaacaacaacagtatatctttgctgctgtcttcgtgtagaaattctcttcgagaactagattatctcaccaattttttggttcaatacaacaaatataatatatatatattcgttacaaatgcagaaatatgtatattataaatacaaagacaaagttaaaagatgatcggagatcccgtgtgctacgaagaaaatgatcggagctcctccacgtgcacaacgaagaagatgaccgatgctcttccacgtgcacaatgaagaagacggctagatccagtggtggtgaagacaagggtggtggtgggtttcatgggttgcgagatagagatgagagagatgagggtggtggtgggtttcgttggaggcgagattaatgagagagatgaggagggtgatggcttttatgggaggcgagattaaggagaaagatgagtgtggtgatgggtttcgtggaggagaggagggtggtggtggtcgtcgttgggatcgagagagagaaattagaagttgagatgatgaatgaaggaaatgagttataaagtgaagcgtgtaggtttttattgggtttggttatacacgacggtttaaaatgtcgggtatattatagtcgacggttttaaacagtcggctatagtatacccgacagttttaaactgtcgagtataactccaattaaaaatttgcgttttagcttaaaattgtcgctaatttccataatgagtgttctaaacggtcggggatatacctaatttttccagagggtttaaaacactcatttaaatttcttagcgatggtcaaaaaaaatatttttgggaccgtcgcgaattctaacttttgtagtattgaatgaatgtgagcaaatttaaagtatatacaatcgaatgtgaagtttagtaagaatttaacacctctcggtcttttatcgaacttttttatgaaaaatttgagtggtaaatttgagaaatgtgttgccagtaatgagaagactgcgtcaaagggattgaaatgacagatattgaagctgaagtattttactaggataatttgttatgttcttgaggctaatccaatttgaacgtgctagatgatttgcaagacgagtttagaagaacaagggtattgacaaaatgggattactttctcatggactctttattaccaatttctgtcgatcaacaccagagatgagattcttaatgggggttatttattttttgacaagaaacccgtgtatatgaaaccatatgggatctttatactgatttcactaaagatagggttaatagtgtgccaacatgggtccaaattcctggtttagatatcaaatattgggggggacagatctcttttcaagatagtaggatggttaggaactctaatgatgttggataagattaaaaagaacaaagttcacctgaattttgctagagttttgattgaagtgcagctcacacaagactttccataggagagttcctttaccaatgagattcagcaagatatttcttactcgtgaaatatgaatggcttccaataatatgtgagaactatggggttatagatcacaattcagctgtttgaaggaaaaaaagaagagattacaaaagtatgggttgagaaagaaaaggttaaaggaaaaactatggtagttgagactactgttgaaaaagattgggatggtttttagccactaagaaaaggaggcactactatgaaaagggcctttagaggcgattttttcgaccctttagaggtgattttgaagaaattcgcgacagtcgttgttccaagggttgcttgttagggctttattagtactatttttaagtagatttttgaagtgtttttagtaaattttaattttgtttttgtgcaattttacgtttttggttgtaatgtttttcaaaatttagtaattaaagaggaattgaacaaattcgagtaaatatatatatatatataaaaaaaaaaagataaaataagtaaagcattgtcgctagagcaccaagagaagaacttgccagttggcttgttttgatgaaacaataatgtttatgaaattcaagaaaaacaacattattcctagttagtttatacacactaataagattttttgtaacagaaggtacttcaaggatagaatttaaatgcaagggagaagcattagaagaaagtaaagtagctaaaccaatatgagaaatgtgcaatttcttaccatttgcaatagctagagtctcacttcatatttatggcattgcagaatcaagattgtccaaggaggtagatacatgattgttggcaccaatgtcaatataccaagttgaatcatctccaaaataggaaggataagaataagtcttattcacttgagcattaaattcaggacctagttctgtaggaaggctcgagggacattgaagttgggtttgggggtaacccaatttttattaaacatgtaatgacaaacagcgattgtatgaccttttcatacacaccttacatattagcctggatgatgatacaaaaccccttcaaaaacgtctcccaatagccttcttggaattctcagaagaattttcttgaccacctggaggataggatcgactataactagatcttggacacccaaaagccaaatggtcttgcatattgagggaaagatcatcaacagagtgatggtggccaaattgacttctatgagccatgagcaaggcttaaaccttcgcaagacttaaagaatcactcataaaagtgatgtcggagaccacagaattgtatttcagggctaagactatttaagagttagggaataacattttgctcaacaagattggaccctgcaacaacaatggagtcagcgagagtctacaccttatccgcacagtcggagatcgattgagcacccttatgaacatgcaagaactaacctttaagttgaagcaatcgagctcgagatggggtggaaaacttttgcttaagtgctttctaaacagagaaagaaatgatgaagttaggaacagaaccaggaatgccttcaggcattgaagatcgaagccaagatagtaggggttgatctttgcgcttccatattgattgaacaaaaggtttggttcactagtaaccaagaattgcaaaggagcagggacaccaatgaaaagaatatcatccagatcatgactaataacagttggtacaacctgcgattcccaagcaagaaagttagtgtgatcaaacttgatcgtgaggggagaagtgagagaaatggaaaaaggattccaaattgcagggacaaccgattgaggagcatcagcgattgaatgagctagctagcagaagtatttggattgataagatcgatttaaacacctaagtggaagtctttcttgtgaaagccattagttgacagaggttagtggcgattgataccatgtgaaaacacaaactaagtaaaagcaaaagagaacataaaatagagaatgggtaagaaaagcttaaccaaaaatggctagctttaatttttatttatactaactaagattacaccaagagtcaaaaaaaaaatacaagttgataaagttaactaacaacattaactaattctgattttaactactaactaactttagttgtaccgtttgcaaacgtgtaatatttgatttaccgaaaataaaaaaaatgaataataaataaatttcaccatatgcattatcctatatatataattagcttcgtcactttaaacaaaatttaaattataattcctatgctgtgattaaaatgttcgtgtttaaatatattagtcaaaaaattataatttgttatggcaaaatatgttattagtcacaatactttattgtgactaaaattaaattaatgacaacttgtatttaaatactatattttaattacaaataaatttttatcgtgactaaattaaagtcccatctgttaaaaaaaaaaattatgttgttagtaacttttttttttgtattgggtataagttaatagcacaatcattttttattttaatatatttgaaagcaataattcgagatatatggatacttactactgatgatataaaatcaagtctaggacatgacatctgtgttgaagctgatcaagttatttgtaaagtcctttttttggcaagttaggtgacaaaataattttccttttatggtaagattgcctttcattcattttcgaaatcttacatcttttatt

SEQ ID NO: 223028 - DNA, 1330 bp, Cannabis indica
atatatatatatatagaatttgtaaattgagcttatctatacaatccctatgtggaccaattttatgaattcaatctcgaagaactgcaaagctaatcagttcttaggccttttatttatagaagagtgaacaagagaagtagttgtatactagcttgtaacggaattacaacagaagataataaacctgccaaaacagaggacaagtggtaataatctcacaactaactattgtaacagttaattataaatgttggtaggagcatgaataaatggggaaagcttgttggcaataaaggcaacatctggtcgagttagtgtgaggtactgaagtgcacccaaagtgcttctgtacaaagtttggtcactgaatgactctccatttgtgagtgagagagtgtgggatgagcttgttggactaggattaggtttcactccatccaaatgaagtttagtgagaagattggcaatatactttgactgagagaaatacattcctatctctgtgcgcttcactccaactcttaagaaataatgtagagggccaaggtctctgacatcaaactcatgattcaactcagcaataatttgtgttgaatatactaataaaataatttgtgttgcaccagttcccttgatgaataatgagttatctgatttacacaacttgaatcctttgttgtataatgtggcttttagtctgtcattccacgcacgtggagcttgtttgaggccataaagagccttgtggagcctgcaaacatgagtagggtatgctggatcaataaatcctagtggttgtggcatatatactgtctcctcgagaaagtcatttagaaaggcattggacacatctacttgagtcacatgccagttaaaagagacaacaatggtaagaatggtcctaactgttgctggtcgaactactggctgaaggtttctttgtaatcaattccaggagtttgagagtacccctttgcaattaatcgtaatttatatttatcaagagagccatctgcctttaattttattatatgtacccatttattgcctaccaaggtcatagaaggatcatatggtacaagcgtctaggtcttatttttattaagtctttgttttcatcactcatagaagcaaaccattttggatcagcaagagcaagtttaagagaagtgggttctttgggtaggagagattttagaaaaggataagaggtagcttgatatgcttttggcttggagataccagactttgaccgagtttgcatagagtgagtattagtggtaggtgcagttgtatgtaggggaagtgaaatatgcaagggttgtat

SEQ ID NO: 223029 - DNA, 3159 bp, Cannabis indica
gggcacaaaacccaacagataatccaatatggatgacacctatcacagtttacctccaaattggggccttggcagaaggaaaaattgaagcaaacaaactgaaaagaaaagctactaggtatctaatcctagacggagtaatgtatagatagagcttttccatgcctctcttgaggtgtgtcaacaaagcaaaagctgaacaactaatgatagaagtgcatgaaggattctgtggcaaccatgccaagggcaaagcctatccaagaagatactcaacagggttagttttggcaaacaatgatcaagggctcgatggactatgtcaaaaaatttgacaagtgacagagattctcaaaaattccaagagctcggcctaatgagctcatgatggtgcagtctccctagcccttcatagtatgggggatagacctaattggtgaactcccaaagggaaaaggaggggtacagtttgttatcgtcgtagtagactacttaaccaagtggacagaagctgaacccctggcaacaatcacctccaaaaaaatccttgactttgttgtcaagaacatcatatgtcaattcggacatccctagaagattgtgtcagacaacgggagtagtttggcagtgaaatgttcactcaattctgcaataagcatgacatcatcaaaagcttatctttcgtggcccattttcaagtaaatggccaggtagaagttgtcaacaagaccctcaaggacaccatgtgccttgaggaagtaaaaagcaactggcctgaactactcccaaaggtcctatggtcacataggactaccgaaaagacggccactgtgcaaactccatttgctctagcttatgggtacgaggcgatgtttcttgtagagctagtgccactgtctcataggagaacaacctatgaccaacaaacaaaaaacacccttctggtcgagtcccttaacgaagtaaaagaaagaagagatcaagccaacctaaagctataggcctaccagtaaaaggtagcaaggcactccaacagaaaaattcaagaataagaaattcttcataggagacctggtgctccgaagagtgcccctaaacaccaaagatccagtaataggagtgttcagaccaaactgggaaggcccttatcaagttacagagataattagaaagggagcctacaagctgggaaggtataacgagaacatggatcccgttctcctaccaagatactggaatggagaggacctttgcaaatactatcagtaaccatcttacagagtactactctaaagtagcagttctacctactcaacattagagtacacaagggctaacacctatggtctttttggcatggtctcccacagtggcctctgctatgcaaaacaagcaggggtatatgacatctagaagctaaatctgtataatgtagtcttgtagattcaatttatgtatgtaagttgcacaaaaacaaagaccaattaatgaataaaaaaaatgtttatgttctatttattgtgtctaaaccccttgctctcaagaatgacttcttaaagttactctttcagttcacatgcgtactatggataacactccaagaaagaacccagacaaagtttgtgaaacttggtgaatagcaagtgaccaagagacttgtctacatggtcacttggggggcacccatatagtacaatgcatcaaactagcacaaagaacttatgcagagaaattttaacacttataataagctactgaacatacctctaagtcgtccaggcatactttaaattgacataggaaatttagacccttgcatgtcaaggccataagaagatagtcaggattaaagaccgcctggttggtcacacaatccatgagaaaaaaaaaaaaaacaataagggccaagcaatagtagtgttcaaaaatagagggcctataggccaaagatacaaacatgaaggccctgaggctgaaaataagtaatgttctaacaaggtcatagcccacatggaacatgaaattaagtagtcctctaaaaaggccacaggccccatggagcatgaaaacaagtagtgttctaaaagtaaaggccacaggccatacagaacatgaaagtattgtctatgttatacaaacataatgttgaatattactaacaaaaaatattgtctatgtgtgtaggggtaggtggagctaagtctgaagccgcgaaattgggatttccaaagtctacgttggccaccacatcaatatgatggcaagcctagtggtcaaaatcttggccggccaccccctcaacagatgggttagtcagcccctcatcatggttacctgatgaagacccctcgcgataggcaacgacctggtttgcctccatttggctctcaaagagaactcttcctcatgccaatgtacgctccacaaaagcctcactgcccatgtatgatagatttgctttggggttgtgcagcctgaactcataagtgagatcgaatgacaaattagcatactcctccctaatggcctgctggccctcaatagttgctttcaatttctcctcattctcagcaagttcaggctgcaacatagagatgaaggcagcttgggtggtattctccttgtttttggcaccgacatggtctctatctctcaacaaggagggcctccatttcagacatgaatttctccttcactagaagggaagcctccaaggtcttcacctgctcctgaagagcatccgaggaccctcgagagccatcacatgctgagcttaacttaatcaaggactaaaaacaaaacaaaacaacattagtgtcaaaaccacaacactggccgaccttggggactgttatggctagccagcccctcacaggtacatttatggcttgccaaacacctacaacaaaccctatggccgaccagcttgctcagtgccaaaagatgaacagagctaaaagtacaacttaccagagaaaaatcccaaaggccagtggactagagcctgtctagctcaccatcaccaagctccttgagctcctcatccatgacgggggaagctctctctatacatctataggctgcctccacagccctctcccttgcatcttaccctactcctctaccgggcctctaagccccttggcttgtaggtcgtag

SEQ ID NO: 223030 - DNA, 4183 bp, Cannabis indica
aaggttggtcgatgggggttgttgagcctgagatatccctaactgctcccagactgctagttgctgggatcaggctgttctcgccattagaagtttgtggcaaggcttgtactccttcatgtagggaaaggtttgtcctggttcctgaagagcctggttggacagcttgctgatagaccctcccctatctgtcaactagtcttccttggagtgggtctctgatgagatcatggcctctttcagtggttctttgattgaaccaccttatcaggtcattggcttttttgttgcggcgatctagctccgcctggtgagatcagaggatgtactcttggtcatccatccatctcaagaatttgcatatctgttgagcgaatacataataatcaacagtgcatggttcttcggttaggccggcttgacagacgacctctttaagtctggctaactcgcgatcttctcccaagtccacatggggcttgctaatagtaggctcatcaattctcggtctcgtctctccagcatagtactggggacgaggtccgataattgttcctgggggctattccctaagagtccttccctcactgggaggcgccagtggagggtcctcccttggaggcaagggctgagtgttcagatctaccgagatgtttgtgttactctggccagttgtagtggccagattcaagctaccagccgagatggaaggattgaccacatctgcagtgttcatgggaattccagtcgtggctggaacatggacattaggatttgcaatcaaaggatcttgaagaagactcgatgatgcagatggtgcaaccggggttctcctcatcttaaacattgcatttgatcaaatatgatactaacttgctctcaatgaaagcaccaaactattgacctcagatttgaccaaccaacaatgaagttgtattagtactgacgcttgtcacgcgttacacaataagaactataaagtggaataaaaaaggattttatagaggttcgaaccccttaattattttagttgtattgataccaagaaagcaaaaatcaagataacaattctcatattctttgcttccttctataggacaatcacacaatccactcgtgcaaaacaaactagttccccggacattgataaaactttatctccccaaaggggtatacccagtggtttgcctcccactatggaaaacacatcaaccgccattcatgatgaagcaccagccacacctagagacattcctactagttcacctattttgtcaaaaataggtagaattttatctaaacccaaacacttctctaattatgtttgcaatactactactgcttcttccactactcaccctattcatcaatatttatctcgtgataggttaaaaaagtactttcatgcagcgatccttgctacccatttggtcattgaaccatctagctacaaaatgtcagccaaagaccccatttgacagaaagctatggatactgaaattgatgctctagaagccaatgacaccttgatcgttgtcactcttcctgacaaacatcacactattggctgtaagtgggtgtacgaaatcaaatacaatgccaatggcattattgaatgattccaagcacaattggttgtcaaaggctgcaatcaaaaataaggtattgattactttcaaagctttgctcctgttgcaaagttgaatactttaaaattactgcttgcatttaaagccattaacaattggtccttgtacaaccttgagattaattacgcatttcttcataaatatttaaatgaaaccatctatatgacacttcccaaagggtataaacctaagagaaagattcctccaaatgttgtatgcaaatgaaccaaaagtctatatggcttgaaacaagcttctaaagaataattcacaaactcagcaactactttttattctctagttttaatctatcactttcaaatcacactttgttcattaaaaactataaaggtattttccttgcacttttaatttatgttgatgacattgtggttacttccaacaatgatgatgttgttacttcttttaaatagcaactcaattcagtgtttcaacttaaggaccttaatcctttatgctttttcttaggtttggagaattgtcttcctcaactagaattttggtatcccaacgaccattcaccttataagttttgattgaaacaggttacttatgagcttacatatcttctacaccatggaacctaacattctttcatccgatgttggggaaccattggaaaatccgaaagcttattggtaaattgatttacttaacttttacatgccttgagatttccttcgctgtaataagttaagtcggtttttatctaatcctagagttcctcatcttactatcgctcatattacaatatcttaaaggcacttctggccaaagattattctttcattcagcatcttccactaacttatgtgcatatgctgaaactaacatgtccaatgcagactttcatcttaaaaatttcaaaagccaatttggcttcatgtagtgacataacaaggtttgtttctggctactgtgtcttccttggtaaatcattaatctcttggaaatccaaaaaggtaatccacaatctcttgttcatcggcggaagcagaatattgggtcatggctaatgccacttgtgaaattacctagttgcaagcactactttgggatttcagcatcaaccatcaaactcctgccatcctatattgtgataacacggttgccattcatatctccaagaacccagtattctacgaacaaacaaagcacattgacatagattgtcatgtcgtccaagaaaagatccaagagggaaaattgaaactcatccatgttacaaccaaaataatatagctgatatatttacaaagtctttagttttctagttacttccacactcttgtatccaagatgaacatgaaaaacttatatatttcatcttgagaaggggtattaggtttgataatttcttcttattttaggcttctctcttacctttagcacatgtattttgggcccagtatataagggacctctctttagttgtaacatacacctttcgacattccgttcttttcaaagatttgagaaagagttttctctctattagctattgaatggaagatttaagaaaccatttaagtcaaatttagatggccaacctcatgaaacatcttaatggaaagggataactttcttgcgtgtcaacgataacaatatgtccatgttaagggtaaagttgggatgaatcaaaacttaccttgtaataaggtgaaatatgaacgaacttcaactagatgatcatgtgcaaaacaaaattgtcttattagagcaatagctaaagcaactcgtgaatgaaaagaaaattctccaaactacatgtcaaatgaggaaccataaccacactcgacaacacaaatttgaaatatatatgtatatataccaatgctggtatacaaaacatatccacctaaaaacaaagactattcctaaatgacacaaattgacgataagaaaacaaatcaagattactacttaaagcatataatactagctctattttaaagatattttaatcgatatacaatttatacaaatctcatagtgaagatgatctaaacaaaacatatccacttaaaaataaagattattcccaaataggatagacacaaactaacgataaagaaaacaaatcaaaattactatttaaagcatataaaagtaggtcttacttttaaagatattttaatcgatctacaatgctctaaatcatattactggcattattagaaaagtgaattgaacacaaaaaaaaaaaaaaatcttacaaaaatagcaaatatcatgatacttgaaaaacaaggaaacaattgaggtattcatctaatctaatatacactattttgcttataatattttgaccaagcaccaagtgcttattttatagtttggatttaattcaatcaatcttcaataatgctaaaaataacacataatcgtataaatatatatatatatatatatatataaatatcactgatttttaaaagaaaagcatcaaaagaaactacaatccaagtaaataagcttaaaagaaaggaaatttttttagaaatatactatat

SEQ ID NO: 223031 - DNA, 2889 bp, Cannabis indica
atgtgtcaagagtttgggatcacagacataaaaccgtagtgaagatcctagaacaaaatagtgttgatgaaaggatgaaccgaaccttgttgggggaagccttagcaactgtaacctaccttgtaaacaggagcctgaataaagtatagaccttaaaaaaacttatgaaatgtagtacaatcgaacccccaacctaacacatttaagaacatttggttgtacatcatatgtacaccaatctattgacaagttggaacctaagtccgtgaagggaactttcttaggttatgccttaggaaccaagggttatacatttctagaaagggtaaaccaaaagttgtgattgctagaaatgttgaattcaatgagttagaatatcctcatttgacctccaaaaaggatagtgtgtctccgtgtgttacaggaaaaagaggagataaaaacaccacaaatgtggaagtggagtacagaatgcagctcccagaagaaggttcacaagagaaagattgtgtggaacgagaagacaaagcacaaatgaaagttattgtggactcgaaagaacaagataacgaagaccaaacagaggtgtcggaagggttcggacagacaggtctagaaggttatcagttggctcgtgatagaacccagagaaagattaaacatccggcaaggttcgggaaagcagacataatggcatttgcactagcggtagttcaatagtcttaaattgaagagcctggaagctatgaagaggcaatctcaggaggaaacaagtctaaatggcttcaagccatggatgaggagatggattcactctagaagaataagacttgggtagttgtgccgaagccggactagaagattatagagtgcaaatgaattctcaaggtgaaagagggaaacaatgagaatgaaccaatgaggttgaaagccaggttagtggctaaagggtttactcaggtagaatgtatagaatacaataaaatcttctcacctgtggtaaattataaaaaagaataaggttgatgctgtccttggcaacacatttggagtttgaaattgagcagcttgatgtcaagattgcttttctaaatgcgttcctaaatgaagagatctatatgaagtaactacctgggttgcaggtggaaggaaaaggagttgaattagtatgcaagcttaatagatctttgtatggtttgaaacgtccccaagataatggaataaaataatcgatacgtatatgcatcaaatgaggttcaaacgatccacatacaatcactatttgtatttcaagagcctggagcaatttacagtcgtgttcttattgctctatgtggatgatatgctcatcatgagcaaggataaatctatgatcaaaagtatcaaagcaaagctcaaaagagaatttgagatgaaagagattggatcagttcaaaagatacttggtatcaaagtctcactaaacttaaaggaatggactattagcttaaagcagtctgggtacatcatgaaaattattcagaagttcaacctagaagatgccaagagtacatcttttttgtaagggggacaatttattttctcaaaagaataatgtgctaacaatacgaaagagaaagaagaaatgaaggatgtaccttatgtagtggttctaggatgcttaatgtacatgatggtgagcacgagactggacatagctcatgctttcagcatcataagccgattcatgtccaatttgggcattgaacattggaaagcccttaaatggttattgagatattaagggcacatgggattagggtctgacttgtgagaaaggaaaaagagatctggaattaaaagggttcgtggacgcaacctatgcctccaatagagatacaaaaagattaaccaattcctacgttttcttgataaactgaaactgtataagctagaaggaacaattacagttcgtagttgctcttttaaccacagaagaagaatttatagcgactatcgaagctttcaaggaagagatatggcttcacagaatgctatatgagttgaaacaaatcaaagggagagtgactgtagttttggacaaccagtcatcaatccatctttgtaagaattcggtttatcatgaaaagagtaaacatatagatataagactctattgcattagagatagaagaagggcttgatttagaagaggtcagaattgaagataatcctgttgatgttgggactaaggtcttaaccttaaaaaagttcaagcattgcttgaactagatcaatcacagaagttagtatactgagattcttagaacaccaaccaatgatggttgcattctttcttcatcattgtcattcttttaatttgaagaaaccaggtggaatttgtggaatagttcctccaaataaaaaggtctacgcaaatgttatttttgcaaagttgtccactcatggttgccagtcccgaagaagtcttgtggaataataaacgtgttcggaagggagttcccggatgactatcatgtcctctctgggttcggtcttgaagatagcttgcctacccctggaaaggagttcttgttggctagttgtccctcttggaatggtaattttggatagtcgactgcaacatattcattcctatccgaaagcgcattcaactagtgtccatggttcgtgagtccgggaactcatatatgttctcggaggctttgatacttaagctgacgtggagacttcgctcaaagaggagttggttaagttagttatttctaactaacttaacaacctcgtttcttgcagccaccgactttaggatcttgatcttaagcctataaataccacattcacttatatttttagatacgactggatatacgagattaagaacttaga

SEQ ID NO: 223032 - DNA, 1707 bp, Cannabis indica
taggttgctctgttagttgcgatgtgaattgttgcgtgaattgcggtttgaattaggttgcgagttaagttgcttcgttggttgctccgtgtgttgccctgtattggcatgtttattaaactgtaattgtaatcgaaataatcaatggaagaaatgaatcgatttaaaatataaaataattaaaaataatactttggtatgttgtttactaaattgaccggaaaggaaaccataaacatttcattttatttacataattaggaaaagtaatcggaatattttaatttgactaaattgtcattgttagaacatgtaattattttttattcataaatttttaaaggtcatatttgtttttttttatttttaattaataaatacataaaaaatataaaatcagttagaaagggaaatttaatgggagaagtttaagaatacccccttttttatacattaatcaaatttacctccaaataaaatttaattcaaacatacatctttttatgagtattgtacccaaataatcctcacacactttcataactaagacataatttaaataacagattaattaagtaggagaatatataggcagaatcgcttcagcaaaattgctagtcggaggccttttggtttcaatttttgctactgaagcgaaagtgacagccaaaatttacgtaattgtcatataagatgagatgatttcgattagttaatttaattacgatagaagaagaggaacagaggtccacccctcatcgaatcccaaggcggccagagcccagcacacgtcgtctccgttcaccgtcttccgcctctcacgccggcacttctccgacgcctcccaagtcacgaaactcgcaaactccgacacgcaaccctgtttgtcgagtttattgaatcaattgggaatggctctgaaatttaatttgcagcagtaattgacagttcaagcaaaggtatttgggaaaaaaattgaaacaattccaaaatctaaaatcctattccaattccaaaattcaattccaattccaaaatcatattcctattgtgactaaatgacctaaagtataaattgtaagtcatggtgtcttgtcttttgacatgcaaagttcgtattgcttttgagtgatctgctagcccctgttttcaagtttcagtgctctgttttttttcttcttcttttggttcttttgtaaaaggttatcaatggcagattcaggaaacgtgaggaatggtttggaagaggttatactggatgaagaagagacgggaggagttttgataggggataatggaggaagtgctgaagtagaatatgactcccgatggttcttagtgggaagttttctctcaggaggattagttgatttcttctctatgcaacaaacaatggcagtcctctggataccaaggaaaggtgtctacatcaaagaattgggtgcgaattttgtatctttccagttttatcatgaaatttatatcaaaagggtgatggatgggagtcctaggtatttcaatagaaagtcattgattgctcattggctccgacatggagaaaatcctaaaaatgtgcctctaaataagatagatttatgggtataatgtgcctctaaataagatagatttatgggtataattgaatgagcttcaaagtgggtataggtctgaacagatcgatattgcagcagctaaattcattggtga

SEQ ID NO: 223033 - DNA, 1364 bp, Cannabis indica
aggttactagcaaggtacgtgcgatcctaagtacgatcggtgaccatccacattaattacctcaggatgcttcttcttcaacttcctgagggaatactttttttgagatagtgagtgtgagccacataatccttgtcttcctcttcggctggaactgggaccctctgccacttagaatatttcggaaccttgtagtcgcaggtgaattggtctgagccaaggaggttgacggtcctcggattggcctcgttctgtaggaaatctactgagtgaagtccaaaaggaagacctaacaaaattttatgtcgttcagccatctcaggtgtagggatcatcttttagtgacctctgtcaacacaataagtgaaataagtaagcgaccccaattttataaatctaaaaaaactcaaaaccaagcttttgagaaagaaatcacttacgtatgatatgaaacgcagttgtgttgatgggagagagaccagtagtccagaagaaatcatccttgaactcagtcttgtttggtaaccttacaatgatcctacgatcacttgtgtgagtactgaggtaatagaaacctcttgaaccttgcttcttgtgggaacagctttgacagaatagaagtatactatcttgaggggagtaggacactcccagcctaaaatatggtataggactcttaggcctgccagaattttgcaagaactcagaatcaattgaaaaggagcaattccgagataattacagaactccttataatattccctcaaggggagtactactccatccttgatatgttcgaggctccaaatgcctattcctgatgaggcactagggctggcttcaccacactcttctcgaatcaccctttttggtggaaagcagctaaattcccttggagcaacagatataatgtgccatcctcgcccttgcttgatgccataagtctttaatacaccaccgacataatcccaaataaccctcactttggattcaatgagctcggcctcaaaagtaacagtatgatcttgagggtctttgatttacgagcctgggtggtcattatttcaaagtctaggttgttgggttttgtaccctaaataaaacccatttcaatataatcagatttactatttaataaagatcggacataacaatttatgttgcatggttcacatgatttatttcatgattataaattctgttaagtccagaacgtatgtatttgttaataattctagtgttgtcagcacactgaaatataatcttgattatatgtttgaaagtttaattccctgaattgtcagttcactggatttagactgtcatgataatcagcgataggtattcttacaccttggataagt

SEQ ID NO: 223034 - DNA, 1467 bp, Cannabis indica
gatataattcaaaaatcaatttaatgatctttgaactgcatatctactaatcacacgacagatgagtgccgtcagttgaaggatgagatagagagtctcatagcacgaggccacttcaagcaatatgtgaaaaaatagggcaatggacataaccacgccaatccgcccaacaacccaagcaaccagggattacacactcctactgttgtgggagaggatatcctagttatctcgggagggccacatattgcaggagaaagcaataatgcccaaaagaggtatgtgaaggaagtgaagaatgagcagtctgcctttgctccagaaccatccaagaaagtaaagactgaagagcctccgattatattttcaaaggaatatgaaaagaacgtgagataccctcacgtcgacccattggtaatcaccatctatctcactaacaagaggataaaaagagttctagtggacaacagaatttcagtcaacatcctttacagggaaacactaaagaagatggggcttgaaaaagctaagttaagatcttgcatggtaaatctttgtggatttactggtgacagtgtcaccagtcaaggcataatcgagctcccattaactttgggtgaaacacctttatccaccacaataatgcaagacattttggttgttaacctgccatcagcctacaatatactgttgggtcatcctgtattaatcgtactacgggcagttagttcgattaagaactaatccctaaagttttagacaccagtaggtgtgggattagtgcaaggtgatcaaacgctggcttgcgaatgctatcgcataaagctgaatcacagaaaagctggtcaccagctaatggcagtcttgactgaagaaagcgagaagaaggatgaagatcttgatcctaagattcaagatgaaagaaacttattgaaatcaattaaagagctggaagaggttgttttggacccaggaaatcccacaatgggtgtttacattgggaagaacctggatgaacaattgaaatagcagctaataagttttttaagggcaaaccaggatcaattcgcctggagtcatggagatatgatagggattgaccctaatattatctgccatcacttaaatgtcgatccaaactacccagcaaagagacaaaagaggaggcccttaaattctgagaggcaaggaattggataagttgttggtcaacgactttatacgtgtggtgttttatccctcgtggatagccaatcctattcttttcccaaaacccaatggaacttcgagaacttgtattgatttctcttatctgaataaggtgtgcccaaaggattgcttcccactaccaaggattgaccagttggtggatgcaattgctgggcacgagcttatgtcattcatggatgcatactgtggatataaccagataaaaatgcatgtcccagatcaggaacgtacaagctt

SEQ ID NO: 223035 - DNA, 1646 bp, Cannabis indica
ttttattatatttggatattgaagttgaaatttacaatcttaaaacatattcattttttattattattttattctaattattttatgtttactcaattatatttatcttatattaaagtttttaacattaatttaagctataacatttatagcttaaaatataaattaatatattatattttttatatactaattatttaaatagtaaaaactaacaataataattatatatataaaaaaagtgaacggtttggacggcttaacccgaccaaaccgacgaaatcattgagtgggttgaactttttctaatttttaattgagcaggttacggttaaatatttacaactcgatatttatattgggttaataaaaatattctataacccgaccaaaccgaagaacgtacacccctaaatggtcgtccatcaactggtcgtgcccatcagttggttgtacctcaattggacattcactagctggctggatgtccgtctgctggtcatgcatctactggtcgtgcatacttcttatccgcgagcataccaacaccttaatacaatgataaagggctgaagaacgattagactatgtctgaaagacctatgataaatagcccacaacaccagccttgggattaagtgatgaagacaaagctcaccaaaattagtctacaagaacacatgaaaaaattcttatagactaggggcaagtgttgacacccaaaaattgctaagtgtaatttttggattcattggtattatgcctaaaatttcgccaagtgtaaattctaaaatgcacccaaggggatgtgttggtactaagaggaggaaaggcacgggtcaagccttgtgcccatgccagcgtgcctaggctccccgtgcgcccagcagactccccacgcccacgctcgtgcacccaactccccgtgcccacgcccacgcgcccagcctacccatgagtagccctcctcgtgcacctagcctcctcatgagaagccttcccccgcgcccaggctcctcgcatccactcccgtgagcagcccctccttgcaccccctttaccttcttttcttctcctcatacaaatagcctatgcacataagctcaatatacatgaatgtcttaggtgtttacataatcgatcttgtgggcatagggggtgaggagtaataatttagactaaggccatgcaagcaagagcggcagagacaagatatcgaccatacaacaagtacgaataatggagacaaagcctgcctcactcaaattactacaaatggtaggaagaacttttgtcccattaaaagtgctagagatttcagaccacttgacatactgatcttcctattatgaaaataaccttgcatcctcaaactaggagaccacgtgaaattcaaaattgtataggcccactacaaggccggccttgagatcgggtgagtctttaggaaaataaaaattattggaccctttatttaaaaaatatatagtatttttaaaaactactaaaaaatatgtatattcttaaaggagaaatatttttttgggcccttgggctaagtgagtcctaggcgtctaatctgctttcaggctcgacccttataaataggtctttggaggtgtttgcaaatgggatctttttttttt

SEQ ID NO: 223036 - DNA, 2041 bp, Cannabis indica
tgttgaactggcccttagcatcatttgtaagttcatttggagtaaacttatctcttaaatgacaaagttttctccaataccaactagcatcatttttaaggtcataggtccaaatggaattgttcttgagatatatattattgacccatttcacccaaagaatgtcactcttagttgaaatggcccaaatatatttagctaggatagcttgattccatttgaccccatctttgaatcctaatccaccataattcttaggaagataaactttctcccacgatgccacatgaagcttgctcttgttaccattctaaccccaaagaaaccgtctacaaagtttctcaatctcctttgtgatactatgaggcaaaatgaatatactcatccagtagttgcgaagcccaagcaaaactgaatgaatgagaagagccctacatgcaaacgaaagatgtcttgttgcccatgtgtgaagtctctatttgattttcttgataatcaccccacagtcttccgttttccatttgataggccttagaggcacccctaggtacttgaggggaaaaacaccctctaacagattcatttccctcaacattgcccgtttttcctctgcttttacccctccaaaatagagttgggatttgttagcattgatagctagacccgaagcggcctcaaactcattcaaaacacttttcaccacctgcatggagcttaaggtccccttactaaatagcatcagatcgtccgcaaaacagagactaattatcttgagactcttacacatagggtggtacttaaacttcgattgatcaacagccataatcaaacgtctagtcaaatattccataatcaaaacaaacaaaagaggggaaagtgggtcaccttgccttaaacccttcttgcctttgaaactcccttgaactcttccattcatcatgattgagtaagtgggagctctcagacaagacgttatccacgttataaacctggatggcattttgtacgcattcaaaagagcttctaaaaactcccagctcaccatatcataagctttacttatatccaccttaagagtacaccttggagatatgttctttcttttgtagttctttaaaatgtcttgaagaatcataacattatgcgcgattgatcttccttgcacaaacgcaccttggttctggttggcaatcataggaagcacttgagaaagtctcatacaaatcagctttgaaacacatttataaacggtagtacagcaagctataggcctgtaatccactgctttagttggattttcagtcttagggattagggtgagcattctagcatgaaattcacggggcatagatcctgtattaaagaaactctctacagcttgagtaaagtcagctcccagacccgaccacattttcttaaaaaaaccagctccataaccatctggccctagcgattttacatccaaaatgctaaagaaagctttcctaatttctttctttgtgaacgatctgattaaactcagttgttgctcgagatttaaacaattccccatctccatacaaccttttttgagactagctataggcctagattcggttcccatgtatccctagaagtgaccaatataatggttgaccacctcagtaaagttgtctataaccaccccttgttcattagtcatagacataatgctattctccatccttcttttttccaaactagcatgaaagtaagcattattctcatctcctttgctaagccaagtcaccttgcttcattgtctcaagaaactatggtacaacttttcttggttggtgtagtttgtggctgcctctttctctacttgctgaaacttcgggttttgagcatgagtttgagcttgcattctagctgtcaagcttcatgataactcctccctatatcccctataacatctctattgaacttctttatgacatgcttcaacctcataagttttatgacatgcttcttcatgagttttatcctatattttaataatgaaaataatctctctctctct

SEQ ID NO: 223037 - DNA, 1136 bp, Cannabis indica
tccttttcttttctttcttttttttttttacctgtaggcttatgtcggcgccttttcatattttatgtttgtattttgtaaattttgtaagtttgcgccggcgtcatataccacatttatcaaattttgtatgggccactactcccctagtttttttgaaaatagagtaagtactctttttcataaaactttagtttttgtgtaaggaggggtaatggtttttctgtttcatattttctagctcttttttaatgttaattttactttatattctgttgtttctcgacgtgtacctgcttatccacacgttttaatttcgaacggagttttattttttatattgtacttgctggctgtcctcttatggttttcatgttttacgtattatcgtaccgaatggtcttagtcatgcctttcgtgaaaaggtcttttatgttgcctttcgtgaaaggtctttgtattgctttttgtaaaaggtctttttattgccttccgtaaaaggtcttttttgttgcctctcgtaaaaggtctttgttcctttcatttttgacttggacgatattttccgaattccccacattttttatttattttaaagagaaaattcgatgacgtttccatggactttgaagttcctagcttttggtttatacatagaatttcttgaggtaccttgcattccagcttcttgtgatctcggttccgtccatggtggacagcctgtacgccccgtttcccttcgggcttatcactcggtacgatccttcccagttggtggacaactttcccgctcgggcttcttcggtgttctgaaaaacttttcacagaactagttccactgggaggaaattccttggccttactttcttattgtattgttttaccaccgtggaacagtaattctgcattcgggacaaggcccgctcccttctttcctcggcgtcgtcgacagcttttagtctgaggaaagtgttgtcttcgttacttaactcggattgcaaagtaggcacttgcgtttccgtcgggataactacctctatcccgtatacaagtgagaacggggtttcgcccgtactagtccgtggcgtggttcggttggcccaaagtacgccgggcgattcttgggcccatcttcc

SEQ ID NO: 223038 - DNA, 1742 bp, Cannabis indica
tcaccttgacgaatgccacgagatggagttattggtcccatgacatgaccgtcatgaaaaatagaataccgaacactagtaacgcaagccataatcaatgtgacccatctgtgatcaaagcccatttgaagcataatagcttgtaagtaaccccattcaacacgatcataggctttgctcatgtcaagcttgagagccatgtagcctttcttcccatgaactttcctcttgagatagtgcattacttcaaaagcaatcatgatattgtctgagatcaagcgacccggaatgaacgcactctgagtgggagagataatgtgatcaatgagaagcttcatacggtttgctagaacttttgcaatcaccttgtaagagacattgcataaagctatagggcggagatcactcatagagcttggagacttctttttagggaccaacactagatttgtatcattcaagtggtctgggaaagtggccgaagcaaagaaatcacaggtagcattaatcaaatctgtcccaacaatatgccagtgtttctgaaaaaacccaggtcccattccgtcaggtcccggggccttgtcgggatgcatttggaaaagagcaagccgaacttcctcattagtgaccggcttcaacaactcaagattctgggcagtagtaaccgtgcaatgtacaccattcacaactgggttccaatcaacaatcccagcagaataaatattggtaaaataatcaaccattacctcttcaaggccattgttccaagcagtccaaataccagaactatttttaagatattgaatcttattgctgcgtttccgattactagccatagcatgaaaaaattttgagtttttatccccactatgaagccaaaattgctttgatctttgcttccaataaagctcttgttgggctagaatctcaaaataattattttgttcataaccaaaatcagcaatggaagaagggtcagaattaccttttaaagaagcaagttttgctttgctttgcctgattcttttcttaaaattacaagttaagtttctgccccaatcaacgagatccttgctgcagagagagatcttttcatgaagaggcagtgaagcatttttatcccagcaggcttgtacgatttgagcacaaaaaggctctcttgtccaggcattctcgaagcgaaactggtacaccgtatcagcaggagcagcaggtgaaggttcaagatagattggcgtgtgatctgaggaagagacatcaccgtttgataacacagcagaaggaaaaatatcgagccagagagaagtaactagagctttgtcgagacgaatttctacccaattgttcgtacctttgccacgttcccatgtgtacggatggccatgaagttccatatcagtcaagttacaattgcacagcacttcttggaaaccagtgatcaaagaagaaggataaagtctgcctctttttttttcactttgattaccaatgttgtttatgtcgcctatgatgcaccatggaagttgagactcagcgtggagggaggtgattaattgccaagttttgaaccgcaagctacggtttggttccccgtatagaccagtcaaacgccaagtagggagatttggagtagaaatttcaatgtcgatatggctgtgagaatatcccagaaaccgcactccatcactgtacctccataaaagtgtaagcccacccttgtgaccattagcatcaacactgta

SEQ ID NO: 223039 - DNA, 1663 bp, Cannabis indica
atcttcttccttattcttaagtcaatacaactaacgaggattaggctattaccgaactgctcggggctgaacctctataaaatttctgtgtcttcttattattatttgctttattacgtatccttattacgacatatcgtttatcgcttatcaaaaagactcattgtcgttggctaaaagcgaagtcaacattttggtgctttcattgagagaagaatcacagatcgctcttttgacacgatggtgcaaactcgcagaggcctgtccgacccagcaaactcacagacgctggatctgatgttgcaggacccagggagttcaacggttcaacccgctatcaatcctggatagacgggaagcgtggtgaatgatggaacaactcctgttactgaaactgcgccttgtgtgcaagagaccgaaaataacggttccgcacacagccaggatgttcataacatgactgttccaccaggcatcaacgcccagacgaccatcggagacgtaactgaattgcaaaatctatgtgctgcgcttggactcatgcagggctacaacaataccctgcatcacgatcagaaggagttacgcgccgcagtaaacctggcgtttgacgaatagaggcatatgttcgccgagtggagagataaagagatggaggcattaagggctcaccatgcaaaaatcaaagatcgtagtcggcaagctactatgctgatacgaagagcctattagattgtcggccagcaggcgccgaacgtcatttcccttggagaaactgaagatgacccaacggtgaatgcttcccagacaaacaacggtcagccgtccaatccccgatcacgagttccactcgtgggccaagaggtaggcggacagaccttgtccgagaattcatcaggaggagtcatgctcgatggatccgcgcaaaataatggagccattccacctgccaaccaagcgaaccaatcgctaaggcagccaagtcttttttgcttcgaaaggttgggaacaccccgtgacctaatggacgacctaaacagaagaaggagagcagacgaccagaatactacaactaatgtgcagtctggagccaatactcatatcctcgctcagaaagactctgacgtagcccaacccgaccagaatgccaatgaactcagcccagccgtacaggcccagcttgacgaactgaagaatatgcttcatggcatggtcgggcagcgtaacaatgatcttgagttagaccgcgcacgcggaactcctttctcgccagaaatcaacctcctgcccctacctcacaaattcaagatgccaacgtggaagatgtacactgggagagaagatcctctctctctcatctcaagtatttcgagatgtagatggatttacaaggagtgcgaggagacgtatgttgcagaagcttccccgcaactctgtcggaggccgctcagcaatgatatttcaagcttgctccaggaaaatttagttcatgggaaaccttctcttcggaattcgatgcacaattctattcctcacgccaacttccattgcatctaggagatttggtcgaagtaaaacagcgacaaggcgagccactccgggcatacatcagcagaatcatgatagaagcgaccaaggtgtcacgtgtaactgaggatggaaa

SEQ ID NO: 223040 - DNA, 2127 bp, Cannabis indica
gctagagatctgaacggaggagtgagttatattttgcttgcacccaatgtaaggttttttaaactttatatgtgttctttcattgttttagaatttcgaattaggatgttaatgaaacatacatggtagtaaatctagatcctcgtaaaatatttccaacataaacatgattatattccactgtgctgacaacactataatcattaacaaatacatatatttgggacttcatagaatttatacattaaatataatcatgaaataaatcatgtgaaccatgcaacataaaatattatttctaatctttattaactagtacatctgattatattcaaattgggttttatttagggcacaaaacccaacagtgacgtggaatccacttggagtatctgctcggagggtacagtccgagtaggatgcctcgctggcatgcccagagcaaagcaatcagcaatccgcacaggacaaccaacacttagcgaattaagctttcgcattttgagtcatcaacgaaatccctataacttggggatcaaattacggagatatggcatacccacaatcccatgatcagggtattcaacatttatcccacgatcattgtattccacacttatcccacgatcagtgtatactgtatctatcgtgtaatccttctacatatatccattgtaacgagaggggaaacacttcctctctaagttcacagccctataaatactgatgcatgttcactaggcaaaatattcagagagtatacccctaaagatattatctaagaatacatattcagagatactgttgtaagagctataagaaaaggaacctttctccttgatcttaagtcaatacaagtaacgaggattaggctattaccaaactgctcggagctgaacctctataaaattcttgtgtattcatattgctttattatatatcgattgctataaatcacttattgcttactaaatcagactcgttgtcgttggctaaaagtgaggtcaacagtgttcaaggctccaagcgcctatcccggtcgagccacttgtattggtctcgccactggccccctcaaatgttttgtgagtaagtcgcactagtggataacaactgaactcaccagcaaccaccgttctaacctgacagtctcgcttatattcaataccataagtcttcgatggctcgcacctttgactctattagcttagcctcggaggtgacgttagggtcctgtggagtctttgatttacatggcttggaagacataatttcaaaatccaagtcacctagttcaaaagcaatcgtgaccttgggtaaagacaaactggggggtttaggccaagcagcatctcgtaagaaatgtcgtctgccttctgtaatttcttgcaagaagcttctgtggcgactggcaatatcgttttgttaggttttcactaagtgttccgtaatttttgcaacatttatctctaacttagattgggcaactgaaattctgggtttgtatgggatggcaagttcagtagaacactctatttctaaatattctggacaataaaattctgaaccagattgggacattgatgcaaggaggaaataatcccaattcatggaagaaattaatcaaacaaaaagttggtaaattgaagaatctcgaaaacctacgttctgcctaaaccctaagtttagagaccgcttaactttaatttggaaattagcagataaatagggtttaattatgaaacttgcgtattagttatgaattattttacagagatttatttgaattcataatgcattttatatgtcatatatgaaatttcatatttttgcatgttttgtgcccgacaacattagaacgcgacgtttggcaatttgaatcacattttagtattttttttagtatagcgaggcaatatagttagacattgcaaatgtcgagaatagttgagattttagaattgcccaaattacccctaagtgattttatgacttttggtgtaggcaagggcattatggtctttctgcctggcattttggtcctttagtgagattttatttgattattaatctgattttatttggctaatattaagttgataaaccctattttttttattttttttt

SEQ ID NO: 223041 - DNA, 3699 bp, Cannabis indica
aagcttcaataatgaacttgtttgcatgtagtctttgtctggtacgcttttcttttgttggatgggacgaaagtttgggtcaatgtttagggcgtgagaaatgacaatgggttgaatactgaccatatcctcatgtgaccaggcaaaaatgttcaggttttctcttagaaattttatcaaaactaattttatttcgagcaacaaacccttaccaatttagagtttcctagttgggataatagggtcaatttccacctcttccagctcttcaattggcccaatatttgtgtttgtctccccaagtcggggttccatgtcttcatccccgccttgggcaacttcctattgggcaatgctcttttccttgcctgaactctggtcagaggtatttttcttcttgactttagttagagcaatgttgtagcattcccatgcaattctttggtttcctttgagacaccccacctctctttttgttaggaacttgacgcacagatgtatgtaacaacttttaagtcatatagggacggccgacctaacatgaaattaaaggttgaagggacataaattatcaagaattgccccattatagttatgctcctcgaagcttgtccaacaatgagaggtaggcagatttgtcccagaggtgaaacgctttggccagagaaaccatatacaagctgggtgcagggtatcaagtctttaagacggagtcccattttcttttaagttgtcttgaataggatgttcgaggaagctttattatctacaatagtccatgccactgtcttatttgcaatttgcactaacacgaccagggggtcgttgtgtgggaagtggatgtggctggcatctacttcagtgaatgttatcgcatgttccactacccgcggtacttttgcttttctttcttccatgaccaagaatgtttcgttttattcatactgcaaggctcgcgcatacttttctcaaactttgcccaaatctccagcaagatatggacccccaataatgacctataaatgcccgttcactgatggaggcatcaattgtttttgattattgtctgcttgggtggccttttgattttggtcagccttgacagacttctgtaaatgcgggttattcttcctgatccaaaactcaatttctcgcttcaaattattacacttgtttgtgttgtggccatagtccgcatgaaaatggcagaacttagatgtatctctcttacttacatcctttttcatgggagatggtttcttgtacggcaccatagactgagttgtcgcgtagattgtctctaggtcgtctgttaggactgagaaggctgtaaattttgaggcattttccttggggtgctgctcagcattgccagtgaattttcccttctttccatcaccctaccggttgtcattgttagacctcttcccatttgaatttgagctactggggtcttgtggattatggacggatgttcccgcagaagaggcacattgctggtgtttcttttgtccaacagtatcgacatgccgaacaacttcattgagctttatgaacccatttgcttgatcaaaaaaattcagccattgaccccactgtaagccttttaatgtccttccacgaatctttgagtggttgaatgcccccaatattgcggccaaccttccttcttcagtcaaccccttaacatatgtagcttcgatcataaacctgctaatataagctctgaggggttctcctggcatttgctttacttcgaccaggtcttcaaggtgtgagggaaaatgacgaaaggaggaaaactatgcatggaactctcataggaaggaattccatgaattaaaccttcgtggaggcaatttgaagtaccattgttgggcaacctctgcgagtgtggcacgaaagattctgcaatgaatatcacctcttaccccttccaagtccatcttcatctcaaaatacttcagatgtgataaatgatcttcttttccggtatacattttctaggttggcattttgaacttttagagtagctcaaggacttcaatctcaggggagaagggtgatctgcgtgcccattcgagttcgagatcagtgagttttgggccgttcaggccttgtaccgtattttaatgttgatccagttgtgtttgcacaaatggatgaacttgttcggtttgttaaccagcctgtgtcacattgagatctctttgaactagaacttgggctcaaatacctagttggacagttggtggaatgtattgttcatccagactccttctgccatttaggtctgtcctgaggtcatgtgcgacacccaacctaccaaacactgaggtactaggtggccttggtgtctgacttgtttggctggtaggttggctagaaatttcagtagtggtgaagttggtgtgtataactcctcccaaaggacggtctagcaggatctaaccatctaccatttggcccacatgttggacctgtggccttggattggatggctaaccactgtgagtttgtgtggtatgcccagttgcataccattcttatctgcccatgcgaatactggacgcaatttctggttgttgatcggtgacttggtaggcctgccttattagtacgatggcctccctggtacgatcatcaatggctgtttgttgagcgcttagaatttccatctcccagtccctcaattctataaattgacgtctttgtttgtcaaacgcatgatttatggctacacagaaaacctccagatcatggtgcaaagcattagtatggccttgcatgagcccaacggctgctcagaggttctggatttagtattttctccaactaacctttgattattagtggtagatgggacctcagtgatggaagtggattgatcggctgcgaactgttgtttccagtctcttgtacgcttgttgtgatcccagccagagggaaagtcactccatggcctacagtaggaggttacgtattgacctgcttggggtttgtccctagtggtcctcttgtattttcaagagtttgcacgttaggatttatcaccatcgggtcaccttgattaggaaggcctctacgggtttatacaaccatcatgtttatcctgtcaaaacttaagacaaagaacttgagttcaactctcaatgaaagcaccaaaatattgaccgcttctagccaacgataatgagtcaaataataaagcgtttcaacatattaaaaaagaataaaaacagtaaggtaaagtgaacaccagattttaaagagatttgaccccgtaagtctggtaatagcctacttcccttgtattgtattgacttaagagaatgagcaaagtgttctttttcttgaaagctcttacaattgatctctgagtaactctcatagatcattattttctctgtaaagtatatttctgtagcaattttctcttcccctttcatagtgaggctaagtcactatttatagggacttaatgcaatagggatggcatgtattttgcactacaatataatcgtctaagtcacggaatcaaaggcatgtaccacgtcactttttgggggataaatttcctattctccttcctcttgtttattttatagtgggataaatcacaagttaggtaattgtccatgtttgcatagtcttacaatataaaatacaatttttgagacatgcatggatcttttcata

SEQ ID NO: 223042 - DNA, 2282 bp, Cannabis indica
ggagatttatggtcaagtattggtgttggtaatctattaattaaataaacagatgtttgaaaagcttcccaccaatatttcaagggcatgtgagcttgtgctaaaagagtgagacccatttcaacaatgtgtctatgttttctctcagctctaccattttgagctgaggtgtgaggacatgaatgatggaaatcaattccatgggctaaagcagtgtcttgtagggcttggtattcacctcctccatcagtcctaagtctttttatttttctttcaaactgagtttcagcaaaggttttgaattgaagaaaagcatttattgcttcagctttggtttttaaagggtagatccaagtaaatctagtgcaatcatcaatgaagtgtatgtaaaacctataaccattattggaaacaatgggagaaggtccccataggtcactatgtattaaatcaagtatgttgctagctttgttattcgaaggtttgaaaggaagggcatgtgatttgccaaattgacatgcatcacagaaatgattcatttcattcttggaaattttaacttgacaacaatttaaaacttgacttaatactttgtgtgatggatggcctaacctcctatgccatacatcactcttagaaacacaagacacattggtttttgaccgactgacactagacttggacttgacagcaacaccagaaaacagttgctccttaggcttatttgactcgatttttcttgagaacagaggagttggctttgtgtttggtgcttggagttggtagagaccatccttaagcatcccttgaagaagcactttccttgttagcttgtccttcacaacacaacaatcagcataaaactcaatgagaacattgttatcaagggttaatttagatacactcaacaagttcttagcaatttcaggaacaagcaacatttcttcaagttttaaacattgacccgaatcagtatataaaacaccattgcctatgtgagagatagagagttgagtaccattaccaacggtgactttttccttacccccatactcttgtttttgtgtcatggatgaggattcggatgtgatgtgattgcttgctccactatcagcaaaccaagcatcactttccacagtttctggtgttgctacataggctgagggattgttgctgttgttgttcttgttgtgtgttgagatgtttggatctgaacccataaactgctcatcgaacctgttgtagcaaacagcagccgaatgaccatacttgccacacacttggcaagtaggttttggacctccagatctgccactgaaccttcctcttcctctagcacgatttccaccacctctgcctgaatttctgccaccgtgactttgagaatagttggcagtacctcttccttgtcctccaacatgtggcttttgaacaaagttagcttggggatccatcaaggtgttgattcctttgccatttgaagacatggcttgtaatctttctattttgctgtcaaaactcagcaataactcttggagttcttgccaagatgtcttaggtctagcttcgatttgaagaactatggtgagatagttcacatctagacccgataggacatttgtgacaagttgagactcgggataaggctctccagctaaggcaagaaggtcagcccagtttttcttttgcctaagatattctgtcatgggagtgtttccctttctagtaacctgaatcaaggttctagtttcatccattttggacttggagtgagctccataaagttgttcaagagctttccataactgtgcagcagtggccacccccataacttcagttgctatagtctcagtcattgagctatacaaccatcccatcaagagctgatcgttgatgatccagttctcatatgctggatttacaacttgagaatcagcagtatccaagctttccatgactgttcctgcatcaataagttcagatggacaagtgttagttccattaagaaaaccatcaagtctatggcctctaacaatggttgagaccattgttttccatagactataattgtgtctatcaagcttgagagaaaagggctgattgagggtgctgaagtggtttgatactgggttttggggctgagaaaagcttgaaccagcacccattactgtggatgctgcagtggctggagtgttttgagcatggttgttgtttcctgtgttttggggttctgcagacatggtgagagggttgagacgcctggtgctctgataccaagtgaa

SEQ ID NO: 223043 - DNA, 2156 bp, Cannabis indica
agataaataatcaccctgtggatagtatctagccttgaaaactttgctcacaagagaatcatgtcggaataagagcctccacccttgttttccaagcatagcgagattgaaatccctcaaattcctgaaccccacttccaccaacagcttttggatcttgtcattttgtcccaattcatccaaacaatgccactcccattgttgttagctctttttgatttccaccagaaacttgccatcattctctcaagttcattacatgtaccaataggaaaaagaaaaacattcatggcatacgagggaagagattgaactaccgatttaataagcacctccttaccagcacgagataaaaattttccctcccaactgcttattcgcttcttcattttctcttttagaaatcccaacactgcattcttgtttcgcccaaccgtgcttgggagtcctagatacatgctatcggccccagcttcttggacttgcatcataccacagattctgcttcggatatccgcccttgtgtttgaactgaagaaagctgacgacttgttaagattaactttttgccccgaagctctctcaaaaagttgaagaagtgtaagaacatgattagcttcctcctccgatgcttgacaatacacataactatcgtccgcaaatagtaaatgggaaataggaggtgcacttctagccaccttacatcccgtgatatgtttctgagcttcaaaatgtttgatcaaagaagagagaccctcagcacacacaatgaacaaatatggcgacaacgggcacccttggcgtatgcctctagtagggattattggacccatcttttgcccactattaatcacatgatatcgaaccgaattgacacagccaaggatgaggccaatccatcgttcgcaaaatcccatcacacgaagaatggcttccaaaaaaccccactcaacgcgatcataggctttgctcatatccaattttagagccatgtatccttttcttccatttgttttcctcttcaaatagtgcataacttcaaaagccaccataacattgtctgaaatcaaccttcctgaaacaaaagggctctgagtgtctgaaatagcatagtctaggattcctttcattcgattagccacaaccttagaggctattttatataaaacattgcaacgcgatatcggcctcatgtcacccacttgagctgggtttttcttcttgggtattaagacaatgtgagtatcgttagtgccagtggggaagctgccatcattgaagaaatcccgaacaaaattgaccacatccgaaccaactatgctccaatgtttttggaagaatgccggggtcatgccgtcaggtcccggagatttgtccggatgcatttggaataatgcatttcggacttcatcctctgtaataggcatcaagagttgtgcattttgttcactggagacagtcggccgaacaccatttaagatagtacccaagtcaatgtttgatgaatgaaacagatcactaaagtagcgtgtaataactgcctctaaccccgatccccaagtcacccatctgccactttcatttttaagttgcccaatcccactattcctcttcctagcacttgcaacagaatgaaaatattttgtatttctgtcaccagaatttagccaaaattgcttcgatctttgtttccaaaagacttctcgctgagccaaaacctcagaaagattggctttcgcttcattgtgttgatgaattgaactctgatctcttccccatttggtgtttctaatctgtttcttacatttgtcaatacggtttctgaaatccccagtgatatcccttccccatctccccaacacctccccacaacgatttaatttctcttggatgttactagaacccgaaccctcccaacacccttgtaccagctgcttgcataaaggctctctaatccaggcattttcaaagcgaaaagaattaaaagaaccaggaggagacacacctttaaacaccaagagaatggggcaatgatctgatgttgagacttccaggttgtatagtgtcggctgaggaaataaagacagccatgtgtgcgtaactaacgccttgtcgagtctttcttcaacccagttatcaccattccttcctttctc

SEQ ID NO: 223044 - DNA, 2934 bp, Cannabis indica
cctgaaaagttattcaaaagggaatgtgatgacataacattcatggaaagcgatgccaggtgggtccatcatccacactctgacgcactggtcatcgtcgcaaacattggaggagataatttccaccgcatacttgtggacaatgggagttccatgaatctcctaaatttccaggccttcaagcaaatgggattacaagagaaggatctgtgacccatcgtgtcgagtatctacggtttcagtggagacatcattgcgctgaaaggcatgataaaactcccaattaccttgggagtcgcacctgtggtacctaagtcaatggttgacttcgcggtaatcgaccaacacttgccatacaatgctgtgattggtcgccctatcctgaaagagatgaagatcgtgacatccatttatcatctcactatgaagtttcctactcctgctggagtaggatctatgcgaggagtccaatcagactcacgagaatgctacaatacagcagtaaaactcgtagaaaacaagtcagtcaacgtcatttacttgctagaggcatcgccccctcgacaagaggtgtttagaatagaggaaatacctcaaaaagacaagccagacttggatcctaggatcctcgactatgccgcaactgcccaggctgcggaagacactatgaggtacctattgatcctatagataatagcaaagttttgaaaattggctctaaactaacttttcaacagcgagaaaagctagtcaattttttgaagcaaaatctggatgtttttgcctggaaacatttagacatgatcgaaatatctgcgcaggtcatgggtcaccgattgaacattgaccccgaagtgggaggtgtccgacagaagctacccaagctggtaatgaacttctcagtttcatagacgcatactcgggatataaccaaatctcgaagtatgaaccagatcaggaacatacatcgttcattacagatcgaggtttgtattgttacaaggtaatgccttttggtttgataaacgcaggtgcgacgtatcagaggctggtaaatatgatgttcgcagatatgattggggacaccatggaagtgtatgctgacgatatgcttgtaaaatatcaacatgaaaaagaccatgttaaccatttacaagcgatgttcgagatattgcgacggtacaaaatgtggctcaatcatcttaagtgtgtctttggggacgatttagggaaattcctcgggtttatggttaatcagcgaggaattgaggcaaaccctgcgaagattaaagcattagtagagatgcgatctccgactaagccaaaagaggttcaaagtctaacaggtaaattcgacgctttaaatggagaaactggcgtttgctctggtaatagcgtcaagaaaactgcgaccttatttccaggcccatagcattgaagttttaacgaactaccctttgagacaagttttggcgaaaccagaagcatcgggaagattgttaaaatggtaagtagagctgagccagttcgatatcaggtacagaccaagatctgcgattaaggggcaagccttggcagatttcatactcgagttcccgagcactgaagtggcactcatagaagagaaaattgatactgatgtaccaaatggcgaaggatggactttatacgtcgatggagcctccaacagcgaaggctccggcgccggcataatactcatcagctctagcaattttaaggtacaggctgctctaagatttgaattttctgcgtctaacattgaagctgaatatgaggctttgattgcaggattaaagctcgctcttgaaatgaagctcgagtacttacaggcttttagcgactcccaaatcgttgtatgccaggtaaacggagaatacttggccagaggcgggtgtttggctaggtacctcgccataacatgcgagttgctgcagaaattcaagaaagtggttgtctctcgagtactgtgtgctcataaatctcacgcagatgctttgacccgctaggcctccacaagagaagctgaattgctcgatgtaattcctgtcgatgtattaactcacccaacggtgaatcaagatgaagtaatggagatagatactgccagaggagttacatcgatgactccgatagtgaaatacttggaaaaggagatcttacctgaaggccaaatagaagcaagaaaaatgcgatatcgagctgctcaatatgtcatatatgatggcacactttatcgcagaagcttcagccaacagctgctcaaatgcattgacggggaggagtgtgattatatccttcgtgaagtgcacagtggtatctgcggcaaccatattaggggtaattctctcgccttaaaaataacccagcaagggtattactggccgacactacgacaagatgctttcaacttccctaagaaatgcgacaagtgtcagcggatagccacctatgtcaaccaacctccgagccacttgcactccatcacaagtccctggccctttgcaatttggggcatcgacttaatcagagaattacctaaaggaaaaggccgagtcaagtacgctgtagtcgcggtcgactacttccccaaatgggctgaggcaaaagtacttgcaactattacagcggccaaactacgcgagtttgtctataattccataatctgtcgatttggcattccttacaaacttatcttgcataatggaaatcaatttgattgtaaggaaatgcaacaattgtgagatgagtttggaatgaaaaaggcattttcagcagtctcttatccacagagcaatgggcagatagaagccgtcaacaagataatcaagcatgctatcaaaggaaaactcgaagagcgtaagggggtatggctagaagaactttcacaagttttatggtcatataacacaaccc

SEQ ID NO: 223045 - DNA, 3474 bp, Cannabis indica
atgctgaactaacaatataggtatctcataaaaaattcaaaattcaacagaaaagaggaaaagaaagtcacacaataagatacatacacatttggcgacaaacaaaaatacaagcaatttaatactgcatgtgttgcttaagcaatcaaaatgtcaaatatattcaccgttccaagtcaacaaagagaagaaaaaaagcactacaacaacaacaaataaaggattaaacaacagaagacacgtctgtacctaattgcgttttagaaaatgctggaacatttccaggatcaaggcatcacattcaagatccaacatcaccacacaagacctgacctttgcaacagtctcaagaattgaggttctttttgtgtatgatcggcttgacttgtcacatagattttcaaatgatgatacaataagccgaaagacctcctgaatacacaaaaataaacaaaattcgaacccaaaaaataaatgactatttggcaggccttaaacaaaatctaaaaacatgtacttatattttaagtaccttcatctggtcatcatcataaggagcatcaggtgcagtaattcttgttatctcactgatgcaagatgcaactgcaactttaatatcaacatttgtatgtcctaaaagtgtttcatcaaccaatgctttcaatgacggagaaagtgcactttgcattgattcagacggagactgctccacctttgatagacaattctcaactctctgtcattaaccaaaataagaaaggcataagagtggtattggacgcaaaaacacaaaaagcaaacaaaattatataattttagggggaagaattattctattagattcaatcccatatctctaacccaaaaaagaacatcaatttggcatgtaatagtatttaatatacccaacaatcaagactgtaatttgtaacgattcttctcacatgttgggtctttagtaataggcttaacacgcggcttatcaagcaagtagctgttaataaaatggcaagaaaataaatttatggattcttcttacaaataattacatggaactgaatattaagcaaagagacaaactcgtttagtaaccaagtggaagctttgcaatattggctttactaaaattacctagtaaataagtttacccaaaggctcaagtcaacattaaaagttgaacatacatcatattaaaggagccattgacaattgtctcctcgatttcaatactgcaataaatatataaatatatgtaaaactcaattatagaatcagctcttcaactaaagttgaaaacaaaatatccagaagagactgcttttttattgactaatatcccattttaaccgtataattacctcatattcaaaccagcttgttcctttatcgtattaaactgccctttgatataacgagacttctttaaaaccatgtcgcccatcctattaataacgcagctcaattaccaataattaacgcaacaaaaagtatacgactccatcaaatacaaatatatactctaaatatttgtaataacttcgaatttatagttcaaaatctgtaatgaagaaaataattttaattttaaaaaattgaacagaattagagaaaaaccaatcaagatttcgcctgtctcgtttcctactctttctcggagataagcttgggatctctgaaggggtcatttacataataatagttagtggaaataagagagtggtgtagagagaggagcaaaagaagaagaaataaaatgcgaactaatcgtaaaactctggcctgcgattggaacttgactcctttgaatttctccgataggaatttaactcactctgcgattgaaatttgattccttatagaatttctccgattggaatttaactcactctgcgattggaatttgattcctttgaatttggaatttaattcttttgaatttctccaattggaatttcgttgctagagatgatgaaagggtatattaattgattgggaatgggttcaaatacagaagaaaaaaaaaatttgtgggattgtgatgagagtgagattctaattaggttagggcaatttgaaataatagtatattgagaaagagaaagggatagttaacgggagatcaagcctactaacatcgttaaatttaacagaatattcttttatttttaaggaatattctgttaaaccaagaaatgccgttaaataggcacttttaatatataaagatatataaatcgtagtagattagattgaatcagatcagttatttttgtatatgaattaatatctaatccgcacaaatttagatatattgcagattggttagtttaaatcgtgcggattaaattgagtatcttatgaacgagcattgttataaagtaccagtggttcatgacaccactttgaggtggcactttgcaaatagttaataatatttcataataattattaaataaaattatgtgggaccgatgcttaattcactaatagtgaaatgacactcatgatggtgagcatttctcaataataataaaaaaattactttgagctaaaattaaagagaaatgttcaaagacaccttaaaagtgttttaatataccactattgatgcaatttattattgagtttcatacaatttgattaaataaataatatgaaaattgctatccacttataatatgctacatcagtatggtatctaataacaatgctcaaaattaaaatagagaagagatcttctcaaaatacccttaagcttataaactcacatttgtaatttccttttaaatgcttgagatattattattatgagcattgttattagatatcagtggtgcccaacacattttaggtgacaccttacgattaattagcaatattctttaaaagttatttttttaaattaaataaaacttgatacttaattaaactagaaaagaatattaaacaccactagtacttgacgcgcgggtaattggtcaccttgatcatccttattttcattggaaacaaacaacacccaaaatcagatacaaacgtacttgacacgtggcagtcatacagagtactacaactttcctcactcacagtaacactctccacttctctttctctctctttaaatctctcatcggaatatttgcggggaaattcctttaatatttacaattgttatacatatgactttaataaaaaaaagtaatgataaaagtaccttatcttacaattttgttgcagtcgtgcccttttttgaccattaagtatcaactcaaaaacatgtgatgacatattattggaccacattttaaataagctaaagaagtatatcatatgtgtttctgaactgacacttaacgaacttaattaacacttaacagccaaaaaaaagtatgattgcaacaaaatcataagataagatatttttgctgccactttttctgattagggtcatatgtgtaacaattgtaaatatta

SEQ ID NO: 223046 - DNA, 1971 bp, Cannabis indica
acaattgatgggattttattcatttttcttctaccacgcttgattgggacatttggaggaaaaaccttcggaagtaattcaacttcatcgatatcccaatcttcttattgaggcactggataaatcgtatcaacataagccaacgcccaagtttccaacttataataattggagcacaaatcatatacttctattctagcttgttcatatgctgctagtgcatgcacgcaagtaagtttatcaaggtcaaaaacacgacaagagcattgtctttgacccaaatcaactatggcatctttgcctttaccagtaacctcgtactcaaatcgattaagctgcctgacattcatttccaatgctttcttgaatcttttccgaatgatattctttgccattggatttaaaggtgtatatgatgtattgatagatgccacaacatctgattgttgaacctttcagagacttttgcttgcatagcctccaacaatgcaattataggatactctattggttccttcatattactgcattaatagatttagcaccgttcatagtcataatattgtagcgacaacctgtaaagtgagatcttgtccatttgctaagtggtgtatttgactcttcaagataattcacagggccaggatatctattcttcaattcatcataaagttggttgaactcggaaactttataggcgttagcagtttcttcaaataatttttcaacacctttaactctaacacgtgctttaatcttttgagataaatgccacctacagtatccatgttgtgacttcttataaatatttgacaaccaattaatgatgctttgatgcctatctgaaatgaagaccaattcactctcatgcggtagaagcatcattctctgaatcaaccacgccccaagcaataggataatatttaatagtaaggtacaataattaattatttaatcaattaagattcacattattggttttgtcaattttaagaattttcactaagtttgtaaaattcggaagaaagagaaaataaatattaatttattaattatacacttttgttttcagaattaataataaaaattttaatatgttttatttaaataattatctagatataattatattaagactagtatttaattattaaaagtttaattaaatatggtagaaataaaacgatgacaaacttctaagtatattggattcaaattctttttgtcttcatgatacagaatactgctagatggtgagttaaaaataactaagcaggattcaaacacccattccagagttcctagagtcaaccttggagtagggctaaggacccctaccaggtcgacttctatgactcgggactactcaactccaggatgttctctttcttgccacgtgtcaaacattaatgtccacgtcaccaggatcagtttctgggtagacattagtggtattagctttagattgtttttgtagggtttgtcccattagtttctctgttatgagtctagagagatttgttcctcttgtaatcgacgtggtttgttatcagtcgagtcgtctcctagtgagatatgtgcgggtttatcactctgtgacctataggactttgttttctttttaactgctatcactgtttctagaagggggacacatggcattcccaattcaaaattaatcatctaaggcctggtcaaaagccctaataagataataggcccagtctgtacgaaaggatgggcctcacacttatctgaggcccagtatatttacatccaagaccggatcgctctaaatccaatagggcgtccacctgaataaaaaggagcagtagagaccctctgaatgagcatttggatacattcgaaagggaattccaagaggcatcctggaaacctagtccaggatgatgtggcggccctctgacactgaatatcactaaatcaagggattatcccctgtgtcaggcc

SEQ ID NO: 223047 - DNA, 1860 bp, Cannabis indica
ttgaaaggatgttttaaaataaaaggtttatttgaaataatcaattaaaattatttaaattaatttttaggcttacgacggtcctacaaaaataggatgttaaaattaaaaatacccaattattaccaagctcgtcatcattatttatttattactttgaaataaatattcattaatagttgattaataacatgctcatgcattaatgaataatatgccatacatagaaatttcacaaaattatattatcatgcatctcttagtagaaacatgatatatataaagattgtcctatgtatttatgtatttaccgttttttgaaactaaaagcatgtaaactggctaagattaatttagcattaacttggtaatttaaaattaacttatattaatttaaaatagttttaaattatgaattaaagagttataattcagattcaataattatgacagaaaatttatttataatttgagacttttattataaataaattaatcataattattaaagtggttaatatgtattaattctggaattaataaaaaaaatgcattaacttaaaatagtgagtgggagacggagtacatgtgagtgtaacctacaacctccattattagtcaacaccgaaggagtatagactggcctcgagacaacttagatttcgtcaccctaaggaaggtatgtgtttatatatattgttgttaaaggttgatctcttgactaagataggaggaagtgatgtattttagtgcgataccgacccttaaggcgacgctactaagttaagtcatgaaatttaaaataatgagttatactcgcaaagtgcaattaagcttcatagtggttagttgtcaacttggtcaaaaagcagtactttatattttgaaaaggaaatatgagatttttaggtctcaaaataataaagatgagaattgtctcacaggctcaatgaaattgactcgataccgaccctaagacaacgatccattgtcaaagaattttattgtggaataacttaaacattattttatgtgttttacttttatgcgctcatgcataacatttaaagtatttatgagatgatatttattattcaagtataatcattatatcacttttatttattttcaaaaatgtctactgaaataaattcccttgatgctttagcaattgaaaaactaaatggtgaaaatttccttaagtgtaaatctaatctgaatttgatgttggtttgtgagaggaagtactatctactaagaggtatagtagagagaggtgatgtgacggtcttgaagattgcatcaaaatataacatggtagatccgttcacaaagacactactagtgtaatctttatgggtcatataactaatatgggactaagggaaatgctcaatttgcttttagggaaagtgggagattgttagagtttatgtcttaaaaagcctacaaagacattttctaattattaataaagagttgtacattttgatatatgcatgaatattaaattattatatatttattatttaatactttatatataaatattgagaaattttttattcatatatgaggctgtgacctgtaactatacaatgaactaagatcacttagctatgaatgaaacagtcagcaacatattaaagttatggaatttttaattaatgtttgctagtacggttcacagatgcctattctttgatgtaagtaatctcaattctgattagtgatgtagtatgacatcaaagtgaaggtgttgtatataatagagattatataggacatggatcggtatgaataaagttgtctttatctaacatgtcgtttaatataaagacctaattcatatcataacga

SEQ ID NO: 223048 - DNA, 1428 bp, Cannabis indica
tgtatgctctgtttgaaaaattatattaacatttcaatttattagttaattaaataatttgttacataaatagtcattaaattattaccttcccaacatttgagtaatttgttcgggaacttgttggccacgtatatggtctaaatggatcattttccctagcgcaatgacctctagcatccaatgcgcactaaaaaattatattgggatataagtaacatactataaaaataatttcaagttataatatagaaacaaacaattagcactaaaaaattaaatagtgtttacccgatattctagggaataaagaacatttggtagttgttattcatcaataataaccaagcagccaatcgttttgccgcattctcaaaagactaactcttctcttcatcgttgatactattcactacgagaagctctgtaaaacttgaaaattttttctcaaattttttatgctctcccagatgtgcctgcataaaattgttaagtaatagtgtgttataataattttactagaatttgatatatgaggctaattagattaaagaagagtatacatcattccaaacaacattccctggttatcgatgaagtcacacaatgccacctactacaaatcatctctagataacgtgatctggagatgcggtgctatgaatattcgaagcaccggaattgtgattatatcacttttatgtttgattcttagaaatttagcaaccatctattttaattacttagggattaaagctatgacctttggtgagaataattcatcttcttcatcagcaccaccttgtggagaaggcatgggaccttttcccttcgacacatcacatcttgattgcagttgagcgagtggaccctatacaaaacacaccataatatatcaaatttgatcctaattctacttgatttttggcagcataacggctgtaattaaatgcctctaaaattttaaacatgcctatataatgacaaataacatagatataacagttgtttattaatccatcccatcacagcacaaatatttgcataacctacttcactatggttgaatatttacgatattcaaactccactaatcattaataattaatttataacaaaagttacctcgggtgttgcaattaggtatttaggccaagaaaggaacatgtttgctacttccttaatatatctgcacctgtcaattgagattgggatttcagtagcctcttgcaaaatttatgaaatcagaacccaggcatgtgaatcatcgtagtctttgcagtgaactttgattggaccctcatgttcatacaaatatgctcgggccacaacattgtcgatattgtcagagcagagatatactggctgattaagggccctctattcatcaaaattgtacaagagcggtggctcgttaagggaaacaaa

SEQ ID NO: 223049 - DNA, 1266 bp, Cannabis indica
  modified_base (1213)..(1213): a, c, t, g, unknown or other
acaccaaataacaggaacagtggaacatttgaacctgagttctctcaacatctcttgtagccaagacatctctacaactaattgagccaaagctctatatttagactttgtgctacttctagtaacaactgtttgtttctttgatgaccaagaaattaaggcatcccctaggaatacacaatatccaacaactgaatttctgtcatctggacaacatgcccaattcgcatcagagaaaccaattagattcagattggtactctgtggtatgtgtaatccatggtgcattgtacccttaagatacttgaggattttcttggttgctccccagtgtacattagtgggttgtttgaggaattggctaagcttattgactacaaatgatatgtaaggtctggtgtatttgagatattgcaaggctcctatcacacttctgtaagttgttggctcattgactggtgttccatctgttattgatagtggtttttcttctgtgactggagttacactaggtttaatgttttccaaattgactctctgaagtagttcaactatatatttaccttgagacaaatagatgcttgtattatccctaaaaacttcaatgcccaagaagtaatgaagtgtccttagatccttcaatgagaatgtcttattgaattttgtaatgagcttgtttatctggtatgaattgttccttgtaacaactatgtcttcgacatagaccaatgccataacaacaaactgagcatgtttgaatagaaagaaagacgagtcaacttttaagtttttaaagccccattgaatcagtgtagtttttagtattttgttcaaaagtataaggacaagagtgatgaaagtagataccatgctcacttactatgtgtgagaaagcttgaaatccaccccctattagttcttagttgcttaattttcttgtcaaattgattttctactagctttttaaattgagcaaaagctggtaaggcatcaattttttttgtttaagtggaactagccatgtatagcggctgtaatcatctaaaaatggatgtaatatctataattggtgtgtgaggtcactggggctggtccccatagattagtgtgtataagttccaaaacttgagaggcatgactagttgatgtgggaaaaggtagagagtgtgcttggccaaattggcaagcatcacaaaaactgtgttttttaaanaacattaaatggtacatgggatagttttatcacttgatttaacacataactag

SEQ ID NO: 223050 - DNA, 2452 bp, Cannabis indica
tgggttacactcacaaagcgtaactaagatttcatgtggctagttgttaacttgaccgaaaaagggtactttaagtttcaaaataatgaagatgagaattgtctcatagattcaatgaaattgacttgataccgaccctacaatcaattgtcaaagaattttatcgtggaacaacttaaataatatttaatgtattttaattgtatgcgctcatgcatcacatttacagtcattctgaaatgatatttattattcaagtataatcataatgtcactttatttatttcagtcatgtctactatgtcaaatccccttactgttttactagtacttaaaaaactaaatggtaaaaactttttgaaatggaaatctaatttgaattcgatgctgatttgtgagaactacaaatttattctaactaaggaatatcttgggaagcccgttgccaatggtccaaaaatattttgggacagctatgatacttggattcaatccaaatgtatcatgttggttagcatggatgatattctgcctaagatgtatgaagaaatggagaatgtatctcaaataatgaattctctgtaggtcatgtttgggcagcagtctaataaaacaagatataatgctactcgtagctacataaattgtaaaatgaagaagggtgtcccattagaattcatgtactgcacatgattgagctaatacataaagcagagacacacaagactatcattgacgaaaagactcaagtaagtatgatccttcagtcactatctccttgcttcaattgaggacaccatgaacgaagagctcagattagaaagaaagagaaaaattagagtgactctatctaataccatgtgagatacatgtggatctcattgattaagaatctcttaccacaggttatatataaactatagtttgaagcaaattattacaaatctcatgtgtacaataaccaatacaaatgcacaaccaacttctacagcagaaaactatctctcttgacatttattacgtttagtttatctatcatatccacttgtatgtctaatggtctagtctagagcttcagaaagaatttccccattcaccatttgagatctagtcaattagtagttcggatataccatgttctaaactacttgcactacaatattaaaccaaattaagtacacattgtaaaaaaactccaagctgaaatttcaatgtcacgtgtgacttcttccacttgtgttcaattaaattatgcctgaactttttgtacacaaaacaaagtcaatcaaatttcgcatagtagtgttcttgttgttcacattcttagggttatttatattcaacaatttttgagtgcctccaactttttacattcattcatgagttccagctataagcatcttctacttggctttgaacaaaaccagagcaccaattgatacagcagttgtttgcctaaagtgataccttagttagggagaaacaaaattaatcccaaaattacgacattagtaaaatcacattcagttcgttacagaaaaacatttatacaaaacagtaccttcacacacagttgatatcttacaataatttattttatgtgacggacaccatagatacagtttacatgaatacaataagctatgttccctcacaaaaattgttaacatagctatgctttacactaaacgaaactaagaagagcaataacaaagaaaaagaaaataacacaaatacaatgccacgcatgtcaaaactagatgactcataattcattatgaccttccttttccttcaaaaagacttcaatttgttcgagtgcctggcaaatattaaagaaagcaaatttagaaggcacagatcattccacaaaagatatcttatttttttcattggcaaaggataaagagaataaacaaacgcaacaaataaaacaactcaggaatgagaaagagacctcaattgcaataacagtgggtgtgagattagatacatctctttcacctaatttggctgcaatatctgtgcaatagaaaaactagttattagcacattaaaatgttagaacatcattctaatgcagtaataccaaggtaaatccaatactccattctgacatttcaattttttttatactaattaattaaactttttacttttgtggatctttctagtataaaaataccagtaagaatggcaagcatatgaaaaagcaaacccttaaatgacttactttccaaagaaactcttgcattggcatttgcatatgattcacccctcagttcaaaaagactagacaagcgcatgaaagtctgaaaggacaccgaattcgaagtcgtgagaaaactattttgcgtggccaattatgatccctagcatttcatgcaattcctaattcttcagaggaatatgaaggaagaaaaaaaatccttcttaactgtaccttggagta

SEQ ID NO: 223051 - DNA, 1987 bp, Cannabis indica
tctcacatagaaaaataaaaacagtaaaggaaaaagtatgaacacaaaagattttttacgtggttttgtagttaaaattctgcaaagtccacaagtcaatcttattagatttttgatggcttttcagggcctttttcttataattcttttgtctcctttttttgatctaacttgccactatttataattacataatacgcaattaattatagagttgattttacaatgcttgtcccctgaaattttggggtttgattacatatcacgtagtataaatgcggttattgtttgaatatcacacagttgtgatttatccgcttttactgggtcaaaatgattgtgtgtttaaacacgtcttaaatcatagcgttctgggatgtcttgacaggaactcggttccaatgaccttgatagtgagctggagatttttcccctatcttttcgaggtcgacaatgtacgcctcgttacttatttatttgaaggcttaatgcttcgttttgacaatcgtagttcttaattacaaagagtagcttagcagtcatttgaatgtcagcttctgactcatcaagactataagtctcactgaaagacgtctgaagttaattggtcaaagtcacatgagtgtgccttcctatagcgagataggcacatcacttattaggtcttgagtccacccgactgttatacttagtttgtatatcatacgctaagtgttttcacagtcaatatgcatcaccttttgtcttcccaggggtaacggagtcgatgtctcaccttatgcatccaatgcagtatgctttctcgttaatacatgaggtaacagtttgtatatctttatctcgcataagaccttatagtcagcgagttgcaagtatactctgttacttccgtatttaatgagttattccattaaaaatgattaccgtttcacacatcgatccatgttcccctttgttttacccaaaattcggctaaaggacacgtgttaagataaagggaatgtgaaatggtgcaatagctttttatggaataactcattaattacgtaagagtcagagtatatttataacccgctgattataaagtcttaggggaggaatcaatgtacaaactggcacttagtgttttagcgagaaacaattcattgctgaatgccaatagcgaggcaccagagaaagtgacacataccaactttaaaagtccttagcttgcaataagcaaactaagtgtaaaagtcaggttggctcaaagaacaagtatggaagatgatcatcttgctatgggaagacttcctatagcttcatcgaactaacgggagcgaggctcacgaccctggcgagtcagaagatttctttataaataaccgcaattgacacaaacatacatcgtcgacctcggaaggaagaatggccccagctcgctattgggatcactataatcaagtttctatcgagacatctccagattcgacaattaaaaacgtgtttaataaacgacaattttgacccagtaaaagttggaaaatcacaactatatgattttcaaatcacaaatcgcatttacatttcgtgatatgtaatcaaatcccatgattttaaggataattgctgtaaacatattctggtcaactttgtaattaactgcctactatgtaattataaatagtggcaacaagctcaaaaaagggacgaaaaaactcatatgaaagaggccctgagaaaaatactaaaaaatcagaataagattgactcgtggactatgtagaattttaactgcaaaaccacgttaaaaaccctatgttcatacattatttttatatagcttttttttctgtgtgaaattattatcgtgaggctcaaatttggttaacgaaatctgcgttaatagtttggtgctttcattgatagcctctgtgaaaaagctcaaaaaaaccctcatttcattcgaagaaaaacaacctcctatatggctgaaaatccaaaaaaa

SEQ ID NO: 223052 - DNA, 5948 bp, Cannabis indica
tataattacttcgaactacactctgtttcaatcacataatgattttttccaaatgtgccctataatacaaagtgtgtggatatgagacaataattacatatgaattttgtctatattatttgacaaaattgtatagtaatatttttttggagagaaaaatgaaaattttcattaataggcaaaacagataatagtcgattacattattatatatcactcaaagagcataattaacaaaataggaaaaccatatcattttacaaaaatagaaatgaatgtcctaatagcaccttcaactaaaataccaattatctcattcttctgagaaccaagcggctaactggttagctcgttcttctggttcatgtcctgatcgtatttccagtaggtggtctgtcccttctggtttggatagctgatttgctttaatgaaagttgcaatctttgtttcaaaaaaaaataccaattatctccaactacatagttaaatttttataggagacattagaattggtgagccctcaatcatctccaacgctcaatatattttgattaaggcatgaatatattcaatttgaatattgaatttattttgatatttgataattaattaatgaaagttagatcaacccaatacaaaatctattctcataatatctaataaattacttaagttgaataatcttctctattttctctaatacatttatttgccatataggtagcaatgtagcataggcttatgagataatacggtaagttatataggtgcctataccaatactctatttgtttttagagaaatgtgaaagggtatttatggtgggactttttaagagatgtaatatcgactctttaagagatataatatcgttattggtgtaatctaatatcaaattctacttattttaacttaataaagattatatagaatcgctaaccatttataaagtgtcatgtcataaaagtgttagacatgtaattaataagctaataatatgaagaataattagtaattttgtctcttgaatttttgataatattgattctgcctcttaaaatataccgcttgttaaaagttaattcctcctaaaattttacacttacaaaaatttagtcgttctgttaggttccgtctcattattccgtttaaatgctgatgtgtttttgtaaattagtaatttcgcctctaaacgttgacaattatcaaattataccccctcaaatcaaaatgagaaagaataaatatttttttagtaaatcttaaaaaaaaattaaaaatttaaaaaattaatttagatcttaaaaaatatattttgaataattaagaaaattaaaacataaattaaattttaaaacaaattaaggtgtttaaaaatttatttattcttattaaaaaatatattaaaaattcaatttttgtaaaaactaaattttacgaaacaggtttgagtctatttttttctctctaaaaatctagatttgtttaagtaaacataaaggaaaaaaataataatttaatttctaacattttttcaaaacaattttatatttttattaaatttttaattattttatttattttttcagatatgagtttataaatataaataagttatattttttcttttcaaaaaattttagtttgtttaaattatttattggattttcaataattttgatttgatcttttaagatacttgtttataaataaatttgaaaatatcttttaaggaataatttttttaagtaaactttttttttaattaattttaatattttcattaggtttatttaataacttttattattttttttttctagaattaatagaacattataagttttaaaattattttttttttaattaaaagtgggcaaaattttatataggtcaaaattcaaagagtaaaaatactaattttttacgataaaagaaacggaacctaacagaaaatgcataattatgtgactgttatattttaagaagaaattttaacaagctgtatattttaggaattttttctataataggcattttagggtaccaatttacatttttaccctagaaaggaaaattaaacaaaaatagaaatcaaaactttttatttttcaaaaattacagtactgaacaaccagtctgtgtggaagctcttccttcttcgttacccagttcgaaccacacccatctccatctccacaattttcattttcaacccaagcaattcaactccaacaaaatagaccaaggtgggaaaaattgagggcgaaatgtacatctcaaccaaaatgatctgatcctgacaatttaaatttaaatacaagaagatcagatagaattcgaagcttacccaaaaacgaatcaaagaacaaatacaaggtaataaaaattttaatgattttcttcctaattaagttgtttttcaaagttttttttcatggttataaataatttttagattttagaaattagataaatcattaataataaagaaaattagttgatctgaataaatagataaaattagattacaactaaaaaaactattgatgcatacaaatataatatactttttttatttagaaataattgtaggtatgttgttttcgaagattaaaatggttgtttgagacaagagaaataaattacaaaaaacatattgatttgttacaaatgaacaattaatgttgcattacatctcatttattgttgcttgtcataaaatagttgttttgatagataaaaatatttattttcaactatttacacaatctgaaaaaacataattagtagtttataaaatatagcaactacaattgcattagatgttgtttaatggttattaaaaaaaaaacagttatttataagttttttattaaattaaaatagttatttgtaattattgatactaaaaactcataacaaatacaaaaattttaagacatggaacttttgtaaattttagtacaaaacaatgaccattgggatgataacaaacaagtactatgttgattacgaataaagtggagaattactatcaaaagattacacttttgatcaactagtgtaaattataatagagaaactacaatgcaatcctgatacaatataaatacaactgaaatatcaactaaaagaaggataccaaccactacaaacttactccaattatcacgacaataatacacaattgcatccataagatcaacatatagcaataaaatttgactttaaccatggactcaatacatactaattcattctaccaaattaacacctcaaattcccactacctcaaaaataatacacaattacatccataagatcaacatatcaaaacacaacaaaggaactcatgcaactcaatccaagaaattaactcaaaaattaagaacaacaaaagatgaaacccactacctcaattgttactccaagctctaacaccaatccccttgattcaagccacaatccaactccaaaaattagaattttgtcaagaacggtttatagagagagaggtcggtggaggggttacaaaaattaaaaaaaaaatgggattttaattttctaactcagccaaaatgagttttactaattagtaaagagtggtttccaactagagtttcagtttctagtatcgtcttaatacaaaagggtcaaaacttaattgggacatcaactagacatgccacgaacatatttgaggcatcagaatttgaattggagcaagtttatttttaagtacccggggccctgagcacactgtgaccatgttgacaatctatcaatttgggcgccttccaagtatccgattgaagatccaacttttgcatctttgttgtcttcatcaaaaatagggaaataggtccttccaaagaagaaacaataaattctaggtgccgaaagtagggcccagcgcccaagttgacacctggggctagccttgtgaccaggttgacattttgacaacctaggctattttaaatggagttttttgagaaaactttcgagcatcttcttcgtttttcagaaaatattgagattcaactacttttgaggaccaaacataatttcttaagggccaagagagggacctagcgcccaagttgacacttggagctgggcttagtgactaggttgacaatcaacctgggactctgccttcaattgctcaaatgtcaaatctgatgcgaccattgaatcagaaatggtcaaaatgggatagaggatctcatcctcaagttcagaagccttagaagtatgaaaaacgaaatctcaggagctcggaagtaagtacccaatgcccaggttgacaaatggcctggtgcgctgggttctgcttatccgaatctgatgtcattttgatcatccatttttttcacataactaagatctatgaagttagggaagtcaaacttataactttacatttttgatttccagctcacccaaaaatgaagagtttcaagtctctcatttccacaaaacagcaacatctccgagaattggtgaacagtttcgccagaatacaaaaactaactaagtggtgtcaaaatatcacttaggcatcttaaagtacatcccttggacatttttacacttacccaacgtccaagttgatgtcatatgtcaacttgggcgtcgggatgtcaacttggtcgctgggtcatgatctgtcttcagtaaaatagccataactcactcaatattgattctattgacatgattcaacttgagtttcgaacctaattcaatgatctatcaagtcatgtctcacactccaatcgtaatcttaagctatcgtatcaaatttcacctcaagggagttacaaaaataagtttcaagttacccgcagcgggacccactgggctccaaacaatagtcatcaccaccaagagctaattttaacctttagatcattatcaacggtcaaaaacatctaatttatattttttctcctattgttgtgggccttcttcacctataaaaggagagatcccttagctcatttttcacattcagaaaactacccacaaggtcagaacatctctctctagtttttctatctagaaactagagcttaaacacttagcctaattctgtaatgctcatgagaaataaaaactcgaagtagacgcaacttcattaccatcacgacataaggagtaaactactataaattttgcgtgtctcttctaaattatttacttaaatgtattaatcatttcgctaatctatcgaacaaatgttggccactttttaacgtcagcactactcatcatgctttatgtggttgttcttccctttctttgtgcctaaaactttgtaattctcaattgagagactcgcttgcttattgctcagatttgtatggtttaatacatcaattcatctcttcatgtgcaacaagtggagttgattttggttgtttcataaagaatctactttaaaagaaataaattggtgcataataattaatttatctcggttgagtttgttgttcatttggcacgtgactatcttcatgattttcaacttgataaccccagctctggagcttagtctgtcatgacacaaattgttagcagctgtcgtcttcctctgtcttgtcaccatctgatttgtgatgggtagctttcaacctaaaatgatcgaggctttggctttgagaaatgcgagaattcaatgccaattgcctggctttgagaacatattatttgagtcgacttgtcttaatttggtgcaaaattttaataaccatgttttgttggagtcatcatcaggtttagttttgaatgattttggtatagtttttacttttaggcatgctgtcatttttcattgttctagaactattaatattgtagctcacactaactaagtatgtcattcaactgttagcaaagtctggtgatcaagttactcgatatgtatcaaacatcttat

SEQ ID NO: 223053 - DNA, 3390 bp, Cannabis indica
gatttggtcgataaatgcattatggagattcgatctaggctggttgttgcaccaccaaatttcttgatcaagatgttgacaaagatggagcaagacagtatgcttggcgtgaatccatcagtgatactagtgtcgttccttctgtttgaagttttagtgactgttgttatcatcagaccttattttctgttgtttttatttttgggcttgtagtttgtataattaacagaggaaccatgtctagacttgatttcaatttcaaatacgccaatagtatcatctcagttggcaatgtcaccaggccaagtattgtctcttgactctcttctgcccaagcctccggtcttaagtgaggatgttagagccggccatgtccaccctaatctgagaccagtggtaacaagagaggacttatatattgatggttataattaagggaaagattaatcatgtcaaaggttctaatttgtgcctcttatgtcttcaaagtttattacatttctattagtggttttttttaaccctgaaaaagaaaaaatatataaaaaccaaaaattgaaaatggtaagaagaagctgaagcaatagtgtttcaacgtttctgtttcagatttggtgcagtagaataaccttagtgaaaatatttactgttgatagttgagggagttttgccgcaaattactcttaaattttttatttttattttgtaaaatatggccacgtaggaaaattttttagtgacttgtcattgccacgtgggcaaaattaagacttaacaaagctggacagacgacacttacaaaatgtaaacagaaccgcaaatcactgaatagtttatatcttatgctatatataaatatttaccgtaataacaaacgacacattgtctgaacacagtctgatccgtaaatcattatcgtacggaggaaaatatcgaaagagaatcatcagtgaagtcgaattgggttttggtcactcacaggtcactagtcacaaacttgagcgtccatggaagacagagctgctgtatcttcttcattgccattaccatcttcatcggcagaagagttcaaagatcatgtgatgagcgaggtccacttgggttgcccacctgctcattctggctcccaccattcctacttcttcttctcccctcctcctcctggtaattcaaatccccccctccccctaagctctctggtctctaccattacaaattacaatacattattatatttttgcattagatagaagttgaagcagattcaacgcaaaaatcggttttgctggatgaggatggcgatcttgttcttactagacgcagcagtgagtcttctctcttttcaagtattaaccttttctactttttacgaagtgggtttagcttgtaattactcaatcatgatttttctattcaagtttgggcctttaattttaggtcctcaggttcaaactttttaacattttgactaaacacaaactgttccacttcaatgcttttcactatacagaatcatcaacaaaaaaaattcgtgtggttatccagcataatataacatcttcaattccaaatgtgggtttgcaagtaagtttattggttaactctgttgcttttatgctgttttatgttcttatatatgtatatatatgcatatttgttgtataatactttatttctctcttcaggtgtggaaagcagaactgttgttgtctgattttttgttggataagatgtttacatcgtctgaatttgagggaattgtttcattagaacttggtgctggcactggtataatgcaaatcttaaactaagaataaacaaattaagttaaaaacttctttttgtcttaaaataaccagattccattatatttctttatcagggttggctggtatattacttgctcgtgttgctaaaactgtgtttttaacaggtagagtaattttgcttctctaattcttgttttggctgataaatcaatgaaggcatttggctgttactttggaaataatttgtcaaaaatcagtaaaccttattgagtacaatgatccatttgtgatttcatcagatgattgtgttttcaatgaaggaaaccaatgtagtaagacaatattttgtaagcaaaatgttattttcttggattggtgacagaccatggtgaaaagatcctcaacaactgtgctaagaatgtcgaccttaatactgaatcaattaattgtcgagctatcattcatgttcgtgaacttgattggatgaactcctggcctcctcaaataggcctccaagactcgcctacttctaatcggtagcacatcttttttgttttcccctttccctgctttagaaattagaactaaggttcacacattgtttttcattcttagtactatttcttattattgttaatatgggaaacatgggctgtttcatttgatggattgtttaggcatttatggacctcctcagaagttgaagaagcacagggagcttctatacttctagctgcggatgtcatatacagcgatgaactgaccgatgcatttttcagtacagtagaaagattaatgtctataggatcagaaaaggtacaatacaattataattaaaatggtccatagtaagacctgcaaatatattagtaagattagtatcattaatgggaatcattttgtttatcaggtgctttacttagcaatggaaaagcgctacaacttcagccttgacgatctcaatgtcgttgcaaatggttatgcacatttccgaagctatctgcaatacgaagaaggtcagaattcttttgccatagataatagttaacgttccagattttatgttttaaatttggaatggattggttgcagattttgaaggaattgaagattgttcaaggccttgctttgtggccaagtgcattgacatgtcaaaaattcctcaaaatgtgatagaatatgacagaggacatgaagttgagatttgggagattaagtaccatagaagaaaattctagtctgtcctataatattattatcattactactttttggtatgcagaaaattctagtcatggtttcctccacatgtaatagtacttttccttttgtaaagtatataatatcagaatctactgttaaagaaacaagaaagggtatctcagaatctgtactagtgctctagtgcattgtgtggtggccattgctaaaaaaagctaaaaagctaactcagcaagtaatcgttacaccagacatttcagcttcaatgatgaaactacagtgttttgaggatggaaagatgggcctatgtatgggcctgggcctggaatgtggcccatagtattattcaactccaaacatcgaggaggtaagtgtgttggatgtcctgagttcgagtctt

SEQ ID NO: 223054 - DNA, 2156 bp, Cannabis indica
agtagttgtctgagtccctctagagaaatgatgagtctagattcatggatctcctcgtcttgaacttaagaaaatttagaactgttaaataaagtttgcaagcttgatagctattaaaaagtaattaggggtggaccatcctatggtcattaagataagaaagttgttatcccaattttagtactttgacgtggcattacaatctggtgacacgtggaagtgacttcgcatatctgttggaaagagatatgccgaacagaataccgcataaatatgcacagacgaagtcttcctgaccgggcagtggacggtccgaacagcgtgccaacacttagcaacttcaatacttgcatcatgagtcacagaagcaatccctataattctgggatcatatcacagagatatggcaagctgtccaaatcccataatcagtgtactctgtatttaatacgtaatcttaccaattatagacatcgtaaacagaagggaaacttttccctcaaagcttatagccctataaatagtgatctattttcactaggcaaggggtcgaaaaacttatctaagcgtatatactcagagatatcattgtaagagctctaagagaggaatcggtacattctttgttcttacgtcaatacaaatcaaggggagtaggatattaccgaactgctcgagccgaacctctataaaaactttgtgtctttatttatttcactatgttacatctatattatactacgtacttgtcgcttatagttaagactcattgtcgttggccaaaagcgaggccaacattttggtggtttcattgagagccagagtcacaaactcgctctttacttcaaatttaatcataaacacgatggtggtacagactcatagaggcatggttaatccagctaatccaccagcggtggatcccgcactgtagaatccaggaaatgcaggggttccaccagccacaaatccttaacaactcccaatcgtaggtcaggatgtgacgactcctttgagtggaatcatgcctgttgtgtaagagacttgaaatataagttcaacagccaatcagggtattcccaatgctggagtttcgccagcatcaaatgtctgaacaacctttggagatgacaccgagatccagaacctccgtgctgctctttgactaatgcaaggtcatagtaatgccttgcatcatgactaggaggagctctgtgctgcggtaaatcttgcattggaagagcaaaggcgtctgttcgctgaatggagggataaagcggtggaaacgccgagggcttagcaagcagccatagatgagcgaacaagacaggccaccgtgttgatacgaagagcctatcaggctactaatcagcaacctgcacctgtcatccctctgggcgagtcaaacaaagatccagccgtgaatgtttctcaaaccctgaatggtcaaccacccaatccccggtcacatgtttcacttgtgggccaaacagtaggcagacagaccttatctagtaattcgtcaggagaggtcatacctaacaactcccgccaagttaatggttccggccaactgatcggccaaaccaaccagtcactgagacaacctggtgtatttaaatagattgggaatggcttatgatatcagagatgatctgaacagaaggagagggctagatgaccagtatgtcgcaccatttgttcagcccggggcccgcgttcaaaatcccgctcaaagagatcctgacgtgaccctagtcggccaagaaggagaacctctccaagcttacatcagcagctttatgacagaggcaatgaaggttgcacggttgatcgaagaagagaaattgaccgtgagtactggggggcatcgaagttcttggagaactttggaaggatatcaagagagacggacgagtagattctatgagtgacttccttgatcgtgcagatggctttatccagcttgaagaagccattcagcgagaagaagtcgagcttaaacctggccagctaaaagctccctctgctagaacatccatccagccccctcagtacccaagcaattcaagctcgggcggtaaacggtctaataacaacaaaagacaaggcaatggtaaaaagggaaaatttgctagcaaaaccgaacaggcccc

SEQ ID NO: 223055 - DNA, 1345 bp, Cannabis indica
attcgtaaagtggggcccacatcctatggtcggccactttaagacgggtttttccatttattttttccaatattttaatgcctaataatgctaacctaaacctaggtggttgcctataaatagatagtgatggctcacactaaaagatgatgaaattcaagccatcagtcaaaatttcctgagccatcactcttgctattttcgaaccaccttcctctctttctctcttcatattttcattccctttagtgatagagtaagtgcccacacacatcaagtggtactcaatcatagtgtgtaaggctgtgaagaatccagtttcaagagaaggagattcggactcagatcttggtgatactctgctacagacaggatacaagggttagagatctgagtggaatgagacattattattccgctgcacccactgtaaggtttctgaaactttatatgtgtttatttacattgttttagatattcatatttaggatgttaaataacatacatggtggtaaatctagatcttggtaaaacatattccaacagaaatctcatgcctttacaatcattttgggtcctatttatagagaaatatggctcataacacttggaacttttgtgtaccatttagttgatttagtggcataaaaaactgatataaatgaggtaaaggtagagagagtggaacatgtggacatgtggtgcgcttttattactggatttatgcatgcttcagtgtgtgatggaagggaggaacccgctaggaatggaaccaattcaatcatgggccaactttctctaaaataaaggattcattacatatgtatccaactttgattgaaaacatatatcacgtgagttcaaaggattatgcttcatttacttttaatgggcttgtgtcattgggctctaatttcatatataccatttttctaaatctgaaaaaaaaaaacataaaattaaagtaaattaaatatttctaataaaaataaatttatcattaaaattatgaattattcaatttatattaattatatatgcataattaaagacataaaatgtaacaatttgagccttaatcgtgttttaatttttatacacttaatctccttatcttttttttagtggtaaaacccccttatgtttatttttcttttcaaatttgacactccagttaaatattaccattaaatatcaattagatgaccactgtatacacctgtgtatatgtaacagtaaaacctcgaagtcgatacaatagtaattcagttagtatttaacagtaatatctaactgaaactttaaatttgcaaagaaaagtaaacttaagggggttttgccacaa

SEQ ID NO: 223056 - DNA, 1688 bp, Cannabis indica
tgggaaccaagacccacctttgttaagttttttggcccatcaccaatattcacatcattctccatcataagacactcatactctgccacctcattattttaaccagaatttccatgttccatgcgtctccttttggaatctatgataattttggaaatatcttctccatccacctcagcattaactttgtcaacttgttgcatgggacaccctttccctaatcgtggaccaggtacaacatcattttgaacatccacattctttccttttacaccactcccaggattgatactattgccattaaccatggaatcaatctccataattttagccactgaatcagcctccccctctgtcgccacacatccagccggactcttctccaccatcgcctgctgctcggaaccagaccgcagccactgtgtaccgatttggtagtgtcgtcttctcaattgtgccttcatgccaatgccataaggcttaacaatttgatcaatatcttgatcgaatcgtttagcacaaaacctttcagaatggcctataatgccgcaaataaaacaaaacgttgggagatgttcgtattgaaacatagcccatatccactcaccattttccttatacaacttcattcgtcgctttaaaggtttctcaatatcgatcgtcgtacgaaccctcaagtaatccctccaaataccaacaaagttcttcggatccgacttaacataatttccaacataactacccgcactacgcaccactttatccatcatgaacccagttttaagattatgaatctgcacccacatatcgagtttgtgcaaatgaaccgttcttggattctcaccactcttcaatcggtggaatattagaggaaccttattaaaggtccatggactaccatcaatgaccatttgtatatcaatttcatgataaaattgaaaaaggtaaagatttgcttccaactcttttacatacacacctttcccgggttgccatagagatgccataaggtgtctcattgcatcgaaatcaatagaccttcctgtaagaaacttccctacaaggcaccacctatcgtcaaaaatctgctcctcaccctcactctccccttcgatcagaacaccttcttcttcatcatcaatctgaaaattctcatattgatcagcaaggttacccaacacgtgactgctagaagccataacaaccgaaagcaaaccacaactggaagtaactccccaacaaccttaaaccgtagcagtaacaacacaccacacacagacaaatcctgtagacaagaacaaaagaattctcaccacctcatacgtataacacactcaaaagagagagacatatttctattgaatcatttaaaattgattgtttggattgttacattatttagtcttttggttatttgactttaaggagttttttattttatttttctttaactaaatttcttcccttttcatgttttccttttgacttttgatttatataaatatatatatataaacaatatatatggtatgattgaatataattttctttttaaaaaaaaaaaacgtaaaagaatgaatgatactgattaaacgtgacaaaaactaatccacattaattcaaacttaataaaaacaattatcacaaaactacatcacgtggtagtaggtcgtatctatgctttccct

SEQ ID NO: 223057 - DNA, 1844 bp, Cannabis indica
catacaacgtactatgcagtacaatatacttttcttacctttaatccaggttcatacatgtcggccaacctaattggagaactatccataatgatctcggccctatgtcacaacaacgataaactaataagtgtttatcccaaaatactgtttaatactcacataatacaatctaaggttttctaccgaattccgtggtataaatacactaaaataaaacttatattttggctctaaaatatacaaaatactggagagttcattgcaagctttgaaatggtatattgaacgtccaaaacggacactcaagtcaaaagttatgatcctatgaatttctaaaaactatgaaacacgaaaatctcaacttttgcactcaccgaaatactactaaaacttatccaaataactccaaacctcacaaggcacatataataccataaatattaccatccttatgcaacaaaaattaaaatcgagctcttaaatgaaaaatatgattaacgttcgaactaagctttaaaaagtttaaaattcgatttctaacccaaaatcacctcagttttagcaacaaaacatcggaactagtcccatgactacccaagaacaatcctataaggtcagaaccttcataactattctaattcacaaaatccctatacgaaactaattgtttttaaacttaaaacgaaattaaaccataccttaagctttccctcatcaaggatttgctatcttgctactaccggagcttagatagttaggttttggattgaaaatcgaagaaaataaatataggggaagaaaattttgtcgaacgaagaagaacgagggtttcattattcgtttcgtttatgttactttaacttatataatatatataaataatattatatatactgtaaccaagattaccgattatttttatgtatatataaaaataatataacaatgatataatattaataataatgttaataaaaactttattataatagttatcttattatttcttagccactaagaaatctttatttctagggtatttggccaacttcgagtatcctaaaatactccggtatttctataatcaacttgtcccaataattccattaatatttctaaataaaactgttgtgacatttttagcctccaatcgggtctttagggtcgcagaacatgaaaatatttttatttcacaaataacccttattatttctacgtagttcaaataaatctccgtaatatataaattatgtttatatatccacttatcgagtcctcagggtcaccgaacctgagaatttttttatttcacatataactcatattacatcaacacatgctacataaatcttcgtaattaacaaattacgcttatttacttacttatagcaaaatttaaatttcatgctgaaataaattagtagggtcataatctcacttattacttaattaacccataatataaatataaaccctaattatttaccattaggcttatcgggatattacaaccatcccctctatatagaaattttgtcctcgaaatttatttaaataatttgggatattagccccgtattaatgattttaactctctcttgctatttttctatagcactttgtgagctagtggaattgtctcatttcatagtaccttctttttcctgtccaatatttttcccatataataaatgtaacgccctaaataattaggcacgctacccaaaatgcttaggaaaccctaatcccttaatcgggattactaattaaaatagcgcagaatttaaagttttatattaaacagaccaaaagtaaacttgtaatatatttaaacttttcaa

SEQ ID NO: 223058 - DNA, 1920 bp, Cannabis indica
aatcccaaatgcctgggaaaattcatatccagcctcccccgctgcagccgataaagtctcaatggcttggctcgaggaggcagaagcattagctgtctcaggaggaggtacgttggtgttgggatcgtctagaggaggaacctgttcttgggtcttggtatcagagacctcgaggtcaatgggctcagacaatgtcttctttttatgggcaatggttttcctttgccttttagagggcaccacctcggcatttgtaggaactcctgggttggttcccctcttcttccctttatggtccataatatcttcaaaacccatgcctgcaagacaaaatcaagtgttacaattattaaaaaggtagatgaaaaaggaaagggggactacaattttccacctaagagatttatcaaagccactagaagatgagctatcactataagagggggtagaaggaccgtaatatccactaaagtccctacaacctataatcttgaatatatcaaagggctcgattggttttaaatcccagctcgcgtctatatgacttgccctatctgtcatggtgccatactgctcggctataccataatatgactcgtgacagttaatctggacgtggaatctagggtaccagttgtcaaacctatgagtaactcgatctacgagaagggaattccaaatataaaaattaaggtcggtgtctcggaaggtgactaatgtgttacgtttagccctaagtactgtgggagaccaaccacattgattaccttgggatgctctttcaccgacttcacgagggatagtgttttgaaggtattgtgctcgagccacaccatctcaggccttatcctccttcagaacgagaacttgctgccaagaagaatacttgggaaatttataatcacaagtatactccttgtcagtaagaaggcccaccgatctcagattggcctcgtttaagaggaagtggcatgacctaagaccatagggaagaatcaataggtgcctctgccgactaaccatctcgggagtagtgtaaaaaaacaaacaaaacattggttataaaactaaaagcgaaatgacaaagattagttcaactgagcatgaggaatataatgacttacgaattctgcgaaaggcagttgtgccgattggggaaaggccagttgtccggaagaagtcgtctttgaaagacactttgtttggcaggtccacaataattttaggctgactgaagtgggagtgtcctgcagcatgcttcctcactggaacagccttaaccgagtagagatactcgatttctactaatgtaggacactcccacttcagaattttatacaaaaccttcaaactagcgagaattctgtaagagataggagtcagctggaatggggcaacccaaggtggtttatgtatcctttgaagtagtcacaaagagggagtatggaccccgcactgatatgttcaaggctccaagcgcccatgccggtcaagccactagtactggtctcaccactggctcttgggatattgcctaagagacgcgcaggagggtaaaaactaaactcaccctctcgcactgacctaacttggcatgcttgcccaagttagattccacaggtcttcagtatatcacctgtgtagcctgagatagatcgcaccttcgattctattaactcagtttcaaaggtgacgctgggatcctggggagtctttgatgtacgtggcttgggagacattattttaaagtccaagtcacctggttcaaaagaaatcgtgactttgggtaaaaataaaggctttgccaaaggaataaaggacatactgggaggttctggccaggccgcatctcgcaagaaatggcgtttgcctttgatgatttcttgcaagaagaacttgtggcaactagcattatcttcc

SEQ ID NO: 223059 - DNA, 1987 bp, Cannabis indica
atggaattttttgccaaaagtacttttccatcaaaacatatcaaaattaagtaagaaaagccaccaagtggtatagaaaccactcaaataaattgtatttccaacatccatttatcaaatacaagtgagaaaaatcacccaagggtccataaccctttatgcaaccactgccacttttttggcaaaaatggtggcagtgctctcttaaccaattggccaagaatcaatgtgaccacagtagttttctagcatccatatgactgaaacaagtaagaaacactatccaagggttcccataagccatggccgaccactgccacttttcggtcccaactggtggtagtggtctcccgttagggtttcaaacgtcgaaatgaggttttgtggtcccaagacccgcaaaatataactcaccatcaaaaaacaagtcaaaacacaccccaaggggttcgagaatatgcatggccgagagctgccatttggccgtgtcattgctcgcaattggagtaaaacaacacaaacttcccttcagtaaaacatgcataactctctcaatttttatccaaatgatctagttcaacttgcactggaaagatattttcaagaaggatctaagtgtgtctcatagtcatagcttaattctaaagttatcagattcaaaattggctcgcaaggcaggctggtatactttactcgggtttgagtagtgtaattaagtgtgggatgttggagaaccatgacacaacccatgctgcattatgtgcgagaaatggcacacaaaaatacatgtttccaatacttctcaccaatgtcatgaattccaagccgagaagtgacatcccttattactccattttaaattagtgcatctctagctgaaaataactattttcccaatgtttgtgggattttggcctagaaataaggatagttttatagatatttatttatttataatcttttattaattattgggagtaagatatgagatttgttaatgggacaccccgacatgtggggggtcattaacaaaccctatggcctatataaagagagtaatagactaggataaggagatcgcttatttgattattggatgactgctaagaacattacttccctttcttcatcttttatggacaccaagcctctacaacttaaacaccattgacatacacagtttccaagaataaggaccattctcttttcttacttttattggtttattattcccaagaaccttacaaccaccacatttatcagatttgtgaatattaagtctcccatgagccttgtgttcataagactcgttacagatttcgcctagaaatctattgttgtattattatccacacactcttgagaacataactctggtgtgtcagatctaattaataaaagtaaaagtagacgtagccccattactatcgcgacatggggatgaactactataaatccccgctatccattttatttattgcagttttatttagtcaaataaattcattgcagtcctctttatttttacaatcttcttagattagttgaccaaaaatcgcgtcaatagtttggtgctttcattgagagcgctgcagtgaaatttgactgttttccctttcaagaactcattaatttatctttttcacaacaatggtgttgagtaccaggaggaccaattttgaggaggacactaaaatcccaaggggagaagttaatcaaccctatacgaaggaacctttgtcccaccgcagccacatggagaggggaccgtctaggcgctgagaaaagaatcccatgttgcctatgccaaaagatgagggacaagtccaagactgtgaaagctcttcatctccatctaaggagcgcccaccagtcaggtccatacctatgcatgaagtgttctaagaaaataaaagtgttgtgcgtccagttggtggaaagcctacgccacaacaaagagctccaagagcaagcccaaaggcatggg

SEQ ID NO: 223060 - DNA, 1493 bp, Cannabis indica
aagaagaaaaagaagaagaaaatgtttcaagtgtaaaaataaaaaaaaaatttaaaatttttccatgacccattttacaaaaactttttcaaaggtgagtccacatgcacactgctgcaatcaaattccattgctcactgttctggtttcaacttaccaactttacctacaatagataacatctagataaggcataaaagcttaggaaatcaaccttacatgcataagataagcaatatacatctaattcattaccagagaattacaattaaagttggaaaattcatcgaccttatcatttacttagattaatgccaagacgtaaataacttcccatgaccatacataagagcctactttgtaactttgagagcttcccagcttctctactctataacccaaattatttgcaccttttcattataacataacttgggaaactcccgtctccctaagtttttactaattccttatacattcaacagttcaacaaatcatagttcaactatgttaatgcgaaaagagaaaaaggcagaatgaaaattgtattattgaatgaatgaataagaactattttacaaggctacatatacagggcagatcaggggtgacacatcaacccaatttaacatgtgcaaaacaccaggacaagaacgaactgactcaactaaataactaacctatctgacatatctaaactaaaataaccaattgaggataaataggagaagcagttaggattagtagaaacagctgacttagtaattctgatagccccccctcaagatggacggtaaatgtcatggacggacatcttggcaatgtgagaagagagtgtagtagaaggcagcagttttgtaaaagcatcagcaagttggagggaactattgacagggatgagtcgtatggaagaattcttgattttgtcacggataaagtggcaatcaagttctatgtgtttggtgcgttcatcgaatgttgggttgttggcgatatgaatggcggagcggttgtcacagtagataaaagcaggaccattttgttgtatgtgaaagttgcgaagtagatattgaagccatgtaatctcactaccagttgcaacgagagcgcgatattcagcttcggcggagcttttggatatagtaggttacttcttggtgctccaagatattaggcaatcacctaagaagacacaaaaacccgttgtagagcgtctagtagttgggcaagaggcccagtccgaatctgaaaaagctctgagatgtaaggtggagtttgtgctatataggagtccctggcctggactgccttttagataccgaattaaatgatggacatcttgtagatgtggtgtgcgcggcttggacatgaattggcttaggttgttgacggcgtatgtaatgtctggtcttgatagagttaagtagagcagcctaccaattagttgtctataaggagagggagttggaaaggggttcgtccttgttcatcat

SEQ ID NO: 223061 - DNA, 2899 bp, Cannabis indica
gttctggttaccgagtccaaccttattatggcttgaacgcataacccttaactcaatatatataacacataattaatggtgccactgcactatttgtctatttgctatagacatgcgtgttacgctcacacgcctatatatgtctatgtggcatagacctacgtgttgctctcacacgtctatatacaataaggccttagtagagtttacctcggttttggttaccgagcctaacctggttatgccttgctcgcataaccctattcatatatataggtaattcatacattacgttctttcgatggtttatcctggtgatatataccaggtctaacccagttatgtcttatacacataactcttaaaatacatgcgtgtattcaatatttactataacatataaaatcttagggtaataaccctaacttgcacactaaataatcactcatataatacattactatatattcaaataatattcccgaactcatgttttcactagattaataatatttccatatattaacgctttcttaccttcataatattctagggtaataaccctaaaccgcattaaaattaaactcaaggtactagtttatcgagtctagcttaattataccttagacgcataactctttattccaagatatttaacatggcataacattcaacatcttttaactactagggtaataaccctagactaaataaccgctcattttagggtaataaccctgataccggttctgaattaatcacaatcacaacatataatatgagcgccactgcgcttaactctacgtgcatactactgtcttacctgatgtctcacaaaatatagagattccaaatccccaggtgctcctaaccaagtgctagtaatcctagtcacaaattccaggattcacacatatagggttaattcctaattccacatttacaaaatataaacttggcattcaaaatataaatattcacatatagctcgaaacgagctttcccacggtataaagaacacctaaatcggagtatgaatcacaaagttatggctatttgaagtttgcataaggatccgcccataaagaaaagagcgggtcgcggcatgcaaaatccatgtcgcggcacctgggttcaaaacccagaaaaaccagcaataaaccacgaattttagcccttaaatcacatccaaacaacccaattcttaaccaaaactctcaaaccatcaaatagattttaataatcatacaactagtttaaaatacatatttcatgcaccaaatccaatattaatctcctaatttcagtcaagacaacaagcataaactagcttctctcaagagctaacaccatcaaatctcaagctcaataataagaacttcaaatctatacaaccttatattttccagcaacaacaccaaaataaaacctgaattcaagtataagaaataccctaaaattcatcctatagttcactcaaacacaaaatcaaaagattcaagtaaaaacatgcttaactcaacaagagattactaacatgccacctaagatcattatcaactcatttcatgcccttgcaacaataaaattcagcaataatttcaactaaaatcagtgaaagaactacctcaattctttccaactactagctcaaaagcttccaacaccaagcttgaaatcaagctgacctcaaccaagaaaatcaagagcaaaaatagtttagagagaagagaggaggaggtcggtttgggctgaaggtaaaatgcagaaaatcaaatctcttttcctcaataattccattttacaacaagataaatcccaaacaaattaccaaaatgcccattgggccatataacatatacatacacaattaagggcatttaagtcacttcacacataaataatcccaattaattttcagatttctcaataataattaaaatgccaataattcaatcccaattgcatttcaggcatgaacccggtttggctcgaaatactcagttgtgactataccgcaccaacctgtcagaacacacctgaaaaagacataccgcgtgtacaagagtgtacacataaatagtccatggtggcaattcaaattttttatcacccaaatttcatagtttatgcttataatgactatctacagggtatttcgaccctaatcaatggtctaatcgcaattcaaaatattctaagatcaacaattacactaatcagtagtgttcttgttgactacaaaatattagcacgtgagtctataatatttactctggatataaattattactcattatataaatgctccatatatatacaagttagtttccttaatatattgctacaaagttcccatttattgtatgcatatattattctctatatatacaagtcagttcctcggtataaattattacttattggatgcatatattactccatatgtatacaagttaattcctaaaaaattatattaagtttacattttagatcctacacaaatatcataattttactaaattgctcattcattaaataatattaaactttggagctaatattttgtggaataaatcggttgtagaaagtaggggtgttcatcaaaccgcccgcaccgcaccacatttatgtgtatgcagtgcagtcgcggtttgaatttttcataaacagcgcagtgcggtgcagtgcgatttgcagttttgaattgttaatacgcggttcaaaccgcaccgcactgcatattataaaaatactaattttttatatttatttaggtcacatatgtgatggcccaacctaagtgtaacaccctaacatttagggacgctacccaagatgattaagaaaccctaatcttccaaacgggattactaataaaataagcgtagaaattaaa

SEQ ID NO: 223062 - DNA, 1937 bp, Cannabis indica
gataatccaataaactatatgtatataaattgtttgtcagtgacacaactatattgggataattaatgtcgaagtcgttagagtgtaaatttatttctttcgaccaatattattaatagtcttttatgattatatatatacaatggtctttaaattttatttattaaataaagataaatactctattatatataaaatattgtatatagataaataaatcactacaagtgtaagacactattgctaaaagagaatatggtaagtgaaaaaaaataataaagataaaacaatttaaacaaacatattttattaaattactaacataaaaataaaaagataccctttattaattgaacttggtacctaaatataaaagatagatagtttacacaaagtgttataaaaatataagtagcgtttggtaacattttttttaattaagctttttgtttttaaaattaaaaagtaaaaatatttttcaaaatcatattctataaagctgtttttacttttaaatttttaaattgagaattaaaattctaaaaaataaatttttacaacagtcttttttcttaatcaatattttagattccgaccagatccctacgcaaatttccctacggccctagcgctgaacttagcctctaacccaaacttgaatcccaccctagacatagacccgatttaaataaaatcaaaaaataaaaaaataaataaactttaccgaacacatctttgatttttgtttttacaattgaaaaaccaaaatagttacaaaacgtatttttatttttcaaaaataaatttttaaaaacaaatatgtacttttattttgtaattaaaatattataaaataaaaatataaccaaacaatagcataaatcgttataataaactcagtacaataaaaaaatttaaaaatataaaataccatataaataaaaattggacaaacaaaaacatattatatttttcaaacatggttacaaaattcgttatgagtgaatttcactttatattttgaatcaatgcatcattactcgtaaaatatgatataataatgatgtgcgtaatatttagttagaccaatatcgatattgacacatagaaaggtactaggccccataccatttagtatttctcatattaatattgtgatttgtgaatgatactcctaaaagtggggcccacctgagtagccatgaacttggggtgttcctttaagattgtttattattatctcgaaatgtaacacgtttttggtcgttaataaatatgccctcgataattggagagtgaataaaataaggaaataaaatgacaaatgagtcaatggccctttcattgaaaacatttattagttgccagttgggattaaattgggactggaaaaatgacaggggcatgcagacaaaagtgggtaattagaaaaatagaatgattatttaattagtatatgatgttgagatgagagaagagagatccaacttcaaatttttaaatcttacaccttctccattttgattcctgcatgcattatggactaccagagccacatggtgactttcacgcttctcttcttaaataaatatatggattatttattaaagtacaaataaaaataaagtaaccccttaaacaaaaatcaaaatgtatatctaatctgtaaggattttttcaaattttttttaaccaaaatgttaattcatatataacatcaacaatcacatgtgaattggcctattagggagttgtaacccacatggtgttttactgtagttcaaacagcaactgacgtatgctaagaaaaaaaaacagcaactgacgcaggattattatttttaaatttgtacatacgaattgattattattagaaaaatttgattttttatggttatatttggttaaaaaaattttcttaaataaataataactaa

SEQ ID NO: 223063 - DNA, 1543 bp, Cannabis indica
ggctattctaatagtatggacactaggcgaaacaccaggagtcagggtaattcggtcaggtctagtggtggttagggaagtcagattcccccaaatgttcatggccgaggtagaggccctaggggcagggcacgcgattggggtgatgttaacccgccgcaggttgcccaggaatgggaaaatatgtttgcggcaatgcaagccagaatcaacaagcaagaggaagaaatcaaacgcttgaggaagcagggtgctcttgcaatgcctgctccagaaattcaggtagctcctgcccctgctgtacaaccaggaccggatgctgtagtgaaccgagtggaaccactgtatgaaaggttccacaagcaggcacctccagtttttctgggaggtctcgatgtgatgaaagacgagaaatggctgacagtcattacaagaattctgaatttcatgggcatcaccggcaatgagagagtggcatgtgccacattccagttccaagaggatgccctgatttggtgggacatggtgtccctaacttgtgatgttactactatgatctggaaaaaagtttcaggaattgtttaacacaaagtattacaatgaagcgatcagaagtgcaacaagaaaggaatttactcagttgacccagaagaagaatatgagtgttactgaatacacaactcagtttgatggtttggctaggttggcctcggcaattgtgccaaccgatttcagcaagaaagaaaagtgcttggatggattaaatccgaagataaaacatgatcttatgattactactgttgacagcaccagtgtaacacccttctagtttaggcgtgttaacgtggtttttaacttaactgtgcagctcgttgctattcaatgagtttattgaagatcgtgattaattaaaaaatttcttaattaattataaacactaaaataatatacttatattaaactgggatctcgttttacaaaatatttacaaccgtttcaagtgcaagtcaaaaaagtttgtcgccaagggactacacaaaataagccatgctgtcccaaagatcataacgctccaagcctaatcgtcccgacatgtacaatcttcatatactcgctctcacggctgctcaaccttagccttgcccttacctacacatggaaatagcaactgtgagtcaacagactcagtaagaaaaggataaataataacatagcaataacccagattataatcaagcgcccatacacccaaccataaccctattcctgtgtccaacacggtgctgagtctagaacgttcatacgacagtactatcaaccataatatcagcctacactcaatatgctagtcatactctagccatactgatgtgatagcatcgataagtatctaagccaaacatacatctatcagtatccaatgtaactctatatatattgataccgctatcgatgtaatctaataggcataaataactgttgggctttgtggcctaataaaactctatttcaatctaatctttatcattcaattatcaataaa

SEQ ID NO: 223064 - DNA, 2271 bp, Cannabis indica
tctagggttttctaccgaacctcacgatgtaaatacactaaaataaaactatattttggctctaaaatatacaccatattttagagatcattgcaagctttgaaacggtatatagaatgtctaaaacggacacccgcgttaaaagttatgataaaaatacgatttctgatcttttaggaatttctaaaaactataaaactcgaaaatctaattttcgcactcaccgaaacactacaaaaacttatccacatcactccaaacttcacagggcgcatatacaccataaatattaccatccttatgtattagaaataaaaatcaaccctttaaataaaaaacgccattaacgttcagactaagctttaaaaagttccaaactcgatttctaactcaaaataacctcaaattcaacaagaaaatatccaaactagtcccatgactatccgagaacaattgtatcaggtcagaacttttataactattcttattcacaaaactcttatacgaaatcaattgttattttaacttaaaacgaaattaaatcataccttaagctttccctcttaagggatgtgctatcctgctactactggagcttagatcgctaagttttggattgacaatcgaagaaaatggatataggaagagaaagttttatcgaaggagggagaacgagagtttcgttcgtcgtcgttcttctctactgttatatatcttaaaactttatatatatatacacgaaattatttttgttttttatatataataataatataaaattaataataatattaataaaaattttaatattaatagttatcttattatttcttagctagtaagaaatctctatttctaaggtatttggccaacttcgagtaccctaaaataccttgatatttctaaaatcaacttatcataataatcccatcaatatttctaagtaaaacggttgtgaaatttttggcctccaattaggtgtctagggtcgccgaacatgaaaatatttttgtttcacaaataactcatattatatccacgtattttaaataaatcttcgtaattaacaaattacgcttatatatccacttatcgagtcttcagggttcccgaacctaaaaatatttttattccacatatagctcatattacattcacacatactatataaatccttgtaattaacaaattgcgattatttactcgcttatagcaaaatttaaattttatgctgaaataaattagtaggatcataatcccacttattacctaattaactcataatataaatataaaccctaattatttactattagacttatcgggatattacagtaaaacggtaggctatttcttagatttcgatgagattagtgactgcccaagaaaaacacagtagcctgaaattgatctttgagtgtgtgtgcaagttccccaatcagcatcagcaaacgcttgtagttgaggtggagatgagcaagatttggaaaaaaatagaccctaccctggtgaagatttcaggtattggagaatgcgataggcagcaataaggtgaggctgtcgaggagcttgaaggtactggctgagtttattgactacaaaacttatgtcaggtcttgtaatggtgaggtagattatttgccgattatgcttcggtattgagttggattttacggtaaagtaccagtttcgttgtttaacttaatgttgggttccataggtgtggttacaggttttgaaccaaggtatcctgtatcttcaaggagttgaagtatgaatggcctttgagtgactgatctacctttgttgcagcgagcaatttcgaggccaaggaagaagtgtaaatctccaagatctttgagcttgaagtgagcatcgagagtggatataaaaatttgcaatgctgcaacattgttagtagcaatgatgatatcatcaacataaatcagtaaagcaatgaagacattggattgttgtcttgtaaataggtatggtcattttttgattgagtaaagtcctgttgaggtaatgtggtgctaagtttagcatacaactatcttgaggcttgctttaagccacacaagcttttttcaatttgcaaacaacatttttaggtatcactacttttggggtgtaaccttgaggtagtttcatgtaaacatcctcatgtaattctctttcgaggaatgtattgtttatgtcaatgtgatgtaggtgccaattctttatggtagcaagagcaaaaagaagttttagggtattaaattttgc

SEQ ID NO: 223065 - DNA, 1364 bp, Cannabis indica
aaacaactctttcggctggcttgatttgtctcttgaggatggtcccttacgctttgttcttacaaagattggatgacttaaatcctcccttttgatagtagttgttagttgaactggtagttttgtttctagtttagattcttgttagttgtttagactttaattagctttggcctgctttgtttctttctgtgttagtttcctggtaggccgtttggcctggtttgttgtttgtgttccctggcgcttccaagggttccattaatcaaaaaaaaaaagaacgataaattgagtgttaagtttagaaatatgaggacatcaattttatataattgaaatataaaataatgcattataaaaaaaaattgattcataatctcacacttgtttcttcttctacgtaatctcacacctgcttttttttattcaattcataataaattttttctataaaaaaatatttttcctatattctgcaaagtaaaaaaaaatttcacatatatatagttatgaatatatatgtataaataattgaataagtattttatttaatttatatttattattatgtgtattttaaaaaataattaatttaagatacatatttttatagaaaatttattaaaataatagtaaaatattaatttgtaaatttatactttaataaaatattaaaaaatgagaaaattaaggaaaaatatatttatacatataatgtgaaaatatatatcttaaagttgttagaatagtttgagaaaaagaatataatattatatatatttgaaaaatatcctatatagtttaaatttaaatataaatataatttgatttttatttatcaaaattgtttatttaaattattattttaatttgaaaaagaatattgatactgttttcaaaaatatcttaacaacataaattttaatttttcacaactttactgaatttatattcaaacttttttttttttctcttcatttttgaattttattgctaaacttgaaaagcaagattgtacataaattgtattgagctttgtgctcaaaatttttatctattgtttgtttaaaatgaagatgcacatttgaatttctacacaaagttttacaagtaaattatatatttcactataattttagtaggaacgttaaatgtcaaccataattcatgataaattttaaagattaaagtggacttattttatcttagtgatgtaacttaaacgtatcatagttagttaataagataaaaaaaatacaaaaaaataaaatgggtaagtaataacaattagtgaatataaaaatctatcttacttatgcgagagaatataaaaaataatataagcttatatatatgtattgcca

SEQ ID NO: 223066 - DNA, 2321 bp, Cannabis indica
acatttaatgaccatattttccactcttcttttgaattttaccagtagattaatcatctttctgatctaacggagattaacccaagagtatataaagggaaaaggaaacacctttgcattactttcgccattttaaaaaattttggaattttttcgagtttttctgcaaaaaatcgtacccagattattttgaaaccttgcatgccatctttgtcattggcatttttcctacgagttttatctgatttaattttcgacttcaagtattcagagggatcttcaagacgttcggggattcgcagattgcagagtcgttcatcgtcccaaaacccaacttcaaacagtaagtgacttttctccttattatctcacatgcttattatgttgtgtttatgggttcaattactatattcttggtcagcgtcgctgttatctcatttggttttttagcaattttttgggtcgaactgtatctgggtaaatgttagggtttagacagtacgtaggttttctaaaatctccaatttaccaacttttggtttgataaatttcttccaggaattgggattgctttctccttgcaacaatgtctcaatctggttcagaagtttatcatccagaagattttgaaattgagtaccctactgagattgccatcccttacaaacccaaaattttagaatccatccaaattagaggtaaatgatgtcagaattagagaaaacttagtgaaaattcattaggaagacattgcaagtcgcagcttcttgcaagaaattattgaaggcaaacaccgtttcttgcgagatgctgcttggcctgaacctcccagtgtgtctaatattcctttggctaaacctctattttacctaaagtcacaattacttttgaaccaagtgacttggattttgaaataatgtctcccaagccacgtaaatcaaagactcctcaggaccctaacatcaccttcgaggcagagttaatagagtcgagggtgcgaaccatcgcaggttacgtaggcgattcactaaggacttgaggcattgagtataagcgagactagagggttagattagtatgagccgacaagtttagttgttacccacctgtgcgacttacacgtgagtcctctgagggggccactggccagactagtacaagtggctcgactggaataggctcttggagccttaagcacatcaaggcaggagcaataatccccctgcgagattatttcaaagacttcgtaaaccacctcgggcttgccccattccaactgaatcccgtctcctaaagaatccttgcaagtttgagtgttctatacaaaatcctaaattgggagtgccccactgccttggaaatagagtatctctactctgttaaggctgttccagtgaggaagaatgcggtgggaggtttctactaccttgggactcacactggtgatcgcaagatcatcgtggatttgcccaataaaacttcttttaaggacgacttcttctggacgaccggcctttcccccatcggcacaaccatttttcgtataattcgtaagtatttatttgcattagacttggttaaattaatccatgccttttattctagtttttctgactgcaaatttactttgttttcgacaactgtctcgaaaatacctgcccctacccctaagatggccgaacgacgcaggctcttattgactcttccctatggccttaggtcatgcgactttcttttaaatgaggttaatctgaggtcggtggacctcttaactgacaaggattttttttgtgattacaaatatcccaagtattcttcttggcagcaggttcccatcctagacgaggagaaagctcaagatcgcatcaggctcagtacctttagaatactgccccttgggaagacggtgaatgagcatcccgaggtaataaatgtggttagtcacccatactgcttagggctgagcgtaacactctagttacatttcgagatagccgctttaatttttatatttggcatcccctcctcgtagatcgcattacaaataggtttgacagttggtatcccagattccatgtccaaattagttgtactgagtcgtactatggagtagccgagcaatatgagactatgatggatagggtgagtcatttagacgcgagctggaatttagaactataatccctatgatctatttaggatcacaggttgtagggatgttagtggatattatggtccttctaccccatcttctagtgatacctcgtcttctagtgactatggttgtaacaccctaactaacataggcgtattacgtgatt

SEQ ID NO: 223067 - DNA, 1295 bp, Cannabis indica
aaatcacgtaatacgcctaagttagttagggtgttacaaccagtttctatatttatgttaaaaaattggtttttaattaatttattgttcaggcatactatcaggatatatcagatgatggtggtgggttacagttgtccgttcatactggtcaagctgaggtacaagctttttacatttttctcccttgttaaaattttattgtttgttctaactaattttccttcaattttttaggagcaaaaaagacagtttgaattttgaaaatatgtttatcgatcctgattttcttaagggtgtggttgatagcactgttaagagtgcttaaaagacaaatgatgtttcgtttcatgatgatagtgataagttgagtttggttttgtacgatgaatcatatttgtctccacagattcaaaagaggcagccaaaaccaagctctattattttgttgccatatgttgtggactttgggtcgtcttcatcttcaaaggaagagttaatgaggattgtgcaagatgataaatttattgtgcatggaatcaatccatttaaagatgaaattggttataatattggtcctgatcagtgcgttaagttttccaattttattgatgagaacatcgtcatgaatatgggttagtatattttgtatatatatttatatttttcaaatttctttttatgtttttttatatgtgattgactttattttgtgtttgttgttgtttgttttgagcagtgtaaagaagtactccgatgcggacaacttgttatcgccacctatggatttttcttttattgaaatttccgagaagatgtggttctaccagcttcatgattgtggtgaatttctgtgagacagtgtaagaaactatttttttatacttttattttctgttaattttttttaaatgtgtttgatgtttgtttagtttataatcttgttctcgtttttttgcaaaaccggtttctaatacatgtttttttcgctgtttgttttatgttttatagcatttagatgtggtattctattacctaaggaagaagataaagcaagatgatactttaaaccaaagggttaccactactgattatttgtttgatcaagttatatggaatttttacaatcagttcttgaaatcgggttctaacccttctaagattgattttgataatgtcatttctagatacattgttggtgagtatttgttttacaataatccttgggcgcttactgaccatgttcttgtatatgtcaatattcaaaagcaaaaacattggatattggtccattt

SEQ ID NO: 223068 - DNA, 1441 bp, Cannabis indica
tcccagatcgttgtatgccaagtaaacgggaaatatctggccagtggcggacgtttggctagatatctcaccctaacttgcgagttgctacagaaattcaagaaagtgattgtttctcgagtaccccgtgctcataactctcatgcagacgctttggcccgtttggcctcaataagagaagctgaattactcaatataattcctgtcaatgtgttaactcacccaacagtaagtcgaaccgaagtaatggaaataaacactgccagagaagtcacacggataactcccgtaatggattatttggaaaaagaaatcctacccaaagataagatagaggctagaaaattgcggtatcgagctgctcggtatgtcatttatgatggcaagctttaccgcagaagcttcagccaaccgttgctcaaatgcattatggagccgagtgcgattacatactccgtgaagtgcatggtggaatctgcggcaatcacaccgggggtaattcccttgccttaaaaaataatgcggcaagggtattattggtcgacactccgagtagacgcctcagactttgctaaaaaatgtgacaattaaactccataacaagtccttcgcccttcgtagtttgaggcatcgacttaattggagagttacccaaagggaagggcggagtcaaatacgccgtagtcacagtcgattatttcaccaagtgggctgaggccaaagcccttgcgactattacaactgtcaaattacgagagtttgtgtataattccatcatctgccgatatggcatcccttacaaacttatctcggataatggaaaacagttcgattgtatggaaatgcgccaagtgtgcgatgaattgggaattaaaaaagtgttttcagtagttgcctatccacagagcaatggggaaacagaggttgtgaataaaataattaagcataccattacgggaaaactcaaagaacgtaaggagttatgtccagaagacctttcgcaagttttatggtcgtataatacaaccccctgatccatgactggcaaaactcctttctcgcttttctatggatgcgaagctatgataccagtcgaagttggagcgggctccctacgaagagctattttcaacatcagtcaaaatgcgaacaagcaattgctccaacttgatcttttagaagaaaaacgcgatcaggccaatctaaagaatgcagcctatcagcaacgtactgctcgctattttaattctaagataaaagagcaaattttacgagtaggggatttggttctgcaaaaattcatgccaagcacaaaaaacccaacacatggagttttcggtgacaattgggaaggaccataccttattgctgaaaaaaaaacttggccatgcaacttatcggcttgcagaagtcgatgatactgcgatccgaagagcttgga

SEQ ID NO: 223069 - DNA, 2104 bp, Cannabis indica
aaggacaagggaaatctcttacccgatcctaccacctataggagtctcattggcaaactcatttacttaaccatcacacggcctgacatttcttatgccgtcaatcatctcagtcaattcctaacatctcctcgggtaccccatcttcaagccacacatcgtgtgcttcaatacctcaaacgtacccctggtcaaggactcttctttccctctaatacaagtcctaacatttcagcatttgctgaaacaagcctatctccatcaaatgttcaattgtctttttttgcagatgcggactggggagcttgccaagacacacgtcgctcaatttccggctattatgtatttcttggacaagctcttgtctcttggaaatcaaaaaaacagcaagttgtctctcggtcttcagctgaagctgaatatcgtgccatggccaacgcaacctctgaagtaacttggatcattgcccttctcaaggactttggaatcttccccaaccggcctgcctctctcttttgtgacaacacggcagccattcacattagtgaaaatccagtctatcatgaacgcactaaacacgttgagatcgactgccacttcattcgggaaaaaatccaacaaggctctctcaagttacttcatatctcctcccaacaaaatatcgccgacatcttcaccaaagctcttcttccatcacattttaattctattgtatccaagatgggtgtttctaacatctacactccatcttgaagggggctattaagattaggagattagttaaggttgttaagtggttatttaggctatattagttataattaattcttgattagttattctgactattttacccttattattgggtatataaaccttgctgtatcttttccattgtattgaacatttttcagaacatttcaaataaaacagagttcttctcatttctctctgcaaaccgattcaggttgctcctcctcatattcaacaacatctattctttgtaagaagaataatcctaagaagtctgcaccagcacaagcacaacattggaaatactattcaaaactttcattcaaattttccttaattaatgataatgcgtcatgggctagttaatttatataccatataacaaaaaacatatataataatctaaaagggttattttgctacaaattttaaaatgagattatttattaacatagtcttataattttgggtcacttactataatttcccatcattttttcgtcaatcaccaacccaactttgtaatttttttggcgggttaaacctaacttattttttcacaggttgaacccaacttgctatttttttggcatgatagtgtgagttgtctttcaactatgacccaacttcttactaagcgagttgaggtgagttctttaatttatgctccatattcaacatgaaagaggagtttattcgccattgtttagtctcttgataaattgttcagtttgtttcgaacagggttgggatcaagaccaatgtggcaattagggacacatttttagattgggtggcgaagtgttttcagtaggttgataatgagaaacgatgtttattatcaactttgggttaggctatttggggagccaagaatgagatggtgtggaacaaaaaggtttatggaacttatactattgttgcttcaacatatggtatcttgaccaattgagaaaaattaaaggcataaaattttgagttattacattctcttaatactaataaatattaaatttaaaataatatttaaagatttattttttattttattttataataaatgaacacgtgatagaaacttgcttaggaagaaaagataaattgaagttttttttaatttttttatttaaagcgtttacatatacataacattgtacaatttaaaattcgaacttaaaactttccacaaacacgcaccattccatatctcctatatatagccacttaagctgacctcaaatagttaaagacaaattgaagtcaacttgctaaacttttttggcatgatgagctaaactcattttttcgccaacttacccaacttagtaattttttgtcgggttaaacccaa

SEQ ID NO: 223070 - DNA, 1967 bp, Cannabis indica
ttttggcttggagaccatgctcggaactaggaaaaaggagaacaccacacaagctgccactatctccaggctagaggttgaactcatggggcatgaggagaaattgagagtagctcttaatggccagcatgccataaagggcgagtatgttggcttgtcttcagaactcatctatgggtttaagctatgtaactccaaagttgatctatcatacatgggcagtgaggctttcctgaagagcacattggctcgaggaaaagtgttattcgagaattggctagaagtggatcagatcaccgcctatctagaagggtcttcctcggggaatcatgatgaggggatggccggcccacctgctgaggaggtggccgaccaggactttgaccattaggccggccagcctgtggatgctatggctggcctagactccagcgatccaaatctcgcagcttccgattcaactccacctaaccctgtatacaagtagacaatattttcattattagtattcaacattatggctgtacaatatatacattattttcataatctgtacagcccatggccttttacttttagaacattacttattttcagccccaaggccatgttcgtatctttagcctataggccatctatttttgaacactactattgtttggcctattgcttttttatcacacattatgtgaccgactaggcggtctttaatcctggaaatcttcttatggccttgacatgtaattatctggatttacttttctttatgtcaagccaaagtatgcttgtacctgacttaaaggtaggtttagtagcttattctaagtgttaaaatttctctgtataagttctctatgctagttcgatgcattgtacggtgtgggtgccccccaactgaacatgcagacttacggtctcttggtcacttacaatccaccaagattcatagaccttacatgggatttttcttagggtgcttcccgttatatgcatgtggagctaaaaaataataactttgagaagttaatcttgttatcaagtggtttagatacaataaattgaacataaatattgttttttattcattaatagatcttttttactgtgcaacttacataaattgaatctacaagcttacataacacagtttttctctagatattaagtggctacccctgcttgacttgcatagtagatgccaccattgaagaacgttgggataccacgccaaaaaggtcgtcgttactagctcttttgtactccaatgttgagtaggtagaactgctactttggagtagtgttttgtaagctagctactgatagtatttgcgaaggtgctctccattctagtatcttggaaggaaaacgagctccatgttctcgttgtaccttcccagcttgtaggctcccttactagttatttatgtaacttgataaaggccttcccagttgggtccaaacactcctgatgctggatctttagtgttcaaaaatacttttcagagcaccaagtctcctatgaaaaatttcttattcttgacttgcttgttgaagtgccttgctaccttttgctggtaggcctgcagcttcaggtttgattgatctcttctttcttgtatttcatcaagggattctgccagcagtatgttatttgtttgttggtcataggttgttctcttgtgagacggtggcaccagctctacgagcaacatcgccctatagccataagctagagcgaatggagttttccttacggtcatcttctcagtagtcttgtgcggctataggacctctaggagtagtttaggccaatttccttttactttctcaaggtgcttcttcagagtgtccttgagggttttattgatagcttttatctacccatttgctgaaggatgggccacgacagagaagcttttgatgatgtcatgtctgttgtcaaaatcaatgaacatgtcactgttaaa

SEQ ID NO: 223071 - DNA, 2102 bp, Cannabis indica
tgagatatctcaaaggctctttggaccatggtctacaccttcaaccttcttcctctctgtctatcacaggtttctgtgatgcagactgggcttctgacccagacgatcgacgatcgacttctggtttttgtgtttaccttggttcaaatctcatctcctggtcctcaaagaagcagagaacagtatcacgctccagtactgaagctgaatacagaagcttggccaacaccactgcagaaatcatctggattcagtctttattgactgaaattggtttcaagcttcaacatccccccacgatctggtgtgataaccagagtacagtactcatgtcagccaaccctgtacttcactccagaaccaaacatatagagctagatctctacttcgttcgagaacgaatcctgtcgaagcagcttcttgtcaagcatacccctgctcatgatcaaattgctgacatcttgacaaaggctctttccagtacacggtttcttcttcttagagacaaactcagcttagtctcattggcccagctgagtttgaggggggtgttagagactctatatgagtcaattgtacattctgttatttgtacagtcatagttagttatttactgtagcttctgttgcttagtttgttatgctctgtaactaacttatctctgtatatatactgagcttgttgctcacttcaataatagaataatcattcagctctttcttgttgtttctctctttctcttgcttctctcacacaccttactatggatatatgaatagccatggatatgaattttctatagcatactttaagtaaaataaaaaatcgttcgtttgctactaataaaattaacctgttcatgacgtcactttttattttaaaatgctcattaacaatacccttttcttattatatatcttggttttggtgggcgaccattaaaaagtgcatgcatgtaatgtatattgatcagttgaggctatatgaatggccatggatatgaaattggttgtaatatggtatatatagctgccatccattagagtctttagatatggatcggtttgggtggtttcaagagaggcatgcgctagcttactttgctttttccttatataaagatcttctctcatattcatatgtatggaactttctttttctaattatgaggttgtgtaaatgtagtgttttcgatctcctcttttgggattgttgggaacatggcttgtcactactatggttggccctggtcaaaccaaatgggaaatagacacaataaaaatcaaagtttctttttcctttttatctggattcttctttgatttttagtaaaaagaaagaaaagataatatataatacaaacaaaaatcaatgtaacttcattttagtactattacacatctcatcaagatgatgttaaattgctagctatgaacaaataatgaaatgaatttctaatacctcccttacaaataaactaaggtaattaatataaacatcaaactcatatattattattttgtatagacggccctacatgaataaataaatatgataatgagaaaaattctccttacttagaaatgtcaactatataaagttgaaataaatcatcaaaattaaatatatttgaatgatcaaaatcaaacaaaaataatttgaaatttacatttctttctttttttttttagttacaacatttacattctataaacaaaaaacaaattgagcagattcttttttaagatatttttttaatagtaacctttaaactatatttgaaaaactttggactaatatgcagaatcaaaataactaaaaaacttaatcaataaacaattaataataacaagattaacaattcatgaataataatcagaaaaaaaaaatagggatgaacataattatttaaacaactagaaactataaaagcagtaaaacaataaaatcaacaccaagatatatactgattcaagtcttatagatagatgtgatttatgactctactctagttttggaacaccaccaagtcatctttattgattgaacaagaatatggtacaatacagttgagatcgaatttgtgttagattctctcaaa

SEQ ID NO: 223072 - DNA, 1336 bp, Cannabis indica
aacaacatgtttcctcttgcatatgctatagttgaaaaggaaaacactaatagttggacttggtttgtgcaactattgaaagggacctagatgtacaagacacaagattcttcactttcatttcagatagacaaaaggggttgaaaatgagtttaggaacagtttatgaaggttctgaaatacaattttgtgttaggcatctttatgccaacttcaaggagtttcctggattgttgttgaagcaaaaattatgagtttgcgctagagctacttcagtgaaagaattcaaaaggagaacgaatgaattgaatgagactaatgccgcagcttttgattggttgtccaaaaagtcaccatctaaatagaccaagtcccactttaggacttccactaagtgtgatatgttgctgaataatctttgtgagagtttcaactcagccatactggatggaagagacaaggcaatcataactctgttagagtatgttcattactggttgatggatagaatgagaaagcaaagagaaagtgtcagtgtacaaagtctgttggaagattgtttgaatcattggaagacaacttgctctcttagtcttctgcctattcatgttgttatgatagtactgcatggtcaagatatcttgtttttcccactgttctaattaagattatcaaatatgaacttcattctttatgtatatttgcttttctgttgaaatttgacttgtggttttccatgtgagaaaaggtgctgagaagcctctgcttccactggacaaggcaggtgagcatgaagagaaagagaagtctaagccagtatcatactcgtattcatttttccacctcattttctctctggctagtatgtattcggcaatgcttctaactgggtggtcgacctcagttggtgcgagcgggaagttggtggatgtcggatggccatctgtgtggataaggattataactggttggtcatatgttaattagttttatttaagtttttgtttactataaatataaatattaagccctcactcaatttggtactttgcttacgctcgtctattctatatttgtcttgctataattttggataatttgcgttgtgctatgtaaataaaatggttatggtgaatgattgaattgtgacagttgtgtgtactgttgatcatatatttcctaaatgtactaatatggtaactattgtgtgctgagtctcaatgtgtttcaatgaagaaaaactcttttgggttttgatggggaatatgagattaatgttgttgggtggccactgtttcaatattggcctacttatataattaaagataatttaggg

SEQ ID NO: 223073 - DNA, 1051 bp, Cannabis indica
ttttttttttttttttgaacacacacaagtatctctttagcaatgattttgctaccgtgaaaatactttatttagtataggaataaagaatttgtccaaaattggatttctttgcaaattttatgggctattactcacgagttttttagtcgtatctttgtcattattgtttctaaaaattgctctaattcaaaatattggacaaaatttttgtaaaaatagtacacttgtgatttttcatagcaaactttatacataatgttataaatttcttgaaagactttttttttttgaaattagcgtgatgtcattagataaaccataaactagacctctcggtcattacaatacaggttctccggtaacatggaaaccgggatagatctaaatatatgatgagcaaaggctcatctagccacattgtgagcagcaaagttacatgttcgcttaataaaagaaaaattagagctaataaaagattgagaagacttaatgaaaacaaaattggattaatataactttggtatgcatgattatagatttgggaaaaccccttaacagaaattgttgcaaccttggcagcacatttgttaaggggtcccgaaagcacgaacaatgggttcaagcatacgctcacgctctcgatccaccaatatcaaaattctgcaatgatgtttgagtttgagcaccccacaacctgaaaaatagacaagaagataactcaattaacatttgagattaaattgaatgattgatatgatacattgattttcactagagcaacagacgaaacttacttgtctgagggaacaaaacataaaacaccaattgccgtcgtcgttgatccagttgataaacggcgtgagatggtactgaacattgccatggctaatgaggaattccttgttgagagagatcagaattgtagcctacttttccaagggatacaagaccatcctctagaattcaatctaagttgcaaatgagacaaatacaaaatatagtatacgttagtattttcaaatcccaaataaaatgaacattttattgg

SEQ ID NO: 223074 - DNA, 6841 bp, Cannabis indica
tacacgagaaaaccaagtccaattaggaaaactattatcatagaatatgcagcagatgatattgtgatcgatgttggaattcgtcccttatccttccttattaccatcccttctattatggggtagcttatagccaagatatagatagacaataaaacttgtagaaacatcttgtccaaatttccaacaaggatagctctagtgattcccacaataagagaaactgtgtttaagataacaataacaaccaacggaacaagaaacatagctgatgttctgaaatcgaattttccatttcggtatagttcaactgtttcatcatcatcaactttgtttgtgggcaagaaactggcttctctcataccaattctcttcatgaaagcatccaagctcccatagagatgagatgtgattgattttatcatccataaccttagctcgtttatcactgaccgaagtgagccaccagtaatgaagacctcataagaaaattgaacaaatgaggaggcaaagatgaaaagaaatacgatgaaaaatgagtttgaagcctgttagagaagagtgaatttattgttagagaaattctgtagtgatttagatattactatttcaaaaatgattggtgtatttgatattacctcagggtacataggaatgccactcaacaagcagagttgaggaactgtagcaaagcaccacaaaggtaagaagtagagtgggaataatgagagatatccatagctcattttctcaagaaaggacatttttgagggaccataaacaaaagggcaaaactttgagataccgacttcgaccaaccctgaactccatcttatcccttgagtcaacagatcattcaaatttgttacaccagagcccaaaaactgtggtgttgatgagctcaagtagactgaagtccagcctttggattgtaaagtgaagccggtcaagtaatcttctgctactgaataatgcagaaacccaatctgtggatcccattgcaaagagaagaaattaataagttgtaaatatttttgatggaataagttgttgtaaattattatgaataagaagatttaaaaatgaaatgaaccaaggttagcttacatcttgaccccattttgtttcacttccataggtgcaagaagccaagaatttggactcttgtagcaatgtattagaagagtctctaatcttggctgtattaggcttcttttgattaaaaagagatttaatgaactcattggacgacccaaaataccttttcagttccattggatcagcacctgtttattaaaacacacaacaagttcacgatactattttttggtaagacatacatatgttgctagataacaaatggtaatgttgtcatataataaagaagtaatttatcaacgccttaccttcttgcacataatttccatataaggacaccctttttatgaaaaaacctgtaccagacaatacaggtccatccaatccatccataccttgccatcgcaactaaaaaatgccaaagggaattagggccaattaacaataattgagctagctaatacaataacatgttttttctttgcttaccgaatatgtcaatcttaactgactgtcatagatatcattcctagaaatgttgtggaatctctgagggaactgaacaaaagctagggaagaagatatttttggatcaaggtgaaaacacattgcttgtcttgctgatgttgaatcattgcaatacatgtcacagtcaagagcaagtatgtacggggaattgctaatcacaccggagactcgaagctgtggaaaaggataaaaacacaaattgtgatacagaatatgatcattcatttaacaggaaaaggataaaagaaaacgtacgagaacattgaacgctccagccttaaaatggtgaggatgagaaggccttttctctctagaaacataagcaagttgaggcaacatagctaattcttcttgttctgtgttgtcaatgggatttccttggataacctgatcataaaagatattagtaagaacaaatttgtctaatcccttccaaaagtgatatgacttatgaagataacttcacattatttcgttaaaagaaaaaaaccaatatcgttcattgttttttttctaaagaaaatatggttactaagcaagttccaaaactagtggtaagaggaaagtacgtacctcaatgacagattggtgatctttgccagtgaagccactagtatcaacaaaggtctcttttattcctttaatgctttccttaaacacttggtatctttcctgtaacaaaatgttgcttaataccagcatagccattttctatttttcatagtaaaatttaatcaaagaaataaaaaagcttactttaagcttctcttgttctctcgtgaactcatcaaaacttcctgaatggctatcatcatccgctaatgacgagaaataagcatttggacatctgttctggattttaaacctcctgcaaaatggaatccaccactttgcaaacttccaagcctctctcattcctttcaatgttaccgcggaaccaccatcatcagaaagatacacatgaagcttgtcaggagggtagtccagtgccatggcagatataacagtgttcatcacctgcaaagttggctctctctctggatcagctgtgaaaacaaagacatctatagctggaagtttatcatcttctggcaatctctctggaaatacagaacgagaaacgggacgccaccttaaggcttggtctagaagccatataaggaagagaaacagctcagagagaaagagaagaaaccatggaagagatgatgtaattcctctggtctcagtgtcatttttgaggaagaaagaagccctgtaatagaacaagaataatactgctaatatatgaaggaaagattgtaatctgctaaagatgatagaagatttatggacatggcagacgtgaagaggttgatcagagtcctccattaatgggagtctaggtatgttctgtgattatgtactgatcaattatgtttatataaacactagatatttgtccttttacaaaaaaaaaaaaacactagatatttgtgcatgaagtgattgacttgtcttccttataagtcaatgaagaaggtttcgttttgtccgtatatggaaacattagtcaaacaaagttggtcctacaattccaaagcatagccttgcctcccaagttctcttgaaaaaaagaaaaattgttgatattaatatgtttagacatttatttcgagtataaaattaagacaatattgcaataattctattgtcacagaattaataatatataagacaatttttttatatatataatatcttacagtttatacacaagttatcaacaaaactatgtttaactaatctacaaacatttagagagaatatactatatcatctacaaaattaaaatattatcggtaaggatttttcacctcaaagaaacccaattattcattatattatttttctttttaattgggttaccgtcatttccattttgacccttgtcagtcaagtaaacaaaaaacctattttctcacgtttttctccagcaaaatcgacgcaaagtcgattgaatttgaacaagaaaaatcagctattttgaaccactttcgaaaacacacaccaagctcttgtttcatatgaattgaaatcaacatcagtgaaaacttaattatctctggttcaaagattgtacagacgtagaccaactatgggtttcatgtacatcaagcgttcaaaagattaaacaaaaatcaattgccaacagtaattgaattacattaagctaggataggaacatcctcaaagctgggtcttggcagacttggcacacagaatgttctcaatgagactgacattacagctactgtcaggactcagagcatttgctatgaaacttaatttaaagcccctaatctaacttgatggaaacaaattataagcctaaaactgataaaatataatacattttataatctaattattcatttctctacaccacacatagttcatttgcaacagcatatatatatttgccattttatatgcatcaatattcatacagaataggcaataaaatttcaaacagagctacaagttcaccttcagcagcaaggtcgcatatgtaaccaacccggacgccccatatgctataaatcatgtcagcgccacgcctacattgtaaggcatttgacagttgacacccacaatgaaggcctgatgaaaaaagaagccagttgaggagaagctaatccttttaaacatttcttgaagctaattatactacatatagcttcagtcaagacaaatttcagtaaaactgcaaaaacaagcacaatagattaaacatattaaaaatgtacaaggctacaatttcttgaaagaaacaacaaatcacaatttttttttctttataaaagtagattctgtaatcacaaggaaaccaaaatggaagtatagcaagaaaacttatgattaaaagtgaaaataaatgataatatcatcttcattctttcacaagagctttcattctagtgcaagtgtattcctcataaatttcaaatttcaatccttaatatggctcatataaaacagaattttgttgggttgttatctctgaaaaaataatcaaaaaatccccattgaacagaacataatgtagccttaaaacaattatgggtctctaagataagctggtgaaaccaatgaagtactgaatgaatacatttaatcagcaacagccataaatgaaaaacaaagaccttcaatataagtccaaccagcattaaattagtaacaagttccactgtaaatatagttgataacaaactaataatttcctaagaaagatgaaaaatgaaagatacatataatatctatatttacagcacaaactaaatgaagaactctaagctaaatgtggaaaaagcctagcatcttacacaatagctactcctgactcttgcctacaagcactttggccttttcattcttctgctctaccatgtaattgtgaaccctttcagctttgagtctcatacccttgatcatctcctcacttgattcaattatctgttttggaagagcaatctccaaataatcaaaccactcttcaagagtcatattctccaaatctgactcctttccagattcaaccaacttctctatagaatcagaactacttcccctttttgacataagatcaatcacttccgcacattctggcaatttctccggtgaattcttctttctccttgtgccgccggccgcacgtgtagccttcttatttactaccttgacttgcccaccttctacttcagaattctctggaattttctcaagtactgaacaagagactgcaatattctcattcttggagctctgagtttgcctagttctcattttccgcagctgccccattttctcttccttatcttgctcctctttcaccttctcctcctcaaccacgctcttcaaaaccctaggtttcctcccccgccttggtttctcaaccacatccaccgcatctgcattctccactcccgaaccacattcctcttccttctccttcgcaaccttacctctcctaccctgatttgccccaccagccttctcctgaaggccacgcctagtgtttcgcctcaagcagctcccatcgtcaacttcaatcttgacggagatggaagtagattctccaatcttgatgcagtctccgtcgctgagatcgacaggaacgtcggggtcgatcaattcgtcgttgagaaaagagccgttggaggagccgaggtcttgaagtagccattttccaaattctgattggatggagaggtgcttggtggagatgcctgagtctttgatggtgaggttgttaccccgaacaacacgaccgactcgaatggttaatccgggacggtattctaaggtttctccggctcgaggacctttggttatttcaagtttgagagccataaagaagaagaagaagaagaaaaactaaaatcagagggaaaccgtttccaacctccaattcgaatcggtttttgaattttgagccaacacaaagagagttctctgttattttctgtttttaatttttttattaaaaagaatcacaactttattaattaatatcttcaactataacaattttttttagaagtaaatgaataaattcatacaaaaaaataagggaaatttgaatttatatgcttaaaataccatattatttttcccctaaatccaaacttattaaaattggtaatatatgaccaatttaccaaatttccaaatctaaccctctcatttgaaaccatcaacctctctctcttcctcactcttctctcagccgcactaaaaaacgggatcccctaaaaaacccaaaaccccaactcagccacagccgtcgaaccacaaccccaatcactccggcgtggaacctgaacccgaccaaccgagcaactcgcaacccgacccccactccgaaaatgtcaaaggtaagttgttttttttttttgtttttttcttagaaatggtttatagatttatttagtttgagttgtgaaatattattggtaagatttaagaaatttattgtgaaaatgggattcggatccgtaaaaattggattttgactgtaaaaaatggtgaatatgcgttcggatttgggggggaagaaggtggcccgatggggaagaaggtggcccgatggtctatttggtatgggcccgatggtccaataaagtgggcccgatggtctatttggtagggcccgatggtccaataaagtggg

SEQ ID NO: 223075 - DNA, 2680 bp, Cannabis indica
aaatccttaggaaatacaacatgaaactcaatcccctaaaatgctcctttagagttgccttgggtaagtttgtgggctttaccgttaatgcccaaggaatcgaagccaatctagagaaaattcaagccctccagaatgaaatctcctacaaaaactaaggatgttcaaagtttaattggtcggattgccgcactcagtagatttgtttcaaagtcaacagacaagtgtgttccattcttcaacatcctacgaggaaataagcaatttgaatggatagaggaatgtgaaaaagcctttcaagagctaaaaatgcaactcgcaaaacctcttgtactctcaggaatgcctggccgtcaccgaacatgtagtaagtgccgtactgatcagagaagagaacaatatccaacatcttgtctactaatagagaacaatgtccaacatctggtctactagtaactcacaaaagacttattgaagctgaaggctggtacccattaatagaagagctcaccaattgcctaatcctagaaacaagaaagctaaggcgttacttttaggctcatcttgtttgggtatacactgacaaaccataacgtcaagtattacaaaaactggacgcctttggatggttattcaaatggatagtggagttgggccagtacgaaatcatcttttagccccgaacattgattaagggtcgggccttagtagattttgtggctgaatgtatgggtaaagaagaaagcacttcagaaagtaacccagagccagtacaagtacctcagccaagcaatagtaaacacaagccaacctggaagtttcatgtagacgggtcagctacggatcagctgtccagtgctggaatcgcccttgccacacttggggggcagcacctgcacggtgcagtcaaattcgaatgtaaggcatcatacaatgaagctgaatatgaagctcttatcaccggcctaagacttgctcatgaatcgtaagccaaacacattgagatctgcaatgtctcatagttagtggtaaatcatgtatctggggagtacgaggcttgaggggaaaagatgatagcatatctaagcaaaatacataatttgctcgcataattcaaaagctatgctctaaagcaaattctaagagaagaaaacacaactgcggatgcactagcccgacttgcgagcagcaacataaatgataaagcaaatctgatccccatccaatttcttgaaaaacttagtatcacccgcacggaggagattgaaatgattgatacatccccaaactagatgacgccaataacaacctatctcaacattggggaactcccagataacaggaatgaagctcagaaaatgaggagaaaggctgcacggtacatcattgtagagggagttatgcatagaagaggattttccatgcctcttctcaggtgtgttacacaagaagaagctgtacgacctttgtcgaaagtacaaaatggattctgcggtaaccacgcagctgggcagaattttaaggcaagagtatttttgggcgaccatgattgaagactccaaggcatatgttgagaaatgtgataagtggcaaagattctcaaagataccccgtgcactgcccaacgaactaactcaaatgcaaagtccttggcctttcatcatttggggaattgacctaatcaaacagttacccaagggcaaaggcggagtaccatacgtagtcgttacaattgattattttaccaaatggacagaggccgagccactggccaccattatgtccaaaaacgtccaagacttcattgtgaaaacataatttgtcggtttggattaccgtacaagatagtcttggacaatggcaaacaatttgacagtcagtccttcacagatttttgtccaaaccatgggatcataaaaagtttctctgcagcggcacatccccaagcaaatggtccagttgaagcagtcaacaagacactcaaagataccctatagaaataacttgaagatgcttaaggaaattggccggaggaacttcttgaagtgttatggtcataccgcacaattgagaaaacaacgaccggaaaaactccatttgccatggcatatggttatgaagccatgctgtcctatagaactcaaaccaccatcccacagaagactgacatataaccaagaagttaatcatgcactccttgaagaatcagttgatgaagttgaagaaaaacgaaccgcagcaaacctaaaattgatagctcatcaacaaaaggtagctcggtattttaacaaacaagtgagagcacaagaattctttgtgggagatatggtcctaagtagagtatttttgaacaccaaagacattatgacagatgtgcttggaccaaactgggtagggccatatcaggtggttgaagtcctagaattaagagcatacaaacttggtaagtatgacaaaaaaatgcaactcgttctagcaccaaggtattggaacggggaacacttaagaaaatactaccagtaaaagtaccaagtcgagtgaccatgttaagtacgaaacaaaagaatatttactctttagtgaatggcattctgggcggaccacgcccaaaggtttaaataaaattacaaagtacttaggtcggatgaccacttactaaagtataatttttattttctgc

SEQ ID NO: 223076 - DNA, 4370 bp, Cannabis indica
gtagatgaacagtaagattaaagccgactacgggggtaacgtggatatcatttccaaaataaagtacttttggtttcggcggccgtggaaacttgactgagtggtcaaagatgtcacgacaatatgagatggattatttggaattggaattataccaaactagtttagaatttttcaagatgtcggtttagtgggttagtttagaaattaccaaaatacccctaggccttattttataaatgtttatttggaaggacaatttagtcttttactaagttaaataatgacttttataggtttatattatggctgagtattgtctaagataagttatatttgttttcaaaaagtatatttcttttatgtttggaaattaataagataaaaccaaaattaagaagtttatcaagctctttctctctcacctcttttcggtcctagaaggaaaccatggaggacaagttgttcatctcatttcagttgagattcttactagaaattctactctagttgttgtccagattattgaggtaagttcttgatactcttccccttgaatttcttgagttttaggttagcttaggttaggttttactaggaatttcagggttgtggtgttaaattgatcttagattgtgtttataggattgaattagggaatccttgtgcataggttaagtaattgttgtgcctgttagaattagagttggaattttagtttaagaacttaattttttgttctaacatggtgtttttcataatttgatggaaaatggtgaattgatattttggatatgttattttggtgggactatactattctggagcttctaggttgctttggtgaatgtttggattgattttggaggagaagaaatcaagatagcaaccctactcagttttcttcaaggccagttttagggctcgaggtgatttctgggtctagtgtagagtgtttagaagttgtaaaacctattttggagtgattagaagttaaggtttgtctggttatgggaattagggttattcttagaatttttaatttaaggtatttattggattttgttgtcgtgacataggagccaggatcgtcaagttttgtttctactcaagtcggcaagtacacctaatttcaagattaaggtaagaaaagttttatgcactgcaaagagataaaaaaaataagcgattataatcgctaatgcctcaattaacatcaaaattaatgatgtgtatttgttgtgactcgactctgatcgaggtgatgatgaggaacgattattatcgtttgtgcctctattttgatcgaggaaatgatgagaaacgattattatcgcttgtgactcgattatgattgagggaaagacacggtcattaccgttatgagtaattactcgttgaaaccactgataggtttcttacttatcgttcactttatcgggcaatgatagttacatacatagctcatggatagcaagtggtaagggtgctttatgaagcactacaattatgtgagtatagggatgtgtgattaggatgctttatgaagcattgagaatatgtgattatgtattaaatgaaggtccatttagtgaaatgatgaagttgttgattatgagttactatgattttcttatatgtttaatgaatgtgtttatatagacgttggattatatattcatgctgaatatgtaatgaccaatgagtatgtatactatgttgtggtgagaatatttgcatttttaatgcttacaatctagtaacttttattgctgagtcattgtgactcacgggtgcttcgtggtgcaggtaagaaggatagcagttgtgttcggacatgagtctgagttctccttgcgatgtacatatcagtcgtggtgtcttggcttccgagaagcaagatcaaccctttttttctatgtttgaaaatgtaacctgactcttgcaatagcagttttgtgactttttgtaaaagaattttataaataggggatccccgtattatggcagtattttgtatgaaagttttattttaaatttaattatgggttttcaattaaaccacacatttcttaaactaatagattagttagaaataagtttgtgaaagcacacatgtggcgtccctgtgggtgaggacgttagttacaacatggtatcagagcgactaaggtttaaagatcctgaagattggctctatatgtacattggctgcgaagactcgattgactcatggcttagtaagtgctaattgctagttgattaatagactaattgttgattgcttgaattgcctgcttatttgaaatgtgtaagctattagagaagcgtgataagtttgatataaaattgctaagtatgtttatgtatgtgtggtaatgcttattagcattatttctgattgggaagattttaaccatgaaaaagaatggtcgtgattgtactagaaggtgtacttaggttgatctagtaagaataattgtgagcttgctaggctcggagttgatagtgtgggtatgaatcttccactaccacaagactaggagcaaatacatgctatgaaataagagattacttgagtggcaaggtagtagaacttacatgattgatcctgggcagcgcggtgatggaaaatgacactaagctggaccgattggcagagttttattttgaagaagcggctgctaaggccgctaggaaggctaaatccaatcgaaggtggaaagagtatatcgctcaaaatgtggatataatggttaaacaactggaagttgtccagttttatgctcaggtggttgagctaacccttagtgctgaggctgcattgactagatcacaggagaaacagtatgaggaaagattcatgaaagcaaatgttcaatgttggctctggtaaggatgctaaccctaatgatctcaaggaaaaggactaaaaacctaccagttatgggtcctagtgagagagtttaaggtaattaaagtattcaacatgatgaatatttgtaaacccatccagaggattgagatgcaagagacgccaggaaagtgaatgctacacgagagcctgctttcagtatgggctagtagatcatttgagaagagactgtccacagttatagcaaccagaatagaaggatgattgaaagttagtgtaaatttaatgacgtgttatcatgtggttccggtaccttactgtttactgtaaaattggttattttctagtaggtggtttaaatcccttcccgagttatgggggaaaggggatggttagttgttttagttgagctaaatttagaggattttaaggtaatgttggggattggattgacttgtaaagtattatgcaaacatcgattgtgaaggtaaggtggtaactcttgaaccagaaggtgaggacccattcgtgttcttgggcaaggttcaagggacccaaaatccattaatcatggcgtttaaggaagaaggtttattatgggatggatgtatcaaccttttagctagtgtggtgaatattacaacgggaacatcagtgggatcaggacataatcttgtgtccaggggtttctagatgcctttccagaagagccacaagggttattaatgaagcaagaaattgattttgaattgaattgatattgggagtaaaacttgtatctaaaattctgaagattcagttgcaggggatgttgggcttgaaatttctaaattgagtagctcatcctggagtacaccagttttatttgtgaagaagaaagatgaaactttataagtgtgtattgaccattgggagttaaataagttcatggtgaagaataagtatcctttgttaaggatagaagttatgttgatcaattttagggaaggaccgtcttctctaagagtggtcttcgatctggtaattaccagttgaagacttgagagaagggtattcccaaagtagcttttcgtacctggtgactttgtgaatgtcttcattaatggtattctgctttcttccaactcaaagaaggcatttgagaggtatttttggatggtgttgtaatgtcttgggagcctcagcttcatgctaaatacaagaaatgcaaattttttttggccaagtaagtttcttagagcgtgaggtggatatagatagtatcttgatagattcgacaatgatttaagcagtttagagttggcttcaacccaagtctgcaattgagttagagattttctggaattattaggatgctacagaatatttgttgagggatgtctacgcccttagtggaattaagtcgaaagaattgaaatagaggttgcctattgcaccagtgttaacattgccaatcagtgaggagaaatttctgatttgatatgacacttctaaa

SEQ ID NO: 223077 - DNA, 3802 bp, Cannabis indica
ccatatctcccacaaaaaattcctgagccttcacttgtttgttgaaatatcgagctactttttgctgatgggccatcaactttaagtttgttgtggttctcttctcttcaatttcatcaagtgattcgacaaggagtacatgattggcttattggctatatgtcaatcttctgtgggatggtggtttgagttctacgggcagcatagcttcatatccatatgccatggcaaatggagtttatccggttgtcgttttctcagttgtttggtacgaccaaaggacttcaggaagttcctccggccagtttcctttagcatcctcaagtcttttctttagtgtatcctttaatgtcttgttgactgcttcaacttgaccattggcttggggatgcgccactgcggagaaacttttgatgataccgtggttcgtacaaaaatcaataaaggactggctgtcaaactgtttgccattgttcgaaactattttgtacaacaatccaaaccggcaaattatgttctttacaacgaagtcttgcacttttttggacgtaatagttgctagtggctcggcttcggtccacttggtgaagtaatcaactgcaactactgcatactgcacgccatcaggtcatttccccaaatggcaaaaggccaaggactttgcatctgagttaactcgttgggcggtgctcgaggtatcttcgaaaatctctggcatttatcacattttttaacataggccttggaatcttcaatcatcgttggccagaaataaccttgccttagaattttcttagataaactctacccgacagcatggcttccacaaaatccatcatgtacctcagacaagagtcgtgcagcttcttcttaggtaacacatctgagcaatggcatggagaatccttgtctgtacataattccccatattatgatgtaccgtgcaaccttccttctcatcttttgagcctcatttcgattatttgggagttctccagtgctgaggtaggttgcaattggcgtcatccagtttggggatgtatcaatcatttcaatctcttccgtgccagtgatgttaggttcttcgagaaactgaataggaataagatttgctttatcatttacattactactcgcaagccgagccaatgcgtcagcaatcatattttcttcccttggaatttgcctgagagcatagcttttgaactgtgcgagcaggtcgtgtattttgctcagatatgctatcattttccccccgagcctcgtattctccagatacatggtttaccaccagctgtgaatcactgcagatttcaatatgttcggccttcatctcccagactagttttagaccagcgatcaaagcttcatacttggcctcattattggatgctttaaatccaaatttgactgcagcgtgcaggtgctaccccctcaggtgtaacaagggcgattcctgcaccagatagttgatctataggcgacccgtccacatgtagtttccaagtcggcttgtcttcattgttactaggctggggtatttgctctagctcagggttgttctctgatacgctttcttccttgcctgtgcattctacgacaaagtctgctaaggcctggcctttaactgttgttcggggttataaggtaatctcatactggcccaactccactgcccatttgagtaaccgtccagaggcatcccgtttttgcaatatttggcgtaacggttggtcagtgtatactcgaaaagggtgagcttgaaaatagggccttagctttcttgttgctagaatcaggcagtacgtgagtttctctatcaatgggtatcggccttcggcctcaatgagtcttttactaatgtaatagaccagatgttgaatgttgttttcctctctgatcagtacggcacttacaacatgctccgtgatagccaagtatatccgaagttcttctccgtctagaggttttgagagtacaggaggttttgcgagttgcatttttagctcttgaaaagctttttcacattcctctatccactcaaattgcttatttccttgcaggatgttaaagaacggaacacacttgtctgttgattttgaaacaaatctactgagtgcggcaatccgaccagtcaaactttgaacttccttggttcttgttggcaatttcatatccaggagggcttgaatcttctctaaattggcttcaattcctcgggcattgacaataaagcctagaaacttacccaagccgaatccaaaggagcactttaagaaattgaatttcatgttatatttcctgaggactttgaagcattcgtccaggtcatctatgtgccccccaacattcctagatttaacgagcatgtcatccacatacacttccatgtttcgttcgatctggtctttaaacatcttgtttaccaatctttggtatgttgctccagcatttttgagaccaaatggcatgactttataacaatacagatccatatctgtttgggaacttgtaagttcttggtctggtggatgcattttgatttgattataccccgaataggcgtccataaagctcaatattttgtgccttgctgttgcgtccacaagctgatcgattcttggaagtggaaaatagtctttggggcacgccttgttgaggtcggtgaaattaatacaaactcgccatttcttaatcagcttgggtaccagtacaggattagcaacccaagccgggtagaaagcttcgattatgaaattgttgttgcgtagcttttctacctcttccttcagggctagggctcactccttgtccaacagtcttcgcttttgttaaaccggtcagaagtttggatcaatatttaggacatgtgaaattatagaagtttcaattccgaccatatcctcatgtgaccaggcaaaaatgtctaggtttgctctcagaaattttatcaatgctgattttacttcgagcaataaaccttttctaattttaagctttctagtcagaatattcgggtcgatttcaatctcttctaattcttccactggtccaacattgctgcttgggtccccaagtcggggatccacatcttcatccccgccttgggaggttccctatttagtaatgtttttccccttgtccgaactctggctagaggatacttcctttttagccttggttatggcaaggttatagcattcccaagcagcctgctggtttcctcttaggcaccccaccccattctttgttgggaacgtaaggcatgaatgaaatattgatgtaatagcctttaagttatataaggccggccggcctaacatgacattaaatgttgatggaacgtccaatactaagaattgtgccattacagctatgctcttcggagcttgcccaacagtgaggggtaagtgaattagccctagaggtgcgacaccttggccagagaaactatacacgggctggagacagggagttaaatttttgagctggagccccatcttttcatacgttgttttgaacaagatgttggaagaggctccattatctatcatggtttgggccaccatcttgttggctatctggacttccacaaccaacggatcgttgtgcgggaagctgatattgatagcatcttcatcattgaatgttatggtgggctctcttgcccgtgggatcttcagtttcctttcctcgacggctagaactacttctttttgctcatgatgtaatgttcgagcatacctctctcgggctttgcctaaatcttcagcaatatatggacctccaataatgacttgca

SEQ ID NO: 223078 - DNA, 1459 bp, Cannabis indica
gcttcctggaaataactagccatttggataaggtgatcacgcatgttctgatgaggtttcattcgtgcatttgtaaagttcttggtcaccataaaataagcttgatctgacgccatcccaaacagttcagttaactgattcatgatctttgtagtcgtgagagtgtttgtaaaccttatcttcaaggtatcaatcatgctagacaacataaagtatcgagctttattgttagcattctgtcaatgctcaaacttttccttgattgccttggttgcattctcacctagttgctcaggagcttcttcagttaacacaaacagggagttttcacctatgagagcaatattattgttctctttctatttgacaaagttagcaccagtgagcttgttatcgatcaatagtggcacaattgggttgtttatagtcatattagaaactacaaatatcaataaatagaaatcaaataaggttcaatacaaaatcatacacattcagaaattattaaacatttagcaagtaggaatgacatgtgaaactataaaaacaaatatatcctaaataatttttaaggtttgcaacttaatgacataagtgtcccttttagacgagagtcaaatatatcactattaatagagttgtttgctcatctaaaatggataccattttagcaaccttttatttgatcaagatgagaattttggcgttgtcccgtttaggcgagattcaaggccattctatcttatgagctttcactattgttttatactttgtaagccctactcttagcaaccactattggagtgatcattactaagaataaaagacttacaataatgaatgaacatctattagggatgaatcttattaaaacaagaactatgagaaccaacaatagagatcgaatattattatactaaagttcattgttttaaaagtactgtattttcatctaatatttattttaatatatatttatttaattaaaattactaatttagataattttaaatataaattttaactaacatttataaaattatacttagatagatctaaaaacaattaaaattattttccattatagtattaatttttaataaatattatgaaaattacttaatttaagttggtccaaaattaatttctaataaatatatgtaactaaatttgaaattcaatgtatttaaaataaatatatttttgaaatttatataaaataaaataaatcttgaaaaattattctaatttatgttgatctaaaattaatcaaaaaatcaattttcaacacaaatttaattttcctatttacttaaatttcttaagaaaatatccaatatttaagtatcttgaatagaatcaacttaaatattaattttatgtttaattaaatatatctaaaaaatacctaaagtctactcagaaaataaccatctagatattttattaactaatcatt

SEQ ID NO: 223079 - DNA, 2822 bp, Cannabis indica
gttattaattttgctaaatcttctatcctcttttccccaaatactcctcaggatattagaagtcttttctttgccacatttgatcttgaagataagccttttgttagtaagtatttgggtttgccccaatgccttactagatctaagtatcattcttttgcctttcttaaggataaagttctgtctgtgcttactaattggtctgttaagtggttttctaaggctggtaaagagattcttctcaaggctgttattcagccaatcccagcttatgctatggcttgctttaggcttcctgttaaattatgtaagggaattgaggttgcgatggctagattctggtggggttcttcagggaataataataaaattcattggagatcttggaaaaagctctgtcaatctaaatgcttaggggggttaggatttcgctctctaattcattttaatcaagctatgcttgcaaagcaggcttggaaaattttaaaacaacctgactctttgttatgtcgtgtgcttaaagctagatattttcccaattcttctatcctggaagatgtccctggtcataacccttcttatgcttggaggagcatcctttggggaagagatttgatggcattaggtcttatttggaagattggggatggagaaagcattttaaccattggtgatcattggctccccaataacaaacatctttgctataaagatggtaacatgcctccttcacctaagctttctttttttatctctgattctgggttttgggattctagaaagcttaggaatcatttttctgaatctaatatccaggatatccttgatgttccaattactggattctctggtaaagatgatcttatttggtctagagatagctctggtcttttcactgttaagtctgcctatcatttggctctttctcatcaggatattccatctacttcgtctgctgtaacttcaaggaagttttggaataaaatttggcattctaaagcccctccaaaaattaaacactttatgtggagagttgtgtctcataccattctagtggcttcctctctttttactcgccacattattgattccccactttgttctctttgtaagagcaatcctgagacggttcaccatgctctgttagggtgttcgagattgaaaaaggcttggaaatcctctaggtttgtagatcattatcataaatataaacatcttgatattactgattttttgttgagctcttttgagatgttggataaggattatgttagcattttgttttgctttctatgggcattatggaatcacagaaataattacatacctcgtaaaaatgttatacctgttactgacatctttgattggagtatcaattacttttttcagtatctggatacccagcaaaatattcagccgaatcgtatttcagttcaggattctagcagggtctcggaaggtacttctagctctaatttacaggtttttactggtgctgccattgatattcgttgttaaaagcatagctatggtattgtggtggctgatgagtgtggtgttgtgaaagctggtgtagttaagccctgtattggaagtatctctgctgttatagcggaggctaaggctatttatcatgctctttattgggtgcagctgcttcatcttctagtggatattttaaagacagattgtaaaactattgtagataaacttaattcttgtaaatggaatgctagtcctttagatgatattttagagggcattaagaacttgttatctttcagtcctaatcttataatagagcatgtgtatagggagtaatcatttggctcattgggttgcaaaattaggattaggattagaaaacgagatagtatggaatggttctttgtcatccttttaacttgtaagctttgtattgactggtttattttaatgaagcacaaattattctcaaaaaaaaaattatattgtatgtgacatttaaataaaatcataagaatattatcttgttcttttcactacttaagattacaacttaataaataattaaacaataaagatattgtacacctcctcaatgtgaacatgaacatgataaaaagccaaatttactcaaaaaaatttaacaaatacactgaacatacattatgaattaacaccaagtatatataattttcctaattactttctagctcttatactcatcactaccaacctcatcaatcaaaggcactggtttcaacctacgactgcataacttttgaaacattaataacataagatcaatctcaatttcaaaacttataatgtctagataattattggcttcttcttcaaaccaaaaatgtatttttgaggccatccaaaactacaaattaagaaaggtatagatgcagaaaatatcaagaatgagaagaaaaaaattagagagaacatagcaatttttccataccccctttcaactttcttgattaatttttcctcaagagtcatccaagaggtcttggagtacaatctaatttttctttttgctaggatagaactacaaatgtgcataatcagactatcaaaagtcattacatctttcaagttgtatactcatttttgattactgaccatattacctcatgcaaaaaaataaaattccttaaattcaaattagtgaaaatacattgtttctcactacatataacttgataacctttcttaatttttctttaaaaagagtaaatcctttcgtaattctttaattaaaaaagagtaagaacgtttttttttcttcaaatttgaagtaattaatattgattataaataattga

SEQ ID NO: 223080 - DNA, 1519 bp, Cannabis indica
tactctctttcggcccccacagtgttttttccaatctgagtcctgctatcagggcttcatatttggcctcattgttagaagttgtgaattcaaaccgtagggctgcctggagtcgaagtccgttcggggatatcatcggacccctgctccagacccattctcgttggaggcgccatccacaaataccttccacgcagggacttgccgtgtgggtacatttgcgttagcttctgcttcgtggcactccgtgatgaagtctgctagcgcctgcccttttatggaagtgcgtggaatgtagtgtaggtcaaattggattagctccattgcccatttgagaagtcttccagacgcctcttgattttttaggacttgccggagcgggtggttggttaatactttgattgggtgagcttggaagtaaggtctcatctttctagaggccattaggaggcaaaaaactagtttttcgatcaccgcgtatcgcgtctccgcccctatcatgcgcttgctgacatagtacacgagatgctgagttttttcctcttctcgttctagggccgcgctaaccgcattctcagatatagcaaagtataggaacaagtcctctccgagaacgggtttcgataggattggaggtttggccatgtgctcttttagttttttgaatgcctcctcgcactcgtcggaccattcaaatttctgacatttcttcaagatgttgaagaagggaatgcatttgtctatggatcgggagataaaacggcttagggtagcaacctttccggttaagctctgcacatctttgtgtttcttgggggaaggcatggttaggagagcttggattttctctggattcgcctctatcccccgctgactgacgatgaagcccagaaactttcttgatttgaccccgaaagtgcacttcttcgggttgagtttcatcccgtatctccggaccacttcaaaacattcttctatgtcatccgcgtggctagcgcatgccttcgacttgaccagcatgttgattaaggctcatgtttgtacattttaagtccttagttttgtatgaaaaatcaatttaaatatttattttcgtgatcttaattggaaaattattttgattgaaaatatttaattaattttgattttatgttctttctcagatttggattaccaattgtaagtgattgaaaataatgaagaaagaagcccaattagaggaagcccaatatgagaaaaaatgacttgttgtattgtctacattgatttccaagctcaagcccaactccatatatcccattcatactttctccaatcaactcaatcttcaagcattctcatgaaaagcccaatacataaatcaattcaacaaggtccaacaaccttctcaacatcatcacgtgagcccaatacataattgcatgaacatcatcaccctactccatcatatctccactagcagccaagtataaattttgtcccccatatttctagcaacaagggacgtgcaagactacat

SEQ ID NO: 223081 - DNA, 1087 bp, Cannabis indica
aagtgggataaaagtttttatctcactttttattttttttcatgtgtaaaaactgggataaaaaattccttttattgtagtgagttttttgaaaaccacataatattagagcttaagaatgtaatgaaggtataaataataaaataacaaacaagagatttttacgttgtttaggcgttaattatccttagtccacgagcccattttattaggctcatcggtcggtggttgtttataaaaatacaaaagggatggacttttaccccaatcccccgtgtttctttgaagaagaagaagcttagtagaatattctgaagttgataatgggcttacagtaggatgcttttacaatggagttgtctttgatctcaaggtgaagagctaaaggatggaaggtaaagtcaggcctcagaatttttcttcgtccctcccttgtgcgtctttgggggtatttataggtcgatcccctcgcatgggccacccttgatggatcttcatggggataaacccccactggttggattggtaggtgacatatttttcatgtggtctttaccaatgttagattgtactagctgtactggtgggtgctttggacgcgtgtcgttcgagggccgttctcatttgaattacccttatccctagccattggatcgttttgcacagtaacaaggacacgcataccttgcacggtggcatggcgtgggggacaacttctgacatcgtattaaaaagagctttgccattgggtccatagcctatcatgagtgggttgggctttcgcagcttaaaggcgaccggtgcatcttggttgaagatgcatgttccttgcggaagcatagggtctcggcttctagagcggagtgagtcgctggctcacatgcatctctcttgtggtccgcatccgggaagacttatctgcaggaacctgttttgcatgattagggctcctaccctcccggagcacggagcaaggtagttgggcagccttaatgatctcttgactttttccttattaatttttacgtgtcacgcttaagaaaatacggataacagtttctatttaatgttacacaactataaattt

SEQ ID NO: 223082 - DNA, 1604 bp, Cannabis indica
attcactttgaatcttcattttgcttcatttttttgcattctattcgcctcttactcgtagtttaaattaaatttatttttaactaaatgcacaaaaaaaaatagttaatagaaatttaattttacaatttcaagttgtatttgctgttttaggtccttccagtagacgatgacctctactcacaccttttgtgtcaccccctctagggtctcctattcgcctttgcctctctcaagttaacaatattcttcttccatgctttttttcgagttcgatctcaaattgtatattctttttgacatcgctaacaaaccgtaaatcacgaatttagaattattaagtgggaactcgaatttagtttgaaaaaaatataattattaaagtcatatatatacgtatttgtacaattagttttttttttttttgaagtattacaataacaattgaatgttatcgttgatctatcccaaatagtttgaatatatgctttgtaaacgctctcccaagtgaacttattcatgagaatggtgttgtgaataaagagtttgaccatgttgttaaatttgttcccatagtcgtctatgggggccccactctagatgacatcgaaattttaacttgtgccctgcaggctacttgactagttcatcttttacattttttttccttgtacgctcctttaactccatttttttcttctgttgtccacacctgcaccaaacattctatacgtacaagctatatttattaatgataaaataagtaattgtaatcataatcaatttattaactaaagaaacatttatttaatataatcaatggtgggttaaaatattacaatattttaaagtttacaagccattacaatcatcaccatcaccattcagggttacattattttcatcataatcatcactaatgtcttcatcatcactatgaacaatgaaatcatttaaatcttgatagtcaggatgcacatggtctatgttggtcacctcagttgggtcgatatcatcacagacatagtcgacatcgtctagttgtagaagttgtacaactaactagattctcaaatagtttctttcttgtatagtcgcgatgtcttcatcatcttcatctgagaaattccacacattacatggggtgtaaatattgacaagtttctaattatctctattctttaggtcgggaatgtaatatatcaaatttatatatgatgcaagtatgaatagttcatttttgtactattcacgggtgacagaaacgctagtgaaaaaactatcactttttggactgttattgtttgtgtcccaccacttgcacttaaaaatgataccaccacaatccttcaagtaagataattcatagaattgttggaggatgccataaaaattttgaccacaccttcaccagtaccaaaatactactgttttgggtgttacgattgttatctatttcctcaattatgaatttaacacaattaacaataaatagggatggcaattatacccgcgggttcgggtacccgcaggtacctgcccctaatggggcgggtacggggtagactttcgggggcgggggcgggtatgggtttaaagattca

SEQ ID NO: 223083 - DNA, 1214 bp, Cannabis indica
atttccatccaacaacacaaagaagggaaggacaagttggcggaagtcttggctcaaaaagaaatattttggaagcaaagatcgaagcaattctggctcaattcgggtgataagaacagtaagtactttcattcaattgctaattctaggaagagaaataatagtatttcccgtcttcaagatagcaatggagattgggttacatgggagacgggtttggcaaatgttatcactagctatttccatgatttgttctcttcatctagtgttaacttgggttcggttttggatggtattcggccaactgttagccgtgagcaaaatgaagacctcttgagaacaatttctgaggaagaagttagaaacgccctctttcagatgcatcctgacaagtcacctgggcccgatggtatgacaccagcttttttccaaaagcattggggaatagttgggacagatgtggtcaagtttgttcgggatttctttgattcgggtcagtttccggattccataaatgatactcatattgttcttataccaaagaagaaaaatccctctcaaatgggcgaccttcggccaatctcgctttgtaatgtcatttataaagtcgcctccaaggtagtggccaatagaatgaagaatgtcctcaactttgctatctcagaaactcagagtgcgtttgtagcgggaagactaatttcagacaacattatggtggctttcgaagtcatgcattatttgaaaaggaagactactggaaagaagggatacatggcacttaaactcgatatgagcaaggcttatgatcgtgttgagtggggtttcttggaggccatactacgggtaatggggttcaatactcgatggatcggtttggttctaagttgtgttaactcggttagatatcatgttataaatagtggacagaaactggggccgattattccaaccagaggaatccgccaaggatgtcctttatctccgtacttgttcattgtctgcgcggaagggttctcatctttgataaggtcttacgagtcgtctcgatggctcaccggttgcaaagtggctagaagcgcacctaccatatcccatctcctttttgcagacgatagctatatttattgtcaagccactgatgaagaagccaatcatgttctttccctccttcggttctttgaagacgcctcgggccagaaagttaatctccataa

SEQ ID NO: 223084 - DNA, 1639 bp, Cannabis indica
cattcactttctctttctctcttcatcttcttcttcttctttcttctcatctattctatattattttataacaaaactaatgttttgataatattgaacatttaaagcatgaattccccctcctctaaagtaatatataaatatatatttttctaaaaaaatattgtataatataattggtatctgtacatgacaaattggtattaagtatatcactgaaacatatagtttgaaagaaattttgacatttggaaccaaaaagcatgaatatttatgcatatatgtatattgttggaactttttcttaaattaatgaattttgataaaataagacagtatctcaatgtgtgtaatagaatgagtctcacatggaatatgagttcttgtttacaatagtatataaattgtaactttgtcacttgggataggactccaaaaagtacttaattttgtgcgaatgagtgaggacacatacacttgacctgccatgcgagtgtcatcatttcgtccaatcataccaagctagtgtgacactttaatttttggagaaaatttatttataaaattatttttattatttagttaattaaaatagtttttaaatgtgtttaattaattggtaaagataggcgtgttctcctccttattttcagcatctctcttacacaggaaaaaataatttacagttaaatatttacgattatattatataagtagtccgagcagtagttgttcggtgtggtattttgacggttctctatcgtgtaatagagctccgatatagtggtattttgattgggctgttttatcctgggacgaccggcaaatccgactgcttgcacattcctgggcagtgccgcaaacgtcttaaagagagtgacctagcctgtgactcaacataaaaattttatttggtaatagtgttcctgttttattttccaatagcagtctgtataagaattttaagacgttcattctgctatgaatattgccgatgattttttttggttctactgctcacattaacaagcttttcgttttgagagtttgcattttcaacgttggagacagaagatgtttttttttttataactatgaaaaaagttgtgtttatgttgactgttttgaaatcagttgtgtttgagactccaccttttgctgagaagaaggatgaagtcaagaagtatgaatcacatgttaaggaaagggactcctaagtagagaacgattttttgtgtaagaattttaatttgaatgatttgtctgatgatttgtatgattactataattctgataaatttgccaaagaaacatggaaagcattacaaaaaaaaatatgatactaaggaggtaggaacaaagaaatatgctgagagccactatttgaagtttcaaatgaccgatgataaatcagttgaagcccagtctcacgagcttcaaaaaatagctcatgaaattctgtctgaaggtatgactattgataaataatttcaagttgccgttataattgataaattatccccttcatggtaatattattttgagggttttcattcgataatattgtttttgttttattttctagtagcagtctgtataataattttaagacgttcattcttctatgactactaccgat

SEQ ID NO: 223085 - DNA, 2502 bp, Cannabis indica
cccttcgcggtctgggggcatcgatctaataggggagttacctaaggaaaaaggcggagtcaaatacgccgtggtcgcggttgactacttcaccaagtggggccagggcaaaggcacttgcaactattacagcagccaaactgtgcgagtttgtctataactccatcatctgtcgatttggcatcccttacaaactcatcttggacaactaaaagcaatttgattgtaaggaaatgcgacaattgtgcgatgagttaggaattaaaaaggcattttcagcagtcgcctacccgcagagcaatgggcagacagaagccgtcaacaagataatcaaacataccatcaaaggaaaacttgaagaacgtaaggaggtatggctagaagaactttcgtaagttttatggtcatacaacacaaccccccgatccacgactggtgaaactcctttctcgctctcctatggatgtgaggccatggtaccagtagaggttggggcaggttccctgcaaagagatgttttcaacattgtccagaacgaagaaaaacagttgcttcaccttgaccttttagaagaaaagcgcgatcaagctcagctgaaaaaatgcggcttattagcagcgaactgcgcggtattgcaactctaaggtcaaggagagaattctgcgagtaggggatttggttcttcgaaaagtcatgctaaacacaaaaaactcggcgcatggggtttttggagacaattgggaaggaccatacctcatcgctgagaagattggtaacgcaacatatcgacttgcagaactcgatggtactggaatggcgaaagtttgtggttttattatcaatagtactcgcatcatatgtactcgttatgtatttatacttagtcaatttatctataaatgttctaagtatatggggtatatagcccactttgtactattgcttaacttgttctttataaaagttaaatttttctcgagctttaaaaaattcactgagtttaccttatcgttttttacaccaagctgtaaataataccgcaatcaaaatagcaaaagacgtgagtacccgtgtactgcgaatatgataacataaataaatatccccaaagggatatatgttgttcaaaatattaaaaaccatagagagaaatttgtctaagtacaaatcgcgagtacccgcgtaccgcttaaaaagtttgataaaatattcataaggtaagtaaactaagcattgggagtagtaggggcagttggagtagtggattcatttgcgactttactggcagcctcgtccacgacttcttcagtgttcgcaacatcagcgtccgtctggaaaaagatttcccccacccccttgggtctgcgtaggtgacatagctcgaaaagcctcagccatctcagccgcctttgccccaaggatcgagaagtcgaagtctggaatcttggaaagagttgtatatatatagtcagagaccgcttggtcatactgcttctttccattctccttctcggtctccaagtcgtgagacatctcctcaatcttcgccttagagttcttggcttcaagttcggcttgtttacggaattccttgagttctttgtccttgttagtcgcttcctgcttcagcttcttgacgttctcctgaagctggacattttgcttcattaaaagctcgacttccttggaaccggcaacgaagcccttcgagaacatagtcataaactacgaagccaactctgcagagcgaggcataagttcctcagagggagtcctctcaacctttgacatgaactcctcgcccatgaacttctcctaaagaactagaaaattgcgagctcgaacaactggatcgatcacgactttcttccccttatcttgcgagggcctcgccggcttcttggacgtatcagtagctgggataatcacgatgtcacttttccttttttgaggaacgacgggagaagtcatcgctgttccgatcttcgacttgcgattgagaacgggagcttgcttcaagaaagtcatttctgggaagacaagaaaagataagttaaaatataaacaatggctcatatatataccgcatatatgcgctgtgttacctgatgttggtcaagaggtctgtttagaaagacgtttatctatcttctccttttgcttctcagatggctccttgtatactggctcccgatgaaggctggcgttctctggaattaacttgtgttcccgcagcttcaaggtcgtgcacagcaatcgccggtcacgatcttgaacagggagacaaccgagaacctcagcgacttccttgctagccgagtctaatacgggtcgagccggtctatctgcgaacaataaggaagagcgtgttagatcaaaccacagggtaacgtgaaaattaactaagtgttagagtgtgcgacgtactaggtcgacgaataaaatcggtcctaattcctggtactttaaaaacgtaaaaccacttagatttccaatccccca

SEQ ID NO: 223086 - DNA, 2409 bp, Cannabis indica
gaagtgtcgattgacaccagatggtgcttagtgggcaagcttttgacgggcagagtctcagattttaatgtgttccaaaacatgatggcattcctttggcagccgggaatgggaatgtacgtcaaggagcttaatccgaatctgtttctctttcaattctatcacgagattgatattcaaagagtcattgacggaagcccatggacatacgatcgtaagccatttatttttacaaggttgaaggaaggagataacccgaggatgatagaaatcaacaaccttgatatgtgggtgcaaatacacaatctacaaacgggaaacatgactcttagtgttgttatggcacttgggaatttcattggtacgttcatagactcggatcctaacaacttcgtgggagtttggcgagattacctacgtgtgagagtccgcttggatgtcaacaaacctatcaagcgacgaatgaagattagcatcgacaactcttcctggtattgggccaatttcaagtatgaaagaatcccaactttttgcttcatttgtgggataatcggtcactcagagaagttttgccccagattgttcttgaagcctttacacttacacgacaaaccttacggtttggatcagaaggcacagttgcagaggcgacagtcgactattggtgctcaatggctcaggtcaggtgcggtggtgcgtgaaactccgggaagcagctctgtacagggtggttttccttgtcctagatcagtggagagaattggggatttgataggcaagaatcatggtaatgataatcttcctgatattgtgccaagagaggggcggaatcctagcaagattacacaaggaataattgaggaagatttgactttaaatgtcaatagtaatggaaacttttttgattccacaatcaccacaatggttgactctaagagaagaagacccgattccactttaggaaactttgggggtccacgtatgaatgtagtttcggctacagatgatgacatggagcaagatggttcgaggctttcaaaaaatgggatggtgggctctggtttccaggcccgccaggagcaatgagttgtttaagttggaattgccgtgggcttgggaacctgcgggcctcacaattcttacgagaccttgtgtctcaaaagaagcccaatttactttttctttgtgaaactttatgtaataaggctagtttggaaagattaaaagcccaactggggtttgaaggttgttttgtggtggaagcccgtggtcatagtggtgggctcgctcttctttggaaagaagctagtgaagttgtcatccaaggtttctcttttaatcacatagatgccacggtccatatggtggggctgcctccttggcgtctcactggcatttacggggagccaaaaagagaacttcggtctcaaacttgggacctatttcggtcactcaaaaatgatagtcttctcccatggtgtcttttgggcgatatgaacaacttggggtcgcatttagagaagaaaggaggaaggaagtatccagaccgactcattgagggatttcttaaggctttagacgattgtaatttgatcgatatgcctcttcttggttacccgttcacttgggagaaaggaagaaacagttccgagtggattgaagaaagactagataaagctcttgtcaccaactcttggctttcaattttcccacagtcttcactgctcaacttggaattctcaacaagtgaccattgccctttgttattattctttaaaggtaacactcctctagctcctcttcgcacttttcgctttgagaatgcttggctccgggaacctttgtgtgagaagcttgttgaaggttgttggaagagttcggcttcagtcaccattcaagagaaaattcagcattgtggcgaagttttggggagatggggtcgggacatcactggaaattttcgaaagcgcatcaacgaatgtaagagtcaaatccgtaattccaagtggggtaaagacccgatttccatccaacaacataaagaagggaaggataagttggcggaagtcctggctcaaaaagaaatattttggaagcaaagatcgaagcaattctggctcaactcgggtgataagaacagtaagtactttcattcaattgctaattctaggaagagaaataatagtatttcccgtctccaagatagcagtggagattgggttacttgggagactggtttggctaatgttatttctagctatttccatgatttgttttcttcttctagtgtcaacttgggttcggttttggatggtattcggccaactgtaagccgtgagcaaaatgaagatctcttgagaccaatctctgaggaagaagttagaagcgccctctttcagatgcatcctg

SEQ ID NO: 223087 - DNA, 1527 bp, Cannabis indica
tgagtttattagtggggctctcctctgaatttaattttataaaaaaaaaattatttgagtctgacatctttgcaagatgtttttcgtcatgttctatgcactcaaactactccatctacttcacttacttaataactcgtaataatagtaatgcgcctagaaaatcttctacctcaagtggagagaaggggaatatccacaaggatttgacaatcgagcatattgtggaagcatttttttgcaactatagtgaaaagccttgaaattcgaacaccaaattctgaaggcattttttgtaacccttataaacatcttgttcacaccaaattttagtgtagaaagttacaatttaaaaattagcacggacagtttgctaattccaagcaccaataatgtatctaaaaaattagttgttatttatgttgatgaatttgccaagtaatcacttaagtcgatcttcatctctttctgttactgttattattgatttaggtaatatatctaatgtatttcttctttttatattctcataatgggtcattgattctagtgccacctatcatatgacacgttatttcagtatttttttctacttttcaatctcatagttccacttctactgttgccttagctggtagatcttcctcttctgttcttggatctggtgtcatattactcttacacctatgcttgccttttcatcagtcctacacttacctaatcaatcatttaatttgctttatattagctaactcacttgttatgtaaattgttgcatctcattcttttctaatgattatttattttcagatcatatgagatctatgggagatcaatcggcgcaaatagtactttacaatttgttttaagaaagtttaaattgttacgaatttttatgtaaatcacattttattataaactccttttattaacaaatattaccacaatgattataaaatatgtaacggaccttatctattaaagtaaatattgattctgtatagatactttttatgtttggtgcttgagtaaattgtaaatctatttctttcacatgagggtatatatagttacaaaatatcttaacacagataaattttgaataaataaatattgataatatttataagtatatcaatactattcacggcctcatcatataataatcataaacattgacaaaataatatgagaacacatatagttcgtggtgagttctatttttcttctcaatgatgtaattttgttctttactcttccaataatataatagcctatagctcaaagttcttgactacttgttttcataataataaaaaacgaagctattattttattggatattttattaatggtaaactaccaatattgtcccctttttttagaaaagaaaaatattagtgattgtagtatattattgtcaggatatgaatgattgcagtattaacataaaagaagaaaaagaaatttttttttttacttttttacttttttcttttttagtatttaaaaattgaaagtaaagac

SEQ ID NO: 223088 - DNA, 1884 bp, Cannabis indica
tgattccatttgactccatctttaaagcctaagcctccataagctttagggaggcaaactttttcccaagaagccacatggagtttgcttctattcccattccagccccataagaaatctctacaaagtttttcaacctcatttgtaacactatgaggtaatataaaaatactcatccaatagtttctaagcccaagtaaaatagagtgaataagttaagccctacccgcaaacgagagatgcctagtagcccaagtatggagtctttccttaattttcttgattatcacgccacaatcttcaactttccattttgttggtcttagagggaccccaagatacttaagagtataagttccttcttgaagagccaattcagtcatcattgcctgtttgtcttcctctttcaccctccaaagtagagattggatttgttggtgttcattacaaggcctgatgttgcactaaattcatccaaaacctcctttatctcccgaatagagcttaagtttcctttacaaaattaaatcaagtcatccgcaaagcatagatttattatcttaagattcttgcataaaggatgttacctgatcttggattgattggctcctcgaagaaatctcctggtcaagtactccattatcatgacaaataagagaggagacaaaggatcaccctgtcgtaaacccttcttgcctttgaagctcccttgaactgtatcgttcatcaagatcgaataagaggtagctttcaaacatgtcataatcaatgagaaaaatatggtcggcagtttaaagtcattcagaagcgcttccaagaacttccaactaactgtgtcatacgctttactaatgtctacattgagagtgcatcttggagatatgtttttccttttataattcttcaaaagatcttgaagaatcatgacattatgagcaatcgatctcccttgcacaaacgcttcttgattctgattaatcaacactaaaagcacttgagagagcctggaatacaacaatttagagatgcatttatacacagttgagcagcaagctataggtttgaaatccacagcctttgtagtgttttctatcttaggaatgatcgttatcatagttgcatgaaattctcgaggcattgaacctgttaagagaaatttctgcacgactttggtgaatacagttccaagtttaggccacatcgtcttgaaaaaaccagctccatacccatctcgcccatgggatttagaatctggaatactgaagaaagacttctttatttccttgcttgtgaagggttttatcaaactcagttgatgctccatattgagtctgctccctagattcatatagtcagatctcaggttttgagtagggtttgagctagttcccatgtagccttggaagtgcactagaaagtgccataccacttctttaaagttatatatgatctctccttgatcatttgtataagtaactatgatattctccatccttattttttttagaaaagcatggaagtaagcattgttctcatctcctttgcacaaccaagttaccttgctcctctgtctcaagaaactgtgatacatcttctcttgagcattaaagttcatggcagcctctttctcagcttggtggtaagacagatcatgagtgtgctcttgagattgcattttggtttccaaataatggtccttggcttcttgatcttcttcccaacacccttattctctctctactaaacctcttaatggtgtgtttcaatagcatgagctttaagtataaagctatcattccctctctttttattggtctattccagtcttcaaggaccacatctttaaattccagatgctcaacctagaaattatagtacctaaaa

SEQ ID NO: 223089 - DNA, 1984 bp, Cannabis indica
cagccggtttttgatccactcatacaggtgacccaatttggatcaagttttccgatctcatcttttagattcttgcactcattggtactgtgtccaatgtcgttgtggtattcgcatctcttgcttggatcccttcgagaactgtccctgtacaggggaggaggcctccggtagtgcatattttgccttgtggcgagatacacacgctcttgcgtgtccgtcaactctgtgtactgggtatattggggagtatacctccttttttggtgcttgtcctccgtccaattgctgccttttgaggacctcttgctccgggagctctgaggaggtccggtaaggctcgcagcaggagcggagtgagacgggacttgtccactcatccctgagggtttcccataatgcgaagatgtgggagccaaggctgggctttgattgtatcctggggtagcggagaactgtataccgctcattagtggattaacaggaggaagggttcccgagagctgaactccagtgcatatcctgcccggttggatagtatcctccgtaagccactatttgggcttcttccaagttgatgtacttttgaaccctcttctggaaatcctagaggttagcagctccctcttgttgcaattcgttacagaatgaggttcctgtacggattccggcttgaagaagtgcaagctgctgtccgtcatcaactttcttggttttcgacgctttttccttgaacctctttataaaattcttcaaggtctctttgggtagttggttgatgttagttaaggcgctgacttcgagattgatctttctcgccgtgacaaactatctccggaaactaacttgcaacttgctccagcaatccacagatcctggttccaactttttaaaccattcctccgcggaacccctcaatgttagtggaaagcataaacatttggcatcattactgaccctcataaccgtcattactcggttgaatcgagacaaatgatcgttggggtctgagtccccggtgtatgctgccatctcgagcatcttaaaatttttggggagttccgcttccaaaatatgtcgggcgcatggctcctggtcttcacagtcggagtccgagtcatcccctttttgcctccgagagactcgagcgatgtctttacgcagtgacgccaactctactaaaattccttcgtttaacgttcctgcggagaccgctggtatatgcttctttttgtctaggtgatctcgcaagtcaccgtgtttttcgctgatttgatgtcttaaatcaacgggagggtgtcttcggttccctcttcctctttctctgggttcttggtgcacagaaacgctctttcggtcttctcgatcctgagggccaagactccctttttggagtttgcccctctgcggacctttccctttcgagaaatttgagcgaacctttcgcggatcctgcacctttttctttctccctgggatggaagtagggtttttccgttgattttcttcagaggaataccgtatagtgctgggttccctggacttgtgtttctgagtgcttggagaggactcttccgaagtttcctcgagtcctgctaggatggtcttagggtgtaagtgaatccctgctgtctccatggctttctgcatggcgaccatcacctcttccatctttttattttcttctttttgggctgcgatcatagcttcatgatcagcagccttttgccttaagagcagcagctctgtgtaactgccttcgtcgtaggcgtcatactcgtcaaagttctcctcgtactcgccatcgtttgcctcctctcgctcctcagaatccacgttgactcttgtggccacttcatcgtcttcaggattttgagcatcttgcgggggatggggctgacgtgtgttgcgagtttccaccattactgcttcaatttatagattgttgtctgtttgaagacgcttcctttagctctcaatgaaa

SEQ ID NO: 223090 - DNA, 2021 bp, Cannabis indica
attcgtgacataggacccgggatgcatggttccacccaggtgcccgcacacccgatatcggtttgaggtgagaaaagttatttgcaccactaagcatgttagtaagaaacaattattatcgtttgtgactcgattatgatcgaggtaatgatacggaacgattattatcgtttgtgactcgattataataaaatatacgatcattaccgttattgtggatggataaagatacggtcattgccgttaatgaaatgagtaattactcccttgaaaccacatataggtttcttacttatcgagtgctttaacgggcaacgatagtgacatacgtagctcgtggacaacgagtggtaaggatgctttgtgaagcatcaaagtcggattgtcttataagacaattaattgtatgtgaaatgcgtgattatgtattgagataaatatctaattactataataataagttgttagccatggtttgctatgattttcttgtaatgtgtaatatatgtgtttgtatttatttgcttttcttactaagtctttgtgactcacaagtgctttgtggtgcaggtaaagggaaaagaaactgtggttcaaccatgagtcagaggtctcccaacgatgtacatatcaactgcgatgtttcagctgccagtggataggatccatccttaattttgactattttagggaattgtaaccctattttgtaaatctggttttgaactaaattgtgaaagtttttgaacagtggatccccgtacttatcaatcttttgaataaaagttacgttttagtttaatctgaaagtttttaattaaactgtatttttcctaaactaatagattaattatgaattagtttgtataaccacacacgtggtattcctataggtcagggcattacatgtttgttttattctataggtagacttcttaagtttacatatgttcaccaatattagaagaaaatctttatagttatctatataccttatcctctagttcactgtttgaaattgattaatgaattgaaatgagcaacaaatgtcaagattactatagtagaatcttttataaagacaagtgagaatgtaaatctcctttgctattgattcttagttcaaaatgaatttcttagcaatgaatcttgttttatatctttatgtttcaccatgttacctaatgagtatttattggtaagaaacctatgattaatgttcttcacccccattagatagacttcattgatctttaggatattcattgatttatccaaggcatattgtaccacaattttaattatttacattctatagttttaatttgtgtctcaaaattaatattgttgttgaactcttattgtgcataatgtaatcactaaaaaatattgatcttatttttctaataagtcattttaaggatggaccagcaaactctttaaaaagaaaatggttcaacatgaatgttgtttaaaaattgtatgcaattactaaataacatgacttattagaattttatcaatgacttgtggattattaatgattagttatggattctcaataactataaacttaaaggttgttttgaatcataattaatctaatacttgaggtgagagtttgagaaaataaattatcttttctagaaacttggttcctagatcgatcgctcccactgatcaaatcaattcttaatccacaattctagtgttgtgggatggataataaaacatgtaactcttagaccttatagcatttatggtatttgggtcatgatttttcttataacaattgtactctaaatgtattctggtatttctaaaatgtgtacattgcatgaagtcggtttccaactttatgacaactcaaaatatgtttgagaaacaactttggttagaacacaattcgatatgcacactaccgttgaagagtatcaactgaaaaagatttaggaaagtttggagtatgctatgcaggctccaccacatgtccaataatacttagtttcttaaacctgaca

SEQ ID NO: 223091 - DNA, 2111 bp, Cannabis indica
ataacagggtgggttctttgaaatcctcccactacgacaaggtattgtgactaactatctaggaacattgttgttagaggaatttagacaacaccaaataaaatattataatcaaaatataaatgagaatatgcgattactctacccagaatggcaagtattcaaattatggacacacatgcgtattggaaatgtaaataatagaaagggagtatagtggttcagtcagatcacggtctgcttagtccactattgcaagggtttttctgtctcctttatttcatgttggatcactcctttatatacaaagcaagtgtcctttgattacatagagattgacttaattatcaattcgtttttacattgaatatcaacattaaataaattaaaacgtaaatataataaatgaagaacagtttcagccccattcactaactacaacaatgtatgcaaccttagtggtgcgagttgtctttcatattctcacataagctcccaggctcaagatgtgtacaagactaattgagtctcacatgcataagatatatgcgtcctgttcgagtcgcatatacggatatcttgtaaaaggtcgataacttaggacatgcaagtccttatcgggttatcgagcatgttaggtcatccggaccagcttgctgagtaaagaattgatctttactaactcgtaggaaaagttttatagtcatcacatatatctcggtacatgcgagtcttgaatccggtcttcgatcttgcatcgtgtgaggcataataatgcgactagactctatcagggtcacaccatctcgctgagtctggtttaggcgaggttcatattcaagtgatctccttctgacatctcacccctcctcaaggagagtgagtccacgtgtcatatttatgggagcctggtctcgattttctaggtgaaaaattcacactataacaaacattaatggtattgtcctcattagttgtgtcaatacaacagaggcaatggtaccatcttatatagagtaagatgatagaatactttggaattaaaaatatctcatttactttgttttcaaatttagccattttcttagaaaaattagatttgttaaattaattataattaattattttcttaaaataactaaatcttaatttatatatttaacaagactcttttagcaattaatatttataaataattttatttttatataaaaattcctattataattattttaacagttaaatcatttaattataataattataataaaactcatttttttttactaaaattagacttccacatacatcttaattcagaagcaatcagtggtgaagattaattacagagaatttatttcatctaaattaaatccacatatatcttaatcgagaagggcggaggtaggaagactttcagaaactcatttctcattcaatctattttttagaaaaatacattcaacccatttttcatttcatcacacgattctaaacaatttttatttttaaaatttttaaataaaataaataaataattaggtgtaataatttttaattaaggttatgtgtaataaaattttaaattatgaggtcatatgtgttaaatttaaaattataagagattttgctataaatattttaacattttaagtgtaaaataaattaattgctaaatgatcattatttagtaacaaagtacaaaaaattaattaataattatattaatttaagtttaaaatataattaatcttaattaaagttttataagaaaataaatgatcaagttactattaagttacaagttatttattatttatttttattaaatttctaaatatatcacaactatttaagaataatctcacagttaaaactaaatgtaaccatgatagttacaaatttaatacaaccattaaaacttcttttatatatataaatagttgtaaatttgtggtagtatgttgtatttgattctgatacgagtacatggatataaattttaaattataaatgactgcttatatgtatactttgatttgttggtttgtcattttcatcaatataattttatatatattataagttttttaaatatatatataagtgta

SEQ ID NO: 223092 - DNA, 2924 bp, Cannabis indica
cctcaagatggagtgtagatgttgatcaaacccatcttggagacaatgttcttgtgatgagttgggagaagagctttggtgaagatgtcggcgaggttgttttgggaagagacatggagtagcttgatggaaccttgttgaactttctctcgaatgaaatgacaatcaatttccacatgctttgtgcgttcatgataaaccgggttttcactaatgtgaatcgctgcggtattgtcacaatataacaaagcaggttttgaatgagatatgccaaagtcttttaggaaggcaattacccaagtaagttcggaggcaacattagccatagctcgatattctgcttcagcagaggatcgagaaaccgtttgttgtttctttgatttccatgacacaagtgaactacctaggaagaggcagtaaccatatattgagcgccttatgtcttgacaggagccccaatcagcatccgagaagaaggatagttggacattagatgcagacaagcttgtctcagcatgagctgatatggtgggagttgtgttggaggcaaagaataaaccttgtccaggggttgtctttaagtattgtaggatgcgatgtgcagcatggagatggggaacccgaggagtagtcaaaaattggctcaaatgattgaccgcgtaagagatgtcgggtcttgtgatagttaaagtttgccaatgaggcttctaaaaatagtaggatcgggtagaagagtccctttgtcgttacttaactttaggttagtttccataggtgtagagaccggtttggctcctatgtaacctgtgtccttgagcaattggattgaaatggtctttgagagacagaaatgccatgttttgttctaccaacttcaaggccaaggaaaaactgaatggttcaaagatccttgagtttaaatttgtcatgaaggcatgtcttaaagtgagatatagcaaaatcattattgatggcaacaataatgtcatccacatatatgaggatggctagaaagaatgtttggttctctttatgaatagagagttgtcagatagggattgggaaaaaccatctgaaatgagagtgtggctaagtttactaaaccattgcctggatgcttgtttgaggccatagatgcttttgttgagtttgcacacagtgttaggaggtgctttgtaaccgggagggattttcatgttgacttcttcatgaagatcgccatggagaaaagcattgttaatgtccaattggtggacattccaattgtacattgcagaaagagctaagaagatctttagggtgttgaattttgccacaggggcataagtttcagaataatcaatgccatgcctttgagtgtagcctttggctactaggcgggctttgaatcgttcaacagccccactttcattgtattttactttgtaaatccatttgcatccaatgactttgtggccaggtggtaacttggtgacaatccaagtgttatttttttcgtagagcatcagtttctttatccatggcaagaagccaatgtcgaaattgggatgcttcagcatagctttgtggttcaacttcagaataggctgcaagcacagctgctctgaattgaggatgcaatttaatataagatagaaagggctcaattggatgattagtagaagaagcatgacagatgtaatctgtgagatgttttggttttgtaatggttctaccagcccttgtagatgtcatagaagggtcatgaacatgagttatgtctgttggtttagggactgctgtaataaggtcagtagtgcccgatgtaggtggtgtgttgggagcacctggtgtggggatttgggtgccaggagagctagaaacaaggttctgctgtaaagtctcatctggtgtgagaatgccagatttggttgctgattttaggccagaactgggtggagtttctggtgtgggagctgctggtataggagctgtagttcttgaatcagcagagtgatgtgaaggagcagtgctccctgaattggcagtgttgtgtgcaccagatattggtgcagattgacaggcaagggtagtgtatatattgttcacagtttggtgaacacttgtttgctgcactggttttgtagtgggaagcactacatcaggaaacaagctgcttgtctcagaagaagatgtattagaaaacaatggaaaaattgtttcataaaagactacatcccgagagatatagatttattttgtttcaatatcaagaagtaggtaggctttcatgccttggggatagccaatgaaaaccgaggctctacttcttggtgtaaacttatgtcttttagagttgagggtggagccataggcaagacacccaaaacttcttaaatggtcatatttggggtcagtgccatggagcacttgataagaagtcatacctttgaacaatttagaaggagtcctatttattaggtaagtggtcgtttgaactagatatggccaataaactaagggtaagtttgattggaaacctagagcacgagcaacaatgagaatgtgttggtgtttcctttcaacaacggaatttgttgaggcctttccacacaagaatggtaatgaattatgcctttagatgcaaagaaagaatgtaaattgaattctttggcattatcagaacggatggccttaatatttgttgaatattgagtgcaaaccatgttgaaaaaatttggaattacattttggacatcggatttattcttgagaagtaaacctagatttgtcatcaactatagtaaggaattatttgtatccttctatactaatgatgtgaaatgcaccccaaatgtccatatgaatcaaatcaaacactcttttggaaaaattatgatttgaaataaagggtaaatgttttgtttagctaaatgacaaatatg

SEQ ID NO: 223093 - DNA, 2044 bp, Cannabis indica
ttgggttggatgtatggagtatgcatcataagggaccgatattgtaatatcccgataagcctaatggtaaataattagagtttatatttatattatgggttaatcaagtaataagtggaattatgatcctactaatctatttcagcataaaatttaaatttgctataagtgagtaaataagcgtaatttataaattacgtagattaatatagcatgtgtgaatgtaatatgagctatatgtggaataaaaatatttttaggttcagcgaccctaaagactcgataagtggataaataagtgtaatttgttaattacatagatttatttaaaatacgtggatataatatgagttatttgtgaaataaaaatattttcaggttcggcgaccctggagacccaattggagaccaaaaatgtcacaacgattttagttagaaatattgatgggattattaggataagttaatttaaaaatatcaagatattttgaggtgctcgaagttggccaaataccctaaaagtaaaagtttcttagttgctaaaaaataataagataactattaatatattattataatattatttttatatatataacttatcgttaagtttaatgtatatgtattataagttatatcagtaaatagtaaacgaacgaacgaacgaaactcttgttctctcccttcgataaaaccttctcctcttatatctattttctttaatttttaacccgaaacctagcgatctaagctctggtagtagcgagatagcaaattcttgaaaagagaaagcttaaggtatggtttaattacgttttaagctaaaaacgattagttttatatatggaatttgtgatttagagtggttatggatattctgacttcgtagaattgttctttggtagctatgggaatagttttgatgtttacttattgaatttgaggtgattttgagttagaaatcgagtttggaactttttaaagcttagtccaaacgttaatggtatttttcatttaaaggctcaattttaatttctgttacgtaaggatagtaatatttatggtatatatgtgccctgtaaagtttagattgatttggataagttttggtagtgtttcggtgagtgcaaaatttagaattttcgagtttcaccgtttttacaaattcctaggagatcagaaattgtatttttgtcataacttctgactcgagtgtctgttttggacattctatataccgtgtcaaagcttgcaacgagctctacaacatggtgtatgttttagagccaaaatattagttttattttagtatttttataccgcgagatttagtagaaaaccttaaattgtcttatgtgaatattaagcagtgttttgggataaatacttattggttcaccgttgttgtgacatagggccgagatcatcagcgatagttctccacttgggttgaccgacatgtatgaacctacattaaaggtaaaaaaagtatattgtacaacatagtacgttgtattgtaatacaaataatattgttatgaattatttaatattgagatcaaaatatgattaatattattatataatgaaaagattgattggttaagcaatgataatgtgatgatactatggaaataatatatgggctcacctgattagatgatgcaatatacctggcaacgtaccgggcataagtacagacatcaatgacatatgctgagtattgagcgtaggtacaagctcacctaattaggtgatgcaattttcctggcgatgtatggagcgtaggtacgggcatcacttatatgaaaattcctagttatggcatagatcgaagccattctttagtttcttcttggcgacgtatgaagcgtaggtacgggcgtcagtgacatatgataaataccgaatgtagatacgggctcgtctgattagacaatataatatattgttgcaaggttgtggcacgggctcacctgattaggtgatgcaattatgtaccgggcgtaggtaagggctcgtctgattaggcgatacaatatat

SEQ ID NO: 223094 - DNA, 6148 bp, Cannabis indica
attgtgttccatgttaattatatacaaattgatcttgggtttattattaattttttctaacaaataaatcaacctgaaaataggtactaataaaacaagatagccataccaccaaacaaaacaatcatccaaggtaagagctaattttgccaatgagtgagcaatactattagcgatcttaagacaataaacaaaagaaaaatctctactataaggagtacaataagccaaagtatctctaatattacaccctaattaagaatgattcattgattcatggaatgagttttaagcacattaatgacataccaaaacactagccaagatgaacacaaagtccaatacaatataaaatggtcgtagcttcatccatcacatgagttaccttaccatggaaaggccaagtggccattggtaaaatcccaccagaagaatcccgcttcaccaagccaaaaccagctctagcatttagaatatctaaaccagcgtcacaatttattttaataataccatccgaaggcttcacccacttgtgagtaataactggcctatagccatcactagttccatgaaaatacaaaccattggccttacgatatcgttcaatgtactcaaggatccactcaacaacaagcttattataaatcattttcttttcattaacaagtatattgcgtctataccaaattcgcctgaggcaaacaagaaatttcttaagagttaaagaagaaaatttttcccaaagagacagtaaaaactcatagaaatccatccctggaatgtaggatatgcaagcaaaactagccaaagagtccaaaatctgtctcaaagaatcacaacccaaagagcatgctgagcagtcttaaggcctttagagcaaaattagcaataagtactcaagtagatgcccctgagcatcaggttgtaaaaggtaagcaactagttgtggctagctttccacaagaagtgtttcactttaactagtaagttcaacttccacaatttataccataataaaggtcccccattagaacccaaaagaccagctaagtgaatcccattccagtaactactatgcatcgtataataatcagactgatcatggtaccaaataagtttatccaaaaggaaaagatgaacccgatgaatagaaaggacagacttagccttctcctgacgaaaagatttgtgaatcaaatcttcttttcactgcccataagtatcaataaaaaagtcaacagttgtatccaagggaagggaaggaagtgatggtgatttattcccatcaagaagagaaattcaactatcatgataaatgaaaacctgcgtaccatctttaataagctagctagcgccatcttagaacaaattcttgccccacaaaatggatctccaaatgaaggaagacctcttagtattattcgcatcaagcagcgaagaagtggggaaataaatagcctccacgaatttaacaacaatggtctcagactcagagtaaaggcgagtaacctgttttccaacatagcttagctaaaaagaaaaagatcacagaaccccactccaccatcttttttgtgccaacaaagcttttcccatgtgcaccaatataacttccttttatccacccccaccccaccagaaacgggcacacaacctgtgaacctcattaataaaagtaacgagcaatctgaaaaggttcatggaataagtacagatatattgaatagtagatttgataaggacctccctaccactagaagggaatgatcgagatattcagtgaaaaagtttactccaatcgctatctcggatagattggaacaaacctttcttactttgacccacaaaacaagaaagaccaatgtatttctcatgacaagctatgacattcactgccaaaatagaagccatggatttgactacctcaacaggaacctgagaactgaagcatatagtagattttgtgaaattaatcaattgacccaaagcactaccataccatcccagtagctgcttaaatatgctacaagaaaactcagtagttttgaagaaaaacaaactatcatcagcaaaaaaagatgagatataggaggccccaatacaccatagtaaatcctagaaagtaagttgtccttataatcttggctgacaagagcagataaaccctcagcacaaatcaaaaacaaaaagagtgagagggggtccccttgtttgagaaccctactaaggactatgaccctgcatttcaccattcaaattaaaagtgtagtccaccaaagagatacaggtgaacaccaaagaaatccatctctcatgaaaccccacacaattataagccttagacatgtcaagtttaagagtgaacaccctagtcttgctcttaactcagcgtttgagatgataacacactcgaacccaatcatagtgttatcagttattagactatcagagagaaaaacactttgttcatctgaaaccacatcgcccaaaatctcataaagtctgttagtcataaccttagcaataattttgtaaaggacattgcaaaggttaatatgtctaaaattagaagcaagcttgggctcatcaacttttggaataagtgtaatcaaggtagaattagtaccaacaatactcccattctcattcaaaaaaaccgagaaaaaaattacacgcataatcaccccacaatcacctagtatttttggtaaaagccagcagacataccatctttcctatgactcttagaattgtacatctaaaaaagatcccatttaacatcatcacgagtataaggatggataaattgagaattcatggtagttgaaactttcatattgacaacattaagaaccagcctcatagacataaaggaaggagagtctgaactaaaaagtttgtgaaaatacccttggaaaatagaggcaagataagcttgggtttatctcaaaacattgttctcatcaagcaaagagtaaataaaattttgtttcctcctagcctaagcacactggtggaataaactagtattgcaatcaccaacgttaatacttttctttacaatgaagtacatgaagttctttctcaatagccacagaaacaccccagtttgaagaagagacaatgggggtctatatgttgcaactatttttttctgatgcataacattcttgctatgcctcctaaaatattactattccattttgtaagggccctctcaaccttattaattttattcactaaacactcaccattagaagttgagttcacttgccacaagaaaaagaacaataagtccacacgcctaagactgcaggtcaggaggtcgctataccttcctataagctttatgtagatggatcctccaatgagcatagctctggtgcaagactcatcttagtaactctagagggatttcaaactcacagtgcattgtggctttagttcaccataacaaacaatgaagtggagtttgaggcaatcctaataggaatacgattagcactagcaatgaaagtcgagtcactcaaaatctacaattactcatatcaagatgttaattagattctcggcgagtagaaagctcgagggtcaaacatgatagcatacttaagcaaagctaaagatttattagcccaactcaacgtactactccatccaacaagtaccacatgaacagaacgtaaaccctacactcactagctaaactagctagttcaatagaaattgacactcttagtgtaggtcccgtcaattaccatccaaatgaagcatcaacgaagactcaaagcctatccttatgaccgaaaaatagtacatcatggatgaccctgattgcacaatacttagaacaaggtattcttccaactgattagaacgaagttaagagattgatgaggaaagcagctcgcttcatcatcatggatggagtaatgtacaaaagaggctactcctaattaggagaggcttaccagatttactgcatgttatgccgataggtcttgatccagaacgatcaagtaagtttgaccatgtagtgtcttaacaaactatagttattttagtgatccaccatgtagcaagttttcggtacctagtcggatcataggatcattctggaacaccccctaattaagtgacatgtacaaaatttacagcacattgtgctgataggtcttgatccagaacggtcgagtaagtttgaccacatagtgtcttaagtttgtaattttttgaacatgagtactaaactgaaatatcgagaactctattctcggtactataaactatttagaattttaaaaaatttacaagaatgatattatgactatagtgaatactgctatgtaatttttttttaaaaaaatattctaacatgtgaaatttcgagtggtttacgatgctgaaaataaagtttaaatattttgttgcatgcgccactattttttcttatacgcgtggtaagtagttgtttgaacatcaattttaatattgtaaactatttataatttttttaaaattttttatgtggtcctatatagttataatatacacaatcatgaaattggattaattttttttagatatcaaaaatagataaaaatttaccaaaatactcttataaaatgtgtaatacataaattttttcattgtattaaaataaagtattaattattatttaaaaatgtatcaatttaaatttattagtcatggttacgtaaaaaacaaattagtcatggttaatattttaattcacaaaagtaaattaaaatttctaatattttgttggatcgtatcttctattccttatttatatttattttttataatttttagataatgaaaattaattcttttataattcagttcaaaaataatgaaaaccagctattttattactaaaagcaaaaaaatttatttgcttaacccaacacaagcttgacacgcacatcaagtcaagcacattccaatttgcacaaagtagaaagcttctattataagcatcttaagtctttagatcactcatcaaattgtatactttaaataaaatcacttgtcacgactacatcgcgaggtaggcatacttgttagcaatagccagagttcagcactgtttcttttactgttgtaaccgtttgttatgccacttgttttggctattttattttctctgtttcttgttttcctctgtaacaaactctgcctctccttctataaatggtatcaggaagcttttgacccacgtcgaccatggatcctcgccaccctgaacccgctaccccgatgtagctgcttcaccagctcaccaatggaatccattccagaattctttgaattcctcgctcactgttcaactcgatcgaaccaactttcttgcgtgaaaatcgcaagtcattcctaccgtcatcggtcacggcctcgatgatattctacttgctggagttgctcctgttcccactcttgttaatggcaacatcaacccaaaatttaccacatagaaaagaaaagatcaattgttactcagctggctccgatcttccatgtctgaaacaattcttggatcgttagctcaatacaactcctcgtatgatgcttggcgtgctctggaacagagattcgccagtcaatccaaggcaagattacttcgaataaagtcccaactctccataattcagaaaggtaatctctctattactgattactatgataaagtgaagcttcttgccgattctttatccagtggtggtcatcctcttgatgacagtgatttgattatgcatatgttgaatggcttgggccctgaatatgatcctgtggtggttcatgttacaagtcttgtggatattctatctttagaatccattcaatctatgttactaacccatgaaagcaagctggaaagacactacaccttaaatgattcttcatctaaaataatggccaatctcactgtccacaactctcgttccaactctggtcctagttatcgttcctatgctggtcaaggtcgtggaaacttcacttctaatcgatctcacggacgatcttatggtcgtggcaaccagtctattccatgcctcctatgccaagtttgtcacaaatctggacacacaccagcagtatgtcactacagatttgacaaaaaatt

SEQ ID NO: 223095 - DNA, 1273 bp, Cannabis indica
gcgtgaaatagctgcagtaagggcagcacaagggagtagttcctgaaatcaacctgaccttggaagaagagattcacgaggcaaacctcgcaactcgcaaaccaaggggcaagagacaacccatacccagaactctcaggagatgcaacttgaggaaattgaggaaaatttgggggcacagcctgggacatatggaatatcggatggaaatcgccaaccctctcttcaggttcaccagaaaggaactcacacaaacccttatagggagaacagggtaaatcaaacctcaagaagaagagcaaggtccgacggcagtcacgacaggggtgacctgcgagagcatctgaacttgaaaaagcctgatcttcgtcaatgactcggtccaaaacacaaggttcactccatttgcgaatggagaagttggagaataagttcagaaagcacaaagtcaggaaatccagaaaacaatcggggtatgattctgttggagaatttgaatcgaaagcctcaagatcaaagagaaaagactattccaagaggctacccatggataagaaccacaacaagtatgtccctctttatgctgaatataccgagctcaaagaaactcgggaaaatatctacctcacacatgtacaggaaatcatttttagcgagccaaaacctatgaaacatgcgaggcgtaagagggacccaactaaacggtgtgaatatgatgaggatattggtcataccacgaaagaatgttgtcagctcaaaaatgagatagaaggtctcatagcgcgaggacactttcaacgatatgtaaaggggcaggacgatgtctattattagctcgatcttcccaatagctcgagtgaccagggatcataaccctcctctgtaggaggaagggacacctcggttatcttgagagggagcgagtcacaagaatacaaggggcagttaatccagtaaagtaattttgtaaaagaattgctacgtgagtagatatcggcccactatggtcaccatatcaagctgccacgtggaaagctggtcgtcaaccagtagcggtctaagacaaataactaaaaccaggattagttaacctggaaccccggaatatgccaaggattgaccttggatattgaagcaattgtgggaatatgttagggattgaccctgaacataaaaacccattttatcaaaaccagatgcttctggaagattgatgaaataaacgattgaactggggaagtttttacgaaattaatgattgtaagtcacattg

SEQ ID NO: 223096 - DNA, 1712 bp, Cannabis indica
acaatctcctcctgctactgcaattgcctcgattccagttgattcattgccacctcggtgtgaatcaaagaaagcttcagtcaagaaagcttcatctttaactccttcttccagcaagagagcacccaaaactcttgctcaaaaatctgtgaggcacacccaattgcccaagacttctaggtatggttcaaagtcttcttctccttttgctgagagctctccttctcgtggttctcagtcaccacttgctgcaactggtgatgctttagcagcatcaaccccaaaaggtccttcatctcagactcgtgcccagcaagcttctcttgaaaaggaagcatgaatcaaaaggtgtcatgacatgcctattcctacaactaaaagctcaagcttaattctccctcaacctcctcgagtaatgatgaagaagaagatcccatggaagtgtaatttggggaatctgattcaaaaactgagtctttttcatttaataaagaaatttctatagaaaatgatgttgtctcttctgaaagtgaggaattcccaattaaaattgaggaagattttgtttatttggatcttgaaccatcattgccaaaatctatagcagtaacttctcgatatgcttctatagtcaaagcatcaccagcagcaaagagaaaacaacatataaagagctctttcactagtaacctctcttcctctcaagctgtaaatttcatatattcttataatgacaatcagtgtgattagaattatatgctatccctaagtttaaaaatgaaaggaatcttgatttaaatgctcatagagtttatgacattgtgaagtatattcaatatcgaaattgggaggatactttaactggctttgaaggttatgttgatggcatagttaacaaattttatgctaatttgactgatgatttgcttgataaaaaatatgagttttttaaaaaagtttttgttcgcgaccattggttttcattcactgaagatgaaattgtcgaagccttgaaactgccaaaaggtgtgaaaagtgatgaagtgtctatggatcgtgattgcatttttattgaactcactagtgaactagttgaataggttgctggtcaaagtgtttgcatcactaatctcacttatgaccaagcctcactaatgcgatttgctcttagcaattggcttccaaactcgaacaagacaatggtgtctcaagacttggcttatcttcttttttgaatcactacaagggcaaatattaacttggcttctctcatcatggagcaaattgtttccttccgtagaggtaaaaaatgtagccacaagcttatttttcttaacctaatctataagcttctttcctcttagaagaacgtggcctattcaaatgaagctctcgagccaccagtcactggaaccatttttcaaacctcagagtactttggagctttccctaagcctcgtaaggcttctgttggggcaactctctctactgatgttccaagttctagttctgcttctatagatgtgcaggaagtcatcttgatgaacaattacttagctgccatggaggagatttagcgagaaatgtccaaacaattgtccaccttgatcaagctttatggggcttaagttttgtgttctctttcctttactttaacttatttgatgtttgtttgttggacttgttttcattcctttttgcctttggccctt

SEQ ID NO: 223097 - DNA, 1482 bp, Cannabis indica
atttttaacggccaaaaaaaatcagggggcacgatttagtacatgtcaaagttcgggaggaaaaactactaattaacctaattacaattgtaccaatactatttttttatattatcataaatgttacatctacattataattttacctttaaaataggtcatttatcatttaatattatttatataaattttataatttaaaaataattcggttacccatctgtgtactgaaaaaaaaattaacctatgcttattttgttttattagaaggagagattaaatcagttgtttgacaagaaagagagaagaagatagagaagagatagaaagagacattctcactccaaactttcaaaatttaatctctccaaatttggaaagattatagaaaaagacaaaatacattttgcaaaatataataactacctttaaaaaaataataaaattttattttaaaaaatgacaattttataatttaactaatcaattttttctccatttctaataccaaacaataccaaaaaaaaaaaattaacaattttctccatccctcttactcccatcgtctctaacttctccctcaatccatcctgctctacctccctcccaccaaacatagtctaaaattatacactaatatatataattattttttatttttaaaatgccacgattataccctctgaataaatataggcagtccagctctcagtctcagcctcggtatagaaactaacgccatggtttcactacgattcccattttcgttttctcagtcctcaacctcaacccttccttcccctaactcaccaccctttcgtgcctccactctcgctgtcaccgtcgctgccacggccgccgtcgccaccattgctgccaccgcagccgcctcagcttccaccaaagacactggcgctactccaaacccaaaacacccttttctccaagaagcgctaaattttttcttcgctaatcgttcgttacctctttggggctcactctctctagccaactctgcggatccagtcgttcattctcggactggggtatcgttcccttccatcctagctgattctcggaaacttttgggaattgggttaaggcgaaagagcgttttggggttaaagaacatcgatgtttacgcatttggtatctgttaaatcttttctcattacgatcaaaaattagcatatatatatatatatttatataatatgatattgatgatgcttatgtgctgcatggaaaattgaaatgttggtttaaaacaattttgttttgcaattctgttttattttgtacattatagtaagctaaattgggataaaattactgatatgtttagtgatgctatgctcattactataaagtggagagaatagttgcttcatagttcatagtgtgaatttgtaaaacaatgggaatgggcagagtaacctgagatttgttttatgtgtattgtgaattgtttgtgatgaaaat

SEQ ID NO: 223098 - DNA, 1499 bp, Cannabis indica
gagaatgaaaatcagataaatttccgccttcagaaaaattgagcctcctatcctattgtctatagccgaacctctctctccatattttcttcttcaattttttgaaaccttgagtgatagagtgagttcccacatacatcaagtggtatcgcaatcatagtctggaagattgtgaagaatccaaactgaagagaaggacattcgggctcagatcttggtgatactctgcgacagaaaggatacaaaggttagagatctgagcggaaggagacattgtattctgctacaacagctgtaaggtttcttatactttatttgtgtttatttcatatcgttttagaagttcatatttaggatgttaaataacatacttgttagtaaatctaagatcctggtaaaataattccaacactgcctggcgtccattctattagaacaacctgcataaccatgagctagcttgatgaaatcgcgattaagattaatttttaattaccgcttacctgagaaaataaaacatgcacctatgcagctatcaggctacttacatgcttcctattaggcttttcttatagcatactaataaagaaaactactaaggcataaaaaggcttactgaattgtgagtagagcataactctaatgatgtttttacatatcatgatttatcttcagaagataacttggcagctctaataccaaattgtgacaccttactagtttaggcatgttatcgtgattttttaatattgtgcactcctttgctaatcaaaggatttatagaaaaattgtgaatgatgaaaattttcttaattaaactttgaacttgaataaataaatattatacataatccaggatcccgtctttaaagttacaactattttacaaaatatatatttacaaaagttgtcacctagcgactatcaaaataaagcatgttatctcgaagatctaacactccaggtctaaccgccctaatatgtatgctcagttcagccttaaattttctattacctacagatataaacaatatatgtaagtcaacagactcaccaagaaaaacataatcataacatagcataaaccaaattataactaggcgcccatacaccaaattacaattttatcctgcatcccatgtttactgagtctagaatgttcgtacgacaatacgattgaccataatatcagcctatactcagtactctagttgtactatgataacatcaattcgtactatgccaaacatatatccgtcggtatttagtgcaactctatgtacactaatatcgccattacatatatgtaatctattaggaattcttaaacatgcatgctaaacatgcaaacacctatgtaattattatactaatcttaccttgatttcaaattcaggtgtaacggtcaacctgagtggaaactactgctcgacggtttacaggcccctaagcaataatatatgtaaaattgataaatgatacactaaatcactttcggg

SEQ ID NO: 223099 - DNA, 2112 bp, Cannabis indica
agcagtctcgccttttattgatcttcctctaatcgacgatgggttcattagcattttcatatacaagtacaaggataaactgcatatgttgggtgccattactgactttgagggtggtgctggacttgttcttgaaggtctgaagagtcctattgcatctgaatttgtcacaactgctggtacaatggcattattaaagtgcctcaaatctgtcatgtccaagtctcttgataagtcattgcctgacaattttcttgagaacattgctaaaagcaagtttctaaagacaacaaatggttaccttgttcctaaagaatgtgttctttttgattcaacctgggaaagtattttgaatcagactgatttaccaagtattgatgtgaagtgttacgagtcagacatatcggtgtacaaggagcagttaaaagccattggtgtaaaaacagattctatggaggtttgctctcttatttatcagcttctctattcgcagacaaatacttctctgataacaaggctgtataaattccttagtctgttcaactggaagccagagaagccagatgagttcaaatcacttgtctagataccaaccaatgttggtgacaagggaaaatggattgagtccaaactatgtatacttgatgacgacaacgatctatttggctcacacttgtattccctttctcatttttatgatgcagaattgctacctctatttctgtcagcttttggagttagagaattcccttcactggatgactatttccagttatggaatgattggacttcaagcagtgatcaccatgtttctaaggtacaatgccacttttttctgagaaggcatctcaaatattggaagcaagaaaccaaagaggctttcaagcaacacttgaccaagctttgtgccaccgcagcaacatgttcacatgacaagattcacttggtggacaaggaaagtgtttttataccagatgatcttcatttgaagaatatttttgagaatgtttcacttcctttgtttgtttggttccctactggcaacttttcatcttcctcgggggtactcatgatgatctatcagtatctaggagtgaatattttaagtgattctgtcaaggtggggagcatatttgcagaagatacagggccaaagaatctcataccgaaaaatgggctaattgaaaaaggtctcatcaaaatcatattggcttttcttgctggtcctttgcttaatatgcaacaaaaaaagagacaacaaattgttactacccttctcaacctctccctttacaagagtgatcaacccattaaagtcacctacttgctgaccccatatccaaatgaaatagtaaaagcagaaacaaagaaaatggttttttgggacaaaagctctaagcagttgatcgttgacgaatcaggctacaagaatagaagaagtagcatagagtttgcgtcctgttttgctcaagaaatctcagaaggactgctgctagaaggaagagcatgtgcagtgtctagtcttagcagaattatacacatggggtttgtgtacgaattcaaggaagattcagtggactacttgttagtcagagagaatttgaagatgttgaatgaagacaacgagtttcttggttccgcattccttgctaccaaacagtatggtaaaagagcagcacgagtgaaatcagagaaaatgtctcccttcacaccttcatgcaagaagtcatgcaggaggttattgccttgagttgatcctcctggtatgaaaatgccgttttttgaatgtgcctcttgttatgtttatatattgtatctcactttttgatgtctcttatgggactttggcttgtttatggcttgtaaatactccccaatagctaagcttctttgactctcgttgtgtaatctgagtcaatgtgttttgtattattagattgccttgttctagttagactttttttgggtagcaatggcataattgcacattgactattttcagtgagcaagtcttctattctattctcccactaatacatattttgttttgttttttgattgatgattggtgattggatttaggcttaggcttgggattgaaatctggtttgg

SEQ ID NO: 223100 - DNA, 1279 bp, Cannabis indica
  modified_base (1233)..(1233): a, c, t, g, unknown or other
tggtttgtggacagtggagctagtaatcatgttactgctgatgaaaacaacatgattcagaagaatgagtatggtggtaaggaaaaactcaccataggtgatggtaatagccttaacatttcacattttggctatggcaaattgcaaacaaacaatgagtcgaactctctgttgctgaataacatgttgttagttcctgatattgcaaaaaatctgttaagtgtgtcaagtttagttgctgacaatgaaatatttgttgaatttcatcctaaatgttattttgtgaaggacaaacacacaaagagggtgctgctggaaggagtacttagagatggtctctaccaattcagcaacaagttttctcacaaacaaaaacagccaaagtgtttttcaggtgtctctaatgtgtctaagtctaaagtagtctcaactactagtgttaatctttccaagaaggatatatggcataggcgtttaggccatccatccactagagttcttaaactcatttgtgactccaacaatgtaaaaattcccaaagatgaaatagaaaatttttgtgaagcttgtcaacttggaaaatctcatgccttgccatttaaactgtcttctttcagagcctctaaagtacttgagttaattcacactgatttgtggggtcctgccccgattgcatcaaatactaatttcaagttttacatacatttcattgatgacttcagcagatttacttggatttatcctttgaaaaacaaatctgatgcactcaatgcttttgttgaatttaaagattttgctgaaaaccaatttgaaaataaaattaaaagtattaaatgcgattggggtggagagtgtcaagcttttgaaagtttagtcaaaaccaatggtattcattttcaacactcatgtcctcacacttcagcacaaaatgggagagctgaaaggaagcacagacacattgttgaaatgggtctgacattgcttgctcaaactaacatgcccttaaaatattgggttgatgcctttcaaacctctgtgtatctgatcaatagactcccaactcccattttgcataacaaaactccatttgaaactctattctgtaagcagtcagattataagcaaataaaaaacctttggggctgcttgctacccttgcattcgaccctatcaacaacacaaatttcagtttcactcactgaaatgtgtgaatctagggtcaatgaatctacngaggctataagtgcttaacgtcaccacaggccgagtctatgtgtct

SEQ ID NO: 223101 - DNA, 2207 bp, Cannabis indica
tgtctaattttagtaaaaaattctaatatgaatgaaagttcaggggtataatttaatacatatcaaagttcaaggggcatgatttgctagatattaaagtctggagaacatgatgtattacataaataaaaaacagtaaaattgaaagaaattacacaaaagtccttaaatctaaccatatatcaatagtttatggagaatttttaaaaccaaaaaataccaaaacataatttagtacatgtaaaagttacgattcaaaaaatgctaattacccttaaaaaacaaaaggaattactccacttatccccaaaacaatacctccagcagcctcaaacctcttcttgtctctctttcgacttccagccgcggtgaggaagaaaccaggcgaaccttgaattttaggcttaagcatcctaggtcggatttgctacataagatgagtgttcctgagccatgtcgaaatttaggcaaagtttgttgtttcttgaattttgaattttccgatttaatgtggggattattggttttgatagaatataattaggaatttgaatgagactatgtttttgcccagattttgaatatcgacagaaagataccttctttttgaaaatataaataaataaagtcttttaacttttaatttgatcaaaacgtagactttagagataaaggtaagttttttctttctttctttcttttgaattttgaggtttaatgtgggaatttttgggttttgaggaagggcattattgttgttttgtataatctaatgaggaatttaaaggagcctatatcggccagattgtgaatttgggcagaaaaatacctgctttatttgaatttattagatagtgttatgataaaagtttgatttacacttcagactcaaagttttaatttgatcaaaacaaagactttagagttgagtggcacaatgattgtccctcttctgctttttcttagaggtttaaccgttttagtactatttccagttactgaaccatagttttccctatttgttataggagctataataaaattgagagttttgtccttgagaatggaaaggaactttcttgatatgcttttaagggatagaaggacacccttgttgatatgatgatagtatgatattttttttaagagggagggtgattgattctgttgataattgctacttgcttgatttgagggctcaaatgaaatcctatatttggacagagaccgttcaatgcgctcattttttttcttaatagagatgataagaactagtgctgataggaaaacattattgatatcataatctcgttaaacactactaattttggggactcatatgaaatgttataattgaagaaaaacctttcttctttttagtaagcattttacaattagagtggaacacatttgtgtgaaaactttctcacagcaagaactcctccaatagtttgaagaatttgtgcatataaatttacatgtgtgttggttacaagacttaccttaatgaacatgtttctcgaagtcgcttcaattttttcctgtaatactcattatgaactgaagttataaggtgagatgctgttctcatcaatactcattatgaatgtgatagcttgtgcataagaaacatgtgcaagaattccaaggttagcataatttattccctttcttttaatttcttagtccatcactttgaggccacaatcaaggcgccaatttaaataattggtttagtcataaacaaaactgccaagaaactcagcacatgcttcaggagctgctcttgacagtctatagttaccattcttgaaaatcaacagactcatcagcccctttaactccaactttcacctgcaaattcccactaataagaaatgacacaaaacaattcacaattcctatttgtatatgtaatttaaacaaacactaaattcctatttgtataagtaattcacaattcacaattcacaattcacctgcaccacctgctgcctcattgctactgctctgctgggagcttttggtgcctgtgaagtcttttatggttttccttgtctgtattgtgtgttccttgtctgtctgtttctttgtttgctcttttagtttgtctttgtttgtttcagtagttctggagggttttgtccctgaggctacttagactcctgttgttcctgtttcttcgttttttcaatgaatgggtgctt

SEQ ID NO: 223102 - DNA, 1415 bp, Cannabis indica
agctaatgcatcagctttaccatttttttgatctaggatgtgatttacaattatattttgaaattggccaagcaaatatttagccttttcatgataagggactaaattatcatgcttgactgcaaatttgccactcattttttttaataatcaaaagagaatcaccaaaaacctccaatgactgtatttgcattttgagtgcaactttgaggccgataactaatgcttcgtattttgctacattattggtgcacatagctagaatatggaaagagtaaggtatcaggcctcttgacagtgttacaaagacaattccagcacctgccccactacttcttgttgtcccatcaaaatataattgccatgatgaaatatcaactgtgaaaacttcttcgtcaagaagatcttcttgcaactccatatcatctggaattgggtgtgctgccgaaaagtcagccaaagcttgtccttttattgctttctgcgggacaaaattaatttcaaattctgagagaaccatagaccatttggctagtcgtccagacaacatgggttttgatagaatgtatcttaaagggtcagattttgacactaaagtcacaaggtatgagtataaataatgttgtaattttgtgatggcaaaaattagagccaagcacaccttcagaattggagggtagttttgttctgcccctactaaagttctacttaagtagtaaagagcaacttctttttcctcctcattgttctgtgccagcaaggctcccaaggagcgatcaagtgaagtgatatataatatcaatgactttctaagattggagctctcaacactgggggatgtaactggtgcttcttaatactttcaaaagcattctggcatgcctcatcccaaatgaatgggacatttttctgcatcaatcttgaaaaaggttgacatcaaccagacatatttgagatgaaccttcgaatatatgcaaatcttccttgtagtccacttagttgacgtaaattacggtggggggggggggcatttccaaaattactttgatttttacaggggcaatttcaataccttgatgtttgatgataaacccaaggaactttcctgaagttaccccaaattcacattttaaaggattcatctgagattgtgttgcttgagcccgtcaaagactcattttaaatcattaagatgatttgtcctttcttttgttttgaccactaaatcgttgacataacattcgacagtattgtgcatcatgttctcaaaaattgtggtcactgctctttggtaggttgcccctagattcttgaggccaaatggcataactgtataacaaaataggccttttagtgtccgaaaatcaatgagctcttcctcgtcgggtgccgttttgatttgattgtacctagaa

SEQ ID NO: 223103 - DNA, 1793 bp, Cannabis indica
aaccttttattcgatcgaaaagtgaattcgatgttgtcccgtttaggcgagagtcaaggtcatttctatttcaatagcctccaccattgtttctattgacctcgcttttagccaacgacaacaattttattttaacaagcgataagtgatttataacaatagatatataataaagcaatataaagacacacaaatgttttagaggttcagccccgaggagttcggtaatagcctaatcctcgttatttgtattgacttaagatcaaggagaaagaatccttttcttatagctcttacaacagtatatctgaatgtataattcttagataatatatttagggtatagtcttagctcagctgttttttgacctcttgcctagtgaacatgtatcactatttatagggctagtaagcttggagaggaagagtttcccctctcgttacaatacttataaacagaaagatcttgggatcaatactaaatacaaggatcgtgggattgaggatgaatacattgatagggggatcgtgtgtgtgccatatccacgtaatctgatccaagagttatagggattgcgctgatgactcacgatgcaaaagatgaatttgctaagtgttggttgttgtgcacggattcctgaatactttgctctgagcatgccaacgaggaatcctactcggactatgcttctcgagcagacgttccaagtggattccacgtgtcacaattcatgtgatgctacgtcagagtgcaaaaattgggataacatttgcccccaagtctgtagggaacttctgaagttgcgtgtacacttcatccgagctgcttctgcctttagatggggacacgtgtcgagtgcgaccgttcgagatttgatgtgaggctgactgggcatcccttcggttttcagctaataaatgcttgacaattaatatttcgaaatgcaattttctctctccagggctggcgacgacacttgattattttttatttcccatattcgcttttaaggagggaaactgaggcgtctgaggttcctttgatatgattacctcatttcgtgacttgcctataaatatcaaacagtattagcacatcaactcattttcatcacccttctttgctatgtaagcttcacagcaaaacgagagattcttggtttcaaagttgtcgaagtcccttcaaaaaattgcttgctggattgatgttggtcgaacccagagatctgactctcgagtaagtttctgatttcctttatgcttatctttgcatgtttacatttcgaatgcaccttcgactctgttgtagaaaatgtctaggaaaccctaggtccagaaacttctgcgattcttctttatcatgtcttcatgcgattttatagtcataatgcttgtttctgaactgcgtaatgtatgtctttcatcttgcttattcgaatcttcatgaacttttttgccctaactcgagaaaaattttgacttcttgagttctgacttttctttgaacattctcgttctttaatctgttgagtactcgtggtcggcatatttgcttatttatcgtttgatattctgagcaaacactcatcttgtgtgttgtcttttgtagatgaactcaggtgagtcttgggagaacggacatcagatcgatccggacctgcttcaacttctgcacgaggatcatcctcgtcttcgttctagcccaccatcctctagtgaggactttctccaaatcctgtacccagccaaagaatgatggcatgtacaaagaaaacaacgcgtctggctgacgc

SEQ ID NO: 223104 - DNA, 1669 bp, Cannabis indica
cgagcaaggggcaggccttggcatattttatcctcgagttcccaagcaccgaagtggcattcataaacgacaagatcgacactgctgtaccaaatggagaaggatggacattgtacgccgatggggcttcgaatagtgaaggttcctgcggcagaatcctactaatcaatcccaacaattttaaggtacacgctgctttacgttttgaattttctgcatctaacaatgaagccgaatatgaggctttaattgcaggactggagcttgctctcgagatgagaatcgagtatttacaggctttcagcgattctcaaatcgtcgtatgccaggtgaatggagaatatctggccagaggcgggagattgtttaagtatctagccatagtatgcaaactgatgcagaaattcaagaaagtagtcgtgtcccgagtaccgcgtgctcgtaactcaaacgcagacgcaatggcccgtttggcctcaactagagaagctgaattactcgatgtaattcctgttgacgtattggctcacccaacgataaatcgagaagagacaacggaaatagatatcgcccaagaggtcacctggatgactccaatagtcgcatatctggaaaagggtatcttgcctggtaataatatggaagcaagaaaactgcggcagcgggctgcccgatatgtcatctatgatggaagattatatcacagaagcttcagccaaccattacttaaatgtatcgacgtggtagactgcgactacatactccgtgaggtacacgggggtatttatgggaatcatacttgtggtaattccctcgccctaaaaatcatgcaacaagggtattactggcctatcttgcgacaagacgctttcgctttcgcgaagaaatgcgacaaatgtcagcggatagccacatatacccatcaacctccaagcaacttgcactctatcacaagtccttggccttttgcagtatgggggatcgatttgataggtgaattacctaaaggaaaaggcggagccaagtatgttgtagtcgcggtcgactacttcacaaaatgggctgaggccaaagcactagcaaccattacagcgattaagttgcacgagtttgtctacaactccataatatgtcgatttggcatcccttacaagctcatttcagataatggaaagaaatttgattgtaaagagatgcgacaattatgcgatgacttgggaattataaaagcattctctgcagttgcttatccgcaaaacaatggacaaactgaagcagtcaataaaataataaatcacaccatcaaaggaaaactcaaggagcgtaagggggtatggccagacgagctttcgcaagttctatggtcatacaacatgacccccgatccacgactgacgagactcctttctcgctctcttatggatgtgaggctatggtaccagttgagattggggcaggctccctacgaagagatgttttcaacgttgaacagaatgaaaaaaagcagtcgctcttcctcgaccttctggaagaaaagcgcgatcaggctcacctgaaaaacgcggcttatcagcggcgaaccgcaagatatttcaattccaaggtcaaggcaagagtcctgcgagtaggagacttagggtgcattagtttttattaagatccagaccac

SEQ ID NO: 223105 - DNA, 1916 bp, Cannabis indica
aaacttacatttaattaatttccaaaaatttcagaaaaattttggtgtttttattgagagctaaggatctctgccaactggaaaagggagagtaaaatatgctatagttgttgtagacaacttcacctgggtagaagtgaaacctatgaacacggtcacctccaaaaaggccttggactttgtcatcaaaaacatcgtgtgtcgtttcagacttccacaaaagattgtctcagataatgggaagcaatttgacagcgtgcattttacgaatttctgtctccaacacggaattattaaaagcttctcagtcgtgaccagaccacaggctaatggccaagtggaagccgtaaacaaaattttgaaaactacgttgaagaaaaaactacaagttgacaaagcccactggccagaggagctttcgagagtcctttgggcgtatagaacgacagaaagaacttcaagggggcacacgccttactcgatggcttatgatcagagttgctggccacgacccacttctccgttgtcaactcgcaaatgttgttcgaagtctggtcaattatctccgaggcaaaaggcaccacatcgcctccaaccttgggtgccaagaactcactcaaggcggcgcaatccacaatcggctcgagacctcttctgcatcctccatcagctatctccgcttgcctcttcgattggagcaacgtagactatctttggacatctgtcatctcctcgtggtgcctcgttaggtagagattgacttcctctaccttttacagaacatccactttgagcaccttgggacgcaaggccagtcaaaattaagaggaatagatgggagagcaatgggagtttgcttctgctgctgatgcttttgaggttgtaacggttgttgttttgttgtggggatttttggatttgctgcagggtttatggctgtagctgttgaggttgtggttgtggttgtggtcgttgttgctgttgttgtggtggttgcaggggttgggttgttgttgttgttgttgttgtttttgttgttattgtatttgttgttgtttttgttgtaattgtatttgttgggtgtgctgctgttgttgttgcggtggtgacttttgttggtgttgttgttcttgctactggcctaatcgttgctaggtttgggcccgcctcaaatctccctccactccggaagactggtaggaatttcctaacaaattaaatagtaacaaagaagacagagtagattgtagatgaaaattgattgtattacttatcccagagttcgagagcagggttttctctccaaactgtcataaaacctttacaaaatatccacccctttctcaacacacacccacactttattcaaactaaaaccgagtgtatgacaactcacccacaccctaacaaaacctcttaactaactctttgccagctcactcctttctatctcatgtaatattcttcacagtagttttcttgggcctgcgagcgtaaacaaaagtaataggtggcctatcagggacctttgcctcatttctaccccctttgccttcttagcctccggctcggagctaggaggaagggagcgtttgttggcaagcgaccttctcaggaaagacgaagccttccccgttttcatctgaccaaacagtggcctccgtaccaccctgaggtaccttgggagcaggcatcccgaacgaaaccttgcctggagcaagatgaagttgctggataggctgaacttcaaggttttcatcactagttagggctgcttggcttctgaaagcttctgccactctaacagtgactttctctactcgcagagcaggtggagtggcgaaagaggaaggagtattaggtgtccttggcttatagacccttttggctctgcttttgcctttgcctttgccttt

SEQ ID NO: 223106 - DNA, 2322 bp, Cannabis indica
cgtaagtaatcgatatacattgcttcatatatataaactataaatatatattttgtattttaatcttttaataacataaatgtatatttgtattgattcatatatatgtcatactgtttattgatacttataggggaaagtatctattgtcatgtatattcatcagcagaactcttcgttgggctgtcaattatataaatctctcttttgatgttcatatttaattgaaatctatccacttgactcatgctcagaaaagattataaaaggaatgatttgtaaaaatctcagctcaaattatgctgagtgattctattgctttatatagacaaggttcattacagcaatacaatggtagggcaagagagccgttagtgcactgtacaggtggcaaaataaaaaagggaatattttcgatcccaaggacaataaaatgattgttttaatcattacatcataacagaaaaatgggaccacagaattcccacgaggcagatattctccaggaggcaggggagtctgctgttgaggtgcagagtaaagaatgcaccctcatgactcatttctttacatcccctctcaaactgaggggtgatttaaccactccaagtttgcttgtaagaaattggaatcgagatgttgacagacccttagtgaagcaatcggccacctgatcatgtgagggtatgtacctcacctccaattgtttattcagtaccttgtctctgatgaaatgaacgtctacctcaatgtgtttcgtccttgcgtgaaacaccggattggatgccagagcatttgctccttgattatcgcaccatgctacagcagtagacaaaggaaattcaagttccttcaacaaggattcaatccacgaaatttcagctgcaacatgcgctaacgctctatactccgattcggtacttgaccttgacacaacagcctgtttctttgaggaccatgacacaagagtgttgccaaaatacacacaataaccagctacggatcttctgtcgtcggggcagcaagcccaatccgcatctgagtatcccgttagtctcaattgcgaatcacagcctatgtgcaaaccatgtttcatggttccttttagatatcgaagtactcgcttggctccattccagtgagctgtagttggggctttaaggaattggctaagcttgtttacagcgtacgagatgtctggtcgagtatggcttaaatattgtaggccaccaatgatactcctgtaggcagtgggatcatttagagactctccatcactcaaagacattggtttacctgctgtagctggagtgggacaggtctttagattagtgaaattagttctccttaggagttcctcaatatatctggtttgtgtcagatagatacctgtctcatcacgatagacttctattcccaaaaagaagtgtagtggaccgaggtccttcaatgtgaatctcttgttgagttcatctatgaactgcttcatgtgtttgctgtcattgcctgtcacaatgatatcgtcaacgtatattagaaccaagatgatgattgtatctgttttgtagaaaaagagtgatgtatcagcctttgagtttctaaatttccagcttgagagtgtgcttttgagtttctcgaaccatgctcgaggtgcttgtcgaagcccatataaggatttgttcagtttacacacatagtcttcttttcctttttcaacaaagccttcaggttgtgccatgaacacatcttccaccaaggtgccattcaagaacgcattattaatgtctaattgccttatgtcccagcctcttgtgactgcaatggtaagtacgattcgaactgttgaggccttgataacggggctgaaagtctctccaaaatcgatacctggcctttgatgaaatcctttcgcaacaaggcgagctttgaacctttgaaatgagccatcagcatttaacttctcacgatacacccatttgtttccaataagattttgatcatcacttcgagggactagtatccatgttttgttcctctttaatgcgataatttcgctgttcatagcactgttccagccaggatgggcaagagcttcagcaaccgtaagtggttcaggagtgtgtggatgccaggcagctgttccagcaaaaacccgaggcttgaatatgccggccttggcacgagtgaccatgggatgaccagttgggacagttggagcaggtgaaaaaccagtagatgcttgagtttgagaagcagcaggtgaatttgggtcaggtagatcgaaaagaatgggacttcggggaagatggttatggcttcccc

SEQ ID NO: 223107 - DNA, 1936 bp, Cannabis indica
cgggtatagagttcattgctaggcaatatccactcttgattgtgtagactccattttcttcataatgtcatatgacctgtatacagatataatgttaatatgtaaagaatgaaatgatatatcataataaagaataaacttatctaataaaataattatagacaaaactcgtgatcagaaattatagatagttggagtactattggaacattcaaattaaatcatctattaagtttctaagaaaattataattacaaaataaaagtacatataattgtttagatacacttcttatcatctattaagccataaagcacgacggagtggataatgatgaacttattatactgaagattctgaaaaatataaataataattatagctatatattcgctgaagcttttgtttaattgaaagtttggaaatcaataaaaatcactttaatatcagctgtctattgaaaatttccaatcgatcaatattgaacgctccctatcacataaggtctatacatttcttccattcatttattaatagatattcttcatattttttgcatattccagaatattatcaactccaggtacaaacattagagataatattatatgtatttagaatgcatatcatatatagtcattattatgtatatataaccaacaaaccggattgggcttaaaggtaatgacaatattaaattaacatccacttccaagaacatattgcataatagaggtatattccaagttctgtctaacttgataagttcattgaccactaatggggtaattctttgacatatcaaaggtctaaaattatgaggtataggtaaccatggtattttcatgatttgtattgaggcaccatctcccacagcccatcgtatacctttatttagcaactgatgaccccaaaaaattactctccatgtttgggataaggcatacccaagtggtgcttcaaggaaagttcctcttgggtagtatctacctttataaacctgtgtcgttatcgatgtagggtcaactaataatctccaagcttgtttggctaataaagcctgattgaaacattgaagatctctaaatcccatacccccttgatccttggataaacacatatttctctatattaaccaatgcatcctttttttggatgaggttgtaccccaccaaaattgtgtcattatactttccgaatcgtccaaaattgagatgggcacctagaaataactcatagtgtatgttggcatagattgagctaacgccttaagtaaaatctccttccctccaaacaagaatagcctctcattccattgtgataatttttctttaaagttatccttaatgtatccaaacatttctttctatgatttattgcaaaaacttggtaaacccaagtagcttttgtgacactcaccaatatccatatgaagcttttgtcccaaatattcttgaatacctctattagtatttggagaaaaagtaagcaaagatttatcaaaattaactttatgtccggaagccgattcataacacaataaaatactatgcaaagtatcacaacattggtttgaagcttcacatagtagtaaagagtcctcaacaaagagtaggtgtgatatagaaggagcatgtctgttgatattaaaaccccttaacaaattacaattttcaacatattgtaataatcttgataatccttctgttatgatgagaaataaaaagggggataaaggatcacttagtctaagccacgctgggaaataacttgaccttggggttgtccattaatgagaaacttgtagtttactgtcatgacaatgcataataagagcaaccaatttatgatgaaatctaacctttccaacattgcttccaaaaaagaccattccacacgatcataagcttttgcaatatctaatttcattatcaca

SEQ ID NO: 223108 - DNA, 1642 bp, Cannabis indica
aaaaagacaaactccataggaacgggaacaacagtaggggcctacccttgtcttttaggacaagtttggtgtcttttgtcctgataacttttgtctcaacaaatcttgtcttgataaattttatcttaacaatttttatcttttctctatttaattaatttgaaaaaatatttttttattacaaaaataaataattactattttgcatattcaaaaaagatttttcaaatatctttatacaactttttatccctacccttgatggtatttcaaggtggcgatttggggaccatggacctataattctaagctccaattaactagattagttattaagtctcatcaaccaaatatttcttgtttattaattctacgattacttcactataaatatagaattgatctcttagtaattatagaattatatttactaagtttaaatgcagtgtccattgatataattaattctagtgattttggtttgtaattagttttggtcaaataactattttacccttcgaattacttctttatccttaagtatcattaattcactattggaagtataatttaaatcctatctaaatttgtgcacaacattccagttctagaattaacacttataaggaaccaacattcgatctgttaggaaagtcgggattctataattgtacatcatgttctcagtcatccacattattagattcccaaaacagaagttataagaatcatcttctttgagaaactgtaacgagtgaatcaaagaaactaataacatgaacatgagttcatgataacttaggatttaggccaatccactactgatcatcgttatgatatgaattaggtctttacgataaacgacatgttaataagataacttcattcatatcagtcattgtcatacataatatctattatgtacaacaccttcactttgatgtcatactacctccgtaatccaaactaagattacttgcaacgaagaacgagtatcagtgaactgtactagcaaccattgattaaatattctataactttaatatgttgatgactgttttattcataactaagtgctcttagttctctctacagctgcaagccatagcctcatatatgaataaggaattttttgatatttaatataaattattcaataataatataaataacttaacaatcatacataaatcaaatgttcaactctttatttaataatcaaaaaaagtctttacatgctttttaagataacaatctcccacttaccctaaaaacaaattgggcatctcccttagtcccatattactaatatgacccacaaaagattttgtgggtagagtctttgtgaatggatctgccatgttatattctgacgcgatcttcaagaccgtcacatcacctctctctactatattccttagtagatggtacttcctctcaatgtgcttgcctctcttgtggctccttggttccttagagttcaccaccggtccactattgacacagtagagcactagtggtttttctacttctcgaactacttctaaagtagtgtagaatttcttcaaccaaacttcttccttagcttcttcacaagttgttatatattcagcttccatggttgaatctgcaatactggttt

SEQ ID NO: 223109 - DNA, 3163 bp, Cannabis indica
gaaactgaagttacacaggacataatcaagtgaacccaatggcggtgaaagcccattcgaagcaacatattctcaataaagttccactcaactctgtcatacgctttactcatgtcaagcttgatagccataaaaccctccttcccaactctcttccttttcagatagtgcataatctcgaaagcaaccataatattgtccgatattaatcggcctgggagaaaagcactttgatgatttgagatcaccacgggcaaaacatctttaaatcgattggccaacaccttagaaatgatcttataaagcacattacataaagatataggccgcaaatcagtcatagactccggatgttttttcttaggaataagcacaatattagtatgatttaactctcttggaaaagaaccaatgacaaagaaattcttaacaagagtaataatatcattacctacagtgctccaacatttttgataaaatcccgaggtcattccatcaggtcccagagatttatccggatgcatttggaaaagagcatgacgaacctcatcatccgtaaccggttccaacaaccggttgttgtgttcacttgtgactgccgagggaacacaatggagaacatcagtatcattcacggctgtagcagtgaataatgctgaaaaataatccaccatgaccgaaggaagccttccattccaatcaacccaaacgccatctgcatctttcaacttttgtatcgagttacgacgtcctttaaatgtagccgaagcatgaaaatatttagagttgctatccctttcacgcaaccaaagttgcttgcttctttgcttccaaaaaatctcacgctgcagtaacactttattcaagttggccgaagcctttttgaagttctctatggacacatcatcacggccccgcttccaacgttgcacctccaacttgcaatctttaattctcttaggaaagttccctgaataatcctttccccaacgccaaagaacctcaccacagttcttaaccttagccataattcctctcggttcatcattcctccaacaactctttacaatcttaaaaaacaaaggttctttcaaccaagagttttcaaagcgaaacacttgattcctagaaaccaccacttcattaactaacaccaagtttaagggagtatgatccgaagtagaaacttctaagttaaaaagtttggctaaaggaagaagtctaaccaagattggttcaccaaggcacgatctatatgaacttccactcactccggcttgccacgactacgctcccaagtatacgggtagccatacaactcaagatcatgtaagtcacaatccaccaaagtttcattaaagccctctactaaccacctcggataaggattaccgccttttttgtcgtcttgggaagtaacattgttaagatcacctataatacaccaaggcaaactagacttacttttcagctcccggattaaatcccaagttctttttcgcaagttcctattgggctcaccatacaatcccgtcatccaccaatgaccttgatcacaaccacaaattactacatcaatataggacaccccatactccaacacttggacatcctcctcatctttccacaaaagagcaacaccaccactcttcccttgacaatcgaccgccaaagcaccctcaaacccaatcgccacacgaactttctccaccaaatccttcttagcaagagtttcacataaaaataaaaaactgggcttcttttggaccacaaggtccttcaagaattgttgagcccatgggttcttaagcccatggcaattccaagagataatattcatgatgatgggtgggcctgcataccaaggcccacctgtgattcgttttttgacccaacaagcccagcagctccactcaaccccttagccgaaactgcctcctcaccatgcacgacacctaccctccctgtacgtctccgcttactgtccagcaacaccaccaaatcttcatcatcattattctcctcatcagatgccaatgattgagcatctccatccccaccaggctgccgacacatcttcacactttccatatatatttctttctttttttgccttcctaatttcatgggatcatgatcaccaccatggtcaacacaatcaacatccatgatttttggggaagcatttacttcagtattcatcaccattcgaacggccggcgctaacaccaccaccgctccaccatccagatcagtccgaagccattgagagccaacacgataatttttcctcctcatatccgcaagcatagcagcaccgtacggcttcaccaactgctcaacaggttgttcaaatcgtttcggacatgaacgttccgaatgtccaataattccacacacaatgcaaaaagtagggaggtgttcatatttaaagtttgcccaaatccactctccattctccttacaaagcttcatccttctctttagaggcttagcaatatcaaccgttgtacgaacacgtaaatattctcgccaaatgccattaaaattcttcggatcagattttatatacgtacctctatagccaccagcactccgaactaccctctccaacatgaaacccgatttcagatcatgaatctgaacccagaagtctatcttgtgtaatggcactaccttcgtgtcttctcctttcttcagtctatgaaacacaaggggacaccgattaaatgtccaagggctgccatctatgacagtttggacatcaagttcatgaaagaattggaatagatatctatttgaccctctttgatgaaaacacccttacccggttgccaaagtgaggccatcaaatgcctcatcgcatcaaagtccatcggccttcccgtaagaaacttcccaaccaagcaccaccgatcatcaaataaaacttcttcagcctcatcatccccccaatcaagactccttcctcctcatcatccaagctaatctgagcatattgctcattcaaatcaaaatcgtgttgactactagaagccatgagaatcaaaagacaagaaaacaaccttaaacacttgagagaacttttaccaacatgtcataccacaagacattttttgtgaaatatatattttacttggaagactttgtgtagaaactcaaa

SEQ ID NO: 223110 - DNA, 1840 bp, Cannabis indica
ttttttttttttttgcttttccaaataaccctaaattaactataagaagaaaaatttacggagacttcaaacagaattaacacatatgcctgtatgagagtttatgtgatttatttttgaaattatcctaattaatagcctaatatttcatgatcattttaatgtatatagtaatgatgatgatgaggaattacgtaggtagtagtacatctagagggtcatataggctagagttttgatattgacgggtctgattcggagggtggagcctgtccataaagccttggaaatgattttgtaggcgtgctctgttggatggaagtaatcccagaatagatactcttctggcttctcacatattttgtatccctctctaccacattgaacttctcctcttagaactccctcgccgcaacatgcttctgacacatttttaaaacctacatacgtactcaaaaatatcaaacaattaattatatatatagccaatttacttacgttaaatatatagactcttacattatatatatagactactatatatatacagataatgcattgcatgtgatattataattattatctgacttaattgattaacattattttctacagtattatatatactcaaaggaactttctcgatagtcctctaacgcagcccaaaaaatttgtatagtataataagcttttagcaaacttaattataaatcaactaatgtatatgaattaagtagggtgtagctatatattgctctaattttcgttatatcattcaatactttagatatatacacatgcattatttaattaactaaccatattaattttgaagaaatgtatgattcagttggctaacggttggtcagtgtgtagtttacaaaaattgttttaccacccaaatagagccaatggcttgtgatattaattagtttttttttagctaggccaatcatagaaaccaaacaaaagaataaataagaaacaaatgcctacaactaaaaagtaagagaccaaaactagaaaagttacatgataattttaaattcccttgaaccggatttattttattattttttaatagttatttctaccccaacaaacttaagcaactcgataattaagttagttaaagtcctcatttgtttagtgcgtctcttgtaacactatagatagtgatcacattcattatgaaagaaaaattgagagattgaaggatgttaaagacactcgcatttatttgattgagaggatctcaagtactggaggattttgtaaggaggaagtctccattgagtcaagcactttgtctttgttttataactctattctgccattaataaagataataccaataatcattgaaggttgttttctctcgtgaattaagctcatgatcatctccccgattgtatagcccaaccctgtaagctttgtattcactttgtttatgttttatgttcaaatttgttttttgtttggtgtttcattcattgatatgtttaacattatttctcatgttttgttttggatcttattcggagtttgagactccacaattggtatcagagcactactacaaaaaagacttgtaaaagaattttttttctatcattaaaaaaatattaccatagctctaaaaggtaaaaaagaatatgttgaaaccctttagaggcgcttatttccatacaaccacctctaaaggggtgttgtaaacttctaaatgggttttaggacataagaaaaatcgaatgaacccttataaaccctaacaaaaaatttagctacgtcagccacaaaaaaaaacctttaaaaccctgaagaaactctctctctctct

SEQ ID NO: 223111 - DNA, 2224 bp, Cannabis indica
atagtttcggatagagatccgaagtttacctcaaagttttggcagagtttgcaacaggctgtgggtacgaaactgaagtttagtacagcattccatccccagactgatggacagtccgaaaggacaattaagatactggaagatatgttacgagcctgtgttatggatttcgagggctcctcgagtaagtacctaccgttgatagagttctcgtacaataacagttatcagagtacgataggaatggctccctatgaactgttgtatggaaggaagtgtagatctcccatccattgggatgagacagggggaggaaatacctaggtcgagaatcagtgcggcggaccaatgaggcatttgagaaaattcaagctagaatgcttgcctctcaaagtagacaaaagagttatgcagattcgaaacgcagaaatgttgagttctaagtaggggatcacatgtttttacgagtatctccaatgaaggggatctaatgtttcgggaaaagaggcaagttatgccctagatttataggacctttcgagattctcgagaaggttggacaagtggcatatcgattagctttgcctccagatcttgcggcagttcacaacgtatttcatgtctctatgcttagagaatacgttccagatcctgctcatgtacttagttatgagaatcttgagctgcaaccagatatgtcttatgaagaacaaccagttcagatccttgatagaaagaataaggttcttcggaacaagaccacaactctagtcaaagtactctggagaaatagcaaggtggaggaagccacctgggagttagaatcagacatgagagtccaatatccagagttgttcaggttagatttcgaggacgaaatccttttaaggccggataattgtaaagaccgcttggcttaaatttggaaattagcagacatttagcgtttaattatgaaaattagttattaattctaaactattaatttatgatgattttattgaatttagaatgcattttatatgtcatatatagacatttcgtattttttcatgtttagtgcccagcaacattggaacacggtgtatggcttagtagaatcacatcttagtattttggtatagtggggagatatagttagacattgggaatgtcgggattggtcaggattttagaatttcccaagttatcccttagtgatttttagtgttaaggggaaaaatggacattttatgatgaagtgttttgtctttagtgattttaaatttaagcttataatttgtttatttgatttatgttggctgagatttattttaacaaaaagaaagaaaagaattagtttaattcatgttttacaaaactaaggaaaatatcacattttcactctctctctttctctctttggaatccacctagaggcagctagggtttgtcaattttcttcttcatttcaagcttaattcagcaaggtgttggtggtttcaagctttaggtaagcttctagtaactccctcatagttctcttgagtttgaagttatgaattttgcatgtttttaggaattgagttaagtagctgttgtgtgtatgggtttgttttcagaagcttgtttatgtttggttatgttgattcaagcatgttttagtgattgttaagtagtttaaccaagttttgagtttagagctcaattttggagctttaatggcaagttttgattctatgcttgtaggtgtgttttgttgattggaaaataatctttaggatgcttagaacaggtctggaaggtttcatgtggattggggttgatttgaatgagttaggaaatttttagtctttcctgcactgaaccggaattccggttcaaaggggcctgtaagaaccggaattccagttggctcccaggaaaccccacagaaccggaattctggttggggtaccggtctaccacttgggcaatttcgggaaccctaatttttcccatttggtgttgtttagggtattgccatgttatttatcaatagggaaactttttgtttcaagtttaagaccccgaaaagtgatttagcgtgtcactcacctatgttatgattgatgtgatttaggagcctgtaattcgccgagcagttgttccactcaagttggccggcacacctgaattcgaaatcaaggtaagattagtataatgtaatgcgtatgcttatatatgtttagcgtacatgttagtt

SEQ ID NO: 223112 - DNA, 3693 bp, Cannabis indica
tatttttcttgctaattgctaacttgtttctttcaaaattgtcttcgtgtatttcacgaattgaaggtgtatgcgacgtcaaggacatggtgtcattttaccggttgatcctgaaattgagaagaattgtaggagaaatagaagaaacaagaggcaagaaagagtttcagcaactgctcaaatagaagtaatcgtggctgagaatgctaatggcggtaacaatggaggcaacaacggtaataatggaggtgctgttgaagatcaagaaaatggtcgcagtctgagagattacattcttccaactcttacggaggtccagtcttgtataagaccacccaccgtagatgctaacaactttgaaatttagtgtgccgttctccaaatggggcaatcttcagtccagtttggtggacttccctctaaagaccccaatctgcacttgtcaaactttatggagttatgtcagactttcaaagtcaatggagtttgtgatgattccatccgcttgagactttttccattctcgcttagagagcgagccaagagttggttgatctccttgccattgaattctatagcaacatggactgatttggcaacgaactttctgtctaagttctttcctccagcaaagtctgctaagctgcgaggataaattaataatttctgtcaactggacaatgaatctctccatgaggcttgggagaggttcaaggatctcataaggatgtgtcctcatcatggtcttgagaagtgtatgctggtccacaacttctacaacgggctggttggtaaaactagaacacttatagatgtcgcagttggcaaggcatttatgaggaaaattgcaaatgaggcctatgaactgctacaagagatggccctgaaaaatcagcaatggccaactgaaaggacaaagaaggcggctggtatgcatgaggttgatgccataacaaaactgttagcccaggtaggggccctaacaaaattgatagatgtgcaggcaaaataggctcaagttgtttgtgagctctgtggaggcccccacccctatgaggaatgcccggttgatatgaatattttgccaatggatgaagcaaaagccattgggaattattctcaaacaacaactttgggttcaatcaaggagggtgtcgaaggaatagtgggttctatcagaaaagaaattagaaccaaacgcaaaaccagcaacaatcacaacaacaaggctctagtgggagttctagtcttcagagagatttattgctacagtttatgacggagactagatcatccattaaaggcttacagactcagatgggccagttggcaactcagataacaacctatcctcaggggaacttgcctagtacaaaagaggtcaatccaaaagaaaactggaaggcaattaccctgacaagtgggaagaagtatgaagggccggatgcggcacagccagtggaagaagagattcaggatcaaccggcaccgatatcaacagaaaagaagactactgaaagtcttgcaccaaaacaagtgtctccaccagttagtacagatcaccatgtgaagatcatgtacctgcaaagactccaaaagactaatctagacaagtagttttcaaaatttctagaggtctttaaaaggttgcacatcaacattccttttggtgaagccttggaacaaatgcatagctatgtgaagtttatgtaggagatcttgtcaaagaagagaaaaatggaagactatgaaacagtggcattgaccaagggttgtagcgcgccatattgccgaagaaactccctcgaaaactcaaagatcctgggagtttcaccattccttgcactattgcgagaatagaagggataaattcattgggtgacttaggagctagcattaacctaatgcctctgtcggttttcagaagatcgcagttgggtgaggcaaagccaactacagtaaccttgcaattggttgattgatcactagctcatccaaggggagtcattgaggatgtgttagtcaaagttgataagttcatcttcccagctaattttattgttctggacatggaagaagatagcaatgtcccaattattcttgggagaccattcttggcaactggtcaagcattgattgatgttaagaagggtgaattgaagctgcgagtgcaaggggaagaagtggtcttaatgtacttaaggctgtgacttttcccaaagggaagtgataattgtttctttgttgatctgattgatactattgtggagaataaaaagttgatagaagatcctttggaattgagcttaactgaggatgagttgacacagcaagaaggatggaggtgatggggtatgcaaaatggctcgactcctatgggccattgaataggaagtattatgaagagttgggggttgtgccatctacagagaaaccactagagttagaactgaaggtgcttcctaatcatttacggtacgaattctcgggagaagacaagaagcttccagtgatagtgttatcttcactttttgatgtggagattgacaagttgcttagaatacttcgggcacacactaaagccattgggtggacattggctgacattatgggattagtccttcaagagttatgcatcaaattttaatggaggaggatgctaaaccaactattgatgcacaccgaagacttaatccaccaatgaaagaggttttcagaaagtaggtggtcaagtggttagatgttggagtggcttacccaatttcagatagcaagtgggttagccagtgcaagtagtacgaaagaaggggggaatgacagtgataaagaatgagaagaacaaattaatcacaagaacggttactggttggagaatctacattgactacaggaaactgaacaaggcaacaaggaacgaccattttcctttgccctttattgattagatgttagaccggttggctaggcaagagtactactatttcttagatggttattctggctaccatcgaatagccatagcacttgaggatcaagagaagacgacatttacatgtccatatggcacttttgctttcaagagaatgccatttggactatgtaatgctctagcaacatttcagaggtgtatgatggctatctttttagacttgattgaaacatgtatagagatctttatggatgatttctcagttttcggttcttcctttgatgagtgtttggagaacttggagaaagtgttaatcagatgtgaggagtcaaacttggttcttaatttggaaaagtgccacttcatggtaatagaagggatagctctaggacataagatatcaaaggcaggcatcgaggtggatagagccaaggtgtcaacaatagagaatttaccccctcttgtctctgtaaaaggagtaaagagctttctgggccatgctgaattctactagagatttattaaggacttttgaaagatctcaaaactgctatccaatctacttgttaacggggttccttttgagtttggggaagaatgcttaaaagctttcaaagttctcaaggagaaattgatattggtgcctatagttacttcaccaaatttggagttaccattcgagctgatttgtgatgcaagtgactacgcaattggagtagtcttgggacagcgagttgacatggtgtttcacaccatctactatg

SEQ ID NO: 223113 - DNA, 1426 bp, Cannabis indica
aacatctgtctaaatgggggtcaagtgggaagctttaacccttcctgtgggcttcggcaaggtgaccctctctcaccctatttgttcatctgggcagcagaagtgttatctagactttttcatgtggcgcttgatcagggttctattcaaggcattaagctaagtcgaggtgggccgactctatctcatatcttctttgcggatgatctaatccttgtcggccgagcaaatttagtggaggtggacagatactggggatgtttagagaatttctgctcatggtcgggccaacgggtcaacaaactcaaaacttccattttctttagtagaaataccccggtgagactacgcgaggagattaaggaagcgttgggaattgatacccctgaaggctgtatcaaatacttggggctgcccttgtttagatcgagacagaaagatgctgacttcaattttattctggacaatctaacgtcaaagcttcagggttggaaagctaaaactctatccaaagctgggcgtgcaaccctcataaaatctgtgggcttgtctatgccaatgtatgctatgcaaacaaccaaactttcttctcgtatggttaacaaaattgatggcatggtcagagatttttggtggggctttgagaaaggaaatcatggtattcatctcagagcttgggataaactgtgtctcccaaagtcgcttggtggtctgggcttccgaaaaaccaaagaaatgaatctggcctttctggccaaatggggatggaatatcctcaccggaagccaatctctgtgttgtagagttttaagagcaaaatacctaaaagggaaagacttccttacctgcaaatataaggatgctgattcttggttttggaaaagtgttgtcaaagctaacgctatcttgagaaaaggtgcctgcaagatggttaccaatggtgagaatactaagatttgggacgatccctggatcccgcatcgtaagggcttctgtccgaaaccaatcgggggtccctaccccaatgtaaattgtgtggctgatttattgcttgataatgggcagtgggatgttccaaagctgcgaggctatttcgaccgtgacacagtctctgacattcttaaaggaggccacccttcgggtactggccctgacagctgggtgtggacgctagaaagttccgggcgattctcgtccaaatctgcttatctggcttaggctctcgaaagagctcctcactgtgaggtagctcctaaactctggaataagctatggaatagcaaaatttcggaacgacataaagtgctttggtggtgtatcctttctagtgccctcccggttagagcggtgatacgaaaaagattccacattgatgacacaacctgccccttatgtgggttgggggaggaatcgtttgaacatcttt

SEQ ID NO: 223114 - DNA, 1371 bp, Cannabis indica
cggatggtatgcaatgcatacccacaccaaatgcattcttttcattttttttccattttcttgacatatatacatatatattaataataacgtattaatgagttttaattatttgcatttgtttttaaaaaaaaaaaaaaagtattaattttttataaattaacaagtcttgtcttttgacgtagttctttagttttctctcattgggtttgtattactggtttttgatttgttcggtatttcatggcttctagtagttatcagtagatggaggaagaagagaacatggcgactataaccattgatgatgaagaagaggcggtattgtcctatgatgctagtaatactacgggaatgattattatgatcgagggtgtattgttggaaggttcttgacaaaaagatccatacattttgttgttatgcaccatttgatggcctctctttggcaaccgagtaagggtatgttcattaaagaattagatactaaccgatacttgtttcaattctatcacgagttagacatctaaagtatgattgatcgtagcccatggacatttaacaagttcttgctgatttttaaaagactaaagaggggggaagatcctagaatgatagtgttgaatgaagtcgatatgtgggtacagttacatgatcttcaatcagggttcaacacggcaacgatagtaaaagacattgccaattatattggtaagtatgtagaatcggatgaaaagaacttcttggggttatggagagattatttacttgtttgcgttaccatcaatgttacaaggtcacttaagagacgcatgaagctgcggaacacagaaggcatcgaattttaggtgaacttcaagtatgatgttcctacattttgtttcatatgtgggataatggggcactctaatagattttgccctcgacgatttgatgtccttgatggtaagataattaaaccatatggggaatggatgagggtcaagccaatttgtaagaatcatacaattagagcaaagtggctgaagcaattcatggtagctatggaagatgatcctgttgatgatgctaacacggctgtcggattcgatcaccgttcactggcaaggaaagaattggttccaggtggaggaataaagatccctatgattgtggaggaaaacatgggtcaacgagctggatagttagaaagatcaatgattgataggaatattcctataaatgtggacagtgatacgttgactgatacgaatcatgaaattaataatactccaaaggaagatgattgtttgttggtggctgaattaaagagaagagaatggagttgggcttgacatatgggccgaatgaagtaggtgatgatgtggctat

SEQ ID NO: 223115 - DNA, 2696 bp, Cannabis indica
aaaaaaatatataaataaatgtgtgataattatttcctttaaattcctattaaatttaaaatagattaataaaattaaaattaaaaaagcgataaaaaaaaatctcacctgcatgggattatttatcccaccctgctggatgggataaataatctcatacagatgaggttagctggattagttatccaaacttctaacatgcccaaacacgtgattggacaaattagcctgtctaatccaatccagtcctgcgtaccaaacaggtccatatattaatagataaagttagacctcgtggtcattgcaaaggatagaagccgatattgaagaaaaatcaaccataccggataaatcattagaaaaagcccatttggcaacattatgggccatgaaattacaagatctagcaataaataaaaaattacaacataacataacattagagagttgtttacattggcgcacatagttatcaataccccaattagtgtcagcacccgttagactcttgatgaccgtctctgaatcactctccaccatcacaaaactgtgatgcctcgctgcagcagtctccatggctagcaaacaagccgcaacttctccaataagagggtcagagaagttgaacaagtttgtagccacccacaaaatagactccttgtgatcatgagcaatggccaccgcatacatggaatcgaaccaactcgcagttgatcttgacctaatcctcaagaggtgatgaccaaccagtagacccaacagtgttcgaagatgtaagtaaacaagatccataatctgcgtaacaagaagagatagaatcaatgttaccctgaccattgttgtgaaccttatcattgcgagctctccagattgtatcaacaacaattgaagcataaaggaaaagcttgtcagtgtccacccctttaaatcgaagattctaaaggaactgaacccagtcccaaacacgggcaccgaaattcaagatcggcataaccccccaaggagacgaacgccagagatgaaaaacaaagttacaatagaggaaaagatgctccatcgtctcctcaccctccccacacatggggcacgagacttcctcaatagccattctcatcgcaagtgaagcacggataggtagagcattagaaagaatactccaccaaagaactttatgtcgctccaagattttagagctccaaagtttattctaaagtgtcggggcaacagagcacaagggagcacggtcgagagcttggataagataagcagacttggtagaaaataacccatttgattctttggtccagacccatttatcacactcctggccactcggcttaccagctttgataatgtttctaattatttcctagtcaaagaggtttgagagcttggaaagatcccaatccccatttggtaagagtaagtccgcaacaagcctcaagccccctagaggccgagtaatagtcttagggacaaaatcccggctatggattacccaagggtcatcccagatacttgtatcttttccattcgaaataagcctgcaagctccttttctcaaaatatctttagtatgcaccacattctcccagaaccaagaatctgagctcctgaaagaacattggaaaatttctttacccctcatatatttggccctcaagactttacagcacaaagacttgtcctcgttgagaagggcccaaccccacttggctaataacacttgatccatttccgaggatttacaaaaactgaggcctccccgagattttggaagacacaagtggtcccaggcctttaagtaggtaccacgattgccttgctcacagccccaccaaaaatctctaaccataccatccacctttgaggttagcttcttggacaacattgtagtttgcattgtataaattggcaacgcaagccccacagatttgattagagtaggacgccctgccttggacaaggattttagcttccatccatgatgtttagatataaggttatccagaatgaaattaaagtccacatttttttggcacgatctaaacaacggaagacccaaataattgatgtgctcaatagtattgttgagaccaagctcctgcatgattcctctttcatcccggccgtagtgttaccgctgaaaaagatcgaggttttgagtttattaaccctttgacccgaccagctacaaaatttttgaagacatttccgaaaaccctttgcctccgcggcattagctctgcccacaaaaatcaagtcgtcggcaaagaagagatgggagagtctagggccatccctactcagctgaatacccttgatagtaccattatctaattcgttttaagaatacgagagaggattttagcagcctacataaagaggtaagggaatagggggtccccttgacgaagtccacactcaggctcaaaactactcatcttgcacccattgaggaagaggttaaaagaggttgtagttatgcactgcctcacccaggtacaaaacttatcaggggccttgaagctacagagcacctgatcagtgaactgccaactcagcttgtcataagctttaaccaaatcgattttgatagcaaacaacccttctttccttttcttacatttaaaagagtggataatatcctggataagaacattattatcctggatgttcctgttggaaattatttt

SEQ ID NO: 223116 - DNA, 1137 bp, Cannabis indica
ttattacattaatacctatacacagttaaatcaaattttttactcatcttctatattttattactattttaccacatgcacactcattccatgcatgagtacacgtgtgtgacctatgaccccgatcaatcaaccatttatcatttccctctctttttttcttctttctgcttttattttgcatttcttttcagtttttattttaaaaattggtaacctccattgctgaaccttacctccccacaatccatcatccattttccctctcatttttgttcttcaaaattttttcaactcccactaacccaatcccataactgttttccctctttctttttgtttctcaatccttatataaaatggttgtgatccgttcttcttcatgtctttcccctgttaaaaaaaaagctccaaaatgggtttgaaattattagctaataaagctaagggaaaacgtcctattattgaggaggaagactctgattttgctcctccattaacgaagtgtgggagagctcctcctaagaagaaaacaaaggtcggtgtgcaagaaaaaaaggctgaagatgtttctggaaaaaacgagaatattggtggtgctattcgaaccgaggttcgtttttcagtttctttttcttttcccccttttttgtacatattcttgtattttcaattttatcaattttgtgttttctggtttgtgatattttatgtctttcattttaaaatttcgtttggttttcatcagtttttagggctttaatttttcttgatcaattttatttgttgttttgtgggttttggcattttagtttgtttattcttacttttgtttcattttgttgtgttttttgttctatttgtgtttttcagtttttttagatatttttaaacttcagtttcgttttagtgtctcttctcagtgggttttagttttttcctaattttttaatagtttaatccgtttatatatgttgtgttttggaaatattattaggtatagttgtttgctgttcatttttaggtaacaattcgattaaagatctttctagtttatattcgtagagttgtttttgtttgtgagtttggttttagttttttttatagtttcaattatagtttgtatacttgtttatt

SEQ ID NO: 223117 - DNA, 2120 bp, Cannabis indica
aatacccctagagtttaataaaatcttcggaattgagaaattataactctaatattcatttctaatattgggatccacaaataaataaattcataaataattataaaattaacagaaattagtgctaattgcttttactcattacagtacgatctttgggacatcagggcttttgctgtttgtatgaatagcaaactttagtaaatatatttagtaaacgagatcccaggattttataaatgtattactttatgttttaaatcaaataagtaaattttaattattcacaattttcaataacctcattgattagcaacgagctgtagagtacgttaaaaatcacgctaacatgcctatattagttagggtgttacaatcagcctcgtcgtccccaggataaaacaacccagtcgaacacactgtatgggaactctattgcacaatagaattccgtcgaaatactacacctaaaactgactactgctcgaaaatataaatatgtaatatagtagtatatacatatatatcatataatttttcagagtgaaaaaatatatttttctcccactgttcagtcgcattatataggcaatgccctgaaaatagtaacgggaagaaagacgttattggatgggaatgttggaacatgggatcgtgggaacgatgcaaaaattaggaagatgctacaaatcaggaagcctttgtctactgattaatcaaacacgtttaaaaaaaactgttttaattaattaaataaataaattttctcccaaaaaataaggtgacaccacacacgcccgccagctcggctcggctcggcacggtcaatcggatggacggcggcggcggcgggcgcgtgtgtggtggtccggtgtgtgagtcctcacccatgcgcacaaaactgggtaccccttggggcccaaacccatatctcaaacttgcactagttatacactttaaatgaagtgtttctatcccatgtgggactcctactcacacactttatttttgtaatatttcacaaggttagtgttgagagcccggatagcgagttcgaggttgaggaggctatccctactagaaagaagcattacatgacctgttctgttttctccaacagccctctgggctcgtatgatggtgacaaccagcctttgaataggttgttgggattttatgtcctaaataaaactcatttcaatataatcttatttgctatcaatagaagattagaagtcatttaagtttacatgttattttcatgtttatgggttattatacattttttaatgaattcagaacatatagctattcataattacagtgatgtcattacagtggaaagtaattgtgattatatgcttcaaagtttaagtctcatgatttattagtgcaataattttacactgacatgataatcagcgataaagtttacttacacttgaataagtagtatgtctttcccagagcattggtaaagtatactagtatcggatgtatagaatattcatcagactggaccgatattgaacttataaaagatattataaacttattgttatagctttctaagtcaatatcagttagttgatattagatcaatagatcttaatcttgagatgcttaggttctagcttaactgcattatttgtattctttgacttattcgttaaagctgatcaaatagatcatcccaatacttacatcttgggaacatgatagtacaattgagtgggagcgctagtcattgatacaaaatctataacttctataatgacatagaagtgaaatggtgatttcctttgagcttgacttaacagagataaataaaagagctcttattttagttttaatattagtctactgaaatatcatttacaagaaacctagtgttgtaatgataaaatacattgaggagtagaatggtaaatttatccttacttgatgtaaatcatctatagaggatctttgattatttgaattataacaatggatatgttgacctcgatctagccaacgacaatgagtcaagataaagcgattaaataaaataaagaatagaaagaaaaaatattaaggtaaaaagaacactagattttaaagaggttcgaccctgtaag

SEQ ID NO: 223118 - DNA, 3364 bp, Cannabis indica
gttgtatttttaatgagctaaatcctccgctttctttgtgtgatattgttaaggccgatgcctgttaatttttaatgaaactcctttatccaaaaaaaaaaaatgaagtaaaaattcttgctgaaaatataacatttgtcatcatattaaaaggagcgtaaaaatgagtgggatagagaattcccttatatctcctcttattttaaatattacactagaagtctcttatatatattattaactattttttaagtaattgctctaagtcctgtactgatttggcacattatttaaaaagtattaaagtgattaagcaagttaaattgcagagtaccttttcgattataggcacataatatagctccaaaatattagtttcaaagctaattttgaaggcgtgcgtggtgccctgctcttcttccatggcaaaaaagaagagggcagtccgaaagcctgcgactgcaacccgtgattcgactcttcaagctgctgagagtccttcggtcattgaggatggattgggggaggaaattttccacgaaccatgtgagatttgggggtagaggaagaaattgctccgtgccctgagaagagaagtggttcgaaacctagctgctgggcagaggaggttgagagagctgatttccaggctagtgcggtggatctttggagcaaattcaaatctgaccaggtacttactccttcaactaaacttgtgtttactgaacccatcaaagtgggggatcaattagttgctaaaattgacattgaggaagtagaggttgaagcctcctattggaagaatgctattgtttgcatagtgttgggagcaaacccaccgcttaaggtgtttaaggggttcataaatagggtttgggggaaacttggaattgagaaggtggccagaatgaactcggggttcactctggtgaaattcagggatgaagcaactggagacttaatcctagaaaccggtgtgatacattttgacaaaaaaccagtggttctccgaccttgaacaactgatatggatgctactagaatgatttaatctgtcccagtttggattcggctgaatggattggggcttcaatactagggcaagaacaaccttagtgcgcttgtgagtgtgattgtaagccgatgatggtggacaaagtcactatggaaagatctatggtaaaatttgctaaggttcttgtggacatggttatttctgatgaacctccaaataccatatcgtttgtaaatgaaaggaaacagttggtggaacaattggtggagtatgaatggcttccaacgaaatgtgctgcttgtgacttactagggcatacagtggtgaactgcaacaaaaataaaaaggtggcttggaagaagaaggttacaacagctcctaacaaggaaccggctaaacctactggcgaggatgcacaacctgatgcgagtgacaaagcagggactgatatggcagtagaagaaacacttgcttctgagcaggtgaaaaaagggaaaaaccaggggtcattgaaggtggttagtgctgaagtaaatgaatggattactccaaagaaaaaggggctgaaggtagctacagtagctgagacaagagtaacagagaaaaccaaaaatggctatgcagtcttccaagagactaatgatgagactttggctcctcctatttccattattttttatggaagtttgtaatatgctaggttggaatgtgaggggtatgaataagagagaaaagcaaaaagcaattctcgatgtttgtaggttgaataaagtggggttcggagcttcgtttgaaacaaaggtgaaacatgacaaagttaaggagatggttgaaattaactttcctaattgggagttttattctagccatcctatctcgggtagaattttaattctgtggcaatctaaatttgttcaagtggaaattattcatgaagatactcaactagtccattgcaaaatcaaagtttgtgggcacaaggaaactttcttgtcacggctgtgtatggaagtaattctaaagaggaaaggaagagtttgtgggcgaagctttgtagtattggtcacccgaacttaccttgggttattttaggtgactttaatgctatgttcacttacgaagatagaaatgggggaagacaaatccaagccaaggacattgaagatgctcaaaattggctcgccatgggtcaagtttaggaattcaggtgtactggatcctttttcacttggacaaataagcatgaggttggggaccttattttctctaagcttgatcgggtgtttgttaacaaattatggctggatattttcaccaaagcggatgcttttttcaaatgggataatatttcggatcatagcttttgcataacccgaaaccaggagcagagtaatgtgggtttcaaacccttcagattttgcaactattgggttgattatcctaattacaagcaaagggtgttaaatgcttttgaaagtcctctggctaggaatggtttggatggtatcatgcagaagctttctcgggttagataggccctaatttagttcagtaagagtgaagtgggtgacatcacattgaaatacagagaagccaaggaattatatagcagaattcaagaggaagcggccaagaatcccactgatatctgcctccaactggcagtttcccaacatttgcagcgtcttcaacatatgcagaaaaattattctagctttgtcacacagcagagtaagattacttgggtcaagtattgtgatgaaaactctagttacttcaatgcgactatgaggaaaagaaagctcgagaacagaataacaaccttttctcaaggtaacattattgaagattattttgacaaggtgagacatcactttctagctcattttgaacactttaagggtagtaaaagttcagctacttgccgaatcaatacagattgtctccaccatggagctagcctcagtttgatccaacaagtgaatctcatcagactttttagtaagagtgatgtgaagaataccatctttagcattcactcctctaagagtcctggattggatggatttggctcggattttttcaaaaatctgtggaaggaaattggtgaagatatatccacagttgttctgggtttcttccatgatggaagactgccaaaaagtctaaatgaaacggtgatctctctaatccccaaggtagtgaatcctttatctacaagtgattataaacccattgcctactgttatactatatataaatgcatctcgaagatgatttgctctagactctcggaggtgcttccttctcttgtccaaagtaaccaaggagcctttgtgaaaaatagac

SEQ ID NO: 223119 - DNA, 1593 bp, Cannabis indica
ccttactagcattaacctattccgaacagccccaaaatgggaataaaatattaattaacttacttacagaaaatctctcaagaacacgtttaggcatggcagtttaggactcagttattactaattattaatgtaaataataataataaaactaaaactaatacaattcaattatattttttaaatgtataaaatttaatctagttgtaaatttatttttaaaaataatatatttaacgaattttattaaacaataagataagtaaataatatattttccaatgacaaaagctcactatggttgggaagtagttctgatcattgtgtatgtattatatcgatgagggtggatgagaatatagggaggaaaccttttcggtactttaatttctgggcagatcatccagagtttaaaaaagttgtgatagaagattagactcggctagttcaagcagttgggatgaaaagtcttttcttgaagctcatgcgattgaaacacaagctaaaaaagttcaataaggaggtcataggagatattagaaacacttatcaggaagccaaaaataggtacatggaagccagaatggacacccaagctagcccgcatgatcagttgttgcaaaagaaggagaaagaagcggctgtcaaatttagtgagcatgagaaaatgtaccatagctttttgatacaaagaagcaaggtagattggctttgtaagggggatgagaacaatgctttttttcatgcctttttgaaaaaaaggagaatggagaatagcatagttgcttatacaaatgagcaaggggaagtcattgacaagtttcctgaagtggtcaaccactttttttatcaatttcgaagctacatggggactagtgaaaggctaacaatgactctcaggcaagactgtttgaatcaggggaattgtctcaacatagagcaacaaataagaatgataaagctgttcacaagcaaggagataaagaaggccttcttcagcattcctgattcaaaatcgccaggcccggatggatttggagcaggatttttcaagaaaatgtggccagaattgggagaagaatttactaaagtagtggaaagcttcttccaaacaggaagtatgccaagggatcttcataccagaatgcttacgcttatcccgaaggttgaatccccctcaaaagctatagactacaggtcgattgcttgttgttcaacagtctataagtgcatttcgaagcttctttgttcaagattagcccaagtccttccaaccttagtgaatgaaaatcaaggagctttcattcaagggagatcaatagctcacaacattatgattcttcaagacctattgaagaattacaacaggaaaaacatctcccaaaggtgcatcatcaaagttgacattagtaaagcctatgatacggtgaagtgagattttttagaggctttgctcaatgcatttaggatgccggccagattcgtaagctggataatgacttgtttgagagccacttcttatactattcttatgaatggaagagtgcaagacaatttccaaggcaaaaagggcctaaggcaagggtaccccct

SEQ ID NO: 223120 - DNA, 2093 bp, Cannabis indica
gagtttgtttatgaaacttgagtagtttctgacactaagatatgtgagctcaattattgactattttttatctcaaacgaatttgactatttttttttaaagaaaaaaaaaaagcatgattagaaataaaattaaaaattaacaaaacttcaaattcctatataaatagatgatttcatttatttttattattcatataattttattacaggtggtcccccgtattaggacttatatgagtttttggttagtatatattattgaaaaaatatgtagtgttgtttgatatatatttttttttttgggaagaacatcagcttgttcattagataagataattgggaagtacaaaagggattccctccctatggtaaacaccattcaaaagactattaactctagctttttttgctacaaaatgagcagcttgattatccaaactaaaaataaagaaaaagttataaaacattaaaactttgcagtatatgcaaaatttccatagcaataggtcttgtttctaaaaaaggagggcaattctttttttccaatgcttgcacaataaccttagcattagaagctatggcaatggactccgccttggctgccaacccgagctggaaagcccatctaattgcttgcattttcccctccgccaccgaacttgcatgattctgttttgcataccaagtccatcttcccgtccttctctcctaccatccaacagccaaaccaaccaccccgtctttccacgatgcatttgttaagcacactatctctgtgttacttggaattttggcagccacggatgtttgcctcatatctgtcacttccccatgtctcttgacggagacgttcgaaaaagaacccagctgaatttgattgagctcttggaaacgcctaaggatgttgcttctagtattatgaatgtctacagcctttcccttgaacaggctttcatttcccgcactccaaatcccatcaaaaaggcagccagtgaactcaagaaacttgcacttcaaatcagtgggaatgcacgataccaaacccagtataatgtctttgaagatatcatcctccctaacatcgatctgaattggaaaaaggcaactgaaccacaacgcctttgcaaatgggcattcccagaatacatgtcttattgattcacactccgtttcacagaataggcaactcttgtctcgaatgaaaggcagtttatcatgggttggaatacaatcagcagctacccttcatatcatcatcgaggacttgatatggatattctggttccatattaaattccacaaaggagacttctcgtcaactctattagcacaacatacctgatgagctctcttgacagtgaaggccctatcagtcgacttcttccacaccatagtgtcctccaccgaggcagggagtctaggaatcaaaccaattctggctcctagatccctcccaaataattgttgtaggagatccaagttccaagagttgtcttgtacagaaaggtcagccaccgtcttcaagtgcgggttactacttttgatcctttgtaaaaggtcatagaactcgttataattaagccatgggatccaaggttgattccatatatcaattgaatctcccctccccagtatggccagaccccccaattgaatgatccctctagactccaagatacccttccataatggggagtcacctccttttccttccacttcccaaaaggacttgttcttgcaatattttgccattagacatttaacccaaggtttattcacctcgtttgccaattgccacgcaagttttgctataatagagctttgtttgtgtcttctaatcttctaaagtccaacccttcctggcttttaggaaaacaaaggttgtcccaactccttatggcattgaatttttctttaggtgtccctcctgtctaccagaattttctgattagcgcatcaatctctctacatgttgacacatggattttataagttgacatagtatacagtttcagacttaaggccatactgacttcaccaaggttgttctccctgcgaaagcaaattcttaactttccatccttcaagtct

SEQ ID NO: 223121 - DNA, 7433 bp, Cannabis indica
gaactatttgagagagaaaaatagtttccttttctcccagtgaattttgataattacaatgtgaaaagcttatttttcaaaacatgcttctatttatagtagtttaatttatattaattaaattatatttaattatttaaacaaatatttataactgaatttagttactgatatttcagatgagagaatcttttatccacttgagagaatatctcagctaactttgaacttaaaaatacctttaacaaatttttaaattcaaatattcatctaactgaattaattaactccaaaagacaaaactaatagggacaccctataataggcgcctaccttgtctcaattaagacaatgatgatgtcttttgtcttgataatttttatctcaataatttttgtcttgacaagttttgtcttaaacttttgtcttttctctgtttaattcatttgaaaaattatttatttattatcaaaaataaataattactattttaccaattcaaagtatatttttttaacgacattatacaattctttatctctttccttgacagtatttcaaggtggcgattcggagaccatggacctataattctaagctccaataaaccagattatttattgaatcttatcaaccaaataatcatgttcattaatttcatgattagtccactacaaatatagaattgaactcttagtaattatagaattatataaactgaaatctactatagtgtccattgatataaccgattccagagattagccctccttgtgtcagttcgtaattagtcttgatcaaaataccattttacccttctaattacttctttatcctttagtaccgttaatttactagtgaaagtataatttagatccaatctaattttgtgcataactttttagtcacagaattaacacttaaacgaaaccagcattcgatctgttaggaaaattatgattccataattgtagatcgttttcccagccatacacattattagattctaaaaaaaaaattgtaagaatcatcttctctaagaaactttaacgagtgaatcaaggaaattaataacatgaacatgagttcatgattactcaaaatttaggccgctatataaaccaacatccacaagtcaataacaaatagactcacttacgtattacaaataaaataaaaaacttattgatccctcttagagaattccctcatgtcaacaagtaataatctagcttttaacgctgctctaattaaattatccacataagagatcataaacacttcttgctcaaaaatacaagtattctggttccaccaaatgaaacggcagtcacaataagactatgaagcaagctacgagctcgttttgtattcaactacagcaactaatacgagtaagactctggccaaatggcatcatcaagccaaaactgaataacattcaggagttgctttgagaaagggcactcaaagaaaaaaagagtatgaaggtcatctctaatatcacacgttgggtagagtgtagaagtacttcgtgtcatcagatgatcttatgttaacaagttactatgggaggtttgtcaaagaataaatctatattttagtatgaataagagacaccaaattattttacaattatcaaccttagcctaaggaactagaaaataattataaagcttgcttacccaaaatttacttcctttttcagcatctaggattgattctcgtgtaaaaccgtgtctacggtgaggaatttacaccgataccaactcacaccccctttcttatcaacaacccaaaaattttgattttttttaagttcttattattgttaacatttttaatttttttttcaataccgctatgtagtttctaaagctatttttatatggagatttactgtatatatacaagaataattaacattttttccatctgaattttttacactaccaatttgtgcttttatagtatgcaactcattaataatacgattcgaaatataaattttatagtaacatgatccttccatcaattacagtaacttttacatctatacattaatgaataatagaataaacaatttttacatttttataacaatttatatttatatttttagttttttaattattaaagtaaaaatagtgaaacatatttaatttatatttatttattaactaccatctatcgtgtcactcatttcacgataaaattgaataaaatatcatgaaaggggtacaacttagtagtgtaaaaaattaaataaacaaaaatactaattattctatataaaattttaatttgaattaaagttttagtgacatttatggcacacaatatgtgttttaacataattatttagtgttttggtcaggtaatataactaaaacaaataaacatataaggaatgttttaggagtgtaaaggaatcaggttgaaactgatttgattatgatccgacctaatttagattatgtaatgatctgtcctgccctgctcccgtctcgccccgctagatcacatacccaaatcggatcagatctaactcgacccgacttattctaatcggatctgatccgacccgacttattttttttagaattttaattttataactaaatgtaacacccgtattcgaaaaacttgctaaaccgaaatgaatcttattatgttatatttaaatagttttataggttgggatcccgaacgtaaaacacagttgaaagtacatttactaatataaaatctcgtaataatttttttttcatataaaatacaaggcagctacaaaagacagctcaaaatgttataagactgaaaccctctaggttgcactgccacgatatgtacaatcattgccaagctccaactcactactcctccagcttacacaaggtagcaaactgatgagtcgacagactcagtaagatatacataacatatatataagcaatgctatacaggctttatgcttaagccgtcctgagcccaacaactgagctcatcaaatggttaagaacgttcttaatgaaagtacgaccactgtaccatatgcactagagtaccgactccgtacttgtgtttgtagggccattactgtacttttgagagttactgagtgttgtaccacatgcacgacgtactccttggtactcatgttggtaatgttgtaactaccctaaaatcctacactgtactaacacccttaactaaacatttagcagtgctagtagtgtgcacagacaataacataccttcattcacatatatgtactttatgctatcttacctcatttttgtgctcaggtgtgccggttagcctgagtggaattgcaactcgagatttcacagagctctaaatcacaacatttgtaactcaggtgagagacacgctaaaacacttttcggagactaaaaatcaaaactagagatattcctatcaatgaataacatggcaataccctaaataacacaaaaatggggaaaactaaggttttgaaaaaatggcccaattggtagaccagttcccaaccggaagtccggttccttaaggaccaaccggttgactggttgttacaggttcccctgaaccggtcgaccagttcaacacaccgggaacgtcaaaaatgttccctgcaactcaattcaagcccaaacttctcaatactttcaataacacctgtatatactacaataaacccaattcaagtaacataactcataaattaactcaaaatttaaaaacaccattaaagccctaagttgagttcccaaataccactcttgcacaaaatccattccactcaaccaaaccagcttaaaatcaacacaactaacttcaacctagctccagaatacaaaatctaacaaccccaattaccacaacaaccaaatccacaaatatacaaccacaattcactttaagaccaaagaaacaacaaaagagtactaaaaaattataccttgtgtttgagattctaaatccctgctgaaatccttgaattaaaccaacaaaagctctcaaatcttgctggccctaggtgagaaagttctagtttattacttacttgctaaaatatataatttaacccttatcaattaaactaagaaaaataagctcataatgcccataaaaggacaaactaaattttcaataaattaccaatttgcctttaattaaaaaaaaatcaaaggttaatggtaaccaagggtagtttggtcataacagccttggaaatttccgaaacctccaaaacctaacaatgacgccccgctattaataaaattctatatcatacagacgtgactctctagcctaacgtcgctttccactgctaccgaacgcaataatcgaaaacaaaaaattcacatatagcataattagtacgtattaaaattaaacaaatctttcacaattatgcaaatcataactaataattaaatcttataaataaaccctaattatttaataattcaacatatcaacataggcggtctttatattaaacttataattttatatatattttaattttataatagtattatttaatacaatactgtatttgatattgacttgtattaataaattgtgtaaaattataatatattttcaataaactcaaccccaacaccaactatgggtctgatctaggtctcgggtcctcggtcccgatcccagtttgggtctgggtctgggtcccgagtccgagttcgggtttgggactggatccgagcaggtccagtctaggtccgagccccagatcccgggtcttgagtcccaggtcttaatctgggttccgggtctgggtcaagggtcttaggtctgggttggggtcctgggttcgggtttaggtctaggtctgggtcctaggtccaagtacaggtccccgcacgggtgttgggtccgggatcgggtcccggtcccaattccatttcaggtctgggtccaagtccaggtctgggttcaggtttgggtcccggtcctaaatcccatgtctggattcgggtctgggtccgatctcgggtttaagtctagtcccgcgtccggggtctgggtttgggtcctaggtcttaggtctcgggtgttgggtctgggtttggatttaggttcgggtctcaggtttgggtcgggtctagatctcgtattcgggtctgtgtcctgagtcccggtccagggttttgggttcgggtcggggtttgggtctagaacctggttcgagtacaggtgtcaggtcccgatctaggtctgggtccggtcccgggtctaggttcgggtcccatgtcttaggttttgggtctaggtctgagtccgtgtccgtgtccgtgtccgggtcctgggtcctggtccaagtctcgggttcgggtcccggtctcgggttcaggtttgagtccgggcctcaagtcccgggtctaggtctcaggtatgggtctcggtctcaggtctcaagtctcgcttttgggtcttgaataaagttttttttaatatattgaaatcggattgaatcagatctgatccgtaaaaaaattagggtaggcagagcagatctagtccgagatctaacaaatatccgaatattttagatcagaaataattctttaaattaaaattttgacccaattcgactaaatgaatcattttgacatacctaatatgtttcatagttagacatgagtcatcattaattctttatggaattaagtggttaagcttaatatatatacattattagttcacatgtacttagatatatattatgtactgccttgaacttataagtacttcatggctactttaattccatatctctgaaatgatggttaaaattgttggagatcgaatgtaaatggacacacctaatgtacccactaagatatttgaggagtactaaaatagattggtccaatgttattatatttatatacaaataatatacatatatgggctgtttctacagaaatgtaaatattggtctctgccaaattgtgtcatgcaatcatgaacaaccatatttatttcaaaatggggccttaaaaattaaagtctctattcaacttcaacaaaaaaaaaacttgtaaattcatataataattaatgatgacattattagacaatcaccgatttgtatatttataacattttcaatttaccagcaccctaaatattcttgcagatttttttttctttttggaaagatattaattataatttttttttctgttgacaatgacatgaattatatatttttgtatgtatatagttgaagaagaaaaatgtataatataatatattttattatgagaattatatatgttacattacatgtactacacactgcatatatttttgaataaattaactaagagggatcccttttaatttggtaattaaaaaggagttaagaagtctatgtctaaaccactaacctagcaagataaaataatgtgtgtagtgtataatacatgaactaataacaaaagaaataatttataaagagccaatataactttgttttatcaataaaattatctatagaatttgtttaatgggtcctaataatttgatcaactttgacggttgtttttatacctgtcactaactcagaaaaagagataatcagcaattaatatttaatagataaaatgttgctttcttactttatttttttttaacttattgttgaaagagtggcaccaaattactaatcatgtacacttggcagttggtaattaaataattatgtacaatgtaatgccttttttttggcctatcaatttaatttcatcaattaattactactgagaaagttgaaattaagaggttactcatctaatttaaaggataataataaataatataataactaaaaaaataacaagaattaaagtgagaagtccaatcagaaaaaaaagtgtaaatgtcggtttgatctttgtagctaatttgttatttcactaacactgaaaatgatttgaaattggatgattattacatttttatacgccaagggtttgaaaaaggagcaaatattaactttttcaaccaaaaaaacaaaagaagcccaacacacgaattgaaattaatttccaatctcatgtcattattagtgaaaataataattaattatagattgtgttctacattacgataatgatgactaagaaaatgcctatgtataaatttattaataagtattattaatttgatggtgattatatatatatgttgaaaaaatgtttacttgaaacgacccacatacatgcaagacctaattaacaattggttttattggagtcgatcgtgacttttctaggaaaatatattaggattaatatgtttgaatttagatccatatacaatcatatggaggatatacaatataattgttgcatcatgatatatatatatatatatatatatatagtaggta

SEQ ID NO: 223122 - DNA, 6344 bp, Cannabis indica
aagatgtgttaccaagtaagaagatgaatagatattgaaaggagttcatagaggctctacgaaaatcatgctaggggcaaagccaattaggtgtagatgggatcaaaccgcaacattacctggcctccaaaaggctggctgaccatggccttaacaggctggctggccatggaatcaacaacctggttcgccactacctccatagcctggccgaccatagcctcgtccaactactcaggcaatgctccctcaatgtgactggctacctggcctataccctagctagcctgatccgccaacagtcaactctcatactttttggtctactatgaccaagaagtaaaccacatcttgctagcaggatcccttgacaaaagggaaaaaagaagagaccaaaccaacttaaagcggcatgtctgccagcaaaaagttgccaggtactccaacaaacaagtcagagagagtaaattctttgtaagagacttagtctctgaagaatattccttcacaaaaaagatcttacaacaagcatgtttggaccaaattgaaaaggcctgcacaaagttataagataacaagaaaaggtgcttacaagccttgatgagaacttggaggtggctcttctaccaaaatactagaatggagaacatctcagtaagtactctcactagccaacttgtaaagcgattcctctaattttttagcgtacaaaaattcataaaagagcaactacccattacttttcagcatggcctctcatcactcttcagcgatggcctctgcctggcatctcaagcaagggtagtgaaaatgtgatttcaaaagcgatcattaagttgtaagcttttgttatacctaagatcaattttttttttagttccacatgcgtacaccctgtagcaccccaaagaaaattcctagacaaggtctatgaaacttagtgaatgacatactaaacttggtgaactagcacagagaacttatgtagagaaattttaatgcttagtataagctactaaactttcctctatgtcaagtgcaggtatacttcagcttggcataaagaaaagtaaatctggatacttacatgtcaaggaaataagaagatagccaagataatcatatgtcaaaaataaaaggctttaaggttaaaaaatagtagtgtttgaaaatagagtgcctatacgtaaaaacaaagaacatgaaagcatcaaggttgaatatgaataaaaaattggttcaaatgcataaggccaaggccccgcaaaaatcgtacaaccagagaatacgaccacgccttctggaagttctgaaggcaaagaggtaataagagtggaggcattgtgcttgcaaggtctaaggacccgaccaagggtactctgcagccactacccctgcaacctaggaccgcctgatactagacaagagtacaaggtgtaatgccatctcttgtgcctataacttgcagggtgaaagcaacattttatccccttgggaccaccctgtacttcaggctattgtagcttataaatacccctccttcaaatgtagaaggggagttggaaaatcatacttgtagcaccatattgagagcaatagaaatttctccattgttctctctgttttgagataataatttgaatatatatttccatctttctcttcatctcatttctacacttgaagcatacgttgattttccaggcacaagttagttgacaagttctcaccatccatagtaagtttgctgcaaacagagctagatatgaacctaccttgggctgaagcctctcagcaaccacctgacggtcaaaaataggacgaagtggcttgtttaattttgcagcatcagcaaatttggcactcagcctagctgaaaacaaggatgcttttttcctcatatcgtcatattcagagtttaattgcttgagataaaactaatctgttgtatccaactaagcacgtacttcttccaacagtgaggaagggtagattggtaagacaatcttggaaggaggaagtgatggaagacttatcttatctttggaaaacttggcagaaagagcttggcttggttgggatggcagaggctgagagcttgtaatgtctttgatgaatgagtgctctgcctatgtgccctgtcacctccctgagcatcagttcctcttcgtctggaagactctaaaatttgcttcctagtagcagtaagttgttgaagcttttctttagcttcgatcctcgatcttttattgtctcttccaagttcagagtaagatctctttcttaacacaagtccatccccatcatctccttgtcatcatccaagataattggtccctattggagagggaatatttccaaagtagtgttatttaccccttattggggagaagaatccaccactgctaaaaaagtttaaggatgggcaataacttttaaggccaaagccatggaaacaacttcctggcctttggcaagaactgttagctttatagctccagcactagaagattgcccaacttttcctttgccttggccacccttggaaactaatttgacttcatccgacctctaggtgatggtgcctaagaatttgtctaccaaacccatctttaatgtgaatggttgctcttcaaaagataacataaattcaaatgttaagcatgcgatcatcagattaatgtcatgaaaaacagtatacaggtgagattctaaccatttactttagcatacttgggttccatttagcaaactaaataatatcttctctacctaagagacttccatgcaggaggacccttgatacaacatcttgctaaaaatatctaccctaacatcatgtgttggtaaaataaaatggttttgactcctaatgatgttgtctagtctatccatataatcactgacgggatatctatgatgattaaagtgcaaaaaataagggtgaaacccgccttggtctaaacaatctaagtttgccaaagacggggccctaactagatagaataatgtcttaccacttccaaaggtactcactctacgagtacccacgttctggacactatcattaaaaaaaataacaagctcttttgcctcacttaactttttttgaaatttttggtaccacttcgccaaccagttctgatcacttttaacaacctttaaggcctcttcagttataataactaaaatggtttccttcacttcatggtgaaatccctggctggatccttcacgggcagagcataaatgctctaatgagaagccaataaattagcttcatgaaggattttggtggctacaagcactccaacttaaaactcttttgttgttaaagactcataaaaggtctgcctcgcctccaactctagagttaaaggaaatcaaggtatagaatctagagaacacaaaaaggcaggagaagatcaatactaaaagttagatgagagcgaagagaaatcagaaaaagtcaagcaaacaactacacttgtgatattaaaatcaagactgaaggttgaaactctctttagtggaaaatcggagatgtaaattcagtagtcccggatgttgtatgtttacttctcgacactagtggggaataccaagtacttagaatgcctctccaacctataataaccaaccttctcattgtggttcctcatattatgggctttgattttaaagaagaacaaaatcttctatggagtaggaactagtttctttttgtagaagcacaagacgtaccctctagaaagcagacagtacacttgtggaaggaactggtatggagccactctagctactacacataactttgcaaagtaacacctcaaatgtagatgggcgcccatctccacgtgtccccaactccatataccgaagcctccttctgcacaatggctaggcgtctccataaaatagaaagtctattcttgaatagacctagaactctttccggccctctctgtgtctcatacttctctaggtttccataagtccagaacttattagtatattgatccattttccatggagatgcattcaatacaagattagactggtatcctgttccatcacaacatcttatccttcaacttttacttccttttgctgaactcacttaggcatgagggatactaaaaaaaataccaaccagttagcatgccaaacaaatgatgatagtaagggcatagttgaatcctccttcataacttctttgacaggtccccaccaaatacatcatccaaaaaaatattcttaatagaacacttgttccagatagttgaatcaagaatagcaagaaatgaaagataagaaagctcatacactatctagaaccataatggcttaggataaaggagtaaaactttgtcagcatttttgcaaaaaaataaactcttcccagaacaataaaacaaaaagacctgattcctactgattcctaaagctattgaaaatagcatctgaaatgttctacttctatcaataataatatttcggtcacaggtgcaaagtcataattttcaaacagcgagtaaatcacatgtaatttctatatgttgaacatgcaacatggttcaaaaaataaaaaaagaagaaaatttacctagtgataaattatgcgataattttggacttgagtagaaatatggtctgggtgagcacgcgctaacatcaaatgatggacgtatagaaattcccttgatatgaagatcttcaagatgattgagcctttttgtaatggcattagagtggtaaataaaggaatcgatcttggaattgatatctagatttgcagtttcttctggtgacgaagttgtaatcactttgggtggagcatctggatattcttgagccctaatttgaagaagaaggtggatgcaataataaatatcttactccagagttttaattcacgatttttactctcaaaggttcttgttgaccaagatttttggaaaccaattattaagagcttaagaaaaatgcaaaacaataaatattacacaaatggttttttatgtgatttgggcattaataatccctagtccacgagttattgtattagccttgtcggcgagtatctgagtattacaagtgtttacaatggtaactctgtattcctctattttctctcaaaggagaatgctttttgggaattttagcagaggttttgtaagtaagtagaaatatccacctgctgtacatgacaaataagggtatttataagcacacatctgggtaaggacatacctttacccacctagtgattcttactcaacacgccacaagggaaaatacttcaacaggacaatctgaccgctggtttggtaggtagctttcccaatgtgtggtgctcaatcgatgcaagatactttgtaagagtattgatgtgtgttgcccagaggtttccctttaaaagtgatttcttaaacaagccattggacaataagcactacagatgcacatatgcacactatatggtctgacataggggacaagtcttgacacaatgtcaaagatatgaaaccgttgggttcagctccgaaataggcattgtggatttctagagaggtctaactaaggtcttcttggaccagctaattttataccatcctggagaatccgtgacttttgttcacttccagtagcaatattatagacgagcatcccaaaatgattcccaccttcgctagaaaagagggcttctgggtaccacaacaccttttgtaaccctagtaaggggaagatataagatagcaacaattaatctaatgtgacacccctctgtgactgtcacgtaccattcatccaagaacagggataatatttaccccttaagctcttgggactggggagtgttgggagcctacagctctttcttggaggccttttttatgtttctgcctcactaacccaatcgtcaggatgtgaaggatccttctgtggcacgttgggaacctgaaaggttatcgtgttatgcgataccactagcaactttttgaagcatggtgttcagtcagtggagtcgtgaaactcatgctcttcattttgggcgcgtttcttagaggaaacgaatgacgactagtttttaaaaagtcatcaggcttcaagtacgttgggaaagtgctacaaaatgatgaataataaacactttattctttgtctttagacgcattaaatgtcgatccttcatatccctaactgttggatgaagggtaaatatcactgttgtcgagcaaatttcgcaacaccaaaaagtatgatttaatcgataagacagggaattatttgagagatgacaagtgcgagtattcaacctaaaatggcgagtactcggatgg

SEQ ID NO: 223123 - DNA, 2178 bp, Cannabis indica
catgtcaaacgttcagctaatgtggctgctgacgggttggctaagtttgctttaggggtggatgagcttgtttttggacggaatgtatacctccgcctataaactcagttattgtaaatgactttacattttgatttatgataacaagtttatttcctcaaataaaaaaaaaacataaatatatatatatatctttttttttatagatgaagggtttatatatatctttgattaagaatcttttatgagaattttcgaatccaaagttttggcatattcaaggagaatgcaatgatgttgctcaatgctcagggacctgacagctttaatgatagaatatgtgaagtgaaagatgttgcaacaacaagagggagtagggacaaagaaagaaactcagaggacaggcaaacgaagcaattgcgataatatcgctagtgttgggatttctttaacaccagacttgttatttatggcactgatgacattgtaattgtatcaggcacgagatacaactataagtgaaaccttcaaattacagcccatgtcagtatttgtgcctattctcatgatatattttcaaatcgatcattttttttctaatcagaaatcaggaagcatatatacaaaggaaaacactaccaaatctgttgtcacctatgtatatgttcactagtatctactttaaattttagaagtctcaaaacacaacaaaaactacaatgaattaaaaatgggggctgttgaataaactgctagcaaaataaaagaggaacgatattaccgaatgaaaaattctggattgagtcacgaactaagtcgctctctttaagacgttcgtggcactgcctaggagtgtgcaagcagtcggaatttgccggtcgtccccaggataaaatagcccagttgtcgcactgtatcggaaccccactgcactgtagagcaccgtcgaatacacccagagaatttcgatatcgcaaatggaatttttaatttttatgaaaactgtattttttctaatacgaaagagatgtgttcttcccatcggttcaatcgcattatataggcaaatggattgaataatcataacgggaagaataacgttttctgaatcgtggggtgagttggtttgaacgtgtcccattaactgatacgactgagtaatcagttccaattaaacatgtttcttaattaaattaaaaataaaaaaataattattttattaaataattttctgtaaaaaataatagtgtcacaccacaccaaccaacccaacccagctcgaatcggacggcgcacgcgcgtgtgtggtgggtcaagtgtgtgtgtcctcacccatttgcacaaaacttggtaccccatggggcccaaacccaaatgccaaggttgcactctttatacccttgtaaatgagggttcgtatcccatgtgggactctttccaattcacacacactaagacacatattttgttaaaagattcacaaaatttgaatacgatttagattttattagagtgacccgtagtcttcaactctatctctaacattgtaccacgcaacaaccttttcaagggtgtaaacaaaagctcgtgcgttaatggccatgcacgtctatcgcagtaaagtgaacgctctaaaactttaacccaaaatttcataggaagcggccccactcccaccattcacataggtgagtctatcaagagtactcctgtagctctctattccactcaacttggagtgtagatctcattaagagtttctattaactgagtcttaaatcgcttcaggaattcatgcttctcttttcgtataattatagcatgatctcacttttatcacttcataacttgttattacccattgaacctatttcttgggatctccagtctataggtcgggttgccattatgagtgattcatcaatgtaagggcaacactcccattactttcgatgttttaaggactttctctctagctaaacctttcgtcaaaggatcagccaagttatcatcagtgcctaatagctcttgttgagagaaactctctaacagtgttgtgcttacgacgtatttgtcgtctcttaccgttgtaataacagttctgaacttttgcaatagccacggtactatcacaatagatcaacgcagctggaataggtttttcccataaaggaatct

SEQ ID NO: 223124 - DNA, 1836 bp, Cannabis indica
agcaccaaactgttaacgcagattttcgttaaccaaatatgagcctaataatgataatctcgcgcaaaaaaataaaaacagtaaaggaaaaagtatgaacacagaattttttacgtgattttgctattaaaattctgcatagtccacgagtcaatcttattagatttctgatggttttttagggcctttttccttacgatttcctctttttctattttttttcttcagtctgtcctgcctctatttataatcacattgtaggcagtttgactgatatttttacaacgattatcccttgaaatcacggggtttgattacatatcgcgttaaataaatgaggttattatttgaataccacacagctatgaatatcctgtttttactgggtcaaaataaatgtgtattaaatacgttgtaaaccgtattattttggaatgtgttgctgggaatagagcagaggtaaccttgatagcgagctgaagcttttcatatttctttccaaggttaataatgcaaatctaatcgcttttactctagaaacctaacaccctctttgacaatcgcagcttttagtgacgaggtgatctttaacatgaacatgtcttcctgtggcgaggtggacgcctcgctatcagttgcttcggttcacctgtccgttatacttagtttgtatactgtaaattatacgctaagtgttttcattgtcgttatatccccttcacgtaacgaggttagtgcctcgtcatatacacttgaagttggtttctcgttaatacacaaggcgacagtttgtatatctttatctcgcaaaagactattcagtcatccgaattataaacacactctgtcaattatgtttttagctagttattcctctttaaatgtaatcataattacgtgtctgggttcatactttttcccaacttgacacgcgtcttcttcacatgtgctaattaaatttcaagtataacatatatttgtatataggtcatgggaaaatgatctcttactcctattagtttcatatgcatataaaatttaatcaaacaatttctatatgtaattcaattagccgtgtacataagtacttataattaataaactcatcacaataactttctatgtacgtttttacaaaaaaaagattctatatttatgtaaataatatactcaatattgatccacatatgcgtgcaacgtggcagacactggaatgtctgattcgaccgtgatttgattccttgatacattccgcaacacatgattaggaaacaacgcccctgcatgtaacgtgtattgaacatttttaataaggttaggaaagagcaagactttagagaaatcaacggtccacgtggttccattactccacgttgtcctcctagcaaccgtcgatttaagggtcattccacgaacatcatttcggtccaccacaacttgatcaacatcatgaaactccttcttagattcatccaattggactatgtggaccccagtatagtcccctgagaacatattattcacaatggtaactccagatacgacgccgtttaaggacttaattaaaatgaaagcgttaccaagaaaaaatgaattgctgatgtgaagttgaaccgggtcttctgctacaatcccagtaaagtcaaagtaacaatttataattcgggtttgggtaaacccgggaacccgaacataaatacccgtgccacctaacatagtagccttattataacaatgtacccctgtgaacacattggcttggccttcaaccatgatcccaattgaggctgaaaaaatcacaacgtctgtgactgaattatcatttcctataatgtt

SEQ ID NO: 223125 - DNA, 1966 bp, Cannabis indica
tttttatctcatcaataggtaaaaattagatttatcatggatgttgatgttcaaagagtttttcctgtatgttagtttgtttaaagttgttttgaagttttattatagttttgctacttgcctttgctatttcataatatttgctttctttgtaaaatgcaagattcggttaacaaatacaatcccaatgatttgtacagatcgaagtgtgtacgagtaatttctctgttattaataacattaagaatactttgtctgtgaatttgttaacaatgttccgagacccagtttgggcattttttagatattcctgactttattttctacccccaagttgttcacaacctacttttgagggaggtttaccagcccgatcccaaagaattttaggctaaggttgctggtcattgtatacagttcagtgtagaggagtattacttgattactagtcttcattgctttggggattgcaataaactgttgttttcccatgaatcaaaccaactaactgaggtttgtttccctggcataaaaacaattgatgataaggctatagaggatgctttgaatccctacgtttgaaactctctgtgttgtatttcatccaatgtttccttcttagcaatactccagataaggaagtttctaggtttgatttagatgtcgttgacagcggtcgatgggatgagtattgttggggtagggagtcgtttgagaagattattgattcttttaaaggcagaataaagcatggtattaaaatgaaaaataaaaaagaggagaagggaggtcagttctatgatggtttgtatagagcattgggctgtccttgggtgttcatagtttggttttaagaatattgtcctgcgatggtaagcaccttttgcaaaagagttgcatccaggattccaagaaatctgaattggaccgatgatgttgggaccaaaaatccaacttttagagacttgaaaggtaagatttttgatttgtcgttgaacaaggtgattttcagtttctttaatgttttatatttgttttgtgctagtttattaatcttttttttttaattttttttgtttcaagtttttttttgtttctatttttcagttgaagattaagaacatttgtccatatgatgaggagaggctgaagttgcaattggaagtcttatttttagatgaatctattgataatcgtggtacaactaagcaaaaattcgagagtggttcatcttctaaaaagtctgattgagaggacatagaaatgttgaaatctaagttggaggttgtcatttccaaccaagaatccttggccgaagatttttatttctttaggtgttgttgaccttaatttcaagtctgtcatgactgtaattaaggatattcaagaaaaagttaatgtcatttgtggtcgaccttctgatgaggtatttattttcacagtttttgtttcatattttttctcctattattgttagtttttttcctagtttatttcaattgcaatactgttttttaaacaggttaagtcatctgatgaatttgtcacccgagattctgatgatgatgatgatgctgatgaggatgatgacaaaggattacctgatcaagagaatattgatactggttttgatgatggtgatgagttgggtaaagatggtggtgatgcttctagagttgataaggttgttggtggtgttcctactgttgatatgattcaaactgaggctgttacaggcagtgaagagagggccaaggatgttgaaaatgttaaggccaaagagtctggtgtaaagagatgattttttaaatggtttaagccagcttgaaattgataatgagcaagttgtgttggctggtttagaggctgttgctaaaatcaatgtaagtgtagtttatattatttgttaggttgtgttagcatgtcaatttctttttagttgattgacagttttatgttagttttg

SEQ ID NO: 223126 - DNA, 4321 bp, Cannabis indica
taggtattcactttaggatctcagtctataaaataataccgcgtagcaaacagtttcctaaaaaattaaacataattacacatacttccgctaaaagaatcattagattataaaccgaaacttagtatagttatgagactaattatcatattttaatcgcggttagtttagttatataattaattaccttgcaagagcgcgtgggtcccacgaagaaggaacagagtcacgaacttcaggagagagaaaaagtgggtatcgatcgatatggagattgaacagaattatgaagtaaccatctaaaccaagcttcttcacatttgcagcgtccatagcccaagacccactctgaaatccaaacatcgaattgaactgtcccgacggtatcttccccggcaccgatgttttccgattaaaaaactccgacatctgtaattattaattcattattaacaattaattatttgttattaatttacgcgtttatcaatcggacggacctgattgaagtcgagaatatcggattggtatcgaacgcgatcgcctttatcgcattttacatcggaggagacattttcgacggcgccgaagccgggaacggcgagtcgtctgttatgagtgtcgttgaagagaattagcgtgtgtttgcctttgcagtattgatggcggaaatctgaggttaaatcgaatcctttgcctaagcaattcacagctttttctaagatttttgagttggattcactcatgtttaggatcaaataattaaaggagagaatattatgataaaggaggattattaaaatggagaagagatgagagtatatataaggactaaggttgaaatgaggagagagttgtatagagactagttagttagtagtccaagacttggaatgttgaagccttgaagaaggaatggtataagtagtaatataataatgggaagtttcaaaaactctattcatatttctctttattgtttttttttttagagtattactatttataaaggtgagtgttagaaaaaatattaggaaaaaataaataaatatgtattttaattagtataataacataatattaatattagggtaatggttaagtggaaaataatatattttattaattttagttaggcactttatatctttgattatattaaaaaaaagttatcaaaatatcaaaaaataaattgaagacctatgtttgcagttattaccaaataagcatagactaattgtgtcgtcagttatttggtaataatggaagacgtaagtctatgtgtgtaggcctatgtctttgattattaccaaataaccatggaaatatggttaatataatatatctttgggaaaacttaaatttttcattttgtctcttctctcattatctttcttatttgaaattctaatagccaccaaactcaaaccaccatatgttttataaaacaccgtttttcttcattattttttaaaaaaatcttttatatttcttacctaaaaacacaaatatattataaaaaatgatttattttaggttttagcggtaaataactatttctactttagggctttgtgagttttggggctcagtaacaacggtcttaaacggtggcttttgatgcaattttttcagtctttgaacttgcattgaaatataaatcactttaatatgtatcttttagtttatttgcattttttttgtgtgtgttttagattcttttttcataatgtgtatatagggtttagatactcaccatggtggtcgaaaaatccatgatttttagttgaaaaatcaataattatatatgctcaaaaatttggtggtggtgattgaaaaattaagtaaacatttctaatattaaattttagtatgaaaataaaaagtttaaggattttattattgaaagatattaatattgtataagatgtaggattaagtaaatttatagttaaaaaagataatctttttgattttagggttttgtggggtttggagcttcgcaaccatagtgttataaatagtagatttggtaaaaaaaaaaataattaatggtttttttaaaaaataaataaataaatacatatgtctttagttattatgaaataactaataacagaagatataagttccgcgtatgtcttaagtcattttgacacttatgttttcggtttcatagtcattagtgttgaaattttttttaaccaaagactaactcacataaaaacgaagataaatgctttttttcaggttgcgatatcaagtttgtgtataaattatgtatactcttataataattgctaaagaatactagtggtattaagtactataatttatcatagtattatgaattagtataattaattattttgtctcatatgttatttaaaaaaaaaaaaaaaaaacttacattgactagataaatcagtcaaaagaatagacaataactactcaattatgatagaaaataaaagcctctcgctaaataataagtcgctctgttaatatatcgtttaaaaaaagttaaagaaatattacaaagggtacaagaaaagcctacaatattgaacaaagagtagacaagagaagcctacaatattgaacaattaaataataaatgtgagatagaaaaaaattgacatgatagatgcgagtcttatatagagggagaattttccacagacaaaaccgaagcacgaaaacttctatatatactcaattccttgatatacaatagtcgaagaaaaattatatagaagaggatatttcatgcctctagtgcggtgtgtactaccaacagaagccaatgaaattatcaaagagattcatgaaagcttttgtgacgatcatgccgattggcaaagcctgtctagctaagaaaataatctgtcagtgttattattgaccaactatcaacaaagacacacatgagtttgttaaacgatgtgacaagtaccaacggttcttgcatatatgtacctcgagtaccacccaccaagttgaaaatgatgacctcgccgatatgaggaatcaacctaattaggtctttacctacatgtcgaggtggtgcaaaatatgttgtcctagcagtcgacttcttcacaaaatagacaaaagctgagcctttagtatctattacatgcaaaaaagttcttgattttgtcatcaaaaacatcttttgtaagtttggcattccaattaaaatagtgtccgagataaccgcactcagttcaatggggacttattcattgaattttgcaaaataaataaaattatcaaaagcttcttatagtatcaagacctcaagcaaatgaacaagtagaagtcattaataaaacctagaatgacactataaaaaagaagtcaaacatagccaaaggcagatgaattgatgagctaccacaagtgctttaggcacatagaacgacagaataaatagtaacaggacatattctatttttattggcgtttggctcgaaagcaatgttacctgtggaagtgaacattgcgaccaacatgcgtgagttctcagtatgtccttggatctacttaaagaaaaacgcatatcgagtcacagataaccaatgctacttatagttttaattacttttatgttttttttcaataataattattcacaatcatataaaaaataattataattattataatttgaatattactattattttaattgataaataaatatttattattattacattattacattttaatgtatcatgcttttaagttaatttgtttgtgcttacatgtcattctttcaggtttactatgtcgtgcataaatctatattttttcatgttgtgtcatatgtctaagtcgcctttactttttcatgtcgtgtctaatgtctagcacatgttttttttatattatactcgtgtgttaatttcgtgtggtgtcaaaaaattccatattcacaacataattcccaaacattaaaacaagaaaaatagtttcatgaaaagtattatttatatataatatataaaattttgggtactgtgagtattgattgacctagtataatgcaatggtgggaaattgagaagaaaatatgaaataagagatgaagtcgtatacgtttcacttatgacaaatttattcacagctactctaatatattcagttatataataattaatttggcccccactttctgatttaattagggtaaacattattttagactctatattttataaaaattatcaattaaactttttattttgttaaataataaaataaattttgtattttttaaaatagtacacataagaccctgaattaatttttt

SEQ ID NO: 223127 - DNA, 1373 bp, Cannabis indica
tctcttaggaaacaacaaagcttgtcagatcaaaggaattggatctgtgttgttcaccatgcatgatggcatcaaaagaacaatcaagaatgtcaggtatgtccctgaactcaagaggaatttactgtctattggagaaatagctgctagtggatgttctattaagattgatgagtctcttagagtgataaaaggctcactgattgttatgaaaggtgatatcagaaatggtatctatgttcttaatggaaaagcagtgttgggaacagcaaatgctgctgtaaatgacagtactggtgatcaaactagaatgtggcatttgaggttagggcatgtgagtgaaagaggcctaattgaacttgacaaacagggcctgttaaggaacaagttgaacggaaaattagagttttgtgaagaatgtgtactaggcaagagctgtagggtaaagttttctactggtatgcatgtcacgaaagaaccacttaactatgtgcattcggatttgtggggtccttcaaggacacaaactcttagaggtgctaattacttcatgagtatcattgatgatttcagtaggaaggtttgagttttcatgttgagaaacaagaatcaagctttggaaacattcaacaattggagaaagctaatggaacaccaaacaggcagaaaactgaaggtattaaggacagataatggattagaatactgctcagatgaattcaaggactattgtgctaagactgggatcaaaagacacaaatctgtggtcaagacacctcaacagaatgggttggctgagagaatgaacagaactattctagaaagagttagatgtatgctgaagggtgcaggattgcagaaacatttttggggtgaaactgtgaagacatcatgctatttaatcaacagatgtccctctgttgcattaaatttcaaaacacctcaagagatatggactggaaacaaacctcactatgatcacttaaaggtttttggttgtcttgcctatgctcatattagacaagacaaactagaatctagggccctgaaatgcttgttccttggttatcctgatggtgtgaaaggctgtaagctttggtgcttagaggatggttacaagaagtgcattattagcagagatgtagtatttaaggagaatgaaatggcaatgaaacctggacagaattcaattgtgaatggaagggtacaagttcaggtggatccaaatttaacaataaggcaagacacagatactcaagaagcacctctaccagaaactggagaagcacaaatcgaatctgatgatgaaacacatgtcaatcaagaaaatctgagaagttaccaacttgtaagggacagagaaaggaggcaaa

SEQ ID NO: 223128 - DNA, 1453 bp, Cannabis indica
taaccatatctgaagccaactgaggtgttatcattacgatactaaaaacctgcctggaacctttttggctcaaagcctccgcaataaatttggctttctcgggatgatatagaatctcatagtcataatctttaactagctctaaccatcgtgtctgcctcatattcaaaagaaatacttgaggctcttgtggtctgtgtagatctcgtacttttctccatacaagtaatgtcgctatatctttagagcaaacacaatattagattccatagttataaatcatgttcccaaccatccacaatattaaatttccaaaataaaagttttaagaatcatcttctctgagaactttaacgagtgaattaaagaaactaataacatgagcaagagttcatgataactcaggatttaggctaatctactattgctcatcgttatgatatgaattagttctttatgataaatagcatgttaataaagacagcttcattcatattggtccatgtcatatataatctctattatatatacagaaccttcattttgatgtcctactacatccgtaatccaagccgagattacttgcaccgaagaacgggaacagtgaatcgtaacaaccattgattaatttgtccataactataatatgtttttggttattttattcatagctaagtggtcttagttctctgtacaactacaagccacaacctcatatatgaataaggaatttttagatagttaatatatattattcaataataatattaataacataacatcatacatatatcaaatgtttaactctttatttaataatagaaatgtcattacaatggggcgtgcattttctcctctgctcttccatggcgaagaagagacggacgatacgaaagcctgccagtgccattcgagcggtgagtgtggatgcagaagatgatactgaagccaactagagtgtgattgagcggcctgcgcaccaagaggaacaagctgcagatatactcctggacccatgcgatgaactggaaaacgtcttgaaggaagacgatgaagattcgactatgctgaaactgaatcggccttcatgttgggctgataaggctgaggcaactgacttccaagcttcagctaaagacatatggagcaatttcaatgccaatcaggctagaactccttcttcaaagcttgattatattgaacctatgaaaattggggatcagattatggcaaaaatttatctagaggaagtagaagtggaggcttcctactggaaatcttctactgtctgtattgtgctaggtgcgaatccaccattcaaggtttttgaggggtttattaggagaatatgggggaaactaagagtggagaagattgtaaggatgcattctggtttcactctagttagcttcagagatgaaccaaccagggatatcattcttgaaacgggagt

SEQ ID NO: 223129 - DNA, 1862 bp, Cannabis indica
tttcttttgcattaggtaaagaaaactatatctagagtaactgttgatgaacgtgacaaactactcataacctcctctggatttcacatttagcggtctacaaacatctaaatgtactaaccctagaggttctttagcacgctctcactttgcagagaaagaacacttagttatttttccttctaggcaagactcacaaactagcaagtcacccaaggtgaaatttttcaatggaccacctttggttaacttgtgcagtctatcgtatcctatatggctaagtcgtaaatgccatagatatgtttcattattattatcaatcttttgatttttatggtttctaggtttagcaacattaagaagtttgttcatgagcgcaattggtatatctggtctgaaagcataaagcccttgttccatgtgagcaacacataattgaataccattacgagaaataatggaaatagaactcaaaaaattcaattgaaaactttatgtttgtaaacataaaacactaatcaagtttctactaaaatttagaataaacaaaacattgtctaaactcaaaaatttattctaaaactttaggtgagcttttcctctagcttggactgatactcatcattaccaaccttgagtttcaactccattggatttaagtaattccatgtttcaagtagctgcaatgaagagcaaagatagttagtagatctagaatcaacaatccaaatggatttgtcattctctaaaacatatgactcaaaaacaaaggctttaccttcattcttatggtttagaagtttgggacatcttgctttaaaatgtcccttctctccacactaagaacatagaagaatacatctgcttagttgttcttcgatagtctgtattgctggttcaatttgaattctagctttcataattgaactcaaagttgcagtattgtcggaggaatcattctcaatatcttcagctttcttttttcccttatctgcaatactagagtgggccctccttacaagtgacaacgtcctttcatgagcatgtagttcagcatccagcttattcatgttggacaagttccaattgttgatcatataagatacaacaaatttattatcctcaagtgataggttgttgagattaaactgaacacattgctcttttgataggacaattcccaaaaaatttacattttggaattttaagttcatcaaaaataagtgtgaaatgatgctctaagcagcagacatcaacacactacgaagttcatttgtaaaggcatatactagttgaggattggggtgaggattgttcattttgacactacaaatatcaataaacaaaaataaactacttggttcaaataaattcatacacaatttcagaaaataacaagtaaagaaaatatatttacaaaaataccaaaaataaaacatattcaataattttctaaggtttccaacaaactcatacaatgtcctgtttaggcgagagtcaaagatatcattcattgaatagagtagtcagctcatctaaatggacaccattctcgtaaccttttattcgatcgaaaatagaatctgacgttgtcccatttaggcgagagccaaggtcattcctatttcatgagtttctaccattatttcatactttgtaagccctactcttagcagtcactattggggtgatcattactaagaataaaagacttacaataattcttatcttttgagattctagggcattaaattgctacaaacatctattgggataaatctcactaaaataagaactatgtaaaaccaacaatggagatcaaatattattttgattaaggctccttatttaaaatgtatttt

SEQ ID NO: 223130 - DNA, 1647 bp, Cannabis indica
atttaccctaatttttaatttaatgactttttaaaactacatattattttattttaaattacactagcatggctaatatgacaatggtataaacatcacatcatcattatatttgtcacgtgtgaaaaaaaactaacagaataatcaatttacaatactgtgaataattcagaaaccatttataacagacttacaatgattgcatagatcatagttcaagaaggtaaaaattctaaatacctttattttttcttagttcaataaacattaaataatataaagtatttttaccgtgcaccccaaacgagttaaggacattcaatagttttaatttgagtaatttgcggcgaaaatatctaagttttgttcgcagttgcggataaatacctaagtaaaaattttgcggtaaaaataccttatgttaaggttttggaacttctttaggtacctgatcgttaagtgccagataagtactatctacgtgtcatcatctcattggtccaactcattaatttttttatttaaaaaatcatttaaatacttaaaagttaaataaaaatttatttaaaattaaatatatatttaaaaaaaacgaaatcaaagatatattaattttttaaaaaaaaattaacctctaaatcacaaaaagagaaaatagagagattgaatatatcttggattggctttcaaaaaaaaaaaagaatacgatcttggatttgggaggagagagagagagagagagagagaggatttattacagcattgagaccagagagttgacacctctcttgatgaactctgacagagtaagagctgtcaaagatggataagcagaatctgcatcctctcgtgctgaatatgtttctacattcttgctttggcagtggccctgaataaataattaatttataacttcaaatattcttatttaagaattgatcacagtacaagaggcgcgtgagtaccaataagatgttcccttaaagactcgaatgatctgcagtgtttcttgcagattccacaagtgggttcatgaacagagtgatatgatattctcatgtgctccactagatgatccattctgttaaactgtctatagcatgctgcacacctgttcctgtttaattaaatatatatatatatatatatgtatatattaatcaacttagcaataaattaataaagatgactcatgaaattacgtatatgtgttagagagaaaactagaaatactacatatatatgcactacctcagagtttctgcatgattctccataatggtttagttgaatagtatataatattaattgaagatgaataattgtacgtttactccaatatataaatatattgtaagatcggaaaaagatgaaaataataataaaagcaagagagagttaagagtattattagtaataagagagagaggcctgagaaagaaagtaagagggtgtggaaggtatttatagggccagaagaaaaaaaaattgattgagatccaagttggtatacatgcaaaatgattaattagctacctgagattataatcagctgatattaataattctccaccccaatatcccttatttgaacattcgtagtgatcctgaaattttggggtccaccattcaaatggaataatattt

SEQ ID NO: 223131 - DNA, 1348 bp, Cannabis indica
gattgagctggtgactcacgatgagtttggctgaattcgctaaggtttgctcattctgcacgactcgttgagtattccattatggacatgctatcgaggcatcctgctcgacatgttgatccgaccagatgccctaagtagagtccacgtgtcaccattctcgtgatgccacgtcagagtgccaattttgggataacaatataaataataatttaaattaactaaatataaacaatactaaatttcaattaaaataatataactaaaaacctaaaaaaaaatacaaagctgaaaatatttatatttattaagattattaactaaaataatacaatctttacacacaattttacactcaaattataactgatatgaaccttaatacaaactcatatctattttgtaaagaccccttaatttaaattcggaaattagcagataaatagggtttaattatgaaaattatttattgctatttaaataattatttatgttgatttatttgaattcagaatgtatttttatgtaatatagtggaatttcataattttgctttttcggtgcccggcaacacggaacgcggtgtatggctcagtagatttgcaatctaatattttagtatagtgggacgatttatttagacattgggaatgttgggattggtcgggaatttagaatttcccaaaaatacccttaagtgccttttaatccttttagtgtgggaggggcaaaattgtcattttgccccataagcttttgtccttttgtggacttaatgttatgtaattatttgatttatttaatatatgttagctgaaataaaggtaagatttatgcatttttgctcatttgttcaaaaaaattaaaacttagaaaattcaagagaattgcattctctctctttcgaccacccttagaacagctagggtttgggggttttttctgcttttccagcaagattcctcaaggatttggactgcttgagctctaggtaagctcttgactttgtgttcttgagtttcttggtttgtaagttagtaaaaatagttgcatgcttggtgtctttgttgttttaatggctgttgttagttgttgttgcattcagaggtttatatatgtttatttgagtgaatttaaactgattttgttggtagatagttggatttaaccttacgtaaagctttgaactcaaaatcttagtttttatggtaaattgatgaattagttgctgtagttgttgctgtgcttggatttgttttctggtgttatattatagttaattgaagtgatttaggcaggttttgattaccaattagttggatgagcaagctttgagttttgaactcaa

SEQ ID NO: 223132 - DNA, 2333 bp, Cannabis indica
gcctaaagcgcaaacccagatggccaaggtctttaaatcagccgattgccatcttccatcctttgacatttaagtaaccatcataaacccatcacaaggagaccaaggggcgtgagctaagattgcttgagcctcaaaggctttgtttagacgaaatacaaaggtatcatgagcaacctcctgcattttctaaccatatgaaagcttccacatccccttaatggcatctctcatctgacctttagggactgctcttttagcaaagaaatgactcacaaacgagcgagtaatggtatctttagttacattatgatgaactagaatttgtatagaaaaatccttcagagtaacgttttctacttccttaatagtctctttaaccacaaacgccatacttctaaacgaaaataggccgccctaaaaaatactctgtataccgttaatggcacttacataaaccctccacgaatagaaatttaggtttgaatgagatgatgctcaacaaacaatactcagcttccttttacccaaagagggaaaacctaaattttttgaatcctcactaaaggaggcaaggacaaatgttctaggacacccaaaagggtctgcatcatcctgcacctccccactcatcactataccaaccacagtatgacagaggcgaaccacaattatagtacggagagcatttcacgattttagtacggagagcattttctaccttaattcttatcttaaaaattagaaaatagaaactattttactaaggtggcatttggtaacatttttacttttaattttttaacacaaaaataaaagtaaaatttttgttttcgaaaaataaaaatgtgttttataaccacttttgttttcttatttaaaaacaaaaaacaaaactgtgttctgtaagttctatttttatttttatttgttgattttatttaagttgggtccggagctggggtccgagtctaggtgtggggtctggagccggggctgggtcaggtgggtctggtgtccgaattgagggttcgagttcgggtttgggtcagagtcagggtctaggtccgagtccaggtcccaaggtctaggttggagtcggagtccaaaatattaatcaagaaaaaaattatttaaaatattttgaaagtgactttttttttattctcaattaaaaaattaaaaaagtgtaaacaattttatggaacatattaattaaaaaaataaaaatttgatgaaaaaaatgttaccaagcgcactctaaatatatgttttttgaagaatgacgtattaaatagtattagagatctaaaaatagtaggcgaacattagggtttctcgtttctaaatctataactattggaggttgtcttttttctttggccaggccgtcgatcttcattgggcttaggtgcgacttggttggggttgtattttgcaattgcaattcgatttttgctactgcgattagtattgtctctatgacatagttttgagtattttagtcttgtctctgtgacatagttatgagatttttcgctttgtcttttgtgacatgattttgagtgttttagtcttgtctgtgtgacatgcttttgttttgttttattgttggttcttctttattcttctactactcgccattaaattgttattagtggttgtaaatagcaagttctctgcaactgaagtggttgttagtagtgcatctacgtaccttacacaatagttcagtgcacaagctacaaagttaaatgaacttgttgaaatagtttctactattgtgtcttctaggcggtggataaaacagaatatatgtgttcttaaagttaattgtgatgcagcaattttttttatttaagttgattttaatttttttgtaaattaaactactgattatttaaataattgttataaaacatacccttgattgtaatccaccctctaaaaatttctctacatgtcaagtcgagcgtccgtacgtccgtctatactttgtttgtgtctaaataagcaataaaaaccagttcaaataataaaaaaaaaatgcaataaaaagtccccacccaaacattcaccgtcacaaatacacgtggcgtgaattcattcgtaaccgtattaatcgtaaaaaataacaaatccaaatacactatagaatatgcgaacctaaccggagagactgtgacttatttctttcttctcacagaaaaactcctcttccctacatgtttctctctctaccagattattaattctgtttctatacttgtcttcccccaatcatcttcctcattctctctcctaatcttttgtttctatttttattttatttt

SEQ ID NO: 223133 - DNA, 1638 bp, Cannabis indica
tctctctctctctctctcttttcaaattttttgagccacatagtgatagagtacatgcccacacatagcaagtctagcactcaatcatagtgtgtaagactgtgaagtatccaacacctaaaggagaatcgggctcagatcttgataatactctgcaacacaaaggaacaaggattagacatctgagtggaaggagccatttaattcgtctgcaatcaatgtaaggtttattgaactttatatgtgtttaaattcctattgttttagaaattcatatttaggatgttaaacaacatacatggtagtaaatctagatcttgataaaacaatcctcaacactttagtattatggttggaagcgccccaagttgataatatctcaacatgggcgttgggtgcctagagcacctaatgcttcgatgctcaaaactaaagttgcttcgaatctgattctattgcctccaatatgttcatgacatgtgtaattcatgtcccagtacaaagttagacccacttgtactaagacaaactcaaaaattgaaatcctagttggaatgtcaactcgggcgctgggtgaaaccctaggccctcaggttgacttctggggtgttgttcatgtatttttagcttccatgccttggacttggattcttcatgtcttcatggtactaaatactgaaacatagtgagttggaaacaacctaacatgatccaaacacccattccagagttctcgaagtcaacttgggcacatggctagggacccctgttgtgaaaattatatacgcaagtatacgcagtcaaacaagtaataaaatgataagtaagatcgtctccacagggattgcaaacaaaaatatcttgtaaaaccaactaattacaacttaaagtaaaaagaaataacatgaaaatgagtgagcaatgattcaaaataaaaatgacagtagttaaacgtgctaatattaatgttattgttgctagaagaacgctttcaaagaggaaataaaatataatatggaaaaagtggcttgaatagctcattactcctatgctagttttttcccagttgctacaacattaccttagcattcctgccagagataacaaaatttcctatgtgtttatgagaattttccaaaactcacaatttaagttctaacacctagtttcatatattcctatatcaaaccagattagagaacactaattatgcatcaatttttaagttatgcaaggtaaatgaaatatccctattccacttacaaagaaacaacctaaatctaggatttctcttgctccattcaagtttaactactagatctaacccttccggaacaagatctagcttagcaaattgttattaatggccaagaaacaacaatcaaatagaaatgagaactcacttgaatgaacaaaggcataaatgctaaaatatgcttaaaaagttaatcatacccaacataggagttcatagccactcaagccttaagaaaattagctcatgttcaacacaaaaattacaatccaaattcgaaattgttcatccatggctgctgccctttttacaacttatcaagtttttgatatttaaagataagaaagacaagaacaaaatataaaaggaaagggaagagaaat

SEQ ID NO: 223134 - DNA, 1945 bp, Cannabis indica
aggttaatggtgctggttagcacgttacccaaatcaatcaataactaagacagccaggcgtatctgtattcgaaaggttagggacaactcatgatctcggacatgatctgaacagaaggacaggagttgatgatcaacttggctcgccgatcgtgcagcccggaacccgtgctcaaattctcgcttagaaagatgctgacgtgactcagatcgaccaaaatgtcgaacagattagtccagctgtgcaggcacaactggacgaactaaagaatatgttccaaggcatggccggacagagaaacaatgatctcgagttggaccgagcacgcgaaacccctttctctcccgagatcaatctcttggcattaccccacaagtttaaattgccaacctagaagatgtacattggaagagaagatcctctttcccacctcaagcattttgagatgcaaatggatctgcagggggtatgaggtgacgtatgttgcagaatttttcctgctaccctctcggaagccgcccagcaatggtatttcaagttggcccctggaaaattcaactcatggaaagctttttcctcggaattcaatgcacaattctcctcctctcgccaacttctgttgcatttaggagacctggtcgaagtcaagcaaaggccaggcgagcctctccgagcatacatcagcagattcatgacggaagcgaccaaggtctcacgggtaactaaagatggaaagttgtccgcgatattagggggcattgaagtcctcggtgaaatttggaaggacataaggaagaacggcccggtagactcaatgagtaattttctcgaccgtgctgaaggcttcatcaaacttgaaaaggctattcagcgagcagaaggtgagcaaaaacatggcaagtcaaaagctccttccactggaacgtccgcccaactcccccgttacccaaataattcgagctaaaatggtaaacgttccaacaacaacaacaggcaagggaatgggaagaagggaaagttcaccgacaaacctgaggaagctccccgggagaatcaagtaaagtacactgcatttaccatcttgactgaggatatagaaagtgtttacatggccactcagtcgctagccctgtataagaagcacgcacctatgaagaaggatgtctgtaagagagacatgaccaagttttgtcaatttcacggagactacggccacaaaaccaatgaatgcaacaatctaaagcgggaaattgaattcttgatcaggaaaaataacccgcatgtacagaaatatgtcaaggccgatcagaatcagaggaacgacaataaccaagacttgctacctccaccggtagacagacatctgcaagtaatcattggaggcccgcacatagctggagattcgggcaaagctcgggagaggtatgtcccaacagcataacacgaacaagaagaagtgatcctggccgtagaagaaaggaagcctaaaatcccacgggtaggggggcctaccataaccttcaatgatgaagacgctgtcaaaataaggtttccgcacaacaacccgttggttgtggaggtccagatagctaataagatggtggccagaaccatgattgataatggagcctctttacacatcttattcaaaactgcctatgaaaagatggggctccagcttaaagatctaaccccctttctcctgcctgtacatggtttatccggccaaggagtcgcacctgtaggacaaattcgtctacccctcactgttatgacttttattgcacaatttctggtattagatgttccttcagcctttaatgtaatgctaggtcatctagctttgtatgacttaaaggctgtcacatcgatattgcactcctgcctgaagtttcaaacgaagaatggggtagggtgtctaagaggaaaccagcagactgctcg

SEQ ID NO: 223135 - DNA, 2300 bp, Cannabis indica
atgtattccatgatacaatgcttcaagattgctcagaagctcggcagcatccatctcagattcctgaagatgtaatgtgtttataacagggatcttataaggatcatcaacgaaacgaggaaaaccagaatccttgtctttgaaatctttcaaactaggagaatcagaatcttcttctaccccattagatgtggaagaaacattgtgtttagacaaacttctctcccatattccgaagccgttaatattataaagaattcttattgcaacaatcagtatcgacatcacacaaacacgagtaggaagccttagttcactagctgataaccataaatttggaggcattgaccactcgtatatacgacaagcgtgaggaagaatcttatccgaaggaagtgatagcttttgaagatagcgtgaagcgatggcgtagaaattcacaggaggtaaacataagcctatggatttagcaatggaagctgaaagtggttccatcttctgtgctgttacagattcaagaggcctgaacatggaacttgaacttattgggcaagcttttgttggtggtccaatgagtttttcgatttcaacaaaagcggcaaagtagggaagtttcccttctaatgaccactttactatatcggttgtcaagactgcttccctggcgagatgacaaactagaaaagaaatggctaaagtacaagacaacggtatcttccttttcaatgatctgatccatatcgttacagcacgctgaccatacatattttggggttctgaattatatttagaccgcggctcatcattaggcagctctcctgaaagaaacactcattcaaatgctaaaatattcattaagacaactaaaatatgcttagttgttgtaacttgtaaggcaaggcatctaagaggcaaaataagctaaaagttaatatgtatatatatgtttatatgtatatatatactctaatctaattcaacttttatgctaaaatatgcttaatagccttaatgattccaaccaagacttgcgttatctgtatcaaatgcgagctacgagcaaatagaacaactttctgaagtatcaatactgtcacatgaatcgtaaatttaagacagttaaaaataaaatgatacattaaggtttgagtttagtttgagcaaaccttgattctgattctcagactcgttaatggcttcatcaacccaaccatcatcaaacactcgagtggcagccacgaaccgcaaccaaatggtcccagccaacccacaaatcaaagggctcactttaaactccctaaccaaagcctcacactgaaactcaatcatcaactgcaaacccataatgtatcgaatccttatctcattatgataatattccgagctcattacacttgaaaaatgcatataatgttgaaatatttgatcttcgtgtactcagtagtaatattttatggtctatgatagaaggcacatggagaagggtgaaagaagaaaataacagaagaatgcgaacattctataatgtaaaatttgtcaaatcagtacttgtctatgcttatggacatagggcttcattatttagtcccaacatagtaaaactactacttttctgattttactttgctagttgatcctatgtacttatttagctatgattttagaggagacatgcaaagatatattaccactgtaattttctctgtatttttacttagtgtgactgtgcattgaagcaaaatcaatgctgattaatcttttactatgatgattgatctttaagattgtttctgctattacccgttgctttgctctcttttatttttcttctaagttgtgtatcgatgtctgcagtgttgttcctctctcctctcactgtcatactatgttcttctcttttcttcttactataaccttgtttggtattgcatgaaataaacattctgttgtcccagaattcttacttgaaatctctttttatatgtagttagtgtctacattttaaatcatatttatgtgagatttgttagttttatgtaaattcaggtacttgaaatctctttttatatgtaattagtgtttatattttagatcatattaatgtgcgatttttgagattggtaggttttatgtaaatttggggcataaaattgtgtactcttgattaatttaggttggtttgttagggttgaaatacatttgtatctttgtttacatgcaacatgattgtgagtggaatatatgtatttcttttaaaaaaaattactgttttctgagatcagtttttatcatccaaacat

SEQ ID NO: 223136 - DNA, 2253 bp, Cannabis indica
atatatatgaaaaaaaaaaacacgaatttaagcccggatatgaaaacgagctgacctgtttaaaaaatatgggtcgacacgagcaaagcacagcactaattcgagcatgccatgaaaatatcaggcttacgggtcgtgtcgagcctaccctttaaaatgttagcactacacgacacaacctatgtttttctgtggcacgacacgacccgttttttaaaaaatacagataaatatagatcgggccagcacgacacgcacgaacttacaacactaggttgagcagtgttttcaaattaagttttgggaaacatgggccgtggtgatagtgaatatatttgctaaaaagtttcaacaagacaactgttaaaatcttgtttttagtttgggtggcgtttggtaacacttttattttttatttttttaatcacaaaaatgatagtaaaatttttatttttggaaaaaaaaaatgtgttctataataacttttatttcaatttcaaaaatagaaaacaaaattttgttttgtaaatttaattttgattttcatttgttgattttatttaagtccagtctgggtcaaagtcggggtatgggtcgtggctgtggtccaggtttggacctggggttcggggccggtttcggagtcgaggccgaggtttgggtctgggtctggggccaggtttgggtccaagaccggggtctgggtctggggccaggtttgggtccaagaccggggtctagggccgacgttgggtctgggtctgggtccagctttgcatccgtgtttgggtctggggttgggatccaagtctggggccaggtttgggtcaaaggacgggctttggggccaaggtcgggatctggggtccggggttgaaattggggttcgaggctggggtttgggtttgggtttgggtacgggtaacaggtcggggtccgggtgtgggttccaaggtcgaggttggagtcggagtacaaaatattaattaagaaaaaaaaactatttaaaaaaatttgaaagtcactttttttttaaaaaaaaaaaaaaataaaaagtgaaaataattgtattgaacatgtttttagaaaatatatttacttttataattaaaaaaataaaaaaaaaatattaccaaatgtaccatttaaatttttatttttgttatataagttttagttaatttatatttgtctaatgatgaagattttacacatggttacaataagtgctttaaatattgattggattttttgacacgaaactaaagataagcctgagaggtattcggtatgaaaagatatgtgtttcggcacaattcgacacgatataaaaaaatatgggcatagacacgacacaacacaatattgcaaattagcatggcatagtacaaaaaatataaacttagacacgacacgacaagcttgaaagcacaatatgtaaagcacaaataaattagactaaaaaataccacacattaaaaagctcaataatctagaaaataataataataataataataataataataataataataataataataataataaatatttatttatcaattaaaatgataataatatccaaattctaacaattataataattctttatattattgtgtaactattgttaaaaaattacataataattaaaactataaaatacatatatatattagtaattagtttatcgattataataaaaatacaaaaacatggagcatgaatttgagtgcatataagaacataggttgattttatataaggaaaataggttgatccaaataaatacaacacgaacttgagcaccatacaatattaccgggcttgtaagcatagacccaggatttaaagtgagagggcgatattttttttttttgtaaaggcaagggaaaagttaatttaaaaagaaaaagaaaatgctctcggtggaatttgcacttaaatctctatcttatatgcaatttagtttaatcattacaccaaagataattttatatttataatattattttttattgcaaattatatcgtaactaactaaaatacatatatatttttttcctttttttcttgggaagcaactgccctgtctcacttctatgtggacccgcccctatcgtgccgaccctaccctataaaattatcgacacgacatagcacgatatttatattttttatggcacaacatgatcatgatttatgtttttttggctcggcactacatgacttttattttaaaaagct

SEQ ID NO: 223137 - DNA, 1915 bp, Cannabis indica
tatatccttccaaagttcactgacgacttcaatgcccccggtatcacggataactttccatcttcagttactcatgaaactttggtcgcctctgtcatgaatctgctgatgtatgctcggagaggtccgcctgatctttgcataacttcgaccaggtctcccagttgcaatggaagttggcgagaggaggagaattgtgcatggaattccgaagagaaggctttccatgaattgaactttccaggggccaacttgaaataccattgctgggcggctttcgacaaggtagcaggaaaaattctgcaacacacatctcctcgtatcccttacaaatccatttgcattttgaaatacttgaggtgggaaagaggatcttcttacccactattcattttccatgttggcattttaaacttgtggggcaacgctagaagattgatcttgggagagaaaggagttccgcgtgctcggtcaagctcaagatcattgtttctctgtccaggcatgccttggaacatatttttcagttcttctagctgtgcctgtacgactgggctaacctgctcggcattctagtcaatttgaatcacatcagtatctttctgagcaggaatttgaccacgggctccggggtccacgatcgttgtgacaatctgatcatctactcctctccttctgttcatatcattccttaggtcatgagtcgtcaccaacctttcaaatacagaagtgcatggctgccttagcgattgatttgcttggttgataggtggaatagcaccgttaacctggttggaactatcaggtatgacctctcctgatggattactagacaaggtctgcccgcctactataatgtctcacgccctaaaaattgacccaaactttcatcccgtctaacaaaagagaagactactggacaaagaatgggtgcaagcactaaaagaagagctagcgagactgcgtaaaaacgaggtcatcattgaagctttctacccaacttgggtagctaaccccgtactagtacccaagcctaacaaaaaatggaaagtatgtatcgatgtcattgtccacaacaaggcatgcaccaaggaatgttttccacttccaagaattgatcagctcgtgaatgcaacaaccggacatgaaatcctgagcttcatggatgcctaatcggggtataatcaaatcaaaatgcatccacaagaccaagaacatacaagttttcgaacagatatgggtttgtactattataaggttatgttgttcggtctgaagaatgctagatctacctaccagagattggtaaataaaatgtttaaaaatcatattggacgaaatatggaggtatatgcagatgatatgctcataaaatccaagaaggttgggggcacataaaggatctggatgaatgtttcaaaatcctcaaaaaatacaacatgaaactcaatcccttaaagtgttccgtcggggtcaacgcgggtaagtttcttggttttattgtcaatgctcggggtatagaagctaatccaaagaaaatacaagccctcctagatatgaaattgccaactaagacaaagaaagtttaaagcttaactggtcggatagccgcacttagtagatttgtttcaaagtcaacagacaaatgtgttcctttcttcatcatccttcaatgtaaaaaatgtttgaattgatggaggaatgtgagaatgctttccaagaattaaaaagaaaacttgcaaaacctcccgtactctcaaaacccctggacagagaagaattatgaatatacttggctgtcacagaatatgctgtaagcgtcatgctgataagaaaagagaacaacgtccaacatccagtctactatatcactaaaagacttgttgaagcagaaggtgttagaaattattttacc

SEQ ID NO: 223138 - DNA, 1191 bp, Cannabis indica
ttgataacatttctgaatcactctccaccaagaaaaagttgtgacccctgagcctcgctgagtcgagggcaagtcaacaaacaaccgcttctcctatcaacggatccctaaagccgagcatggaaacgacagcccacaggacattccctgagtgatttcgagccagggctgcaatgcacatagaatttccaccaaccctcgcatcacagttgattttgatctaatcctcaggcggcggtgtccaagcaagaagagccacaggtaacatcggaggaaacaagcaagccacataatctgtataacaatgagatatggagtcaattgttgttaaaatgatattcgatttcgagttgtgtacctggtcatttcgggttctccaaattgtgtccacgatgactgaagcataaaggaataacttatcaaagtccaccccagaagcttttaggttccaaaggaacttgacccggtcccaatcccgacccccagagttaagtattgggtacaccccccagggagaagacctccagagatggtaagcaaagttgtagtatagaaacaagtgtttcattgattcctcagcctccccacacaaagggcaggttacatcttcaatttggattctcttggccaagataccacggaccggcaaagcattcgaaaggataccccatcaaaggattttatgtctttccaaaattttggagttccatagtctattccagtgagaaggagccaccacacaggcgggggctctttctagagcttgaatcaaataagcagacttcgtggtgaatttcccgtttccttctttggtccagatccacctgtctctcccttgaccggaaggcctgccacctttcaaattggaattcttctcctaaaaaaatttaagaatatatcataatattaagttaaaacataaggatccgaaaccgaaacccaaggtaattatttgtcaactcaatagataaaaacatgtattttaaaaaattagaagctaaaagtggtaatttttgaaaacaaagactaactttgtcatagtacaaaagaagttggtactttagaaaatgaaaaatttaggaaactttaaacaaaatactttggcaaaattttcgagaaaattatattgtatattcactttattttacttgttttaattcttacctttatttttatattctttaaggtata

SEQ ID NO: 223139 - DNA, 3684 bp, Cannabis indica
atcttccctaattgggaatttagttcatgaaaattaagttaacatccatgattaaatctgaaatagaaatagacataaagaaatttaaagagttgaagagctgacctcgcttttagccaacgacaatgagtctattttataggcgataagtgatgtataataacagatatatgataaagcaatataaggacacagggattttatagaggttcagccccgagcagttcggtaatagcctaatcctcgttacctgtattgacttaagatcaaggagaaagattccttttcttatagctcttacaatagtatctctgaatatataattcttagataatagtatagtcttagctcaactgcttttcgaccgatctctttcctagtgaatatacatcactatttatagggctagtaaccttagagaggaatagtttcccctctcattacaatgcgtataaacagaaagatcgtggtatcaatgctgaatacaaggatcgtgggattgaggctgaatacactgatagtgggatcgtgtgtatgccatatccacgtaaattgatccctaagtgatagggattgtgctgatgactcacgatgcgaaagctgaattcgctaagtgttggttactctgcgcggattactaaatactttgctctgagcgtgccagcaatatgtcctgctcagactatgcttcccgggcagatattccaagtgggttccacttgtcaccattcatcacttggattattttttatttcccatattcgctttcaaggagggaaacagaggcatctgaggttcctttgagacaattacctcttttcgtgacttgcctataaataccaacagcattggcacataaactcattttcatcaccctcttttgctaagtaaccttcagagcgaaaagagaaattcttggctttaaattttccgaagtgccttcatacaaactgcttgttggattgacgttacttcgaacccatacatttgactctcgagttagtttctaatttccttcatgcttatctctgcatgtttacattttgaatgcatcttctactgtgccgtaaaaaaatgtttaggaaaccctagttttagaaacctgtgcgattcttttttctcatgtcttcgtgcgattttacaaccataatgcttatttctgaactaaataacgtccatctttcatcttgcttattctaagcttcatgaacctttttctccctaactcaagaaaaattttaacttcttgagttctgacttttctttgaacataattgttctttaatctgttgagtactcctggttgacatatttgcctgtttatcgttaaatattattccgaccaaacactcatctcgtgtgttgtcttttgtatatgaactcaggatagtcttgggaacacggacatcggatcgacgaggaatctcttcaacttctacacgaggatcatcctcgtctttgttctagcccaccttcctctagcgaagggccttctccaactcttgtacctagccacaggatgatggcatgtacaaagaaaaccgtgcgtctggctgacgcatctgatcctcaagtggctcggcatgccactctgcccagtgccgaataggattcggccgtccatatggaggagatcatgaaggggacgctgaggtccaggagatcgaggagttggacgatgtacgtcctggcagtccctctgaggcagaggaagaggcaaacgttaaacccccaaattacggggagtacaatgaggctggggagcgaatcgatgctgacggagacgtcctggttaagggcgtggactacgtcagtgaggagctcactgcggcagttcctcatagaaggcagggtgccttgggagccagatgggtaagccttccgtccaagattacggaggcgcgccttcgaactcttgaccagggcagatacctaggcgagctggactgctacattcccacccacaacaatcatgccacaaaccctgacaaaaggatgtgtgcctggtagggtgcccatggtcagcaaggagcgttgatgcccttgcaaaaatacttctaggatgtggcgaacttcttcggcctttgcccggcccagttcactccaaagggcattaagtatttatctgccctttttgtcctctacgcttcccaagagtggggtactccctctcctcatgaagttgcctggttctttgatttgaagtccacctccaagcaaggcaattcggggtacttctatttctctcaaccaagcttcaagtggttgactggcacgaatgacacgaccatcaataagatagggcattttgttgatgattacttcatggtggatggcgcgggcatcactcgcactcggttccagtagattctgacatatcaccgtcctcccttcactcttgctcttagggacagagctcaaaaacttgcccggcagccgggggaagaccggaatattatccagttaacctccgaggataactttgtgaggtacaggctttatcccaagaactttactcctatatccgtgatggggaagaggaggaaatctggtgccgcccggactgaacgagctcatcaggagaatgaactcagtcaacttaagcgcgaggctaagttgaagggaggtgcaagggccaagcagtatgctcaggagcccttaaatcctaaagatgaagccgaggaatagcaagtgaccccattgaagagaaagaagaaactctcggccctgcccaggcctgttgaacatgcgattcgcataagggagcccatttcacctgttcggccatcccctcccgtgtctggaaaagggaaagttgttatgtttaaaataagatcgatgtcaggtgatgatggtcttctaagtcttgttcgggcagtcaccttgcatattactttgtcttgttttttgaccttcttaatttacatgccttatgtttcttatgtctgttttctaaccacgttgttttcattctgtgcagacatgtcttggcagaagctcaacgctctgaggaagagaataggtggaagctctagcgcctctcctccagccaagaagtctaagggtgatgaggggtcctctactaaggaaaagaggcctacctggaaggtcattgatctttccgaggagctaactgctgcaaacccctctacccccaaagctgccaactccaaggagtttggaccaccaatggttgagtctgaactggtcaggagtaatcctgaacgggtgcaggcacctactccacctttgccggtacttccagaggcaaaaataggcaaggagatgctggcccattatatgaaccggctggttcctgaggtcagtgagcaactggctgttggtgacaatgactcttctttggaatttctggtgggcggagtcttgaaggagttcaccagggtaagtctcttttgatacttcccttaatcttccatacttagctcgatatgctaaagtttttcctttgtgcaaatcggtctgaagttggcctacacttactcccaggctaagtctgctacttctaagaacgcagctctatccgacaccctgaaggcggaggcagacttggccaagtaggatgctgaagaagccaaggtggaaggcagagctgttcgattggaattgggtgaagacaacaagaagctatttgcccctgagcagaaaatcattgtgctgactaag

SEQ ID NO: 223140 - DNA, 1792 bp, Cannabis indica
gaagaataacctagggaaaatgaaattcctcctgaaaatccgaatgatcagccagaaccctctcatggaaatgagaatgggaggcaactagaaatagatgaacaagaaattcctcatggaaatgaggaagaccttgggactcaacctggagaacgtaggtcacctgcgaggaatcacaagcgttctttgcgaacccatagagagagggctcgtacaaaccctagtgggggaaatacgacaaaccacactcagggggaagaacagaacgtgaagaagcaagtgtgacctcagggcgttcaaggacccacagtcgatcaactcaaagaggagagagtgctcaacgagctaatgatcgagaaagcatgggaaccagtaaatccgtaagtcactccaggacaaggtccatgagcaagacgaggtccgtgactaggacacaatctgtgagtaaaacgagatctcccagcaattactcctcgccagatctgcgagagcacttgaatctaaaaaaacctgatctttgccaacaactcggtccaaagcaagaggatcctatccaattgcgaatagacaagttggaggacaagttcaggagatatcaagtgggggaattagggaaacaatctggatacgactcagacgaggagctcgagctgtaccacccagatatcatgaatactccttttcccctaggatttaaaaacccacatctctcatcgtataatggaaccaccaatctggtctcgcatttgaagaacttcaacacaataatgcgagccattaatgtgacaaacaatttactttgtattttgtttcccacctcgctagttggagcagcaagcagctggttcaacaagtttactcaccattccataacttcctgggaaaagctatccagggattttaagaaacagttgtaggctgcaagggatagacgacccgaggtggcctcgctaaccattataaagcaacaacccagcaaaccacttaaggaatacttaagtcgttttagtacggctgctggaagggttagaaatttggatgatagtacacaacttatagcccttcaggcggggatttttactgatccactaaccgctgggggcaaactatgggacgacctacagggtcgtctagtatagaacatcactgagttcaatgaaagggcttaggtgtttgtctgaaaagaggaagctcaaaaagagatgaatttgttgaaaacaggctcgggaggcaagcccaataatgtttcagcaagtgatgtctcaactagagttgataacttaggggcctcttgctcaaagagaaaggaagattttaaggaatcgtcaaaggaaaaaaaagaaacataagaagcacgataagtacgtgccagtgtatactatttatactgagcttaatgaaactcagtaaaaaatatttaccttgcacatgagcagaaggttaccttcggcaaccccgagcccatgaggcatgcaaggcacaaaagagatcctaccaggtattgaaaataccataaggacattggggacacagccaatgaatgccatcagttgaaagatgagatagaaagtctcatcgctcgtggccacttcaaacagcttgtgaagaagaagggcaatggacacagccagcccaattctgcccaacaacccaaacaaccaggggttacagcctcctcctgttgaaggagaggacatcctggctatttcgggagggccaacatatcgcaggggagagcaacgacgcccaaaaaagttatgtgaaagaaataaaaaatgagcagtcagtattt

SEQ ID NO: 223141 - DNA, 2621 bp, Cannabis indica
ttctgggcgagggaacgtccaagtttaataaggttaagggtattaattttgactatgatgatgatcacattccaaaaatgataggagatgcacaatttgaataaaatatcgatccatcaaaattttaatgttttgtagaagatgtcgagaagcctatttacactaattgtaataggtttactaaattattgacacttattagattatacaatataaaagtaaaataatggactaacaccttcataagtgggataaacaatcaccacacacccatgggtcaaattagtctaggggtagatgacactatctccaccataaacataatgacattctcaaaagtagatgaggacatccacacaagactatgactacccacaacatacaagggctcttggggtggtcacgccaagatgacaattgacaccctccttaggttgggtctcgggggtgtcacccccaagtgttatcttctattcccgaaggtggtcaacgaccgtgtcacacccttaggagacccttatcgttagtgactagctcaaatgttcaaatcccacaagaagcttaaagatagttataaacccacaaaaatagcgggatattatcacaaaaatcaaacttcaactacctttgaaaattaaggagatggttgagatagctctgcctttgtcgcgtctcctaaagcgagaagcactgaattttcccctataaaaggggtcacacatgacttgggaaagggatcctcaatattgagcacttaaagaaaaaaatactattttattctttgcattcaagagcttgttcttaacttttgcaaccctgattaataaaacacaaggggagtaggctattagcgatatctgggaccaaacctctttaaattcaagtatctttctttacatttattacaaatttcagtatcattaattacatttattgtcacaattttagtctaaatctcatttattacgactctgtatcggctggctaaaaatccagtcaatagtactctaccatttaatctcatttagccaagcttgaaggaaattatcgtttcgcttgtatatatttatagaagctatagattccgtatctatgatttgctctcccactcaattgtactatcctgttcccaagatgtacgtatttggaagatccatttggttaactttaataaacaagtcaaagaatataaataatacacttgaacctgaaccacaccatgtcaggattgagatcattgctttaagatcaactaagtgatatttacttagaaaagatattatcgtaagtttatgatatcttttctatgtgaatatcggtctagtacgatgtatacagtacatttaattaaagcttacattaccaatacctttgaaaagacataccactatctaagtgtaagcaaaccaatttattgattatcgtatcagtgtaaattctgtgtactgataaatcatgaaaataattttaatcacataatcttgactattttccactatgatgacaacacaaaaatcataaataacaatgtgataaggatttaaaagaatttatatatcaaacaaatgaccatgaagcaaatatgtaaaacaagcattatattaaacaagtaataaaatacttttattcctttattgataaataaaatgtctgataatattgaaatatgattttagttagggcaccaaatccaacatgacaatgagagttggttatcataatgtcacaaagcaaggatgtcctagttatctttgacccactttacaacgttttattttactctgggaggaaagttcttacctattcgaatcactttggtatggtatgtgtcaatgaagtaaacttcttcaacatcttcattggatctctttactctttcaaccctgatttgcggatctagttcatcttctctgtagatcaccccaagtgccagttgggctggtgcctcaagatttgtctcttcttccaaggctttttcatcgaccataaagattgttttagaaaaaatattgtgacactttcatgcgctcttctaataatattttacaatgccaatacaaccatgatcacaaggaaatttcatacataagtggcagatggaggtggctgctcacgaattgactaggacaggatatcctagctagtattacattgtatgcagtatgaaaatccaccactataatcttgcagtacttgaacgcggaatgagtgttactcctagctggacctacttagagtgactagaatttggatctttcccattagtagtggcaaatctccattgagttcttctagataaatgggacattgagcaaggttaacctcaagtcggtcaatggtctaaaatgcaattttgaacaaaattttaacaaaactcccattatctactaggatctgggacactctcttgtttgtgatttcaaattcaatctccaatggatcatgatgtgtgaaatgtacattccgagcatcctcttcagtataagtaatgggcaagttcatcatctacgacctttgagttggtgcttgcactagggcataaacctctcctctatgttttagctcatttagatagtttttctatgcattcaagtgtgcagctaatatgcggacccctgaaa

SEQ ID NO: 223142 - DNA, 2082 bp, Cannabis indica
ctgcaggacacttggattcagtgaggggtctctccccctccccacgatcaggcccttcgtgatggtgagcgaatatcgagcagtatacacatgcaacagcactcttccagtttggcccaagctccaaatgatcctgtcagcataacacaacaatccacctccttcaaccttccattatcggctcatggtggatgcagcccaagatcgacaacttagtaagatgggcttcgacatgaccatccacactaattcaggtgaagttctccttaacttggcgacgccacaaaccgggatcactactcctttgctaatggaagcacaagcactttattcagcagtattatggtgtcatgaacactccttttatccagatagcattgtctctgattgtagtgtgttagtgaattatatttgtaccaatggaacacataatttgcatcttaatccttttgttattggaaccaaaagcttgctctcttctttccctaaagtgtctcttagctacatcccaagagaggccaattttgctgcccatggtttagctaagactgctttaggcttagagcaggaagctttatggatgagctctactatccaaaatgctttatctcatgtaccttgtacttcaaattctgattaatgaatacaggtctttctctcaaaaaaaaaaaaacccaatttattgatggggcttttcgttatttattttttatttactcaaaagaaaagaacttctaacagacttttctctcgagagtattatgtatggctacgaagaaattaaattgccgtttttgggaatattactataaattctctcttctaatcatattgaagtggataaaactcccagttttaatttttttgaactcaactctcattgtttaactaatggacatgcaaaatatatttttaaaaattaaattagaagtattaaaactaaaacataacactcaaataggctgaatttttgtttaaaaaatattagattgtaaggtgttgtgtgtatatgttgttagcttgagtttgttgtactaagttagttaagtgtgagtatatattagctgagttagttagagtcttaaccgactctgtttttcccttctctactgccttgtgtatatatacacaatattgtacaaattttatcaattaatcaaaatttacattttcttccctctcttgttactaaaatggtatcagagccgctcgattaagtgtgctcttatcttcttccgctcgtttcttgtttttcgatcatggccaggggaggtggaactcaaactcgtagtaccaccaacaatggtgattcgaatcatttttctgttcttaatcagagtgttcgaagctctgctgatgatcctcgaagtccttacttcttaacctatggagataattcgtgtgtcaatcttgttccaaagattcttactgggagctgaaaattatagttcttagcgtcattccatgatggtagctctatcggccaggaataaagtgaaactcattgatggaaaactttctgcaccagatgaagaggatgaagattatgaagcttggacaagatgtaacagcatagtgattttgtggatcttacactctgtttcgagttccattatagaatgtataatgtacttggaagatgcttcttgcatttggtatgaattgtaggaaagatttgagcaaaagaatgctccaagaatctacgaggtcagaaggatgatgtagatgttagctcaaggatctaatgatttcacttcttactatactcgtctaaaaggtctttaggatcttttgcaagaatatagatcacaacctgtttgttcatgtggtgctatgaacattattcagggatatcaagatgaagataaagttcttgagttcctcattagactgaatgagtcttattccagtgcaagatcccaaattctccttcaagatcctctccctaatgttaacaaagcctatgcctcggttatccaagaagaaagacaaagaggtatcactaatcaccaatatgagattcataaatctactaatgataatgcaggccagtttcctcgaaatgttcaagcaaatcgtggg

SEQ ID NO: 223143 - DNA, 4530 bp, Cannabis indica
acaggcaacacacagagaacatcgaagcatacacaaggagtatgaataaacatcgtttattatatatatcttgatagggcaaaagagtataactggactcctatcatgctggtgaaaagattctttcatatataaatcaccaatcacatcgtagaaggcttaatgaattttcaagaaaatttcaataatatggttttagctctgcatgtgtgaagaaaattacaaacgaaatacaaaaggccctataaacatagctccccactccaatgacgtacttggtgatagacttgacttataatgatcccatcgctaataatatttatgagtatttttacaagttatttatcattattatcgttaaataaaaaccctaataaatcaaccccaaatctgccgccaccccacctttgttctcttttttctctgctaatgtatttttctctctcaattcttcataacttaatttctttagcttttctctttttggatggcaatggcactagacttcaacttggtgttcgacaaagcaacgatttcacctaggctttgcgaggcacgtactagaggttggctccaagctctcacaccaattttcttctctccattcttctgatgagttttagatttaataggtattagattcaatgggttttagtacttttagttcttttgagttcttctctcctcttttgattaaggaaaaaggtttcctggaacagaaggtaaaataagtggccaagctaattttctaatatttcatttatttttgttaattgaagacttcatatatatattagtggcgaagctaatttatatataataataatgtaatttgaaagttaatattttgacaagaagaaaaaaacaaataataaatattaaactagtttagttgatcaatatacatgttcataaataatatatattaatttataattaatatcacaatattttttccctaatataaaagcaaattaatcattatatatttatattttttttttttatgaataagaatcattttattgtcgcatgataacataacactatattattcgtacagtacctatattaatattattaattaaacaagaataacgtttataattttgcacaatgtcggaaaaactttattttttgtttagtaagaaaataaatatttttgtcacatatgattcttttgatatataaactgtctggtctattgacctgtgtctggtttcttttgaatcagggtatgttatttgtcttttgctgttggttattgtatctgtgagactgttagttcttttgattgatggcggatcaggataacatggatgtcgagaatggcagacgttttgagattagcttggaaggagatgaggacgatgggggattgcgatatgaagctgaggaaacagagctttcggactttgacgataggtggtgtttggtgggtagatttttaacggatagggcgcttgatttcatggctatgcaacacaaaatggcgtcattgtggagaccgggtaggggcttatatgtgaaggagttagatcagaatttatacctatttcaattctaccatgatgtcgatatcgatagagtcacagaaggcagtccttggactttcgacagagcacccttggtttttaaaagactgaagattggagaagcacctagaagtgttgtactgaacacaatcgatttctggattcaactacatggtatgacgaccggttttatgtctgcaaaagtggtcaaggacataggcaattatgtgggaacctttgtggaggctgacaagaacaatttcatgggcatttggagagactatcttcgagtgagagtggctgttcgggtggatataccgctgaaaaggaaaatgaaactggaacagagagggggggaaatttgttactgtaatttcaaatacgaagatctacccaccttttgcttcatctgtgggatactcggccattcggagaagttttgtccgaaactctttgacacccctttgcatctgatctcgaaaccgtataacttagaactgaaggcggttgctcgaagaaggcagcataccatcggtgcaaggtggctcaagcaaggtttgcaggcgaaaggagggagctctagccggcggcctgaagcagaagctacggtgggagatgccggaggacagtcaattgggatcgctggaaatcgggtaattaattctcaaattcctaaacttaaagggattagatggaagattgattagaggtgatatgggtaatattgtggaggaaaatatggctatgaatgggggttcgggttctaatcagggaaagaatgttgatgagggtgatgtggatagagatatagatactgatggggaattatttattcttgaaaataaaagaaaaagagttaatatgggaatggatagtgggctgaatagtaatgggctgggtaatattgggcctatggacattgtagaagacttgttggaggttcaagaaaatagtgatggaaaaaacgattttggggcgggttctggtgttcagacccgccaagagccatgaatgttttaagctggaattgccgggggcttgggaaccaacggacaattcaattccttaaagagacggtgtctcaaaagaaacctgaatttatttttctttgtgaaactaaatgtttaaaaaaaagagtggatcatgtgggtcggtatttggattacgaaggtgtatttgcggttgaggcccaaggtagaagtgggggccttgctttgttttggaaaagtcaagatgtgggccgtgtagttggtttctctcaacaccatattgattttgtaattcaaaaagaggggggtgatcattggcggttgacgggtttttatggtgaaccgaggcggtgccaacgtgaagagtcttggaatttgcttaagtctctagttaactccactaatactccatggtgtgttattggagacttaaataatattctaagtcaaagtgagaaaaaaggaggtaatcggtatccgaattggttaattgaagggtttgagcgtactttacacagttgtaatttgagtgatgttgagctcattgggtatcaatttacttgggaaaaaggaagaggctctaataactggattgaggttaggttggatagggcccttgtttcatcaacatggtatcaactcttccctaatactcggcttcttaatttagagacctctccatcggatcataacccattgtatttggagcttgaaactcaaactttggtgtctcctatacgtcggtttcggtttgagaatgcttggcttaaagaacctttttgctttgaaattgtgaatgactgttggagccaacatgaaagtgataacatcttctctaagattgatgcgtgtgccaccaaacttgcaacttggggaaaaggtgttacgggctgctttaaaaaacggattcagaggtgtagaaatgatctgaaaatgttgaaaaacaaaagggatgaggcttctattcaaaggtataatgagacaaaaaagcagttgtttctagtacttgaccagaaggaaattttttggaagcaacgtgcaaaacaattttggttaaaggaaggagaccagaatagtaagtattttcatcgggcagctagtaaacgaaggagtaccaatcagattgcgaaattgaaagataattctggcatttggaaagaatggggttcgggtttgggtaaggagttgtggtaggattattttccttgatctcttcatactggggccgtggaatgtgatgaagtgctagctaacgttcagcaaaaagtctcgactcagctcaatcaacaactactcgaaccgatccaagaggaggaagttaaggcgagcggtttttggtcatgcatccagacaaaagtccgggtcccgatggtatgacacctgctttctttcagaagtgttggaatattgtcagcaaagatgtagtggagttcgttcagcactttttccttacaggcaagatggagacaggatgtagtaaggcgaatgttgttcttataccaaaaaagaaagtacctgaaaggatgagtgatcttcggcctattgcgttatgtaatgttttgtataagaccattactaaagtgttggctaatagaatgaagcatcagatgcatgatattgtttcagaaactcagagtgccttcatcccgggtaggctcatttcggacaacattcttgtttcttttgaaatcctacactatcttaaaaggaaaaggaaggggaaagagggttacatggcacttaagttggatatgagcaaagcgtatgatcgtattgagtggactttcttggagaaaatgttatcaaagcttggcttctgtgatgcatggatatctttggtaatggaatgcgtaacttctgctcagtatatggtgacacatggaggacgtgaaatgggtcctattctgccttctagaggtattagacagggcgacccgttatctccttatctttttatcatttgcgcagagggtttaacttctttgataaggaattatgaagctaaa

SEQ ID NO: 223144 - DNA, 1096 bp, Cannabis indica
agtgagctgaactgttattaccagaggatctgtgtggtgaaaacgcacatgtgatacgtcttcatcagtaaagatgatgggaggttcatcagagttggctcattttaggggttttggagagaaagccgatttctcgttctccacttcatttatatatcttttttgagcattattgctgttttctgtgagatgtttccctccaagaatgactaagatgtcccccgccctcaactgggggaggttgtaatctttggttattctggttgtttgatggattttgttcatttccttgaggtcttacatattgccttaggtaatctcgcgaggagattttcaatctcgtcttttagttgacgacattctttagtggtatgttcaatttctatatagaaatgacaatacttgttaggatctcgcttatttcttgcatgtctcattagatcgggtctccaaaatgcgatttgattttcattcgcgggatagatattttcacgagtttcattatatttcgtatacaccaagtatataggaatatatttctcgtgcttcttttgtgttttcttatcttttgatgagtctctcgagtcattctttctcttggcatttaggccattggggtttgaatttctggctttagttgtcacagtgctcactgttacggtacttgtgctatgtttgtctcccgagtcagactttagcaacttcatttcattttgcacttcttcctttcgcaaattttttttttgctctttcattaaactcattaatgtttcttacagggcaaccttgcaaatcatcccatagttcacctcctgcagttgacaagtcagttgttatcccagcttgaagagttgttaattgaatactatcattcaaatttttgactttggctgcagccgtactaaaacggcttaagtatgcttttagggactcccgtggttgttgcttaacattggttagtttagatgcttctggtcttcgatcccttgcagctcgaaattgttttttaaagtcctttgataattgctcacagacagttatgcaatggttggtgaatttgtcaaatcgactgcttgctgctcctattagagaagtt

SEQ ID NO: 223145 - DNA, 1264 bp, Cannabis indica
agagaataatctcctcaacaataggtttatacataaaaatagaattaggaaaagtaacccatgaatgaacaaccgtagaatccgtctccactctcaccaactcgtaccccaacatggacgcccaccgcaacccatcacgcaaagccagtagctctgccaccgccacctgaaactccccaaccccacacaccgcccaggccgcccacacctcaccatctccaccacgaacaactcccccgaaccccgcaaatcccctacctggagtaaccgccgcatcgaccgacaacacaagctctcctcgcaaaggaggccgccacctacacggcacagccggaccaccaacattcccatccctcctaccaactcccccaacactcacacccgctccttgaaactccaccaaagcatcatgcgcaagctcagcaatcccggtcaaccgcgattgttttttcccaaacaaaacagaattcctatcaaaccatacccaccaccacaccattgaaatcaactcaaactcccccttgctcagcacctcaaacaaatacacaagcaactctgccaaagaacccatgcgaccccgatataaatgatgccacacacgcagcttagtccaaagaggaagtaaagatgagaaaaatactaaagcatgttccatggactcagtttcctccccacacctattacaaatcggctgaacaggaaccttgcgtctaataagttgggaattagtaggcagagcccgataatacatacgccaaaggaagatctttaccttctgagggaccttcaaattccacaacccattccaccaatgagattggttacaagaagaagagcctaaccgttcccccatgacttgaagggccactgcatacccactcttcaccgtataagaaccattagaactgaaatgccagcaccaccgatcatcaccagccccacaccccaacggaataccaaggatgacatccacatccaactgcaagaagtgttgagacaacgcctgaatattccaaacccccccaacatcaatcaattcattaaccatcacctgggccaaaggaacagcagtgataggacgaaatgtcctcggccgaggaatccagggatcacgaaatgcatcaatagtataggcatccccaacgacctttcgcatcccaaggcgcaacaactctaacccccaaaccaagctagaccacaaatgagaagaaccatgacgatccttagccttcaaaattgatgtctcagggaaatactatgcttc

SEQ ID NO: 223146 - DNA, 1659 bp, Cannabis indica
agggaggatgaatctttagaacacctttttcttatttgtgatgtggctttccatgcctacgatcatctccttagggtatttatcctatctgtgacaccggaatccgtatgtgggactgggtcaaattcatttgggacctcaaacacaaggggattgttgcgaaggaggttttcctatatgcatctgttgtggttgataccatctggcgcactcaaaatgacaaggtacataataactatattgttggtgtgaaaaagtgtattgactatatttgttcttcctatgcagatttatatgctacaattttcccttcccctagcccttgttcgaaggtgagctggtctcctccacttcaggattggatcaagctaaattgcgatgttaaagtagggcttgatagcatgtgctcagcagatgttaaagtagggcttgatagcatgtgctcaggaaccattttggtagggtggtttgggttcaaacgtcccgtgttgacttttttgatgctctttgtggagaaacggaggcctgctgtttggccattttgactgctaaggatattggtgccaagtttgtaattgtggagagcgactcgagcgtagttatcaatgcgcttaatggggagtctcactgggttattggaaactatatctcattttgtaatagttactctcatttgttttctagttgtattttctcttatattagcagggactgtaattatgcctcccataatgtggctaagtgggcgtttacccaaaaactcattatttaatgagcctataaaataggtagtggtactcaaaaaatactagggtttctgtattctctccttcctcatcagagaaaatacctaagaaacagtgtattcttggaagattggcttcaagttagtattttcgcttatcttttatcatcatattcttctttaatttagtaaaagatttatgatttagggtttttatattaaagtgcttcttgaaatatgattagatctatgattatttatatttttgagtgttttataaatcctaacaatttctatctctaagcttaagtgcatatgagcgtgttggacttctctcatctgagagtgttggacttccaacgaggcgagtctcatataaaagcttgatactcttttcataaagctcaagtttgaaggcctttcagttccaaactttcctttagtaaaatccatagcatttgttcttttggctgtcatctcctctctttttggttattctgtgtgtcaaaataccttaaaggaaaggagttccttaactgtagttataaagattttgattcttagttttgaaaaaatgttgttaaatccaagtccatcttaaagaaaggtgcttgtaagttggcggctaatggtagggacgcgtgtacatgaagggaaccttggattcctcatatgcgtaatttcctccctcgaccaaattgttctcccgtcatggacgacaatattgttgctgagcttttttctaacgaaggtggatgggatccacaagttgaacaacctttttgatcatgagattgtttttgtgattttaaaaggtggtgccccttctggcacctgtaaagatcagtgagtgtggacccttgaaagtgatgggcgcttctcttgcaaatctgtctatcttacccaggctatgg

SEQ ID NO: 223147 - DNA, 1378 bp, Cannabis indica
ttttgggggaaccgaggaatctgatgtttctgaaatgattactcttttttgctgttttgcctataagtatcgttgatcatcgttcacaaactcattttcaccaaccttctttgttaagcaagttcagagcaaaaagagagacttttagcttcaagtttagctgaaaaaatttcacaaaaatttttcgttcagctttgcgtaaattgaaatccagacgttgatccttgagtaagttctctatttcttttacttttactttgcacatttactttctgaatgcgatcttaactttgctatagaagatatgtagaaaaccctaggtttagaaactctgcgattttcctttgtaacgattcatgcgacttcatcgttcataatgcttgttttttgattacacaatgtttgtctttcatcttgcttattcaaagcttcatgaaattttttgccctaactcatgaaaatttcaaacttctgagttttgacttttcgtcgaatattttcattctttaatctgttgagtactcctagtcggcatatttgctctatttaatgttcgatatcccaaccaagcactcatctcgcgtgtttgccttttgtagatgaacccaagtgagttttagggaagcgaacactgaatcgactaggatttgcttcaactcttacatgaggatcaccctcgtctttgttctagtccgccctcttcaagcaatggacattttagttcaattttcccatccagccacaggatgatggctcgcactaaatagacaatgcataaaatcaatgcgtctgaccctcacgtggcccagcacgccacctttcccagcgtcgaacaggatccaccagtgcaggaggagggggatcctgaaggggacgctgaggtccagaagatcaaggaacaaggcgatgtccgtcctggtagtccttccgaggcggacgaagaggaggaggctgcacccccaaactttaggtgatacaatgaggctagggagccagttgacgcagatggcgatgtcctggtagaaggcgtggacttcgtcactgaggaacttactgccgtggttcctcacatgaggcagggtgcgttgggtgccaggtgggtgagccctccgtccaaagttacttaggcgcgttcacaggatctcgacaagggtggctatctgggcgagctggactgttatgttcccgcctccaacaaccgagcctcaaaccctcagagggggaatgtgtgcctagtcttgtgctcatgctaaacaaggggcactgctgcctttgcacccgtactttaggaaggtggcagacttcttctgcctctgttcgacccaattcgctcccaagggcatcaggtatttgtatgccctgttcgttctctacgcca

SEQ ID NO: 223148 - DNA, 2480 bp, Cannabis indica
atagaattatatttattgagtttaattgcagtgtgcattgatattatcaattctagtaattactccatgtgttggttcataattagttttggtcaaaataccgttttacccttctaattatttttttaccctttagttccattaatttacttgtggaagtttaattcaagattctatttgaatttgcacgcaacttttcaatactagaattaacacttaaagagaactaacattcgatccgttatgaaagttaggatttcataattgtaaatcatgttcccagctatctacattattagattccaaaaacagaagttgtaagaatcatcttctctgagaaactttaatgagtgaatcaaagaaactaataacatgaacaagaattcatgattacttaggatttagaccgatctactattgatcatcgttacgatatgaattatgtctttataataaatgacatgttaataaaaacaactttattcatatcgatctttgtcatatataatttttattttataaagtaccttcaattaaatgtcttactacattagtaatctgaaccgagattacttgcaccgaataacgagcatcagtgaactgtacctgcaaccattgattaaagattccataactttaatatgttgctgactgttttattggtcttattagttctttgtacaactacaagccacaacctcatatatgaatacaaaatttttaaatatttaatataaattattcaataataaatattaataatttaatattcaagcatttatcaaaatgttcaactctttgttaataatcagaaatgttaggcttttcaaagcatgaaccccaatagactcggaactactcaattctgagatgttatctttcttgccacatgtctaaacattgatgtctacatcatcaaggctactcttgatttaaacacaatctaataaagttttaacaatacaaacaaaagttattaatatattaacaacataatatatatactaattattaagtcattatattgaattgtctctaaaaaataatgcaatatatacatatgttacatatatttgtttttatatgaaaaaacaaaataaaaatcatattgtaaaaagtagtaactttgtaatatataatgtggtgtggtgtggtttgaatcagagttattcaaaattgcaaactgcgccgcaagcattgtacggtttggcaaaaatgtgaatcaaaaccgaagcataaagaatttcaaatcacataaaattttatgcagtatgaatgatttgtgcagttgtcatgatctctacaaattaatattattgtacaataatatattattcttataaataaataaacatgcaggtgagaattttgtgtgaatcttgattggttaaattttttgtgggggtttaatttgttttattacagttggggttagtttattgcggttagggggtttgagtggggtcttggtgtagtattgactgaaacatgtgattgacctctaaatagtaaatactgctagtggcaataatagtgatggctcaaagtcaagtgcaacgtatgtgcaatgcctttatttcaggttcagagattgaggacatataaaaaagccttacctctcttgtttggtatcatttttgaccatatatataaaaaagccttaattcctttaaaaccttaggaccttagatatatatatatctctataaatcaatgtcgtcaagctatgaatttatgaaagcttgaactaatttatgaatttccttataattaagtagtacgtgtttgggtttttcaaaaaaattagtaagtgtatgtcgaacaacgatctcaccgacctaactgacgccgcatcttctacctccgatccccttctccgcaagctcgaagacgccatatacactgtattatcgtgcgccgatctactccccatgggctcccttcaggcccggatcatcgtactgggtccctcccccgcgctcccgtaactatggcctcagctgctttagaagcttgctaaccctttgactgaggaggagtctatgtccaccaccattgttaggggtgggctttattccgattatttatttcaaggtctctgtcaatttctttactgcataaaactattgtttcaatttttgttttcactctttttcaaattttccttatttctttggatcagttcgcaaatttacgccatttcgaacaaaactttttgattttgttttctaattagacatgtatgcacacaggggcggacctgccccctgaaaaaaaaaaatacgagaaaaaaaaagtatatgtattttaattagttacaacatatatttgtattaaaagatgatatttataggcataatagtaaccttggtgtaatggttgaggtaattggtaaataggttagagggtaaaggttcaaaccccactaactacactttatattttttttttttaatttatttacgcccccctcactttaa

SEQ ID NO: 223149 - DNA, 2031 bp, Cannabis indica
acgtggcatcacatgatggtgacacgtggaatcaactttgagtatctgctcggagggtatagtctgaacaggatgcctcataggcatgtctggagcaaagcgatcagcaatccgcgcagagcaatcaacacttagtgaattcagctttcgcatcgtgagtcatcaaagaaatccctataacttggggatcagatcacagagatatggcaagctgtccaaatcccacgatcagtgtattctgcatttatcatgcaatctttctgcttatatccattgtaacgagaagggaaatacttcttctccaagttcatagccctataaatagtgatgcatgttcactgggcaaaggacgagagattttaccctagagatattatctaagaattcatattcagagatattgttgtaagagctataagaaaaggaacctttctccttgttcttgagtcaatacaaataacgaggattaggctattaccgaactgctcggggctgaacctctataaaattcttgtgtctttacattgctttactatatatcaattgctataaatcacttatcgcttactaaataagactcactgtcgttggctaaaagcgagaggtcaacattttggtgctttcattgagagatagaatcaaaaatctctcttcattcaaaacctaaccacaagtacgatggtggtgcaaacttgtaggggcttggttgatccagccaatccatagacggtggatcctacattgccgaacccaggaaacgcaagggtttcgccagctgttaatccttaacagccagcaaacgtgggtcacagtgtaacaactttgatagatgaaatcgtgcatggtgtgcaagagactgggaataacagttcagcacccaaccagggcattcataaaacagtcgttccacctgttaccaacacccaaatgaccattagagatgatactaagttacaaaacctcagttctgctcttgggctcatgcagggtcatgccaataccctacatcatgatcaggaagatcttcgcgctgtggtaaacctcgcgttcgaggaacaaaggcgtatgtttaccgagtggagagacaaagagatggaagcgttaatggctcatcatacagagattgaaaaccgtagtcggcaagctactgtgctgatacgaaaagcctaccaaactgtaggtcagcaacctccaagtgtcatccccctgggcgagagggacgaagatccaacgatgaatacttcccagacaacaaatggtcagccgccaaatccccggtcacgagttccacttgttggcctagcggtaggcgggcagaccttgtctagtaattcatcaggagaggtcatacccgattgttccaaccaggttaacggtgccattccgcctgttatcaagcaaatcaatcactaagacagccaggcgcttctgtattcgaaaggtttgggacgactcaggacctaaggagtgatctgaacaaaagaagaggaatagacgatcagattgtcatgacgatcgtgcagcccagagcccgttctcaaattcctgctcagaaggatactgacgtgatttaaattgactagaatgccgagcaggttagcccagccgtacaggcacagctagacgaactgaaaaatatgttccaaggcatggctggacagagaaataatgctctcgagctggaccgagcacgcggaactcctttctctcccccgaaattaatcttctggcgtggccccacaagtttaaaatgccaacatggaaaatgtacacaggaagagaagatcctctttcccacctcaagtatttcgaaatacaaatggattttccaggggtacgaggggatgtgtgttgcagaatctttccagctaccctgtcagaagccgcccaacaatggtatttcaagttgacccctggaaagttttattcatggaaagccttctcttcagaattccatgcacatttctcctcctctcgccaacttccgttgcatctaggagacctggttgaagtcaagcaaagaccaggaaa

SEQ ID NO: 223150 - DNA, 1178 bp, Cannabis indica
gtataaaatatgttttaaatgaaatgatattaaactcatttatgtaattttttctcaatttttttcatcttgtcggcgaaacagataaattaatctccgtaactatatagcagtcgcatgcatagatgtattgttttcattctttcttccctaccataattttggattttaaaagcgatttttatgtcctctcatcgttaattttggcaaattttattatcaacgcttattcaagcaatgctataagatcaaacacaaccgatgccataaaagaccctataacgtcggtattaaataaccaatgccatagtgtatattatagcgtaagttatttaataataactgacaccatatgtaataagagccgatgccatatccaaaaaactgacgctatagtgtgtaaaaatcaatttattttttcaggtataaaacctattataaattcacaaatttaatttatttaagttaaatatttattatttaattaattattatttaattaaattaaaaattattaatttaaatctaatattatttaaattaatttcataactaaccaatatacttaaattaatttcataaaaacaattaaaaaattacaattacattataaaaatattttaaaattagtcgaattgttaacaagttaatatatctaattaaacatacaaaaattacaaagtaacataaaaaaataagctaggaaaaaaaattcttatacatttcatcagcatcaattgtccaagccttcgtgaatcactgccagcaattgttctatccactgtcgctgtaacggtaacaattcaattttttcatcgtatgttttcttttctccaaactgtaaaaagaagtaaatatttatattagtatatatatatatattattgtttgttaatataataaataagataattaataactaaaacttataactttttgatcgtttaaataatggttagagtttgcacgtgcgatgatgtcactcatgtatttcaatacataaaaccacattcttagtttttaggttgttttggacaatttgctagtgaaatttccagccacgcccccaataaacgcatttgatccccctaaagtctcgtatgcactgttttcaaaaattatattaatattttaataattaacatatatatatacataacttagttaattaaaagatt

SEQ ID NO: 223151 - DNA, 2382 bp, Cannabis indica
gctctctaaccaagatactcacactgtcaataggttcccagcatggtaagacaaatcccaacaccgacgctcaccttgtcactcgtgaccaaggtaacatttgtggcaagatgccaacaccaagttaacgtgccaacaattctatcatgtctcattcgatactgtccgaacagtctccctcgttgcccaaggactcccatacgttcatggaccaatcctcaaggaaccttgcctccacgcatgttggcaggcccttgagacaagccaccaaactagttgcatacattagacctctgtccctttccaacatggtgcatccgtcccatgcgtgtatgcaagctagcccacgaatgactacccgtgtcatctcgtgttgagactcgtggcctaggcgcaccacaacgtctcttggaggatctaggccacgtcccgtgcaagcggcataccgacaagccaagggaaacgtaccagtgaacctctggcagctttcttcgacgcactaccgggtcggcccgataatgtccatgagtactccaactcatggagacatatgagtcccctcgtggtcctcatatgcccgccctactagtcccactggctagtagtagctcacttagcaccaaggtgcaaggggtggtggagagctgacaccagggtacccccttaaagagcattctgagcttttagccttctaccaggaacatagatgatttttgctctgtagacatatgggaagcaccatataccaaatcacctagttttgccaaaccgattgcaccattctatttgtagacccaaataaatggcgaataccaagtcccgtcccgatccggacaatattgaagatatttacgaaaatgccactgcatacaaactaagcatcagcatgccaccagcatgcaccacaacatgcgccaccacttgaccaccacttggccaacttgtgggcatcacttagcttgtaacgtcccctcttagcacgcacgtaacactaggcattagcgttccaaatcctctttcaataaaatcacatggcctacccaaaagatcgatcaccggttttgccacatatgagtgtgtagctcctaaattaaataacacactataaaataagttgttgacaagaagctagcttgttaccatagaaggactggttgcaacattagcttgagtgatggcaaacacccgagcaggtacgggttttgcctttggcttctgctcttgtttcttaatctaagggcaatcattcttgaaatgtcccaccatggaacattgaaatcatgtcttccggttgcactcacccggataatgtttcttacaacgtgggcactcagggtaagagtaaccttggcgtccaccgttgccttggttcccacggaactgcttgctctgcctcgaaccaccaaatgtcgggttagcctttcttttctaatcagtggtggaatcaccaccattgctgccatagacaggagaaggaagagtgggggtcccattaacactcggagtcacacaaggctcctgaagaaacttaaccgcaccctcggctcgaaaagccttgttaaccatctccgcatatgatgtgttgcttcattagtaataatcacccggtcgtgtctaattttcaaattcaaacctaccagatatttctacttcatggtgaagcccgtaggcacaatacctgaggccagcttggccagacggtcaaacttttttgtgtactcagttactgacataccgtcagtttgcactaactcagtgaatcttttcgcttagcactacagactgcctcattgtaatacttggtactgaataaatctcagaactcttcccagatcataaaagtgacgtctcaggtgagggacaccaattccaaccacatgagggcgtcttccaaaaactgaaatgtggcgcaagtcacccgatcattttaaactactcccatgaaattcataattctttatatcattgtgagccactgctcagccttcatcacatctggacctcccaagaacactgaagtgcttgcttacgcaacctctcatatagtggctccatacagttgccagtaacaggttgttttgctagcaccgcatgaactacaatagcctgagcttgcagtggaggcactttaggaggaccctggtgccttaatctcttaatttcttcatgttgctggcggatacgatcttgtgtttctacaaatctctgctcctagtctggaggtgggttcacatgatgaccaccctgaactctgccacggcctcggccgcaaccacggggattctggggaatttgatttccttgaccacctccgatcttgaccctattaccctggctccttgtattttgttgggcgtccatttaataggacttagcctgcga

SEQ ID NO: 223152 - DNA, 1728 bp, Cannabis indica
gaacgttcgagactcagtatcgtgtggaacacggggattagggttgtggtcaggggtatgggcgtctgatcataacccgggatttatgtatgttatataatttatgcttttcttactgagtctgtcgactcacagtgctatgtttatgtgtaggtaaaggcaaggctaaggcgaggaaccgtgaggacgagcagatgaagattgtacaggtcggggcggttaggcctagagcgtacgatcgtcgggacatcagggcttttgttgttagtcgctgggcgacaaatacttttgtaaatgactagtaaacttttgtaaagtattttgtaaatgggatcctgaaatattttgtaggtaatattataagttttaattcaatagcaaaattttaattaatcacgatttatattaacctcgttgattagtaacgagctgcacagtacgtttaaaataaaaaaaaaaaacaagatcgtcagccattctcatgataaatggtggaactagagtcttctcctctttctcagccagaacatccatcacaaataacaccatacctaacttgtaaacatcatccttctcaatgcaacactcaaagatgctacgcaattgaccaatgtcaatgaatggatccccattgaagtattctactatcaaacggtctgacgtcgccttctcttcaaactcagactcagtaggtccacgtagcatgttaagcccactcaccaaggcaaactcaacttggctgaatcaagatctcttccttgtaatttaataatgcactccgtcaaccttacctgatttgattgattgaacaactgatggataagtgcacccgaaaatgctaatggctctctctcaaaaaattacttaaaaggggattcctccttcaccctttccaacaactgtatttccataaatttagcttttacttttgggtaataccaactatcgccccgccaagtcacacgaccagtgtaatggtctgacactagaagtaaaaggcgtggaactttagaagagtgcaaaaaaaaacacaaaaaatggcagtgagaaaatttgtgcataagcatcggattacaatcagtccatgtatcgaacctatctggccctatgtcgggcttgttagaccttcacctaaaaaatatgaaagagaataaacattgggccaaacatcataccctacatcgagcaaatatcgggccacaaaaaatattaaaattctaaattaccatcgggccctatgtcgggcctttcggaccgaaacctaaaaaaaattgaacgagaaaacacatctggactaaatatcgtaccctgttgggcccacatcaggccataacaaaaaaactaaaattctatataataatcgggcatcatcgtaccctatatcgggcccgttgagccaagtcaaaaattttggaagatggttagacaatcagactgaccatcaggcccatcgggccttatattaggcctttatctagccccaaaaccaactttgcatcacacgatccatcgggcctgcattgggaatgcatcggcccagcttaaaaatgtgttttctcgcctaaaaatcacagatacaatatctaaccctaaatctaatccaaaatgcacatatcaaaccctaaatctatcaataacatcatttacctaaacaatagaaatataaaattgcatggaggaatcttacatcggctgacatttgtgagtcgagttttgtggttcatcttt

SEQ ID NO: 223153 - DNA, 1744 bp, Cannabis indica
gttctggaaaaattcctgaaagccccaaccggtcgaccggttcctaatggcctccctgaaccggaattccagttcagtgcaggaatttttcaaaattccataactcaaccaaatcaaccctaaaccaattcaaactttccagacctgctctaaataccccaaataacagttccaaagcaataaaacaacccagcatgcacagaatcaaaaaccaccattaatgagccaagcttgagttcaaaactccaaagcttgctcaaataacaaaacaacaacaaaatcaagcatagatcaacataataactcataattaaccctctgtaaacaacatctaacaactctagcaactacagcaattaaaaactcaattcaccattaaagctccaagctttgagttcaaaaactcaaacttgattaaatctaactaacatgcatcaaacctgctttaatccattcaatttaaacatatataaactacagaaaacatcccataaacccagcagcaacaacatcaaattaccaagcatgcaactaattttttttttaaaattcaagaaacctagaagaaagctataagaatcttaccaacaacttgagatactaaatcttgagaaaatagcttgaattaccaaggaaaacaccatgattcttgctactcaaagaggggccgaaagagagagagtttgagagaaaaaaatggaattttttgcttttctttgatttttccaacattgtaaaataagaataaaatggtttataattacatacttcagccaatataacatagcataaaccaaataattcccaattactaagtccactaaaggacaaaactaatggggcaaaatgaccattttgcccctccacactaaaataacataaaaggggtactaagggtattttgggaaattctaaattctcgactaatcccgacattcccaatgtttaaataaaccgtcccactatactaaaatactaatatgtgattctactgagccatacaccgcgttccatgttgctgggcactgaaaatgcaaaattatgacatttcactatgtgacataaaaatgcattctcaattcaaatataacaacataaataattatttaaatatctataaataattttcataatcaaatcttaattctcttctaatttccaaatttaaactaagcgatctttacaacaaagcacgttggaaacactcgtgttggtctgtagggtcagtcatcaatttaggaagccgccagagtggcgtactcgtgtataagagccattattccgtgggtgtaagggcccaatgaaggcttgaagcgggaacattacaacgtcaattaacattcatcgtcttcccaaatcgggagtttagttcataaaacccacattaacatccataatcaaatctagaatagaagttaacataaaaaatcaagagttaagaaagaactagttggtgattgtgctccagatcatcacaatagcttcctctcctccttcactcacttttccgatgttaatctctgatgatttttgtcattaaatgtgagtcctttaattagaaactaggtttgctacctctgaatggcgaaaattgaaaactggccaaaaatctcgtgtttcgcccatggtctcgactacataaagcctagtcgcgaccataggcaaagtgaaaaatccatgctctctgcctggcctcctagtcgcgaccatgggtaagtctggtcgcgactactgaagctaattt

SEQ ID NO: 223154 - DNA, 1625 bp, Cannabis indica
atatatatatatatagaagagaaaaagggtttgagactcaccattttttttagtttgaaaaaaaaaatagagaaaaaaaataattacaaaaatacaattatagtatagaaccacaaccaatcaatgtttatgtttctatttttcagaaaccaatcaatatgtaatccatgcactagcaagatttgttattagttgttcattagagttcgtgtttgaacaaatgcttattcaaaaaattttagccactcatgtaacagttgatttgattgattcataaaaattcttctttcaaatatccatctagttatagcatcacaaatgcttgtctgaaattttttagtattttaataagctctaaaatgaaatttaacattaacataagggacttcttttttttttttcttattatctctgtaattatttgtaaaaatattaattattattatttttcccttcttcaagaaacaaataatatacactaaaaataagaaacaactcatgatcattgatcaaaactttttttttttttttgaaagcaaactcatgatcaaaacttgagatacactttttgttttattctcataaaaccttaattttcattttgtttggcatatgttagttcattatctatgcacattattagctcatgttatactatacttgattatttatgttgtttataaccaaaaatttctcttagctatgtctcaattgggatagttgttaacattattaccaagaagaacaagatgatcaccatctctaacaagttcaatatcttcaatttcagctccttcttttgtgaacactttagtgggacataacccaaattttttggcaccaatatccattagttcagaaagtgattctggcaaaaacactagttttccaccaacttcacctctttctgggcaactaattgtgactcttgctctgtattggctcatcatattgctgttgttgctattcacaatgctttggccttgaattagttctctctcttctgcataatttagaaaaaaaaaaaaaaaaaccattacttcattagatcgaaattgtaagatagagctttagggtgtgtttgacattgttttctgtttttctattttaatactaataaatggaatttgttggaaaacgtaggttatgaaaataaatctagtttattaattgtaaacgtttttttatttgaatgtatcaacaaaattatttgattattttcgatgatgattcaaaattgtgtttaagaaatgtaaacaggaaataacttttgtagttttcaaaatacatgataggttaggttaatattttctaaaaactattttcacacctcaacaagaacccaacccaagccgacacagactctagacgtcgagcctggaccccaaaccccaacttcagacctagcctcaacggccctaaacctaaacttggaccccggacccaaactcgacaccgaccctattgaactctagatcccagactcgatcccaaaccccagtcctggactaaatcgccaaccctagaccccaacccccgaacctggctcgaaacccggatcttggacccattccggaacctcgactaggactaatgaagagaaaaaaataggtatacgaaaaaaa

SEQ ID NO: 223155 - DNA, 1415 bp, Cannabis indica
aaataagtattttttttatctcacgcaattcctatggcttcgacctcgttcttcacaatctctacactacaataaagattcatgcgcttgcaagttgatgaatataaaacgcaccattttttatcacaacatgcagtttgaattttttgttgggttattcggattgtgttttttgtcaatttatttagtttggtttgggcgatttgtaaaattttttttaacacctctactactgattgataagattggtgagatgaacgatcaacttagaaggttcatctcgggaaatacaaatacacaacataatgacaatgcttagaaagtgtagataatgaattatttacagagcttgcagcttatagactcacatactcacgagtattgctaagagactaagggtcacattcctagcatgattcatcttaaaattgttatactgtgatggtgttttgcgtttacttcgcccaatacctatggaaggacgcgagaagtattatttaaagtatacttagacactaacaaccctcttcagaataaagtatattgagaagattatttgtattacaaatttttaaaaaaaaaacttgtctaaaagttttccaataataacaagttcaattaatttactatcataaaaattttaaatagtttaattaattaaaattaatctcaaaattgaaaagaacattataaaaactgaatcttgtgagattctgaactaatagtagatctggattgagcatgtcatagtcggagttgtggaagacaaagaaacaactgtcccattgaatcatttactttatcaaaatatatatatactggtcaagcatatatcgatccttcaatataagcatccaacaagcttctctatcaggttgttgtctccttatcgaccagacgataactcacccttaaggaaaatacctctttgtacaatcttactgtaccaacgagatacaatcttatgataacatgtcttgctacatgttacaaatttaattacacgtcatacatgccaaaatttagtataacaattatattgtgcaattattgatcttaaaatataagggtagcaattcgatcattcagtacgtctgaacatctcatagttatctaaattatcatatactatcaaatttgaatgagatcaatagtaatcgagatcattcagatcttttttaagtgtaaaactttttatctatttattatgcatgcttttctttgacaaagagccataacttttcatttgaatgttatttattaatacatgtgttatttttattatttactgttataattcatgcaatacaatctatatatattaacaataaaaaatataagattttccactacgataattacaacctagaaattttaatagtataatttttcctaggactgagcatcggtcggtt

SEQ ID NO: 223156 - DNA, 1397 bp, Cannabis indica
atgcttgatgaatagactatgatatggattttgatgaaataaagccaagtgattctaaacattgatgaagcttttcaaaccaagcttgaggagcttgtttgaggtcataaagggctttatgaaactttcacaccaaatgaggagcattaggaagttcaaaacctggaggttgggtcatgtatacttcttcttccaagtctctctttaggaatgcattgttaacatccaactgttgaatggaccagttatgaggtaaggcaagtgaaataacaactcgaattattactggtttcacagcaggactaaaggtctcctgcttttttatggaagcccttagcaactaatcgagccttatttctgttgacggtcccatcaggattaagtttttccttatagacctatttacaactaattggtgttctcccaataggtagaggaacacaagtccaagtgccatttttcttgagagcaactatttcctcagacatagcaccatttttcttctataagagcagctttgacatttgttggctcttgagaaactaagaatgtcttaagtttttggatgccaaattttgctcgagtttgcatattatgtttgttaatgataggaccagttgtgttagatgataaggatggaacaacagattgaaaaactgttggactatgagttgactgttttggaagattggtaggtgtagatgacatggaaatggtattttgatcaaaactatgaaagatcagcaggaatagcattgtcaggagaagacataccatcatgagatgaatttttaatgggaaacatagaaggcatggatggagtagtagtagtttgaggattggcaggacacacatcaacagccaatccaagaatactcatactaggaacaacaggagcaggtggttcattggatgatgatggatttgaaaagagagactcaacaatgtatgtaattggggcaagagggatttcacttttggtgtgtagctcagaatgacaagaaatgacaccattagaaatgttggtatagggaaacttggtttcataaaaaatgacatctctagagatgtacaacctaccactagagtcaagacacttataaccattatgattaagactgtaacctaaaaatgtacatggggaggatctcaaatcaagcttatgtttgttgtatggcctgatatttgggtaacaaagacaaccgaatactttgagactagtgtaaacaggttgtatattgaagagagtttcaataggtgagtgttggtttaagacatgagtaggcaatctattgtgtaattagacaacacacctaataaaagcttcatcccaacatttcaatggcattgaaacttgagcaagtaaacttaagccatgctcaactttttgtctatat

SEQ ID NO: 223157 - DNA, 1920 bp, Cannabis indica
aaatttaatttaagtttgacatttccatctccaaagtctaaacctaagagcatttttaatggagtgttaaaaatatagtgtattgttatattttagcacactaaaaagccaaaaaactactactacaatggttctaaaaaatgtgttaaatttgacacatgttaaaagttgtgtcaaatttgacacaagatataagaccatctcccatgaatggtgtatattttgagttaaatttggcccaaaatatatcataaagctatatttggcctatattttatatttgtgcttcaatacacaatgtgcaaattagttataaaagtcaatattatcattaacgctcgttcaaaatatacgaaatgattaattttatttatattatatttaatatcttataaatatatcttattcaaagtcaatgaatagtattaataagtggcgaagaggtaattgaaaaatatagtatatattatgggctaaaatttagtctatgctatcttttgtgccaaatttggcataatttttagcttgagccaaattcgacacacatttaacatcaccattagagttaagttttagtaaaatattctaaaaaatagcaatacaccacatttatagctcttcattagagatgctctaacattgtgctaaatttaacccacaataaatactacttttttatttactataatgtcactaatgattataaatcatttttttttttttgagaaaaaatctattattataaatcaaagagagtcatttacaacaatagagaagatatctaaggaaatttcctcaatccaaatacaaatattatcctggactaaaacttgtttcgctaatcaatgagtagcttgattagcagctcgtctaacatgacgaacacaaactagagggagattggataaatattgttgaacatttgcaaccaaatcattaaaatgagacttaaaggattttagattattaatggcattggcaagaagcatagaatcaatttctataaaattcaattgtaggttccaatcccaagccaaaagtagaccatagtgttaggtatttatagtatgaaatgaagcatatatgattattgtatgaagtgcggaattaattaaacatatatgcattataattaaagatcgaaataccttcagccattgattctttgagcttaagtcccacacaacctttgatctgcaaaagaaaaaggaaattgattagtgtgggtaatcgagcttccaagctctgtctactctctttagatggatttactgtattttacagaatgagtagtgagctcggggtcgagaccttatatttatataggtgagacctgttaacccaagatatgtttccaagaggagagtgaattagaattaaactaatttcagtaaataaaaacttttaacacaaaactatgcaattagtctcttaatcaaataaatgaaagtagtatggcaagcaatattgtatagaaaattatcatccagatttttctcacctgacgtggcttgcttacgtgtacaatatcacgccatgtgctaatacagctcaccaacaagaaggtcatcaagttagcaccctagccaacaggagccccgacactcaaacggaacaaaaagtgatagaacagctaccttaaaggagctggccggccataggcaggccagaattggacctagtaggatcttgtgcacagatctacacgtggacagcaacttggactgtgaagtgggccttaataatccaataaagtagatgaaaatatctatatttaagggcaatttagtcttttataattaatcaatataatatgtaaatatctacttattttattgttaaattagggtttatgctctcctatatgaagggccttaactcaccctagaaaactcaagtgctaagcctcattctaagcct

SEQ ID NO: 223158 - DNA, 2545 bp, Cannabis indica
acggtctagaacgccggtggagccttggtttttgtttttttttttttaataaagtaatctgagctcagtgggatgttacaaatttattttttttttaaaaaaaaaatacactcaactacttattttgttttaatatgaatgatcattcacctttttgcatatttattgtaaaacccactgtgtattttcaaacagctttgaatctttttaattaatgcatcaaaattagcactttgtaaaataaggcaaaatatcggggtgttacatcagtacctctctcttacacgacccgacattgcattcattatcaacaaactcagtcaattcttacatgcgcccacaattactcattaggaagcttgcaagaaacttctcaaatatctaaagggtacactcaactatggtatattccttaaaccagctgcatcaatggatctatatgcctatttcgatgctgattgggccagctgcgttgatgatcgaagatcaaccagtggctatgttgttttcctgggagggaacctcatatcctggtcagccaaaaagcagcaagtcgtggccagatccagctccgaaagtgaatttcgggccttagccaacacagctgccgagatcaaatggattaccaatctcttgactgaattacatgttccattgtctcagcaaccagttatttgggtggacaaccagagtgcagccgccattactgcaaatcctgtcttccacgcgcgatcaaagcatatagaaattgatttgcactttgtaagagatcagattttagctcaaactctatctgttcgatacgttcctgcagtggatcaggtggccgatcttcttactaaacctttgtcaacagatcgatttctatatctccaaggcaaacttcaaatggcttcaaccccttttcgtttgagggggatgataatgacaaatgaattagttatatctgttagtttttgttttaacagttgtaactgttttaaccgactcttgattcttgattgtaacatgaactccctagaaaatataagggttacaataaagtctatttgcattgtggggacgattttcacttttgaaatgaaaatgtaacaagtggtgatgaaaaagtataatctaaacctttcttcctcattttttttttcaattatgtatgcaatggctatggttatggacataaatgatgatgattttccaaagttcagccttcttcttcttctatgatccacaacaagtactacagcaataagtaggccaagaacaacaccaagctggcctacatgagcaccaagagaaacaaggacaccaacgtttgagagctgaatttgatgtgtttaggccaccacccaatgaatctggatgcagctgctcattctctagccttgccgattcgcttttcatgctccctggcaaactgcatgaacacaaaatttaccatgtaaaaactcattgttgtcatccttatcattttcacaacacatttaataagaagcactgcacaaacagtctcaagtcttctgagaatattctcaatttttatcaataatagagatcgagtgttttcgaaaatcgaatgcatgtaatgggcaaaactaggacccaacacccatgttgaccgggtgcttgggcccagtgcctaagttgatattttgtcaacctaggctagtttcaagtgtcttctcataaaagtgtcttctccaacagacgagatttgagctccaaaaattgatgatcatcatccaaagtcatttttaccattagatcattataagtagacaaaatcaacccagaaaagtaattttttttatatattttttgtaatattttattatttaataggacctcattccatataaaagaagcgcttcactaattcattttccacatttataaggctagagcatctctctctagtttctctctctctaaaaatataaagcacttgccttagtcagttttcttgtattctcatgagtaataaaaactcaaatgagtaataaaaactcaaagtagacgtagctccattactgtcgggacaaggggagtgaactactataaatcttgtgtgtctctctcatttactctacttaacttctattttctctcacaaatctagcgagcgaccgttggccatatttcagcgttaacagtctgattatgaatttgatgtcaataacctttcaagtcccaaaagccaacctaatagggaaccatcattcaatcgataaaaaggtatatatcgcatatctattaagctatgtcccaagtcatatacatcattgagtctccaaaataatagttcttagcctagtcatttagaaaaatcgtaacgcgtgaatcaaaggatcagataacatatataagtgttcatagtaacttcaagattaagatcaatttatatatgatcatactgctaacccaaatttaggccatatgtattaataatattagtggactgtactagcagctattaatctaaaaatatataactttatttcactgcgaactattaaattcattatcttaccaatatgagattaaaact

SEQ ID NO: 223159 - DNA, 1175 bp, Cannabis indica
tcacacttatgggcctagctctattaagccaatatcaaagtttgggggcctaggccgactgtgagtttactttacgcaagtctgtttaggtgtggtttgatatgcttatataccaattagtctaaaagcattttgtttttagttgcatagatgtgattttgtttggtttacttgtaaactagtagttcttcgtctatgtataccaattggtttataagcttcatgtattttaatagtgttatttgtttaaaaatactacttttattaatcaattaattaaatttacctttaattttatatttaattgaaacatacttctttttatatgtattgtacccaaaataccatgacataagagagtcacatggagagtatcttgaagtaactggggtaaaattaatacaatatttaaaaactgaggtaaaaatgatagactttaaaaaagagggtaaaaataaaagaagacaatataaaaagagtataaaataggctttacgctcattatttggcccaaaatgactaacgagtttttctcatccataaagataagtctggacttcgtgtccgaatctcatatgaatcggattcaaaagtttcccaaatataacagtaatatcacaaatggtacttaacttaaaagaatctcagagtacaaaaacaccttcaagggtcattcggggatggaaactggaaggatatccgagaaaatttacagtcttaaaagttgtctacatggtacgcctctgacatgattttgagaaatttggagatctgtcccctctaccaacatttggaagggtacactacaaaacggaaatcaccttttggagggacacgcccctattctaacattccttccccaatgacgtcgcacgtcctcacctgtcactgtcaatagtgttgggaatattttaccaggatctagatatactaacaagtatgttgaattaacatcataaatatgaatatctctaaaataataaaattaaacacataagagtttagaaaaccttacattgatggaagcggaataatatgactccttccgctcagatctctaacccttgttcctttctgccgcagagtattatcaagatctgagcttgaatctctttctctccttcgggttggttaccaccatctttcgcactatgattgagtacttgacttgctgt

SEQ ID NO: 223160 - DNA, 1958 bp, Cannabis indica
catagtagatcattaactacttaaataatgtcgaaggaaaatacgagcaatgaaaattcctaaagtactttcaatttgatcaagatataattgtttaagatgtgaatgaaaacgcaaacaaatagatatatatttagttcaaatattaaagtacgaaacattcaataaagataagataaaagcaaagttggccatccaaccttgcaaatttatctttacaaaagttccccaaggggcaaaccatgtctcggcctttgggccatttccctaaataaaataaaaataaataaaaaccaagcctacatagtaggagtcttggacaattcttcttcttttgctgtctcggcatcttctttctcctttttagtcttctcccagaaggcaaggatttcctcctcagactctcccaagaaactcgtatcaatccttggattttccatctaggcttggtgatggtacgtaggccaacaacattgcatcgctcaatggttttagcttccttccccttgatcattaccttggctgcatctagttctccttggagtttctggcatgcatcgaccttgtcttttgcctccttcttagcaacttcaagctcagcctcgaggttcctcttcaccttctcagcttcttttgtaagttgattgttctccagtttggcctcattccattgcttggttacaacctcgcactggcctatcaggttctggatctcgctctccagatactttattttttccatgcctcgccgttgggcgacaaaggaaatgcaagatgtttagaaaccaacaaacaaagatgtatgagtattttaaaggatgttataaaaaaagagaagtgagcagataaagataaggaaatttaccgagaggctatgagatatactctctgtaagaatctcccttagatccccattattgaataaatccctttcatgggggaggagagccctatattatgccagcatgttgcaccaaactctatactatactccgggccaattttccagcctcgacaggcagagttttgggaataggctcgtcggtaggtgcaggggccagagggggttttgatcctgagtctccgtttcaaggacctcaaattagtggtctaagaggcttgcttcttgttagtagtagtcttcttgggccttttgcggggctccacgtcgacatctcatgcagcgtccaagatggtcaacctcttctttccctttttgtgaatgagaccctaaattcatttctaggagacaagattaagtggtagcatttatttaaaaacaagtaataggggaaactggggcataatttcttgcctaaggaatttaccataagaagtcgaagaggatagactataatatcaactaaagtccctacatcccgtgatcctgaatacatcataggaattaagaggttctaaatcccaactcacatctaagtgacttgccctatccatcacggtcctgtactactcggctatcccatagtatcagtcagtacaactaatttggacatggaactctgggtacaaactatcaaacttatgtgtaatgcaatctacaaggaggggattccaggtgtaaaagttatagtggctatctcaaaatgaaactagagtgttatgctcggccctaagcactgtgggtgaccaaccacattgattacctcaggatgcttcttcttcggcttcccgaggggcagtgttctggaggtattgtgcctgagccatgcgatcttgagcttcctcctcggttgggaaaggaacctgctaccaagaagaatacttggaatatttataatcgcaagtaaactccttccatgtaaggagaccctcagacgtcaagttggccttgctcaagaggaactcagacgacctaagactgtataagagcttgcgtcgctttgccatctcaggagtagggcaggtcttttccagaaaactttctaaaacaaagaaaa

SEQ ID NO: 223161 - DNA, 4161 bp, Cannabis indica
tgggccatttcagatactcgagaaagtcgggcatgtagcgtatcagctagccttaccaccagcactgttggctgttcataatgtatttcatatttcaatattgaggaaatatgtttcagacccgactcatgtcttgagttatgaagcccttgaactacagttagacttatcctacgaagaacaaccaattcagatcctagataaaacagagaaagttcttcggaacaagaccatcgctttggtcaaagtgctctggggaaacagcaaggtggaggaagccacctgggagttagagtctgacatgaggactcaacatccagagctattcaggttagatttcgaggacgaaatccttttaacgggaggataattgtaatgatcgcattagtaatttagattagtaaaggcaattagcactaatttttgatatttttataattatttatgaatttaaattatttgtgggtctcattgttagaaattgacattagagttataatttctcaattccggagattttattaaactctaaacaacaacactgacagttatttattgtcgtcattactgcctacatcgatagttttctgatagttacaagctatcaacgtaaacagtaacgaccacaattcataattgttaacaatgcgcaataacaacagttaataataaattttggtataggttatacatatggcaacactgaggtcaataagaacatttaaaaattattggataagccatatttgggtgtagcataaggccgttctcctggtttatttcctgagggataatagtaacaaatagcaatcatatcattacctaaaccacttctctcacaaccaatgtcagtggatttgttccacaccaactgagtgtaattgttgcacacagtgtttttcttacacttgttggtgatgtagtcgtaatttgcctgctcattttcccattgcatcacgggaggctcacctttggcgaagttctcgccataaggtccagccaagggcacgtactttagcgagtgcgtgtttagcgatatgacgcgctcggctgcgtatttttgtaaggtattgttccaagttactggactaacacccacctttcctcgaatcttattgtgctcccggatgtaataatatcgattataaacttcacgttttgagttaataggagcaatcatcatgaagatgcatcctatcaataaaactctttctaaatgattatgatttaaagacatttttaataaagatcaaaattaattgtacctattagtgatggatttgatcatgatatttatatccaaatgatgtataaatttggttggttgtcatgaacatgaaaaaagagataattaataacgttgcctaattaataaatggtgtaaatcaatttgtatttatagaaaaagacatgtggtcaaaacaaaattagtttaatattatagcataatatttaaattctcataaaatttcatacaattgtttttgtctgaatatttaaaatatattctattgtataatttatagatgtatgttttgaaaatatgaaaagggaaaaaaatataagtttaattaaaattatacattttaaataaaatatacaaaaatctatacataaatattaaatatacttttatatataaatatacaaaaatttatctttagtttgaactcattactcattaaatacattaatcataatgatctcaagcttaagaaatttatttctacccccaaaaaaaaattaaaataagattgtttagactttatattctaagttgaagaggaaactttcaacaaatcaaattaaaattttattaaaaaataaataaaaattgcaaacataaattgaatatttatggacattcactctatcattttgattcaaatacttccattttgttttagtctctactttttcgttcactttagtctgttaagtatctaggtggactactaccatatacagaagtgtacacatgacaaattttcattagtccacataatattactaacttaaatattataaaaaataattaaaaatattttaaaatttaagaaaaaatagtaattatttttattctttttgttacttttctttttttttcggttcttccctgtgtatcttcttctagaggcgttaggcgaagcttgaaggcgagtatagtggcaaaacttgagtccgtcactccaacaatgacgcgaaatataagttgaataggaaactttcaacaaaacaaattaagaatttaataaaaaataaagaaaaatgccaaacataaattgaacatttgaacatccacccaatcattttgatccaaagtattgttattagtcattttatatcattatttattaaattaaaatatgtaaaattagatattacaagttaactcattctaaaacatcccaaaattaattgaaaaaaacttcatcacatgcccttatttgacaacactaacataaatttgttttcttacatgaaagtgagttttagttcatataagaatctttaaaacaaaccaatttttgtcacctctccaatgaacaaatcaaagggtctctaatcgaaactaaccaaaacaaaaggtttgtttcattcaaaagctaaaacagttctaagatcaaagaagactagactcaactcgataaatattcaatcgatgagactaactacttagacttctctccttgtttctttttaataacttcatcacatgcccttatttgacaacactaacatgaatttgttttcatacatgaaagtgagttttagttcatacaagaatctttaaaacaaaccaatttttgtcacctctccaatgaacaaaccaaagggtctctaatcgaaactaacaaaaacaaaaggtttgtttcattcaaaagctaacacaattctcatatcaaagaagactagactaactacttagacttctttccttgtttctttttaataacttcatcaatgtacattatacctttgcctttgtaaacttcaggaggcttacagctacggacagtggctgcaaactggtgtaccctttgcttgtcaatcccggtgcagcaaacgacattgtttttgaagcaaaaaacccgaacagcagggggaacagtcaattcaacctcatgactgtaacccaatttcagcaacaaaagtcttccttctgattctgctctagctttgtacccaacacctacaatcttcaaaaacctaaagaatttcgcttccattgatgatgatgatgatgataatgataatgattatgattatgatgatcacaacatcaactcatctcctttaaacaaaaaacaaaaaacattaactcatcatcatcatcatcaatgagtttaattacactttttccaatcttaactaaaacaacaccaaattattcaagaaactctttaatttcataataacaaaagacataaataaaagcatatttctattcaaacccactaacaaattctcttattctgtatcatttttcacagattgtagctattggtaacccaaataatcataatacaaatctcagttcagatctaacacccatacacagaacaaaagattaaaatctaactataaaacataaactaatctatagaatgattaaacgaagatttagaatcaaaaatagttctctacttctgatctgagagagagagagagagagagagtacctgctgctccggccggtgattatgaacccaacggaattcctcgtctccgaccagagagaaatggagaaaccctaataaatatttatgtgacttttggttttgggtctgttcttataaatgggcctccattattgggcttctaatatgggccaagtcataagatacccacatttttataagggattatttcactaatactcaaaaatgacaaaagctttagatttttacgtatataaattgtttttatatttttatgaaatttaacttttttttctacagaagtacggagggttatttttctgttgctttccaaataatataaatataaaaataatattttttttctttaaaagtgaaaaattaattttaagtactttgtgtaaattacatatttaaatttatatatagaaagtgtatgtatatatggcacaaatttttttttttgttatgacgtttttccattagagattttatttgt

SEQ ID NO: 223162 - DNA, 1378 bp, Cannabis indica
attctaactcgaccccttgcggcgaccctggctacgtgagggtcatatggaggcatcttacgaaaagtctatttcattttggccataagtacaatataaacaagagacctacacgactatcacctcccttactcaaacccgacactacctgcatggaagaaataaggggaggtgagaaacttgaaaaagatacaaacacattcaatttaacggtacccaaggtaccttctaagtaaaacaaaatgtgcaagatcagtcaacaaccaagtaccgtcttaagaatacttactaagacatatagtgagtcttaagttgcattattgactataatggactaactatcgtgccttatacaaagtttccaagagaaaccacacatatggtaacatttttatctgcctccaaggccatcacgagaccctaaccgaggtcaaaagagggagaaaagctggctggcaacttggagcctttgccttggccgaccaaggtgtccaagtcttagtggccggcaagaccccaagacccggtatagtgacttgccaagaaccctaatgctaggcatacatcgaccaacctagggatacagtccatatggctagtcataccccatgaattcgacctatggcccccaggcctcatacaaggcgtccttggtcggccaggatctacatggataagaacacgtgtttttttaagaactcaaacatggtcttcgtgactcaatgagccaagaatcaaaacaaaggtcaaattcagattttttttttttgtctagaaatcacacattatgcatcctaaggctatcatatggatcaaatactaaaaggataataatctaacgtaagaatcaaagcatgttcaaatcaaagaatagtgttcatgcatccatggcaaaattaatcaaattaagtaaaatagctggaatagaaagattacccactacaacattttgttgaagaagaaggtgggaagcttggatcgtcgaaatggcactactgacctcacttctagccaacaacagtgagctagataataaagtgattaagtaatataataaaagagaacaaaaacaatacagtaaaatgaacacaagattttaaagaggtttgtgttgggctttgtgccctaaataaaactctatttcaatgttatcttttctaatcaaatatcaataaagaaaaagatttaatttcattagttgtttaatgtgttatttggttcatgtgatcatctagttatttatttgattaataaattcatccaaacccttatcacactgatattcttgtttattgtgttgtcaacacagtggaaagtaaacaacattgtgtgattaaatgtattcctagatttatcagtacacatggtttaactgata

SEQ ID NO: 223163 - DNA, 1672 bp, Cannabis indica
ttctttttaataattaatatttcattgaccactaaaaatttactgtgtatatacttttgtaaactgtggcatatccaccgtggcaactaacagagtcttttgaacggaaggggtaagtagataacagaaaaggagtttggatagttttaccaccaaaattttagtttttggtattaaaaaaaaaaatagttgttttaccgccaatatccctttggatatgattataataaacgtatttttaaaatttttaaaattttcttgattaggtaacgtatctgataatgcatatattgtaatttactatattattaaccaaaactcacaaaattaaatttgagtgtgtctatatataggctaaattcgtaaatttgatataaagattttcattcccatacttaacaaaaaatatgatatgtgaatcggtttaccataactaaaatggaaagcaatcaattccttattacaactattttaatttaagatataaaataaataataataaagttaaatatatggttaaaaatatttataatattttaaatttaaatttttttatataaaatatttataataaagttaaaaatatggttaaaaatatttataataataataaagtcatatctggattcagatttccttacttgtgtgaattattgtaagtttgaagatgtcaaagctagtgggaattttttcacttggacgaataaacaaccaggggctgataggatattttaagatagataggatcatggccaaccaagcttggattggaaaatatgagtttgctgaagctgtatttcttaacgagggactatttgatcattctccaggaattctttctttacatcctcaagtggtggggggaaaaaagccattcaagtattttaggatgtggaaatctcatcctaaatatgatcccatgctaagagatatctggagcttgaaaataaccgggaatccaatgtatcaagctgtttgtaagcttaagcaattcaaagagaggttgaggaagttgaatagggaagcatactgtgatattcagcagcaagttcatgaggccatggaatcacttgatagtctacaaagtcagttacagcaacagcctcttgaagacagtttacaccagcaggaacgagcagcccgtgagatcttaactcaaaaacagaaggattactcattgttcttaaaacagaaagctaaagtggagtggattcaagatggtgactcgaactctgctttatttcatgcttgcataaagcatagaataaggcaaaaccgaatcctctccattgaaaaccaagagggcagcagagttacagaccctgaactcattacagcagcattcctagacttctacaaaggtctacttggaaccaaaagagagcagaggaaggtagtggaaaacagtatactcagcaatggccctgtactatcctcaactcaggctgattacttgcttcaggaattcacaaaggatgagataaaaaaggccatattcagcatacctgcaaacaagtccccgggtccagatggtttttctagtagcttctaccaggataattgggagctcattggagaggacatatgtgctgctgtgcgttctttcctgaattcaggtaacatcttgaaagaaataaactctaccattcttacattggtgcctaaggtgaaa

SEQ ID NO: 223164 - DNA, 2587 bp, Cannabis indica
aaaaagcttgagttgagttatttttaacaaataattagtagaaaagataagaaaatagaacttactccccaaccaactttaatgatatcaagtccattttgtagtttcattcgtccgaaagtatattgcgagtcagcgacattatataaggtgtaaaaacttgcatttgttccacctccattgtatttcttagttggatcagaagtgtaaacaagcgcttgctattatattcaaattcaaattgtaattatattcccatgatagaatatgttatttaatttgtcaaaactaaaaaaaatgtaaaatatacttacatgaaaagtaggaggggaattaattcttgagttataagattttgtaaataatttggctctaataagatcttctttagtagttcttcttattggaacatacccaattggacatttttcactatttaacccactatttatcgatacctgctccacattctttggaggattgccttccctaacaatcgacttgggacgagaagaaggtctcatctacaccataaatacatataagtatgttataatacaaattcaccatggtttcgaaaaaataaagaactattagagaaatacttatttgagaaaatgtacctgaaaatcatatttgtgattctttagtaaaggatgatcaaatgctggttgttcgtaaaaattaacacagtcataaatatctccaaattgtgtctgtacataacacaaaacaagttagataagtgagaaatgaagatgaaagtaataataataaagaaaaaaaaaatacttttatagccttgattgatgacttattcaatcgctcaagttgattctctatttcaagaatttcatctcttgataatattgctggttgttttctagattcacaataacacaaaagtgtacacaatacaatagcaaccatgaaaaattccctcatacccatatctatatcaaaagattttatctgcaatacaaatatacattcagattagccaaacaatcaaaataaataggtgaataaaaaattattaattaaaaagaataaatatttagataactacaaatttatttacattaaaaatggagaaatacgaaaaaggtaaaaactacaaaatggtatgttgtgagagagtttcaatatttgtaatgttgactgttattttgatattttcaatgaataataaaatattatataaaaaaatgaatattattagctgtataattaaatacaattttacgttacaaaattaaagaatgagatttatatacagtataactcaatttttcgtaatatatttatttttttttggatgttacaattcaattaaatattaattatatatactatttttttaagaatattattagttgtacaattaaaaatattttaggatttaaataaaaataataatattttaagttacaaagttatttttaattgggataagtgtttaaactagtcttttttttcttaaaatattagaaattaagcagcagtttcaaaaggtttacattaaaatattttgtgaaaatgagaaatctattaaggctgaatatcaagtgcgttatgggtttctagtacacggggtttcgggttcgtgagtttcaaactaaaaaaaaaaaaacaccagcacccacccatgtaatgacccaagttggtgggttagcaggttgcgggtgaccgactccagtgggttctccggccaaatagctccatgcattagaacacatttgtctctcactcacggtaggaaaggctccgatgaacaacatggtgatgtcccaacttttagtgattgacgtccattctgctttcaatgtcatgataggcctgttgagattttgtgccctaaacaaatatctaatttaatgtaatcgtatttaatttcaataaagatcaagaatcattttgtgatatgctttgttctcatgtttatatgtttttaatatataagttttattaaatccgaaacatatagttactcacaattacagtgatgtcatcacagtgaaagtaattgtgattatatgcttcaaattatttagtcttacgatttatcagtgtactggatttacaatgacgtgataatcgactataaggtttatttacacttgggtgagtggaatattttttccaaggcattagtaaagtaaactaggatcagatgtatcaactatacatcagactggaccgatattaacagtagaaaacatatcataaacttaccattgtatcttttctaagttattacacttagttgatcatagatcatttgatctcaatcctaagatggttaagctctagcttaaatgtatttcacgagttctttgacttgttccttaccagtttacatgcggaactagtcccatacttacatcttggaaactcagtagtgcaattgagtggggattaatcatagatatagaatctatagcttctataactatttagaaatgaaacgatgatttctttggagcttgacttaacgtgataaatgatagagcactcattttggtaattatattagtttcctaaaatatcattttcaagtagctaagtgttttgtggataaaataca

SEQ ID NO: 223165 - DNA, 1317 bp, Cannabis indica
tttagtgtcttttgaaaactgacagctcaattgattgggacactattcatgtcggtcaaccatgtgaatagtagtgttgaccgacgaaaataccccttttcgtagtagtgccaggaaggaggaagaagatggcgaggtcatggaagaagaagaaaatttgtctaagtctcccagtatgtagacttggttatttatttatctttcttttcttttcttttttttaagaaaatggccctttggccaagacaatggtttgcccctggtggcacttttttttgtaaagacaaatttgcaaagctggacgaccaactttgcttttttaatgcctcatacttttaagtttaaactttaatatgtttatgtttgcttgcgtttcactcacaatttaaacaatcacatgcataaagtttattagggatttccattgctcatattttcctctaacgctaagtagttaattacctactttatgcgtgagaaacttatctgctcgaccctcaatctgcgagccatcattgattccacctggcgatcataaaaaatgatcttattttaagaaaactcaaatatatttttaacgaacttgtcatcttgtgtatatttgtattgcttacattagtagttaaatcttctacccacatgtttggtttaagtattttttcaagacactttgatgtctcgtttaatacttttccttagcgcaagccgttattattcagctttatgcgctaattataactttaattataacttttgattttcctttctcgtcagataggttttaaaccaaaaactacagttgtttgatccctttctcatcaaaaacgattgatcaaggcgttataactattcgacccctctttcatcaaaaaggtttggtcaaggagttataaaaatttgacccctctttcgtcaaaaagagtgggtcgaggcccttttttttaaaagtgttgggtttgcattgtactatgtatttccagattgattctagttgatcatacatatatgcccctcaagtaattttaaagggtttacactttataattacttgttgaaagaaatgattattttattaacaactgaagttcaaaatatttcatcagcaatgtgactcacaatcattaatctcataagaacttccccaattcaatcgtttattttatcaatcttttagaagcatttggttttgataaaacgagttttgattttcagtgtcaatccctaacatatttccacaatcgtttcaatatccagggtcaacccctgacatatcccagggttccaggtgaactaatcctggttttagttgtttgtctt

SEQ ID NO: 223166 - DNA, 1505 bp, Cannabis indica
ttcttttttgtagaaatgtcccaatctggttttgaagtttattctccagagttcttagaaacagaatatcctaaggaattggccctcccatacaaacccagaattttcaaatctcggtccaaatttgagataaatgatgcaaaaattagggaccatttaataaaaactaatcaggaagaagttgctaatcgctataggcgtttcctacaagaaataactaagggtaaatgtcgctacttacgagatgcagcctggcctgaaccttcatatttatattctattttggctaaaccctttttacctagagtcacaatttctttttcacctagtgacttggactttgaaattatgtcttccaagccccataagtcaaagactccccaagatcctaatgtcacttttgaggccgagatcatagagtcaagagtaagggccataggggactatgttggtggtgttttaaggacttgtggcattgaccaaaagtgcgggtgtcgtattagatccgttgcacctggtgaatttagttgttatccaccagagcgacttacccgcgaggaatgcaggggccagtggtgaaaccagtgacaaagctagtactagtagctcggctgagataggtgtttggagcctcgagcatatcagggctagagcaattctccctctgagagagtactttaaagagttcatcaaccatcttggaatagcttcattccaattggtttcaatttcctacaatttccttgcaagtttaaaggttctgtataagattttaggatgggagtgtcccactccccaggaaattgtttacctttattttgttaagacagttcctgcgaggaaacgttgtgcagggggtttctactatcttgggactcacacaaatgatcgtaggatcattgggggattaccaaacaagactgcttttaaggaggattttttctagacaagtggcatttccccaatcaacacaaccactttttgcataatacgtaagtaaatatttatctaacacttggttttgaattacgccatgtttataatcttggcctcgctgacttatctcattaattctattaattaatagtagtctcaaaaagaccaactccaactcctgagatggtcgagcagcgtaaacttttgctgggtcttccgttcgaactgcgatcgactgagtttcttgtgagcgaagccaatctcaagtttgttggccttctcactgcaaacgagtatacttgtgattacacgtttcccaagtatacatcgtgggagaaggttccagtcctaggtgacgaggaaagttaagattatgtggcggctcaggtgcattatctccagaatgcaacccctcgagaagctgaagaagatgcatcccgaggtaatcaatgtggatggtctcctactgttcttagggaaacatgcacttcgttagtaacttttaacaatagccaatataacttttacatttggaaccccttccttatagattgtattacccataggtt

SEQ ID NO: 223167 - DNA, 2015 bp, Cannabis indica
cttagcctttttctataattacccatctcgtgagaaataaaaactcgaagtagaagtagcttcattaccatcacgacatggggagtgaaatactataaattttttgtgtctctctaaattatatacttacatttattattcatctcaccaatctagcgagctgctgttggccacttttcagcgtcaacacctgtcatatgcctggaacaatcattgtcgaaatatcacatttgagaagcaatagatttaaagcaagaagaaccaactacatatttatttttgacaatctatttttatttttgagaaacatatttatttccaaaagatttagaattaaaaatattttacatggtaatacatttaggtcgaatgtaatattttattctacaaaaatggcatataggaatgaatcgatttttatttcctttgggattgccaaacttaccaaactacttctgtaataacaatacatttttagcatccagaaatcaaaaccctgcaaagtaatgtcagaacatccagaaattaaatttttaaatttagtattttatttaaattgagccttaataaaacccaaaccagcatgactcgtttgtcctgacttttgaacctcttaaaaatgttagaacctagatttagcattttaacatttcttttcaatttttcaagtttcttagttaaatatacaattttagaattttttgaaatcaattcagattcacaacatgtatttttctcttcaagatctttgatgttgtgagataactctttattaaattttactaaggaacagttttcatcacaaatttacatcaacttaccaaacattaccttgtaagattctgtcaatgatccttcatcaagttctgactcatttgaatatgaaagagctcatttatcattgtcatcagtcaatgtattgtttaaacacaaaacttttcttttcttttattttttctataaattacttgacaaaacacttgttcaaataatattttcatcttcactatttttaaaatcatcgaaactccaagtaacattaaaatcctttttattctttttcaaggtattgacacattcagattgaatatgaccatgccctttgtattttctgcattaaataccctttttattattggggacaaaataatcagatacataattaccttttggagtttttgagaaattctttttatttccaacatttatcatgtgcttttgaaaattagccaattcatcatcatcctcataatcagaaacatatttttcaaaaactttaaagagaatacctttgcttttctcatttgaagagtttgacttaccctttttcttaatttgccaaaaaattttgcctattccattgctagtatttcgtgtcaaatctatcaagaagcacacgaatgatttttcgaaccaacacaaatttatctaatttttttcccaaggaaaaaaattcagaaaaaaattcaattagcaatatcaaataatctttcataaaattcatattaagtttcaatttttgacgttcttaattcattgaatctagtttgcaacatggtaaaacgtgatctctttacatcagcggtatcttcaaactaagtttgaaggatttctcatgtctcctttaaagattcacaagattatatcaattcaataaagccttcactaataccattaaaaataccatgcaaagctttattattataatcagataattttcatctttagtagttcaattaagttcaagttttaccttagcattaccttcatcatcatttttaataggtcgagaccaacttgaaagtatagctctccatgccttcttatcttgtgacttaataaatgatctgattctgaccttcgaatatggataattcgagtcattgaacatgggtggtcgagtaatggagcttccttctaaaaacaacgacatctcacataaaacaattcgaaatgtaataaaaaaaactcaagatctcactaagagtttaatgacttactctgataccaattga

SEQ ID NO: 223168 - DNA, 2144 bp, Cannabis indica
ctgtttgaatttccaagtgattgtcccaactccgactagttgaaacctataactttagtcaacaatcgtcaaacccggtcgtgcactcgagtctgttcctagctttgaatggtcgttcgtcctaagccatctccaatcaagtgcctcaataatatgttggcatagaagttacaggcactttaagccaccatttgataatttgatcagccaacaggtgatggttgtgatggttgtctattaattatgttaaagaaaaatgactaactctggatgctttaatttctagagagaaactagagagagatgctctaaccttatggttacttttctaaacttaaaaaatgagtttgtggagctctctttttataggaaaggaggtcttattaaaataaaataaaataatttaaaaaatgtgaaaaaatacattgctatttttgattgcagatgatgatttaacggtgtccggaggttggttgtcaatttttggagcttgagtcgcattaaaataacttcgaatcacaagttgagtcacgtcaataagatcaatattgattgagttatgactattttattgaaggctgttcttggcccattgcacaagttgacatcccaacacccaagttgacatttagcacttaggttgacatgtgacgtcaacttggacgttggatgagttggaaaacatgtcggggatgtattttttgatgcctaagtgatattttgacatcacttggcatgtttctgtgttgtagtgaagctggtcatcagttctcggagatgttgctgttttgcaaaaatgggagactcaaaactcgattttttagtaattcactttgtcgaaaaagtgaaaatatgaagttgtgaatttgactcttctcacttcatgactctcagttattgtgaaaaactagacaagtggtcgagatagaatcaaaattggataagcagaacctagcgcaccagaccatttggcaacttgggcgctgggtgcttatttaagagcttctgggatgccgttttgacacttccaaggttcttgaacttgaggatgaggtctcttctccagtttttgaccatttcagagagaatgcttggattaaaatttgtattttagtgatagaaatcagtgcactaggttgtttgtcaacttgggtgctaggctcagttttgaagcccttgcaattgtggttttctcctcaagtttacttgtatttttgttatttttgataacaaaaaaaatgctcgatacattttttttgaaaataggattggaaaacggcccatgttgacaatatgtcaacctgggcactgagccaagtgccaggtgtcaacctgggcgctggttcagtttagggcctcctagaatttccattttctccatgtaaacaactgaatcttaatctttggcaaaaatagagaatacgacggaaagacttttcaaaaaaaaaaacctcatcagaattggcccatgttggtttgtttcttcccgaaaagcacttgtttccccgtttttaatgaagacgaagaagatgcataagttaaatttcaaatccgatgcttggaggtgacccatgttggcaaattgtcaacctgggcgctgggtgcctaggcaccaggtgctccaggttctcaaaaatgagagttcatcgaatttgattctgatgcctcaaatatgtccgtggtatgtctaattcatatctcagtgcaaagtttgatccatttgcactaagatgatcccgaaaattaaaaccctagttgggttgtcaacctgggcgttgggtgaaaccgtaggcgcccgagttgaattgtaaggtgttgtttcgcgtgttttcagctctctgttggattattgttttaccaggatctagatttactaccatgtatgttgtttaacatcctaaatatgaatatccaaaacaatgtaatttaaacacatataaagtttaagaaaccttacattggttgcagcggaattaaatgactccttctgtttgttaggctatttttagcctatgttttggatttattttatgtgcgtttttcgctgtgttgggacggaattacgcttgttttctatgtttttcaggttctttggaataatagaggtctcgatgcaaatattcagtaaaagacgagctgagcca

SEQ ID NO: 223169 - DNA, 1489 bp, Cannabis indica
ttagttaaatttaaggatagtcgatacaacttttatatttggaactatgtagatctcatttcccatagttttgacagttggtaccccatgtctagttgagttgtaatagtttttactttggaattgccaagtaatatggcactaactttgatagggctggtcatccggattgggatatgtctccacttaacccctttgacctattcatgataactagttttaggaaatttagtaactattatagttcttctttctcatcagatgactatggtaattttcttaagtggaagatgatctcaccacacttttcatgcttatattgaaaaagtattaatgtttatccttttgtctcgcagatatggactttgaaaatctcttgtccactttgcgtttcaaaaaaggcaagaagcgagctgttgtatcagagacttcttttgggacgaacccagaacctttgaagagattgaaaaaatcgacgaccaacaagaaacgcgcctcgactcgattgttattgagctagaggttcccccggtgacctcttcggtacctgttgctgccctgatgaacaagctttagggtctgttcatcaggttagattctcaggatgacaacccgagatagtactctcggagccttcttgccccctgcgaaattctgcaggcattaagggttcgcaagttttctagcaatatgtcaccacctgctggcgtcattacaaatcttttcaacaagatgattgagacttgactaatgatggcaattttcaaattttatctgcaaggagcgccgatcttactctctcagttagtatgcatcttattcttttattttgactttatatctctttttttagttattctttcttaactttgttcttttccaggcatcttttttgtctcaccatgctcaacaaagaggccttcagagaatcaaacagttggagactgagctttgcaagtctaatgaacaatgtgaagtcgttgcgaggcaatggacagattctcaaactgagatttctcagttaaagaaggacgctgaagatcaaaagaaaacccacaaggctgagctcgatggtgcccaaaaagaagccaaagatcaccttgaggcccattagaaaacctaggaagagcttaatgatggcaaaaagaagcttgaagaagccgaggccaatgctaaggctagatgtaactcagttgccaagtgttctatctgtagagcttggttggcaaatccaaatatggacctaagtttcttggaagatggtgctaaggagatgttggctttttgcgagcagaccaaaaaagattaagatgctgcaaaagaggaagttgaagaagaagaacaggaacccactaaatctccaaccatgtagatttagtttttatcattttaatttctgaacaatggccttaaggccgagacaatggtttgccccttgtgccacttttgtagtattattcaaacttttactttgtttaatgaccaacat

SEQ ID NO: 223170 - DNA, 1105 bp, Cannabis indica
tgtactactatgtataaagttatctctaaagtacttgcaaatcgtcttaaagtggttcttgacaaaattatctctccctttcaaagtgcttttgtttctgggcgtattatatttgataacattcttattgccaaagaaattgtgcatgctattaactctaggaaaaatggtaagagaggttgggctgttttaaaactcgacatggctaaggcctttgatcgtgttgaatgacattttttggaaagtttaatgttccattttaccttcccaattaagtttgttaatctggttatgaaatgcatttctactactaggctgtcttttcttattaatggtgatgtctgaggttctcttagaccctctagaggccttaaacagggagatcctttatctccctatctttttatcctttgtgctgaaggtttgtcctatttgcttagggttaggcaggatgctcaacttcttaagggtattgctatctctaggcatgcgccttctatctcccatttatttatttttttgctgatgatagcctattgttttgttatgctgatagaaattcttgcttagctcttcaggaggtttttaatatatattctagggcttctgggcaggctattaatttttctaaatcctctattatttttctcccaacactgcacaggagattcgtactttattttttcatactttcaatttagaagatagttatagatatttaggtcttcctcaatgcctttctcggtctaaatatcattcttttacttttctttgtgataaggttgcttctgtcctcaaaggatggtcctctaagtgtttttttcgggctgggaaagaggttcttttgaaagccgttattcaagctatccctgcttatgcagtggcttgctttaagttacctactaaaatttgtaagggtattgaggctgcgatggccagattttggtggggttctactggggagtccagaaaaattcacttgaagtcttggaagtttctatgtcagtccaaatttaggggtactttgggtttcagatcccttgtgcattttaatcaagccatgcttgctaagcaggtttggcgtatcttgaaaaaccctaactct

SEQ ID NO: 223171 - DNA, 1544 bp, Cannabis indica
taaaagggcagccaagactttttcacaaagtaagtcccttcatcactaatcaatgctcttggcgtcctgaatcttgtgaagacatttttatgcaacaatttcattaccaccttagcatcatttgttggactagctattgcctccacccatttggacacataatctacaaccaccaatatgtaaagatttccaaaagattgagggaaaggccccacgaagtcaatgccccaaacgtcaaacaattcaacctccaaaatgcaatttagtgacatttcattccttgctgaaatatttcccactcgctgcgatcacatctttgagtaaaatcatgggcatccttgaatattgagggctaataataacccgattgaaataatttgacagccgtacgttgtccaccaaaatggccaccatatggggctgaatgacaatgctccaagatgcttttaacttcattttcaagcacagatcttcacattatatgatccggacattgtttgtacaagtatgactcatcccaaaaattaaatctgctatcatgaaggaacttttttagctgttgtttggtaaaatcaggtggattggcacctccaactaagaagtttacaatattcacaaaccatggtacccgtgcttgctccaccaccaacagttgttcgtctgggaatgagtgttgaatttgtaattgtccctcgaactctagtagcaacaaaacccaacgtatgagcctctgtttagaatctttcttggctatcaaatacttgattgccgagggatcattatacacaatgaccttggtccccacaagatacgatctgaatttttcaaaggcaaaaaccacagccagcaactctttctcagtagtggtgtaattaatttgggcatcaacaagcgttttacttgcataataaatagagtgaaggaccttgtttttctgctgcccaagaacaactccaatggaaaaatcgccggcgtcacacatgcgttcaaagggcagcgactaatcgggtgctacaatcacgggggctgtaccaagagctgtcttcaacttcaaaaatgcttcattacattcagcagtgaactcaaatggcctattttgttctagcaagctacacaagggtttagacaccttagaaaagtctttaatgaagcgcctgtaaaaacccgcgtgtccaaggaagcttcttatgccttttactgtggtaggggctggtaacttctcaatgacttacaactttgccttgtcaacttctatcccctttctagacaccttgtgacccaaaataatgcctgttgcaccatgaaatgtcatttctcctaatttagcaccaagttggttacttcacatctttttaacaccttttccaaattctccgaaaaacccccaaattagtccccgtaaatagagaaatcatccatgaatatctccaaaatactctcagccatatccgtgaaaatagccaccatacacctttggaaagtagcaggagcattgcataatccaaatggcattctcctaaaaggcaaaggtgccatatggacaa

SEQ ID NO: 223172 - DNA, 1998 bp, Cannabis indica
tttaaacatggcatcatatatcaaaaaaataatctagatgctcacatactgcctaaaatggaaagcggtaaatcaatgatcatataagcagtaaagtatttactctcaacacttactgcaccatgagccgagcttgtctctgacgatgactgtacatgttcggccggtctacatgaagtttaaaaaccttggcgctctgataccaaaatgtaacgccctaacaattaggcacgctacccaaggtgattaagaaaccctaatccccctaaaattaggattacggaaaagataagcgcgggaaatttaaactttaaatgaaacagaatgaaaataaaacttgtaataattttaactttacaatcaaaaatacatgtttcgggatcccaaaaatattttacgaaatattacaagtctttccattagccaacctaagcggcaaaaccagagatacaaaagttcaacactggtagaccctaacctgcttggtctagttttggccaaacatgtgcatacattgcccaactctctcactcatggctgattagagacagatttaccctttcctgcacaatatagcacccatgaaccaagcccagcaagacagtataatatattcataatcataactaacatatcatataaacattaatgccatttcatgtttgtctttttgacgtagacctacacgttacgctaacatgcctagttatttctatgtggcatagacctacatgttacactcacacgtctatatacaataaggctttagaatggttcatttaggttatggttaccgagtctaacctaatcatgcattgaacgcataaccctcaatctttacatacattataatcacatggcataacaattacatactaacaatccactagggtattaaccctaggctattaaaccactcatgttagggtaataaccctaatcccggtttcaatttaatcacatatataattttaaatcccaggccaacaaccagaggcgagctgcgatgcccaaggtgctgggccacggccactgggttccaaaccctgaaaacccattttcccagcttcgaaactcaagccaaaatacagcaaaacccaaccaaaacatgctcaaacactagcaacaactccacaataataatccatataccagaaagctatcacacacattttaaactctaaatcacagcatacatgcatcataaaaatcagatttaaacaacatacaacataggctccaaataagagcaagattctccaagaacccaataaccaagagcttaaatgcttcaccaaaattatcaacccatgataacaacaaattcacagctataaacttaattaaaagcacaataaaatccctaaaatcatttcaagaatactacacaagcatcctacatcaatttctaacttaatcaagcatatgctatcaagattacaccaatatcaacatacatgcattctaagaatatccaaagcttaaaatcataacgttcatctttaattttagcaacctaaaaccaagaatcaaaggtgtgggaactacctcaagttccaagcaatgatcaagccacaactcttcaaaatcaagcataatccaactcaattctcaagcaaattcacaaatttagagataggtttaaagagagagggagggatgggttttgggtgttggaaacccaaaaattactttccatttttataaataattctcttttgatacaaatgatccaaatgagccaaattaccatagtgcccctagggccatataacacacacaaaagcatccaagggcaattttatcattcacatcacaaatatactcaaataaatttcagattaatcacttataaatataatgccaataaataatcccgaaattgtatttcgacttcgaacccaattcggccttaaatacccaattgtgactatactgcgccaacttgtcagaatacacctgaaaaaggataaagtaggcatactatataataatata

SEQ ID NO: 223173 - DNA, 2138 bp, Cannabis indica
ggcaagatggagtatcttgtacttcggcaaaagcatcttcccgagcaaaacctgatgggtcatcatcatctgacgagtctctttggtgctccaggatggctttcccctttcttactacaggagtggatggaagagcaggtagactgggctccctgacctaaatcgcatgttcgataggcctgtgctcgaccgaaattttcttcttccttttgagcggagtcacctactcttcctaaacctcgtcttcttgctcaagatgctcctgagcatactccttgggtcctgcacctcccttcaacttagcttcatgcttgagttgaatgagttcattctcctcatgagctccctcagcccggatagcactggatttcctcttcttctccttcacaggatggggaatgaaatcctttgggtagagcctgtactccataaagttttcctctaagctcaacaaggtgatatttcgggcagcacccagcagctgagtgatcctttgagctttatctctaagagctagcgtgaagggtggacggtaatatatagggatctgctgtaattgaatataggtggtgcccatgccatccaccatgcaatactcgtcaacgaaattccaaattttgctcacggccttgtccccagtgcccgccagccacttgaagtctggctgagaaaagtagaagtatcctgaccttccttgcttgggagtagacttcaagtcaaaaaactagctaacctcacgaggagaaggcatacccaacatttgggtggcatagagaacgaacagagcagacagatacttgatgcccttgccagtaaatttggtcggacaaagatggaagaagtctgccaccttcctaaagtacgagtgcaaaggaatcagtacccctttttttggaatgagcacccgactaggcacacatcccttttttcgggtttgtttgctcgattttttgaggcaggaacatagtagtccagcttgcccagataaccggacggatctagatcctgtaggcgtgccttagtgactttggacagagggctcatccacccggcacccaaggcaccttgcctcctgtgaggaactgcaacagtaagctcctcagtgtcgtagtccactccttcgaccaggacatcaccgtctgcgtctactggatcaccagcctcgttgtatcccttaaagtttggaggtccagcctcctcctcttcctttgcctcgaaaggactgccaggacggatatcgccctgttcctctatcttctatcatgatccccctcctcctgaacaggcggttcctgttcgctgctgggtaaggtagcgtgctgggccacgtgagggtcagacgtgttgactttacgcattgtctgtttagttcgagccatcatcctctggctggacgggaagattgaatttaaatgtttgtcgcttgaagagggcagactggaacaaagtcgagggttatcctcgtatagaagttgaagtaaatccttgtcgatttgttgttcgcttccccaaaactcacccaagttcatctacagaagacaacacgcgagatcagtgttttgtcaggatatcgaacaataaataggcaaataggccgaccaggagtactcaacagatttaggaatggaaatattcgacaattagtcaaaaccctgaagtttcaaatttttgagacttagggcaaaaatttcacgaagctttgaataagcaagttgaaagacagacattgtgcagtcaaaaggcaagcataatgaatactgaagtcgcataaatcattgcaaagaaaaatcgtagagtttctaaacctagagttttctacctatcttataacgatcaagtttaagatcgcattcagaaattaaatgtaaaaaataaaaggagaaagaatcaaaaacttactcactgatcgacgtctagattcacgtatacgctaaagttgttcggatagctcttgtgaaaatttcacgacagacttgaggtgaaaattcctctctttttgctttgaacttgcttaatgaatacattggtaaatatgtaggtttatgaacaatgctaagtcatatttataggcagaaaaacaaaaaggggtaatcatttcaaatgcctcagatgcctcagttccccccaaaagcaaatat

SEQ ID NO: 223174 - DNA, 1557 bp, Cannabis indica
aacttcagttttgtgcccaaagtactttgcacactttcccaaaacttagaggtgagaattaaacctctatcaaatacaatggtctttgggactccatgtagccttacaatttttttacatacagttcaacatattgttctgcgttgtagttagtgcgcacaggcaaaaaatgtgctgattaagtgagtctatcaataatcaccaagacagaatcctgttgtttactattcttcgataatcccgtcacaaaattcatagcaatgtctttccatttccactcaggaatatcaagagactgcaacagccctgcaggtctctagtgttcgaccttaacttgctggcaggtaaggcattttgctacaaattttgctatatcttttttcatacccggccaccaatacctactttgcagatcgttgtacattttggttaaccatgggtgtaaagaatagggtgtagtgtgcgcctcttgtaagatttttgatttcaactccgctttattaagtacacacacccttgccttgtatagtagaatgccctcttcattaactgagaagtccccagctttctcattttgtagttcgactcgcttgattaaaaactcatcttgggcttgttcttctttgatcttctctaatagatttgattcaattgtgaggttagctagcttccctgttactaattctattccagatctcttgatttcctgttgcaacgacacttttaatgcccttaacattgacaaggttgcatagttacgtatgctaagtgcatctgccactacgttagtctttccaggatggtataatatctcatagtcgtaatcttttaccagtttcaaccaccgcctctgtctcatgttgagctctttctgcgtaaagaagtattttaggcttttgtgatctgtgtatatttcacacttctctctatagaggtagtgcctccagattttcaatgcaaagaccactgctgccaactctaagtcatgagttgggtaccttgtcttatactcttttagttgtctagaggcataggctaccaccttctcattctgaatcaacacacaaccaatcccttgctttgatgcgtcgcaatatactacaaatttgtctttgttagttggaacacacaggacgggtgatgttatgagtttatctttcaatgtctgaaagctttcctcacaattatctgtccttgcaaatttttgttactttcgagtcagattcgtcaacagtgtggctatttttgagaatccctcaactaatctcttataatatttagctagtccgaggaaactccaaacctcacttgcggtttttggtttggtcagctcttcactgcttcaatttttgtagggtccacctctaccccatctttggacactatatgccctagaaacgccactttctccaatcagaactcacacttcttgaatttcgcgtacaattggtgctttttgagtctgctaagagttagccttaagtactcctcatgctcttccattgtcattgaataaatgagtatgtcatcaatgaatatcaccacaaacttgtcaag

SEQ ID NO: 223175 - DNA, 893 bp, Cannabis indica
actttttaggggcaattgttatacccatattttgagctgtaatatgaagctgacacgtgtaacaaagttagaatatgagccagctcaaattatgcatcaataaatgcattcagatgactcgcctcgagaaatacagttgatagaaatacttgaactcgccatcacatagataatagcgagacatgagtaataactacaaactgataagatcagggaggtgaacaagtccatttcgggatagacagaatacattatgaaattatttggaacaggtagataatgagttttgcagcttattgacccacatactcgtgagtatgtaaccagaataaggacaacttcaacattattcaactcgctcttgacgcgttgaagtaagcatctaacatatacttcactcaacatttaaggaagagtgtgagatgtactatgattatacacttagacattattccacggagatgtttaagaaaaatattgattgaatgacgagaacaacaaagcacattcaacataattatttatagataacgacaaagagtaattatgcagatattcataattctctcatgtgcctaaatatgaaacctggggaatattcacgtttcataaactgttacaaatgattagaccccaaaggaataactctcatcctaaactcctataaataaggcatagaacctagtgcacaagggacgaccaacttttgaaaaaatagcgaatattgtatttattgttcatttctgcacagttaattgtattctgtatacaataatacaatattccaattttaaataagatggactcgtgaactatgaagatttaattttaaaccacgtaaaaacattcttatcatttattgttattctttttattattattagataattaaa

SEQ ID NO: 223176 - DNA, 909 bp, Cannabis indica
tgaatgacaaaggttccccttttccgttgttcagaccgtggatgaatacccactcattctatgccaactgcttctttggtaagagtggaacctcacctgctatgaacgaagggaacaagatagtggcgattagagacggcctgaaaccagttggagtagtgcgttagtcaccggtgacagagatggttgcaaaggacctgcctgttactgctactccgattatgagaaaggggatctcgagatctttgcggggctagccttcaaggggacgaggtggtacccatgttctaagggcgtggcaaccgagatcatctgctgcaacggagggagttggtgcttatttgggtgttgtttcactttcaccccacctggagttagaaaagccgtctgcccctttatccattacaaaagataatttgaatggtaatgggggaggtgagtatatgggtatccgtgtgagtgagggtttgaattgtgtggtcaacgcgtgggctttgactggggctgtgggccagctggatggagtgtgtagtgggccgaattatggtaacaagaatagtaaggattatgggcctttttttaagaattgtgaaattccaagtgggccgagaattgatcttaccaacattaacactcagattttttctgagaataaaaatgatatgggaggcagtgggccgaatgacatcaatattggagataaaaatagtgtgataaactcagatggtgaaggtgattcgaaattgtctattataggccaagatcattccgatcatattgatgagaagaggtccctatcaaaattttttcaagctcaagaaggttatcttcaagaactggctgctttcgcatcacaaggaccaattaagagaaaagcgggtcattgtgacattggtgttccaccatctt

SEQ ID NO: 223177 - DNA, 1198 bp, Cannabis indica
ttgtggcaaggcctgtccttccttgggcaagggaaggtttgtcttggttcctgaagaacctggttggtcagcttgttgatagaccctccctgatatatcaactagtcttccttggagtggatctctgatgagatcctggcctcttccattggttctctgattgaaccgccttattaggttgttgacttctctattacagcgatctggctctgcttggtgagattgaaggatgtactgttgttcatctatctatctcaagaattcacatctatactgagcgaataaatcacaatcagcagtgcgtggttcttcagttaggctggcttgatagacgacctctttcagtcttgctaactcgagatcttttcccaagtccacatggggctcgccaattcctggtcctatctctccagcatagtactgaagaagagatccaatttttattccttggggctgtttcccaaaggtccttccttcagtgggaggcgccagtggagggtcctccctcggaggcaagggcctgttgttcaaatccattgggatgtttgtgtcactctggccagctgtagttgccagatttgaggtgcctgccgtggtggcaggattgatcacatctgcagtgttcatgagaattctagtagtggctggaacatggacatcaggatctgcactcaaagggtcttgaggaagacctaatgatgcagatggtgcaactggagttctcctcgtgtcaactatggtgcttgatcaaattacttgacaactcgctatcaatgaaagtactaaattgttgactcagaaattagccaaccgacagcagagtcgacttaatgttgatgcttgccacatgctacacaattagaactagaaagtaaaagaacataaggattttatagaggtttggccccctgagttagtggtttgtgacctactccccttttagttgtattaataccgagagataatactattcatatcactataggtgggatatgatatagctctcttaaggttataatctaggaatcaaagatggtaaatctcaagtatagagagaagctatggtgggcgtgagagagagagagaatgacttatttgacttagagtttgacgacttagatgacatacttaacacttactgacttagggttttagggttgagttaagactctatatataggagagcttaaaccctaat

SEQ ID NO: 223178 - DNA, 2594 bp, Cannabis indica
atcagcaaaaggagtttcagcatcaagattcagagaaagagatccaggttcagatattgataatgctcggtaaaataattccaacaagatgtgcatactgatccacccatgtttcatcttcatgactactcgaagccatagccgggaacaatcaaaatcaactcacaaaagactaagaaaccacagaactttcaaaacatgtcaatagataagacatttgcagttggatcaactcacaaaagactaagaaaccacaaaagacttttgagttttaagtgagggtttaagcttcattttcaaataataataataatttgagtaataattttttttgtgcttttacaatgtacctgtaggcaactaaatatagatatttaggaacaagaaaactatattagaaatttgaaaaacatatattgtaagagcaaattagatgactcctcattttagctacctttcattaattgaaaaataaaataaaaaattactcaaattctttcattattttgctatgtaaattctattaaaatttatatttttttatcaatgccataaattgaaaaataaatggcaagtcacaactatttgtaacaaatttagagatcaaactaaaataaaatttgaagtttgaaattttttatttttcattgtaaaataggtttgacacacaatgactttcctacctatttttgtaagaagctaaataaacaaacaatagtttatcttagatctgcttgtaattttatagacatgtacaaaagagttagaagagcatcttgcagtagcggtgcatacctcgcgagattggagccaatcaacattgctgccacagccacaacaaccatgctgttgctgatttttatacacaaccccaacttgcaaacgacagagagaaagtgagcaaaatgccacctcttcctcccaaaactcaagcaatgacatgcccaattatgtatccagcgtcaagcttcttatcccattaggccaccaggctactaaaggttagagataatttagatccaaaagtatgtaataaaaatagggatatgaatgcagatcttaagacttcaataaagggatctctttcatgttttgaactactttcgacgtctgatacttcatttgtcttactaaaataagaatttttctcttgccaatatctctcacattgaattctttgtcgcattacattccatctattgagctttatttcactgtagaattcggagtaattttttttcttcgttttgttctctcttaaaatagagaagaatccccaaactctaaaaagaaagaaagaggaaaaaattaaatttttctacaaaccttagaagaggttgttggtaaacacaatatcaccattttgccccgagaaacgaagctctagagcactaattcaacctgaaattcaagtggttcttgctcgaacccaggaacataaggtctctccaaacactcttaatgttccacattatccccaaatatttcggctccagctagttgctcaacttcgatttcgctctggtctgacacctaatactttggaatgatgaccgcattgagttaactagcaaaaactcctgattgaatttgagtgtgagagaaatggtggccaagcaccgctatcaaggtcaaggtacttcaatgaagaattagggtgggaatggtataataaaaacataaatatggtttttctaattttttaacaaaaatataacattaaagtaaaatcatataaaagtaaaaaaaaaatggtccataatacaaaaatattatttaattataccataaaaaattaacttttaaatttattcttagtaatttctacttatataaatcttaactacttagaaaattattatttctcagtaaattttatccctttatcttaacctgtgtttgaaatttggactataaactaagtattttttaaatccaaaattatgagccttgagcctgtcctaagcccgtgagctgaaatcttgagctctaagagcatctccaatggtaaagtttaaaagatgcttggtgaggtagacatattatgtgacaaaatattgagatattatactattgaagagaaaatgatatcattctagaaatttgcatatatggatgctatgttgtagcattgatgttattcattttcctaataaaaaattgaagctaaaagttattgtagttaaaaattatgatatatataaaataataatgtgtgagatcataattatagcattttttaaaaatactatacattggagtgtttctagaagtaagagtgctaaaaatgatgtgtaagagagataaaaaaatattatattttgatatgatgtttaaatttttagcatccttaaatgatgctagatgctctaaactaatataaaatatttctcaaccctgtggttgaccaacatgagcgttcactaagattctggagcctaaactcgagcttcattgagcttgggtttctaactatgagccttaaaataaaacatcttgactctcaaggctaatttccattttggtccgtttggtgagcacgtacattcatttagtttgttagtccaaatacctatcctataatcctagactac

SEQ ID NO: 223179 - DNA, 1529 bp, Cannabis indica
atctccggtatcctcaatatgaacactctttagtttctttagcttacttaactttttaagttattctcattgataacaactcttaaatatctaaccgtatcagaaatctctctatcgtcattggaattgacaattgagctctcattttgggttattgagcatgcaaggttgtgaattaaatcatgcactctaaactcttgccacattacaaaataatcttcatgaggatcaagttgaaagaaagatctgttgcacaactctacaaagcatgagtcaccaatatcttcgaggtgctttttatttttaggcgaaggaaggattccaagtgccatcaaaatactaatcaactcaaagttccacatcaaactatcctcttcgaaagttgagcaataagcaaaacactgtctcaaagatggagacattgcattgtaacttaatcgtaatgcaggtaaaatgtgaccttcttcttgttctaactcccaaattttgctatctcttacatttttccactcatgagcttcagtcttcaaccgaaggagactgcccaaagtcttcaacgccaaaggaaccccgctacacttttccacaatttcttcaccaattcttttgagttcaggacattttgatgcgtctcttcatcgaaatgcatacttgaaaaacaaagacaaagaatccttctcaggtaggccctccaattcataaggtcttattccacccatgattgaagcaactttactatttcgtgttgtcactataattttgcttttctcagaacccacagacaacaactccgccaattcatgccactttaaaggatcctcattccatacatcatccaacacaagtagaaactttttatccttcaaagtctgactcaaagatctttgcaactgatctaaattagtcaagttacttatctcagccttattatcagttgcactcataataatatctttcactagtctagtgacattgaaatctagagacacacaaacccaaatcgtcaaatcaaacttttctttaattgcatcatcattgtatactgatttgataagtgtggtcttccctaaacctcccatcccaattacagataccacaagaatttgattctcaattttgtgatcattcatcaatatcatatctaggatctcttctttttcgcgatctctaccaataacgtctaaagggttaacaaaagagtgagtcatcatctccctgttgtcatgcattggagggttttgatccatattcagctgagttttgatcaaatgaaacttttccatattcttagcaatctcatcaaattgttgtcttatctctttaacttgatgaacaacactaaaacgatacacaagaggattggaccatgaaaagaaacggcatacctttctaccaaaagaggcatattttttgacaacttgtcttctcagtaactcacactcaaattcatcgagcacatccactgcatcatggaacacatccttaaggtgattgagccagtttttgagctggggattgttttcttgctt

SEQ ID NO: 223180 - DNA, 1645 bp, Cannabis indica
aaagtaacgttgggcctttagagagtcaccttttatgatttgggatgtcagtattagcgggacgtcattgttaggcgtcggaagtgtcgggaaattggtggggtttaggaaagatcaagataccccttttaaattattagatccttatcttttaccaagggcatgttattcatttgtttaagtgttttatcctttgtgtgcttggtattaatattattgtttttattttctttattaacgttagtaagatttaaataagagaataacctagagaacacttccttcttcaccattctctctctccttcgaaccacatcatactcagccaagaattttgattcttcttaacagaattcagagaacactaaagggatttaaagcttgtaattaaggtattatgctttagccttcttctctttagaattcttaagattaaacaaggttttgatgcatggttttagaaattttgatgttgtggggataattgatgtttaaattaaagttctaaaacttgtttaaggttgtttaggttgatcttgagtaattttgtggattgtattgaggttttcgcaagatttgagtttaagaactcaaaccttgacctctaatggtgcctttggattttgagtaaattgatgagttcttttgcttgggattggtttattatagtggttttaggtattttggagattatggttgagtttggggtcgaattgagttgtggggagaaatttttgggttcccagcacagaaccggtcgaccggttctaggggacctatagaaccggtcaactggttggtacttaagaactggacttccagttgagaactggtctgccggttgggccatttttcagagccatagttttccccgtttttgtgttgtttagggtgttagcatcctatttatcgatagggttatccttagtttcaattttaaatcctcgataagttttttagcgtgtctctcattgagttttgaatatcgtggtttagggccctgtaaagcgtcgtgctgtatttccactcaggttgaccggcacacctcagcacggaacgaggtaagatagcataataatatatatttgaatgtttgcttgtgttaaatgtttacactactaacactaacagttatatggtattaagagtgtaagtacagtgtaggataccatggtggttatagtgttaccaacacgagtaccagggagtacgccgtgcatgtggtacaacacttagtaacttccgggagtacaataatggctccaccaacacaagtacagagttggtactttagtgcatttggtacagtggtcgtacttcccttaagaacgttcttaaccatttggtgagctcgatttctggagcttaggacggcttaggcataaagccgatataagcattatttatatatatggtatgcatatcttactgagtctgttgaatgaaaagctaagctggaggaacaatgagatggagcccggtagtgattgtacatatcgcggcagtgcaacctggagggtttcggtctttcaacattttgagttgcttttgttgatgcctgtcgtttgtaaaaaaaatagcaaaaggttttataatagcaaatgtagttttcaattgtattttatgttggattatgttttaccag

SEQ ID NO: 223181 - DNA, 2369 bp, Cannabis indica
aatcataacagaatcaataacaaactctaacaaccaagaaacagttatgaataactgtattaactgccttgacactccccctcaaacttggaattggtagggataccaataccaagtttggtacgaaacagagtaaaacgatcagtggagattgcctttgttaagccgtctgcaacttgatccactgcagggacatgttgaatgcgaaccaagccttgagtaagcttctcacgaacaaagtaaagatccaactcaatatgcttggtacgagcatggagtacaggatttgcagtgagcaaaatggtactcaaattatcacaccagataatggggggacgaggaagctgcaatttcaattcagtgaacaaagaatgcatccaagttaattcagagacagtttgtgctaagctcctgtactcagcctcagtgctggatctagagacagtatgctgtttcttacattgccaagccacaagattggaacctaaaaagattgaaaaacctgaagtagaccttctgtcatcagggtcactggcccaatcagcatcacagaaggctgtaacatcaagttcaatggaccttttgagagacaatccatgagacacagtgccactgagataccggagaatgcgtttcactgcattccagtgtgtgtgaagaggattggccatgaattgacacaccttatttacactataagatatctcaggccgagtgatggtgagatactgcagagcaccaacaatcgatctataatggtgaggatcagcaacagggtctccttgataggctgataactttaaaccacttgtcataggagttggagcaggcttggcatcttgcatctgagctttgcatagaagatcagtaatatacttcccttgagaaagatgcagaccagattcagtaggagtaacctcaattccaagaaaatagtgtaggttacccaagttcttgagagcaaacttactatctaaggcactaattagagcagagacttgatcagagttacttccagtaactatgatatcatcaacatatactaggataagaagaacagagctagaagtatgttgaatgaaaagactatgatctgatttcgaagatacaaagccaaatgacaatagacactgctgcaatttgtcaaaccaggctctaggagcctgtttaaggccatagatagccttattaagtttgcaaacaagatgaggtgcatcaggtaactcaaagcccgggggttgtgtcatgtacacttcctctttcaaatcaccattcaaaaaagcattattgatgtctaactgttgaatgcaccaacctcttgctaaagccaatgacagaacaatccttatggtaactggcttaaccacaggactaaaagtctctgtgaaatcaaaccctggttgctgatgaaatcctttagcaaccagtcgagctttgagcttgtttatagtgccatcagggttgagttttatcttgtaaacccacttacaccctatgggtgttctaccatcaggtaagggaacataggtccaagtgacatttcttttcagagcccccatctcctcagacatagcattgagccatttttcttgcttcatggccattttgacactagttggttcttgaagagccaaataagccttaggtttgaatatgccagattttgctcttgttttcattgaatgtttattggttacaggtacctgaggaacttcagaagcctttgaaacaggtatggtgggaattgtgggaggagcaggtgaagctatgggcataggaggctgtgaaatagctgtaggaacagtgttggattgggaaaaagaatcaggggcaatgagaggttgagtagaagtggatacagatagttgaggcatggctatatttgcagggtgaaaaacaggtgtttgttgggaagactgagagtgatcatcagggaatagaaactcaggagtgtatgttgatttgggaattgaagcagagggtaaagtatcagtactgtctgatgcaacaggtgaggaaacagactgagatttaaagggaaatttggactcatcaaagatcacatctcgagatatatagacacgaccagaactatctatacacttataccctttatggttcaaactgtacccaacaaaagtgcagggagatgatcgaaaagccaacttgtgtctgttataaggccttatatttggataacatagacatccaaaggttcttaggttggagtactcaggtttaatattaaacagcatctcaataggagagagatgatgtaatactggtgtaggtaatctgttgtgtaagtacacagcagatctgaatgcctcatcccagaaccttaaaggaagtgaggcatgagcaagaag

SEQ ID NO: 223182 - DNA, 1188 bp, Cannabis indica
ggtattacacctttgtccaaaagcttattttccctaccacaagcacttagggaaaagaaaataatggaaatagctttttaaatttatcaagcttatagtttctagcaaggtgctctctttgatagaaactcaacaaaaaaatgtgtcttcacaagtgaaccaaaaacctctatttatagtgtttaagatcacacactttgaaattcaaactcataacctccatggatgttatgtaactcatgcacacaccatgacccccatagcattaagaatttcaaattaaaatgtgtaacaccttcttacacacttaatattggtgataattgtggaggttacaaaatgtaagtaactccacctcttatgttacaatttatgtgaatattagatgtatgtaactctcaatcacattatatatattaatctcatatgaaatcgcattttattattttaatctatcttatattataacaatataatataacataatttaatttaataattgtaatctttataaaatagaaagttataaatactagatagagtataatcataccaatggcaaggtcttcgattgtcggtagactttcttcttcctcctcatattcacgaacaactataggttgatgtgattggctccaccaatttttcagacatatcaaagcttccacagttgttggattcaatgagctcctaaaaggatctaaaatacgccctccagtggagaaagccgcctcagaagcaacagtggtaactggaacagctaagacatcacgagcaatttttgccaaggttggatatttggatgaatttagacaccaccatttcagtatatcaaagcggtcaggttgacccacttttataggttcaacgtcatcagagatgaaatacttatctaattcatcttttgacacttcaccatattgctcgatcctctcttgcagaaactcaacatgcatgtcatccgaaagaaatgaataagaatctgatgagaatgtagtagtagtatcaacactagtaatgtcttcaccttgactcgctggaactaatggttgttgtaattgctcatacccaccatacgcctcaaacaaagttctcaaacttgtttcaatcttgttcaccatcaaatttgacgtgattgggtcatgcaatttaaggaagcaatggttgagatacttcaacttgtatctt

SEQ ID NO: 223183 - DNA, 1674 bp, Cannabis indica
gatttagcgtatcacttatcagttttacatatgttgtgacttagggtcttgtaaatcatcgagcagtagtttccactcagggttaccaacattcttgcattcgcaatcaaggtaagatcagtataatgattacatatatgtatacatgtttagcgtacatattgtttccatcagaataacatatccggatatcagtgaggtgcacatagagtttcatcgaggtacaaataaatatatgttaggtaaattagtggccatcaaattagcatatcagggtatcagtgaagtgtacatagagttgcacaaagatgccatgttctaggcctctagatattatgaatgaactgctaccacatcaatatgactagagtagagagtatagactggattcacagttagtcataccttgttaaggacgttcctaacccagttatcagatcgtgattaggtgtatgggtgcctggttacagtccaatatatgtttatatttatgattatgcttttcttactgagtctgtcgactcatagttattacatgtatgtgcaggtaaaagctaaaatcaaaccagtgagagtctaaagctaaggatgaagattttacatatcaagatggttaaaccgggagtgttcagggtctttgggatagttttggctcactttgctagtcgctagacaacaacttctgaagtttaaatattttgtaacttttaaaacgagatcccgaattatgtaaattattatgtttaattattaaagtaaagttatttagaaagtcttaattattttcattttgtaataaaccctttgattaccaaaggcgtgcacagtatttagaaaacaccgtaacacgcctaatctagtaaggtgttccaattttggtatcagagtcgccaggttgtttttccaagatcgtcaagatagctaaaatcatcatctgagatatgcttgacgcatggttcgataattttttacgtgttttattagttttatttgttatgcatgattagaaacatatgatagaaagcatgttagtagattgatagctgaataggaatatactaagttcccttggaagcgatagttagaatgtgcgggtttgtcctatagaatggacgtctggcatgaatcatgtagttgggctaaggtagatgatactggtggtagatggagagaatgggatccccctagttaagtcgaggtaggagctaaggaagaacttacagaggtggtcacgaaaatccaccacaagctctgttagatttggagcaaaggtttgtggagatggaagctaagattcaacatcttgaggaggagattaggagattaaagcaatatggatttcatatgttgccttcatctcaagtaccggttgtgttgattgcagagttgccagcaaaatagtttattgctggtaaccaaatggaaccaaccgaaggaagatataagatgaaaggaccttcggttagtttggaaaatctagaagtgatgaatatccctcgagtcggtgggtactatagagtttgttcaagaacctcgagggactttggttgttgaaaaggatattgtttctgttgacgtcgcttttagccaacgacaatgagtcctatttagtaagcgataagtgatttatagcaatcgatatacagtaaaacaaatataaagacacaagaattt

SEQ ID NO: 223184 - DNA, 4479 bp, Cannabis indica
aaatattggttacctcctgttgtcttgatctgtcttgcttcccacagatcagagtggatgtattcaagcacactcttggctctgtaactgctgttagagaatttaattctgtgttgctttccctgcacacaaatttcacataatggtaagtttgcataagtgtaattgtttatcaaaccatattttgattgttcaactaaaccttgttcaccaatatgccccattctagcatggcacaacttagtttcaaacacacatttatccacagatgctgcataagcaggcatgattgtttggccatttagaaagtacaatccatgcctcttggtgcctttaagtaccagcatagatccctcggtgattctcataactccattacttgtcttgtactcacatccctcatcatcaagagtgcctagagaaattaagtttcttttaaatttggtatgtgtctgaccttggtgagagtttttacagttccatcaaaacttctaattacaatagatcttatgcatgtcatttgacacttgtgatcatttcccatgaccacatttcctcaattgatctcttcatagttagtgaaccattccctgttaggattcatatggtaagtgcaaccattgtccaagatccactcatcataatctttgtgttgtaggctaagtgcatacatctccatctgtctgacttgcacaccagtcattcatcacagcgaaaagatcaccatctgagctatatgtgtcatctactattgcatttaagtcattagatttttcttcttcatctttgtgcttcttctttttatttttgatctctcaacagttcttgatcagatgtcccactttaccacagtgatgacattttctgatttctttaggcctagattttgatcttgaatgtcctctaaatcttgagttgctccttcttggatttcttcctcgagcaaaaagaccttcatcttgtcttgattcttgtttggtagccttttgccaattcaattctgcatctcttaacctgagggtactcataacatcttcaagagttatagtatctcgactgtacatgattacagtcctcatttctttaaattgatcatgaagaccatttaacagaatcacaaattgatcttcctccttgatagactcacccatattagtaagagataaaataattttatataattcatcaagattttgttttaaagaattaactgcattcattttaaagccatagaacttcccattcaagaaaatctttgttgcagtggacttggccatgtaaagatgatttagcttcgtccagattccaagagctgttttctctccaatgacttgtctcaatacattgtcaaccaagttcatgatgattgctcatcttgcttgcttcattatagtttagcatcttccttctttgaaccatcagtctggtttctcagttttctcacccttctctaattgatctttaagagctgaatccaatttctggtagaccaatattgccattattattttctctttccataaactaaagtctccagtaccatcaaacatctcaagatcgaatctggttaatgatgaagccattgttgtctgtttcttaattttttgaacctttaatgttcctttatttgtcaaattagaagcttcttcttgttcttgcaaaaccaaagctctgataccactattataaattaacaacacacaattcgacaaaacattaaaccaatcatcaacagaattcaaaaactaaaaggttgaaaaattaaagaacacagtttttatccaggttcagccaaagaaacaaaggcctacttcctgctacccccttaggtattccttgtattcaattcataatcacggttactctcttactcgagcactccaagaacacaccttagacagtactacctcactttctttcactctgtttcttctctccccaatcaaactaatctctcagctttttcttgtaacaaaatgagagcctacatgcctttatatatccatgctacatgaaaggaaaaaatagaaattgtaacaacttatacccaagctcaagaataagtgaacataactgaaaaattatctgtccaagatagttggaattgatttttaactaactgtttctttatttagattaccaaaaaactacatatatatataattgaggtatcaaacaaaaaatcacccacaatatgataaattatcttaacttgtacacttgagctcaatttttttttttaacttgtacacattaaattatcttaaatcttcataataattatgatatatatttttgtcaaacatttgaaaacaatgttatataattggttaaattttgttttacaatgtaggaggcgtgccaaaaatactatatgttcatgtggacaatctattctgtggaacatgtcctctatttgttcatgtagcctatatccctcagtttcttttacatcaatgcacaatacatttgcaaggaataaacgatttttcatttttttttttaacttgtacaccttagattatcttagatcttctattaataatagggtttatgcaaaagtctataaaagtatttttaattatcaataaagagtcgaatattttgatatatgcatgaagttaaattattaatattcattattgaataatttatatataagtattagaaaatttcttattcatatatgaggttttgacttgtagttgtacaaaaaactaagatcacttagtcatgaataaaaaagtcatcaacatattaaattttgggaatctctagtcaatggttgctaatacggttcactaatgctcgttcttcaatgcaagtaatcttggttcagattacagatgtagtatgacatcaaagtgaaggtgttgtatataatagagattatatataataaggaccaatatgaatgaagttgtctttatctaacatgtcgtttactataaagacctaattcatatcatagcgatgatcaatagtagatcgacctaaatcctaagtaatcacgaactcatgctcatgttattagtttctttgattcactcgttaaagtttctcagagaagatgattattacaatttctgttttgggaatctaataatgtgggtggctgagaacatgatttacaattatggaatcatgactttcctaacggatcaaatgccaagtttctttaagtgttaattctagaactagaatgttgtgcacaaatttagatgagatctaaattatactttcactagtgaattattagtactaaatgataaagaaataattcaaagggtaaaataataatttgaccaaaaccaattacgaaccaacacatggagggctaatcactgaaattgattatatatattcatggatactgcagtaaaactcaataaatataattgtaatatcctctttcttaaaaggataattttgtaattttttcctttgtcgatattttgttaatttgtatatttagaaattttataaatatcaggtaaaacatatcaggtaaataatttgtatatagtgacaataattttttttttttgatttcttgagttagaatatttttacagtgtaaaacatatcaggtaaataattagttacttgtggtaatttaattatttattttgtgcatattattattgtgagtataacaataataattatgtggatttattttatattatagtgtaatatatttgttatattattactagaaatataatatagtatattgatttgtgatagtattattattattattagttatatcggtgtgtaacttaaggaaacaaaatgatcgataattgtagaactaagaatcgcttcacaatgaatttgttactatattagaactaaatctaaggtggagaagtcgtgcgaaaagtgcgagagaaaccaatagtgttcgcgtgaaacttagagagagaaagggagattttgattctgaaacacttagagagtttttgggtttagcttctgtacgatctaaggaaaccaatagtcatgaccaaacgcgctaagagcgcaggttttgaaatccaccattttcatgcacgttcaagcatgttcttgagaaatttcaaatttgaacgtgtttaagtcatttttgggtttaagaaacattgtgtttaagcttataggaccccaaggatctgttttgatgtggagaatggaagctttaaggccctgaacaaaaatcgacattgttggacttcatttttaacggtacaccgacaacgaagaagactacaatttttgaccgtattctttggtgatttatggtcggcttgaggttctaagcactgtaggaagcttcaccaatcaaaatatataatgcgtgaaaaacaactgtatgagtagttgaaggcttgccgtcgtcggagaagacaactacgccaacgtaactctggcgaccacaatttgggaagatgtgaggtgtttttcccatctttctttatgattttcgactctaca

SEQ ID NO: 223185 - DNA, 4282 bp, Cannabis indica
atgtaagtgttgggccaatccaactagttagatttaacgaacaagtcaaagaacacatgtaatacatttaaaccagaacctaatcattttaagattgagatcattgatctatgatcaactaagtgatatttacttagaaatgatattacggtaaatttatcatattttttccactgtgaatattgatccagtttgatgtataaccatacatccaatacaagcttacttttctatttctttggaaaagacattccactgtacaagtgtaagtaaatcaaattgttgattattatatcagtgtaaatctagtgtactgataaatcatgggactaattggtttaattacatgatcttgattattttccactgtgtagacaacacaataatcatgaataacaatgtgataagggttaaatagaatttatatatcaaacatatgatcataaaataaacatatgaagtaagcattacactaaacaagtaataaaataattccagttcttttattgataatgaaattcaagattacattaaattatggttttagttaagacacaaaacccaacaaacttctacttgcactaatataaacaatcagtacatttcaactaatcctagattttctctatgcttttcaaatgcagcttctgtcaatgtctttgtaaatggttcaactaggttgtcttcagtatcaaccttttctaccaacacatctcctcttgccacaaatttcatgatgatgtggtatttcctcccaatgtgtttactcctcttgtggcttcgaggctctttactattggcaattgcaccagtgttgtcacaaagtaacactagtggtttttccatacctggaacaacaccaagctctgtgaaaaacttttttagccagaccagttccttagcagcctcaacgacgactatttattcggtctccatggtagtgtcagaaattacagattgcttgacacttctccaaacaattgttccacccccaagagtgaaaactatcccagatgtagacttcctatcatcaagacagccctaaaaatttgagtcggcatagcctaagggattcaaagtgccacccttagactaacacatagttccttgtcctctttaagtatttcagaatattcttaaatgtcgtccaatgttcctttcataggttgggctgaaacctgctcacaattcccactgcataggaaatgtctagtctagtgcataatatagcatacatcagacttctaattattcaagcataaggaaattttctcatatcttctatctcttggggatcagtaggagattattccttagatagtctcaaaccatgtctagaaggcatactttcccctttggcattggtcattaagaaactctctaacaccttatcaatgaaagctgcttgcaagagagtaagtgatttgttctcacggtctctaataatttggatcctgagaacataattagcttcacccaagctttaattttaaactagatgcttaaccattcctttatgcatgtcatcttcttgacattgttaccaatgactaagatgtcatcaacattaaagaccaggaatactaccacttgataatccttaagttggtaaacacaaggtttatcttcattttgatgaaagtcgtaggttttgattatttgatcaaactttttgttctaagagcgagaagcctgcttaagtccataaaatggacctatttagcctgtaaattttttcttcttgtttaggaagtttgtaaccttctggttgctccatatagattgtctcgttaacaattccgttgaagaaagatgtcttgacatccatttaccaaatctcgtaatcgagagtggctgctatgaagagaaatattttgatggatttgagcatggcaactggattaaaagtatcctcatagtccacaccttctctttgggtgtaaccctttgctacaagtctagctttaaaagtttttacttgtctatcagcacctcttttcttcttgtagacccatttgcatctaattggatggtaattattaggtgcatctacatatttctagactttgtttttcttcatggaatctatttttgaatctatgtcggctaaccatgctttatattcaggacttgccattgcctatttataggttaacaagtcgtcatcaatactgtaacgccctaactattaggcacgctacactaatcaataatgaaaccataatcccttaaaacgggattactagatagatatgcgcgggaaatttaaacttttatctaaaacagaatgaaaattaaacttgtaataactttaaaatttataaacaaaagtaacataatatgggatctcaaaaatattttacaaaatattacaagtccttttcactagccgacctaagcggcaaattagagttacaaaagtacatcactagtagaccccaacctgcttggtctagtgtgacccgaacatgtacaagcatcatgataggtattttctgccacaacagcaataatacaagaagaagaagagagttgcagagcaatatagcagaaaaatggttgagcagccttgaatatatcacctaggagttcgagagcctggttctctcccaaattaattacaagataatcaaacttttcacaccaacaaaagacaaatcctaccccctttattcccaccaaggtatacccgaaatagcacacacacaaacactcaggcctaacaactttgccaccttagcagtagtcaatcccctgaggtgttgaccacattactcttcctattccttcaggcatacacaaacattaagggtggcctatcaataccccccgccccttaacgagtctcaccttgtcctcaaggtggaagtgcaaaaattgatctttgatgacagcaaagtcttcccaagtggctttgctggatggtagattcccccacttgatcaatgcttgtagtggtaccttatgagtgcctggacgtatagctagcacaccgtcgggttctagcagccattctaactcagcggtgaggttgggagggagttgagtgggctgttggtgcggtccgagagcagcgcggagtaaagacacatggaagaccggatggatggtggcatctggaggaagttgcaggcggtaggcaactggaccaacacgagctaccactggataaggactgaaatatcgtggagccagcttctcattgacacgcttaaccactgtacgttgacggtaaggtcttagcttaacatagaccgaatccccaaccttgaactcgagttccctgcatttcttgttggcttgtgtcttcattttctgttgagcgcgatgaaggttctctttgagcaacaccaaggtggcatctcgagcttgcaactattgttctactctggatacttttgtgctagctggttcgaatcgtagcaggggcgaggggtcttgattgtagagagccttgaatggtgtcataccagccgagacatgataggatgtgttataccaatattctgcccatgccagccatttaacccatttcttcaggttctcaccaacaaagcatcgtaagtaagtctataagcatcgattgaccacttccgtttggccatccgcttggttttaagttgttttctgatttatatttttgaggttgcttacttattattcttgtagtgtttacatcagtttctaagagaccaattcccactcctgagatggccgagcgccgtaaaatcctgctgggtcttccatttggattacgattggcagactttcccttgaatgaagccaatctaaaaattgttggcctacttgcctcggatgagtacacttgtgattacaagtttccaatgtactcttcgtgggagaaggtcctagttccagccgatgaagagattatgtggctcgcgtacactatctctagaggataatcccttgcgaagttgaagaaggagcatcccgaggtagttaatgcaggtggtcacccactatgcttagggcagatcgtactttgttagtaacattccaagatagtcgatataatttttatacctggaaccctttcctcatagatcgtataacccataggtttgataattggtacccaaggttgtttgtccaacttagttgcactagctcgtattatgggattgccgagcaatacgggaccaacttggatagggcgagccacccagattcaaattgggatctagatccaataaatacttctaatatattcatgatcacatggtctagggaatttagtaattactatagtcctccttct

SEQ ID NO: 223186 - DNA, 1532 bp, Cannabis indica
ccttgcttggccaaaagcgcaagattaaagtctctaaagtctcgaaatcccatgccaccattagctttgtgagcagaaagcttattccaattcatccaatgaattccttttttagaggaagatcgccaccaaaattggctaatagctcgctcaatatcatggcaaatgccaactgggatgagaaagacattcatagtgtaagctgggagggcttgaacaaccgacttaataagcacttctttacccgctctagaaagaaacttgttgtcccatgtttgaattcgtttatgcaccttatctttcacgtaaccaaaggcggcatttttgtttcttccaatcgaacttgggagtcccaagtacttactattctcagatgcctcctgaatgcccattctagtacaaataatttgtctcatttctggggaagtattagtactaaagaacacagaagacttttcaaagtttacttgttgaccagtagccatagaaaacatttgaagcaattgaagcacacgagtaacttccccatttgttgccttacaatagagaaaactatcatcagcaaataacatatgagataccaatggtgccccattagccacttttattccatggatccacttcttctcttcaaatcttctgatgacggcagagaagcattcagcgcacacaaggaacaaataaggagagatgggatcaccctgacgaagccctctacttggagcaatcggtcccaaagtatgaccagttgttacaatctgatactgcactgaagataagcaaccaaaaataaggcggacccatttatcagcaaaccccattcgtctcaacatagcacataagaagtgccaatcaactctgtcatacgccttacttaaatccagtttcagcgccatatagccatccttgccaacttgcttccttttcaaatagtgcaagacttcaaaacttaccatgatattatctgtgattaatcttccagggatgaaagcgctttgattcaaagatataacctcagataataatcccttcattctattagccaaaactttagtaatgactttagcaataacattacaaagggatataggacgcagctcactcatcctatcaggtttcttcttttttggaatgagaacaatgtttgtgtcattcatcccatttggcatgtattcattacaaaagaaagcacgaactgtattgatcacatcacttccaacaataggccaatatttttgaaaaaatttaggattcataccatcaggacctggtgacttgtctgggtgcatctggaaaacagcttctttgacctcctcatcagtaataggccgaagcaacattacattatgctcctcacgaactgttggattgacacaatcaagcacatcttcccaagttgtagcctcagcagtaaacagcttagaataaaactccacaatgacattgtccaaaccgctatcccaatggcgcaaaataccttcatcatctttcaagcaaagaatctgattattgcgtcttctcgtactagcctt

SEQ ID NO: 223187 - DNA, 1574 bp, Cannabis indica
ctttgatgagttcaatcgaatcatcctggatctgagcaacattggagtaaaaatagaagatgaagatcaggggatcttgttgcttagctcattaccaaaaacttatgaacatttcgtggatacaattctatatggcaaagaaaccttgaccatgacagaggtcaaggcagcactcaactcaaaggaaatgaagaagaaaaatgatgaaagaactgatggcattgcagacagtttgtttgtgaaatccagaagtaatacaagagacttcagaggtggacacaataaaaaaaatcacaagaacaaccagaacaagggacacaatttaggattcaaatccaaagcaaaatccaagcaaggaaagcagtgttactactgcaagaaggaaggacatttcagagatgaatgtagggcactcaaggcaaaattagagagagaaaagggacaagaaagaggtgctgcaggcattatttttgatggttatgagactgcagaagctttggttgtgacaagtcaagaatctggttgtgaatggattcttgactctgggtgttcatttcacatgacaccaaggagggaactgtttagtgacttcaagaagattgagggtggatcagttctgctaggagacaataaagcttgtaagatttcaggaatgggaagtgtattgatcaaaatgaatgatggtcagatcaagctcatacaagaagtcaggtatgtccctgaacttaagagaaatttactttcaattagtgaacttgtatctaaaggctgcactgtaaagatagatggttcaatgaaagtaatgaagggtactaggatagtaatgaagggagacattaagaatggaatttactatctgcaaggaaagacagttgtgggaaaatcgaatttagttgtcaagagcagtgatagagacaacacaaggctatggcacatgagactaggtcatgtcagtgagagaggtctctatgaattggagaaccaaggtattctcaaaggtaaacttggcaaagaactgggattctgtgaagaatgtgtgtatggtaagtgcagcagagtgaaattcactccaggactacacacaaccaagggaaagctagactatgtgcactctcatctctagggtgcttcaagaactaagaccattggaggtgctagctacttcatgagcattattgatggctattctaggagagtttgggtgtttcttctcaagtctaaggatgaagcatttcaaacttttgttagctggaagaaactgatagaaaatcagtctggaaggaagattaagaaactaaggactgataatggattagagtattgctcagatcagttcacaaagttttgtgaagacaatggcattgcaagaaacaaaacagttgtgaagacaccacaacagaatgggattgcagagagaatgtacaagacattgcttgagagggtgatatgtatgctaaagggtgctggtttagacaagaaattttggggagaggcactgcaaactgcatgctgttgtgataaatccaacacgcaagtatacgtatcgttttaacaagtaatactcaggtaagtga

SEQ ID NO: 223188 - DNA, 1451 bp, Cannabis indica
gagccttcataattcttgtgttaaacttcaacatcgacatgagctatccttgaagaccttaagcaaagttagaagaaagagagagaaaaaaaaaaaaagctagccatgttgttctaaataagaggatcacaatatatgcggtggaaggtaaaaagagtgaaaggttgtagatgactgacacgacttaaattgatagagtcaaatctctagttttagatgaatatataataataagaaaacaaataaaattatattaaaaatacaactatgtcctcataaaataaatgaaacagaggttataaaggtcaaagaagcaggaggccattaagcctcttattatatattagatatgtataacgcactcatatatatatatataaaaatacaccgactcacatatatatatatatatatcgactcacgtacacatatatatatttcttcattcatccatatatatacatatatagatgtgttaattgcaatccaaagattcaaagcagtaatgtaatctcacacgtgacgatatgaatttattctttctcaatcaaaatatattttaccacgaataattttaataataaattcatgaacaagagtatatatatatatataagaaaattcttaggtgagagcatcacatttgctctcactcatgagagtattttttcaacccatgatttttaatctaaaggtaataatttggtgtagtttatttaattatcatgaggtatcacacataggatttttattatttatttttaattctcctataatctaagcatgatctaattttacctttttcaaaattgaatatgttagttttgttttaaattctcctatattcaaggcatcatgatctgatttttttttaaattatttctaccaactccctatttaaattgtttccaacaaaattatttcaacttcactctctattcaaattattttcaacaaaaattattcaaataatattcaaattattcaaaaaaaaaatagtatttctaaaaataaaaccaaaagcttcatctatttctgctgccaccacaactgacactaccgaaaccaccgaagccaacgccggactaaacaggttctatatgttaggctccctgtcatttttccatactcaaagattatttcaatttccattgaacttatcatatttgaattatttatagtatggaagctgtaactttggataacatattgaaaactttacaaatgttgggaacatcctacgatgagttgaaagaaagtgtctgtacaatacgatctaatatgcataccctatctgaggagggtaaaaggcgtgatgaggatcgaaaacaatttcaatcaaatattttaaaatgttatcttgggagtatggatgagagttcaaatgagctagataagaagaagagcagagaatttagagtttaaaaagaatctggtatactcattaatga

SEQ ID NO: 223189 - DNA, 2369 bp, Cannabis indica
atggagattatggccatgacaccaacgaatgcaacaatctgaagcgagaaattgaatttttcataagaaataataacccgcatgtgaaaaaatatgttaaaaccgatcaatgtcagagggccgcccagacagataatagtcaagatttactaccaccaccggtggacggacatttacaatcattattggaggcctgagcattagtggagttcaggcaaagcctgggaaaggtacgcccgaacattacagcatgagcaagaagaggtggttctggccgtcaaagaacggaagccaaaagtaccacgggcaggggaacccaccataacattcaatgatgatgattctgtcaagattaacttcccacacaacgacccgttagttgtggaagtccaaatagccaagaaaatggtggcccgaactatgatagataatggagcctatggaaatatcttgttcaaaataccatatgaaacgatggggctccaactcaaagacttaaccccctgtcttcatcccgtgtatggtttcttcacccagagtgttgcacctctagggcaaattcgcctacccctcattgttgggcaagctccaaagagcataactgtaatggcacaattcttcgtattggatattccatcagccttgaatgtcatgttaggctgaccaactttatatgacctaaagctgttacgttgacattccattcatgccttaagtttccgacaaagaatggggttgggtgcctgagaggaaatcaataggttgcccaggaatgttacaaccttgccctaaccaaggctaaaaaggaagtatcctctagccagagttcggacaagggaagaaacattgccaaatagggaaccgcccaaggcagggatccccagcttggataacccaatacaaatgttggaccagtggaagaactagaagaaatcgaaattgacccaaatgttctgaccaaaaggcttaaaattggaaaaggtttgctactcaaagtaaaatcagcattgataaaatttctaagagaaaacctggacaataatgcatggtcacatgaggatatggtcggaatcgatccttctataatttcacacgtcctaaatattgatcctaatttcagtcctgttcaacaaaaaagaagattgttggacaaggagcgagccctagcgctaaaagaaggtgtagaaaagctatgcgactttaatttcataattgaagctttctacccagcctgggttgctaatccagtactggtacccaagccgaataagaaatggcaagtgtgtattgatttcaccgacctgaacaaggcgtgcccaaaagattattttccacttccaagaatagatcaacttgtggatgcaacaccagggcaccaaatattaagcttcatggatgcctattcagggtacaatcaaatcaagatgcatccaccagacaaagaacatacaagtttccgaacagatatgggtctgtactactataaggtcatgccatttggtctcaaaaatgctggagctacataccaaagattggtagagaaaatgttcaaagaccagattggacaaaacattgaagtgtacgtggatgatatgctcgtcaaatccaagaaggttggggggaatatagattacttggatgaatgcttcaaggtcctcaagaaatacaacatgaaacttaatcccctaaagtgcaactttggagtcagctcaggtaagtttctaggatttatcgtcaatgcctgaggaattgaagccaatcagagaagattcaagccctcctggatatgaaatcgccaacaaaaaccaaggaacttcaaagtttgattggtcggatagccgcacatagcagatttgtttcaaaatacacagacaagtgtgttccattcttcaacattctatgaggaaataagcaattggagtagacgaaggaatgtgaaaaggcttttcaggagctaaaaacgcaactcgcaaaaccacatgtgctctcaaaacctctggacgaaaaagaacttggaataaacctagctatcacggaacatgctgcaagtgtcgtattgactagagaagaaaacaatatccaactacctttctattacatcaaaaaagacttattgaagctgaaggccggtatccattgctagcttattgcctattagcaacaagaaagctaagacactactttcaggctcatcctgttcaggtagacaatgaccaaccattacaacagatattgcaaaaaccagatgcctctagacggttgctcaaatgggcagtggagttggtcactgtgagattatctttcaaccccgaacaatgattaagggtcaggcattggcagattttctagttgaatgtacgggtaaagaa

SEQ ID NO: 223190 - DNA, 3122 bp, Cannabis indica
aggaaccacttggatgcaaagatactgcaaatgaatctgatgcatataaagagccagatgaacctaactcccctgatgctgtggtcactggattcaaagaacctctagaagaaactccaagggctaagaggttgagaattaggaggatgagaaaggctcaaccccaaacacaagcacctggtacccctctgtggtagatgccattaatgactcatggcctcaaacacaacctgaaacacagccccaaacacaagcacctagtacccccctgtggcagatgccatccatgacacattgcctgaaacacaacctgatacacaacttgaaatactacctcaaacatggcctgattttgacacggatcaactttctcaaccccaaacagaaacacctgtagaaatacaaccccaaatacatccccaacccaaacaaaaacacctgttgaaagataaccccaaacacaaacaactgatggtgaccttgaatttatagaagaggagttcaatccagccatacagggggaagtggaaagggaacatgttggaccatatgatccaaacagatggtgaaaccaggcaagtgagattcgtgttgtcaatgacgatggcaatgattggttagattcaagagatgaactacacaatgttcacagtgatgatgaagatggtgatcatacctcaaagttggagttcaatcccaaaacaaagaatgatgatttcaagtttgagttgagcatggagtttggtagtatcaaagtattgagggctgcactaaaggagcatttcatacatacagacagggagtatattctaattcacaatgataaatgtaagttcagagctaagtgcaatgtagaggggtgcccatggatgatatatgcacatgtccaaccagatggaatgacattcaagatcactacaataagtgaaatagggcactagtgtgacattgtcttggataacaggttcttttgatcttttattgttattgattgttcattagttttaagtgtttttattcatactgattgttcattaacattatttttcaggcttattgatgtgaattgggtgaccaaaaacttcctagatcagtttaggcaacaccctaatctggaatttaaagtttttgctgaaatgaccaaggacacaaagtattctaaggtcacttcatggaaattctacagagccaaaacaaatgcaaaagcaatacttgaagggtctgtggcagaatagtatgccatattggatgattacttcaaacagattttgaacaaaaacccaggaagtacagtcaagattcaaatagagttaagggatgggagaaggatctttcaaagatgttacatttgtcttcaagcatgcaaagaagggttttacagaggttgcaggccattaatagggctggatggttgcttcctcaaaggttactgcaaaggtgtgctattggcagcaattggtgtagatggagggaattccatatttccgtagcttatgcagttgtagagaaggaaactactagcagttgggaatggtttctaacattattgaaggatgacttggcaccaagggatacaaggacactcaccatgatgagtgataggcaaaagggtcttcaaaatgctgttgagtctattttcaacagccctgacacaagattctgtgttaggcacatgtactgcaacttcaagaaagacttccctggcctattactgaagcaacttgtgtgggcagctgctagatcaacaattcctgctcattttgaccagaggatgaaagaaatcaaggatataaatgaaggagcttacaattggttagcagccaaacaaaagtcagagtggacaaaggcatacttcaaggaaggtgttaaatgtgacatgttattgaacaacatgtgtgaaagcttcaatatggccattatggatggaagggacaagcccattgtcacactgttggagacaatcagaggttggttaatgtctacttttacaaagagaagggaaggcatacaaaagtggaagcatggagtgcacaacaacatagcaaagcttgtagcaaaaaatgctgaaattggtaggaagtgctctgtcacaagagcaaatgctgttttatttgaagttaaaatgtcagaagctggtgcctttatggttgatctggacaaacatgagtgcacatgcagaaggttccagctcactggaattccttgtggtcatgccttggcagccatttggtttgtggccataatgaatggggttacatacatagttactacaaaactgaagcttatgcagcaacatatgcaggcacaatttccccaatgcctagcctgacaagtgaccaaacaaaggccttaatcctatattccctccttgtgagaataatcttcctagcaggccaaaaaagaaaggagaaggggtgctgatgaaaaagatccacctgcagttgggagaaaagccagcagagtaggagcagtcatgcattgttctaaatgcagaaaaactggccacagagccctaagatgcaaggaacctataccagagaagccaaaggagaattgatataataattgatttgccaatttcattgacttttgcatttgtattttgttttgacattgtttatatgtctatgtagtctcatagtctcaaaagaatgaatgaggtaggccaccaattcaaaatccatatgtttcaacactaaagaggaggaagagaagggagaaacaacttgctaaagatgctaggcaaaggggggaaggttcaaggtcccagcctcggggttgattgtcatgaagaagtttgaaattatattttacattaacctattgtaatagaaactagttttagagaacttttggatatttgatgtatatgtgcctttcggtgatcttttgatcaatgcaccaagcacaaatagggccttaatttatatttggctcaatgtgaattgtataggtgcattttggtgatcttttgatcaatgcaccaaaatcacaaacagtgccttttgctaatgtataggtgccttttggtgatcttttgatcaatgcaccaaaatcacaaacaatgccttttgctaatgtataggtgccttttggtgatcttttgatcaatgcaccaacaa

SEQ ID NO: 223191 - DNA, 2974 bp, Cannabis indica
ttttgtgctggtaaaaagtattatgggaattgtgtttataagacttgctatgccagcgcaaatatgagttgcgatagtaaaaatatgttttgccagcataaatatgcgctggtaaaattatgattcttttaccagcacaattcgcgagatgtactgggaaaaatgacttttgccagcgcaattataaactgcgctatcaaaagtgacatttcttatagtgaacctacaatcaaatatacgtaaaaatatttaaaggcttataatacacaaaaagaaaggacaggaatatttcaatatatgaatggatataccacttataattaaggacctttattgtcaattggacaataagctacaagcatatatttgtcgttctccttgtacagctgcttttctccccttctcagctgaaaatatatatgaacaaaaatctcatattcttgaaaacgaccaaaagcttcgatacttacagacccaaccaattaaaagtggagaagaattatattagtggtaaagagaaaagtctatccatagatgtaactcctactctaagcatatgccattgcttcctaggtttattccatgatctttctactgagtctagaataatattctatataaggatccataatgtgttgcatgaaacacacactgagatcatagttggagatgaagaaaagaggtggtatatataatctttaagcaaaccagttatagggcttctctctcttggcacgtattttaggatatgactgatatatctagcaatatatagcaatgcatgtacatctacgtacaagcttgttactatcctgtactacttgccaaaggagagctgccctatgacagctttagcttattactcatctattaatttgttccattacctacacggtgatatgccatacttaaaatttgagggtaagtgataacttttaattatgtcactatctaaggtatatatgtttgcagtataattatttattgaaaactgtcttaagattcaaatattataattagtagtgtgttttattcatgtaatcatgcatgtcgtgcgctcaatttggaaactttagaataaagaaataagttaaagaatggtccactaattgacatgcatgttagaatgttcaaaaaaataaaatgacatgcatgttagatattatcactgtccttaatacatcaaatctatatacccgtagatggttacgttagttttcttataaaaagatttattttaaaaaattgattataattattaattagttaaaaatttattattatatattttattattattttttatacatatcactttatatattactttattagattgaaaatataattaagtgtcaccattgaaataggagaaaggatctcttctatccaaaaaaaactcattgtctatccatatatatatatatatatgatgatgacatttgagagagagatactgaataagattttaatgtcaaaactagatcacctatagctaattatgatacacggaattgttcagagaaaaattccttgacttgaaattcaatatctcgagcccatctaaattttaaacatatcccagaagtttctacaaactgataatatacttgtacacaacaagtttttataagagtctgcctacaaaattataaacacacattatagagtaaaaaaatattatggtcacatttttcatatttttcagtaaaaaaaacatttaattattaatattaatttttcaccgatcaaattattcagcaaaatagaatatcaaaatatccctatttatatactaggtaagaattgcacgtgtcatctaccagcatatacttttgtaacttaatgcaccagtttactaaattaggcaaattgtcgtgattttaatgaaccgcttgtaatgaaccgaggagataagatttccacttttaatttttctttgctttctttgccgtcagttttatttatagcgtcattttattgtacgacgtaaatcaatatttcaaattaaaagagaaggctacaattttatttaaaatatatcataattaaataatgtataaatattaaagaaattaacaaatttttaaatctaaccataatttttaaaaaataaaataatcaattttaaaatttaaacctcaaaatatcaaaaattaataatgatctattaaaattaaatattattaatttaaaattttgatagttaggtttaaatgataaaaataatattttatttgatttttagggtttgaaattgagaaaattcgaaatttgtggaaaaaatccacaaaattcgcacttttggtgcaaatctcccagctgcccatgaaacaggctgcaagcagcccattcgcgcgcgggagaggtgttttgcagccttgggtgtgcggtaaatacgggcactgcaaggtgtcactgggcggagttatagtgtcctgggcgcattgggtcgtgtctgaaggcacctgaacaaggaattcagccaacgcatgtctgaatccgtgtgcgtctcccaccttgtccgaagtacttggtgcgtgcgagcaccatacttcgacacccatggcatccgattttcaaacaaccataacattctcaatttttatcggaattgagttctgtaaaaactaaattgcttaatttttcacaaggaatccaaataaaatatttttagaacaaaaataaaattactttcatgaaaaaatttcgtaaaacacattcaatcatcaaataacacataaatcaacatgaacacatccaaatcaacatacaaacaatattcatcgttttaaatccatatttcataaaagtaaattattaccatggctcttaggcgagttgttggaaatattttaccagggtctagatttactaaaaagtatgttgattaacatcctaaatatgaattctctcatacaatggaataaacacataagggtttaagaaaaccttacattgattgtagcagaat

SEQ ID NO: 223192 - DNA, 1859 bp, Cannabis indica
ggaaaaccctatttttgtagtagtattaagcagaatgtaacatgatgaatgttattccaaatttggtaaatactattttggaccctgtattttgcaaaagttaccaattggatcatctgttttgttaaatgactaaatagacattgtattttctaaaattatacaaataggaccctgaactgatttttgtcaaaatagaacttaataataataatctgatttagagatgttatgacaaaactagttatattttctgtatctatttgtgttagaaattatcttaaagtcggttatattaaaataataaaattgttgaaaattgagctaaaggtcctatttttacaattttggaaaatatagggtccattttgtcatttaacaaaacagagggtccaattggtaacttttgcaaagcatagggtctaaaatggtatttacccttccaaattttttccacctgacgtggcatgtccacatgagccaagacagagtacatatggaatacagctttgccagtagcaagatagagtctccatacaagatatggtaaaaccgtcaagcagcaactgaaaggagtgaagcgagccattaaggagttgtaccaacatgtttagccagccaagagaagcctataggccagcaagggtgaatttgtatggccagccaggatctaggcataatctggtcggccaaaaggtgactttcatagtaacttggtaaattagtaacattttagtttagacttcaattaaaaaataaaaaaaatgttaaattagtaatattttagtttggactttaattattaaaaatgataacttggtaaattggtaacattttagtttagagtttaattattaaaaaaatagtaacttggtaaattagtaacattttaatttagactttaattaaaaaaaaaaaaaaaggtaaattgaataagttagtaaatttaaaatgttaaaaattaaattaaaaattttaactaattggaaactttggaaacttgaaaataaaaataaggattgctaattttaagaaattgaaaattttaaaatgaataaataattgttaatttaaacaataagttaaaaatttaaaataataattttatttaatttttaaaaattggtaaatatttttacttagtaatagggttatattaatactattcataatttttaaattgataataaaaggttgtaggtggtaaaataaaatagcataagacgttgtaagatagtataaataaaatttttatcttgatttgatctctttggttataaaccaaaaataaaatagaacaattctatttgtattatcacctagtgataatttttttttcacgtgcacaaatttttcatatatttaatttattcattggcacgatttttaaatataatggtaattttttttcttttttatttattttgaattgacacaatgtaactagtagatattgacatattaaaagtgtattgttgtgtagttagtttttgttgatttaattatgtattacccattataatatattattctattttaaaattataagatattagggtaatttgcagcataacctccttaattggtaagatttttccaactaacccccaattctaaaattttggtggtaaaacctcctaaacccaagttctgctagcacttagccctttccatccatttttggctgttaactaccatggtggaatgtctatatgtacacagtatacacgtgacacaattttattggtcaacgtaaataaatatttaaaaaaaaaaaaaaaaattaattattttaaaataaaaaaaaaaaaaataaaaaaaaatactttttctttaaaaatttaaaaattaatttaaaa

SEQ ID NO: 223193 - DNA, 2237 bp, Cannabis indica
agtgcactaacagaaatcaaattgtacttaaaattgggtacaaacaagacatttttaagagtcatatgagggttaaggaccacagtaccaattttgtgaatttttgcttttgaactagtaggtaagtggacagaaagatcactaggaatagattcaatagaaaaaaaacactcaacgtggcaacacacatgatgtgttgcaccactatccataatccaataatacctgaaaaattgtttatcacgactttgtcagatgtagaggcattgttggctgtagttgttgtgctaacattgatattagttgtaggcattgtgctagtgtaaactgtgtgttaagattaggtgttgaagatgtaacttgagaagcttgtgggttattgttaggagtggtgctcatatcagattttcttgtattgttggaatcatatttcttattgccatagcaaggaggaaatccgattaagaagtagcatttatctttgtagtggcctggcttttggcaattggtacaatgtgggcgtggccttttattcttcgatgctgcattggctgcaagagctgtttcttggggagtagaggagctggaagcagccatggggggaagcaatcgatggcctaaagacctttgtctttcttggttgattaccatagaaaaaaccttaatcaaggcagggcagggatcaagaaggagtatctgatctcgcacagcctgatatgaatcatttagacccttaaggaattgtaatacttggtcatgattttgatgagccaagtgttgtgtagcagcagcacaagtacatgggatgcaggatctgagttgatgtatttcatcccatatagctgtgagttttgtaaaatatgcactaaccgaatcatctccttgattgagataggtcagtgtttcattcaattcgaaaattttgggaccatttcctcggttaaagagattatttaacacggtctacatctcatgagtagtatcaaagtacatgatgctactcttaatttcaggagaaaccgaatgtaaaattcaagacatgacaagttgattacaacgagtccaatgatcaaaaagaaagtcattttcaggaggttgaagaagagtaccttctaagaatggagtcttgttttttgctccaatagagagcttgaaatctcatttccaaggttggaagttcttatccgagagaaccggagtgacaagagagagaccaggatgatcagccgtagtgatgtagtagggagatcgaatatcttcataagctggtctgtcgattagagttgatcgaggcagaataggaaaagattgatgagttgtttgtggagggttgtcagcggaagtgttcgatggtggaggagccattggtgcttcaactctggaaggatcatcagatgttgttgcacaactgctggcccgagtacgcaccatgatctgaggagaaagatcttgattcttgaagctcaaagtggactgcttgaagctttagtttatttcatctaataccatgttagaacagaggatttaagagagaggaaaagattgttttattgatttgtatcttatgaatattacaacagaaagaatacaattatttataggcaaggaactcggcttagaagccaactaaaccttgtaacagaaaaacagaaaaaacagaataaacggtaaaaaccagaaaaataacagacttgtactaaactaactcttaacaaattgggatcaataatatctttttttattcggcgctgatttcattcactaaaactaataagactaatgaatctacaacaaaaactccaatcaccttcatattattacactatttttgtccaataatcttagccatatgatatgatgagacacctcacctcaggcctctaaagatttactctttcttttcacaaactcaaattttgtgataagataaagattttgctattactttaacaagtaacttaaacaataatacaaaaaaactgaattggataacaagtaagaaagaaattgtagtgactattaaagtgatctaaattttattggatattatttcacagcataattaattatataataagagtaattagactaattattttaaggctttagaaggcaaaacaagaatctctggacaaaaatccatcaaattttccctttagcatgccttagtcaatatttaacattaagcagtagtaaagaagccactatataccaacattggttagttttgctttaaa

SEQ ID NO: 223194 - DNA, 1903 bp, Cannabis indica
ccaatagtgtttaaagaacagaaccgacataccatcaggacctggagctttgttactactcatggcaaatagggttgtccgtatttccttgtgtgaaggctttctaatgaggtcagtctgatcatccaaagacagacgatcccggacaaggccattacaattaggagtaataacgttttcaggtcccctaaagatgccttggaagaactccaggaattctttcccaatgagctcccttttggttatccacacattgtctttattaaggatgctttcaatggcgtttcttctacctttgatagaagccgacaggaaaaagaatttggtacatttgtccccttccttcagccaggaaattctagccctttgtttccaatacacctctttcctagcccgggcctcatttagagagtagcgaagctgctttcccattccctaatctctagatcccacaggcagcttctgaaaactatccagtcttcttttgagatcacggatttgggcatctaagttaccaaactggatctattctaatgcataagagcaacctgagtagccccaatcttcttaaagatcctggccggtgcccaaggaaaagaacagacttccaagcaaaatcaaccacaagtttgcttcgctcatccctagtccaggcttcctcaaacctaaaatttcttctgacgttctcccccaaaccaccagaatacagacacagagggcggtgatccgagttggcagtctggacagaacaaagaacgactttcgggaaaagcctaacccaatcaccattagcgagccctttatccagggccgacttaacatgattagacccagaacgatggttgtcccaggtcaacctgtctccctggatgggtagagaaataagcccccgggcattcaccaaatttgagattacaggaataaactggtctctaccttttgatcccactcgttcagaattactaaggacaaagttagtatcacccaagataagccacggaccaccgaacctatcccctaccttcattagattctcccagaaagctttttttgcatggaaatacggggggccataaacacaggacaagagccaagggtgcgagggggggtccgaaaacactaaaccagaattgtgattgtgggagcactcaatacattcaaactcaaaaccaaatttccaagctaaaataatacctcccgcagtacccacagccggaacaataatatgaaaataaaaatgaagggagttaagaatacgtaccaaagaagtagcatcaacttttagctcggtcagaaagatgaaatccggagagcgcgaccgaatcagggacttcagctcacgaactgtagaggtctgccctaaccctctacagttccaagcgatacctctcatggctcctgtggaggagttgtagtctcctccacaggggtatgagaacgagccgacccaaaggaaccagattcttcaaccacaaaagtgccctccatcggccttgatgagatcacattctttcctttcgtcttccactcgtccgggccaataaaatcgttattggaaagggagacctcctctgagggctcatcttccgtcaccttagtatcattagcgtgaccctccggatcccaagggaaatcacggatagcccagggatgaggacgaagaagcttccaagggcgtgaacaaagtgatgtagaggcctcatcaaactttctctttttgaaaggagtagttcgttcattaacctccgaggtagtaggaaccccaatgttacctccaattgatttaatctcatatagatccaagttcccaaatttcttaagctcttgtaaagtagtgccttgagcttgaaaaaaattagtcaaagctaatttttcatcatggtggaagtttacctcttgacca

SEQ ID NO: 223195 - DNA, 3478 bp, Cannabis indica
aaccatctccacatatgatgttgcctcatttggagtaatcaccaggtcgtgtctaattttcacatttagacctgccagatatttctccttcttactgaaatccgtaggcataatacccaaagctaacttggccagacgattaaattcgataaatcctttctgcttagcattgcaaagtgcctcattataatacttggcgttgaataaatctcaaaactcttcccaagtcataacagtaatgtctcgggtgaggcacatcaattcccaccacacgagggcgtcttcttggaactgaaaagtagcacaggtcaccaaatcatttaccacaacccccatgaaattcaaaattatttctatcactatgagccactgctcaaccttcattacatccagacctcccaagaacactggaggtgcttgcttgcaaaacctctcgtataacggctccatacgcttgccagcaacaggttgttctgctactggcaccgcaggactaaaatgacctgagcttgcaatggaggcactacaggaggaccttgctaccttaatctcagaatttcttcatctttttggcggatatgatcttacattttcgcgaatctctgctcccaatctagaggagcttgaggtgggttcacatgtcgaccaccctggaacctttcacggccgcgaccacgaagattttggggaatttgatttccctgatcgcctccagtctcaaccctattacccatactccttgtatttttctgggtgtccatttaataagacttagcctgcgaacccataagtcaggcaggtcaggcagcgatcacaaaagttaatcccgctcctatagattttaaggcaacgcattaaaataaacaattataaactaatatgcttcctaacatgctttaccaattacataaaatactaaacaagtaaaggcttactgaaccgtgagctgagcttttctcttatgatgattgtacatacatgtcttggcgatcttcggtagataaacctggcagctctgataccaaaattgtaacgccctaatactaaggtacactacaatgattttttaattacagtgctatctttgctaatcaaagaaactttattaaaaattgtgtcgaattaagacttcataattaactatgaaactttataaactttgtatatatatttacaaaagtcgggatcccgttgttaaactattttacaaagtattccaaaatacaaaagttaggtcgcaaaatgaaaacccctgatgtcccgagacggaacactccagatcgcgccaccatgacttgtacaacatcacccgagctcaagctcactcctgttcagccttcgcctttcctttacttacacatgaaagtagaactgtgagtcgacagactcagtaagaaaagcatataacaaatcatataatattgacttgtatctaggcgcccatatatctatttacaaggctaacaaatgagtaagaatattcttaactaagatacgattatgtaccactgtaccaaggtagggtatgaactgtaccccgtataagtgttgtaccacatacaccatgtacctactcgtactaatgtagtaacaccgtaatgtactcttcagacatcgtacactttaccaatgcactctgtaccactactgtacaagtgttggtagtgtacaaatcacaacaagcatgcacatatatttcacacatacatacactcgcacatatatatatatcacatgttatacaatattcttacatcgtttccgaattcacgtgagttggttgacctgaacggaaagtctcgtgttggatggatgccctaatcacacaacataaccgggtaaataactcggtaaaaccctaatttgagaaacccgaacctccaacttaaggttctactattactaaccaaaactacaataccctaagaaacatggaatcacctaaccaagactctgaaatggacatgaatcaaatgaattgtttcggggaatctgccaaaaccggttaactggttttacaaatcctagcaaacctaggtttcaccaaataattccaaacctgctcaaaacatgtccaaatctcaccaaactctccagaacacctataaagaccttccacaatataatccaagcaataacaccaagagaaaaactcaaaatccaaaagttccattaaagactcaagtttgagtttccaaacccaaacatgtttgatttcttcataatacaccaaaatcatcaaccaggactcaatatcaacttaaaatgaacctagaaactgaattccaaacatttctaaccctaatagccactaaaactcaaaattgcatgccataaccaaatagtacttagagaaatcaagaagtaagagtttctagggcttaccttggtcagaacttcctcaaatccttgatgaaaacacaaaaatcagatgagaaccctaagtgcttcccctagttttgccttagccgaaagagagaaagagagagttcaagaaatgtgtttttggttctaaatgttctttgtcttctagccaaatctaatagtcaactagtcaattccttttgcaaataataactgaataataattctagaaaatccactagaggacatactccaccaaggtagcagaattaccattttcccttacttacaccttaagtaatctaaaggcttaggggtaaaatggtcaaaacataacccgctcaaacttggtattctacttatttccaatactaatcccactactaaaatggttctaaacttacccatgtgatttaaatagccatccatcgcatttttcattgtcgccgagcaaaaattgtaaaaataacataattcatatatatctcaaataatacacttagagtttaataaaatctttgaaactgataaattaaaaatctaatgcccatttttaataatgggacccacaattaattaaattaatagctatttagagaattaccaataactaacgctaattgcctttactaatccatattctaaaatgtggtcattacaattaagtacaagatgactactattgcatgtggtaccaaggtcgtacttctgttaagaacgttcttgatcatttattaagccttgtggataggtttgtgggtgcctaaatacaagtcggtaatacatatgtgttatatatttttcttactgagtctgttgactaacaattattgtttacatatgtaggtaaaggaaaggccaaggctgagcaatagtgagtccgaagctcgaggatgattgtacatgtcaagatagtttgacctggagggtttagtcttaggacaacttgtgttttattttgtaggcgttgtgcgacatgattataaaatgtagtttgaacatgaatataaattttaaaagcgggatccaagatttttgtacggatatatgtacatagttataaatgtttaaatttttgtaaaaaattttaaatttgacacgttttttttgagaa

SEQ ID NO: 223196 - DNA, 1634 bp, Cannabis indica
aacttgttgactgtaaggtcttacgcgagataaagatatataaacaattgcctcgtgcattaacgagaaaccatacgacaccagaagtggaaggcgaggcatcaacctcgctacgcatgaagagacgtagacgagacatgatgattgttaaaatacttagcatataacatacattacataaactaagtataacagtcgagtgactcttaataaagaatagcgaggcatccatcttgctataggagggcacactcatggtaccttcactaattagctccagacatcttttaatgagatcaaaagctccgtcgagtcagctctctcagatagaagctgacattcaaatgatgttgattgcgaaagttcaccttgtcaccgagaactacgattgttagatggagtgttatgtcttcaagcacgaaaacgacaagatttatattatcaacctcgaaaagacatgggaaaaactccagctggcaacctgggttattgttgctatgttcccagtgagatgtcctaggacgatacgttttacaacatatttaacacacgtatgcattgacccaataaaagcaaaccaatcacaattgtgtgattttcaaataacaaccgcatttattttacgtgggttgtaatcaaatcccacaatttcaggggataattgttgtgagatatcagtccaatttataattaactgccctctgatgtaactataaataggaccaaattacactaaataagggacgaaaaattcattagagagaaagcccaagaactgtatcagaaatctaataagattgactcgtgaactatgtagaattttaactgcaaaaccacgtaaaaaatctttgtgttcttacttttttttactgcttctattttctgtgcaaatccatcacgatttaggcttaaatatagttaacgaaaatctgagttaacaattataattattaaacaaataactttggcatttataggattgaattagaaaatatggtattattgaaagaagaataaataaaattaataattaggttgattttgttcaagatacttaattatttgtttttatttcaagaaatttaattaaattagaaaatatattacagttgaaaaataatttgttaattaattttggattaacataaattagaatattttttaaaattttaaattagaattaataattaagttaattttattctagatacttaattatttctattttaatgaatttagttaaataaaaaattatatataagttggaaatttttaatttcaaattaacttaaattagaataattttcaaaatatattatattttattttaatagtcataataccacataattttgaattgcatttatttttttaaatgttgatatttcaaactttttctattttgaaaattatattaaagttggaaattaatttgtttaattaattttaaatcaacttaaatcaagtaattttcattaatgattttattaaaataaatagactaaaatttatttttttaattagaaaatcaataattagtttatgaattgtttagatagatattttttaggtagacttttggtatttttctagatatatttaattaaataagaaaattaatatttaagttgatt

SEQ ID NO: 223197 - DNA, 1580 bp, Cannabis indica
attcaatatactactttttaccttttttcttggacttttctatataacgatgaactatgaattaatgcatatatatatatatatgatttttgttcattaagaagacatatatatattgatttttagaaattttgagggggccaaggccaccccaactacacacctacgtccgcccctgtctgttatgttgaggtgtcattttttgttgtttctgtttgtttcagctgtttctctctaatagctttgtattgtatattaatagagcaattgctcacaataatgaatcgatcgaccattcattctacacatttctgttattcctttcgtttcaacatggtatcaagccagttattttttttctgctttcgcttcttcgttcttctctttgcttcctcttcgttgtgtttctgtgaagctcttgctgttcatcaatggctaatccagtcgttttctcacataaagtatcagtcaaactcgatgacaataattttctgctctggcgtcctcaggtgctctctgccattcgtggtcaccgactttcggagtacatctctaactctgttcaacctccaccaaagtttctcaccaacgacgatcgactcaatggaattgtcaatccacgattctccgaatgggaggtgcaagatcaagtcctctactcatggcttctttcttccatgttcgatggcatcttaactcgcatcgtcggagctaaaacctcgactcaagtttggcacacattagaggtatacttcgttactcaaacctctgctaagatcgatttctttactaatcaactgcagatgtgcaagaaaggaggcctctcaatcaatgaatatttgcttcgcatcaaagctttagtctatcgtcttggatctgtaggtcatcgagtcactgtcaaagaacacatttcagccatcttcaaaggccatccctctgactatgatactttcatcatttctgtcaattcaagaaacactgattacaccgtggctgaaatcgaatctcttctgttatttcaagagcatcgtatggacagcaaccacaaagatcttgattctgttaatctgacaactaatcgaacacctcgcggtcgtggaaactctcctccaatgtccaattcatctacggatctcaagcaacaatccttccctgtgaaaggaggaagaggcttctggaatccttatgttgttgctcctcgatccacaggtgttctcgctcctcttggttcagttcctttaggatctaatcgaactatgcaaactcttgcattcgcctctggaacaaaacctgtttgtcaactatgctctcgcacaggtcatatagcttcaagatgctatcagcgttttaacatcgagtttcctggagttggtgcagctaatgtggggtctcaatctatcaacatagccactgctgagtctttaccggatgatgcctggtatccggattcaggtgctacaactcactgcactgccgatgttaataatttcactcagcaaactccctatcaaggtacagatcaagtccatatgggggatggtactagcatcaccatacagaatgttggtaaggctactttc

SEQ ID NO: 223198 - DNA, 1560 bp, Cannabis indica
ggtacaaaggtcgtacttttgtttaggaacattcttactcatctgataagccttctgattaggtgtatgggcacctaaatacaagttagtaatatattgtaagttatatgcttttcttgctgagtctgttgactcacagatactgtttttttccgtaggtaaaggaaaggataaagctgaacaacagtgagttctgagcttggggatgattgtacatatcgagatgatgtgacctggagagttcggtcccgagataacttgggcttcattttgtagtcgttgagcgacatgtctgtaaaagctatttttaatgtaaagtttaaaacaatgggatccgagttttgggtataaatatatgtatatgtttataagagtttaaagttaaataaaaattttaatttatcacaatttttgagaaaatcctttgattatcaaaggtgtttactgtaatatgaaagtcaatgtagcgtgcctaagcattagggcaatagattacatgtcaaggtcataagaagatagctaggattaaagaccgtctggttgatcgcacaatctatgataaaaagtaataggaccaaacaatagtaatattcaaaaatggagggcctataggccaaaagtacgtacatgaaggccctgaggctaaaaataagtagtgttcaaaaagtaaaaggcctgtacagaacatgaaaatactgtctatactataaaatcataatgctaaaaactaataaattgaatctacatgtgtgtaggggcaggtggagctgaatcaggaagctgcaagatctagatcgccggagtgtggaccaaccatagcctccataggctggctggccacctagtcaaggctccggccgaccacctcctaagcgggtgggtagccatctcctcatcatagtgcctcgaggatgacccctctggctggacagcagttcggtccaccctcaactggctctcgtacaatgctttctgttgagccaatgtgctatccagaaggcctcatcacccatgtattaaaggtcagcattggagttgtgcagcttgaactcataaatgagttctaaagacaagttaacatactcgtcttatggcctgctggccatcaagagctgttctcaacttctactcagatcctatgagatcaacctctaacttggagatggtagcagcctgtgtggtgttctcttccttcctattaccaagcatagtctccaaacaaaaaatcatgctccatttccgcaggtcgagagcctccatcttagatatagtctggtccctcaccagaagggtagcctctaagatcttcacctactcacgaagagcactcgaggacccccgggagttgtcacgtgaaacgctcaacttcatcaaggcttgaaagcaaacaaggtcaaagctagtgtcaaaacaaaaacacttctcggctaccctttctacaaggtttctatggccgtctagatccctcaaggacacactattggtcggccaaccccatgcaacatcactgtggctggctagcctgcaaaaatgccagaaaaattagcataattaagtgtg

SEQ ID NO: 223199 - DNA, 1449 bp, Cannabis indica
atctctccattaatagtgaaagaaaaagtgttggtagagagacatgtcatgataaggctgatccattgttcagcaaagcccatttttctcataacctcttcaatgaagcaccattcaactcgatgaaggccttactcatgtccaacttgagagaaacaattcctttcctgccagaagttcaagtcttaatagcatgtacgagttcaaaggccaccaggatgttatctgtgattagacgattcggtaaaaaggcactttgtgtctctgaaatgacatatggaaggacaaccttaaatcgactaaccagaaccttggtgatgagtttggagataacattgcaaaggctgatggggcggtagtctttcatagtccgaggctttttaatctttggaatcaaagttattatggtgcgatttagtttggtagggtcagccccatcatttagaactcccaaaatagcttcagcaactaaattccccactaaatcccagttttgttggtagaacatcttggacataccatcaatccccggactcttatcaggactcatgtttcgcagtgcatcttcaatctccgctttggtgaaaggcttggtgagatcactgttcatttcaggcgtaaccatggcaggtattgtttcaaggacagcagacaaagcctcgacatctgaatgtgaggtctgaaaaatgttctggaaataatcttcaacaaccgaaaccgggtctgaatgagctgtcattttttggccagaatcattaaagagaaacttgattctgttattggattgtcgtgctgatgctttagcatgaaagaactttgtgttccgatcccccaaattcatctaatcgacacgtgagcgttgttgccaatacatctcttcttgttccaaaaggtaatcaagaattgattcagaagctttgagctcctccatagtgttggtagatcggataacagagttgttcaaatctgtcactcgggtttgtgcttcagcaattgttttcttcatgcgtccatatttcctaatgtgtcattgttgcaagttggtagcacatgagtcaaggttgtgtaacacattgttgattgaagtttgagaagacttatgtaaccaacattgagaaatgatatccctactcttagcatcaaccaaccaaagtttttcaaaacgaaaccggctcttgcgtttgaactgctgtgctggtgtattgtgagaagtgataacagcagctatagcacgatggtcagagtggaaataatccaagtgaacaatgtgcggcaccacaaaaacattatcccaaagattattggtgaaacaccagtcaagacgttcctttaaagaggttgctacagttcggttcttgatccaggtgaatgcatcacctttaaaaggtgtatcagtcaaatggcagtgatcaagagaggctctaaggtctgccattaagcgttcattac

SEQ ID NO: 223200 - DNA, 2316 bp, Cannabis indica
gatttcttttacgtttactttgcacatttattttctgaatgcaagattaactttgctgtagaagatatgtaggaaaccctaagtttagaaactctacaattatcctttgtaacgattcatgcgacttcatcattcataatgatggctttttgatctgcataatgcctgtctttcattttgcttattctaagcttcatgaaatttttttaccctaactcatgaaaattttgaacttctgagttttgactttttgtcgaatgtttttattctttcatctgttgagtactcctagtcggcatatttccctatttaatgttcgatatcctgaccaaacactcatctcgcgtgttgtcgtttgtagatgacccaggtgagttttggggaagcaaacacaaaacaggacctgcttcaacttttgcacgaggatcatcctcgtctttgttctagtccgccctcttcaagcgacaaacattttgatttaacttcccgtctagccaaagaatgatggcttgtattaaataaaaaatgcgtaaagccaacgcatccgatcctcacgtggcctagcatgccaccatgcccaacgcagaaatggatccacccgtgcaggaggagggggatcatgaagggacgctgaggtccaagaaatagaggagctgggaaatgtctgtcctggtagtccctccgaggaggaggaagtggaggaggttgcaccaccaaactttgggggatacaatgaggctggggagatagtcgattctgatggcgacgtcatggtagagggcgtggattatgccactgaggaacttactgccgcggttcctcagaggaggcagagtgcattggtcgctaggtgggtgagccttccgtccaaggtcactaaggcacgcttacgggatcttgatcagggcggctacttgggcaagttagaccattacatccccgcctataacaatcgagccacaaaccctgaaaggggaatgtgtgcttggtcgggtgctcatgccaaccaaggggcatttctacctttgcacccatactttaggaaggtggcagacttcttccgcctctgttcgacctaattcactcccaagggcatcaaatatctttctgccctgtttgttctctacgcctcccaaaagtgggatatgccctctccccatgaggttagctggttttttgacttgaagtctacccccaagtaaggcaggtcggggtacttctacttctctcagccagactacaagtggttgatgggcaccggggataaggccgttagcaaaattgggaattttattgatgagtacttcatggtggatggcatgggcaccacctacacttggttccagcaaatccctgtatatcacccccacccttcactcttgctcttagggatagagctcaaaggcttgctcagctgctgggtactacccggaatatcactttgttgacctctgaggacaaatttgtggagtacgagctctacccaaaggatttcgtccctcagccggtgaagaagaaaaagaggaaatccaatgctggccagggtgaggagcccatcaggaggatgaactcattcaacttaagtgtgaggctaagttgaggggaggtgcgggggaaaaacagtatgctcattagcctctgaatccaaaacatgaggctgaggaagagcaggtgacgctgctcaaaaggaggaagaaacttcccaccgagcacatgcctattgaacatgcaattccaatcaaggagcccagtctacctgctcggccatccactcctgtattaggaaaggggaaagtcgtcctagcagagataagagacttgtcaggtgatgatgggctttcaagtcttgctcgggcaaatggttcgcgaaatactctgtcttgtttttaatcttcttgattattatgctttcatacttttagtacttttctcttaaccatgttgcttttatctcgtgcagacatgtctcaaaagatgcttgaagctttgaagaaaagagttgggggaagttcaagctcgtctcctctggccaagaagtctagaggcggcgagtcaacaccgtccagagagaaggcttctgttgaagctgttatcaatctattcaaggagctaaccgcggtagacccttctgctccgaaaattccaagtccaaggtctctcgaggaggaagctcagatagtttcgagcagtcgaaggacgaatctgagctcgtaccccacctccatcagtgcatgcggcgaccaaaagaggaaaggagatgctcacccactatatgaataggtcggcccctgaagtgaatgagcaactggccggagc

SEQ ID NO: 223201 - DNA, 3095 bp, Cannabis indica
actaaaaaagattaagaaattagaagtttgtgtcttaattaatatatatcctatattctaattttttaaaaatatatataattaagtgcggattggattggattggatcagttactttttgaagtcaaacaacatccaatccgcgcgtgcggatttagatttttcaatccaatctaatacgcgcaagtgcggatatccgcattttgcaaattgaattggattggatcgtgcagattagattggatcgaatacttagtgaacacccctaggtcaatgggttgactgggagcatgtcttgggggacgtcatgttggattatttttccaacattttctcatcatattcagtcgagtgacaagaaattgttgattgcattccttcggctattacgactgatcataacttggtcttgttgaaagctatttcaaatgaagaggttaaagaggcgttgtttcaaatgcatcctaacaaatttggggcttgatggtatgactccaattttttatcagaggttttgatcagttgtgggtaaggatgttattttattagttaggaatttttttttgcctcttgtgtgatgccagatggatacaaacttggtccttatttcaaagaagaagaatccgacggtcatgggagatcttcgtcctatttttctttgtaatgctctttgtaaggtcatcacaaaagttttggctaatcgtcttgagattcctttccaaggtcatatctgatgcgcaaagtgcttttattcttagtagattaattttagacaaattttaatctcttttgaggtccttcattacttaacatggaagaaatagggtcaagatgggtatacggctttgaagttggatatgagcaaagcctatgatcgtatcgaatgagagtttcttcaagtaattttgattaagatgggtttacctcggcattgggtaaagttgattataggatgtgtttcaatagttcgatactgaattggccatgggggtcaaagtctcggtactgaattgtgctaaaggtttttctaggcttatcaggaatatgaaacaaataagtggcttcatgggtgtaaggtggctaggcgagctcctgttgtttctcatacattgtttgcggcaattatctttattgtcgagctaatgaaagagaggcggcaaagattatggagctcctaacaaagtttgagcaagcttcggatcaacaggtgaatatttctaaatcatctatcttttttagcactaatatctcgaaggtagatcgtgctcgagtttaggaaattttggggatgcaggttgtaagtgatcaaagtttgtatttgggtcttcctaatactatgggcagggataaaaacgttagtttgggttttctcaatgataaaatgtgtaagcgagtggaaatttgggacggaaagtggctctttaagttgggaaaggaagtccttttaaaatttgttactcaatctctccctagttatgctatgagtatttttctacttatgcttaagctttgttctcaaatagagagaatcatgtgtatgtattggtggcgggcaagtagtaatggcctaggtattcattggttatcgtgggagatgctgacagttcataaagataatggcaggatggggttttagagtttacatgattttaatctagctatgtttaggaagcaagggtggcagcttttaactcattctgattcgcttgtactggtcgtatatattaagcatggtattatcctagtgaattgtttttgtctgcagagttgaggtcgagtcctagttatgtttggagaagtattcttgcttttcaatagctgcttccaggtggtgtgttgttgatggttcttctattgacattctggggtagttgtggcttttgtgcgaggagcagcccaggattacttctttccatcctaggttcgagggggcaaaggtcaatcagattatagcgggaggggcccaagtgtgggatgatgaagttcttgaggattcgttcaatgcttctgactaacgattaattaagtgtattgtgttcaatgataatcttgggctagatcattggtattggtttaaagagacttcagggatttattcggtgaagagtgcttacaagcttctctaggtacttcatgtaggtggtcggaagataataattctggcctttggatggcattatggcgaaatttctcctaaggttaaagacttactctggagggcatgttctaggtgtttaccaacactgacacagttaaaaggttgacatgttgatgtggttgtcatttgcccgatgtggcaaggtatgaatgaatcaatcctccacgttttggttgagtgtcctttagtcaaagcttgttggcagcaggttgatggggctatttgtaacctttcagtcacatatttttcaggatggttttatcaactggtcatcgaattttcaaagactttggtttgtcatgttgcgatgatttgttggtctctttggaaagtaagaaatgagcttgtttggcaaagtaaattttttgttgcaaatggggtggtggctgctgtgttgtcttacattaatcaatggaagattgctcacaaaaattctacaaacacaatggattccagtccttgtgttcgggtggagcattggttggtttccaatattggtctgattaaagtcaatgtagatgcctctgtcacttctagggttttttatttcgaaattagagggttgtcatgtgatcatcatggagctttcctttttcattggtctaaataattgcctggccgtgtctcttctcttttggcagaggcaattgggttgaaagaagctttgagctagatcaaagaacgaggcctagatcaagttgttgttgagtcggactatagaagcattattgatgccctgtataattcgactccttaattgtctccttttagtttagttatttctgatcgtcgtactataatctatgatcttaacaatgtttcttgtatttttgtcaaacaatctacgaacaagacaaccaattattttgtgactgcttcttgtttctctctaggtcgtggctatggtaggtggctttgtccctactacttttcaagc

SEQ ID NO: 223202 - DNA, 1692 bp, Cannabis indica
tcaaaaaatattgagattcaactatttttggggaccaaacagaatttctgaaagggcaaaactgggacacgacgcccaagttgacatctggagctgggcctagcgcctaggttcacaatatgtcaacctgggctgttttcgataaagttcaccaaaaagtgttctgggaactttttctattatcagaaataatgaagattcaagcaaactcgggtagaaaactacaaacccaaacccctggaaatggggccaccttgccttcaattactcaaatgccaaatctgatgcgaccattgaatctaaaatggtcaaaatggggtaggggatcttctcctcttgttcaaaagccttgaaagtatcaaaacaagatcctaggagctcaggaatgggtacctagtgcccacgttgacaaatggtctggtgcgctaggttctgcttatccgattctgattccactttgatcgtccttctagtttttcaaaattactaagatccatgaagtcagaaaggtcaaattctcaactttgtatttctcatttccaacatgagaaactcaatcgaaaataaagagttttgagtctctcatttctgcaaaagagcaacatctttgagaattggtgaccagcttcgccagtacataaaaatagactaagtgatgttataacattacttataacatcacttaggcatcttaaaggacatcccttggacgtttttacacttacccaacgttcaggttgacgtcattcatgaactaccttcagtcaaaaaactataactcacacaatattgattcgattgacgcgattcaacttgcgttttgaaactatttcaatgctctatcaagtcatgtctcacactccaattacaattctaaagttatcattgtcaaaattcactccaagagagttgcaaaaataagctccaggttacccgcagcaggaccccctgagctccgaaaattggtcgtcaccaccaaaagctaattttcactgtcagagcatcatcaacagtagaaaacatctaacttttattttctcctatttttgtgggcctccttcacttataaaaagagctcccttagcttcttttttacattcagaaaactacccacaaggtcagagcatctctctctagaaattagagtttgaacatcttactctgaacatgccagagaggcatcctgctcggttcccgagcagatgttccaagtggagtccacgtgtcaccattcccgtgatgccacgtcagagtgcaaaatttaggataacaggtatatttaaactattttatttttaaaaataaaaatgtaatgatttggaccaatcagggattgtcacgtgacaatttacttaacacttaaacttaggtatttatttgccgttaaacttaagtatttatgctgcaagtcaccaaattttaaattaaagaggaaaatctcactctaacaaaatttaaataactattaaaataagcttataatgataatcattcaaattatattattatttgcatacgaactatgttagaaataatttataaatcaagaacaattgaaattaatgcaaattaatgtttctaaatataaagacttcgttttaagcatttgtaaagaagaaaaacagaacatgagagaaagaactttaagagattgagtttgggaaacactttcaagtattttttttttttttt

SEQ ID NO: 223203 - DNA, 1030 bp, Cannabis indica
ttcccctcaaaaccttaggtcgtacatcttatgtccattccttagggtttaattgcaccaaattcgatcttagatcttctaaatgtgtctttctaggttactagtccactaagaaaggttacatgtggtataataacacatgcatgtttctttagatgttacactcagtgaaacacaatctttctatctcaacactttgcacttggggtgaatgtaactaacatttgttttcaataaacatatttaccattatctcctctacatattgcttagtccattgactttcaagtgttcacaactcattcatcgaactgtgttgtttaaaaagaatgaagaaagagagatagaagcccttacaaatgaaaattgatgggtccagtagaagatagaagatcaacgtcaaggtacaacaccaagatgtggggaaatcccattagttagaaagaagagcaagaaacaactagttgttgccatggagtattccaaaagctgaacttatagctcttgttgaaggtgtgtgggctaatccggattaagtgtgttcttttagagcttaaactccatagagtaccagccctttgagattattttgtgataatatatcaaccataaacatagcacattatccattccatcacgatagaaccaaacatgtggaaatggatcgacacttcattaaagagaagatcaaaatcaaggaattatgtgtcatacatgtacccaaaaagaaaaaaaaaaaagactgccgatttgttaaccaaatgcctattcagagaatgctttgaagaattaatatgcaagcttggcatgcatatttgtatgctccaacttaagtgagggtgttgaaaatatttggtatcattcccacaaggcaaactgaatattttcccttaaatttgtaaatactaaatttctaagagcaattagtaagtttccttattagttagggttgacctagggtggctgttttaccactaatacaattaactgtaatttacataatacgatttgtactcaacctatttaaagg

SEQ ID NO: 223204 - DNA, 2145 bp, Cannabis indica
ttgctaattagcctaaataaaattaggcacaagggagagccattccccaaaagcccataccataaaactcttaaatatatgcttttatatattttcataaaagattacactactaactcatttgtaaagacccaatatttttctttttacataaaaaccaagccttttaacttaaaagagttgtaatataaaaaacattacataggcatcaattgtttatgggaatacatttgtcttgataatgggtgaaggaatttttcaattatttttcatttgggaactccaagctgacagccacccacttgtcttctctaacggggagtacagtaatgtcctctgggaatggatgattgggcaactgtgagtacactctcaccttgttgcaaagcaagtaactcttcacatcactgctcatcaagtttgttactgaaggagaagaaacagcagggactttctcaggttcatgcagtttttccatatgagatgttattgcagggtatgagctactgctgttgttgtccacttccattgtgcttacaatggtttctgctgaatctgctaatgtcatcatgaaagaatcacccaaaagataaagtagatatatatgtatatgtgaatcaaaagaattgaaaacagatgtaccaaacttctctttagcttcacgataagtctgaggttgatgtggaaccaaaatgcattggtgtttgagactctgcaccaagtcataggccacaccagagctccaagttgatttgggagtatgtgctcctaaactagaggaagtgaagttgacattctgaattgatccacctgaagaaagatgtcgtggaaataaacactggtaactggttacctttttaatgtatattccagtttcttatttatatgtaaagctgctacatcctaaccagtcaaactaccaaaattagtatggatcattcgtatttatggttgatcctaatttattatcaatcaaaataagattcacttgaacatagaagattagagtcagcaaaacaaatcattagaaacaatgaactgttttttcggacttatgttccttaagagcgacataggcagcccttgcagcatccaactctgcttgtttcttggattttgctgctttcccatggaaaatttctccatccagctccacactagtaaagaaaataggcttgtggggttcaccacgttttatagttttataaactggagtgcttaaatcttctctctgaactatctcttgcaagagaatcttgtaaactcgagactcgtcctgtcgatggaaaaaagtaaattagactaacaattttctatacattcatccacacagatatgatgctgcaaaacaagtatgtaactgaagcagtagaaagaaaattccaatatagaaacccattctaaacattcttcactaaaactaaatacaaataaatgcactacagttctataaaacaccaagctttgcagcatctaaagatttgtgaagaaaagaaaaagctcttagctactttggagtgcttgcctcttgaaagttttccattaagaaagacattaaagcaacctttgcagcatcactttcagcgtctttcgaagtgttgaaggatccagagctctcaaaaatttggtcaccaactgtaactgttgccttaaactgagtggcctcaggaccctgatcacattcacaaaagtacactggcaaaccgaaatttctctgtctagcatatttctgcagttgcttcttgactggacaatagttttatatatatacatgagtaaaatttcattgtcttaaaaaatttaagggttcaacagaacatttctaacaaagactattgtgctttagttcaattttgtgtaacttatagaagttgccaccatgaactttgatagtttaaaataaaaaacacatgaatactatggatgattgcagataatgaaaaatctaaaatattaggactaaaacataataaatccctgagaacttaaactattgacaatcccaacaaaaataacttcaagtaaactattgacaatcccaacaaaaagaacttcacttcaagagacactacctaattacctttctgtataacatagaattatctgtacatatactttaaacttatgtaccttcagtctcctcac

SEQ ID NO: 223205 - DNA, 1451 bp, Cannabis indica
aatattaataatttaatattcatcgtatctaaaaatgttcaacgatgaagaagaaatggcggatgtaatgtctgatattttaaaagaagaacctagttttgatgatacaagttctaccactacttccttccgcgagccccctctgaatggtggtggtaagtacgacgattttttcatggatatgaaaactgaattgtacttgggttgcaaaaaatcggtgctcagctttggtgaagctaatgcattgtaaagttcacaataagtggagtaaccattcttttgatatgttactctccatattgaatgagttatttttggagggtacaaaattacccaagtcccattacgagtcgaagatgaagttgcgtaaccttagtttaggttatgaatcctttgatgtatgaaagtatcactgtgtcttgttttggaaagagaatgagaaaaaatatttttgtcctatttgtggcgagagtcgttggaaaaagggagacagaaaaaaaagttgcttgaaaagttttgcagtacttttccttaattccaagactagagaggttatatagtgcaaaacactcgactgaggacatgtgatgacactactttaaaagacccaaagaggatggcatgcttaggcaccctgcagatgcagaatagtggaagcaatttacaaacgccatccatcctttgaacttgtaccaaaaaatgtgaggttgggtttggcgattgacgggttcaatccatatggtaacatgggtaactcttacagtaggtggcctgttatcttagtcccgtataacttaccccctttgaagtccatgaaagctgagtcattgatgttgtctctgttgatttcagtgcacactgcccctggaaaagttatggatattttcatgagaccattgattgatgaattgaaagagttgtgggagtccggtgcccaaggtcgagatgcttacaataggactatgtctacaatgcgtgctgctattttgtgaaccattaatgactttccggcgtatgcaatgatgtctggttggagcaccaaagggtacaaggcgtctggttggagcaccaaagggtacaaggcgtgccccacctgtaacgaactcaccccttccattggtttgcgtagcaagattggttatgttggacacaaacgatttcttgaaatggacgatccaaggcagagaagtaaaaaatacaatagaaaaatatagaaaagaccactgcctctagaattgttgggggacaatgttttagctcaggtggaccagatacaatatcgtttgactggaaaacacaagaaatttggtggagtcaaacgtaaatattctatagttgagttaaattggtcaaagaagagtatattttttgaactagagtattggaagaacctgtgtctcagacataatctcgatgtaatggatatcaagaaaaatatgtgcgacaatgta

SEQ ID NO: 223206 - DNA, 4331 bp, Cannabis indica
tacggtaaatttatcatatctaatcaaagttcaatatcggtcccatccaatgtatacgccatacatccgatactggtaaactttgccaatgccctggaaaggacataccgcttatccaaggtgtaagaatacctatccctgattatcatgccagtctaaatccattgaactgacaagtcaagaaaataaacttttgaacatataatcatgattatattccactgtggtgacaacactataatcatgaacaaatacatatgttctggacctaatagaatttataatcatgaaatagatcatgtgaaccatgcaacataaaatgcgatttctgatctttattagtaaatatgattatattgaaatgggttttctttatggcacaaaacccaatagaacacaccgtaggagaggcattgaatagccccttctatacaatttgccttctattatcgtgtagcgaggcaccgaatataagagtttttttgcctcatttttgtcaactgaaagtttcccgttgagaatataatttactacgggtgtcatccaagtaggcgagttgcctatcatctcaacttgatacaccaatggggtcttaaaatgtaatttatcagtatagtttcacatattaaattatataataatataatttatcattaatacataattaaactagttaggattgctaatccggtttcattaaccttagggtattacaattatcccctccttttagaaattttgtcccgaaatttacctgaacaactctagatatttctgctgcatatccatctcgagttcccaggttgcctcttcaactttactgttcccccataacactttaatcagtgtagttatttttttccgcaagactttttctcttctgtctaacacttgcactggttgctcttcgtatgaaagatctggtaaagttctaatgcttcataactcagatatgggatgggtctgagacatacttctaaagcattgaaacatgagacacattatgtacagctgccagcgctggaggcatagccaacatgtattctacttaccctatcctctcaaggatctcaaaaggtccaatggacctcgaggtaagttttcttttctttccaaagcatttaatacctttcataggcgatattcaaagaaaaaccatatctctgatctggaaatcaatatcccgtcgctttggatcagcataactcttatgtctactctgagcaacgagcattcacgctctaattttatcaaatactacacttgtcctctgaatagctttgggacccaagaactttctctcacctacttcatcccagtgaataggtgatctgcattttcttccataaagcagttcataaggagccatctctattgtttcctgatagctattgttgtacaagaactcgattagggaaaggtactttacccatgatccttcaaagtctaaaacacatgcatgtagcatgtcttctaagatctgaatggtcctttcagactgtccatctgtttgaggatggaatgttgtactgaattttagttgagtactcatggctcgatgtaagttctcctagaatcttgatgtgaacttcggatccctatcagaaactatggacttaaggacatcgtgaagacgaactatttctctaacatacaattttgcatactgatcaatggagaaatttgtccgaacaagtaaaaagtgcactgactttgtaaatttgtcagctatgagccacacaaagtcatactgtcccgtagtcttaggtaatccaactacaaagtccatagcaatgtcttcccatttccattctgaaaggttcaatggttgcagcaaacctacaggtctttgatgtttatctttcacttgctgacaagttaaacacttagcaacgtactctgctatatcgttcttcattccaggccaccaaaacatggccttaagatcttgatacatctttgttgtacccagatgaacagaacaaggagtcgtgtgagactcattcagaatttccctcttaaaaatcatcatccataggaacacatacatggttcataaaacgtagcatcccagtactatccactgtataatcactagtcttcccagccgaaaccctatctcgggatttcactaagtccagaacttgcgattgcacttctttaattctttccagaagagtatattatagggtaatgttagccaactgtcccacaaccaactcaatgttagctcgggtcatttcctctaccatttgcttggagatctgcttcatcatattcatctggtaatgacctttcctacttagggcatcagctacaccattcgccttcctaggatgataaaggatttcacagtcataatcctttaccagctcaagccaatgcctttgtctcatgctcaggtcttttgggtaaagaagtatttcagactttgatgatcaatgtatatctcacatttcttgccatataaataatactgccaaatatttagcgcaaatactattgatgcaagctctagatcgtgagtaggatacctctgcccgcactcttttaactgttgagaagcataagctattacctttccaattttcataagaacacagcctagaccttatcttgaggcatcacaataaacaacaaactttttcttatcagaaggtagaattaataatggagcggtaatcaagtgctattttaactcctgaaaacttttctcccatcgatcagtctaaacaaacttccaatcttctaggtcagctccgttaggggtgttgctaattttgagaaaccttcaacgaaccgacgatagtaaccagctaaacccaaaaagcttctaacctcagtagttgattttggtgttggccaatcccaaacaacttcaatgatggtcagatcaaccatgatcccatctttatcaactatgtgccctaagaaagagacgtgataaccagaattcatatttcttaaaattagcataaagcttgtgatcctgcaatcgctgaagtaccaatctgagatgtagttcatgttcttcctctgatttggaataaaccaagatattatcaataaacactatcacaaacttttccaggtaatccttaaatacccagttcataagatccataaatgcagtcggggcattagtgagtctaaaagacatcaccagaaactcataatgtccataccaagtacggaacacagtcttcggaatatcctcctcctgaatcctcagttgatggtaacctgagcgaagatcgatctttgaaaagaccgtcttgcccttcagctaatcaaacaggtcatctattcggggtagaggatatttattcttgatagtgagttttttcagttcctgatagtcgatatacatacccatctttcttttcacaaataaaactggagcaccccacggagaataacttggtctggtaaattccaagttaagtaattcctggatttggatcttcaactcattcaatttcgctagagccatttggtaaggtgcctttgatactggttccgctcttagaactaactctcttacgaactcaatctctctggaaggtggtaatccatgtaaatcctctcgaaatacatctagaaatttgcacaccaaacttgtatttttaggtccagatgacataggttggctagtatccactgtagtaactagaaatcttagacaacctctgtgcatcagatctttagcttttaggagtgttattcaaggtatgcgcgatccttgtaccttacccactaacactatcggattagcactatctggttcaaacaccaccatcttccacttgcagccaattgttgccctatacttagacaagaaatccattcccatgattatatcaaaatcagacaattgtagttctattaggttggcagctaattcatcaccatcaatccaaaaagataaagacctaatccaccgagtagatacaattaggtctctagaaggtaatagggtaccaaaccttgaagcatatacatcacacgatttatgaaaactctctattactctactcgatacataagaatgagtagctcccaaatcaactaatattgaataagaacaaccatttatggacagctgatctgtcaccactgacggattagcattagcgtcagcctaagtcataatgaacagacagcccggattctgattgttattcttctttggttcttctttcttagcctacggacagtctctgataaaatggcccaccatatcacactggaaacatgtcttagcccggcactcaccctgatggtgcttcttgcatttagaacactacgggtaagatctgaatgtagacccg

SEQ ID NO: 223207 - DNA, 1483 bp, Cannabis indica
tttttcatttatttttctatgttaaaagaaactggatctcattttttttttctgtttcgtaagcatatcggcggtaagaggctggatttcattgttcttaggtgctggagttcgttgttctcggtgacgataaactcaggtcttgatcttactttttttgaccttatttttctgataaatgtaatattttttgtgtatatgaagttttaatttttattttgttactgtttacatatttatttattttttcttatatataatttggttaaatttttcattatatttttgctatgatctttgaatagtatgttgattataatttaaataaaaataaatttgaatataaactgattcttaattttggttaatgtaatttggtactataatagtgtatatatagcctatattttactctccatattatgattttatttagttactaacactatgtaataatgcttctttgatttaagtgataaaataaaactgtatcatatgttgtgatacataaatttgtttatagatacactatataataatgctagttacttggtgtctctttaatctctgtggttgctttattgttggttttgtttatagatacataagttttgttatatttatagatgtaatggacaaatatattgaagaaggtataattttttttataatgattgttttataaattaataattttattttattatgctaatttaatttaaataatttgagtaactttattttataattgtaggcaataaagtaaaggtcaaagcatcaacaaaagtggagactattgacactgttaattgatgttgacgtagaagaatattgattttattttaacttggtaattattttagacaaattaacaaattttaatacttattttgaatttggatggctgtaataatttatttttgatgtttgaattttttataactttgcctgaactttatatttatttaatcattcaactcaattttttttaattggaaaatttttaattacaaaaaattatgggttgtaacccaacccaacccgatcaataatgggttggtttgggttgggttataattaaaactttatatgaatgggttagaatttaataggccgatctcattgggttggcccactaaaatagcattaacctggccaacccaacccatgcacagtcctaggcacagtatagtcactattgggtatttcgggctgaatcgggttcggggccaaaatacattttcggaattttatgttggcattttattgatatatgaataacttgaaatttatttgagtgtgtatgtgatgaaaatgacaatgttgcccttgaatgcatgcttatgtcttattttaggcataggggcattttagtcttttgaccatttatttgatttttcaacaaaatgaattttggtagaaaattaaaggcatttctctggttatgtccagccctaaaactgatctcctctctctctctctc

SEQ ID NO: 223208 - DNA, 1614 bp, Cannabis indica
acaagtttttttattccatagaagctcattacgaacaaaccatatcttccaactaatacacgctgcttctttaaccacgacagccgagtgttgcacagtaagagcagagaaccatctgttgaagccgccactattcacaccagtcggaacaatggaaacacaccaacaacttcttgcaaatcgacactcgagcaaaatatgactgatagtttccacagccagattacaaaaaggacaatacaaatcaacattaacctttttggtactgagttgagcctttgttgggaggcaaccgactagcacacgccacaagaagtgctgcactttcggaggaacttccaactgccatatagccttgaacattttttgatcttcagcagcaacatgcacaccagaatcttgctgtagcattcggtatgcacttttgacagtgtaaaagccattggtttcttcattccaacaccacttatcagccgtagcagatacactcaattgtatagacaacacaagattcttatccctttcatcaaatagatcattgataacatcatagtcccagctcttagaatgcatcaaaaataagctagaaacattttgattcactaaacccggatgatgagataggacaaaaggattagaagggtcggggagccatgggtccaacaaaatacttacattatcaccattgccaatagactttctagtaccctccttgactagcccttgtgcttccataatactcttccaaataaagcttgggttttgtcccaaagtagcattaagaaagctacccgaaggataataccgagctttgtaaatcttgcttaccaaggagtcttcattagttaatagccgccacccttgtttcccaataaacgaaagattataatctcgaagatccctgaaacccatccttccatcagtcttatgtctactcaaccgcttctaacttatccaattcacacccttcgaacctgaacgtgattgagatttccaccaaaactttgccatcataccttcaagattagaacaaatctcctttgttaacagaaatacgctcatggcataacaaggcaatgcttgggcaacagacttcaatagaacctcctttcccgcttttgacaagaaacgactctcccaagtaaaaattttctttttcatcttttcttgtaaaaaacctaggatagctttcttattgcagcccaaaatacaaggtaagccaaggtaaaaactgttatccccagcctccaacattcccataagaccacacagactagtacgtgcatcacccgaacagttcttactgaaaaagactgaggacttagagtaattcacttgttgacccgatgcttgctcataaacttggagaaggtgcatcacatgtgtagcttcaccctcattagctttgcagtacacatagctatcatcagcaaatagcatgtgtgagactcgaggtgcactcctggccactttacacccagtcaaccatctccgttgctcgtacaaagttaagagtgaagagagaccttcagcacaaaccaagaacaaatacggagatatgggatccccttgacgtattccacaactaggtacgatcggacccaacttccttcc

SEQ ID NO: 223209 - DNA, 5692 bp, Cannabis indica
gtaaaataatttccaacaacacagtatcccagtcttgggctagttgccccggtgatttggagaagggaaaaagcatttgacacctcccaggtatccgtccttctccaaactcctcatcttagcttgggttactatagatggaggagacacccaccgagctcctaaggcaccttgccttctttgaggaacagcttcggcgtactcctcaatcacatagtcatcactctctaccaagacttcatcggcctcggatactggttccctttcctcattgtaaccaccgaagcgtaatctccgagcaatccctcctcctcggcttcagatggactgtgaggacggacctcgctctgatcctccatctctttgacttcaacgtctccttcattatcctccacctcatcagcaggccaggcctatccagcgcttggcatcgtagcaagccgagccatgtgaggatcattcgaagcaattcttcgcattgtttgtttagtgtgggccatcatcttatccttggatggtgtttggttagtatgcctagcaacagttatggcaaaggtggcgataggaatgccaaaggcagcagtgcttggtcggtcgacggggatagtatcaactatgtcttggcagacgatatatgtccagttggacggcaagtatcgtctccacccattcttgagttcccagatcaagcgtctgtaaccttcacccacgatctggtcaggatactgtacctcagattttagggaaggtgtgcattcactagcttacctcccagtcgtcaaacttgaattagaaagcttgtcacttgatgtggacagaatagcacagagatgaggttgttcctcatacaaaagttggagaagatcctgatcgatacgattttctcctccccaaaactcaccggggttcatctacaaaagataggacacaatatgagtatttggccgggatatcgaataaaaccaaataaagtataccgactaggtcttaccaaaagattaaaaggggaaattttgcatggtttaggtttattaacccagaatttcaagacttcaaattaagggttaatttttattaaaccccgaatgggcaagtgaaaaccgaatatcattaaaataaagtcagaatacaattacagtcgggtcatatggtcaattacaatcaaagtttcatatttctaaatctagattctttacagttttcctagaacaagttcaagactatcgaattttctacaatggaaacccagaaaaattagagattcaaatattaaagaggaaaacgatgaagaacttactcactgtccgaagctttgaggttgctcggatgacgttgatctgcactttctggaaattcttcaaagatttgagagaaaaaggtgttcttgctttgaaatcaccaaataagaaaatgttaaacgtggtttattaggactttttgccctatttataagcaaattagtgaagagttgtaatcatattgaaatttaaatgcctcgatttcctcccaaaagtaaacgttaggaaatcaagtacctgaggaagagcaaccatcaaagcatgcaaatcattggagtattttgaggtacaaatcaatcaacatttatgagttgaatattgaagagaccattggtcagaatcacatcagatcaccaacagacgcattgaacacgtgccacccgttcaaacacgaattcaaactatgtgaactctacacgcgactttggaagtcccatgcagacttggaggcaaatgttatcccatttttcgcactatgacgtggcaatatgtgctagtgacacgtgctgttattctttatgcttgactggaggactgtaccgaacagacttcgagtagtagatttgcacgcacaaagtcttcctaactaagcagggcgagggcagatgaactgagcaaagagtgatccgacccgtgcatcaagacttcactacttcaggtttgatatcgtgaagctcaagcacataagcaatccctacaatcataagatcgtatcaaagggatatggaaagctgtcccaatcccccattttaagtattctaaatatgtaatgtatattcctaccaattatagatattgtaaggaaaaggaaaaccttccctcatgcatttagccctataaatagtgatctagcttcacttgaaaaaggattgaaaaaattgctttagagagatctaagagaaaatactcagagatttcattgtgagagatttgaacgaagaaacactgtattctttgtcctcaagcaagtcaatactatctaaggggaataggctattaccaaactaaaggggctaaacctctttaaaatcttatgttctttattgcttacttatatttgctctgttttaattacattttatttattaattgactcactgtcgtttgttaaaagtgaggttaacaatgatgtccataaatggaggcttactcctctcgaccaagaatcgaccagccagccccctaaggccgacaattacacccaagccaagaggaacatattgaagccctaaaccctagttgcgcaaaagaacaaaaagtttttaggagagagaagaaatgtttgcataggtgctaagaccactatcttcaaatggtgtactcttttatagcaacataattcatcgctggaaaaagtctgattgcgataaatttagtgtgacgactttatatagggacatttagagtttatttttttttttttctgaatttaagtattttttagagaagaattgttttttttactgattttacataaataaaaaatttcactcaagcgtaaaaaataattttgcactaaacttttaaatttatgaacggcatagatccaataatgttgaaatacattaaaaatagttgttctgaattgcttctatataaatccaaataaccgacaattattatttaaataattaaaatacgacagtgcacgcccttgcagagttttgtagcattccacacaaacaaataatgatttgttagtaatattatttatttatttacaaaagaaaattcccttcaaaattaaaaaatatatgtttaaaatgaaatatttaggcaatattttatttcaaatttggtcattgaaacagtgatggactgtaatggattttcacatgtagatagatagagtctaatgcctagcttcttttttgttttcttctgcaggagaagcaaagtagggaatagcagagtcagtattccataatggctttggtaattttcgctaaaatatatctcgtaatgttggcagcatcttatctggcgacaggctgtaataccatttcgagtaagctcagaaaattgtaagagtatttatttatttaatttaatttaattaattaattgaacggcgaacaaatattaacagaaatccagccacaaacaacaataaaaaagaaaattaaataaaaagggtttgattaattttaaaactatctgaagcccgagttgtcagaaagggtcgtactcacatactcccgtacttccctcgcaataacatccctcatcacatcccaaaaccccgccgtgaaactctctctcctctcctcgggcattacatctccgcctctacccggcggagcaagagtcaacgcggtcggtgggtcattttcaaccgacatcggtgaagagtggccgttaacattattatcactattattgttggtaatactattactagtgttgccaaatggcagcgatccattggcctcacctctgctgaaaccggtcccacaagacatagtattctgattaccctcgtcctccatctgatgtgcctcccgagccctccgcttcaaagtcgagttccagtggtttttgacggcgttatcagtccgaccgggaaggagtcgtgcaatggtggcccaacgattaccgtactgggcatgtgctgctagtatggtctcgtcctcagcgggagaaaagggtctgtgttcaacactcgggctgagttggttgcaccacctgagccggcacgacttgcctgacctgccctttatgtatcgacttatcaaagaccagttcctggctccgtaccggtccacgagccgtgtaagaatccggtcctcttcggtgctccatgggcctttgattcgctctggtttgttcccgtttctcggtaccttattattccctgaagattccgaagacgacgagtccgatgatgatgttgtggaagatgtacacctattataattcattgcttccatttgcacgtgcaacaactggtcaatatatatgtctatataattaatagtccagatattatctaaatattggaccgatatgtgtatatacagctagagagaacgaatgagagaaaagaaagagtgagctttggtttatatatagcaggtgtgaagtggagagagagagagagagaaggagagaggaaggtgtgaaggtggggacgcgggaataggaatgggtgcatgaacttatttggtttcccaatgaggtctagagagttaaagtgaatattttttttttgcgtatatatagattagtgttgtaattaatggggggaagagaaatgggggtacttccaggaaactgggttttgtaaagtggttgggagtacttactgcaccatgtacggctcattgcgtagatgcgcacagcacaatcttattcttaattctttttataatttggtgtcgcggtttgattctgctttgttgtctggtttttatacctatttgacaattaaacttttcaaatgatataataaatatattattaagacactactaaagatgtctaatcgataggctgtgcgtaatttgttaccatttacctgacattttttaacataataatgaccaatgatcaccacgtcttaggtgacccaacttatagactttgaagatcgcgattaagtttcatgtcttgctagatgtgctatcctgtgactttaattgaaacttgaaattaatttgtagctaacacatatatgtaaagtgttaagttatttatacgagtttgctaatagtaatatgataaaagtagtgtcgaataaatcttataccagtttcatatctattcagtactgtacatgcaggtgatattaatttaacaacttcacactattaaattattaatccttgatctcttctaattaaaagagtaaggatactagatatacgagatgttaccacttttttattagattattaattatacacatacaatatagacaataattaataaatgaattattttataaaataaaaattcacataacaaattaatattgtactgtactatagatcgagtgtattgatatatacatgtcactttaatatggtaatatatatgctttctcctctcactacttgatgtgctactcttaattaggcatatatacatagtttgtcatattctgtggaagaatataaacaagatgccgggagcaaagggatgtatactaataggaattaaacaaatgaagtatgtctgagaagaaaatagtaattagatcaaaattaagataatgataaacttttgtcctaatcggatattatcacaatatatgagaggtttaaggctaaaaacagagagaaagaagagaataatttcttattattctcgagctgaagttacatacctatatataggctttagtacaatgacattatgtaattgatttaagcaacttggcaagaagtaagtaa

SEQ ID NO: 223210 - DNA, 1678 bp, Cannabis indica
aatcacgtaatacgcctatgctagttagggtgttacaccctgcctgggaattttcttggagggataacgagtgtacgcatgtgaaactgaaaaaagaataactttaagaagttatattattagcaagtggtttagacataatatatttgagctgaaacacttttattcatcaattggtcttttgctgttgtgcaacttacattaattaattctataagcttacaataaaaagtctgcttctagaagtcaagtggttacccctacccgacatgtcaggcagaggccatcactggagagtgatggaaaggccatcgctgcttagatctttttaaactaactctttggaatgagttaataaaactactactaaagaataccgttcatacaatttggtcattggtagtactttcagaggtgttccccattccaatatctttgtaggagaaccaactccatgttcttgttgtacctaccaagcttgtaggctcccttacttgttatttctataacttggtaggggacttcctagctagtctgaacactcctactgcggtatctttggtgttcaggaatactcttcagagcactaagtctcctatgaagaattttctttccttaacttgtttgttgaagtgcctgcaaccttttactggtaggcatgcagctttaggctggcttggtctcttctttcttctacttcgttaagggattttgccagcaaggtgttgtttacctcttgttcataggttatcctcctataagatggtggcatcagctctacgggcaacattgcttcatagccataagctaaagccaatggagtttgcccggtggtcgtcttctcgatggtcttgtgcgatcagaggacttttgagagcaattctagccaattgaattttgcctctttaaggtgcttattcaaagtgtcatgtagggtcttgttcacaggttctacatgcccattcttttgaggatgggccatgatagaaaagcttttgatgatgtcgtgttggttgcaaaaattagtgaacatgtcactatcaaactgctttctgttgtctgacacaagcttttgtggtagtctaaaccggcatatgatgttcttgaaaacaaagtcaaggactttcttagaagttattgtcgctaggggttcagcttctgcccacttggtaaagtagcctatagtgactacgacatactgcacccctccttttctctttggaagttgaccaatcatgtctattccccatatggaaaagggccaaggagacttcattatcgtgagctcgttgggtggagctcttaggatctttgagaatttttggcacttgattgacatagtccatcgaatcctcgatcatggttggccaaaagtacccctgtcggagtatctttttggataggctttgcccctagcatgattaccgcagaagccttcatgtacttctattaacaaatgcttagcttctgttttagtgacacaccttaggagcggcataagaagcctcgtttttacattactccgtctaagattagatacctagcagcttttattctcatctcttttgcctctttttattttcaggcaaggctccaattttgaggtaagttgcaataggtgtcatccaggttgggctgccgtctaacatattgacttctttaggaatggtaatgttac

SEQ ID NO: 223211 - DNA, 2077 bp, Cannabis indica
ttttttttttttttttgaaactcttggtggagaagtttggctattagagttgtttgttttattcatcatggatcgtgatgaatgagcaactttaaacgattcgtttgactacgatgatagtgatgaggatgttattgagggagatcttgaggtggcttttgttgatgttgataaagatagtgttgagagaactttagtggggacattgatttcttcaaaggtattttctagggagcatatgccacaaagtgatgatttattttgaaagattaatggtaatgtgactgtcaaggcagttggtaataatatatttttatttcgatttttgaatctcaacgataaatgtaaagtttatggtggcggtccatggcttttagaatgtcaacttttggctatcaaagttcctacgggtgttggtgattacaattctttggcatttaatagagtcaaaatttgggtccagattcatcttgtctcgatttcgtgcatgacggtcgatatgggtagagaacttggtggctttcttggatgagtgactgaagtggatgagaattcttccaagaattgcctaaaagggtttttgtgggttcgtgtcggcatcaatatctccaaacctcttcctaaacttataaaggttagtttgattaaaggagaggagaaatcaaaaattcctctcaaatatgaaaggttgctagaatttcgcttttgttgtggttattggacaccctttgagggagtgtgttttattgccagaattggtttggagaggccataagtgaaagtatggtgattttttaaggacttgcccaattcaacgctcgcttaggtcatctaaatggactcgcaaggatgcgggtaagctaggtcggggtaaggaattattgcatggtgggttgtcgggttcgatggtagctatgacacttggaaaacggtggctggtagaaattcaatggttgtgtcaccaactttttctcgtgttccggttagtttgaccaagggtgagaaagctctagctaaggtttttacttctccgatttctgtgggtgtaatgaataataaatgaaatatggttgaaagggaaagagtattgattccttgccaactatctcaaatattttggtaattcttgatcaccaacttatagctcaatgcacatctctagcatgggaaacaatgacaacaccacctttaattccattaatgtttcctcctctagattttttccaggtaaggaaagtgctcctaatttgactaatattgatcttaattgtgatgaaagagctatttttaagaaattttggacttgtgatgatgggccagttactgttgggcccaactctttttctgggtcaatgtctttaagtgaccacgtgctctcttctacaggtcacgtgtttttgcatggaaaatcatcttctcctttgccttcatatgatactcccttggctatgctgtcgttgacgtcaactggttaaattttaagtgctaatgttagtaataggctgcctgatacagagaatgaggtctatgcaaaggtcaagaccttttacgtgtagacggtctttctcgagctacgtgtagatggtcttttttgacttcatcaaccccccataaataaccttgtattctttgtttatgaaaatggcttaatggtttgcccctagtgacatttttgtaaagataagtttgtaaaccaatttgggttttctcttatcttaaatgccttgtacttttgtcgttcgaacttaatataactgtgtttgcttgcgttttttttcacaatgtaaacaactatattttgatcaaatgtaaagttttttgggtttttccattgctcgtaattttcctgtttaagtagttagttatctaccgaacttttgattttcgagcagtagtcaattttgcctcgcaatgacaattataatctgccttaagcaaacttgaatatacttttaatgattttatcactttgtatatttttgatttcttgtatgaatagttatattatctatccatttattagttatatagatccatggtccccattctagttgagaacattctgcttgtaagactc

SEQ ID NO: 223212 - DNA, 1376 bp, Cannabis indica
aatacttaatacattaagaatattaccgaccgccatgtcaaaaaaatcgaaaccgaaaccgaccaccaaattcggtgatgacgtggaaccgaaaattcggttacggtctagtcggtttgatggtcggtttcggtttttcaatttttatgagtaattcaaacaacaaaaaaccaaactaaaaggtgaaaataaagaaagatagatagataaaacttgtttattccagcaataaattaaatattgtaatcaattcatattacaattcttatttgattgcattaccattactctcaccattattcatcccaatagagttttgagcttgttaatgaagtcctcaatataagaagattcaaaattgttgcgaagaatgttttggcgtaacttggcaaggttggccctaacctctttaccaacctcattgtcttcatccatgacagtcttaatcgcttcaaagacactttctttagtaaacaacccttgttcttcacttttctccacttcaataccagccttcaatgtattcccaaatgtcctcgcattataaatttgatcacctatcatcggtatgagcacaagctcacatttggatttggctcccaatacctctaataaagatccccaaccacaatgtgtgacaaataaaccaatagaagggtggttcaagatttgtggttgctgaatccaacctccataaaccactccccttcctccaattcgctcctgaaatccatctggtaaagcttcctcaatggaatcagctcctgaaggtgttcttaaaacagccaaaaaaggcaacccagaaagctccaaacccaacaacaactcttggaattgagatttggacaaggtgacctcacttccaaaacaacagtatatgacagagttggggttgaattgacttagatagttaacccatttcttttctagaggttcacttggtgggtctggtataagtggtcccgaaagcaaaataggcttcttaaaatctttttcaaggaagtcaacaaacatgccatcaatttctctacaacccttgatccctataacatcacactctgcaagactcatatacaagcggtcaaataaatgaacaaccccactattactactaggcttgacacttaagtacatacgaagcgctcgagcctcatgaaaatggaggtgaattgatggatctggatagcctgggagaggtttcatcaagtcagtctcagtaatttttgattctctaagattgtggagagcagcaggggacacactgtgagctgttgcagcaggattcaccacagagtaatgcatcgattttatgcccaaggggcgagccaagttgggaacccaataagcaaaatcgtaaaggatgaaatggggtttaa

SEQ ID NO: 223213 - DNA, 3786 bp, Cannabis indica
gtaaaagataaaaggatgtagcctttttgttgtctttcttttcgttataagaatttttgtttttcattccgtagtaatgatccttggtctcatcttttcattataggttgttgttcttgttagggaaaccaagactgagatcgtaatctaatctcacagaggtaataatccagatagaattttgagtgatgtgatgaggtgataattacataaaaaaaaaaaaaaagaagtaagaggtggattaggagggcaaaattaagcaaggtgaagaagtcaattttagttgctgtcattgtagccttcgtttatgaaatatggcgcacaagaaacaatgtttgatggcaaaattctaatacaaatgtagagaatgtaattgctaaagtgaaaaacatagtgaaaaaagaattacatgtatatggccaaaaaaaagtaactaaaagtgagaaagaatgatttgatgccttgtaaagttttatagatatttagattctccttacttggagaattctattaggttgtataaaaagttttgagcaatacacatacttgattcatacaaaaaaaaaaaaaaattacataaaaaaaggcccaaaaaaatatggcatttttaaaaattaaattttatttgagcccagaaaacattcaggctcagcccaataaaacctgaacccgagcacgtcgaacccactatacccgacccaaaacccgccatacccaaccacccaaaaatcgggtttggttgtgcatttcaaacacctaaaatccaaaacccgaacccgaccacccgaaaacccaacccgtgtgcagccctaatgggtctcttttatttacttctttagttgtccaaaagttgactgatgccaagattggagtttcacagcaacattgaagatgtttttagtcaattgtgtaatgtgatttgtagaatcattggaccaattatcaactattatttcagagcagtagtcttccttcaaccaaattttttaaattgaaatttggacttaaagcatctctcttctggttgttcatcatgtgcagcaactaacacttttaaagcttgatgatcagacttgtaatagtcgagatgttgaagtgatgatgtttggaaggtggagtcccagcagtcattcacaaacccgtagtcaagtatttctttaatattctctcttccttgacttttattactctaggtagttctttcaccctcaataggtaattgattaagacaacaatcaacaactgttgatcgaaatgcttcaatctgggctaaattccttgttgaaccaccaatcttatcttcatgtgatattatttcattgaagtcacctaggacaagccaaggtgataaagtctagtaaagtgcaaagaaggaccatcaagactttcaatgaagtaatcaatacggttagtggagtagttattgagtgaaacagagacatgagatttccaaagtaacataagaccaccaccttggccttccagagggacttcaagtccatgaggaaaatgaagtgtatgacgaactttatctatacttccaacttttaatttagattcaataagaaacaacaaacagggagcatgcccaggaacaagcaagcggagatgtctgaatgcactcgagttccccaatccccgagcattccaactaatgaaattcatggctggggcggtgttgcatagcaacattcgccacactttcagaaaggtgctgagctgaatctaaggaactagaaacatacaaagcaggagagtcattcgagtctgaagttcctgactgacctgtagtggaattggattgacaatgcttgagcacacttcaaagtgaatcagcattcaattgaagtttaaagattttgttgggatttgaattttctttttcaacatctaaataaacaatgtttttgcctttggaaacatcacgtggttggatagtggaattttttgggattatggtgactttagtggatgaagtgagtaaagctggtgggagtggggaagtcagtgtgtttcgaagttggttggggttaatggtggaagcagagggggataggtagcaaacatgggtgaaccatgtaaaaatggcaggattggaatgataatggcttcattatcattatttgataaagtcgtggaattggtagtagtagttgaaatggttgagatgtgtatattggataaattggatgtgtggtgagaatgtcgtggcacagggttaacagaggcctcactctcagttaatagaggggatatggtaggggtctcgatgagatatttggtatagcagctgtgaaggatttttttggccaatctagttattaatggccaaacttctcctttagagaaatcagtctgatatctatcgtaaccagattgaagaagtggggagccaatcattgaagcgccatagggtaatgggggatcaacaccattgtaaatttgttccaagaattgatggtagtgttcaaatggatcgccaattgtaccacatttgaaacaaaattttggtagtcgctcatagcaaaattataaccagaattcatctcttgaatctttaagtttgaccattttcccccttaacaacggtttagagatatcaattattgcacggaagcgaagaaaaagtccccttctttcatttaaagaatcttcgtggtcttcaatgtaagtgccaaccatatttcctgcccattcagatttttgatttgcttagaaaaggcaatctatgaagttgcacccagaaaggggataaatgtaaggactctgcagaagcaatctgtagaggaggaggttggcataagacggtatggtgattctgaaagtgccatggctccataaacaatactttttttaagtcacaagaacaaccaaaagtgactaagaaaagaccagagtgatgatagggtattggcctttccaatatccactcattttgattctgaatgttttgcgattaatatcacgagatgaaactactcgtacaaagaggatgtagttctgggcagcagagttcccagaagttgcaggcgcagggactgtttggacatctctttcactgtcagttaaggtcatagtttgattcatatcatatagtagattatccatgatgtatagtataaacaaaagaacggaattgaagaaaactaatcaggatttgaagttgaattttgaatgttcattggggagggaacgattgtcagttaaattttaaaaagtgtatacaaagaaataggaagttacgaagggggaaaggaagggaagaacgaggggtaaggatgaagatagagttgaaaccgttaaaaagaaaaaacaaaatactaactcccacagagctttttcgtgtaactatatataaatatttggggttcaccagattcactcttatttattttgatatttaaaacaaataatctttcttaatagagtacattttaattatttaaaatattttataaaatttaaaaaaattattcaaaaaaattaacacaccaaaaatagagtttaaatagtttattacatatgcgtgactcttttattttacacgtgtgcgaaataaactgttttaaaatcactttctatattattgtaaattataacgaatttctcaaaaaaaaaaaatatattttgattaactataacatatacgtcataaaaagaaaaattgttctcaatgtcaaaacagcacgggatgcatcgatgcaccttttttagagggtgcaatgtagatgtaatgaacacgtatttagatgtggaaattagaagccactactacaaatttgggct

SEQ ID NO: 223214 - DNA, 1245 bp, Cannabis indica
tgatgacatattataaaattaactaaaattcttttcaggtcattaaggtctggaaccatatattatctattgcatttctgaagtagactaacatacaatttacattaaataataatttataagtcacaaaagctatgcaaatactatcatttaacatcaaaacttaaatttattcaattagagcattctcaatacttacttttcagattttatgttgaaattataaatcatgcctaaagtgatcaatctccaacatgtattaaacacaaatgaataaatgcacaatcaagaaagaagaaataacattaatattaactcatggaataaaatcaactaacattcatcatatccctatattaggaatttagttcataatttccatgttcaaatctacaattaacctaaaaacagaaattgacataagaaattaaaaagggagaagaaagaaactagtagaaaaattgctcggatcgccacgctcactctagaagtctttctctttgtttctaggattgtatttttgaatatcctcctaaaattcgccactttttttttcattaaaatagagtttttttagcccaaaattgaagaaaagacaaagttgcccatgtcccgtacggaggcctcactgggccaccaatagcctcgccccgggggctatagaaaatcaaattcaaggcttcctgtagccatctcattgcggccataagtcgatgctcccagcggccacgaatattagtcgcgactaaaatgttcctacttcgacctctctcagtaatatatgcataactttcacatacgaactccaaataagctgaatcaagatacgttagaaagatgaaaaagatatctaatacttttatattttgaatttgtccaaaatctgatcagaacatagtcgaatttaggcttggagtttcagctttattttcttgtaaaattttctctattttataaatcaccgttttctaaaatctggccaatttatacattccaagtgtcgaaacctaaaatcaaagaaaataagcgtaattccattccaaaaagtgaaagaaaattaactgtaaaaatgacctaaataataggcaaattaactcaaaaaaagcagttattaaggtttaagagggctcttagttgcatcaaaacccagagctggattggccccgaaccccaaccccagatctggggccctgcccaaacttgggacccaggcctaaacctcgacctcaacttggacatggaccc

SEQ ID NO: 223215 - DNA, 2596 bp, Cannabis indica
tcaacataatatatagattaaatctagagtaatgaaagaaagacaatacatcttgaagcctatcaaggtatccttgctatcttttagtacagttaacgatcctccaatctaagaactatcattgaagaattcacaccttaatcttccaagttagcctcaacactcaggaagagagttggctattagatcttaattgatgaatcaatttaggtattacactgtgtactcaactcatgagacactgcaattgagatagagttttttagtctcacacacaccttaattgttgtaggcgtgtgagacctagagagagagagagaataggagagtgtgttatcccactttttgcactatgatgtggcaatacatactagtaacacgtgtcagttattccttacacttggttagagaaatgttccgaacagactccaagcaagatatatgcacgcacaaagtcttcttgaccgagcagagcaagggtagatgacccgagcaaagagtcatctgagccgtgtatcaagacttcattattctaggactgatatcgtgaagctcaagcatacaagcagtccctataatcatgggatcgtatcaaagggatatagtaagttgtctcaatatgtaatatatattcttaccaattatagatattgttagcaaaagggaaaccttcactcatgcattgagccctataaatagtgatctatcctcttgtgaaggggatcaaaagaattgctttagagagagatctaagagaaaataatcagagatttcatcgtgagagctttgagagaggagacattgttttctttgttctcaagtcaatacaatctaaggggagtaggctattaccaaaccaaaggggctgaacctctttaaaatcttgtgttctttattgcttactgatttctactctgtcttaattacatttctaattgtttattaattactgtcgttggctaaaagcgaggtcaatatttttgtgctttcaatgagagcaaaaatccaagtttgctctttgccttaagttttagaaaacacatagaatggtggtgcaaactcgcagaggcgtggttgaccagagtgactcactattgacagatcctgccttgcaaactcctggaattacaagggtcccaccaggaaccaaccctggacagccaaacacgcagccacctactatgggccaaggtgtgacatctcctctggctgggatcacaccaggtgtgcactagactgggaataccacttcgacaaccgatcaaagcactcccagcactggaatcccatccacaaccaatgctcagacaataataggagatgacactgagatttagaacctccgtaatgcccttggagtcatgcaaggtcacactaataccttgcatcatgaccaggaggatcatcgtactgcaatgaaccttgcgttcgaagagtagaggcgtcagttcattgagtggagggatagggagatggaaacattgaaggctcagcaggcagccatcgatgaccgaacaagacaggccaccgtattgatacggaaagcctatcaacttgttaatcaacaaccagctgctacgtccagtatcccactgggcggcacagaagagatccctgctaggcatactgcccaaactcataatggtcagtcgtgcaatccccagtcacaggttccacctgtgggtcaagtagtaggtggccagaccctatctgataattctttaggtagaattatacctaataactccatccaaactgacagttctggccaataaactggccaaaccaatcaatcactgaggcaaccttgtgtttcggtattcaacagattgggtacgacccatgatctcaggaatgatttgaatagaagaagaagtctagacgaacaatacgtccaaccggccactcagtcaagtatccgcatccaggattcagctgtaagagatcctgacatgacacaggtcggccaagaggctgaaccagttcacccatctgtgcaagcacaattagatgaactaaaaaatatgttccaatgcctagccgaccaaaaactcactgatctcgagcaagatcgagcatgcaaatcaccctttactcccgagatcaatgtcctagaactaccctttaagttcaaaatgcacacctggaagatgtatactgggaaggaggatcccttattacatcttaaatattttgaaatgcaaatggatctacaagaggtacgacgcgatgtgcggtgtagcttattccctgccacattttcagaggccgcacaatagtggtattttaagttaccacaaggaaggattaattcatggaaagatttctcttcagagttccatgcgaaattatcatcctctcgtcaactcccatcacatttagaagacctggtcgaagtgaaacaaagactaggagaacctcttagagcctacataagcaggttcatgacagaagctacgaaagtagcaaggttaattaaagagggcatgttggccgccatacttggggcattgaagtagttggagaactgtggaaagacattaaaaaaaagtggccctgtaggatctatggctgagtttttagactgagcagatgg

SEQ ID NO: 223216 - DNA, 991 bp, Cannabis indica
atctatattaataagaaaatttgattatattgaaatgagttttatttaggtccaacttaacctggctgaagtagaagtgccctattcaattctgctttggagcagactccaacttaaaataatacccaatctcaactgttatctgcatttttgtagttgcgacacatgagttttaatcaagaaagattaaacagtaattagccgatcaatttcgttaaccgatgctccaggatgttaaaggccccaactcattgaaaaggcttccgtgattgggagttccttgactgcaagtggtgggagggtatccaagagccgaagtcttccccggtcccaagaaccaaagccatctgctcccacaaagagtatgggtttttctcagaagaacaaaggccttttgaaatgtgcctaactaagctacgctcttattccgtggaggctttgctcgtacatgtcagactacggaccgagtggccaagctttctcaagtatgatgtcagaagatgtcccccaagacacgctatcgtaaagagcatgcgtgtctcatcatacctgcccaaatgatccaagtgttggaatatattttactatgatctagatttactaacaagtatgtttttaacatcctaaacatgaacttctaaaaagatataaaataaacacataaaaggtatgagaaaccttacagtggttgcaaaggatttaaatggttccttccgcacagatctctaacccttgtatcctttctgtagtagagtatcacaaagatctgagcccaattccccttctctggaatttggattcttcacagccttacactctatgattgagtacaacttaatgtgtgtgggcacttactctaatcactttagggtttggttttgaagagagaaagagagagagaggatttcaaaataggtatagaaaacatggctcaaattttactgaatggaaagtgttttcatcatcttttcctttgaggccatcactacct

SEQ ID NO: 223217 - DNA, 1942 bp, Cannabis indica
tgcatattctacccatccgactgatgtacaattaatcacagaacctacttcactacgaatgaatatctaacatattgaaactccgttaaaataaagaattttaaagttttaaagatgatacctttctctaaataaagatagctacaattccctactctttttttttctaatattttcaaatattgaataaaaaagtttaaatagattaccaagtccaggaccatgcatgcatgcttcggcctatggaagtaaaaagctcaacacaactttgaaatttaatgtctaggtgacgcacaacacaatcaagtcaaaattatagagctataataatcaagttggatagaatgcccttagggggactcgaccatgcttgaaaattaataaacatgtacaactccaaaagtttcaagatcaagggttggtatttcattatcaaattcaatatttcaagtcaagcattcaagaatttatctcaagcatcaataagtgatcaataaaagcttaaaatcaccaagttttcttacataggtcaaatatcaaataccttgtaaattttgttctcaacataaagtctaaaccccaaatacattgtcaaaaaatcctaccatattaaataaacactattcaaagtccaaataccatataccataagcctaaactattcctacaacaattttaaatccaaacaaagcctaagttcgcaataaaaaactacataagattaaaaaaaatccaaaaaattcttcctatacttttcaaccacaatagaaaatattcaagctcaattaagtttcaataaagttttaatatagttacaaaaaattaaaaaatttcatgctcaatggatgtgcactaatgcaaagaaaatataataagaaatttttaagaaggtttgaagagaatatataaatatataaataaattaataaatgaaaatataaataaataaataaatatataatatatagatatataccttgagacggagcccagccgattaaccccagtcgtcgagtgagtgtgacggtggtgattatggagggaggaactccggttgagttggattttgtgggtgtagaggataggtggagctagagacgagatagaggttaggtacaaaatctatcaatgtgggtttgtcggtgtgggtacgtcaatcggtgtgggttcgtcaaggtttggcaatgggtgtgggttaacgattttatctaggttttgtaaatattagaggttagagatgagagaggcggtctaaaatgactatgctaggtcaactgaaatatggtatatatgtgagaaaaatgattttttaatggcccctatacccgacagtttaaaaccgttgcctatactatacccaacggttttaaactatcaggtataagggcctaataaattcatgaattctaattaaaattgttgcctattcctgtaattattgttataaaccgttatgaatactaatttttcttgacggttgtaaacaattacttaattttttagcgacggtcctccaaaaaaaagtatttttaggaccatcgcgaattctggcttttgtagtagtgcaattgtcaaggtcgtctcaagataatgagagacataggtgtaaaaccctaccagtttagccgtgttaacgtaattttttacttaaatgtacagctcgttgctaatcaacgagtttattagaaattgtgaatatttaaaaactttatttaactatttataattatcaaaataacatacttatattaaattgggatcccgttttacaaaatatttacaaaagctttacagtgcattacacaaaagtttgtcgcccaatgactatacaaaatatgcccaactgtcccaaagatcgtacgctccaagcctaactgccccgacatgtacaatctttatcaactcgctctcacctttgctcatccttagctttgcccttacc

SEQ ID NO: 223218 - DNA, 1442 bp, Cannabis indica
aagtgtaaaactatccaagggatatactttaaggtgcctaactgatattttgacattactttggagaagttggccaccagttcttggagatattgttgttctgcggaaatgagagactcaattcattttcgggtgagttggaaatgagaaatgcaaagttgtgaattcgaattttctaaattcatggatctttgttagggtgaaaaactagacgggcggtcgaaacctcatcagaatcgtataagccgaacccagtgcaccagaccttttgtcaaccttggcacaaagtacttactcccgagcttctaggatttcatttttgatacttccagggcttctgaacttgaggacaaggtctcctaccctattttgaccatttcagattcaatgattgcatcaaactttgcatttgagcaattgaaggtagcgtcccaagttgattgtcaacctgaatgctaggacccatttccaggagcttgagtttgtggttttctctccgagtttgcttgaatcttcaatatttcttgtgacgaaaataatgctcagaacaatttcgatcagattgattggaaacaagccaggttaataatatgtcaacctgggttcattgctttgcccctttagaaattctgtttggtccccgaaaatagttgaatctcaatattttctcataacgcagaagatgctcaaaaagaattcttgaaaaactccattgaaaatggctcaagttgacaaatgtcaacctgggcgctaggccctataattacacctaagaagtgttgtttcttcttctaaaggacctatttccttgtttttgatgaagacagagaagatacaaaagtaagatctctgatctaatacttggaaggcgcccagattgacagattatcaacctgggcgttgggtcctcgggccccaaggtgctcaaaaatgaacttgctccaattttgattatgatgcctcaaatatatccgcggtatgtctagttgattcccaaggcatgttttgacccttttgcactaagacagtcccaaaaattgaaacctagttagaaaagtcaacatgggcgcccggtgaaaccctaggtgcccgtgttgacttttggattgcaagttcgtgtaattttaggtctcgggccttggattaggtttctccatgtcttcatggtatagaatactgaaagatagtgagttggatacaagttgggcatggggatagggtcccctcccagatcaattactatgacttgggtgtactcaactttatgatgtcatccttcatgtcacatgttaaacattgatgtacacatcaccagggaaagtttccaggttaacattttcccccaagtcaactttacacatgtcactactacaatatgggccttaagcttccttttttttttaacccaattttattaaaagggaagctaaagggtgtgaaaa

SEQ ID NO: 223219 - DNA, 3049 bp, Cannabis indica
ggaagagttagattgccgaaatagataggtcagcgatctgataaggcggttcaactagagaacatgtgtaagaggccaagatctcatcagatatccacttcaaggaagactagttgatagatcagggagtgtctatcaacaagctaaccaacctaccccttcagggactaggacagatcttcccttgctagagggaggacagaccttgcatcaaaggtctaacgacaagaacagccaaatcccagtaaccaacgcatgggggccagggatctcaagttcagtaacagcccccgctatccctcctgtgaccggccagccaccagcaggagtccctatggccggccagccacctaaagaagtccccatggtcggctagacatctccagaagtcctcatggccggccagagaggagcactccctccctgagggaacaaatcacccaaagaccaattttcaggtgacaaggaaaacaataatttaaggagtgaaattaatcacttcagacagttggatccaccaaactccaacaatgggtgtgatctatcccatgttaatgcacaaactccaccagccaggcaaagaagtgtgggcggccaggccctacccagcatagggctggctggtcatgtacaagtatagactcaaggcttgctggccttgggtataccctctcctatggtatggccagccatgctctggatcattcgggactgcaactcaatcaaagaaggccaatcaatcaggcccctgcagcaataaatccttttgtgcaagcacagttggatccaatgtgagacatgctcaaaggcctaactggtccaaaaccttcagaacttgagctagacaggtcaaaaagaacaccaatctcagcatacatcaatgccttgcccttgcctaaattcaagatgctgacttagaagatgtgcatagagaaagaagatcccctagtgcacttgaaatactttgagatccaaatagatctcctatagtatctggagatgtgcaatgtcaaatctttctagcatctctagctgaaatagcccaacaatggtatttcaagctggccctaggaagaattgactattgggaagaattcccctaggaattctatgttcaattctctgcttcaagacaaatacctgcccaattggaggatcttgtcgaagtaaagcaaagacaagatgaacccttgaaggactacattcaatggttcatggctgaggccaccaaggtcaaaggtttgaaaaaagaaggtcgatatacggtcatactcggaggcatcctaccattgagtgacttctaaaaagatatcagaagaatctcaacaaacagcgcggaggagttcctagagcgagctgatggcttcataaagtaggaagaagttgtctgacaagcccagataagagggcatgtcaatggtaaacaaacacagggcctcatagcgccccaagcactgcccaacatgccgaccagtgcagacaatctttgttgattctcaaacaatgataatggtggaggcaagcacaacaacgatggcttagaccaacataatggcaaaagaggggattcaacgattcccttatgccatgaagcccaatggagaaggaggggaagtgtgcatgcttcactctcctaacaaaactcccaaagaaaatcatgctcagacatcccagcagggcaaggcaacagtctgagggctggcctccacctctttccagttgcacaagcaggtgctaacaactctgcccaaacctccggtggcaggacacataggggtcgtcattagcggactccatattgtaggcgagaccagcaaagctagaaagcactatgctcaaacactttgtcacgagcccaaaagtgacttctcaacaagcaaagaacaagactctaagcaaccaaagattggaaagcccgtgatctctttctcaaaaggagatcctgcctaagtcagtccccacgcaacgatttcctggttgatactgcataaatttggaatatggttgtggcaagatacatggtggacaatggagcctccttcaacattcttttcaaaatcaagacatggaaaggcgatgttccaactccgtgacttggcaccctacaatcaagtgatgtatggcccctttggccaaggcatcacacccatcaggtatatcagattacccttcactgttggagaaaatccaaccaccagaactctgatggcacagtttgtcgtaatcgacgttccctcgaatttcaatgccatgataggcttactagacctataaaatctaaaggcaataacatccatctaccacctttgcctgaaattctcaacaaggcatgaggtaagatgtcgagaggatatcggcaatctgcccctcactattacaacttgaccttgtccaaagccaagaaataaaagatgcatccaccaaatcaggagcatacaagtttcatgacagacttaggcctatactgctacaaagtcatgccttttagggctggagaatgcaaaggccacatatcagaggcctgtgaataaaatgttcaatgatcctatcgaccgcaacatggaattgtggacgacatgcttgtcaagtccaaaaaggttgggggcatatagaggacctagacgaattttaaaatcctcagcagctacaacatgaagctcaaacccagacaagatccaagcccttttagacaagaagtcgcccacaactgtcaaggaagtacaaagccaaacaaacgcattgttgcactcagcaaatttgtgtccaagtctacagacaaatgtgtacccttcttcaacattctcaaaagcaacaaaaaattcaagtggagaaaggaatgtgaaaccgtattccaggagctgaagaatactccttgacaacaaatcccctgcaacaagcatgtttggaccaaattggaaaggtcctcaccatgttacaagataacagtaaaggtgcatacaagtctggcgagtacaacaagaacttgaagtcaaaacttctacccgaacactgaaatagggaacatctcggtaagtactctcactagcca

SEQ ID NO: 223220 - DNA, 1111 bp, Cannabis indica
tttgtaaataattatgattataacgtatatttttttttacatttatatttttttttatattgttaaataatcatacgataaagtaattattattatcattagtaacataataaataaaaaaaaacaagttagatatttatttgtacttaatttaaaattagtttctataaattatatatttccttcaaaaaaattattttttttcttaaaaaatatttagaagtataacataaatatgcctaacacgcttataaaaatttctcccctgaccagcctttgcatcttctttcctcaacaagcatgttcgcaactcaagtttcatcttcgtcttcatcaaacttccagagtagtgatgaatcttctagtctttttccccccaaaacgttttttccacccgtctccgtgtcgtggtggctccacattaatggcgattgacagccaaccgtccctccattatcagctgagatcagaatcttcatctttgctgacgatttgtgggcaagcatgctaatccattaatgcgtctcttgtaggtttgatctccttactgaacaaatctcatgatgatccctatttgatcttgattactgttgtcttttctacttctcatagggtttattgtcttaatttctatgtctacctacctagtcagtggctggatttggataatcccccgcctgatctggtattaaatttttgccttttggccttcctgatctactcgagtacaactcgagatatggcagtttcctctactatcatcttaattgttgtacttcttttttcctatttaaacttgaatttaggttttgagcaaattaccttttttatgcttagaacaccaatactttcgtcgtgtattcctatattgctaaatatgcaagacttagcaagatctttttctgcagcccttcacctcactgatactgaaaacacaatccactcacttgctgagcatgtcgacccaaatgagggacttccaccagccccaccacagtttcatcttatggccaccatttataccacaaagaattttaaccataatgctttgaaaaaaaatttggagaagcattgaaagggacaattcgcagttagtgtcaaagaaagagcc

SEQ ID NO: 223221 - DNA, 7844 bp, Cannabis indica
aagcagccagagtggcgtactcgtgtataagagccattcattccgtgggtgtaaggacccaatggaggcttgaagtggggacgttgaagtttgtattaaatatgtggaattaattgttaattattttgtggttttatgttagttggctcgaaacaaatataactattgcattagagtttcatcacagttgctttgaagttgacttcttctttctcttctagccgtcgcagttgaaatttttttcaggcaaagacaccttcgacttcttcttccctagacaacgaccacctttagccacgggggaagcgaaattggagtcatcatcatcgataactgggcgttttcttttagcgttgttaacaactgatttatgacccatttttgacaggcccgaccctgggcataggcgggccaggcttgtgcctaagcccacctagtttaggggcccaaaaaaatcttcatcttttaaaattacacaatttttttgctgatcaattttgaaaaataccgtcttttttttctaaataagggcccaaaaataattttttcttatggcccactaaattttaaggctggccctggatgttgattgacatgtaaaattaaccaatccaatctaatccacatatatttataaaaacattaaaaaaattatatatacaattaatattttaatgtaaagaaaatagtaattcaaagtctaatgcatataatacaattatatttcaaaacttaataggtcaaatgcatactccattcttatatataattttattttctacatacagtttaaaacaaaattaaacatttttttatacatacaatttttttttctttgaatttgttatttattattttatttattttaatttgttgttgaaaatataaaataacaataattttgttatattttgttgctaattatgttaaaaaatatttttttttcataaatattaaataatttaatattaaaaaataatcaatccaaaataactgattcaatccgcacttttgcggattagattagattgaatttgagctatcgtgcggattggattggatccaaaatatgaaatctacacttagtgtggataggatgcactataagcaaaatcatatggattagattggatgaacagtagtaaatatgaatgcagtatgtatatggattttgttatatccttgatgaaaaatttttctatgaacaatacaaattgaagtttgaagaatgagaaggaaccctcaacccgcaatagatagtggaggatttattaaatgagtgactcaaactattaaatgttaaaacataaagaaaaagatataggacccatacataggcccagctagtagttaattaatagtattaccccacatgcacatagattataaagcattgtattttagatatgtacacaactttttatatataaaaattattaaagaaaaagagggaaaccaaggggattttggtaccctttctaaggctataaaaagagcaagtgtctgtatggttttttccatgcacaaacattgatccattccaattatttcatctttttcatctctttctctctctcatcacttatagagtcatctttcataatttaaaagcttaataaagctagctaaagaagaatataattaagaatggtgtctaaagtagaagaagccatgaagaagagacaagtagctcaacaagatcagcagcagctgcagcagaagttgatgcagtgtaacaaaggaaaagtagtcaagttcaagagaagtagctctaacattgaagacgacggcgtttcatcggccattctcttgcttgcttgcatagcttgtgctccttcatatccttaattattagaataataattacaaatatatatacatataaaaaaatatatacatatatatatatatttaagtgaggctcttttagctagcaccaagtacgtctactatacttattctcctatgtactcgttataattagctagcaatagcatagtattattttcatttattgttataaattagtactattccaaactctatttttcttgttgtatgtagtgtttgaatttcattcattattcactcagtataatttgattatattaaatttaccaaggaagataggttctgtcactgttataatttacatttccttgttaaaaaatatacataacatgaatagttgccatttagtgatgagatagaatatgatggactctatagttgactcaggcaaataatagaaaatataatttaatttgctcattccataacaatgacacacatatatattacagtacattgtttaataataacgtaagatgtgtaccaaatttggccaatgataaaaattgtgttaaatttagcacaaattaaaatataatataaattaaatttgcataaaataataaatatataactgtactaaatataaattatattcactaattttttaaatttgaagatggtctaatcatatacgatggataattttggattagcttaaacaataacggttaattattaacggtattctttttattcaagaaaattcatagcagctggtacattgtacaagcaattgccttaatactttgtagtcatcaacatcaacagtacttatattatatatactagctaagattattgattagtacgtcaaactaagatactatatacttttacaacatgtgggcctctctgcattttcaaataaataggtataatcctgattttgaactattctccaaattcattgtttgggatgaggattttggtttaggacaatgaactgaacaagcacatgtggggtttggctatcccaatagataaccacaacagagcagaactcacatgcttccctccttttcttcaagggattattattatatatcaaggacaaaattcaatgtaaaatattattgagaccctcaactcttttgatgataaacatgagtaaattacatgggttacccatttttaattgaaaagtataaattttacattttcttaaaaaactcttataattttaagaaaagaatatattttttttctttttgaactataactctagtagaattttgcctcttaagtgtatttttgttgcaaatatataccctttgaactttacaaattgttataaatatcttcattcaattatatttgcttggtcattgttaggacaattgtaattagttagcaattctattagagttatttatctttagattattgtcaactatattttgagttgtctttatactcatctgcatatatatattgagctttgtgctcttttgattgaatgaagtgaatcattttctaaatctgttcttgaatctcaacatcgtatcagaacagcttttttttttatgataatttctctattgttctttgcttctacttctcttcgttcttcttcatccatggcgtaagtgaatgctcctactgctcaagctcctatatttcatcatgttttcttctctcataagatctcgatgaaacttgacaacaataatattttgatctggcgacctcaagtgctttcccattagaggtcacaatcttcaagattacatctcaaatcaggtccctccccttgaataatttctttctgatcatgatggcaccataaacttagttaatcctctatttactcagtggggacaataagatcagttgttatattcttggcttctctcctccatgactgaaggagttctcactcgtattgttggtagtaacacatctgctcaagtttggcataaacttgtggtatacttctccactcaaatatttgctaagatcgatcaattcactaatcaatttcaaaatatcaataaaagagctttatatcaatgatcaccttctttggatcaagatagttgtggatcaacttggttctattggtcactgcgtcactgctaaagaacacatttcatctatcttcaatggtcttccctctgagtatgatacatttatcatctctgctaattcccacaatcacccgtatacagtagctaaaaatgaatctttccttctatctcaagaacattgcatgggtagttattatcactatcttgattcagctaatattgatatgaattgcaatcctcgcaatagatcaccctatccttcatcaaatgattctcgatcaggtatcaattcacaggctatgtcatttggttgtggtacttagaatccttatgccattcctccacgaggtggttcaactccatctccatattctcccagtgttggtcgaggaagcttttctggctctccctctaattctccattgactgaatctggatctcatcccatgtgtcaactgtgttctaaacctggtcacttggcttcttgttgctatcaatgtttcaacatagaatttcctggggttggtgctacaaatctagatcatctcattgccaatatagcaacaacgaatacaattattaactcctcttggtatcctgaatctagggcgactagtcaatgcactgctgatgagtcaaatttcactcacaaagaaccatattttagtaatgaacagatttatatgggtgatggtgcatgtcttcctattaatagtgttaataagaaagtattttacactcattttactttaaaatctcttacacttaaccatatacttcatgtccttcaaattacaaaagactgatcagtgtctcataattctcttttgataataatgcttattttgagttctatcctaaccactattttgtcaaggatcaggactccaaagcagctctcatgaaaggtcatcttgatcgtggcatctatgtcattcagcctactcaattacagtctggttttactcatgtctcttaagctcaactcaagtcatttaatcctagtgttgttttgttctctcaataatgttcaaaccacttcatgtactataccttccccattttctttgtggcatagcatgttagctcatccgtcttccaaaatagttaaacaattaatgtgtttgtgtaatatttcgaattataataaaaatgatactgatttttgcgaggcatgttgtaaaggcaaaattcacaaattctcctttcctaattctaatattatttattccaaatcccttgaactcatacacactaatcgttgggggccttctcccactctcttattaagtggatacaattattatattcactttattgatgcttactctaggtagacttgggtatttgtacttaagtctaaatctgaggctattcagacctttatcaattttaaaattcaagtagaaaaagaatttgaagcttcaattaaagtaattcattctgattggagggtgagtatcaagcttttgaaaaatatttattatcttatagaattaatcacaaactgtcttgtcccacaacacaccaataaaatggtgttgccgagagaaaacatagacacttggttgaaactgcacttactcttcttgcacatgcttctttacctttgtctttttgggatgaaggagttagaattgttgcctacattattaatatactaccctcctctgtaattgacaattaaacacctttaaaaaggttgttcaatagggatcctgactatagacaacttaaggtatttgggtgtgcctgttaccgaatatcaaaccctacaataaaaacaaactagtgtttagatccctcaagtgcacatttccggggtatagcttgaaacacaaaggttataagtctttctcatccattggcagaatttacatttctagggatattttgtttaatgaatattcttttccctttactgatctggtttctcagatgtccatctctaaatcttctctacccctagttactaccaattctctcattccaattttcgttccagatatcaatcatgttccctccaccaattctccaagctcttcctcagcttccttattttccaattacactgattcaggtactgaagcctccactgttgctattcttatgcatgttccatcatccatggttaccccagctgttgttgagcctccttcagcacctgcaactattgcttcagctacaacctacaacatcaccaacgcttgctgatgagtctcctgcaacaccactagtagcatcacctactgcaacatcatccacagctgatgcactttcttctgcatccatcacaacaacaatagctcattctgcaccattttttattcctgctaatgcccataatatgataactagggccaaggctgacatttctaaggccatggttcttcttgccacaattgaacttacttcctatatagctgatatgaaatatgctagatggttaaatgctatgaactatgagattgatgctctcatcagaaacaagacttgggtgcttgttccatcaccagaagggaggacaaccattggttgtaagtgggtttacaaggttaaatataattttgatggtactattgctaagtataaagctaaacttattgctaaagggtttttgcaacaatatgaatttgattttacatagacatctagccctgttgtgaagcctcaaaccatcaagattattctcagcattgtagtcacactcataactagtgtattaggcagcttgatgttaatatgctttccttaatggagagcctcaagacgaagtgtttatggctcaaccaccagggtttgttcacaaagattctccacacttggtctgcaagctgaataaagaaatttatggtttgaaatagactcccaaggcctagtttgataaactcaggggtgcccttttgtcctttggtttacagtgtccagagttagatacttccttatttcttagggttattgttgatcatactacttatgcccttgtagatgtggatgatatttttctcacatggagttcttctccaactgtttcccatcttactcaacaactgaatgccatgtttgctcttaaagatctagggtctctctcatactttcttggcattcaagttcagtacaccactcaaggtcttcatctgtgtcagattagataattgggtgatcctcttaaaaaacctaaaatgattgatgatgatccctttcccactccaattccagaaggtgcaaaactgtctagtcaagagggtgatgttgtccaagatcctcacttttacaggagcacagtaggagctctacaatatactactgtcactagaatagagatatcttatgttgttaataaggtatctcaatttatgcattctcctcttcaagatcattagaaaatagttaagaaaatcttgaggtatctcactagtactcttgattatggcttgcttatcagaccagctcctcaacttactctcacaaggttctatgatgctgattgggcatctgattctgataataggaagagtactttaggcttctgcatatttttaggatctaatctcatttcttgggcatctaaaaagcaaaggaccatctctaggtcaagtacaaaagcataatatagaagtttagctcacaccactatagagttgtcctggattcaagctctcctttctaagattgggctcaagcttcagtacactccaattgtctggtgtgacaactggagtacagtgctcatgttcgccaaccctattcagcattctcgtaccaagcttattaagcttgacttgtattttgtgaggtttggaaatggtcttgaacaagcaactggtggttaaacataccactgcttgtgatcaattagctgatatttgactaaagctttctcttgcacacattttacttttctaagagaccaacttagcttagctttattagctaccctaagtttgaggggaggtgttagga

SEQ ID NO: 223222 - DNA, 2705 bp, Cannabis indica
caaggaagagaaatggccattttatccttccttgattctccacttaattacaagttatgcttgagtcatttttggtattttgcttttatggaattttctctacacaatcctatagttcttgatgaaataattcatcaatcaccaaatatttatttggggtataaaaattaaacttttgttacactacaataatttttacataatcctaaaatcatttttatttgtattaagtgaacactctagctcaaggtgtgcatttaatcataaaataccctaaaaaattcttttcataattttccttaggcttgatcaatatttcccaaccttaaaataatttatttttcttgccatagaaatatttttccctaaacctcgttctgagattttacccatgaaggctcttttgtgtccacgacaaaactttttaattctaatcatataacccatatagctacaagaagacataatgttttactaaaatacaatatattatttcatttaatatttcttttcttaggataccttctcaagctcatatctagacatgctaaggcatggagcgtcacaatttacatagcaatcaaaatagaccttcataacacgacatgcgtttcatgcttctgacatgtttgttaagttagttattaccgttactgttagttgttagttagtttggtatctggtggctttttagtcttttatcattcctgtcttgtaagctcagtcgagctatatatatgtttcctctgtttgtacccaattcaattaatacaattcatctttctttttctctttaattctgttttcgtaatatggtatcagagcggggaaaagaagtttcccctcgatcttgatctgttcttcatcctctttgctgtgttttctctccagcaaagactctctcctcttctctgaagttctattctgaacttcttctctcttcttcttcgatcagcgcttatatacctgatcgttcttcttttcgtccatggaaaccgataaccaagctgaaagtcaagaacggaggacaatggaggatatgccactgtcgaagaaggaattactcccatggtgcagaacagtcgcactttgcagagaaatcctcttgaagatccttcaaatccctactacctgcatcatggagacaatccaggtaatattcttgtttcacaacccctaattggacaagaaaattacatgtcatggagccgtgccatgcaattggccatatctgtcaaaaacaaaatcggattccttgatggaaccattcctaaaccccttccatctaatcttgtcatgtataatgcatggtatagaaacaacaacattgtcatttcttggatcttaaattctgtttctaaagatatctcttctagtcttttgtatgatgagtcggctgctgccatttgggaagatctaaaggttaggtttcatcagaaaaatggtcctcacatatacaatttgaggaaaaatctaatgaaccttaagcaagaaagtcaatcaatcagcatgtattttactaggctgaaaactgtttgggaacaactctcaaattacaggcctaattgtgtttgtaatggatgtacatgtggtggtgtgaaaaagattcaagaacactaccacatggagtacataatgtcctttctaatgggactttcggattcttactcccaagttcgaagcaatattttaatcatggatccattacctgaaatcaacagagttttccatcttgtaactcaagaggaaaaccagaaaggaaattccaatcctgctgcagaaccaaattcaggaatggcttttgccttccaaggagacaaaaactcgaacaataagtcgaatcctcaaggaaataggtcaaattctttcaaaagaaatcgacctttttgcactcactgtaacattcttggacacaccgttgaaaagtgttacaaaattcatggatatccaccaggatatcacaagaatgataaaggaaaagaaagctcggcatctgctaatcaggttcaaaccagcagcgattccagcaccaaacaagaaggacaagccctgctacctcaactcactgctacacagtatcaacaactattaaatttactggctgttcaaactggtttggtgaattctgatgcaggaaccagcacaggtaaatcaggtatggtcctttcgagcatgtcagattttccttccattaattcttggatattagattcgggtgctactagacacatatgctatgacaaaaatcaatttcaatgcatatgtagtactcatcctaccagattattactgcctaacaatgaaagtgttgttgttaatcaaagtggcactattgctatttctaatgaattgcatctaaataatgtactttatgttcctacatttagatataatatcatttccgtaagttgccttactgatgacaataatctttctgtcaaattctacactaataattttgtcattcaggaccgaatcaacaagaagaggattggcaggggtgaatccaagaatggcttgtacatcttggatcaaatacctcataacagcccgattcttgctatttctgccaatacttggcattcaaggcttggacatccttcgaacaagcatttgaaactcttagataacaagctgaattgtaatacttccaatttacataaagacataccttgctatatctgtcctatggctaaacaaaagag

SEQ ID NO: 223223 - DNA, 2699 bp, Cannabis indica
tggtagttccaatacgttttcgttttctcccatgcgacattaaatgcgaggtgactgttcaaatagagttcagtacctcccggagatgccttagcattgctctggtctcctggagtacgtggatcctcctcagatcttctctgggagttatcttctcatcgatactcctctgttgccaaagacttagttgatttctttcggagctgggcctctcagctccacgtgtcatctttatacaggtccacgtattttgggaaaaattaagggaaacatttacccccaagccttgtttggtgtagagtaaacgaggcttgtttggtgcctccgggtgactcatcgatttcctggcacgtgctttaggcacgtgggctgcatttatgatagtcatcattaaaatttattgcctttcgcaggcaacgattcgtttccgtccattaatgatccagagcatttaatcggtgtcagaaaagtactctagtatttttaaccgccctgatgagcatttatcccaaccgttggatctgcagaatgcgaatcgattgcgattcccaccgtacgatgacgcctgatcacacctgctttgcacccgttctggcctataaaagcaagcctttctccttcatttggttactttcaccacttcaccatttctccacaagaacacctttgagaaaaaatttcaaaaacaatagatttcctactgctattcctccatcgttgccaatccacattttaccgtcgatcaacaccaactcccagttctcaaccttcatgtaagtttcctggatattttgtgtctttactgttcatttgcatgctagggtagaacttttttggttaagtgtttgatttctgggaaattgtcacgaattttgtaaataatacgcaagtgtacgtaatcaagtagtaagctcacacaggtgaggtcgaaccacaaggaattggactgagtaccactagattaaatctatgtttctatttggcaaatcaatatttttttccagttcaataatcgaataaaaattcaagaagctaaaagagacaataaaaattaatcagaaatgagaagatagggaagagaatcctgttgataggtttacccaattgttaatgcctaattactattccagttcttgttgtgaatgacagattattcaaattaccctagctctttttagatcttctaggttctagatctcctttaattaatctcttaattagaattgcctaaaatctgcattaagctataatcccaaaaagtcacaaaagtcatgtaaataccttcgttctacaaaaacttaggttatccaaattttagcattctcaattctcactttttagatttcgaattgagatcatagacatgcaaaaggtgatcaagctttaacatggaaataacacaaataaggataatacacaatcaaagtgaacaggaatggcaattaacattaactagggcaaactttaacaaacattcatcatcttccctaaatggaagattagctcatgttcaaatccataaccattcctaaaacagaattcaacataaagaaattaaaaaggaagagagaaagaaactgttggtggaatgactctagatcttcactttgctcctctagctgctctccactgcgttttaggtctcaaaatcgcttcccctcatttacaatcacaattttctttttatttctcattttcagggttcaaaaacgaaattagcctcgcttgtacgggctctcgcctcggccatggcttccttcgccgcggcgactgatgatgtggccacggcggtgaaacctctcgccgcagctactgaatccctcaaaattggtctcttgttctcgagttatggtcgcgaccatggtcaggctcgccgcggccacaagtggtccaagcatcaactttgcgtttttcttggctccactcgtcttttattgcacttttgtaacccggggcttccatagcttcgagaaacctgaaaacatagaaaacaagcgtaattctatcctaaaacatcgaaaagcaaacataataacgatccagaacataggctagaaatagcctagcgaattcccccaaactgaatctttactcgccctcgagtaaagctaaaactaaaactaaaacagaaataaaacgatgcattagataactgaaccttccaatggttgaactaccactaccacatgcacaacttcaagcaattcaataacctgaatttcaactcaataactctaagaattaacttggatgcacaggttagaagtaagcaattcatatagacacaaaacacctcttttgacactcatatcacaaccgttctacactctccgacattccaccaacccatgttcaataagcttgaatgacatacctctctccactaaggttaacaattcttgctcggaatcaaaaggtctttttcggttacaatatcatggctcaggtaaaacgggtagatgagaagtcatttaggctacattataccataagaaaattataccgaacaagcacccacaattatccatacttttatcccaaagaaactggtaagagattaaattttcctcttttatgtgcctacctcattgttcacatttttttcaagaagaatttatcacatttattactttgtgttttttttcttctttttttttcttttcttttaatagtaaaggcacttcacataacaatttttt

SEQ ID NO: 223224 - DNA, 2303 bp, Cannabis indica
attttgcatcaacaacaacaacaactccatagcaacgcacaaaaatggctgcctcaactggtgtggtgatttcgaaattccgtacccatttggcctcgacgatagttgttacttggaacccaaggatcaattccatatctattgtaacaattcaaagccttacctattcaacaccggttacaacgtcataaacatatcagtcacatatggcaagctaacaataacagggcctgttgtcagagattgttacagtaacgacaatgggagtcgaaattcaactgctacacgagacatcactcgagccttgaatgaatatttcagtgtttcattcatagaaaacaagttttactccataggttgcgacaatttggcaaccatcaatggcttccgcaatggtaacagcaaaagccgcctccatggaagtgaagtaagagagatagtttagcagcttcttcttcgggtgtcttctctggaagatagattctaaatcgaagacccgagtttggatcggctaggacgtctctagtggcgactccgtcgatgtattgatcatgaggcgggacggactcggccatgaatttgacctcagccgataagatacttgtttggacgataaaatctagaaggatttcaataaatattggtggagttggtttccataaagagagtttagggtggactggtcgttagagtttttttaggaaggattttatgggtcttggtttattttaattttattaaataaagtcatccaataatttctcataaacaaagaattctgttatatagccacattttatacagaatagatgtattatcaattaaacatactaattaaaataaatttatttttatttgtgttatgtatgtatctatatagtagtgtaatattagatatttcccatttttcttctttcataatatctatgtacaccatggtcttactacatactttttttctcaccatatattggcatgattcattaatatttagagaatattatcccactctcaatggtataaataatgtaaaataatgatgataatacctaaagaatggaggaaacgtcaacgaaaacatttaaaatattattttattatatattattatttatttaaaatataatttgtgtaaataaatactaagaattttatatttatagttaaaaaaaattttaacacttttttattgattttgtgatcacgatattcaccttagttgtaaaagaattaattaaaacaatcataatttctctctaaaaggattgttaaaagaaaacgaatactctcaggagtgaaaaaataatgataatatatataaagatgtatgatagtactttatttttctaacatcttattattgtgaggaactatataaacttcttcttattttcttttgttttcttaaattttttctattatttaattttttttattatttagtaataatgtaatttttaaaataaaactccaactataataatgtagcatttaataatttgttacccatttattttagaatatttaataatatgttaactattcactttcttataataatacctaataattttaatatttcaataattacaccatactcttaatataaatataattgttaggaattattcttaatattgatagtttctttacacaattatttcaccataaattattgacttttaaacttatatttgtatacaatgatagtttttttagctttagtttttttttttaaaaaaagtgtagtcttaagtagacttctattatatttgtatttatataaactctttacatcatttttgtataaaatattattataccatagataaattatatgaactactctttttttttttctttgtattctcaattatttaatttttgttattttttaaaataatttttttaactatttttcagatttaatgtatcaagatggtgcggctgcacatattatataccaaattagggaatggtaccgcgcttcacgcagttttaataataattgaaaattacgtatattaaaataatttatattttatagtgaaatttatatattttatgattgaaattcatgattaattttacagcttgtacaatttaaattattaaaaataaattagtaattatttttttttcctgattaaaaaaaaaaaagaattctctaaactattagtgatgttaaatattctcgatactgagttgtgatctttctcttacttttcatcttatatggttaacataaaactgatttggcacattaaatcctaacatgttttaattatatcaatgcaatgtgt

SEQ ID NO: 223225 - DNA, 1305 bp, Cannabis indica
gttcttcactgaagaacacgaagaacacagcccagaaaatagaaattaaaccccagaaaaataaccctttcctaaaacgattatagcccagaatttataaacacaaacaacaaagataatatagaaaagtaaagagaatagatatcaccggatttatagaggttccccaaagaatctgggtacgtcctcttgagctcgcctcttccactatagatcttcaatgatcaagagattagaaagcttggattccaactcacaacattttgagaggtaatcggaatatatatttatatatacagtgtttactcctctattttcttctctgttttctctctaaatttgtactgatgttgtgttctttttccttgtgcttgaacaatctctcctgagttctggatctccgaaccacaccatgggttccaaagcttactccattgtaagcctcttccacaaactcaccctgttcttgttctgattctcagtactgatctggagaaaaatattcagatctgagttttttatttttcccttggtatttttgttgacatgattctattttttgatgttgtatatagatattgtaattttctgctttatatatgttgtagtggaatacaggatagttagttataaagttttaacaaactttataaactaacttaataacctgtctaggtaaatagaggccaaaggccacctagtattttactgctttgtaatactctgtgtaatattctggtttttacagtgtggttaatatggggtttacttcaacaatttcttaatgaaaactatcatcataacataaaccaagtcatttagaaaatggtagctaggtacaaacctgtgccataccaccacgaccttgcttttatgctctttaaagcagtaacaagaagaccaaaagtgaaaataatccccaacaatccatttgcatatagccactggaattgatatttctctaaagttggatcttcagctttaggaattccaaactcactcaccattccctttcatcattaaaaaagtaaaatgaatattcaacacgtgatttcagctactttttgtatagaattattttctataataaataaagtaccttgatagcctcttgaatgaataagacagatatcaacatgccaaaaagctctcctgcaattcttgtaaacctattgattattgtacaagcattgaatattgcaagtagaaacaacaaaagtgccgtccacacacaaaccctgcattaaaaaaaaccatatttaaatcatacagaaacttatgagaactcaaaacaaaagaaaaata

SEQ ID NO: 223226 - DNA, 2676 bp, Cannabis indica
atacttgtgagtagatctaagttcttggtaaaatataattccaacagatgcttctcttaatgtcgggcctagaggataggtttctgagagaactacacaccccatgcctgcatctaagggcaagggaaaggctgtagttgaggactctgatagtccctcttctgatgatgttatttgatggttaataacatcatgcttttgtacttgtcttgaatgtttatgattgctttttgactttgctactttctttttgtagacatgtcttctacgttaagaggtctaacaagaagacctttggatgagcctactaaacgagtgagggcaaagttggttaggaattcccgtggtgatgatgcttctaggccatcactgcctccccctccaccagggcctgcactaggcggacaagctatgatacggcctactggccaaggtgcttggaggcctagtagaagagcggggtcatttgctggatagaaggttgctaaggcagcaatctgacgcatagagggggctcttcctttcttggacgaggatctaagggagataggtgacggtggaccttacaggctttactctgccaggctttgggatctttctctggtgaattatacttttagctctgctcatcttcttggcactgtattaactggccagccatgtggcttcttgcatgtgtctggccggccttggaagcttatgtggggggctggctggccatagtagtcccaaggggggactggccggctagtgttgcggttttggcattgatgttgttttgatttgtttttataccataatgaaactgagctgagcccataattgctttaggggattttcagatgcttgtcaagagcctgtgaaggccttggaggcttcccttgtaggaaaggataatgccaattttgagctagaagtccttctagcagatagagaatgatttctagcttggagaccatgcttagcgccaggaatgtagagaacactgcccaggctaccctcatctttgggctgcaaactaaacttgatgatgataagaagaagttacaggaggctcttgatggaaagtaggccattagggaggagtatgtcgacctatgcttcaaacttatctatgagttctagttgcacaacccttaagctaaactgttgtacatgggtagtatgacttttgtggtgagaacatttgcccgtggaaaggcactgtttgagagtcgggtggagacagacctggttgctacctatcgagaggggtcatcatcgggggaacaagatgaggagtttgctgacccacctatggaggaggtggccagccaagacactgaccaccaggccgaccaacatggtgatgatggggctggcctagactctgtggatctcgatctcgcggttccaaatttagctctttcttcccctgcacacatttagacagtatttttattagcatcatttagcattgtatttgtatcacataaacaatattttcacgttctgcatagcctgtggttgttcaactttagaacattactcacttttgtgttccatgtggcctgtggcctttttggagctttactttcatgtcttatgttgcctgaggaaattttagaacaccactttcatgtcctatgtggcctgaggcctttttagaacattactttatttttagttccaaggccttcatgtttgtatctttggccataagtcctctgtttttgaacactactagtatttggccctattgcttttttatcatggattgtgtgactgagcaggtggtctttaatcctggctatcttcttatggccttgataagtaagggtccagatttactttgccaagctgaagtgtgcctgcacgacttagaggcagatttagtagcttatactaagcattcaaatttctctgcataagttctttatgctagttcaatgcattgtatagtatgagtgcccccaagtgaccatgcagacaagtctcttggtcacttgctattcaccaagtttcatagacttttcctaggttctatcttgcgagggtaccgtagtacgcatgtggaactaaaagaataatctaaaaagttaatctgtgagcaagtggctcatagacacaataaacagaatataaatatttattcattaattggtctttgttgctgtgcaacttacataaattgaatctataagcctatactacaaaaaattagcttctagatgtcaagtggctacccctgcttacctagtaaagcaaggccaacattgaagaacagagggagaccatgcctaaaagagttgtgggtgctagcgcttttgcactctaatgttgagtagatagaaccgctactttggagtaaatttctgtaagctggttactgatagtatttgtgaaggtgctctccattccagtatctttgtcggagaaccagctccatgttcttgttataccttcccagcatgtaggctcccttgttgggttttgtgccctaattaaaacccatttcaatataatcagatttactaatgttatcccaaatttggcaatctgacgtggcatcacgagaatggtgatacatggactctacttagagcatctgttcggatcaacatgccgagcaggatgcctcgctggcatatccaaaatggaatactcgacgagtcatgcagaatgatcaacacttag

SEQ ID NO: 223227 - DNA, 7744 bp, Cannabis indica
ttatttcagatctttattaataagtaaatctaattatattgaaatgggttttatttagggcacaaaatccaacaaacaaagccaaaaaatcacatcttaaatcacacactaaatcacagatcctaaatctatcaataaaatgcattttaaacctaaatcaataattcaaaaattcaaaaaaatccaaagacacgagatcttacctttgtcgacattgggtggtggtggttcagtcgagatgggtttgattttcttagtcgtggtgtcggtgatgttcaatggtgttcggtcgattttcgtggtgttcctcgtcgatcggcagtgggtgcggtgcggcggaggaggacatcgtgggtaggggcggtgggtgtagacgatcgtcgtgcggtgcggttcgacggaggaggacattgtgggtaggggaaaagggcggtggacggtggggttgctcgtgggtttagggtggatttgagagagaaaggaggtagagagagagggttgagaaaagtgggaggggtattttggggtttaggaaaaactataactatttgcccaattttagtatacttaggtataatattttaatttgggtgtaaataatgcatagtaaatcaaattttccaaaaaaaaaagtgtagagaacaaaaaaataaatcaattttttaaacttcatatgaaaatttttgttgaattgagtgttttttaatctttctttccatactaaatatgattttttttttcaccatatttcctacacttttctaactttttttcttcacaaaaatcttttcaaatataaccttaaagttccttatatacattatttttaatattatacttaaaaaatatatttaaaattatttgatatgatttaattgttcaattattcataatatgtaatttaaattttttataaaccaccacgcacgcgaactgcgacctgtttactaattattttcttataaccacacctcactccctttaccaaacgttgtttgtacaccctaaaatttttcttttacattatttaaaaaaaaaaaaaaccatcaaagacatttgcgttcttgttcttaggcttcccttcttctttaattttgatctcatttttgcactaatagaaatattcaaatcaggtttttggttaaaatattacgagatatcagttctaatatgatactctattggataattaatctggaagtgattgaaatttgtagttgtatgaattttttttcattttttgtatgaaagtaaaatctattaataatgcactaggaaaaccaaatggaataggtaaatattaaataattagttgcaacaaagggtagagtatagtatccattaatgattagttctttttattttttattttttttttttgaaagattttccattaacaaccattatttaattttaattagtggggtgtacttattaaaaaataaattaaaaaaatttaaaaaaaatttaaaatataaatcctcttattatttcttattcgacaaagacatattgggttgggataattgttagttccgttttggggtgaaatactttacttgtaaacaaagaaagaaaaaagaaaagaacacagttgtaaatgtaattgtatattgtatagttcacttatgattcacaaaaatatatggttaaccataactccctaacccaccaccatattattaaagtaactcacacccacccatataatattaatggtaagtaaccaatcgccaactaacgaaataaactatactttgataatgtaattggatcattacatttgttgatttcccataattaaatatagatgtagattttacatttaatatatatatatatatatatatatatatagtaaatcaatacatgaacttttcgatactactaatatgatatgcttattttgaagttctgtttaatttttttcctgttacgtccaacttaagatttcaaactaaaggagttgctcctcctagtgactagaaaattggcaaattaataaagaatataatatatatatatatatacatatttagaaaaataataaataattattaatactatatatgttaaactatagatcaactaaaggaattgtatatcacagccagtcgagtcactcaaacttgaagaatttggtgatctaataaagttgagaataaaaacaagaggagtgctaaggacataaaaaaaatggtatgaagtataagatgagcaacttaaaacataaaaaaagatgattattttacacaacaaagcaatgtatgaaaacatttgaagccgattcagtaggtaaaatgttaccctccaaaaccaaaacaacacaaaaaaatgtacatgtaatccaaattatatccaaaagaaaaaaacctattaaatctttaataatttttgcatcgagtagagaaagatatcaaaatcattgaagtttttatatatttgaaatcaacggtcgggatggagaggagtccttcatcaccagcggcgaaccacgtagagattaaggtccgaccacgccgcggggacaacgtgggtcatcctgccccggttgacacttcctctcggccttcagcgacgccgtttcggctcaccgccccttccggcgaggacaagccattcaagagatggacctcttggcttgttccgtcgtttgtggtggtcaacattgtcttgtttgctgtcaccatgtccgttaacgattgccccaagaattcgacttcttgtttggctcgattcttggggcgattttcctttcagcctctgaaagaaaacccacttctgggtccctctgcttctgcgtaagcccttctctatctgcatgtgtataatcttatctataccgtttggaatgcttatatggttgttgtagaaatgggttttgttgattatccctcatttttgttggaaagttgtgattgaacttatgaatgtgttaatggagattagagaaaaataatgttgatctgatctctttgttgaatgtttaatatggcaagtaatttgtttcattattcgattagtgagttggagattgagtgatcaatgagcttttgaagttctagagcttgccatgtttatctgtcattggaaagtcaataatccaacggtaaagctaaactagtttttaaacaaatgtagctcagaagaagttctgaatgcaatataaaagtattagagatttgatacatttgaaaagtagaaattagtgttcttttgagaatttttatatttggggatttccggcaacgcgctttgaattttgaactgttgttatgtgcacagaatattatttccacacgtccaattgaatcctcttgtttccttttaccatcattcacttggattgatcatgagttttgagttttgccatacctagtttcatacttgaacttcattactgtagtggtttcaaagtatcttacactactctgctaaggaggtctaacatgaaataagtctaatagatcactttgtagtagtttcatatgatggcattattctgttgacctcttctttttctcttctcaaatcactcatctttcaaatatttgtcattgattaaatggaaagttgttaaaagggtagaccatgacgagcaccttaagttctgtaaatgcgaaatgtagcaattttccttatatcaatctcttgtaatttttttgtttcctcttgttcgtatgattttttttacctctttacagattagaaaagatgggtgctctagaagtggataaagtggtccataaacaccaagcatggcgcttgatcacttgtgcttggttacatgctggagttttccatttacttgccaatatgttaagtcttcttttcattggtattcgacttgagcaagaatttgggtttggtatgcatctaatctctcagatagatgtgttttgaaattttcatggtggttagctcttattatataagttgttaatgttttagttgggtttggtattccatgtacaaatctaaactagtttgattcaacccaacccatcattcttctttctactttcccataacatttggatacattttctggccatagaagtatactcaaattaaattgaagtgtccaaaataaagaagaaatttttgtatgataaataactgtgaaaaaggaaagaaagactcccccagtgtacatgatttcttttcttcattggtttagtgaatagcttcttttctagctcacaggtttgagctaccttttcatttcttttttcttcttttgcagtaaggattggattgctttatatcatatctggttttggaggcagtttgctatcagctcttttcattcaaagtggcatatcagttggtgcctcgggtgcactttttggtttactaggaggtatgctttcagagcttattacaaattggactttatatgcaaataaggtaaataaaactgtcccctaacgcatatcaccttattgtatttgacaatattcacaaccacattatcttacattgttatatttactgggcagttggcggcattggtgactctcattttcatcattgtggtaaatttagctgtgggaatcctcccacatgttgacaactttgctcatattggtggatttttgtctggattcctgcttggatttatatttttagtaaggccccagtacagatggattagccagaaatttacttcccaaggccgcactgctactccaattaataaacacaggacatatcagtatgctctgttgattttttctctggttcttctcattgtggggtaatctcgtactccatttcttaccagcgaattgttttaaaaaggcatatcttaaaatttttaaagcacatttctaaagaacactctcaccattgaagtaccataatatgtgtcccttaatgcatagttatttgaatgagatgaaaatagaagtggttgcttcatctttttgggaatgtatagcatggcataatttccaagtttgagagattagtcaatacatgattgtgaatttaaattattcttgcatgtcaacaaatttgatgtcttataaccaaaagcttgtaatttttcagattcattgttgggttgattatgctctttcgaggggttaatgtaaatcagcgttgttcatggtgtcattatcttagttgtgtccctactgctcgatggaactgcaactctcaaaaagaattttgcgaggtaactcatgctgctcatttgtttttctttttagcctctagttttgtgtgatattgttctttatgtggtgtaatgttcattcgtaaagttccctgcttgaggggttaacatcttgctgagtgattttgggaataacatgactagagcattaagttaccttgcaggaagttataaagaatttaaggcccccaatctggcttggtcacctttatttaggaacattgttaaaatgtgttgatttctcattgtgtgtccacattatttaccatgtaatttcagacgatccaattcggaaatcagatgaatatgacatgtgaaaggaatggtagaagcagcatttttcagttatcagataataacccttcaagggctcaggtccaggagttctgccgtcaactttgcagttagacatctttttattaccccacataatgcaaggttactcaccttatctcattcttgtaaataattcattcttaaatatctgtaaacaccattttttcttctttgttttctgtatccataagcaataattggttatttttcaccgttaatcttgcaatgtgttcaaagttccttccatctaaattacaagtcattttttttcagcaatgctaggtaaatatttattttacacacataaaatacacacaatgttgacactatttttgtttgtattttaagacacagttacatgtatgcacttttgctttctgctaattgagttatttccaattcataggaggtgagttgtattcataatatagaaatatgtggtaatttttattgactgcaaacatgaaacaaaatatcaatatcaattgacattgtctctttatataaataacaaacgttgacatagatatttgggataatttcatgtattctttggaaacttctcaaaataaattttaaatgttctatttgataaatatcatgacaaaattgtaaactataaagaagtccaaccaattgagagagtatcaatagattcttttttcggagtaattggatattaatgccgctaaaaagaatctctagatttatggcggtacaaactcaaaattttaagtacttatgcccgccttctgccttatctttgctgcttctctcctaccgtctggcagttctctatctctcagatagcgaatataggggtccatccagctaggtccgaggtcctgtgtcactgggaatgcctcggcatgaggtcggtttgctatgcttggctcgggttggaactttcgcagcaggagcagtcttttactttactacggataaaccgcgttcacgtggtcgaatagaacttgctgctcgctcaacgagcgttaagtactcctctatcgtgcttgtggagcctttttgagagcgaaaatcccttaattttaattatttttgctgataatttggtcactaatgggccaagtataatagatttggtgctgataatttggtcactaatgggccgagtataatagatttggtctaaaatttgatccattatattattagataaacttagccttcatatggattggatgtagaggtggcaatttgtattcatgggttgtgtccatgttttatcgagacataggaattactagtaaatgtcaaacttaaacctgattcatttattaaccatgtcgaaagctaaaatccaaaccaaacctgtttataaatgggttgactcgacccgacccatttaaactgtttatattaaaaaagatcacactaaattgtgatcaacttatcaactcattaatatgtttatacaagtaagaacatgtttacaattgttttatgacacatttataagtcgttaaacatgttcatgttctatttaactaacttaatacaatttatatgcaaaaaatataataattataagagtaaatacttttaaataggtcattgtcgtgtcattttctggttaggtgtgtcaactcgaaaataaattgtttaataaacgggttagtcatgtcatctcgagaatgatccaaacccatttaagagaaatccaaactcgtttatcttgtgcggattttgaatcatgttattgtgtctgatctattctgtcacccctaagagcagctccattaatactgcctttattctagttgcccatctgtctttgtcaggggtatagctactaagaagagtagctaatgcattggaggaaaaaagcttgactactccaactgctatataggggcatcggtcttgggtcatggggtcaatatttgagaaaattacatggtatacccattttactttacttattttaatttttacctctatttttatattctttaagatatattcacttttatagatgttattcccattaaccttagttaatgcaaattatatactagacttaagtagataataagggtatattgggtaacccactcaaaaaagtggatctatatttaaaaaatataatatgagggtattttttattaatgtataaaaaaagatgtatttttcaacttatccctcaatattttatatatatatatatatatatatatattttaaaaaaattaaagtaaatattga

SEQ ID NO: 223228 - DNA, 12270 bp, Cannabis indica
tattgagaatgatttaaatgaataaacacaggttttaatgtgaaacgagaatattcacatagcatgtgtgacccttaaattatttcttaatgcaaattatatgttattctatctcagagatgcaatagatggaatatagtttagaacatttatgatctgaaaaagagtttatgttattttttataatatgtcactacttaaagaaagaagaatagtgaataacattaacagttaggtaattgaagcaactggattcatatccttaatttctcctccatatttgaataacaattatcgttctctttaattttctatcagtctttattattttctctcaaagattatttttttcaaccaaatataaacataagtctagtttagtggtaatcaatttcaattctcgtggttttgacctcacctgtgtgagtactacttgatacgtgtacttgcatagcgtaatttctgtaacatccagatggaagtctcttccaccaatctttagcggcttttgctagggtaagtgaaaaatacacacacttctcatcatcgctaacatgtgtacctcggggtctgtcttcccttcatacttatccatttgaggcatgtagaatcgctttggcagaggtgcttctaaaatcctcttagtacatggctttgggtcttcttctttaaagtcagacatcgttttgctttgtttgttgactaagcagtctgtgattttggttaaggcttcaatctgatcctccaacctttttctgttacaatcttgaactcctcgctcccgaatttgatcattgatattgtttttgaggtctcctccacgaggcttggctttctcacaacctgtcctttcatggaaaatgttcaggcagtccataaggccagtggttgaaatgctatcatcggggtctaagtcctcaacatcgataattttgttaactagaggagttggagcagcttttccttccctaaacattaggtcccggtacctgagcatggggcctattgttttgcatgtccctccgtcacgtattgtttggttgacctaaccctagatctcgatcgaaccttttcttgtggcctccagtactttaaaatttgcatgaatccctgcacttggattttggtccttgagaagtgcatctagagtgaagcctctactgccataagactttgcatggggggagggtctcttgtatttgccgggtagcttcctcttgttctaccattttagtctcctagtctcaaaccacttgcctcaattaaatcacctccaaatcatttgtatattcagtgtactctccctcctctttgtaatatttgtccctcagatcatcttcatagtattcctggttgtcttcttctatgggatgctcatcatttggatcctttggttggttaacgttacgaggagattcgtttcccaccgttgatgcctctttgttccccatggcatttgcctaagcatcttctggtggaaaaggaagatggtcattgttgacgacgggatttttcgccaactaaagaaagtgtgtttaaagaataaataagacgaaattttttatgtggtttaggcgttaacgagccttagtccacgagtcaatattattaagcttatagctatggagtatttattcttctttgcatgggtttctaactccaaaaattccaagcctttgcaagaagggcttatgccgtattcataggcaagggattgggtttctaagctgatcccgacccgtttacagttgtttttatgttttaaagtccactaatgaggtaaatacaataaagtattaacttttgggcctagtaagtgaggcccaaccaacatataatcgtcgtttgtatggtgaatagtgtcattgtacggaaccgaaagccttgtgaaatagaatgttagaggaaaatgggcaaattgggcaacaaaaaggtcccctctgttttaccgcgagcctctttgtggtctaacacatgggacaagtcccctgtggtctcgagattttatcagacatgtgccatgtgtgctgcttttcgcgacttatgttgttgccaaacgctccttcgcatttcgcatccggaggtcacttacaggtattttcccagagttattatttacctctgagggaggttactaactcatccagtttcaggtctagagttcgtttctctggtgggtgaaccctctgcataaatcgtatggagggccctctaagtgggccatgctttcatgttgggccttaggacgtcctatttcctagctatctgaaaacacagatgatagggaccttgatggaattcttaggagcagtaaagtattattcgagcagacgattttgccggtttctcttttagtttttgagatgttaactacatagctcattgtctagtctagtataatttggttcgtagagatagtgcatcattgttgcttgtgctgcctttgttccatatttgccgattcttatgtaatcttctcttttatgaaggattttttttaatagaagaaataaagtaaaaataagcacttagatatgtgagtgctgaaaatgaactcatcttttgcttttaggatgacaaataaataaaaggaacgaaaattgaaataatttggagtgaaattccaacgtggccacatctctctcataatggtggagatcggatttgttcttagttcgggtaaagattagagtgtagagtgtagagtagaatccctcaaaatggcttcattttcttcttctccactcctcttaccaactcccatttctcccacaacctctctgcgcagaagaagaaatgcttcagttgcggttcaggccatagcaaaggcctcgcaagagcaagacgatgattccaccaagttggtcactttcttgggtaaaggcggctctggaaagaccacttccgctgtatttgctgctcaggtaataattctctcaacactttatttactattcttttttaaaacagaaatgcctaattacgatccataaacgggcaaaaatagttaacaccttatctcccttttttcttttctttataaaatgtgacaattggatgactatcaagaagtgaaaaaaaacaattaaaatgatgctaattaggttcaaatggtcaaattgtttgaattcctgattctgggctgttttggataagctttctatatattatgtattacttcttatttgaaaatttgtatgaagaagtgaaagcttaccagtagaaaggtgataagaatatgagaagttttacttgctcgttatattgtttcgttggtcaattcatgttgcggaaatgtgtagaattgagattgtgtgtatttctaaatactttgttatttgagctgaatgggatttttgtttacagttacaattatgtgtctttgtttaactctctcattcctcacataactgcattgcagcactatgcaatgactgggcttaacacatgcttggtgatacattcacaagaccctactgctgagattcttttgaactgtaagattggaagttctcctacagcatgccacagcaacctttcagctataggtttgaaaccaccaaagtgtgtttttcaacttcttttttcctctgtctttcatcatgggttgatttggattactgttactaatgatttattattcttgatgattccagatgattcttgaaccccttaatcgcctgaagcaagcagatgctcgtttgaacatgacccaaggagtgcttgataaggtgggtgcttgatactttcattactatttattggcctggtgtcattcaaagaatgcagtcccattcgaatgctttttgtggatgattttttgaacattttccctgctttggtgaggcagatagttggagaagagcttggagtgcttcctggtatggatcctattttttcagcatatgcacttgagaagcttgctgggttttttaggaaggttgctaaaaaaaatcacaacaaagataaatttgacatagtaatatatgatggtatgagttcagaagaaattctaaggatgataagtgcagccagtaaagcaaggttgggaaaccttcttcccttcccttcctcccctccctttgtctctcatatgttaatatgcactcaatgacaagactatacacagattgtacttaaaatatctgcggaacatggctgaaaagactgaccttgggaggttggctggtccttcgcttctgagacttgttgatgaagccatgagtattaatggtggtcaatcctttatgcgtgggcaattaagtgcagaaatatgggacactctggaacaaatgttggaggtaaatgttattctcattctttacaggggaagttttgctatcaatccaatttacttctgcattggttttttgtgttgcagagaggatcttctgcattctcagacccccaaaaatttggctgcttcctagttatggacctaaacaatcaaatctctgtaaattctgcatttagatattggggttgcgcaattcaagctggtgcatgtgtttctggtgcgttaggcattggttctccaaatttagatgcagactcaatagaaagagtcaaggaaaccttttctccattaccatatgcttttattccacaactctctattggctccactctagattggaagacaattatttcgaacaatgtcaatgaaggggcaagaaatcttctctcaataccagcaagtggcagtagcgggttatcacctgtagagtttaatggagccaaaaggacagtaaccctcctgttaccaggttttgataagtcagagattaagctttaccaagtacgtttattatctattttcttcttaaccacaagttttcatttttgagttctggtttcttattaagctatatagatgataacctaaacaagggtacctaagatcattactcgttgacactttcgcttgatgtacaataaataattacagaattcaacactacactaccagggaacattcatgatttcctctaaaatcactgaaaaaaaaatgtgcatttgtttattgggccttttccaattgtcagttgagcttttgtcatcatggttctcaagtcagtggctttaccttgatgtgttacaatatcaagctggttagaatatatcattgatatgttaattatttactaatgcagtataggggaggatctgagttgttggttgaagcaggggatcaacggcgtgtaattcgattaccatctgaaattcaagggaaggttggcggtgccaagttcatagatagaagtattgtaatcacaatgcgataatttatttgagttttggtattaaaacagttaagatgatagcctcataatatattaaactatcttttcatactaaaattcatgtaagatgatagcctcataatatattaaactatcttttcatactaaaattcatgtaagatgtcactgaaaagaattgaccagcctgttggctttggagattcatttttaaagaagaatttttagctactattctgtgagattcttttttcttttgtttattattcattgtacaaaatcaaatatatgatattcttgaaacatggatggatgaactgaagaaaaggctgggtaaatgaaaatagaaaagaaactaaaaaagaaaaataggacaaaagaaaacctaaagaatctggtaattccagcttattatctccccggcttgtgtattcatacggtttcttagatcctcaaatgccttcatgctctctgcatcaaagcctccagcaaactgaaacaatgcaaagttagcatctcattgatacagtctcatgttttgttgggattttcatattgcaaggactagaaacacaacattgttaaattatacctgatgaacccggaaagcaaaacggacaccctgcagacagtaaaaattctctatttggttccttttcaggtccacttaacgcatcaagctctaatgctacacgtttcatgtacttccttgccaattggacagaagagagcttaatctgcaatgagaagaatgtttaacttttaatagtatatagcacatgaaatattttttcttcttggctcaactgttcatataagcctattaagcaaactaaaacattagcagaacaaagaaacactttgccattacgaaactgaaattatctatgatgttatacggttaacttatgcagtgactataaggttattaatcatctgtgatgtaatttcaaactccatgtctgtagatgaatgtagataatagatgaactgtgaaccaactgcaagatagatttcatcacattatattttattttcacaaaaagaacgtaccttgccaacaactcctgaatctaacaaccaattgactggaatcccgaattctttgtatcttgagatagccatgtcccttgtacgtaagagtgcatacacactctgttctactctggaaacataacaaagacaaaaaataatatgaatatccaaagctaaaataacagcacatagccatccataacatgtatgagaaaaattcttacttttcaagcaaggagtacatcttcttcaaagcagcttcatatgggagtttcggatcatccacaaaggaggttacacgtttctctaatttcatcaggtcttgatactcaaaagctgcttctctaaaggcgtctgcctttccttcaggccaatcaaagtgtttgagaactgcccgctcatcaaccttaagaaggcaggaaaagaaaaacattacacacgacaagcactatgatatctaaactattcaagccgtttagtttagatgttgaatcacttcaattaacatcttaatgaaaaagcataccaagaatgaaagttcttcatctagccagtttacaaaggccactagatcttcaatgtcagtgaatgaagctgctctgatttcagttgccaatgacatgacaaaatcaccttgggtttccacatcagctttcacctacatcagttcatacaattttaatatctctcaaccctgcataaatatcttctagaaaaggagttaattgacgctgaaaattaaagaggaagttccacatacagctaagaggaatgttgatctgttttcaatttcccaaatcatattgctccttgcttcagatgcattgttagatcctgtagaaattaacgacgacgtatccttctttgcttcacgtttcatgagtgactgatagaattcaaccaactcgggagccctgtggaccttgtcaccactgcctgctccccttggaagacttccaggtgggggaggtggacgaggtggtcctccaggaggcaggggaggtggaggtggacctgatggaggaggcggtactccagtagaaggatttgaagttgtagtagcaggagaactcccagatgctctaggaggtggcctaggtgtccttggaggcctcttctcaatttcagatagtttcatcttgcttattgattgagcatcaacagccttaccatcagtagtttggtcattttcattaccagaaacaattggcttctcctttaattgagtgagttttggaggtagtataatagtgctcttggctctagactcaaagcctgagttaacatttagattatcaccaaaccttgctgctcttgctttatctgctttttctttgatatgtttttccctctctaatgctaatttatgacgatctttgtacacaggatatttttcatctggagtcccttcaaccgacttggacatcaactggaatgacgttgcaacagaattgagtgagtcacttgaagcttgtcttttgaaatttgattgaactggtgtttcaggtgagcctgcatgttcctgctccatcattccatatgaagtgatagcaacactgtcacttgcattacgtagcatcaatgattccagtggacctctgggtcgaacactcatacttgccctacttggagaatttccagagaaagatcttgatggagataaaaatgcacttgaatcatctttgcttcggccccatttcttcagcttctgaattaagctagctttcttacttatactactgaatctactggtagaactatcaatagaagcattgtcaaagtcctcacttcctggggaagacgggtgggaaaagttgctttcgagatctgtatccccctgcccacgctctgatcccgcgtactctaacataagctgtttagctttttcttgggattttgggcttaagttcttattaagatcacgagcagacaactttcctgatggaatctggtaattccggagctcatatctcaagcatgcattgacccaacgaaggtaaactagttcttcaacttcactaaacctgttcatctgaagaccttccacttgctttaacaggtcttcatttgcatgtctcagattattcaattcctccctcacttttgctaccttatcactctgcagggaacattatcaagtaagcttaccaacatacataagcatgatacgttgacaaaaacattttcaataacaacaaaaaattatgaacttaacgagttttaacaaatgcataaccacgtcattattgtatccatgaggattagtttctacttaaaagtctcatagggctcttcagttgaccacaaaaagatgacaaagcagaaattttaacagcttcatagcaagagtacacagcctactattccctttccatgatcttactgactaaaacttctcaaattaaggagaaaaaagtgggggtgttcaaaatctgattgccaaagaaagtaaaataccataaattaagctattccctggcacaataatgaaaacgatagaaaataaaacattgtgctcatatagaagattgagaactttgagataacatttagctctaacctcagtcatgttggagagaactgctactctggattcagcagcatcaagcttaataactaactctctcttttcatgttgaagttctttattctttctcttgagctccacaacttccatctctaactccttgacagcttttaacttcttatcgatgtcagcatctttcttaacagcttcttcctccttagcctgtagaccagaaacttgtttcttgagcagcaataaatggccttttgtctggttagcatcaagctgaatctgcctttgaagctctttaatcctgttccttgctacctccagctccttctttgctgcaactccctgagaaatctcttcttgaagcttcttcctctcagtctgcaaagagttaatagtaatattgagcatgttaatctccaccgatttgatcttcacctgccgttgtaactcatcaatgtctgattcttgctccttcagtccatagtattctagcaattcaccttcaagcttcacttccctttcctccagctcctgaaccagttggcgcaacctttccagctcacttgcattgtttgccatctcagtttcatacattctgtctttctctgaattatcgatcttgttattgggtaatggaagttcaatctcaccggataaaagatcttcaaattctggtaaaatatcatcatcttcaatgctaccaggaggattatcactagcttggctaaatatgctattaattaatttaacctcttcttcctcttcctcctgaaatacatataatgcaatgttaattcaagagaaagacaattaaaaatagcataattttcattttatttccaaattaaggcctatgaagtctgcatgctactatgctagtgccataaatggaaatttgacagaagctagcactagtacttacatcattccctttgtggtaatcatgagaatatgcaatctgctctttgtcttccgcctcgctttgatgatcaaaagttgctttgtcatttcctgtaacaccataataatgacatgagcaaatagagaataaaatccacataaaaatggaatgttaaaagtatcttcctttaagatcaggcagcaattattactattcacctgcaataaatcaagttgacatgctgctggaattctatattgaatttaatttttattgtcagcaaaacaaaagataaactaatatatgcaaaactcatggacacgagtacctgaacgccgggttcttgaggttgaagaccctgctttttttgcattcagctggttcacagcataggctgcaaccgaagcagcaaccagaagaccaaaccgaactatcatgaaggtattgtaggcagaagaagctcaactttctgctcacctatagagaaaacctgatataatatcaacccagctcccatgtctttccacccccatacctgaaaattcaattcaacagaaccctgcaaatgcattcaacagtgaccaagagcctataatttccaggacagcttaacatgaaaaccataacgtcctagccatatccaactacagacatatcgacatcatgttacaggaattgcatttattcggctatccaatatagccatatccatgtatagaacattctcacaacatcagctttatcatctttctgtgttttaagaagcaaacatgcctcttatggtggtgtccctagtaagtataattccaaaacaactctagtgctacgaggtacagcaaccaccaataactagtggccaatttttctccaagaggattgataatccgtaaaaggatgggtctagcttcttatcaagttgtttacaaataatatgtgcagttaaagtgaaccaagaaatacaactgaaaaagttcttttcaactgtaaatttcaacaagaaaaaaagggtacccaagtcacttccttgtttaaagaaagttaagttggagtcaaggggataagaaacttgtcttatctccttttcaccactaaaagaaaatatttcaattggctgctattcaccaatttgtatccatagatttaatcaaaatcttatattgatcaaactcaaacgcaaacttgatcaatcattgacacttgcagacaagcatcaaaaagtaaaacattgatcaaagggttcagagtttgtgggatgtgagatgttacaaaacctaaggaagcaaataccagaaggtgggtccccatgaaattgtacattaaggtcatactttatttgggttgtccccaaaatgaatggggaatgtagaaagttggttagatgagttaagcttgtgtgtgaaatttatatcttagccagtatcttggtggactggagcctacggcacacgtatccaatcttaaaaaaccaaactttaccaattttggcccctactccaacacacatacacttaagcctttttggcatttctctggaactttgttcccatatggttgtgctcattaggacccaaaaaaaaaaaaataataattttaacatttcagatggctaaaatattactctcctaagataatcccacatcaaattatgaagtgagaagatatgggcaaagactaaatgaggtgaatgtagcatgacattgacaaggatcaaagatgttgccaagtaaaccacatcccttctctggcaaaggaattttttttaatccgtatggacaacataagaatacaaagtgaaaaggagaaatcattatctgggtcataaatttgttggagcccacagaagcagtggcggccaaattattatccaaaagatcagtggctctgaggcacttagtcgtccctgccactaaacaagggcacccagctggtcctcagtagagaacaatcttaaataaataaatactctaaaacatgaattatctctaagtaacacaaacgagtaacgcgaactggttctattctctagaaagaagaaagaaaaaaatagattaatattaagtgaactaaaaaaaaaagcaagattacataccaagtggactggttggggaaatttaaagcagcacagtaaatgaaagcaagaatatagcatggctgattaggtggtttgacatttggttgtgtactttgtgtgaagttgctaaggcagaaccctctggaaatggaagtggttgatttgttgtcgtttataattttcaaaagtcgggagaacaagtacctttattcaccaatgtaggctctacacatttaaacaaagtacacatttctaatacctaaaagtatatctcatttttttggtccataaaattttaacatttctattctggcatcgtctctatatttttttaggtttttcttttttcttttcttttcttttcttttttttttttttttttttattttttttttttagagaaatacaagtacataataatatttctaccaagtaaatttatcaataataaactaaactaaat

SEQ ID NO: 223229 - DNA, 1772 bp, Cannabis indica
gtaggtaagggcaaggccaaggctgaggaaccatgaggacgagccgatgaagattgtacatgtcggggcggttaggcctggagcgtacgatcctcaggacagcagtgcttttgtaattagtcgctaggcgacaagtattttgtattagacagtaaacttttgtaaagtattttgtaaatgggatcccagagtattttgtataaaatattatataagtttaattaaaaagcaaaaattttaattaatcatgatttccataaacctcgttgattagcaacgagctgcacagtacgtttaaaaatcacgtaatacgcctatgctagttagggtgttacagccacatttggtgaaggcattttttgaaagcatcttggtgagaagcttgattgcaaggaaagcagagggttcttcccctgcgtcttcttcaggctcttcaggtaattcagacagagaatggatcttagtttcagtgtcagtgagatttagtgtggtgttgagagttagagagaggtcttccatggaaaatcagtcaaagaaggaaagaaaaactaagaaaaaggtgtatgatagttggggaaatgaggtattcgggttacagtgcagtgaggtacgatattggatgggcaagaagaaactgaatgggatgaatattacataatggtgttatatttatagtggagagtgtatcggttataatgaaggcacggatagtgcttcgagaatttggtggggatctatgacaaaaggaattactcaagcgccactgagaaaatattatcacaatatggaagaaattgaatgaaagtctctgcaaactaggggaagtagagctcgatggtgaatttctgtcagtgccccctaaaaatttccaaaggacgcctggaggggagggaggctttaatgaccgtagagcaatgatgagtaaccaggggattcagagatgtgatggtaaataaattctatttttggaaagaaggtgtcgagatgaaagggggaaattcggttagggttaaatttaggttgaaaacagatttggacaataacattaatggcagaagagacattgtgaaaagagttatggtggaagtgatgcatacctacttgagaaaggtctagatgtagagcggcgaagtaggtagtgatgattgttgggtcgatctgctaatgtgcgaagccgttaacggcatgaaccaagaggcttcgagtggactgtagtggagagcaaccgttaccaggggttacggatcctggacggacgaaaacactgagtgccggcgatgacgacgacgactgaatcatggtggcgcacgaagaaaccttagcataactcgaaggaagagtctagaacttcgtagtagttatgactttgaaagaagactttggtatatgggtaggactttttgcaactaacacactcttaataagtaatacatgtgattaaaatttataatttacgtataattaattatttgcttatgagagaacgaagagaaggccaatcaaataatggaggccactaagctctcataagggccaaaataagtacaaagagacaactttcattgtttatcccaatactagttttacatcattctttcttagaatgcattttttttttccatttagttaaaactcttgcgaactatctatggtcaatatatttagatgccttggttaattaattatttatttatttattttgggtttggctctccatatatgcttaaaccattaggtgggctaccgttaagctctgaaaagaatgtaaatgg

SEQ ID NO: 223230 - DNA, 1694 bp, Cannabis indica
gtagcgtgccttagcattagggcgttacagggagaatagcgaggcaccggagaaaagtaacacataccttggctacaataagcaaattaagtgtcaaagtcagaccggcttggagtacaagaatgcgagatgaccatctcgctacacggaaacttcctatagtttcatccaactaccatgagcgaggctcataaccctggcaagtcagaagatttctgtatacccgcgatcaacgaaagacacatcttgtcgacctcagaaagaagaatggttccagctcgccattgggatcacaacaatctagttctgtcgagacatctccaaattcaacaattaaagacgtgtttaatacacgatatttgtaacccatcaaaagcgggaaaatcacagctaaatgattttcaaaatcatgcaccgcatttacatttcatgatatgtaatcagatcccactatttaaggtataatgactgtaattacgttttggtcagccttgtaattaactgccactatgcaattataaatagtggcaaacaatctcaaaaaaaaggacgaaaaaatcttatgcaagaggccctaaaaaaatactcagaaatctgaataagattgactcgtggactatgcagaatttttaacagcaaaatcacataaaaaaactggtgttcatattttatttttctatagcttttatattttctgtgatgaatcataatcgtgaggcacaaatttagttaacgaaaatctgcgttaatagctgtcatcaaagatgcttgcaatcaggtggtagctggagttgcaactactctccccggggccctagagtcaactcatgctgaaggtcttgctctcaggacagctcttcgatggtgtagtgcaatatgttatcctatcttgatggttgagtctgattctaaagtattagttaaaaaaagtttagacaagaatagagatttatcagtcctttttgatgttataatggatattaatcactctttgtcaacatttcctaatgtttcattaggcatattcctagagagtttaacagagatgctcataatgtggccaaattagctttagggcttgataaagatttagtatggaatggttctatccctcaccactctaaattgtagcttgttttctaaagttacaaatttcaaaaaaaaaaaaaaaaacatccaacttattatatatgatgatataaaaataaataagtttggaaaaattttaaatatatttataagatttatattttatttttaattaatgtactattttttaaatttgcagtggacaagaaatttgagtgagataaactaaatatgacaaatgagtggagaaatgcgaaaaaatatcagtggtgtctagcattttttttatatgttattatcactattagtttaattaagtatcgggtctcatatagttttagggactattactaaccaattacaggacaacatctctaaaaatgctaagtaccaggaatgccaaataacaatgctccttgacatcatataaagtttttccttatatctcattagctacaaattacaaatacaattttattctttttataattatgcaatattctagaaatggcacattggcaattgtaacacgatcaactatttgtaaggttatattcatgtatcttagacaaatctaaaacatgtttgattatgtaatcatacac

SEQ ID NO: 223231 - DNA, 1321 bp, Cannabis indica
ctgtagaaaataggtagaaaactaggtttaaaactttgcaattttctttggaagaatctgtgaaacttcacgattcatgacgttggtctttgatcgtaccttgtctatctttcaccttgcttattcaaagcttcgtgaaacttttccctaaacccaaaaatttcaaacttctgggcttcgacttattgtggaatgctttaattctttaatctgttgagtactccgtctgcatatttgcctgtttattattcgatatcctgaccaaacactcatcttgtgtgttgtcttttgtagatgaaccctgatgagttttgggaagcgaacaccgaattgaccaggacttgcttcaacttttgtacgaggatcaccatcgtctttgtgccagttcgtcctcttcaagtgacggattttccaatttaagctttccgtctagccacaggatgatggctcgaacaaagcagacgatgcgtaaggtcaatgcatctgatccccacgtggcccagcttgccactgctacgtccctacctcaaatcaccgagcctcaaacccaaagaaggggatgtgttcctggtcgggtgctcatactaaacaaggggcaatgctgcctctgcacctgtacttcaggaaggtggcagaattcttttgcctctatccgacctagtttactcccaagggcattaagtatttgtctaccctgttcgtcctctacgccatctagaagtggggcgtgccttctccgcacgaggtcagttgattttttaacctaaagtctacccccaagcaaggtaagtcggggtacttctacttctctcagcctgacttcaagtggttgaggggcaccgtggacaaggccgtgagcaaaattgggattttttttttacgagtattacatggtggaaggcatgggcaccacttatactcggtttcagtagatccctatataataccgtccacccctcacgctagctcttagggacagagctcaaaagattgttcagctgtcggatgatgctcggaatatcactttgttgatcttagaggacaactttgtggagtacgggctctatccaacagattttgttcctcagcctatgaaggagaagaagaagaagaagaagtccagtgctggctgggctgagggagctgaagaatagaaggagctcattcaacttaagcatgaggctaagttgaaggcaggtgcaggagccaagaagtatgctcaggagcattctgagcaggagaaggagcttattcaacttaagcgcgaggctaagttgaagggaggagtcggggccgaacaacatgctcaagaatattctga

SEQ ID NO: 223232 - DNA, 4992 bp, Cannabis indica
ggtcgggcctggggagttccaacggatcttctgactacaaagaacacaacaagaatggcagcaaaggcaggggaagtgatttcggtgtacaattcagatgtgtctaaaatggttgctgatggattttttcgctttcgcatatggatgtctatccacaaacctgtgtgtcttggttttagtcttccctgggaaggaaagaaacattggattgcattccaatatgaagaactaccattcatgtgttttaagtgtggaagaattgggcacagccacaaagattgtcatcaagaaccaattgttattcatgaggaagggaaggaagatactgctgcgtatggcaaatggctcaaggtagataatggaggtagagaaggcctaatgggaaataggcaaggaaaggaaaggtttgatactttagaagagccaaggcaagcaccaacatctaatcatggaaggaataccataagcaactctgttcctctgtgtgatactatggaagtggtaagtactgggggtcttgatcacaaccagctacaacagaatacaggcaagaactctcaatattcaccacagaatattactgtaaaggctaggaatgatgggaaagaggatgtacagaaacaatgtgaagatggtagccgtggaaagcgtcgaattgtggaagattacggagattctgagtacgggaagctgaaaaaatcagccacaattttggccaaagaaactcaggatcaagatctttataatgtcccggtttcatacacacaagatgctctggttttggatggatctacaccatttgcagtgggaagcagctcgaaaaacattgcaaaagaaactcggagaagggtagcagttaagaaagattccaaggctcgaaaagggaagatggaaaacaaagtaactaacatttctcctttaggagatttggcagtcactccgatcatggaagaggcgaaccctgaaattcagggtcgcctacaaccatgaatctcttaatttggaacgcccaagggttggggaacccttggacggtgcgttccttaacttccctggtgaatcaatacactccgaaagtagtcttcatttcagaatctaaatttaatgctgtgagggccgaggctttgagagtcaagttggggttctttgggtgctttacggtagaagctcgtggaaagagtgggggcctcatcttattatggtctatggacatagaagcccaggttctctcttactctcagttccatatcgattctttcattagaattgagaatggacaatggtggcgttttactggcttctatggcgacccagatccgagtcaacgttttcactcatggaagctcctaaaacggctaagcagaatgtatactggaccttgggttgttggaggggatttcaatgagattttgagccaaaaagagaagttgggaggccttcctaaaccgacgtatcttattaacaactttaggaaggctttggatagatgccaattgagagatgtgggttatgaggggaatgattatacatggtgtaatgggaggaaaaatgatcttatctttgaaagacttgatcgggtatgtggtaattcagattggtttgatatgttcccgtctatgaaagttcgtcatttggatcgtacaaattcggatcattgtcctttacttctaatggaccatgacccccatttaaaaatgcaacatgcgacaagatggagaactagattccactttgaaagtgcttgggcagaggacgaagagtgtattgtgcaatcggcctgggtaaaaaaccagcagaatacgagtacaaaggggttgaagactcggttgggacagattggaatggatttacaacaatggaataagtctaagaggcaagagatgtcaaggaacctaaaggaatatgaagataaaatctccttgttatcccgaagtactaatgctaaggattggcaacatctggaagacttagaaagaaaacgaaatgtttggcttgacaaagaggagaaattttggaagtaacgaagtcgagctttatggctgaaagaaggggataagaacacaaagttttttcataggaaggcaagtaataggaaagcaaaaaataccatcaaaggcttgatagatgatcggctccaatggattacgggaaatcaaaatatgggaaaggtggcatgtgattatttcaagcagttatttacttcccatccgcctaatcaagaagagttggaagagttccaaagagtcatcccgcatcgtgtttcacaagctacaaatgactatttgttggagcctttcactaaggaggaggtgttcaaagccatgcgagatattcatccacaaaaagcaccaggcagcgacgggttaccaggccttttctacagaaaatattggtccataatcggtgaagaagtctcaacagtttgcttaggaatattaaatgaagggatgccgataaaggacatcaatgatacactcatttgcctcatccccaagatttcaaagcccacctgaatgtcggaattccgcccaataagtttatgtaatgtgatttataaaattatagctaaatgccttgctggccgaatgaaaacaagcatgcatcaagtcatttcggaggaacaaagtgcctttgtggggggtaggctaattcaagacaacgctataatcggtttcgaaagtctccattgtatgaggactaaaaggtttgggaatggaaggaaaatggcgctgaaattggatatgtctaaagcatatgatagagtggaatggaatttccttcgaacaatgatgaggggattgggttatgaggaacaatggatagaaaaagtaatgagatgtgtggaaagtgtgtccttttcggtcctcattaatggagaaagaattgggaacttccaacctacccgaggtcttcgccaaggagattcgctttccccatatctcttccttctctgttcggaaggtctctcgtgtcttattcatgaagccgaaagagcgggaaagattcatggggttcaattcgggaaagagagaatcaaagtgtcgcatttattcttcgccgatgacagctttgttttccttgaggcaaaggagaatgaatgcgatacaatgaaacttatcctacaacaatactcacagctctcgggtcagcaagtaaacttagagaagtccgaagtcagcatgggcaagagaatttcatccactcagggacaagctttagcaaccagattgggggttcgaattgtttcacaccatgcaaaatatttaggtcttccaagctttgtgggaagacggaagcaagaagtctttgaagtaataaaagaaaaagtgtggagcaagctcaaaggttggaaatcctccatgttctctcaggccgggaaagaaattttaataaaagctgtggttcaagcgattccaagttataccatgagctgttttcggctcccaaagaagctaataaagactcttcattccttggctgccaatttctggtggggagatacgaaagaacataaaaaactccattggagtacttgggacaagttatgcataccaaaggaggagggaggtcttggtttccgaagcttaactgaattcaatcaagcccttttggctaaacaagggtggaggcttcttcataaccctcactcccttcttacccggattttgaagaatagttactatcctaatacttcgttcatggaggcgggttgtcctccgggggcttcttgtgtttggaagggaatttgttggggtagaaacatcttaaaggaaggagctagatggagggtaggaaatggtaaagaaattaaagtttgggaagacaaatggctcccgagacctcaagcagccactttatctcaatttcctaatctccaaccccacaccaagcttcataagttcattacttgggatgggaattggaacatggcggagatcgacaaacacttccacaaagatgacataccttggatacaaggcattcccattgatctatatatggaagacactctattttggccctttacccctaatggccaatatatagtcaaaagtggctatagggtgggtagggagatgaatcttaaccccactaggtgctccaacatgactgacattcagaagtggtggaaaatgatatggagtttacacctacctcctcggatgaaactttttgggtggagagtttgccacaactggctgccagcaaagatgaacttaaagcatagaggtatggaggtcaatacgagatgtgaattgtgtacaaggtatgatgaaactcttacccatgctttatggagttgtgacaaagttaaatgtatttggaaactccttccttggtacaaacaagcttccaaattggaagaggggtctatgtttgatattttgaagtctcttgagcaaatcattaacaagcaggattttgaggatactataaaaattttatgggccatatgggaaaatagaaacaggaagtggaatcaactcccttgtatgaacaaacagcaactcctgaactgggtcttctctgcctacccaaatggccatacagaggtgattcctacaacaatccatgaagctaatcgacatcctaatcaggtacattggataacccctgctagtggtagcatttgtgtgaattgtgatgctgcagttgtaaataataccccaggagtcggcataggtttcatttggagaagggcggatggtcaactgatatctgctggtatgagatatttgcacagctgctgttctcccaaaacggctgaggcatgggcgctttgggaagctttgaataacctccctgcaactgagatcagtcattttgaaatccaatccgattgcaggctgctggtggaagaaatcacaagcaaaagtcgaagcctcactgctgacagcaccatcattcacaagatcaaaactttgctggaaaacttcactcatgtaaatataattcatgtaaaaagaaccaataatgaatgtgcaaatttgt

SEQ ID NO: 223233 - DNA, 2287 bp, Cannabis indica
aatgagttttatttatggcataaaacccaacagtgttgtggtgtccaacacaatctatatgcaaattttctacgtatatgataaatttcaacatataaaaggcattaagtatgaaaaccctatttgctacataagttatttgaggactcttgtccaatatataacctatgtctatatagctgtaacatattcaactctcatctctcgaatttcgaattgatatcataaaaacatgcaaatagtgatcaagtattcacaagcattaagcataaattatatagattaaattaaagaggaagaaaccaatagaacatcatagcaaaataaaatagaaattatagtgactttattaacccataaattagaaaattagtgcatgaaaatcatcttcatcaccattgcattcataataaaaactaagaacataaataaaattaaagaaagagaagaagaagatgatgatgaaacatactaagtagttgctaatgaagagttaatgagttttttgagatctgaaaacgtactaaaaatactaataataatgtgtttatataggccaacaaagttacctaaaatataatgaaaagatttaaaatttaaacataaaaaaataaaattcgtgtttagccgcagctccacttgaaaaggctctcttttttttttttgctaagccttttatcttttttttttagaaaatttcccactgcaatgactgatagttctttggccataactctctcgatattgctcataattggataattcaaagatgtttcaaaaatttgaaagagagatgtagaacctttattcaaagtgtttttcctaaaagtgaacggatcatagtcaaaaattagcttgaagcctcaaatttcattcccaaacacaaccagagcgtgttgagcatccaaaacttgaatttttcattcaatatttcataaaaccccccaaatccatgataaatccaccatattcatattttgatcatgtttttctctcatttataatattcataattataccccttgaattcttggagtaggtcccagacggtcgagacataggaagccatatgctctcagcgagcctaatattctccttttacttgattgactatcagttgggagtcactgcatatttcaatgtgcgtggtccctgccaccttggaaagtctcaacccagctagcaaggcttcatattctgcctcattattgcacgcattgagcttgaactgtaatgcactttaaagccttaagccttctggggatatcagtataactctgactcctgatctgttctcattggcggcgccgtccatatacactttctaaataggcaaggtttcttttccaacatcaaaatccttgttttcctcgttacattcaacattgaagtccgcctgggcttgccctttgatcgagacgcgaggaacataatgaatgtcaaactgactcaacttcatagcctatttgaggagacaactagaggattcaagcttctaaagtacctgccagagcgggtggttggtgtacactttgattgcaagagtttggaagtatggtcgtagtttttgggaggagatgagtatgcaataggctaaatttttggtctatgggtagcgaatctcagcccctaccatcctttttctaatgtaatacacggggtgctggaccttgcttcctctcggaccaaggttgcggtaatagcatgttctgaaactgccatgtatagatatagatcttctccttccacaggtttagataaaattagagccttggacatatgcacttttaggtttcggaatgcaattttgcactcgtccgttcattcaaagttttgacactttctcagaatgttgaagaacaggacacacttgtcagttgacctagatatgaagcaactcagggctgccactatcctaatgacactttgtacatctttatgcttcctaggggaaggcgtgtacaacaaaggttttatctttttaggataggcctttatacctcactgactgacaatgaatcctaaaaactttttagattttaccccaaaagtaaacttctttgtgttaagcttcatcccatgcttctgtactaccacaaaacactccttgaggtcattttcatgatccttggaagttttacatttgactaacatgtcttctacaaagacttcccttttgtgacccaactagtttcaaaacatgtggttcactaattgttggtatgtttctcctaagttctttaatctgaacgacatgaccagataacaatatgttggaatttatttt

SEQ ID NO: 223234 - DNA, 2106 bp, Cannabis indica
cataagccccacgtcataacccatgtccttaatgttaacccggacatgccaccggttcagcagaagcgacgccctctcgactcagtaaaggcagaagccctagaggaaaaggtggacaaattacttaccagcggcatgatccgagatgtgtgttatccagaatggctggccaatccggtactggtgccgaaaccaaacgggacatgcgggtatgtatagattttaccgatctaaacaaagcctgcccaaaagactgttttcccctaccatgaatcgaacaaatggtggacgccgcctccgaattcaagctgttatccttcatggacgcatatgctggctacaaccagatcaagatgcacattgcagatcaagaatgcactagcttcagcaccaataagggggtatactgctacctggtcatgcctttcggattaaagaacgctggtgcaacatatcaacgaatggtgaaccggatgtttaaaggccttctggggcagaatatggaagtatacatggacggcatgttggtcaaatcgagggcatacgcaagccatgcggatgacctcaaagaatgctttgaagtggttcggagatacggaatgaaacttaacccaaagaagtgcacttttggggtcaaatcaggaaagtttctgggcttcattgtcagccaacgagggatagaggaaaacccagagaaaatccaagctctcctaagcatgccttcccccaaaaagcacaaagatgtatagagcttaaccaaaaaggttgctgccctgagccggtttatctcccgatccacagacaagtgcatttccttcttcaacatcctgaagaaatgctaaaaattcgaatggtctgacgagtgcgaggaggcattcaaaaaactaaaagagcacatggctaaacccccgatcctgttaaaacctgttctcggagaagacttgttcctatacttggccgtctccaagaacgctgttagcacgaccttagtacgggaagaggaaaaaactcaacatcacgtgttttatgttagcaaacgcatgataggggcagagacacgatacccgattatcgagaaactagttttttgcctcctaatggcctcgagaaagctaagaccttatttccacgctcacccaatcaaagtattaaccaaccacccgctccgacaagtcctacaaaaactggaggcatccgggagaattctcgaatgggctatggaattaagccaatttgatctacattacataccacgcacctccataaaaggacaagcgctagtggacttcatcacggagtgccacgagatagaggctaatgcaagcatgtctgaaacgcaagtcccagcgtggaaagtatttgtggatggcgcctccaatgaaaatggatccggagcgggggtagcaatgatatccccaaacggactttgactccaggcagccctacggtttgaattcacagcttctaataatgaggtcgaatacgaaggcttgatagtaggactgagattagcaaaagccgtgggggccagaagaatagaagtctacagtgattcacaactggtagtgaaccaagtatcgggggaatatatcaaatgagcggagaaaagatggctgcgtatgtagcaatagtccgggaactgctccactagttcacggactacaaagtagaaagaatccacagagaaaagaacgctcatgtagactgtttggctaagttagcctcagacactgaaattgagaaactaggggtagtgcccgtggaatgccttgcggaaccaagcattaaagtcaagagtaccataacaacagttgaacaagagctcaactggatggtcccaacatcgaatacataacgaaaggcgacctgctcgaagaaaagggactatccagaaggatacaatatcaagcgcaccgttatgtgatgatggacaatattctctatcgaagaggactcagcatgctgtacctaaggtgtgtatcagaccctgaagctaagaaaattatgctagaggtccacgaggggttctacggagaccatacaggaggcccaagtcattcaaagaaaatactgagacaagggtatttctggccaactatgaaaaaa

SEQ ID NO: 223235 - DNA, 1458 bp, Cannabis indica
tcagatttccgcacaacgacctgttggtcatggaagtccagatagagaacaagatggtagccagaactattatagatcatggagcctcttccaacatcttattcaagaccacatatgaaaagatgggactccaactcaaagatctaacccctatcttctgcccgtatatggtttcattggccaaggagtcgcaccgctaaggcgaattcgcctacccctcactgttgggcaagctgcgacgagcataactataatggcacaatttctggtattggacgttccatcagcctttaacgtcatgttaggccgaccagccttgtatgacttagaagctgttacatcgatattccattcatgcctgaagtttccaacaaagaatggggtaggctgtctaaggggaaaccagcagattgctcgggaatgttataacctttccatggccaaagctgaaaaggaagtatcctctagccagaacacagacaattgaaaaagcctttctaagtacggaacttcccaaggcagggattaagatgtggatccttcacttggggagccaagcagcaatgttggacctgtggaagaactagaagagatcgagattgatccagatattccagcgagtaagctaaaaattggaaaaggtctgtcgctcgaagtaaaatcaacattgataaaatttttgagagaaaacctagacgtttttgcctggtcacatgagtatatgatcggaattgatccttttgtaattttgcacgtcctaaatattgatcccaacttctaaccagtttaacaaaagcgaaggttgttggacaaggagcgagcgctagccctgaaggaagaggaagagaagctacaaaataacaactttattattgaagctttctacccggcttgggttgataatcctctactggtacctaagccgaacaaaaaatggtgagtttgtattgacttcacaaaactcaataaggcaagccccaaagactgttttcctcttccaagaatcgatcagcttgtggacgcaatagctaggcacgaaatattatgcttcatggacggtatattggggtacaatcaaatcaaaatgcatccaccagaccaagaacatacaagttttcgaacagatatcggtctatattgctacaaagtcatgccatttggtctcaaaaatgctggagccacataccaaaggttggtaaacaagatgtttaaagaccagatcggacaaaacattgaagtatatgtggatgacatgctcgtcaaatccaggaaggctggggggcacatagatgatctcgacgaatgcttcaaagccctcaagaagtacaacatgaaactaaatcccttaaagtgctccttttgagtcagctcgggaaagtttcttggctttattgtcaatgcttgaggaaatgaagcaaatccagagaagattaaagccctcctagatatgaaattgcc

SEQ ID NO: 223236 - DNA, 1412 bp, Cannabis indica
aaaggtgccaagggaggtagttcgaatggacctagtccgatcaaatcctccaacagtgccataatgctcagctccgaagccaagaagggcaaggagatgcatcaatactacctcgatcggttacttcccgaggtgagtgattagttggtcagggttggtaatgagttgtccgtggagcttctgatgggtgggctcctgaaggaggcaacttgcgtaagtattttcttcttagtttttatcctgtctttttaccagtgtagattttaactttttcctgtgtagctcgatttgaagatggcttacgcttactcctgagtcaaatttactgccctgaagaatatcaccaccaccaccaatctgtagaaggaggtggatacaacctagaaggaggtcgatactgtaagggttgagctgggtgaagtgaacaagaagattttagatgccaataaatggattgaggggctgaccaaagaaattaaggagatgccatctaccgcccagctcgaggcagaaaacgaggctctatccaaggagctcaatgagcttaaggacgagagggagggtctccgcactcttctttcaaagttaaccaaggataagagaagaggacgtcaaatctaggcaaacgagggaagaaaagctcttaaaggaggttgaaagcttggaaactactgcccttgaagttttctatgagttctggaaggtgaacccagagtgaaactttgattacctcggagataccaaagaggtatatcttagttatcgtgcgggtcaagtagacaaagaaagccttgaggcagctaattccacggccctgaccgaccagaacaatgagatcatagcctctaacgaccataatattgagcctctaacccctactaaccaagctgaaccatatagggagcccgagactcccgtagtttaaatattttcttttttcctgtttggcccatgggcctttattaaagataatatgaccgaccgagcggtttttaaacttggtaatatttcattttattttgagacgactagctgaccgggcaacctttaatcccaagtttataccatgcttttgtcatcttttaaaggaatattttcccttgtttcagtaattgtacgtgcgaactaatctgttgttttttgagcttgttatttatcttgttacttactaatgctttgtacgggtatagttgcctcccaagtgattgagcagacttatgactcttggtcacttgcatttgacaagtatgatttttgtctgttcggctctttgggtcgagcagaccttttgtacacattaatggtaaattcataaatcgctaacataataaacacaattggaatgataattaatatcgttattcatttattagtccgaacagttttgttaccgtggtaacttacatttatga

SEQ ID NO: 223237 - DNA, 2358 bp, Cannabis indica
tttagggtattgccatgttattcatcgataggaaatctttagttttgattttaagtccctgataagtgttttagcgtgtctctcatcagaattacagaaattgtaatatagggccctgtaaagcgtcgagctgctgttccactcaggctgaccggcacacatgagcacgaaaataaggtaagattagcataaagtatatatgtgaatgaatgaatgcgtgttattaattgtttacactactaacactggtatagtcatagtgttaagggtgttagtacaatgtagggtatttaagggtagttacagtgttaccaacacgagtaccagggagtacggagtgcatgtggtacaacactcagtaactctcagaagtatagtaatgtccctaccaacacgagtacgaagttggtactctagtgcatgtggtacaacggtcgtacttccgttgagagcgttcataaccatttggtgagccttgcatttaggcttaggatggcttaagtacaaagccggtatcgcattgcttatatatgttttatgcatatcttactgagtttgtcgaatcatcagtttgctaccctgtgtaggtaaggaaaaggctaaggtggaggagcggtgagttggagctcaacaaggattgtacatatcgcggcagtgcatcctggagggtttcaatcttaccgtattttgaatcatattttgttgccgccctgtggtttgtaaaaaaaaaatattatgtaactataattatgatatatgtattttcaacagtagttttaaattcgagatcctgacttacgaaattttataaatataataaaaatatgtttaaattttgaattagttaatttttaagtacgggcgttatagattctgtattcaaatctccctaatttattggctattaattcttggtaaatataattgtatttccctataaatagtgagatcacatcactgtttagaaatcttttttttttttggtcattctaaaagagcaatcactctgcagaaataattgtacacttcctaagaattatcaagaaactcacctggttggaccttgtgacttgataattcttcataataatacaactaaaagtggagtaggctattaccgttataagatgtcaaacctttataaatattgtgtgttgtttattattctcatttcattattatttactctacagttattatcactttaaagactcagtgtcattgactaaaagcgaggtcaacattttggtactttcattgagagcattaaatattatctagctctcatcaacctacgatcttgcatccacctttgaatcatcaatcatggttttgacaagaagatcctcatcgactaaattgcacaatcatatggtgatggaccccagtgtccaaacacctactgacccagggaaacgcttggcttccacctcgaggcaatcaacatacagtccctgctaatgttaaccctagggccactaggattacaacacatcttactggagtcattcttggtgtccaagaggctaggactactagtcaggcatacgctggagagactgggcctagcactgatcagccatatgtatgagagccccgagtttatctgggggataactctaatttgtaggatctgagggatgcattaagacaagtccagacacatactaacacaatccaccacaaccaagaggaaacatgcatcgttgtgaatcacgcattcaaacagtagcgacgtgaattccaagagtggatgtatcgcaaggcttgatctatgcgagcccaacaagaagaaataaacttccaatccagagaggctaccaacctaatcaggtggtttactcagcaaactgggggggcaaagcctgcaagatcagccgctcaaacgagacgattgttggaaattattttaccatgatctagatttaataacaggtatgttgattataattctataatctaacatcctaaatatgaaattcctaaaacgataaataaacacataagatattaagaaattcttacagtgatggcagcaaaataatatgactccttccattcagatctctagcccttgattcctatctgtagcagagcattatcaagatttgaacttggatcttcttctcattcgattgtgttcatcacagtcttccacaaaggcttgagtatcaccttgaatagtgtgggatgatactcaaacacctttggaacaatattttgagagagaaacttcgtgaattttgaaagaagaaagaagagaaaagagttgcctggcattgaaaatttaggctaattctctcttctcatcactttctttgtataggcttcacttaaggctaggttagatgagattga

SEQ ID NO: 223238 - DNA, 2115 bp, Cannabis indica
gggaaagaactctcaatttttttagttatttaaaatttaaaatttcttatcgaaaaaaattattgtaacatcctttttttttttttgagtcaattgtaacatcctttaattaaaacaaattgtgattataataattgtaggacttagtataaattctttattagtaggaaagcttttttaaccattattaattttaaattgattggtaattattgtgtaaggtatacattcttataatagattgtatattattataaaaaaaattaatttaatatatattttaaaaataaaataaaataaaataatattaatattaattagtctaaaatattaagcctatatctatatctctctcttcttattgatctctctttctctcccttggccaaccgcactcactctcattcattttgttcggcttaattccaaccaaaacagtagagtttgatccttaattaagtgcgtttaaataataatggagaattaatattttaacttggtgaattggaggatatgatcgagtcccaaatgattcatcctcgtttataacacttctgaaggccatacacgtaggatccacaacaagtaataaagcagctgcattcctttttttaattattttttatttaaaaaaaatcaactgtataaaaatacacctacatcagttggacaattaatttactttactcttactggtctaataaccttccccatatcatgaggtagtaacaagaggccttacaatatatttatactatatatatatatatttctccatattaacccaataaaactctactatattctttctgctttcctaagaggtgtaccgtacacctcagtagtacagtagtaaaactcccataacaaactcatattagtatgagttataaattctctgttgctagctaaccattgctcttcttagtcctacgtgtataggacatgtattgggaggtctatcaatacccttcgcccaaagatgcacctcaaggtgaaaatgaggaaatttctcttgaatgttgttgaaatcttttaggctagtgagacgaattaatgagagttggcgggactaccttatgaattctagggcacatatccaagacttgttttgattcgagagtctaatccaactcaactctagggtaacggaatgaaggatccaagccatttgcatctcatgtttctggtaactcttctcttaaccctttatggattgtggatagtggtgcttcacaccacatttgttgtgatttttctttattttctaatgtgcataaaactccaatagctcatactgtttctcttcccaatgtttctgtcataaatgttgaacaatcgggtgacattcagatttcacaggattttgtcatctctaatgtcctctatgttccaagcttcaaatttaacctattcagtgtttctagctttatcgatgatacatctaacagtatgcatttcacctctaaactttgcacattacaggattctcagaacaagaagattgggacaactaaatgcataggcaacctttattttttgctgtagtctgttcagttttccaagttttcatttccctgtaaacagaatattcatacttgtaatagtgcctattcatggcattctagacttggacatccttccttgtccacaacaagattactgaataaaaatttacattctactactgattttgtttccccttgttctatatgtcacctagcaaaacaaaaaagattgccttttaattctcaaaacaatattgctcaatcttcctttgatttgatacatcttgacatatggggacctttccatattactagcatagaaggctataaatattttctcactattgtggatgaccacaccagacatacttgggtttacatgttaaaatctaaaactgatgtgcaatacttaatcccacaattctataaccttgtatttactcaattttcaaaacctatcaaagctataaggtgtgataatgcaaaagaacttaacattaagtccttttatgttcaaaaaggtattcaagtatacaattcttgtgttgaaagacctcaacaaaattcggttgttgaacgaaaacatcaacacatattaaatgtggct

SEQ ID NO: 223239 - DNA, 1683 bp, Cannabis indica
tatttatttattgtgttaattaaaataattatattgatgtaattatttaaataaaaagaataaattaactatggtataaattaaaatgaaagaattatttaagtttattgggctttgagagaataaataatcacaaataaagttcaagccctataggtttccgactatgcttggtgaccaagcattgagtctcttgttttattattcggaagaaattacattgcatacctactttactttatttatttttatttttacctttatttttatttttattttctttaagatatacccacttttatagatgatgtccctaatatgccccttaagttaatgtaaattatatgctatacttaagtagaaggtgagagtatatttggcaactcactcacaaaaggtatatttcaataaaatataatatgagggtatttttgattaatggacacaaaaaagatatatttttcaacttctccctattattcgcttgtttaattaattgtaaggaaaaaaaaaactttaaaatttaaagagcttaaatagagttattaataacatttgtttgtctctcagaaaactctttctttttctctcttattttcgaaatacactctttttctctttcttcttgtaactttcgaaaattacttggtagttgtaagaattgtttacacttgtctacacaattctgttacaacatttagatttctatgaaagactgtgtagaggttgaagaagaaaaattgtgttcttgttctattgaaaaattcaaaattagtgattaatcatactttataatagatatgaactagagttaaatcactgaatggattgaatcatattccgttatgctacatatttacaagtattatagactcaatatataaaataaaaattatatgataaatcgttaagcatatattcccaatatttgtttcatcgacactcgagactaccacaaataggatgacacatcatgaaactttcggaacacgataacacgactcgaaactcgcacaagagttagcgctttgagtttgccttaaataagtttggctcgtgttcggattaacacggttaatacgaaactaactcgttaataacctatttaaagttattttagtactttaacatgttataaatgagttataaacatgttgaatacttcataaacgtgttattgaataacatgtttaaataaaatatgcttataaacgggttacattagtcgtgttgtgtcaactcgtttataaacaacatgtttttggaaagagcattgttattgggtaccggtggtgtccaacaccttctctaggtgacatcttatgattagttaggatattctttaagaaatattttcttaagttatataagactcgatacttaattacactaatagcaatgtaacactaaaaatattactataccaatgacaccttttaacagttcttttttaaaaaatattttacttttttaattaaaaaacaaaaaactaattaaataatattatcaaaacaccattagaatttagatactcttctaaattaaccccaattaattattattattttggtagaacaattaattatttaattatttattattaagcaaaatatgaccgaattggtcaaccattcttaagcattaacttttggccgtggaacccaccagaatcacaaaatcacc

SEQ ID NO: 223240 - DNA, 2286 bp, Cannabis indica
tgttgaactagattagtaggatcataatctcacttattacctggttaactcataaattaaatataaaccttaattattaattattaggcttgttgggatattacacccatcatgtagacttggtttttatttatctccccattctcttttggaaaatggcccttttgccaaaataatggtttgcccctggtggcactttctctttccttttttttttaagaaagacatatttgcaaggttggacgaccaactttgctttataatacctcatactttaatatgcagatatttgcttacgttttattcacaatataaacacctacatgcataaagtttactaggagtttccatcgcttgcattttcctccatcgttaagtagtttaatttcctacttacgcgcgagcaacttatctgcccgtccctcaacctgcaagacattattgattccacctcgcgatcatcagaaatgatcttactttaagcacattcaaatattatttcaatgaacttatcattttgtatatattttcattgcttacatgagtagttaaatccttttactcacgtgttttgctttaagtattttttcaagatactttgatgtctcgtttaatactttcccttaacgggagccattagtattcagctttatgcgctattcacaacttttgattttcctttctcgtcagataggttataaatcaaaaattacaattgcttgatccatttctcgccagagaggtttgatcaaggcgttacaacgttccgacccctttttcgtcaaaaaagtttggttagggagttatcacagttcgaccccttttccgtcaaaaaggtttggtcgaggcccttaaaaaatttttaaattcaaaaatttattttttaaaatgatgggtttgcatttatattatgtatttctagattaattctggttaatcatatatatatgcctctcaagtaattttaaagggtttacactttataattacttgtttgaaggaaatgattattttactcacaattgaagttcaaaatatttcaccagcaatgtgatttacaatcattaatctcataagaacttctccagttcaatcgtttattttatcaatcttctaggagcacctggttttgataaaacgggtttcgatgttcagggtcaatcccttacatactccctcaattgtttcaatatctagggtcaatccctgtcataccccggggttccaggtgaagtaatcctggtttgtctttttaccagagtaactgccccttgtattcctgtcagtcgctccctctcgagataagcgagatgtcccttcctcttaaagagggggttgtaatcctaggtcgctcgacttattggacagatcgagcttatcatggacatcgccctgcctctttatatatcgttgaaagtgtccttgcgatataagaccttctatctcatctttcagctgacgacactcttctgtggcataaccattatctccatgatattcacacctcttatttggatccctcttgcgactcgcatgtttcataggtcttagctcgctaaaaacagcttcctatacatgtgcgaggtagatattttctcgagtttcggtttgattcaccttattctccctataatggattgtgcaaatttctttcttgtgagcctgaagagaggattggcgatttttgtctgatgttccacgtatctcgggctgtgtctccaaattttcctcagtttccttaggttgcatctctgagagttttgagtatatctctaaattgttgcctgcctcttggtttgcgagctgcgaggtttacctagtgaatctcttctcccaaggtcaggttgattttggatacaattctcctgcgctgcccttaccgtggctatttcaagctctaactcggtattacgctggtttgcttccttcaatcgacgcctaagatgtcgattttctaattccacgattggtatgtatctggttgggtcataggcgccatcctcatcatcttggttaggaagtggtcgattgttgtttatccaaggtccgtcaagctaaggaccccaatactgggttttcttagtatttgcagtctgttcaggcgatgagtcaatagatccctgaggaatcaatggttgttttctaggtcgatgattgattccttcttgaggattattatctttggtgtcatccatcacttttatgtcaagaggtcttttttgagctttttcacagaggctctcaatgaaaacactaaactgtgaacgcagattttcgttaattaaa

SEQ ID NO: 223241 - DNA, 2017 bp, Cannabis indica
aaaacgggatcctgatacttgtaaataattttaaaaggttataaagtttaatatttaatataaaagttttaatttgacacgattttcaagtaagttctttgattagcaaagatagcactgtaattgaaaaattactgtagcgtgccttagcatgatcgggtgacctctgccacatttcagttccaagaagacgctctcttgtggtgggagttggtgtcccttacttgagaagtcactgtaatgacctgggaagagttccgagagttattcaacgccaagtattataatgatgcagtccgcagtgctaaatggaaagaattcactgagttagtgcaaactgaggggatgtcagttagtgctcctttatttcgtccttactcttccaaccaaacgctcgagttatcgattctcgtggaaacaatacctgttgaaacattgctgggtttgcttcccgagcttgttttcaacagattcatttcctttcgggcttcttccttccaaacgaacacttgagccctttcgttgaactcattgatgcttctcaccggacgtccttgtaagtcatcccacaactcgccccctatggttaatggatcagtagagatccccgcctgaaggggtgtaagttgcgtgctgtcatccaaattcctaaccctagctgcagccgtgctaaaacaacttaggtacgatttaagtgtcttgtcgggctactgctttatactggttagcgaggccgcttctggttgcctatccctagaagcctggaattgtttcttgaaatccctggacagctgctcctaagaaattattgaatgatgagtaaacttgttaaaccagctactcgctgctccaacaatcgaggtggggaaaaaatacagtgtaattttttgtcacattactcgctcgcattattgtgttaaagttattcaaatgtgagaccggatcagtggttctgtcatatgacaagacatgcgggtttttgaatcttgaaggaaaaagggtattcattatgtctggatgataaggctcaagctcctcgtcaaagtcgtatccagatagtttccctaattcccccacttgacatctcctaaacttgtcctccagctcgtttatccgcaattggattggatcctcttgctttggaccaagctgttggcgaaggtcaggtttcttccgatgcaattgctctcgcagatccggttgggagtaattgctgccaaacctcaccttagtcaccgattgagtcctactcatagactttgtctttgagtggctcgcggatttactggttcctatactttctcgatcattagcttgttgagtaatttctccttttcgagttgatcgactatgggttcttgaccgcctcgaagtcacacttgcttcttcatgctctactctttcccccgagagcggtttgtcgtatttccctcatcagggtctgtacgagtcctcgctctatgggttgggaagaatgttggtgatttctagcaggtgacctccattctcctggttgagtcccaagatcctcctcattctcatgagggatttctcattcatcactttccagttgtctcccatctggctgttcgttcttatttttagacaatgtctcattttccttgggttgttcttcctgggcctttcctgtctcctggttcgtgagccacaaggtctgcctcgtggtcttctcattccaggttcaggttgattttgagcatccgtcccctgtgctgccctggccgaggctgcatcacgttctaactcagcgtttctacgctgcgcctcttccagacaacatctcaggcggcgattttccatttcataagttccttctcccatagactgggcacctccacgattgagctcttcatccctcgccctggggttctagccattccaaccctgagttctcctcgagcgtgttattcgcgtactaggaccaacgtcgggttgggttctccgggaacgggtggtccttctggtctgcgggctggtagatcttttggagcccatg

SEQ ID NO: 223242 - DNA, 1800 bp, Cannabis indica
tataagggtttgttcggctttgccggagaacttcccattttttccattgccttgtctattgttgttgttagatcttttaccgcctgagctggatttactagggtactgggtgctttgaacggacgttcccgctgaaggagcttgtcattggcctaatttaggctcgacatctgctcgctgaatggcttcttcgagcttgatgaaaccatctccgcgatcgagaaaatcactcatagaatctatgaaagcacttttcttgatgtccttccacagctctccgagaatctcgatgccccccagtatggcggctaattttccttcttcagttaatcgtgccacttttgttgcctccgtcatgaatatacttatataagctcagagaggttgtcctagtctttgcttcacttcgaccaggtcttctaaatgtaacgggagttggtgtgaagaagagaattgtgcatgaaattctaaggagaaagccttccaagaattgaaccttcctagtttcaacttcaactaccattgttgagcggcttctgagagtttgacaggaaaaactctgcaacgcacatctcctcgtaccccttgcaagtccatttgcatttaaaaatacttgagatgtgataagggatcttctttccctgtatacatcttccaggtcggcatcttgaacttgtggggtagttctagaacattgatctctggagtaaacggggatccacgtgctcggtccaactcgagatcactgagcttttgatcagcaaggccttggatcatattttcaattcatccaactatgcttgcacggatggatgaacttgctcggcctcttggccgaccagtgtcacgtcaggatctctttgagttggatcttcaatgcgaaccccaggctgagtggttggttgaacatattgttcgtctaaccctctccttctatttagatcatctctaagatcatgaaccgttcctagtctattgaatattgaagcaccaggttgcctcagttactgataagtttggccgagttattgggtataacccctacagaggaattaccagataaggtctggccgcctaccacttggcccacaggtggaacctgtgaccggagattggacagctgaccgttcaaagattgggcagtatgcccaactggatttttgtctaagctgcctagtaggatgttggacgcaggttgctgattagcaacttggtgccttcgtatcagtacggtagcctgtcttctttggtcgttgatggctgcttgctgagtcttcaacatttccatctctctatccatccattcggtgaactggcgcctttgctcttcgaacgcaaggttcattgcagcatggagctcttcctgatcatgatgcaaagtagtagtatgaccttacatgagcccaagagcgttacggaagttctggatctcagtgtcatctccaatggttgtctggacatttgttgcttaagggatcccaatgctaggagtactcagatcagctgttgaactggtgtttacagtctcttgcacactgggtgtgattccagccaaaggagacgtcacagcttgactcgtggtaggtggttgcgtgatcggttgttcaggataagtggctggtgggacccttgcattcctaggagtttgtagtgcgggatctaccgccagtgggtccacctgatcgaccaagcctctgcgagtttgtaccaccatcgtgtttatgatcaaactttaagtgaagatcaagttgatattattgctctcaatgaaagcaccaaaatattgaccttgcttttagc

SEQ ID NO: 223243 - DNA, 1398 bp, Cannabis indica
ggatgtgttccttgccgaatcagctcagctgaaaaccgaggattactataatctttttcaagtgaagaaataaagtctacctttttccaaattcatcccttaaaagcccggggaaaggatggactaccgggcctttttttccaaaaaaactgggatttgataggcccggatttaactgctgcctgccttgacatcctcaacaacaactcggattgcagctccattaacgagactcttatatgccttattccaaaggttaaacaaccctctaggatgaccgagttccatcctattagcctttgtaatgtggtctataaggtagtatcgaaatgtcttgccaaccgaatgaaaataagtatgaattcagccatttcagagaatcaaagcgcgtttattagtggccgaattattcaagataatgccatcattgggtttgaaagtcttcatagcatgagaaaaggtcgcttcgagattgggagaaagatggctttaaaacttgatatgtctaaggcatatgattgcgtcgaatgaaatttcttagagactatgatggattgtttgggatacaaggaagaatggactaaaaagataatgaattgagtgagatcggtttccttctcaattctcttgaatggctctatcaaaggtcactttcggcctacaaggggatcccctctcgccttttctctttctcctatgctccgaagggctatcttgccttattcatgaagcggaaagggctggtcgcattcatggattaaggttcggtagcttggaccaaaggctttcccacctattttttgccgacgacagccttgtatttcttgaagctactttggaggaatgcaagacaatcaaagaggtcttaaataggtatgagcttctttcgggtcaatgtattaactatgataaatctgaaatgtgtgttgggagcaaaattagttcagattcggctggtatattggctgctcatttgggagttaatttagttgaaaatcatactaaatacttgggtatgccttcatttgtgggacgaaataaacagcaagtttttggtaagattagggagaaggttgaagcaaaactacaagggtggaaaatgggcctcttctctcaagccggaaaggaagttttgattaaagcggtaatacaagctattccttgctatataatgagttgctttagaatttccaaaggtattctcaaggatattgaaagcatgatcgctagattttggtggggatctacaacaaaaaatcacaaaatccattggggaagttggacaaaactttgtagacttaaggagcaaggtggtattggatttcgtgatttagaagattttaaccaagctatgttggctaaacaagggtggaagttattgactatgccggattgcct

SEQ ID NO: 223244 - DNA, 2534 bp, Cannabis indica
gcttgccacgatgctgagcgctgaacaggcgcgacctgctgctgaggaggaggatagtgaaggggatgttgaagtctaagagatagaggatcaggacaaggttcgtcttgacaatcaatctgaagtcgaggaggagggagttgctcggccattgcgctttggcaattacaatgaagtaggggaaccggtttccgaggctggtgacgttttggtagagggcgatgactacgtgactgaggagtacattgaagctgttcctccaagaaggcagggtgccttaggagctcggtgggtgtctcctccatctatagttaccaaagccaagatgaggagtttggagaaggacggatacctgggaggtgtcgagtgcttttttccttctccaaatcaccgggaaactagcccaagacaggaatactatgcctggtcgggtgcccatactaagcagggtaaaaggctgcccttgcttccgtacttcaagaggattgcggactactatcatctctgcccgacccagttcacaccaaagggcatcaaatacttatctgccctattcatcctctatgcttctcaaggatggggtgagccatctctgcacgacaccaactggctcttcgatctgaagttaactcttaagtagagcaggtcggggtacttctacttctcccaattggacgagaaatggctgaagggtactatggactctgatgttagcaaaatagggaattttgtggatgagtattacttcctacagggcataaaaactgtccacactcggttccagtagattccctcgtactgtcgtcctccttcattgatgtaataccctaagattaagaaaatagattagcaaaccctaactagttaagtgtgtattattatggaattatattattatataatctattatatgtgaattaattggatatatgacatgttaagaccccgttggtgagccaggggcattttagtaattttgacccgagaagggtaaaattgtggaatttatattatgatgtgcttatagactatattattatatagtatacttgtcttttcctttttcaggtgttttctgacaggtcgacgcggtatagtcacaattgagaatttcgggccgaactgggttcggggccgaaaatcattttcgggattatttattggcattttattaatatgtgattaatctgaaaattaattgaatggtgtgttatgtgataatgacataattatccttgagtgcctagatgagtgttatgtggccctacggacatttttgtaatttttgtataattggattactttcaacaaaaggtattttttattataatgagaagcattttttggtttgttctcacccaaaaccgaccctccctctctctctaaatccatctctattatttgtggtttatctttgggtttgagttggaactcaagctttgattttgaaggtgttgaagcttgtgtttgcttgaggcttgaggtagtttcctactgccttaattttaagtgttattgctgaaattgaagttgatttaagcatgattttgttgtagagattcttgtgatgcatgtgtgttgaaattagtgtaatcttgatactctatgcttgattgtgttagaagattggagtagaatgccttgcgttgtgttttttagataattttgaggttaggatggtgctttaatccttttatgaagctctaattttattgttgtgtgtgagctgaaaaatatggttggtatttgactcttgagtataaggttatattgatattttactcaagtttggagcctatattgtatattatttaaatctgaatttagatgcatgtgagttttgattttgagctttaaatgtgtattttagctctctgttgtggttatttaaatctgtaagagattactttgggttggtgcatgttttgggttaattatggtatgtttgagcatgttttcaagcaggaaaagatgggtgccaaatacactaggagtcttccacattcaatggattttcgatagagggagatacaaatcgaaacttagcccatcaccaagttcacctgcaagacatgaagtgttgatcaaggggcactgtctctaagattttaaagcaacagaggaatatatctctaccattaaagaataatttctaagttttcaccttgaggacaaggtgaagattcttagggggtattgataagcctaagacttatatatcacaaaatgattaaatgaaatacttagtctcttatgtacatgggctgagttgtcttagtatttcaattctattggtccaattgtaatcttaggtggccttagtctttttaagaccaatgcttataaatacagagggagcaacctcatttagcttaacttggaattagataagagtagactctttgtggagagaccaatcctctcaaaagattgagaatttggagagacgagcctctcgaaagctcgatattgtaacttagtgactgtttttcagaataaaaatcatttgaaaaatttattactggtatttattt

SEQ ID NO: 223245 - DNA, 2113 bp, Cannabis indica
ttcttggaattttttaagggtatcttctctggatctaacaatgctaggcctctgaactgtggccacttatttagggaaaggatttctcgtgaggaccaggttgggaatgtcggggccccatcccgggaagaaataagaagtactctgtatgccatgagaaatcataaagcccctgggcctaatggaatgtctgttttattcttcaaacactactgggagtctgtagggaatgttttctgtgatgctgtcgctgatttctttgacacgggtagaatgcataacggtgttaattccatgaatgttgtgctgatacctaaggtgcaaaacccgaagagaccgaatcattttaggcccatttctctttgcaatgtgatatataaggtcatctctaaaatcattgcaaatagaatcaagcctattctcccctcgctcatttgcccaactcaagttgcttttgttccaggaaggaatattcaagataataatgtgttggtgcaagagattatccactctttcaataagaagagaggaaaagaaggtttttttgcgatcaagattgacctggtcaaagcttatgataggctaagttggaattttattgatcaggttcttggatgtttcggttttcctcaaaaagtttgcagttgggtcgctcagtgtatttccactgcctccctcaatatttgtctcaatggagggccggtaggtaagatcgtgccctcgtgcggtattcgccagggtgacccgttatcccctacctcttcatctgtgcagcggaagtgctctctagacttttagaagaagcgattgggaaggggattattcacgggattaagctaagtagggggggcccggtgttatcccatattttctttgctgatgacctcattttggtgggccgggctaacataaatgaagctaaatccttttgggattgtctgaacaagttttgttcgtggtttgggcagaaggtcaacaaacttaagacttcaatattctttagtaaaaataccctgattggtatgaggagaggaattaaggaagctttgggtattggtactcctgagggggttcttaagtatttgggtttgccgctattcagatcaaggcaaaaagatgttgattttaatttcatccttgacaatctcacatctaaacctcaggggtggaaggctaaaactttatcgaaagcgggaagggctaccctaatcaaatctgtgggtctgtccatgcccatctatgccatgcaaaccaccaaattgtctaaccggcttgtgaataggattgatggtttgatccgcgatttctggtggggctttgagaaagggaaccatggcctttatctcaaagcttgggataaactgtgtctcccaaagtcattagggggactgggatttcggaaaaaccaaagaaatgaacctcgcttttttggctaagtggggttggaatttactgacagggagccaatccttatgttgcaagatcctcatggccaaatacctaaggggtaaggattttctccactgcaagtacaaagattctgattcctggttctggaagaatgtcgtcaaagctagtgaaatcatccggaaaggggcctacaagagggtggctgatggaagagacactagcatatggagggacccgtggatccctcacttgaaaggtttcgtctcgaaaccaaatagaagtgttgatatggataataattgtgtcgctgatcttcttttgcctacgggagggtgggacatctttaagctaaaaagtctgttcgatcaggagacggttttagcgattctaaaaaatggaaccccctaggatcgggaaaggatagttggttgtggactttggaaagtaatggacatttctctagtaaatcggcttatctgtcccaggctttggagagagctccccagtgtaatgttgcccctgctctttggaatagtaacatcatggagcgtaataaggttctctggtggtgcatcctttcccaagctctccctgttcgagcagtgattaaaagaagatttcagattgatgataccagttgtccgttgtgtggtatgggtgaggaaactatggaacatttgtttcttacctgcgatgtagcgat

SEQ ID NO: 223246 - DNA, 5313 bp, Cannabis indica
tgtttaaacaacatacttgtgagtagatctaagatcctggtaaaataaattccaacaaatagggccgtagttttttagatgcatgaatcaggcatagggcaagtttttcaagagggggatacctcgattctacccccaataaccttttactaacatagtaaacgggttgttggtgttttccctcttctcgcaccaaggctgcactgattccactttccgagacaaccaagtaaaggtataaagtttctccagttattagtttggccaaaactaatggtgttgataaatgtttctttatgcctttaaatgcttcttcgcattcttctgtccattcaaatgttttgttgccttgtaaaacattaaagaatggtaaacacttatcggttgattttgaaataaatctgtttaatgatgccactgttcctgtcaaggcttgggcttctttttgcttcgtgggcgatggcatctctattaaggccttaaattttctaggatttgcctcaatgcccctcgcattaactatgaaacccagacacttccccgatgagactccaaaagaacacttatttgggttgagtttcatattgtacactctaagtattttaaagcactccacgaggtcttttttatggtcttcgcactttaccaactttaccaacatatctcaacataaacttacatgtttcttccaattttctttccaatcattccatttactagtcgctgatatgttgccccaacgttcttcaaaccaaaatgcatgactttgtaacaataaagtcccatgttggttacaaaacttgtatgttcttgattagggacatgccttttgatcttgttatatccagaatatacgtccatgaatgtcatcagctcgtgccctgtagttgcatccaccaacaggtcgatccttggcagtggaaaacaatcttttggacatgccttatttaaatctgaacactcaatacaagttctccaaggactgtttggcttcgggacaagaacaggatttgatatccacaaggggtagaatgcctcacgtatgaaattattggttaataacttctccacttcttctttaagtgccccttgtctcttacaatccaagggtcgtcttttctgtcttttttagggtaattagggtcgatattcaaatgatggcaaatcactttagggtcaatccctaccacatctaaatggctccaagcaaattgatccttgtttgccttcaaaaaatttgttagtttttcattcagatttttcccaataaacacacatctagcgcgattgactgaatctaaaacaacttcttcaagttcttcaattggctttaacatgtttttctcgtcttggattctagggtcaagatcttcttctttcttctcgccttcttctgttattaccaccattagttgatggttggctcttctattttgaagctctacacgatagcactcgcgagccaacagctggtcaccttgcactgcacgtacttcctacagtgtttggaatttcaaggataaatgtttgattgaactgactgcccctagtccaatcaatgtagggcgacccatcaatatgttgtaaactgatggtagatccataactaggaaatcttgcattaatgttgtagataatggcggcttgcctatagttaatgggagttcaatgatgccttgactggcgacactatctccagtaaatccacataagtgtaccatgcaaggttttaactttgcattttgtagtcccattttcttcaacgtattccagtaaaggatatttaccgagcttccattgtctaccaacactctttttatcctcttgttgatgacttaaactgtaatcactagaggatcgacctgtggatacctcacatgttttgtatcttcttctgagaatacaattggaggttcttctgttttggctttctttagtggtttcagagcaaacaccgattgattattttttacattattgacatatcgcttttgggcattactactctctctagtgagatgcagccctcccgagataaccaatatatcctcaccctgaatagggggaggttgcattctttggttatctatgttgatgggctgaactagtcggttatgttcatttccttggcacttcacatattgtccaaaatatccacgagcaatcaagctttctatctcgtcttttagttgctaaaaaagacactcttcagtggtatgccctatgtctttatgaaatcgacaaaatctatttgggtcgcgtttgtgtcttacatgcctcattggctcaagtttacaaaatgcaaccctatgctcattttcgagaaagatgttttctcgagtttcattaagctcagtgtaaacggtgtaaatttgcacataattatcgtgcttttttctttcttcttatttttagatgattctctcaagtcatattttcttttggtgttcgaaccacttgcattgtcagcctttgtcgagatggtattttctgttgcagtgttgggtttgtttcccgagccagtcttcatcaacttcatctcatttcttgcttccactttgcgcacaaacacttgcactctttcattgaatgaattaatatttctcactagacgaccttgtaagtcatcccacagcttgcccccagctactgagaggtcagtcgtgatccctgcttgaagagcagtaagttgaataatgtgattcaagtttctaactttagcagcggcagtactgaagcgacttaagtaagctttaagggactctccttgttgctgctttatgctagttagggaggatgcttcaaattacgtgtctcttgctgcctgaaattgtttataaaatccttggacagctgttcccaggaaattatcgaatgatgagtgaattttatcaaactagctactcactgcccaagtcatcgaggtgtggaataaaataaaacgtagattattcgagatgttgctggctcgcattatggtattgaagttgttaaggtgagcgactgggtccgaagtcccatcatactgcgagacgtgagggtttttgaatccctgggggaattgaaagttcataatatcaggatgtaaaggctcgggctcctcgtctgagtcatacccaggtaacttcccgtattccctatcattatatctcatgaacttatcctccaactcaatgattcccaattggattggatcctcttgctgtcggttagcattaagctgttggcgtaagtcaggtgcattctgatttaggtgttcgcgtgaatcaggttgtctttgattcaaatgtccacgaagatgtggttgtcttcattcatagttgctcacaaacctcgtatctgagtaactcttagattgataactcctcatattgctcatactctcttgatcaacataacgccgaggtctgcttctttctcgcgtttgccttcctgatcgacttttcccctttgaatgtcgaacttgtctcgtcttgcacaagcttctccttcagaaaaggttagatacacgccctctatttaggtatgtgtatgccttctctctattagtttgagaaggatgctggtgggtgtctcggtggtaacccacttgtcctaggttgatttctaggatttatctcgttattacgagagatttcttgttccctagttctgggttgccttatattctcatttttgcgagaagtctctggcacatcattgttttcattcccttgattcgtaaatccttagggtctttgagggacttcttgatgaggtgcttggttgttctgttgttcatttactagaacatccctagttcccccaagttgctcctcctgggtgtttgagaaattttcttgatttgcttcctgcctcctggttcttgaaccccaaggtctacctcatggtcttcttactctagggttaggttgattctgtgcattgtttccttgagtcgccttggccgctgtagcctctctttccaactcagcgttttgttggttagactcgactaagcattgcccgagttgtctgttttccaattctactaatggtacatacctagtgggatcataagcgtcctcacttctgggtacataaccaacattagtattgatttcttcattctttccttctgggttttgattattaccaccttggttccttcttgaatgttttgttcctgaaatgggtggcctctatgaacccattggttctttcccaggaggatgtgtagtctcttcaggacaactattatcgttttgattatgatgagccatggaaaaattttgtttgtaaggagggattttttctgagttttatcacgtaggctctaaatgaaagcaccaaactgttaacacagatttttgttaaccaataatgagccttttttgtaataaatttaacacagatcttatgaaaattgataaaatataataaatataataataaaaccaggtattttacgtggttttgtagttaaatctgcatactccacgagtctatcttattccagatatttctaagtgtttgatacaatatataattagtaatcctttttttgaagatttttttctcccctatctgtagaatctgttgctatttataggaatataggttggcagttatttacatttaaatttgaattacataaccgtttaatgaaatgtgggaattgatcacgtttcatttaatcatgtgtggataacaattgataaccgtataattgcttatcattcttatctttacaaacggtggatgttgatttggacaacggtatctcgctttgcctatagatgatcaatactgacttggttgatcatatgccttccaacaatggcatgagtaccagtgtattgagcaaacttaagaacttctctttgaccataaggcctcacagactggacaatcatgtcttgcatatttccaagttgatacacttagttgttataatgtggaaaatacgctaagtgtttaacaactgatttgtctcgtcaattttctctagtgtatagaaaggtggatgcctcactctatattgtccgtgattgattcggataacttcacctattcttttgaatcttgtccttgaatctacgtctttcgagacaggatgttgtctcgtcaatacatgaattataatttgtgtattcttgtctcgcgtaaaactatacagtagtgagttatgaatatactctattaattctatctttaatgagttattctctttttgtcattaaatgatataatcgttattatatctggtggttcacatttccacctaattggctacgtttcactctctgaagttgctgaattttgggtataata

SEQ ID NO: 223247 - DNA, 1750 bp, Cannabis indica
gaaaagagattctagggtttattcgttaattaagagactttgtcaagtctaattaataatatgttaaatggcaatattatttaataattaattttaattattaaataattagatttggcatttgtgttgttaaattagaaaaatgacatttttgagaaaataagatgaataattggaaaaattgcaaaattgaaatgtggggcccaatatccatggccggccacttggggagccattgaccattttattttttcattattttaatgctaaataaatctaacctaatcgtaagtggtttcctataaataggtagtgatggcctcaaagaaaaagatgatgcaaactctttccgtcagtaaaattttgagccaccttcactgttcctatttttgaaaccctctctctctctttctctcttcaaaaccgaaacccgaaagtgattagagtaagtgcccacacacatcaagtggtactcaatcataatgtgtaaggctttgaagaatccaaattcaagagaagaatattcaggctcaaatcttggtgatactctgctacagacaggatacaagggctagagatctgagtggaaggagccattaaatttcgctgcaaccactgtaaggttttcggaactttatatgtgtttatttcatatcattttagaagttcatgtttaggatgttaaaaacatacttgttagtaaatctagatcctggtaaaataattccaacatcatattgtatagctcttctatgggacttttcatcaccaaaaatcctcaatattatactgtactgtgaatatatattctattattactcaatgttagacatataaaaaagacataaaagagactatcatatatgtatcttaacatatatatgtatgtatataacttttagagcttgaaggtgttgggaatattttacaaggatctagatttactaacaagtatgttgattaacatcctaaatatgaattctctaaaacaatgaaaataaacacgtaagggtttaagaaaaccttacattgattgcagccgaatataatggttccttctgtttaagatctctagcccttgattcctttttgtagcagagtattatcaagatttgaacctggatctctttctcttcttcgggtttcgttactgttgacctcacttttagccaacgacaatgagtataattttataagcgacaagtagtttaatacgattgaactatagtaaagaaaataaagacacaagaattttatagaggtccagccataagcagttcggtaatagccaaatccttgttatttgtattgacttaagaaaaaggagaatatttccttatcttagagctcttacaacagtatctctaaatatgaattcttagacaaaatctttcgacccccttgcccagtgaatatgaatcactatttatagggctagaagcttggagaggaagtatttcccttctcgttacaattgatataagcagaaagattgcatattaaatagagaagacactaattctgggatttggaaccttgccatatctctgtaatctgatcccaaagttataggaatttccttgatgactcacgatgcgaaagctgaatttgctaagtgttggcgtcctgcgcggattgctcccaactcggtctaaaggacttcatccgagcggatgtatgaggtatcctgtttggcctgtgtctcgcgagcaaatacccagagtcgtttccacgtgtcaccatcgagtga

SEQ ID NO: 223248 - DNA, 2062 bp, Cannabis indica
atgttcaaagggtatgatccagtgttaccaatactagtatgggacaagtatatagtttatgtagtacaacactcagtggtactcgaggtacaatttatcccttccaacactagtacgggaagagtactaagtgtatgtgctacagaggtcttacttctattaagaacggtcttgatgcatctaaagccttgtaaataggtgtatgggaacctagatacaagtcaatattatgttatatgctttgtgcttttcttactcagtttgtcaactcacagatattctttgcatgtgtaggtaaagaaaaggctaagactaagaaccaatgagttcggagcttggggatgattgtacatattagggttgttagacctggagagtttggtctcaggataacttgggcctttattttgtagtcgttgtgcagcatgtttataaagggcgttttggatatgattgtaaattttaaagttgggatcccaacttttgtgtatgattatatatttataaaagtttaaagttttaccaatagtttaaaggcaaaggcgtgcacggtaagtaaaaaattactgtagcatgcctaagcaagagggcattacaatttttgaattagagctgctaggttgtttacaaaataccatcaatttatctaaaatcatcgtcagagaaaatctcaactcacggttcagaaatctttacttatttatttatttgtttacaaaggcatgctaggaagcttgttagtaatatgttagttgagtaatgtgttgcttaaaattctatgcatgcaataattgattgtacgtgatcgttgtctaacctacatgacttatgggttcaatggctaagtcctataatattgacgcccagtgaaataaaggagtcgaggtaatgtggctgagtccaaaggcggtcaaggaggtcaaaatcctccaaatccctgtggacgcagcagaggccgtggaaggttccaagaaggtggttatgaaaacccgccataggctccataggattaggagaaaaggtttgcagacatgcaagcccgaattaattagcaaaatgaagagattcagaggttgagataggagggtcctcgtacaatacctccttagcaagtgccaaccgatctggttcttatggtgccaacaaagcaatttgttgttggtaaccgaattgagcctctatatgagagattccgtaagaaagtgccttcggtctttttaggaggtcaagatgttatgaaggttgagcagtggctaacagtaattaagagaatcctaaattttatgggtgtcaccagaaatgaccgggtgacatgtgccacattccatttccaagaagacgctctcgtgtggttggaaatggtgtccttcactcaagacatctttacaatgacctgcgaagagtttcccgatctttttaatgctaaatactacaatgaggtagtccgtagcagttaacgaaaggagttcactgaactcgttcagggagagaccatgttagtgatagagtatacaaccatgtttgatcaacattccaagctagttttgggtatagtacctacgaattttattaaaaaggaaaatacttggcgtgattgaatgccaagattggacatgatctggtcattactacatgttatcccaattttcgtcctcctggtgtggcatgcctacagtggacaaaattagttgtcacgtggcagtgcaactcaccaatgagaaggccaagtcatcacttgagcaaacaggaatcccaacactcaaacgggcatcgagtgacagactagatccctcacaagagttggctggcaacccctgggccggccaaccttggggctgcaccatggtcggccaccctgccctccataggggcttggctggccaagaggtgtcctgtagggtttcctgtacacttctacaggtggacaacactctctgggctacaaattgggccctaaaagcctaatagaatagctgaataatatctaggtttaagggaactttggtcttttctaactaaataataaaatatacaaatatctagggtttcatattgtattcta

SEQ ID NO: 223249 - DNA, 1527 bp, Cannabis indica
ctaattcattgtttttttcctgcttaaagtactattatattatatttttcattaaaaaaattaaaattacatatatgcaatatattagtgttaaaaccaaaaacctaaaatccaactgttaatatatttataacttttacagaaaataaaaaataataatacaataatattttatatagtataattaatataataatcttctacacatgcaaaaagcaaaagttctatacaatctatttcttttaactttgattgaattaatttatttccctttattatgaagtaaagacactaagtcctacagtaaatttatcctgtatttatatatataaataaaaacaatgagctaactactcaccctttatatatagttatcaataaataataatgaaataaatagaactgtatctaataaaacttaaattcagtatgtttttaatattttcaattaaaatttaacttttagttttttataattcttttttttttttttgataaaaggtagggtgccccagcacccaattcattgaacaaacaacacgtacataagagtctaaacaaaccaaacaacaagaacaaaaaaacgaaagaaacaaagcaaggactaaacgaaaaataaagcagcaataaaaacaaactcagagaacccgcctaacatcatccgttatcatggctccactccacataatcatccagaatatttgtctccaaagttagtggattaatactcccaacagtgtttgagaatcgagcccattttgcaacgttatgggcaataaaattgcaggctcttggagtgtggatgagatcccagctcctaaggttactacaacaattgatgaatcgatcctttgctgtctccagtttgaagtgagaagttgctgctgcccgaggttgcatcacattggtgacaatcaaattatcacaatgaaataatgcctggttataacccaatgagttcacaagttcaaccgccatggaaagggccaaggcttcaccaatctccgggtttgtaaccgtgtttgtaccagttttaatggcacacacttcccccttatcattccggatcactgctgccaagaaggaactgtcgttagagactgctacatccgagttgctgcagacccatccaactgggggcggcttccaagcagtcagctccctcatacaatttgtggtcaccatctcgtgatccaccacttttctgtggatctcctcattaagttgaactaatggtgttgtagaagctccatgtatctttttatttctttccttccaaatcgtttccagaatacagagagttgttgtcatgaattcctcaaaggatacgtcatgtggtcgatttccatccatgagaaaccagagttcccaatcgttccaattatccaccataacacattcagtccgaattccccatcgggtattaaaccagattgctttggctaaattacacttccagaataaatgtatagtagtctctatttgttgctcacatagagggcaaaaattagaagggagattcataaa

SEQ ID NO: 223250 - DNA, 2036 bp, Cannabis indica
gtgttatatttttaatttaaccaactaaaattatttagtaaataattttttgtgtattaatgcgttatcatgatttatagttgatggatggtgtattgtctcactgtttgatcgtaaagtaataaatttttaaaaatacatttataacctacatggataacactataggtatttctaaactatgtgggactttaaatttgtattaaacaaaatatgaaaataaaacaaaattttaaaaatacaataaaaaaatctaagatatcacctagactcttttgtgctttatttatatataaattatattaaatgtggctataaaatattaattattgttatttttttaaacattgtaatttaaattaaaagttattagatatattaaaaaaatatcttcttatggttattttttaaaaaactctatgcacatatttaaagatatatttctattattcttttttttttaaagttaattgcgcatattaaaaataattattattctattattattttttaaaccaataaaatagagaaagtatttatgagatgtgatttcgttacctattgtagttaccaaaaaaaaataagtttcttttaaaaaaaatacacattcttgaccgagattttcggcaactaaatcattaatgcaatgagaattataagaagagagtaaatgcaagtgtttttgcgtgattggggcattaattagccttagtccacaagtctctaatttttttatatgtgggtatttctttacagagaatgttctgctctatttttttcgatccccattacaaatgtgattaggagtatttatagcagtttattggagagggaaaatgcctctattgtcctaagtgtccaccttggccatgcacaagtttccgaattggcaaagtagggtatgcgcccctacctagtaggatgcgtagggtttaggtgagacaagccctttataatttcttgattgatataatagtacattatgtagtcgtcacatacatccttgattagtgtgtaattgctaaagagtgggtttaatgcgtctgacacgtctttcatattcattcgtagacgtttcctccatattgcatttaatgccaattaatagttcatctccagtatcttaggcccggaggagctggatgctacctagctcccagaggtgaataaaagatcgatccctccggacctagccatagctcttggaggaactgctaggttgtccaaggggatcttgcctgcttaagatttgtctaactaccttcgggtccttaagctttatcagccacgtgtcgcaccatgaaattgccacgtatattggaagaaaaataaggcaacacacataatcaaaataaaaattaagaatatctctaagtaaatgtacattacacgtaacatgatctagtatacatattggtaaaaacttaatcgcagtagtaaaacctaattggcagagctgaacttgaaccactgacctcccgtcagaacaccataatcctacccagatctcgatcggacatctcccaactacgccaaacatagcccaaatgctggaagaaatcgttaagaacatagaacaacccatggagaaaaggaatacgatgcatagagagggagcccatcatgctacgcctgttgcaccgatcacagaccccaaccaagccacacctaagcccagggagagtcaacgggcctagccagagaaaaaagacaacctctatagcaacacacaaaaataattatataatttttcatcacctatgtttaatcctatgtaactttgatactttgtaaattgtggtggaaaaccttgtggcggcttcctccccttaagattaagaattttgtttggagactgagccataaactgctggcggttgaggctaagttggtgagacgtggaatgcatatggatcctattttccattggcgtaacaagagcaaggagactattgggcatatggtgtggaattgcaatgcttctaggaaaaatttggaagcttgcaagtttcctccatagcaccactcctttcatc

SEQ ID NO: 223251 - DNA, 1662 bp, Cannabis indica
aataatagaattcatattcatttaatcatataaataatatatatgtgttacctcaaaaagtaaccatttcgttacatcatgttgcctaatcaggcaagttgatactttaatctgataatcctgcattgcattgcttaatcaggcaagcctatgccatagcctatcacccatatatcacataactacagcacctaatcaggtgagctcgtgctaataacctgcacccatatatcacataactgcgtcacataatcaggtgagctcgtgccacaacttgacaccaatatatggcatcgtctaatcaggcaagctcgtaccaacacccggtacttatcatatataactgacgctcgtacctatgcccgatacatcgccagaaagaaacccgacaacgattttgatctataccataacaagacattttcatatcactgatggccgtacctacgctcgatacgtcgccaggaaaatcacatcacctaatcaggtgagcccgtaactacgctcggtacttatcatatatcactgacgcatgtacctacgcccggtaagttgccaagaaaattgcatcacctaatcaggtgagcccgtacctacgctcggtgctcatcatatatcactaacgttggtacctatgcccggtatgtcgttagaaaaatcacatcaatttcagcaacaaaacatcggaactagtcccatctacccgagaacaatcctataaggtcagaaccttcataactgttctgattcataaaacccgtatacgaaaccaattatttttaaacttaaaacgaaactaaagtatacattaagctttccagcatctaagatttgctatgttgctactatcggagcttagatagttaggtttttgattgaaaattgaagaaaataaatataaggagagaaaagtttatcggatgataaagaacgagggtttcattacttgtttcatttatggatatgtaaaaataatatgataatatatataaataatattatatatactgtaactaagattaacgatcatttttatgtatgtataaaaataatattataataatataatattaataaatactttattattaatagttatctaattattttgtagccactaacaaatctctatttttatggtatttggtcaacttcgagtattctaaaatatttcgatatttttaaaaaattaacttatcccaataattccatcaatatttctaaataaaactattgtgacatttttagcctccaatcgagtctctagggtcgccgaacatgaaaatatttttatttcacaaataatctatattttatccacttatttcaaataaatcttcatcattaacaaattacgcttatatatccacttatcgagtcttcagggttgccgaacctgaaaatatttttatttcacatgtagctcgtattacattaacactttctatataaatcttcgtaattaacaaattacgcaaattacgcttatttacttatagaaaaatttaaatttcatgctgaaataaattagtattgtcataatcccacttattacttgattaggcttatcgggatattataatttttgttgtttactaaatttttaatggtaaatttgatcatattaaatcaagaagagacatgtagatagagtgacgtacg

SEQ ID NO: 223252 - DNA, 1199 bp, Cannabis indica
gttaaatcttaatcttttctaaaaaatagagaagatgcttgaaagagttcttacaaaacatcatcagaatcagccaaggttgacaaaatgtcaacctgggcgctgggccttgctctggcacccaagaagtgttgtttcttaccccgaaagtacatgttcccccgtttttgatgaagacaaagaagatggaaaatttggatcgtcgatctgatacttggaaggcacctagatttgataaattatcaacgtggaagctaggttcccagtcactgggtgctctggtgctcaaaaatgaactttctctgaatctgatcatgatgcctcaaatatgtctatggtatatctatttgacatatcaatgcaaattttgatccattttcactaatatggtcctgaaacctagttgggaatgtcaacttgggcgtcgggtgaaatcctaggtgcccaagttggcttctaaggtgtaggttcatgtaattttagctcccgaggcttaggtttgattgctccatgtctccatggtacataatactaaaagatagtgggttggattcaaattattgaagtcttaacttccatcccaaagctttagagtgaacctgggtgctgggctagggtcgcctcctaggttgactactatgactcgagtctactcaaccctgtgacatcatccttcttactacgtgtcaaatattgatgtccacatcaccaaagaaagtttttgggttaacatttgctccccaagtcaactatacacttgtgtggagttgacttgataacgtgaactaagcctacttttcttgaaactaccagatgaacatcaattttgacattcttagtccttggaaatttttgaaaatcaattagaaaagaaaaatagaaaaaacttatattttttttccacttatcttttatctttttctttaaaaatttgaattttcatatatttgttatggcattaggattaattggatttgaatcctaataataattgatgatgccattcaaaaataagaatgagagagaaataagaagagaaaagacttttgatcttttgcttatcatttatctttttcttttaaatctctaatttttccttaatcttaatagcattagaaattgacgttaccttttaaattaaaattcatattcctatatctacaggaatttcaaaacttagcttgaaaagagaagagaaa

SEQ ID NO: 223253 - DNA, 1352 bp, Cannabis indica
ttgttcaaatctgtaaagtcaatacatgtgcaccacttctcatttagttttggaaccaaaactaggttggccacccaaatgggttagaatgcctctcaaataaaattgttgacaaggagttatcctacttattcctttaaggcagcatatcttgtcccatcaagaagtctccttttttatctttttattaggatgttcttatccaggtcaaggacatgggttattacattgggatcaatcccaaccatgtttgaatggacccacacaaagacatcttggttttcacgtaggatttggataagggacttttgatttcttaattgaggtgcttgccaaccttcacagttttgattagttcttttggatttagtacgatttcttcaagctcttcaataggaccaaggtcaaccttatcatcaccaatgcgaggatcaatttcctcaagctttggcacttctggttcttcaatttcctccatgacagcaatgattggtgccccccagtgaagattggagctgttcgctaaacaatcttgcaaggtgcaatttgctacaatgatattgaattacatccgtaataatttttctgaagagtctgccattgttgttgaaataatgagttttcttaagggaaaatagtcaaatttcaccacagcgctctcagcgaaagcaccaaactattaatgtagtttttcatcaattgatctaagaagattgtaaaaataaagaggaatgtgatgaattaatttgactaaataaaatcgcaataaataaaatagacaccagggatttatagtagttcaccccatgtcgcgattgtaatggagctatgtctactttggacttttattaattagatccaacacactagagttatgttctctagggtgtgtggacaataatacaacaaaggatttctaggtgaaatctcaatcgagacttatgaacacaagactcgagggagattcaatattaaaaaatctgatttgggaacaataaaccaataaaagtaagaaaagagaatggtccctgttattggaaactgtatatgtcaatggtgtttgagttgtagaggctaggtgttgacaaaacatggaagacttaagaaaaaggtgaaggaagggatatggtgttcttggcagccgtcgtgtaagcaagtaagcaattggtcccttattatgacatattactctctttatataggcattaggatttgttaatgatcccccacatgtcggggtttcccattaacaaatcttgtattttattcccaataatgaataaacaattacaaataaataaatttctacttatttctagactaaagtcccaataaataattattttcagcta

SEQ ID NO: 223254 - DNA, 1740 bp, Cannabis indica
taagcaaaatcatacgaaaagaaaaagggggatacggtagggaggaaagaaacgtttgtattcagctacaaaatttattttgtatactgcaggaagttccactttttctttactatatttctcgattttggaggtattaatttaaactgagataaatcatattgataataatcctttaaccaatttttaaagggagaaataagggttcaggttagaaagatctgacatgagctgagaagaaaggagcttcgacttcggctctctgggcttcgacttggggaatcatcggacagagtttcacgggagctgagaagaaaggagctaccgtggtggctggtgagtctcgtcacagggaaatttttgaaccttggggattcatccacgagagagatgagatttttgagccttggggtcactggtcttaaatttttgagcccttcactggtctaaaagcagctgttctctttcttatatacgatacccttcactagagagacgatttgaaattttcgagccaaatttccaaaatttttgaactaatattatagctctgtataaaacgcatcttttcctaacagtttataaatgttaggaatactaagcattctccacggtgataaactgttaggatacatagtattcctaacagttataaactgttgggatttactataattttttttaaaaaaaaaccatttagtattgtccacggttctacaccgtcggcaatagctattccaaagattgtttttgcttcggtgctaaaccgatgggaaaaacttccacttaccttttccaacagtttccatagttaatcctcttctaaaccgttgggaatagcccattttgtagttgtagctatggcctagttgtgcatatccacatccggatgggtgagactttggttcacagaacggagggagaccgtggttcccgggagtatttcttttggctagcagtaagggagccttccttcatggaggcttttcctgcgagatcaatgcccttatcctcccgggatattcaatgaagcatttgggcggcttaatgactccttgaccttctttgattaaaatccacgtgcatacttacaaaatgcggataacaatgaccctcaaaacttgattcttacaacacaatgttcaagaaaatacaattcaaactagaaccaatcacaaaataaaaactagaacttaaatgaaattagacaagaataaacttagcttgagaatgaatgaattatagatctctattgattaggaatagtcagtagtacaacatgagatatgctcaagaatacaattgaacacaatgaacaattacaaagaaatgtctcacattgagagaaatcacttcaagtgatactctcccattacatccctccacacactcactcattgtaatcttggactttctctctcaaaacataactttgaaattgaagtatgaatattggagattccttaaaagaatagatgcacacctatttagatgttggtgggcctctctttaagttggtgacaaagtcaattgttataactaacaacaattttatccaaattcatttgatgagcgaaaagatggatctactggctttgacagattgagtgagtttaatcccaacacctattaattctacaaataaatgaggatatagaaagatcttgtacaattcattttttggctcatcattgtatcaatcttggcattttttttctcaaataggaaaagtgggcttcg

SEQ ID NO: 223255 - DNA, 1920 bp, Cannabis indica
tttatttacagaaaatatggtctttttatattgtactcttgtcaatttgttgttaattttttgatatctgcattttattttttgttgttatttttatgttacttttatgtagttttcttgttgtttttatgttatttttatggaaaaccgtaaaaatataaaaaaaaaattcgttaaacgttaaaatgtaaatttttttataaaaaatagtgtcttatgtaattatcccaattttatatgtatcatataaataatacacttaaaattcaaatatatttccataattaggaaaataataattaaaagtatatttttgaaattaagccctaattatatgctaattctcataataaagctaaacgggtgattacaatagggtaggcgcctaccttgtctcaactaagaaaaggatagtgtcttttgtcctcacaactattttctcaataattattttctagacaaattttgtcttaacaaattttgtttttttcctatttaattaatgtgaaaaatatttatttattacaaaaataaataattattatttttttcaattaaaaatagatttttttcgaacattatacgactctttatcctaccattgatatatttcaaggtagtgattcgggaactgcaaacctataaattaattctaagctccaataaattagattgcacaaccacgatgagctttcggccttccattctcagagacagagttatgtagtctcggcgtcacatcccaagggttgggttccattctcagagctggagcttttttggctcatatctagggccggcccaaagcataggcgggcaaggcctgtccctagggcccacctagctcaggggcccaaaaaaaatttgttctcttttaaaattacacattttttgttatcaattttgaaaactactatattttttcctaaatgaaggcccaaaaatattttttttctctatggcccactaaattttagggtcggccctgctcatatctcaaagatttagaagaattcttttttggtgtttatgttaatttgtatcttaatttactattatgtattgcaatataattgtaaaatgtgtgtcaaatataatatttatatttactaattttttgtgcggaatttaacatattttttaccctatgacaatttgggttagcaaaatgccaattctttcgagcaagagtaggtgttaattacttacattatttgagcaattaaattgcatgtgtgacagttttgggaaggacaaaaggaaacatgcatatacatgtaatgaataagcaaccgtattattagcattatgtccatcacaatacagtcaagagtcaaatatgacaacccaattcaaacaattgcctactcacattttaaacacttgcacctgaatagtgtatatgtattaatatataactaatttaaaaaatgctattcaattcaagccagaatatattgttattattatgttaagtttatccaatataaatattatatttttatagtaatgatatatactcagatattatactaaatgttggttcaaaaagaaaattattatactaaatgtctacactatatgatattttattaattaataatttttatgacacttttactttataaattgttaaagagtcattaatgtgtgaaaatgttagaacatatataagatctatatggttaattggttttgagataaaaccttatgcatcttatattttaaattctaacatgacactacaaaaatttttacttttagtcacaacaaaatttgtgattaaaagtaaaaaagttgtgactaattataaattattattcttatgttgtgactgaaagattcgtggctaaagatattagctagtcacaaatattataatttattgtgactaaatgtatttttagtcacaatacttgt

SEQ ID NO: 223256 - DNA, 1256 bp, Cannabis indica
gaaaaaattgaaggactcgggggggatcggtccccgacgtcataatggaactcatccccgcttgaagactcgggaagaggagaaccttgggagtttgacatttctgaagcaggggaaaagaaagcaaaaaatatatacgtgtgaagagagaaacttagaagctatgccaaagagacaccatgaacaaaggagaatgcttgtttaaatagaatacaaaaggtggccaaggtaagataaaaggaagatgaaaaggtaaatccacccacatataaggcattaaatggcaataaatgcgcgttccctggtgtcaaaacgcttcgaaaaataccacacacgtgtaaataaccatgataagaaaaataagttgaaaatgaaaatttaaagaaaaatccttacaaatcattaaataatggcaaataaataaataagaaattgttcctcaagcttgtctcacacacacaaataaaaaaaggggcggggggggggggaggggggcgattaggaaatttatcaaaataagggtagggaaaaattaccctcccatctctttaggcttcgtcggcatcctcgccctcactaccattgtcagactccgaggaagaatccaccaaatcttcatccttcttaaactcaaagtattttgcaaaaaactcgtccagatcccaggtagaagattttgcctccttaaactcagaatacagtttaaaggacgactgataacttccactaaggaacgccttcttgacttggcccgttaggactttgatctcctttgacagggattccttctcagcaaccaaagccttttgggcctgagctgacgccttttcggcttcggacaactttccactcaaggaagagagtttgtcctttgccacctcagcctcagaacggaaggcatcgcgttcttgcaacaaagtggccttctcagattcaccgtcgacagactagcctccagggaagccaccttgaaaattagaacccccttttctgactcaagggccgatcgagtaagatcccaacccctcttctctgactaaagattgtcggccttactcttcaaaagcttaatgtcgacctccaaggcgctaactttagtaagaatagcccttggccaagctctccctctccctatcagtttgtggagcgaacttcatagcatgggcatatctcaaagctgtctggcaaaaatagggatatatatatgagtgataataagtgaaacaataactaaagtaaaatgagatacatgcaag

SEQ ID NO: 223257 - DNA, 2704 bp, Cannabis indica
agtggtggatgaaataaaatatttaaggtcaatcactcaattatgatgctataattttttttatctgattttattttaatttttttgtcgatcgatctgagaattaagtagttgattatttgactcgtttttctaattctaatcctggtcgtaaaatgtcttaattagagtgcagactattattttaattaattgctattaataaaaatctattgttttttttttttttaaaaaaaagtaacttaacttttttttaaaaaaactaaatttaaaaaaaaaactaactttgagcgtacaatttataacagttaataataataataataataataataataataataacaataacagtgtataatttatagcattgctctgcactcacatattttgaatttgaagtaccaaaacaaatattttatttttttgagagttggtacaaaacaaatctagtaaatagaagaataatgtaaattaaaatagtaaaattttgggatttggctcaacaaggtggggccttagccgaaaagggtttattttatttttttttgtgcaagaaagggtaagttcatatatgggagtgtgagtggtgtaaataatcttttgtgctgtcagagactaatatggataatatatatcatgtccctcacggaataacgaaaagtattatagtttttgtgcagaaaagataagaaaaagaaaattacgccttagctcaagtcaattttatgatggtgaggtgactatgatttttatttataattggatgctttagtttccattttcaaattatagacttgtccttagtataatatctatggctcgtggccaaaatccaactaaaaatcatagttgccaactagattaaaatggtgacaacttcacaggagaaagtgaatctataaagtaatatattatgtatatttatatgttgtgaatctcgagttccttccatggttggctttctttggatgctttcaatcatcatatcatataaatctcactgtaagtaggattatattagaccaactaaaagagacaaatctagttaaattttgttggtaaaagttgtcaaattcccaagttagggaaataaattgataaatagagaggtagggaatgttcccaaaagtctacttttaagtgagaaattatgattagaaattgtctcttgtttgcgtaattacagcaacaaaatcaaaaaaggaaacaccacaaaagtaaaaatttaattattaaaaataataataataaaggaattttaattttttctatttttttttctctctctcttagaatattgctgtgttccatcaatggggaaggaagaagatggtccttgtttgagtataagccatgaaaacaaagataaaagttgaataaacaatattgtcatctctgtggctttgcttttatttttgtttttgggttgctatctcattcattattgaaataaataacaaaagggataatggttgttttttccttcctgttcatgataaacatgaacattggataacctattattctacctagaatgaacacacaaagtcatgttgagtctttgaccatgctattatactctactggtcatgtatttgtttgcattgtcattatgtctatccgtatgttataatatccacctaacatacataataataatcagaagaagaagaagaagaagagaaagaggaccacttgaatatgcctaattaaatcaacttaatactaggggtgtcagtacacatgggatgtcgagagctcagacaatgacacagccaacaaaaaacaataccacagtgcagagatgagatctagttcctggttataattattattacatattttatttattctcatatgtaaggacaaacctgacccttctcttacatagtcatacatatcattccatgaaataatacaacatatataccaccaaaacttaaaaccatcaaagagatataagcactcaaaaaacttcccataaactagtactaatcttatattaatgaaacggctgcaatgtgaacctgagagaaagaaaaaaaacttttcctgaataaacgagaaagtaaggttagcttaacactaggctacaaaaaacaatgttaattatgaataaaccaatgattagtttagtatgtgttcatggttagttgaagacaagaaaaacaggagagagtgagaaggaactaattgaatgatcagtctgtggaatatggggtttaatagcaatgactgatgaggttggcttggctaacaggacaaaaacaatccagcttgcattatgatatattgtgtatgagcttacatttgcaaaatcaaacaaattttgccagttcaagctgtctctcacggggttttaaagcaaccaaatacctgtcagaatgatgttaaagggtatctctccggtcggcatagacggtctgatccagtgctctcatacttcaccctcaaccttaagcactcccaaggagagttagcatactcccaacctgaaacattggcatatctaccaccacttgtttctttctttctcactcttttgtattatttatttttaagtccctttcttatatatgtcattagccccaaatcaaagggatacacatttcaagcatcaatgaattaggtaacatgtcacttatcagtcagctgtattagcagagtggaaaagacccacacaagagaaaagtgcaaaaaa

SEQ ID NO: 223258 - DNA, 3215 bp, Cannabis indica
gcactcctggccactttacacccagtcaaccatctacgttgctcatacaaagttaggagagaagagagaccttcagcacaaatcaagaacgaatacggagatatgggatccccttgacgtattccacaacctggtacaattggacccaacttctttcctccataagtaacatggtaagacaccgtagatacacagaacataatcagagccactaatctcaatctaaaacccatccgaataagcatagcctcaagaaacgcccaaccaactcgatcataggctttgctcatatcgagcttgatcgccataaaaccatctttaccaatacgcttccatttcatatagtgcataacctcataagaaaccatgatattatcagaaattaaccgtcccggaagaaatgcactttgattggtagatatgacattcgacaataccactttgagtctatttgcaatcaccttagacacaactttataaagaacattacaaagcgatataggccgaagatcgcccatttgttcaggactcttcttcttaggaataagcacaatattagtttcattcaaaacagatgggaactcaccagtagcaaaaaacgtctgaaccagtcgcactacgtcatcaccaaccaaattccaaaatttttgataaaaaccaggagtcataccatcgggaccaggagacttatcgggatacatttggaacaatgccttcttgatttcctctctagtcacctcctcaagtagcaagtcattttgttcttcagtaaccgattgggaaacacagttaataacagaagaataatcaccatcagagtgctgaaacaattgctgaaaataattcaccaccaatgtaggaagaccatcttcccaaccgacccaatcaccatcagcattcttcagtttttgaatgacattccatcttcttcttgatgttgccttagcatggaaatacttggagttacgatcgccctctctcaaccaaagctgcttactcctctgcttccagaaaatttctctttgcaaataaagattattcaagttcaactccgtagctttatatcgatcaacagaattagcatctcgccctttcttccaagtcttgatttcggccttgcaatcctttatcctcttgccaaagttaccagtgtattcttttccccattcaagcagagcattgccacaatcacgaattttttctgtaatggaaagacctgtagacaactcccaactatcttcaacaactttaaaatacattggctcctttaaccatgaattttcgaatctaaaaactcttgtagtcacctgaatattctcggctacagggactaaatgtaaggggcagtggtccgaaatggacacttccatgttatagagtttagccaaaggaaacttagcaagccaactctgtgaaactagagctctatcgagccgagcctctacccataaatcaattcctcgacccctttcccacgtataaggataaccactcaactccaaatcatgtaaaccacactcatccaaggtatcacaaaatccattaatcaaccaattcggatataaattacctccatttttatcttgttgggaagtaacattgttgatgtcccctaaaatacaccatggcaagtcactttccgttttcaacgatcgaagaagatcccaagtacgctttcgcaagctacggttgggctcgccatataaccccgtcaatctccactctccatgatcacggctatgaacaatgacatcgatataattagagccgaacctaactaattgaaattcctcagcatctcgccaaagtaaagccaccccaccactcttcccttgagcatcaacactaaacgctccttcaaaaccaatacagacccgaagctttttaaccatttccttcttggccaaagtttcacaaagaaataacacaatgggcttcttttggataacaatatccttaatgaattggatggcccatgggttcccaagcccatggcaattccatgtaattagactcataatgatgggtgggcttgggaaccaagacccacctttgacaagttttttggcccatcaccaacatacacctcattctccatcatttcacactcttcatctgccacatcagcattctcactaatattcccactttccatacgcctcctttttgcatccaatataatcttggaaatatcttcaccatcatctcccacattaatattgtcaactgattgcatgggattcactttccctattctttggctagaaataacaccactttgaatacccaatttcttacctttctcggcaccatcagaattgaaaccattaccctggaatgtggaatcaacttccatgatcttagccacggatttagcttgccctctgtcgccaatcgtcggccagcatccgtttccaccgccggctgttgctcagctccagaacgcaaccattgtgaaccaatatggtggtttcttcttctcatctgcgccttcatgccaataccatacggtttaacgatttgatcgatatcatgatcaaaacgtttagcacaaaacctttcagaatggcctatgatgccacaaataaagcaaaaggttgggagatgttcatattgaaacatagcccaaatccattcaccatttttcttatacaatttcatatgccgcttcaacgatttttcgatatcaactgttgtacgaaccctcaagtaatccctccaaacacccacaaaattgttaggatccgacttcacatacgtcccaatgtaactacccgcactacgcaccaccttatccatcataaacccagttttaaggttatgaatctgtacccacatatcaagcttgtgcaaatgaatcattttaggattctcaccacttttcaaccgatggaaaataagaggaaccttattaaaagtccatggacttccatcaatcaccatctgaatatcaatctcatgataaaattggaaaaggtataaattagcttccaattcctttacatacacacctttaccgggcttccatagagatgccattaggtgtctcatggcgtcgaaatcaatagatctgcccgtgagaaatttccctacaagacaccatctatcatcaaaagtctgttcaccaccatcaacctcccttcaataagaacaccctcttcttcatcatcaatctggaagttctcatattgttcagcaagatcacccattacata

SEQ ID NO: 223259 - DNA, 2452 bp, Cannabis indica
atctctccactctaaccccccactgtgatgaaaaccacactgctctagttatattgcagcccgaaacaaagtgagagaccacatccatctcttcaagaccgcaaagcatacatggtccaacatttgaaccaaaaatggcagcaactttgcatccaaaagggagagcattctggccaagtctccacaaaaaaatcttcaaccgttcatgaatgtgactcttccaaagcctcttaaaaaccacatcaatacaatcaaactgattttggttcaaccgccaataagcacttttaagagagaagcaacccgaaggatcgtctttccaatacaaccgagtctcgacattaggaaaaggaagggtgatcttaagaattgcagcagccgcatccggacggaaccaagaactcaccaaattcacattccagctcctgccatcttccataatcaaatctcccacacacatcccttcctcaaccataggatttaaatcacccaaggacattatctccccatcagcccccatccattgttggctaccgatcttgacattagcatcgatacccaaaagccagacactattatcgacaatgaacctcctagtcgcccaaatacttttagcaaccggagacgcattagctggtaatatagagtccccaaaatttgatccatagcaatacttgtccatcaaaatcgatttccataaacacaccgtatcggaggccatagcccaccccaacttagccaataagcagaaattaatatcttcagcttttctcagccccaaaccaccacattgcttaggcttacaaagaacatcccaagcttttaaagagagaaaccgactttggttaacttgccccgtccaccaaaattttcgaattataccatcaattcgattggtagtttttttcggaagcttatacactgacattgaataaataggaatcgcagccaagacgctcttgatcagagttaaacgaccagcttgagaaagaagcctcgctctccaaccctctaatctagcattaactttctcaatgataaaatcaaaatctttgcttctacttcccttgaacaagatcggattccctaagaacttttcaaccccttccatctcatcaaaacccagctggcgtcgaatcgaaagccggcggtcttccgagcaattttgtgagaaaaacactttagatttactgtgatttaattgctgtccagaccagcagcagtattgcttcaaagcatccagaaccgcgctgatatttacaccatccgccttagcaaaaaccagtaaatcgtccgcatacatcaaatgtgttatggggaggccctccctccctaccgagaacccagttaggagcccttcttcctcctttgctaacaatagtttggagagaacttccgcaccaagaatgaacaaaagaggggatagggggtcgccttgtctcaagcctctcttcgggaagaattttttggttatccctccattaagaagtacctgaaaactgacagaggtaacgcagtacataatcatctcacaaaaatgctcgttaaaaccgaaagctttcaaaacctttaagaggaaacaccactcaagcctatcataggctttagacatatcacatttgattccaacaaaggcattccgatccgtccgccgcttcatctcatggaagatttcatttgcaataatagagttctccgcaatattacgccctttgacaaaagccgcttgaaagggagagatcaaatttactagcaccgtagacaacctattagccaaaatctttgaaacgatcttgtaaatagagttacaaagactaataggacgaaaatcatcaaagcaattagcattagactttttagggataaggacaataaagcttctattaacgagcttacagaatctccttgatgcaaagaattccttcacaaagttcaccacttggcccccaacaatgtcccaaaagtctttgaagaatttaataggaaagccatcaggtcccggagacttgagggggggcatggaccacacaactttcctaatttcctcctccgtaggacaagcacacaatctcgcattttcagagtccgaaatgcttctaggaatcagattcccaaaatctacatccaaactcgggtttgaggaagtaaagatactttgaaaattggcacgaaagtactccgcaatgttatctctaccatccacccaagtcccatcatccaaggagatattccaaatgaaatttctttttcgccgaacttcaacagaggtatgaaagaatttggaatttctatccccctcctttagccaagcttctctagatttttgtttccaaatggattcgagactaagttccgcatcctctaattccaacattatcgttccctcgagctccaaattttcgtttgaaggaggtctcgattggacttcaataagaagtttttccaaagcttg

SEQ ID NO: 223260 - DNA, 1549 bp, Cannabis indica
cggggccccgatccgatccgcgaaaaaaccccaatttgccattcctagtatcagagtcacttgtgatccgttgtgagcctaaagtgtcaccagtccaaaaagtcatttgcgatccgttgtgagtccaagtattgccggtccaaaaagatacttccgttgtctcccctttaacctcaatttgggacctttcgacaaatgtgtacctttttccagtgttcgatctttgagctgtttcaaaatctacaaattttccaacgtgtacacccacaaatttcccgatatttagtcttgtgggattctttcaaatgtcacattcggccctgagtgaaggtgtattagaattagtcccacattgttaatgtatggaaataaattgtcatatataagatgaatggactactcactctattccaaattaatttttacataaaaccctattcaccttatcttaaattctaacactagtaaacgtatgactgaaatcgataagcaagatggtcctgattacacattacctaacaagagcaccaaatatattgcatgtgatgcttattgataggtcaacatctgcactaaatttattttatataccgtgtgattgatatctgatatttgtttcactgacattacaaatgtcaatattttgctacacgtttatatatgtacatatgcttctcctttcataagatttatttttcctattcattcaaataacaaagaatataaacttaggggctaaattttgatggttgtagatgtaaatatataattacctgtggagggacgacattgaatattgctatatatatagatagattattccttaaacaactcattacaacgtgatcgtaaaatataaggaggttcaagtgaggaaagcaaaaaaaaatatataaccatgtccaaggaccctgacactataatttggtgctggttaagcatttgagaaagtggcaaacttcataagcaactagccaatgcaaatatttatgttagagataatcattgtattcaaacgctgcctaaaatcatgccttcaaccaattaaatacagccacaatagcaagattagtcaactactgttattaccatatatttattcaatgtaaatatttttctcacttaaataggctagatattctcctcatatattgctagaatagaatattaattatgatttatgattttatgaagatttatttcaattcagagtgtattatttatggagacatatgtgaaattttatatttttatatgttttataaccgacaacattggaacgcggcgtttggccaatagaatcacattttagtatgttagttttagcaggacaatatagttaaatattgggagtatcagtattattcgaggtttaaaaaatgaccaaaatacctctaaaggaaaaataatttgtttggccttttgtctagtttttctttagtaactcatttctctaagttatgttagcaatctgtttggagtttactatagagttattattgattcatttaatttttacaaagaaaagcttaaattctctctctctctc

SEQ ID NO: 223261 - DNA, 1989 bp, Cannabis indica
ggagaaactttactcctctatttcgctgtctcaaaaaatgcaattagtgcagcaatagtgcgagaagagggaaaacattagcaaccaatttactatgttggtaaaaggatactgggagcagaatcgaggtatccacctcttgaaaaactttccctatattcatgcatctcgcaaattaaggccttacttccagacacatccaataaaggtgttaattgatcaacccctgagacaagttttgtcaaaaccagatacttctggaagattgataaaatggtcaattgaactggggaaatttgacataacttatcacccaagaacatccatcacgaatacttggaagttgtacgtggatggagcatccaatgaacatggctcaggtgtaggggtcatactaatttcgctagaaggctttaagttttactatgccttaagatttcaattcgacacttcaaacaacgaggccgagtatgaagccttgatcggtagtttaaagatagctgaagtgctaaaggtacaaaatcttatatgccatagtgattcgcaattaattatgaatcaagttctaggcgaatatcaaactaagggcttaaaaatataaaaatatctagaaaagttcgaaagaacttggaaaagtttgattatcttaaaatctaacgaatttcaagagaacaaaactctaatgcccacgccttagcaaaactggcctcacagaacgaacatgatgaattgaacttggaaccgatggaactattaaacgagccgagtatatgtgaaagggaagaagttgatatgattggcagctcgcctacttggatgacacctatagtcaattatcttgtcaacgggaaacttccagctgacaaaaatgaggcacgaaaaatattgattcagtgcctcgctacacgataatagaaggcaaattgtatataaggggctattcaatgcctctcctacgtgtgttctccccacataagcaaacgagattgtcaaagaaatccatcaaggattttgtagagaccatccaggttggaaaatcttgtcaaagaaaataatttgataaggatacaactggccaactataaataaagacacacacgaatttttcaaaaaatgcgataaatgtcaaatgttctcacatatacctcacgtaccaccgacagagctaagaatgatgaccttgtcttacccatttgcaatatgggggattgatttgattggggcactccccactaggcgaggaggagcaaagtacgcagtggtggcggtcatcttcttcacaaagtggatagagacggaacctcttgtttccataacctgcaagaatgttcttgactttatcgtcaaaaacataatttgtaggtttggaatacccattaagatagtatttgataatggagctcagtttgatggtgagctatgaactgagttctatgagaggaataagactattaagatcttctcgtcagtatcaaggcctcaagcgaatgggcaggttgaagttgttaacaataccttgaaggatactatcaaaaagaagttggacgctgcaaaaggtagatgggtcgatgaactaccataagtattttgggctcacagaacaactaagaaaacagcaacagggcatacaccattctcactgcatttagctcggaggcaatgatgccattagaagtcaatattgcgacccacagacgagatttctttaatcaagaagaaaaccaaaactcttgaaattagtgaagaagaggctctttaacattggtgagttggtgctaaggcgagtatttgcaaatacgagagatgcatctgcatgagtatttaacccaaactgggaagggccttatgtgatcgaagtaatagttggaaccgggatttataaattagctcggcttaacggctcactaataaagaaccactagaatgtggagcatttgcgaccctactaccagtaaattaatgctgcaatctctctttctgatgtaatat

SEQ ID NO: 223262 - DNA, 2094 bp, Cannabis indica
acagctgtgtgatattcaaaatattaactgcatttttatcttacgtgatatgtaaagaccgcttagtttaaatttggaaattagcagataattagggtttaattatgaaaattatttattgttatttaataattatttatgttgatttatttgaattcagaatgcatttttatgtcatatagtgaaatttcataattttgcattttcagtacccggcaacatggaacgcggtgtatggctcagtagaatcacaatctaatatttttgtatagcagggccgtttatttagacatttgggaatgtcgggattggtcgggaatttagaatttcccaaaataccctatgtaccccttttatgttattttagtgtggaggggcaaaatggtcattttgccccattggtattttgtcctttagtggtcttagttacattttattttcagctttttatttactattgtgggctgaaataagtgattaattgttcttagcttattttattgaaaaaaaaaagaaaaaaaatacaaaagaaagacaaaatttcatttttctctcaagctttcctctctctttcgaactcacctagaggcagctaggttttggtgattttttctgcattacaagctggttttaaaaaagattaagtaatctcaagttcttggtaagattcttgtagcttctctttgttttcttgaagtttatgaaaaaatgaattgttgtatgtttgatgattttgtggttgtggttgttgttattgtttattgttgttttctaaagcttgaatatgtttaaatgagtggattagaacaggttttgatgcatgttagttgattttaagcaagtatggagttttgaactcaaactttggttttatgagtgaaatgttgtttaacttgctgtatttgctgtagttgtttgttgttatattcagaggcttggttatgagtttttatgtggttaaatgcatgaattagaggttgtttgaagggttagtcaagttttgagtttttgaactcaatcttgaacctttaatggtgaaattcgtttttgtgtatgaagctttgttttgtcacttggaatatgttcattggggtctaaatagcaggtctggaaagtttgaattggtttggggttgaattggtcgagttatgaatttttgaccctttcctgcactgaaccggaattccagttcagggaggcctgtaggaaccggtctaccggttggcttccaggaattttcccagaaccggaattccggttgaggaaccggtctaccggttggggcaaatttgggaaccctagttcttcccatttttgtgttatttagggtattgccatgctatttatcgatagggaaacttctagtttcgagtttaagtccccgggaagtgatttagcgtgtcacttatcagtgttgtgattattatgatttaggagcctgtaattcgccgagcagattgttccactcaggttgaccggcacacctgaattcggaatcgaggtaagattagtataatgtcatgcatatgcttatacatgtttagcgtacatgtcagttgccatcagattaacatattagatatatgttaggcaaattttatatagccgtcagattagcatatcagggcaacagtgaggtgtacatagagttgcaccgagatgccaacagatatatgctaggctatcagatagtatggattaactgctaccacatcggtacgactagagtaccgagtataggctggattcgcggttaatcatactttgtcatggacgttcctgattcagttagggttatggtcaggtgtatgggcgcttgattataacccgggatttagtatgtttattatattatgcttttcttactgagtctgtcgactcacagtgctatgtttatgtgtaggtaagggcaaggccaaagctgaggaaccgtgaggacgagcatatgaagattgtacatgtcggggcggttaggcctggagcgtacgatcctcaggacaacaatgcttttgtagttagtcgctaggcgacaaatattttgtattgaatagcaaacttttgtaaagtattttgtaaacgggatcccgaaatatt

SEQ ID NO: 223263 - DNA, 1868 bp, Cannabis indica
gccaaggagataatttcttttttttcaagccgtacacctccgaaagaagattgtgtagcggcattgagggaattgattggcaggcaataccagatggagacgctagacacctagagagatcatttgaggagaatgaagtcaaagaggcagtcttcagttgtgaaggtagtaaagctccagggccagatggcttcagtttagccttgtttcagactcaatgggaggtaattaaagaagatttgatgaattttattaaggcatttgaaaaagatggcatcattcaaggaagtatcaatgaaacatttatttgtctaatccctaagaagttgaacagttgtagggttagggattttagaccaattagccttataacaagcgtctacaagattattgctaagttgctttcattcagactcaggagtgtactgggagatactatcctcgaaactcaatcggcctttgttgaaggaagacaaatattggactcaattctcattgctaacgagacagtagaagactataggagtagaggaaagagtggtttggtcttcaaaattgattttgagaaagcctatgaccgagtggaatgggacttcctagatctggtcttgtgcaagaagggttttggggaaacatggaggaaatggattaaagggtgtatctcctctacctcattctcagtcttcgtcaatggcacaccaaaaggaaagtttgttgggtctcgaggactcagacaaggtgacccactctctccctttctttttaccctggtggcggatgtgctaggaagaatgttgaataaggcaattagttcaggcaacctttctggatttcgggtgggcaaggaaagagtccatgtcagtcatcttcaattcgcagacgatgcattattttttgtggataacgagcagtcgctatacaagttgttgcggttagttgaagcattttgcgctgtatctggactaaaagttaatatgagtaaaagtcaactactgggtatttgtatggatgaaagtaccattgcaagactcgcaggtagaattggttgtgaagtgggaagttggccaatgcaatatctaggtctgcctttggggggttcaccgagaaaatggagtttctgggaaccagttctgaacaagtgcgccaaacgactagatggatggaaatgtgcattcttatctaaagggggaaggctgacactcattcagtcagttctatcatctcttcccttatacttcctatcactatttaaagctcctaagtcagtggttagaactatggagaaaatgatgagagacttcttttgggaaggcagtgaatctacaggtggggaccatttagtggcttgggaggagatgtgtaggcctcgagaggaaggaggcctaggaattgggaggttagaggcacgaaacaaaagtttgcttatgaagtggctgtggagatttcccttagagcaaaattcgctttggcatagggtggtggtaagcagatacggtagggatgataatttctgggattccaagaatggaagtcgtttgtctcccaaaggcccgtggagggacatttcagatctgtatgctgagtacttgggtttggtacatttcaaaattggaagaggggataggatccgattttggaaagacatctggctaaacgaatatcccttgattagtgaattccctgacttagcagcaatatcaaagggaatgaatgttcctataaaagaaatgatagcgaatgaagggtcaccaggtggatgggtggagaattggaacttccagtttagaaggaacctaatggatagagagataccaagcctcatatcattaatgcaaaaggtggaacatgtaagagtgctgaatatttcg

SEQ ID NO: 223264 - DNA, 1737 bp, Cannabis indica
tcttcaaaatttaaccgctgccattcctcttttaatttccttctttcatcatgcagagattgactccaagacgaggttacttctagtctgtctaacacccccaatcttccttccaacgcattctttgtggccttattttgtccaaaagtgtatttactccagtcattcaccttcccttgaagtattttcagtttcttcataaactttgtgcttggccacccgtcattaatctcctccttccaccaactttcaaaacacttggaaaactacttgtgttccagccaatgattatcaaacctgaaaggtcgaggtccccattttggaggatttgaatcgatcaccacagggctatggtccgaaactaaccttaccaacatttcttgtctcacaaacagaaaaatgatgttccatttgtttgagaagagaaatctatccagtctacagcatacaggggaagctctgaaattcgaccaagtaaaacttccgttctcaagcttaggatcgatcagctgtaattcccggatcaagccatcaaaaagcttcatactctttgtacacgagctactgttcaatttttcccctactcttctggtcacattgaagtctccccccacaaaccacgactctccacatattgagcttaaccctgctaattcatcccagaactccggtctaagtttatacgaacacgggccatacactcccaaaaaccaccaaggctctttaccttctgaattggtcagaactgagattgagaatttaccaaccaaagagtctagtaccgagattattctagtatccaaaattagtaattttccccccgatctccctatagctggaataagaatccacgctttgaatctggatctccatatgcttccaatgaaccttctatccaccattgctcttttcacttcttgtaatattaccaagtctgggttagctttgcaaatagtagctttgatagctgttcttttttctttgtccccgctgcctctaatgttccaggttagaatcttcataatgaacctctggtgcccctggtttattataacttttctcataatttacattgaaagtcagtttgtttaattctctacatttctgccttgccttcttgacctcttctatcttttgatcattttcttcaatttattgagtaatttttgagcccatctcagccatggattcaataatatttgaccaagaagttgcatcattcatgatctcattttcttcacccaaaatcctccttctctagtgcatctttcttagcaacaataacatcatccaacttcacctcccctagtccctgcctcagaaaagcttcggcctcctctgtccatagctcattaatgctgcatataatatcatcagtttcttctccttcttctagcattgattcttctccttccccttcagactcctcatcctccgagctcaaagctaggaactcaaactcctttggatcctcatcagcctcctcgaactcaggataataattttcttcagtggagtggctcacgcaaccatgaccgaatgattttctttttctgcaatagactcgattcacttgaggtctaatttcctcctctagttccatctcccccttgtagtggagtacagactctgaaacttttcttttaagcgtagcaaaatcttcccaaaatttaataatcgccttcgtgaaattctctcgggctttaggatgaatcgatcgaagtctgccatgaaaaa

SEQ ID NO: 223265 - DNA, 1893 bp, Cannabis indica
aagctggttgttcaaaccaagagggatacttatatactaacaaacactgtttatattgctaacattattgtcaactaatattggcttaaaatattaatttaaaataggattttcgttgtcaactcgtgaatcaagtactatcgaaatcaatgcagaaaatctcgaagtaacaacgctacatgaatggtaatactcatatattaaataatgtaatttcatttaatattatttttatgtagatactgttgaatgattattactttatttacttatttaacattaaatttacattgacaagggttgaaaataacaaagaagcaataaataatattactattcaaacaccgtcttatccatattctccaaattcatctgctacaaaacgggaatatataaagaacagcaaaattatcgatttcatgaagaaacttaacccgacccccaggtatataaacttaaataaatatcgttaatttttttaaattgatataatattgaatctattaacatacataactcatattttgcagaaaccatacttttggattgaggctaaaatgatataaaaaaacctcagtcaatctttctattacatttcatgtgattcatgtaatgcaaaaattgtattcttcaacgacaatgaagaaactgaatgtaaaaatccaaattgcagaaaaagatgtcttcctacaccacggtaaaatcattatatttaatttgacatttgaacttaataaaattcataccaacgtttacatattctgtatggatcattagtgcaatgacatatgtccaactcgacgatggtactgaaatactagatgctgtgatgttcagagatgttgcacaagatatattgtcatgtattgcagttcaattaaagtcgtattcaactgaggtatattttcacatttagtatatcatatatatatatataaatgtgtaatattttttctgcaattacaaacctactaaaacttatcttaaaaattataaaagtaatatttaaataaattttgcagaaacatcgcttgtttcttcaaaaaacaacgaagagattatcaatcagtaaatggagaatctaattgtatgtagatccaagacgacggatgagcccaaagtacaaccagttcaccattcaaactgctgagtcgatagaagattcagataacatttcacaatgttgagtgcaaagtacaatcattttttaaaatttttattaaatacgtagatgattatatatgcatgagattaaatcatcttcaattatattttcttattattattggagcacattcgtaagaccacagaagttgcctacaactagatgttagaatcctataacaatagaagagaatgtttgggtttgtgacttttgttgtgcagtgacagtgaacccattttagttcacatttgcttcaatattgcatatttgtctttgttagcgatattatttggaaaattgtgtttagtttagtagaaagattgaggctttatttacgatttcttttttttttctgaaatatttttaagataatgatcattgaattaatcatgagggtatattgattaggtgggaaatattcatattttagctcttcatacatgtttcttcgttaatttttttgagaaattttatgtgtattatttattcatggctataacccttgtactcttacattacattttgtagtgatggtactttaatggatgaaaacgtggctcgccaagtaactttaaaaaataatttacaattagttaccgaattcttaaacataattcaatagaatttaaataaaactaatatttacgtggctcgccatgtaactttcatctagtgtatataaaattaagaatatgttttttatagttaatatttattatatttatttt

SEQ ID NO: 223266 - DNA, 1445 bp, Cannabis indica
accactggtttaaaagatgtgattcttggcagccatggatccgttgcaccaaaaatattggcaccattacccactttccatcgaagaccttttgcagcagttctttaccccaaacaatacctctccaagttaaggaagggtaagaacctaagtccacatccagaaaagacgagttcttaaagtaccttggcttgagaactcgacttagtagagaatttggattggagaatattagccatgcttatttttccaaaagcacttgattgaaatgaacgaaactcttaaatcccactccttcaactttcaaatgagtgagagctttccaagttttccaatttatgccagatgatgaagagttagaaccccaccaaaatttattgcacattgtctcaatttgttgacaagagatttcaaaaaccaaaagcaactcataacatatggggatagattgagctatttctttgagaagtacttctttgccaccaattgaaaacaatttctcttgcgaggaggctgaaagtagagtccataacttatctttaatttctccaaacaaaattttttttatccctacctaagtatgaaggtaatcccaagtatctctcatggcaaggcttgatagccatctacaaaatctgatgtaggctagtttggatggcaggtaaagtatttggggagaaagaaaggactggcttatcaacattaaggctttgtcctgaagcacgacaatagtaatcaagcgtttaatagccatgaaggttttgttgttcctggtgaataacataaagtgtgtaaattaaataaatttttgtatggattgaaacaggcacctaagcaatgacatgagaaatttaataatcttgtcatctcacacagttttaaaataaataaaagtgacaaatgcatttactataaatctaaatataacgtttgtactactatatgtttatatgtggatgacttgctagtttttagatcaaatattcatgtcgtgaataaagtgaaatctctgttatgtgaaaaaattgatatgaaatatctaggtgaaatgtaatccttggtatacaaatcactaggtctgaaaagagaatttctttagatcaatctcactacattgagaagatcttaaagaaatataattactttaactgcaaacttgcttgtacaccatatgatcccattgtaaaattatttaagaacactagtgatagtgtaagacaatctgaatatgcaagcatcattggcagtcttcagtatgccactgactgtactagacccaacattgcctatgtcgtggaattatatgcaagtttactagtagaccatgtgcagagcattggaatgctattgaaagggttatgagatacctcaaaaaaacattgacaatgatgctaattggaatactttatttgatgactccaaggcaaccaatggctatattttta

SEQ ID NO: 223267 - DNA, 3130 bp, Cannabis indica
cctttacctaggatcgacgacctgttcgatcaacttcaggggaagacggtcttctctgagattgatctttgatcgggctatcatcagttgagaatccgagaggaggaccttccaaagattgctttccacactaggtatgggcactatgaatttttggttatgtcctttggactaacaattgctttgatagcttttatggatttgatgaataagatattcaaggatttcctcgatatatgtgttatagtatttatcgacgaaatccttgtgtactctcaatcgaagaggagcatgagcaacatcttcggatggttctgcagtgactacgagttcataaactgtatgccaagttcaaaaagtgtgagttttggctatcttaggtgttttttctcgaacacattgtcagtaaagacgagatcaaggtcaatccagggaagattgaatctgtcagggattggctgagaccaaagacagttacagaagttagaagttttttgggtttggctaattaattatttttgtcggtttgttgagggattttctaagatctcaacacccttaaccgaactcactaaaaagaatcagcagtttttatggacagacaagttgaagtaagcttccaggagttgaaacaatgatttatcacaactccggtgttagccctaccatctgagaaagagaagttcgtggtttattacgatgcatctaaacagggtttggagtgtgttttgatgcaagccaatcgggtcatcgcctatgcctcccgtcagttaaaggaatatgaacaatgataccctcctcaagatctagaacttgccgtagtaggttttgctttgaaaatttggcagcattatctctacggagaaaagtgtgagatttatacagaccacaagagccttaaatatttacttacccagaaagatttgaatatgaggtagagacgttggttggagttggttaaggattacgattgtgacatcctttaccatcccgggaaggctaatgtagtggcaaatgcccttagtagaaagggtcccgggtaagtgactagtatgatcaagatttcacctcacctaacagatgatatggccagataaggtatcgagtttgttgtgggcaaacttaataatttgacattgcaatcgaatctattagacaaaattaaagttgctcaattaactgatccgaaactggtgaagatccaagaagaggttttagctggtcaagctaaagattatactttgtcgggtaatggtaagggcaagactaaggttgagcaatcatgagagcaagcggatgaagattgtacatgtcggggtgattaggccttagcgtacgatctttggaagagctggttgtattttatatagtcgctaggcaacaacttttgtattacgtactttgtaatagttgtaaatatcttatactcgagatcccagtcatatatatatgttatttattttgttatttataagtatttaaacaaaattttaattattcacgattttcaataaacttgttgattagcaacgagctgcacaattaatataaaatcacaataacacacctaaattagtggggtgtggcaattttgggataaacagaatacacaacagtgacaatatttgaaaatgatagattttgaattatttaaagagctcgcagttcattaaaccacatactcatgagtatgttgaaagacaaaggaaaacttccccatcctgattcacctcgtaattatcacactgagataagcgtcttgtgtatgccttattcaacactaatggaagaacacgagaaatattacttgacgtatacttagacactaattgttatgataaagcatcgaaaggagaaatgtaatatttcaagaagaatgaagcatagtaagcataactgcctacagataaaattaaaagagtagttatgagaagatacttgtaattatcttatgtgtatgtaaatatgaaatatgggaattattcacgtttaataaatggttacaaatgataggatctcaaggaaatagttgtcatcatagactccaataaatagagacagaacccagggaacaaaggacgaccaatttgagaaaaaagaagaattatatctataatgtattttgtaaaacatttttattgtcctctgtatacaatttatcaattcttgaataaaatagacttgtgaactatgaatattaacttcaattttatcatttatgttaaaaaaaaagctattaatttatgttaaattttattgttttaactttttttttctattttatttttaccaaatttttagcagctttttcaaaccttatatatcaaataatatctacctatccgactatagtacatttattcacaaaacctacttcactacagatgaatatctaatatattcaaactcttataatatgcatttctattttcaaaactaaaataatatatgataaaatcatactaatcttcaaatacgatgaggagcaataatcaaccgacataaaagttcaagcgatacaccaacgacacctataacttattaaccaaaaaaattatatattaatattaggacactaatattatacaaacacatacactaaaatacatatatatacacaaaaatatacaaccatatacatacactaaaattatatataaatacacacataaatatatatacatatataataaaatacatatataataaaatacatatatacacacacatcaaaattcacataaaataaaaatacatatatatataacaaaataaaaaacttaaaccacatatacatatatacaaattaacactctaacacataaacatttgcatatatatatatatattattacacacatatatacacaaaaaataaaaatataaaaacaaaactcactacaataaatacaaatttaaataaatacacacatatacataaaaaaaaatagaaacataaatatacatatacacatatatataaaacttaaattatcttttattggtggtaatgacaggtggccaacaatgaagaacacataaagagagggagaattttttttttaaaacaaattaaggaaaattgagagagagagagagagagagagagagagagagagagagagagaga

SEQ ID NO: 223268 - DNA, 3207 bp, Cannabis indica
ctcccttcttttgaagaaaaaccacctccttcatggctgaaaatccaaaaaaaggataacaccccacataaggaaaccaatcttcgttttgggaaagagcccatgggctccagaagatttactaacccccagtctaaaaggacaacctgttccaagagggctcaacctgaggatggcctaagagcacggaccacacgttcccgtagaactcgacccgatgttggtcctagtacgcggacaacaactcagcgtgggaatggtttgaacctcaggacgagggatgaagaactcaatcgtggaggtgcccaatctgtgggtgaaggagcttatgaaacagaaaactgccacctgagacatcgtctggaagaggcgtagcgtcaaaacactgagttagaacgtgatgtagcctcgaccagagtggcacaggggacgaatgctcaaaatcaacctgaacttggagtgataagaccacgaggcagacctcgtggctcacgaacgaggagacaggaaaaggcccgggaagaacaacccagggaaagtgagataccccctaaaaattaagatgaacagccagataggagacagccggaaactgatgaacgagaaatccctcatgagaatgaagaggatcttgggactcaaccaggagaatggaagtcacttggtagaaatcatcaacgttcttcccaaacccataaagtgaggacttatacattccctgatgagggaatacgacaaactgctctcgaggggaaagaacagagcgtgaagaagcaagtgtgacttcgaggcggtcaacaacccatagtcgatcaacttgaagagtagaaagtactcaacttgctaatgatcgagaaggtatgggaaccagtaaatctgcgagacactcaaagacaaagtctataacaccctaactaatataggcgtgttatcgtgatttttaacgtactgtgcagcttgttgctaatcaacgaggttattgaaaaaagtgaataattaaaattttcttatttaattaaaaacataaactaatatattaataaaattcctggatcccgtttacaaaataccattacaaaagtttactattcatatacaaaatatttgccgccaagcgactaaacagcaaaagccgtgatgtcccgaggatcgtacgctccaggcctaactgcccgacatgtacaatcttcacctgctcgccctcacagctcctcaactttggcttttcccttaactacacatagcaatagcactgtgagtcaatagactcagtaagaaaagcataacataaagcatgcaaataactcgggttataaccttgcgcccgtacactcgatcataaccctaatccccgtgtcccacacggtactgagtctaaaacattcatacgataatactatcgaccataatgtcaggctatactcaatatgctagtcatattctagccacattgatgtgacaacatcgatcactatttcagccaacatacatttatcagtaatcagtacaactctatgtatactattactgctatcaatgtaatctaataggcataaaaacatgtgtgctaaacatgtaataacatatgcataacattatactaatcttaccttgattctgaattcaggtgtgttggccaacctgagtggaacaactactcggcgaattacaagctcataaatcacatcagtcataacataagtaagtgacacgctaaatcaatttctggggacttaaacttgaaactaaaagttccctatcgatggataacatggcaataccctaaacaacacagaaatgggaaaaactagggttcccaaaactgccccaatcggtagaccggttcccaaccgaaattccggttcctacaggtccccctgaactagaattccagtttagagtatgaattaccaaaaattccaaatctcaaccaaaacaaccccaaactacatgaaaccttccagacccgttctaaacatcctaaagatcattttccaagcaacaaaacaagtacccaaacctcagaaacaagaaatgccattaaagctccaagtttgagttctaaaactcaaaacatggttacactaatcaacaatcactaaaacaagctcacttcaacataaccaaacataatttaactacagaaaacacaattatactccaccagcaagaacaacaactaaatcccaaaaacatgcgtaaattccttttcttacacttcaagaaaacaaagagaaggttgcaagaactataccttggcttggattcacttgaaactagctgaaaatcacctagaattgctgaagaaaacccaaccatagctggttctatgggttttgaaaatgagagagagagtttgagagagaaaatgagtttccttccttcaattgatttttctttgaaagtgagataatacctttgttttattcaaataaatcgacttaatcaactttaaaatcagatttaatactaaactccattctcacaaaaagacaaactaaagattggaaaaatgacaattttgcccttccatactaatagccactaaaggtgactaagggtgttttggtaaattctaaattcccaacattcccaatgtctaaactatatcgccccgttatactaaaaatactaagatgtgattctaatagccaaacaccgcgttctaatattgctgggcactgaatatgcaaaattatgaaatttctatatgtgacatataaaatgcattctcaattcaaataagtcactataaattaataatttagaattagtaaataatttgcataattaaaccctaattatctgttaactcccaaattaaagctaagcagtctttacaaagtctatgagtaggacgacatttgtgactaagacaaggtctgccagtaattactcctaaccagatctgcgagatcacttgaatctgaagaaacctgaccttcgcaaacagctttgtctgaagcaagaggatctaatcaacaagttcaggatatatcaagtggtggaattagggaaattatctggatacgactctgacgaggagcttgagccgtatcatccagacataatgaaaacccctttttcttcgggattcaacaacctacatgtctcttcatatgaggaaaccactgatccggtctcacatttgaataactttaacacaataatgcgagcgagtaatgtgacgaacaatttacgctgtat

SEQ ID NO: 223269 - DNA, 1611 bp, Cannabis indica
aagatcttgtatagatgatctacgtcgaaaagagataaatgagatctcaatcaattatctctatcaagccaagctcaaaaaaaatcatcgtttcacttgtaaatacttatggaagctatagattccgtatctatgatcagtgctcccactcaattgaactaccatgttctcaagatgtaaatatccgccagaactaaaagttagcttccacaaacaacttgaagaacataaataatacaactaagttgaacctaaccatatcaggattaagatccatagacctaagatcaaccattgatattgacttataaagatataacggtaagtttatgatatcttatccaagatcaatatcggccccttccaatatatgctccatacattcagtactgataaactttgccaatgccctagaaagacataacacttatccaaggtgtaagtatacgttatcgctgattatcatgtcagtctaaatctagcgaatttacaaatcatgggaattaaacttttaaacatataatcatgattatattctactgtgctgatgacactataatcatgaacaaatatatatatgttctagacttaatagaatttatacattaaacataatcatgaaataaatcatgtgaaacatgcaacataaaagcgaattatgatcttatattaattagtaaatctgattatattaaaataatttttattaagagcacaaaaccgaacatatatactatttcaacgcacctatgtaccgacacaaggtccaaaaaaatagtgggaaaattcttgtatgtgaaaaggttttagcagggaatagaaaagttttaccagagacattttcgggaaatgaacgaccctagaagtagaagaataacatatgatgggaagattgagaagagtgcaccaccaccggtattgacgggggttgatattttagcacaactggagcaaattcaatatcgtttgcctagaatacacaaaaaattcaggggtgtcaaatagaatcatttttctcacaaactaaacttgtcaaaaaagagtattattttttgaatttgagtattgaaaaaatttgtccttatgacattatctcgatgtaatgcacataaaaaaaaaacttgtgtgtgagaatttattaagtatccttctaattattcagtggaagtcaaaagatacaaagaaagcgatactggatttgtaagacttgcaaatacgacttcaattattattgtatgaagaccaaaatgaaaattgaaagaacctaccaagtagttacacaattagtgttcaagaacgacttgaattttgcaattttaccaagtttgtatagtgtattggtggttttactgcaaacattgataaaaatattaattttgataacggaaagatctttggacttaaatccccatgattttcatttgttgttacaattattatcttagcaagtatctgtaagtacttgaaaaaagaaatcaagggcaaaattattatgttgtttgtgtatttcaaataaatttgttcaaaaatattgaatctttgtgatctgaaaacatgcaaacaaatattctaactgtaacaccctaactaacataggcgtattacgtgatt

SEQ ID NO: 223270 - DNA, 2334 bp, Cannabis indica
ttttttcatatatattttttattagtactattaatatatttaaattaagtataaattataaataagtataattaaaagttaaattgacaagttaaataaattcacatttacgttactataaataaatagattacattaatattctaaaattactctaagtgtttaagatttatgaaaacgtgaaaaactatatccttataaaagtagattaaaaaaataaatgtcaatggctaaaagatttcttgagtaagagaacgatttctttttattgcattcagtatgtgagttacaccattgattttccaaccaacccccttacacttgtgaatggggtatttataggctctaatagcctgagttacatggtggtcccaaagagcaaactatttcttttaggctgcaaaccgtaggtgcaagaggtggtcttgtgcctcgtacccttgtctggtgtcaggtagtcccaagtcgcataggtggtgcctgcaccgtacccttggttgggtcctcagatcttacaagtgtggtgcatctactattcgtacctccttacttttagaaggtatggtggtatgcttttcccttgcacaccttgtcctttgattcctcctccaacaacattctcttcaacgcgtattattcaaatttcacctttgctccaccttatacacacaacacacacaactcaacacactcgacacaacaaaacacacacacatgtatatgggctcacatgcgagcccccatgcaccatgggctcacatgcaagcccttacacacacgcacgacacacaacatacacacccacggctcgcatgtgagcccccactcgcgcgcacgcacacacacaacgcacacacccatgactcccatgcgagccccccacatgggctcgacgcgagcccccacacttgcgcacacacacagcacacatgcatccgcaacctggttcccatccgtaacttcacttattcacatccttgccttttgccatctcttgtttgtagagccccacaagattggtccttgaatttcttggacgcacctgagacgcgtaagtattggtgactttgagatatgcatgccgagtcagtaagcttgtcgaatgcgctcttgttagtcctttgattattagtcgactaaccttgagagttagaagtactaatttttagggttaacaataactcatactaaaaaaacatatcttaactttcaataaattcacataattcttattgtacatcttccccttttatgatgatgtgtctacgagatgtcataaatgaacattatactgaaattccagtaaataaatattgttagagttacatccgaatcaatcaaaagacacaaatcaaaacacaaacaaaagcatgactaccaataatccaaaatctatatttttcttttatgacaaatgacttgcacaacaacaacacctatatttttggtggtatttaagtgcgggcccatgaattttgttcagggcgaaaaaattaaaggggggagtaaacgtaaaagttaagacattaaaaattaatgtatatgaaaataaaatatgatatccaaaccacattgtatatgaaaatcattcccaactttgcatctaagaccttgaacaagaagctcacgatcctaatgaatacttttccaagtaagccatggtgtgtgtcctaaccttgcttccaaaaatgaattgttaaaaaagtacctgcacttgaataatcagctcaacaaagtattaggcatttcaaagattctctaagcttgtttagctaagagtgcttggttgtaatgtaagaaagatcagaatcccatgccaccctcaaatttggatttacatagcaactttcatcttgtctaatgtattttcacgccttatttgttttgatccccacaaaaaatttgccatcatactttccaattattggcagaaggtctttgttaaatggaagcaactcatagtaaaagttggtattgactgaactaccgctttaagtaacacctctttgccaccaatcgtgaacagtttttcatttcaagcatgcatcaatttccaaacacgttctttgatgttactgaataactccttttgtctcggccttaataggaaggcaatccaagataacgctcatggcactcactaattagcatctttaaagtccgatgaaagaagtcttgcactgcatctggagtatatagagagaaagacataacgaatttttgattttaaagcatttagcctgaagctcggtgataaatgtctaaagctctctgaattgccataacatacacatgtgtggtttcacagaataataggctatcatcagcaaaaaa

SEQ ID NO: 223271 - DNA, 1689 bp, Cannabis indica
ggaagccaatgatcttcaatggttctgatatgactaccatcacccactttccataaaagacccgactgcaacaactccctaccccagagaatacttctccaagtgaaagaagggttgtgaccaggtttagcctcaagaaacacagtacgagggaagtatctagccttaagaacagaagcaaggagagaagaaggattcttaaagattctccaagcttgcttggccaacatagcttagttaaaatggataagagaacgaaaacccaaccctcccaaaaatttagatttgcataaggacttccaagacttccaatgaattttatgagaattccctgatgatccccaccagaatctggccatcacagcttcaatgcccttacacagcttaacaggcaaacgaaaacaagacatggcataagcaggaatagcttgaataatagcctttaacaaaacctccttaccagctcgagaaatacacttagaagactagctcctgagaacagaattaacccgatcttttaagaaagcaaatgagtgatatttagaacgagttaagcattgaggaaggcccaaatatttacatataaagggcctatcttcaagattaaaagtagagaagaaaacattacgaatatcaggctgagtattaggggagaaaagaataaagggcttggaaaaattaataacctgacccgaagccctagaatagacatcaaaaacattttgaagagctgaacatgaagtacgattagcagtgcaaaagagaagactgtcatcagcaaaaaacaagtgagataaagaaggagcattcctagaaatagcaatgccagcaagtaaaccagcatcttgccttgccctaagaagagcagaaaggccctcagcacaaagaataaaatgatagggggaaagaggatcaccttgcctaagtcccctagaaggctgaatagatccatgaacagaaccattaatcagaaaagaaagagaagtagttgagatgcacttcataattagagaaacaaatctagaaggaaagttaaaatgaaacatgagactctctaagtagtgccaattaacccgatcaaaagccttagtcatatccaacttaagagcagcccagcctagtttcccatttttcctagaattaatagtatgaacaacttcttgggcaataagaatattatcaaagattactctaccagagacaaaagcactttgaaaaggagatatgatcttatccaaaacaacctttaaacggtttgctaagaccttagatataaccttataaaaggtagagcaaaggctaatggacctgaaatccttaagagtgtgggcatgctgtttcttaggaataagagagataagagtagtgtttacagaaaaatcaaccccctcattaagacaagaaaggacagccttagcaaaatcagcccctaaggttgaccaattttttcgataaaagtaggcatttagcccatcaagaccaggggccttatctccaaagattaaaaagggctttccttacttccttgagagtaaagggttcatccaagaaagcataatccaattcttccaaaggaggacccaggcaatcaataataaggctaatggcatcagcatcactaccatcataactaaacaagtccgagaaataagaaactactaaattttccatatccatatgaccagagac

SEQ ID NO: 223272 - DNA, 1663 bp, Cannabis indica
atcagattgtaatgggttttatttagggcacaaaacccaacagaaaatacatttgttcttgacttgttgtagaagatacatagaaaatctaggctcgaaactttgtagttttctctataatagttcgtacggcttcattgcttataaccttctgcctctaatctcccaatgttcgtttttcaccttgctcattcaaagcttcgtaaaatttaacctttaacccaaaaaattaaaaattcttgggttatgagttaatttttgtacgtttttcatccttttaatatgttgagtagtcctggtcggcatattttcctgtttactgttcgatatcctggccaaacactgatctcgcgtgttatcttttgtagatgaaccctggtgtgtttttgggaggcgaacaccgaattgaccagaatttgcttcaactcctgtacgaggatcaacctcgtgttcgtgctagcctgtcctcttcgagtgacggactttctaactcaagctttgaagatttggaagtgagtagtgatcgttctcctactcctcaacctgaagtgcaacaccacacttactccgagcagatcgtatgagaagggtacggtcgcttcatttagaaattgaagaagggatggagacattatctttcgtctaattgggcgtatattctccaaccaggtgtttatgacactcttcccgtgggccatccaagctctggtaattatccctatagttgtcccaaccgatattgttgcacgacacacacatcagtatctgtctaggagaaggatgatgtctcgcacaaggcagacgatgtggaaagttaatgcatctgaccctcatgtggcccagcttgccatgttgccaagtgtcgagtaggatctgcccactgtggaggaggaggatcatgagggggacattgaggtccaggatatagaggagcaggacgatgttcatcttgatagtcctctgaagttgaggtagaagatgtggctgaacctccaaatttttgagaatataacgaggctaaggagccgatatccgcggagggtgatgtcttagtcgaaggggaagactatgtcactgaggagcttactgaggaagttccccataggaggcgaagtgctctagggtccagatggccctctgtccaagataagcaaggcacgtatgagggccttggataaggctgggtacttgggcggacttgagtgttacgtcccctcttcgaatcaccgggaaactaacccacagaaagggttttgtgcttggttgggtgctcacactaagtaaggggcgatgatgcctttgcactcgtacttcaagagggttgcagattattttctcctttgtctgaccaagttcactcctgagggcattaagtacttgtcttccctgttcatcctttacgctattcaaggatgaggtgtatcgtccccacatgaggtcaattggttttttgacttgaagtctacccctaagcagagcaggtcggggtacttctacttttctcagccagacttcaagtggcggacgggcactgtcgacaaggatgttagcaagatcgggggttttgttgacgagtattacttcgtggaaggcatggataccacctatactcaaaagatcccagtatacagccttccactcctcacgttggcacttagggaca

SEQ ID NO: 223273 - DNA, 2106 bp, Cannabis indica
ggcataaaacccaacaatccatcgatagggaaatttctagttttgattttaagtccccgataagtgtttagcgtgtctcttatcaatttaactactgttatgatgtatggccctgtaaaacgtcgagcagctattccactcaggctgaccgacacacctaagcacgaaaacaaggtaaggttagcataaagtatatatgtgtgaatgaatgcatgttattatttgtttacactagtagcactgaaataaatatagttttaagggtgctagtacaatgtaggattttaagggaggttacggtttaccaacatgagcaccagagagtacgtagtgcttggggtatagcacttagtaattcctgaaagtacagtaatggccctaccaacacgagtacgaagttggttctagtgcatgtggtacatcggtcggccctaccaacacgagtacagagttggtactctagtgcatatggtacaatggtcgtacttctgttgagaatgtttttaaccatttggtgagcttagcatttgggctcaggacggcttaagcataaagccggtgttgcattgtttatatatgttttacgcatatcttactgagtcggtctactcatcagtttgctaccttgtgtaggtaacggtaaaaccaagctggaggagtagtgagttaggccttggcaaggattgtacatatcgcggtagtgcaacctcgagggtttcgttcgtacaatattttgagttcattttatggttgccctgtagtttgtaaaaaacatattatgtgactttatatattagtatatattttcaacagcagttttaaacttgggatctcgacttacgagattttataaatataataaaataagtttaatccaaattagtcaatttttaattatggcattacaattctggtttaaaaacacaattattctccttaaatattctatgtcatttcgaattgaagacacttctttcgtcactgtttgagacaagatgacagttgtactatgagcatccttatcatcttgctcaacgggctttgtccaagatttgtcggcaaagtaagtatcagcacaaacacgctggcatgacatgatcaaaccattctttcagagattttcattactaaacaaagatcacccatctctctcccatgccttaatttttaacaacatgactttaactatcctcttcatgtcaataagaggatctgatcttttgaaagggccgactttttggaaggtagtgtgtcttgacggaagaacatgagcatagaaatactcctgatggtaaaggtcacaatttcttttggtaattttttttaatgtatgggctaaattggtgaaaatggtagaagccttcttctttgcaggttggactccttttcaagttgcaaagaaagtttatttcacgaggagttggaataggccagtttctaaggcagtagaatatgaaaaaggtgacaagaatcctatagccatttggatttatctggtaagggcagacaccaaagaaatcagctatggatatgaaccatggatgtaagggcaattaagcacctgcattcatgtggaatcttgaccaatcagtacagcaagtgttttaggagccattaggaccactgcattgtggcttttgaacaacaattttagggagatagtaatcatctcgtatcaattgagcttgatgctcagtaagagttttaaacacaagaggctttatcctgaagacgtgatctctcaaatcatcactcttaatggcagctttgagaagctaagttgccatcaccttcccaccacacgtcttgtctatgttctagatttatgcataattagcttagctctaatgaactaagccacatggaggtcatattcatcaggaaaccttctacttttcttcatcctagccatctcaagctcaacaacatagttgcttacaactcaagaaaagtctaaattgggttggaaaagtcaaagcaattttggaggaatttttcaaggcactagagaagtgttttaaatttttggagatcttagaagaaatattttaaaggttctttgggagtcaagaattatttgtagtaagatcaacaaaggaggagaag

SEQ ID NO: 223274 - DNA, 916 bp, Cannabis indica
gagaagaagtagtgttgaaagtggatgatcaggtaatgagttcaagattattgacattattgaaagaaatgtgcacttttataatctcattgcatccctgcaacctgcaacctatatgatgatatcactttctgttgatatgcttcaacaaagctagtagaagctaactataagatatacatatacatacatatagaccgagaaagtaatgtagagaaaaatgatattttgagaatgtagatacaattcagagaaaaattaagtgataaaaattgttgtgtatgttcaagtttcaaatgtgatgcaaaagtgatgagataatattttataaaactgataatataagagtactagttacctcaatgacaagagtatcatatgcagaagatgaaaactacaattgacgtctagtttctttattaagtgaggtgctagcatttatgtcctacatacaataaattaacaaaacaagtatatagttgatagaatagtaagttaaaaatcaacacaataaaagaaaactaaaccagattgaagatgtggcaatgtcaccacgatctaaagtctgcaagaaaaaaactaattttagttagtacatatttgggttaatatttgaaattattaaaaaaaattagttgtttaacctagacagtagatatcccattgctattgttttagttgttcaacatagtcttaagatttttaagttaagattctagatcatctacttttgactccagcgcagctacatacttattttgactcctttttcaagttgatttatctttccacacattgaatgggcagacgccgaatctaaacatgcaaattgatccatatttttgctcacccataatttcaaaaaaatgaatcattcatagtcttttcttttgatgaatcctcattcttttcttct

SEQ ID NO: 223275 - DNA, 2627 bp, Cannabis indica
gacgacccttggattccgagagataagaggtactcaagcgcgtacctgaaggattgttttccatacctcggacctcgtggagtgctttgatatattaatattgttttctttaggaaatttctgggattcatagcaacgcgaggggcattgaagcaaatcctgggaaaatcaaagcttaattgaagcggtagtaggaaccgagctttataaattggctcgactgtactactgataaaaggcatgcatagttgtacaaatgcctcactgataaagaactactggaacgtggaacatttgcgaccctactaccagtgataaaatgattgtaactcacatttctgataaagtgttttgaacttcagttatgaataaagttaatcatttttcttttcaagtaattacaaagtgttactctttaaaattacttgagaggcatatgtgtatgattaaccagaatttatctggaaatatacatgatatagtgcaaacccaccactttaaaatttttgaattttttttaaagcttttgatcaaacctttctgacgagaaagggatcaaaccattataactctttgattaaaaacatgtcagacgagaaaggaaaatcaaaagttataaatgagatataactcataacttgtgtgcaaagttgaatattaacggctcacactgtatagaaaagtattaaacgaggcatcaaggtgtcttgataaaagtacttaaacctagtgtatgaatagataatctaactattcatgcaagcaatcaaaaatatacaaagtgataagatcattaaaagtatattcaagtttgcttgaaacagattataactgttatcacgaggcagaattgacaaacaactcgtgcgtatagtagtctattaactactcaatattaaaggaatatacgagcaatggaaatttcctaaagtactttgtatgtgatcaaaatatgattatttaaattgtgaataaaacgcaagcaaacaattatgtattaaagttcaaacgtaaaagtacaaggcattaaataaagataagaaccaggttagacatccaatctggcatatttgtatttacacaaaataaaggtgccacaaggggcaaaccattgtcttggtcctagggccactttcttacataaaagataaataaaaaggaagactacattgtaggtgacttggatggatcttcttcttctacctcctcggcttcttcctcctccttcctggtcttctcgcaataagcaagaaattcctcctcatcttcctccaagaagctcatgtccaggtctggattttccatcaaggctcgataaatggtacaaaggccaacctttttgcattgacctttggtttcagcctctttcccctaaagcacccctttgagctcctcgcatggttttggcctttgttgccttctcagcatcttcaagactcttcttcatcctctcggtttctttggtaaggcgattaatttcttgttgagcatcgttccatctattgactacgacctcacgttagcctagtgagttttggacctcgctctccaagtattttatcctttctataactcaccaccgggaggcaaaagagatgaaagacgcctgaggattcacaaacaatgatgtataaaaaacaagggggaagaagaaaagaaataaaagatgtatagagactaaggaaataaacttactaagagggtatgagacaaaccccttgttagcatttgttcccaatccccatgattgattaaatcccaatcatggggaaggagagccttaagttggcgccagcaagcggccccaaactcttgggcaaactctgagccaatcttccttgcctcggtagatagcatttcgatggcctggctcgaggaggcagaggcatgagttgtgttggggagcggctcgttggtacttgcattgaccagaggaggagtttgatcctgagtctcagtctcagggacctcaaggttaataggcttaaaggctttcttctttttctgagcggtggttttcctttaccttattaaaggctccacctcggcatctgaaggagcccctgagttggtcgctctcttcttccctttcctctgcataacatcctcgaagtacatgtctgggagtcaagacaaaaatgttaacactaattacaaataagtaaaaggggagtttagggtataattttaccaaccacattgattacctcgggatgctccttcactgacttctcgaggggcagtgtttggaaggtactgtgcccaagccacgcgatcccaggccttatccccgtttgggacaagaacctactgccaagaagaatacttgggatatttttaatcacaagtaaactccttgtcagttaggaggtccacagacctcagattggcctcgtttagaaagaagtcgcactaaggccataaggaagagtcaataagagcatgcgtcggttggccatctcaggagtaggggcaggtcttttcgaaagggctgtcaaaaataaaacttcagtcaaataacttaaaataaaaagacatggattaagttaaccaaatctaatgagaggaatcacttacgaattatgcggaaggtggtcgtgtcaattggagagaggtcgatcgtccaa

SEQ ID NO: 223276 - DNA, 2288 bp, Cannabis indica
ccttaatcccatattagtcatatgacccataaaagattttttgatagcatctttgtgaatggatctgctaggttatgtactggcgcaatcttcaagaccgtcacatcacctctctctgctatatctcttagtagatgatacttcctctcaatgtgctcgcctctcttgcggttcctttgttccttggattttgccatcactccactattgtcatagtagagtaccggtggtttttctttctttggaactacatccaaagtagtgtagaatttcttcaacagaagctgctatatattcaccttccatggttaaatctgccatattagtttgcttaatgcttctccagactacaactcctccaccaagagtaaatactgattcagatgtccacttttgactatatttgtctgattgaaaatcagaatcagtatatctagtaggattcaactctccatcgaaatatacaagcatgagatctcctgttctcaaaagatacttcagagtgtgctttatagttgtcaagtgttccaaacgtagattagattggtaacaactaacaatccctatagagtagcatatgttaggccttatacacaatatttcatacatgaagctccaaactacttatgcataagggtactttctcatgtcctcttcctcttgaggagtctttggagattgatccttacatagattaattccatgtccggaaagtaactatcctttcttagaattctccattgagaatctttctagcaccttatcaatataattttcttaagaaattgttaattttcctagctttctatctctatagattttgatcccaagaacctagcttgcttctcccaaatactttatttagaatttattggcttacccattccttacatctcacaacctttctacattgtttccaataaatagaatgtcatcaacataaaaaaccagaaataccactacattacctttaatgtatttgtatacacaggcttcgtcttcattttgttcaaagtcatactctttaaatgtcttattaaaaatgatattccatgatttagaggcttgcatcaatccataaatagatttaagtacctttcacacctttcgatcttcccttagtttacccttctggttgttccatataaatgacttaatcaagattgtaatttagaaaagcggtcttcacgtccatttgctatatctcagtcataggtggctgttatggaaagaagaatgtgaattgattttagcattgccacatgagagaaggtttcttcataattgatgccttctcgatgtgtgtagcctttggctacaagccaagctttaagggtctctacattccctttaacatttctcttctttggaaaatccacttacaccctataggcataatatctttaggtggagtttcatactcctagactttgttggtgcgcatggaatccacttcttgatctatggcattgttcgacttgtgtgagtaagggtattccattgcttatttataggttaacggattgtccatgtttgtgtcagagacaacaacatgtgattcatgttcatagcagataagttgtctcacaattctcccacaacgacaatgtaccgagttttccttttcaagaactaaggtaaatgatatcagtagttcatataatggtcctaaaattattggttcagaaatttgctcatttatgatttcctcggtaaccacttgcggttttgtgacttttcatatagtcatgtttaagaaaagatttattgtcttgatgactatagaaatatgcacctcgagcttcatttgaatatcttacaaacatacacacttcaaatctaagagcaagtttctcagtcttgagtttaagaacatgagcagattaaccccaaatgcagaaatgtatcaagctgtgttttatcccattcaataattcctttggagtattgttgatgctcttcgtagggtactaaattcaaaatgtaagtagctgctagaaatgcatatcctcagaagttcagtggcattgatgagtaacacatcatttatctagccatgtctaacaaggtccactttcttctctctgcaacaccggtctgctgagttgtctaggtgttgtaagttgggataagatcccttctaccatcaaatagtatttgaattcagaatccaaatacttgccaccacgatctaaatattgaagtgtctttaatgagttacctaactgcttttcagccatagcttttaaagtctttaagctttctgaaagtttcagagttcttggaca

SEQ ID NO: 223277 - DNA, 1602 bp, Cannabis indica
gtttagccttgaagttcttggaagttgtagtgagtgacaatataatagtggagtcaattgaagtggtaaatcttgagtctatgacactagctggtgttccctttgagaaaataaatctaatggtatgcaagagaattagaactctatggttaggttgtgattttaatatgaatgagttgtcatcattagaatatctcatttcaaatcttcctctacttgaggatttgactttgagcaatgatcaatgcttgggattgaagcgtattaaaatttcgagtgaaagtttgaaaagtttcagtgtagaaaactctggtgaaaatactgaaatgaatgttgtagttgaatcagctccgaaactagaatcgtttcgttataaaggtaaacacaaatttagtataacaatggagtcatccaattccttgaatggaacattcataattcttgcatggccttgggagaaatttgatggagattggtttatcaatttgttgaatcttcttttgaatctcaattgttgttggaataaggtaactctgcatgttgacacacttaaggtatgtttatttctcattagatttgattttgtggtcttatttcaagttcatatcattattctttgtagctatatttgatttttaattcaatttttttgaattctctacttgaaggctctcatctttccaaaaaatttgaggagggcatgtcgttcttctttgcttaattggaagcatcttacagtttttgctacacgactagagaaagaatcagaattgagagatgctttgttgtggatgtcaccttctttaaaaacattatctatactaaaacgttcatctcttgcatgctattgttatccaagattataggttggagtactagattagttcactttgtatggaaactttaaacttcacaagaaattttatgaattactcttggatattcaaacctggctgcttaggtttctgtattgatttattttctcttctatgcttatgttgttataatgttatctaatcatcatttacaaatttgaaggctagaggccctttttgctttggctaaccgataaagtaaaataacaaaagtaacaaaagttacacaagagatgagggttatttctattcaaaaaagttcattgtctattctaaaagcatgcttagctaatttgtgaacctcaaaattaaagttgcggctgacatgagagagagttgccccaagaaagctaggcaatcaaactttaatatcagaaaagataacccccaattcattcatgtacactgtttgaccctccaaagctaagaccaaaaatagtgaataatacatttcacccaaatttgtttctgaccattatttgttttaataaagcaactttttcttcccttagattctggttccttgtgaagtttgtgctgtgtgatttgactggttcagaaacatacaatacaatcaatcaagattaatatggatatcccatagttacaagttaatggtggtttcaagatgttctgctgtgtatttttccaagctctagcagtagatacataatttctttaaggtacactaaaaatgcttatcgatctagatttgagtttaattaat

SEQ ID NO: 223278 - DNA, 1261 bp, Cannabis indica
ttatttttttatttttctgtgtgagattatcactattaggctcaagttttgattaacgaaaatttgcactaacacctggcatccatatattacatcgcctaatcaggcgagcccatgccataacctgacagccatatatcgcatcgcctaatcaggcaagcccatgccataacctggcattcatatatcgcatcacctaatcaagcgagcccatatattgcaatactatggcctaatcaaataatcaataatgaagaaacctgccatgccatgtggtacattatacttttcttaccttaagtttcagtttaggtgtgttggccgacttgcttggagaatgatcaatgatcccaggtcctatgtcataacaataaaagaatgattaaccaagtaatctaacctattctatgcccaaaaattcattcccaaggatctcgtataggtcactagggtatccctacttcaaaccttaagcaaatacgaaaactggggttcaaaaacactactagaaacgatctgccatttgtgaaacggttaaccatttccttttggtttcctggcaagaaacgggaatcccaaattttacacctcccgaaacaccaccaaaacctatctaaatcattccaaacttcataagacaaatatatatcatccatacagcagtcctaacgtaacaaaaattaaaaacgagtccttaaacaaaaatatcatcaaagcttgagctttgagctttaaaagctcaaacactattatcacctcaaaactatctcaaattcagcaagtgaacattgtaattaatcccgtagcaacacaaaaataaaatcatgaagtcacagattccacaactattccaaaacacaaagtcaacatatagaaccaaatatttttaacttaaaacaaaaaccaattcttaccttaagctctctctcttcaatcgtccactatccagttactatcaggcttaaatcactcaatttttggttgaaattaaattaaagaaaatagatggtgggagtgaggatttcctcgcggtcgaagagagtggggttcgttctctttttcttttgatttttaaaaacttaaaacatatacatattaagctgataagtataagttttattataaattataataataataataatactaattataactttattaataaaaattattttactatttcttagccactaagaaatctctacttctagggcattaagtcaaattcaaatacttctaattacctcaatatgtatac

SEQ ID NO: 223279 - DNA, 1953 bp, Cannabis indica
ttgttccaagacccaaggccttgtcttcatctaaaacttctctcaaaacctcatgatcgagactgaggagaatggcaccatgtgctttggcttcaatctcaaatttcttcttcctgccttcaattaattccatggcttcagcatcaagtgcctcatagataccttggtgaactagaaaggtcttcaatttatttctccataggttgaaagcattcgaactagtgaacttgtccacctcaaaccttgttgtacccattcaaaccaggttcttgattgcttgaatccaatttttgaaagttcgagtttgattcttgaaatgtcaaagaagaatcttgattggttgaatgtgattcttgaaatctaaaccctaagctcggatgccatttgtggtgaatgatcaccctcaaaacaatgttgttacaatagtagtgatgttcaagaacacacaaacataactagaaccaatcataaaatcaaaaagtagaacttagatgaaattagacaagaataaacttagcttgagaatgaatgaatcatagatctttattgattgaatagtaaatattacacaatggaatatatccaagaatacaactcaacaaaataaacaattcaaagaaatgctcacaatgagagaaatcacttctgtgatcttggactctctctctttctctaaacttgactttgaaatctttggagattgttttgagagagtatacacactcctatttatagatgttggtgagactctctttaagttggtgacaaagccatctcttataactcacaacaacttttttcaaatttatctgatgagtgataagatgaaactactaattttgacaaattaaatgagtttaatctaacacaaaccctaacggagaaagagagagagaaaaacagctaatattttagtagtaaggtcgtttaatttttaaatcttaattaatcaccaagaattccgaagttgttcttacatgtcaatggcaagaattgtgaacttagaatttaatattattattattattattattattaataaacaagaatttaattagtttaattgaagccaaataatgacatgccattccacccattcaaattagttgaataggatcgttgcttcaaatacagagttaagggacgttgtgtgtaatggtttctcaatatttgacagcattactgtcaagctgcaatagtaattaaattccaacaattactctcatgttttttctaatagataattacttttaatttttttactgatagatttacttacatgttaaagctttttatttagctctttgtttttctgagtcagatttactacaaaataataaataataaagaaaatagcctaggcaatgtaggcatatacatttaggcatggcaaaaaagatccatttatttagatcgggtcagtgatccgatccaacggatcattactgatccgaaacattcggatagttattggatcttggatcagatccgctccgccccacttaatttttttacggatcggatctgacccgatccgttttaaatatatatattttttaaaaaaaaaagaatttttactttttaatatatatttttaaggtgtaaggccagtggaatacaaccattagacatatatgatctgcccataaaccacactatatattattattttaattaattactctctcaatttaattcttatatatatgtgtacgtatatatataaaaataaaaatatatatgcatactggccactctatattttaattatttgattataataattattattatttgcaaaatttcctataataagaaagtaaagtaacaaatgttatacacaatagatcgatttatgtataggcactgttaaatatattaatttgtacaataatttacacttttatatatgtatgcaacaataatttacatttagtataaatatattattaa

SEQ ID NO: 223280 - DNA, 3561 bp, Cannabis indica
gggaagatccaccattggtgcctgcccctgaaggaaggtctcatggtcgacagcccctagggacaacaaccgaatctcgtctctggtattatgctggagagagaggaccaagagttggcaagcctacgattggggagcctcaagtggacttgggagaggatctcaagatagtcagactcagagaagctgtaggccaagccggcgtaactgaagaaccacgcgctgctaattgtgatgtatttctcagtagagacaaaaattcctgagatagatggatgaccaagagtacatttttcaatcttactacgcagagttggatcgctgcatcagagaggccagcaatctgataaggcagttcactcggagaatgatggaagaggccaagatctcatcagagatccacttcaaggaagacttgttgatagattagggagggtctatcgacaagctaactaacctggttcctcaggaactaggacagatctccccctgatagagggaggatagacctttcctcaaaggtttaatgacgacaacaaccaaatcctagaatccaacagcataggttgctagctagggatctctcgctcaccaacacccctattgctcagcctatggctagccagccaccagcaagaatacccttcgtcgaccaaaggacaacacttcctccctaagaggagtgaggcgccagaggtcaattttcaattgacaaggaccaggagcaggtggaaacaccttgaacggcaattcgcaaagtgaaactcttcacttcatctacctagatccaccaaactctaacaattattgtgatctacctcctatcaatgcatagccaacatcagtcaactgaggagtcatgggcagtcaaaccttgccttttataagtctagccagccatggaagcattgtgggcagctacaccctgccctttgcaggtctggctagccatgaaggagcaatgagcgaccagaccctgcccaatgcaggtctgaccagccaaggacaatagccaagtgtaggctttggctgctaaagccaacacccgtacctaagaatggccggctagggtctacaagtcagcacaggtctgaccaaccttcaccataccctctcctagagtacggtcagctagctcttatctttccagaatctgcaacccctctaaggagagccagtttgtcaagtccccacaacaacagatcctcatgtgcaagcatagttagaccaactcagggacatgatttaaggcatagctggtctgaagccttcagaccttaaacttgatcggtcaaatggatcaccattctcaacatacataaatgccttgcccttgtaaagtatacaagttcaagatgtcgttatggaagatttccaccaagtgagaagacccattggctcacatcaaagacttcgagatgcaactcaatatctagaaggttattggtgatgtgtcatgttgcatattcccacactttgtcagaaattgctcaatagtggtacttcaaactcaccctaggaagattcaactcttgggtcgagttctcatgagaattttacacacaactcttgtctttgagacttgtactatcatagctacaagatcttgtcgaagtcaaacaatgacatggagaacctttgaaggattacatccagagattcttggcagaggctaccaaagtcaaaggccatacagaagaaggtcgatatacaaccataatggggggcatactcccattgagttacttctagaaagacatttggaggatctctaccaacaacatgaaggagttctttgatagagctgatggctttatcaaacttgaagaagacatatgacatgcctaaatggggcatgtcaataataggcagtcacgaaacatcctggagtcttatgacctgccaggcgcacaggaagatgccaacaactctgcccagatctttagtgggaaaacactagaaataaccacatcaccaacaactctaggaggaacactgaaaaaaaaaggggaagtttaacacttctaccataccacaaaagaacaaggaggagaagtacacctgccttaccctcttgatagataaacttaaggccatcttcatggaaactcaaggaacagtcccttactgaaaaccctttcctattaaaagggagaagaataagggggacatgtcaaagttttaccgatatcacaatgacttcggccatgacaccaatgagtgtcagaatctaaagagagagattgaatagctcataaggtgtaacaatccccacctgtgttgttatctatagaatgaccaaactcaggcacaagatgcccagaacagagatccaatgccatcactagttgtaggacacctaggggtcatcattcgcggaccccacattacaggtgagaccagcaaagctatggagcgctatgctcaaacactccgtcacgagcctaaaagcaatatcctagctattgaagatagggatctaagaaaccaaagcttatatagcccacgatctccttcacagaaaaagacgcggctaaggtcagtttcccacacaatgacaccttgttcattactgcaaaaattgggaacacgaccgtagcaagatgcatggtggacaatggagcctcctccaacattcttttcaattcaacatataaaaagatggaggtctagctcactaacctggcgccctacaaccaaatgatgtatggcttctttgaccaaggtatcacatctgaccaggtatagcagattacccctcacagctggagaaaatccaaccaccgaatttctaatggcgcagttgtcataatcgacattccatcaaccttcaatgctatgataggccaaccaactctcaatgacctgaaggcggtcacatacgtctaccacctgcgcctcaaatttctaacaagacatggagtggcatgtgttagagaagacaaaaagtctgcccgtcactgctacaacttgaccctatccaaggccaagaaagagaatatgctcaccaagggcctaaaagatgagcccaacaaagggaaatgaagtctagcccaaagcagggacatagacatagatcctcgctttggggatcctgtaggaagcttagggcctgtagaagagttggaagaagtggaggttgatcccactttccaaacaagcagactgaagattgggaaagttttagctctagaaattaaatcaatactgataagatttctaagggcaaacctagacctttttgcatggtcacatgaagatatggtcggaatggacccctccgtgatgacccatccactcaacatcgatccaagcatttggcctgttcaacaaaaaaggtggttgtaagatagggagtgcactcaagcactcaaggtcgagagcctatgagccaacgacttcataatagaggcattatatccaatatgggtaatccaacccagtattggtgcctaaacccaacaagaagtggacagtatgcatcgactttaccaacttgaacaaagcatgtctaaaagactgcttcccatttcccagaattgccaactagtagatgccaca

SEQ ID NO: 223281 - DNA, 1853 bp, Cannabis indica
aacaaacctaaatctaatttcttttcttgagttcaaaagaaaaaaaaaattgcttcgtctacctcggcaccgacggacgagagggagagccttcatcgcgacctctctttctttctcgactcctctctctctgttttttctgcgcagagccagagagcaactccgtcagtctatggccctcgagttctctccattccctctctcctctctttctcgacctctctctgctcagagccagacggagcgactccgaatttcaccaccttgaaaacccctagatctatatctttgcctctctttctctctcccttgggatccttctctttgtttctctctgtgcgaactgacatagatttggctaaggtcttggcggagatttgggcatcgacgggagtcatgggttctatcgtaagatattttgaatctgaagaaatataaataattttaggaaaatttaaagttttattttataattttgagatatgagtgcagttgattttgttttattttatattagatgtatatttttaccagattttatttctcaccattaagattctttttatgaattttggtatataaatctgaattttattagtgtactgagtaatgaaattttggattctggtttggtgtttgttcctggggtgtgcgactggagattgtttcctggggtccgtttggtttcggggttgtcattgtgtttggtgtgcgatcagccgagcaagataacgctcgagtatatttatcataaatatattgttcctagggtcattggtttgtcttactggtttgtttttatggtaaatatattcattgtttgtttttggggttgtcattaattataaaggagtgatatgtttttcttattacgggtttgttattggtttgttggtgtgggataagtgctgggccgtggtagtaaaaaaaaaattatgtttgatttaatttaatttttatatattttatttttaatatttttaatttcaaataatttttaatcaatttcaaaaaaaaaaattaaataatttggaccagtcaaaccgtgacacctggacagtgacatggcacttaacagcatgtacctacagaacttctaaaagtgtgacagaaggtatttttaccgccaaaattttaacttaggtattaaactgcaactagaagataaacttgggtatttatgctgcaaattactctattaataatgatataataattatcatatatttttagcatttttcataatttcagagcaccatatatgaattatattgaaattaaaaattatagagtaatttgaggtatagatatttaagtttaactcccggttgtaaataaatatttaaatttaatttgtagcggtaataatacttaagttataattttaaaattttgtactcataagtaaattgctacgtgacaatctctcattagtttacaccattaaatttttattttttttttaaaaaaataaatttaaatataccaatagtacttataaagttacaaaaatataacttaaaaatttaaacttaaatatttatttacattaaaaattaaacttaaatattcatgtattaaattactcaaaattataattattttgtattttacatgtcttttttgagaaaaatttgagtaaattgaagtcaagggacgttttcgtaattgaagacttattgaaaaaaggagtgttctattttcactccataatcttataaatacatttcattattaaaaaaaatataaacttaaataatttaaaatataatttaattttatttgataggtatattttttaagaatatgaattggaagaaaattctgttcaaaaaaaaaattggaagaaaaaa

SEQ ID NO: 223282 - DNA, 1254 bp, Cannabis indica
tagtcggtgtttggatttgggacccagccatggacccgaacctttatacggacccaaagccacactcggaccacaacccagtcccaaagccaaaagtggacccgaactcgtaccctgtgacccaaaattggaaccaaaatcggaagttgaccgggactagaactcggacttggacatggaatcataactgaaattggagctagatccataatcgtaacaggaccaggaaccggaccccaaatcagaccaagacacgaatagggagccggactcggatcccaacctaaacatagactctggacctgaacccgaacatgaactcagacccaaacatggaacgagactagggacacagaaccagggtcgggacctagaaccgcacccaagtcttgatgccgaacccaaactcagaaattggacctgggacctgaaccagaaccagaccgatacccgtgacagtgatccagatctttaatcgagattcgggtagcggggcctggaacagatcagttctcggtgtctagatttgggactcagactaggactagaacccagacgaagaaccacacccgaacccagacctagacctgggtcccaaaattagagcctgaacaagaatcgccgaaccaagaccctagaacaaggctaggagcgtgaccaggacccggacccaaacatagaaccgaacacaggcctagcctaagacccaaactgagactggacctcgggcccgaacacggtcgtgtacctagagcggaacggatcgaaatgttgattctagatctggaccgagacactgacccagacccaaacttgacccgcactcgagaaccccaattttgacctggacccgaacgtagacctagataggggtccaaacctggacacaaacccggacaaaaactcagacctgaactcaaacccacacctagaatcagacccaaaggtagacccgaacctggacccaaactcgaacaaagaccaggattagaaccaaggacttagactcagaacttaatccaaacttagatcaggattagaacattggactcggacccaacctagaccaagacccaagacgtgaacacacacacggagcctgatttggacctagacttaaatccggaccggaacccaaactcagaccaggactcgaactccgacccgaactcaaacctaaattctatctcagaatcgcaaatggccctagaaccgaacaaggactaggaccaggacaaggacctaaactgaaac

SEQ ID NO: 223283 - DNA, 1460 bp, Cannabis indica
ataaaataaacaaattaagaacttacacatgataaccaattacttgaaacaatataaaactttttctctaacataaagtttcaaaatttaacataaagaaaccagtgacaaaaatcaaccaaataaaaaccaattacttgaaaaactaaatcaaaagctgaaatttagaatccaattacgtaaaacaacatagctaataattaaccacaaaaactagtttactattataattaactaagaaaataaacaaatacataaaatagctaaaacaatcaaaagattgattggaacacaaaaaataattacaacaaaataattgagcaaaaatctaatataacgaaaccggttataaaaaaacaaataaattaaaaattaattgacaaaaataaataaaataaaaatgtaaactttgaacccaaaacaacaaaaccaaccattagataccgaaaccaaaaccagttaacaaacagtatttctaacaccctttaaatattaacttatcaaatgaaagttctcaataattaggaaaaataaaaaatttacataacagaacctaagtctaaatttactagtaactaacaagaaagaaaagagtctaaacttattaagagagagctaaaatccacacattataattcaatacaaaagaatctcatcttcatgttcatcactcgttcatatccttatcaagctttggcttgaaatgtaaaaattaaaaccataataacaaagctacaactttttttccttccctttctgcttcaattaaaagaaattttaatgctaaaactatcataacataaaaatagaatgtctttaattttagaagaatacatcaagacaaacaaaaattcaaagcagtataaaaagactttgaaatatgctcataatgatcaaaagaactgtaactaaagtaaaaaagaattgtaaatgataaactattcttggaaatcaaagaaatgaaaaagcgtactaaaattaaaaatgaaaacaaattacatagaaagcaaaatcaaaatacatttcaatgaaaaaaattctaatcaatatagagagacgattggcacaaacgataatcgaacaaaaaaacaactacgagattcaaatcaataacggttcgcatcaacaattacagttaaacccaccaccacctttcccatcgaatcccctctcaaacttcactgcctgtgattaatcacatcatcgaatggcgtcgttgtgaccctccaatcaatcttgtcaaacgctatcgtttcaccatagatgatgctcatcgtcttaacctttctctggttctcgttcaaaggttagagggattgtattagcgatacaatacctcttctaaccaaaaaaaaaaaaaaatagaaatatgggctttctgtttttcttttgcaaatatatgaaaatggcattcccataaaaaagttcaaaaagcaaaaaatgccataaaatgtggccta

SEQ ID NO: 223284 - DNA, 1262 bp, Cannabis indica
aagcgagcatcctcacgtagccacactttccttgaatcgtcgtttttttttggggaggatcatcagtcaagtgattatctttgtcaatactacttagataaagccgaattgtcttactccattcttaataattcgaaccaatcaatttatggtccgtgattttagacatcacgggaaccacatcaaaacaactagtggttttggatctgatttcgtctctttcataatttcagaaacaaatatcgaaagagacaaggttgaatcgaataatgaaaaataagtaaagaatacccatatacgcagtagagagaaataccaaactataacttgagacagatgtgagtaggcttaaggggggctgaaaaacgaatcggaggcaaatcgctgtcgaaacctctgtcacatgtgcctccacacgccgatgcagtggggtaggtggacaaaagaaacgagcggcgcgtaagccacacgtcacacgtgggaggaatccaatgaccggactttggggtttggcagatcggctgctagcaatccttttgagtgggtggtaacaaaagacccctctaaatatggtttccgaaaaagaaccctaattgaaaaacccaaattcgtgataaaccctaattttgaattttgaattttgaattttggactcccaatcctacaatcagctctgataccatgtaaaatatggtgattgaattgtgcattatattccatagaatagtatatatttatatttaaagttagaagactaaataagaaactactaaatgcaatttatcttaatttttacaaatatacaggtaatattccaacaagttgttttattgaactgtttattttgtcatttacattttcaattcataacaaatgaggtacatcaagttttttttttttttcatgtcagcatctttagatttttatgaaatgggagcccttatgtttatcgtgggttgctatttgtgagttcattaattaactttgcatagcatcagtatactggaaggggttataagaggcattttatgctcttcttgtgtatattcgtgtgtatttgctatgattctttagtttgagaattagaaaataaatgtctcaggtgaacaagattgtacggggtcagtttgatttattccagtcaatgtacaagccatttcttgaagaatacgaggctaaagagattcttagatcctcttatttttcggataacaaatcaaacatatctcaggttggtttttgatcttaaagtcatcacggtc

SEQ ID NO: 223285 - DNA, 1050 bp, Cannabis indica
ttgtaagaaatgtaagatatgctaatgtgaggtaaagtcaaatgtcactaaatagttcactttatgacatttgaaaatgccactaaaataataattaataacatttcaaatgtcactaataaatttttatatatttactcattatatttaaaatgattttagtgacattttaaaaatgttactaaattatattactttatttgtaaaaatgtcattaaattattatttatataatttaaaaaaattaccaattttgttgatataatagctataaagatattaataatatattttactatttaaaatgtcgttttatgtttaaatattaaaattagttttggtatgaatacatatacaaacataactacatcagagcaaaaatatttagaacttgcaaattttataatttcattattcaaatttttttataattacatagaaatatctttgtataacataaaaaggtaatttctattattgaaacaataatagaatggtatctatacatacaaatatctcttttgtagtgaaattaataataaaaaaaaaagtaattctcgtacttcaacattttgcaacttgcaagaggaggagactagtatgaattatcctgcaatattgctgcaatattgctcttaatggctttgagagtgcacaaagaacattgaggttagcttgctgaacttcacctcaatatttggtcccttagaaagatcacatatcttttgtgagtgacattgcaaataaataaataaaaagtagaaccataccattgcaaattatatataattcatgcatgagaaaaacaaaaaagaatattagtatttattttgaaattggaatgaaagaaaaggaccagcacaaagaatcaccaaataatgcttcattttttttcttagataaagaatggcatgtataaattatgagtgatatcagtccctattatatagcatcataaaaaccatagttagtatattcatttcctcaaccaccatatgatatattatggattatacatacataatcattaactaatttccactgtatgta

SEQ ID NO: 223286 - DNA, 1835 bp, Cannabis indica
atcactatagtaataggatctgaagtggctctcttaagattacaatgtgataaccagagtcggcagatttcaagtgagaatagagcattgggtgtgttagatagagagatgagcattgggtgtgtgagatagagagatgagttatcatatttagagcttaagatttagggtttaagacttaggattttagggtttgactaatgctctttatataggagagcttacatctctaatatctcctaaaattaagttaataaagttattatttatataataattaatgggaagttatatttacacccctaaaactataactacaccccaaatatttaattacatatttaacctattgtgaaatcactaaaaaaatatctttaatttttttcttttagttattattttatttcttaataagtgcaccccacccacaattcttaaaaaacggtttgttatcctttcaataaaaataaattattgcaacttaatttgagtgagcagtgtgcccttaaaaagctctatggcagttagtctgttattttttctttttaactgtttcttcctcctaactcctctatttcttattcatcttttgtcataactcccattttcaaaccttaatcgttccctccatcatgatacgaaccatcaacctccaactttcccacttgtaattctacttctgatccgttctctgcctatggatcatctactcaacgatatgaaccacacactcatcttaactgattctgaaagagaggttcaaactctccctactgccgcccatactagaagccctcaacaattgaatcatgtcctctatgctagagttatctcttctcgtgacattaatcattacagaccaacattctagtctctttttaatcacttttggttgccttggtgatctaaagaaagtcctattgttggaaccatggcatttccaaaatcatttaattgtcttaactccacctactgctttccaatctgctacaccggaggcaatgtgcttaactcctttttggattcaactacaccggctgccttttctaagcaaatcgaaggctatggcagaatgggcaagcaattcgattggtatctatattaatgtccatgaagattcattaaatgaagtttggggttttgcgatttcgtgctactcttgatatttctaagcctttcctcatggggaaaatggtaaaacttaaggactcagatgatgaattttggttggaatttcggtatgagcgcctccctgaatttttcttcaaatgcggaaccattggccatccttttgaatcttatcacaagttcttggaacaaatctacaatggtgttgaaccctccttggcttatggcccttctatgatcggttctcctcttcttgaattgagctatgactgctatagaactgacttcatcaaaggaggagtatggccattaatgacatgactgtcaaagaaatcgttcactgcagccattcttaatctctccacaagatcacttcctctgccaccaaatttaactgatatagaaagtccttcaatagcaaagcatcagacttctcatcttgctgttactactgacattctacatccccacataccaacaaactccattcgtgttccgcccacttccaccaatgaaacagtcattattcccttcccttcttatcttccaacccccaatgatttctacatatccaccagcaacctcatccgatcaaagaaccaacccttttcaagttctttctacgaccattaccatcgttctcttccacatataatacttattgtctccactaaacattccctccatccaagcgattatgccaaaaa

SEQ ID NO: 223287 - DNA, 2403 bp, Cannabis indica
gtcttataatatctcttttgcaatatttccttgtcaagtttaacatccattaatgattgtgaaggaacttgctcaatttttttcctttggacaaggcactttggtgttgtagcaattcaccaattttttcaagcatcaaatcaagacaatatactgcacatccaatagatgctttcttttctccattaacaatgtgcctgccactttgtaggcactagcattatcattgaccacttaaacaactaaatgctctccaatgacatcatccaacattttaaataacctcggtgcatctttactaaatgaagaaccatcaatacttttaagaaatacagtgcccttgggattattgactaaaatattgattatgccccgatttccaatgtctgaccagccatcagacattattgaaactctcgttagtggccataactgcttaatatcatcaactacagcatctgtagtattcatctcctccttaaatatccatgtcctaagctcatacatactaagagttttcaattccctcccataatctccaattgagcgacatatattgataaaaggactcttacccaagtaaaaaggcaaaacattctcaaagaaacacctcccaatgttcatgcaacttttattacgcaattctttcgtatttttgtgagttacttggcttgttcagttgctgcccctccaccatcactacccataaacctatccattgggcctcttacacctctactaggcatgggggcataatccttctgagaatagtaagcaccctgcccaatcatctctttaaaattcatttgactcacatgctttgccaaagttttttgtttcaagtgcttcacaaattcaccatttacctctttgggaacttccagacatggtttaacatcttttctagtttgagcaaggtgttgtttcaatcttgtcataccacccttaataatttgcttgcaataattacactcaagataaacataagtcttcttttctttcagcatctcctcctgaaatatcaacctccctaccatgtttccaagctagatcttttctatttccatggttgtcattccctcctctactagtactaacattacctctctcattattaccactagttcctccaatacaattccttttcgatcttttaaccattctactatgtacacaacaaaatacatacttaaatttaagtatttaactagtaaatgtagataaaaaaaaaactaaataacatttacctaagagcagcaagaagggagcagcagagagaacttcaccaagcagctagaaagaagaaaaggaggaggaaggcagcaacagcagttttctctcttttgatgatgaaggaggaggtgtctcacgactgctaaccctaaagaaatatagttttgttctttttaatataaatggtgtaggtttagtttttagttggactcttttttagatatttgtttgagttttattgggtttttattgtgttttattggacctttttctcaagttaaatgttattgggctttcttttcagttgttgaatgaaaataggctaaaaaaaccctaaaatcctacttttttaggtgtgcgcttcactttttttttacgcctcagaccatttttcatagcctcacacgtctgaggtgtacgactctctcccaaatactgaggcgcacacaatagtgcatttttttccgcctcaaaatgaggcgcgcagtagaaacacaattttaaacattgatttggatgacctgaaggagaccttatgattttcataaggccttaagagtgaaaaacaagaacatccaactttaagttataatcaggtgtttgaagaaatagcttttcaaaaggtgaagcatagtttgaaatagtggagggaagcctgttaattaagtaagctgcaaaggtgaaggcttaccaccaaaatgtgggaaactttggcaagaagggtgagaccaacatcaattacctgtctatgtcttctttcaactcgaccttgttgttgatgggtgtgagggcacgaatttcttttgacaacccctagattttgaaacattttgtataagggtccaaattctttgccaagatcagtttaaaccaatgtttaaaattacgtttctattgcgcgcctcattttgaagcggaaaaaaaacgcactattgcgtgcgcctcagtatttgggagagaggcgtacgcctcagacgtgtgaggcagtggaaaatggtttgaggcgtaaaaaaaaagtgaggcgcacgcctaaaaaaacaagattttagggtttttttagcctattttcattcaacaacttaaaagaaaactaaataacaattaacttaagaaaagggctcaataaaacacaataaaacccaataaaactcaaacaaataactaaaaaaa

SEQ ID NO: 223288 - DNA, 2430 bp, Cannabis indica
taagtcctgttgggaagatagcaggactgttgagggcttgtgtcctacagcggtattattggagtcagattgtcttgtgttggttaatgctattaatagcaagagccatattctgtctcctcttggtcttattgtttcggattgtatttctcttctacgatccttttctagttttgatatttcagttcagtttgtaaaacgatctgggaaccaagcggctaaactggttagctacgttcttctggttcatgtcctgatcgtatttccagtagggggtctgtcccttctggtttggaagctattttgttagctgtatttgcttttaaatgaaaagttgcaatctttaggtttcaaaaaaaaatctatgttttagttgcaagaaacattttgttgtttgtgactaaaaatttgtcactaaaagcaacagttttttgtaatagtttttcacgtcagttataaaccgtcatttaaactggttttttctgtcaattataaaccatcatttaaagttctgaaattttatgacacttacatagttgatcggttttatgaatcgacgcaaatttttataagggtttaattaatctgtcgggaatgactaattttgtagtagtggacatgtaaaatcaagagcttggacactaaataatttgaattgtaacactcaagtaagggtatctttcttaatagttaacagttcaataagggacatgtattttgagaataacaattcttttgctctttatataaaattaattataaaatcatcactcattagttttgtgtttgtgtctaaattaaagcaactggtattgaatcaaacattattaaaaaatcttacttttagtcacaacaaaatttgtaactaaaagtaaaaaaattgtgactaattataaattattattctaatattctggctaaaaggtccgtggctaaatgtatattagtcacaaaaattacaatttattttgattaaatgtatttttagtcataatattagttgtgactaaatctaaattagtgacaacttgtgtctaaatgctatgttttagtcacaaataattttttgttgtaattaaaagtcacatttagtcacaaaaaatttatgttgtgatgactaaaaagttgtcactaaaaataatagttttttgtagtgttaaattaacaaacaagatataaaatgtccatgagtattattcaacatatatattgaatcaactatatgattaacaacaagtcttcgatcaaacattaaagtaaaaacaacccaagattgaaaatagggatgatacaaaaaaggtcctatcagttttacttaaattttaatttggaccatatctattttaagaaattatagaaagaaacatgtgtttataaaaatgataaaaaatagtctcctgtcacacaatctcagtcaaatctcatgatctgagcttaaattaaattttaagtaatttggaaagttaattgttaaaaatagtcaacagtctatttgaaagaaattttttaccaaaaatatatttagagaaccatttttttcaccattttaattattagagggtcctttttattattatttttttttaaaatagaagcttcaaaatcaaatttaacaataatactggaaacttttttatattattcatagaaaataataatacttttacaaaccatgaaaaagaaaagttgacataacagtataaatatatatatatatatatctcataattctatatcttaatttatcttccaatcatttctctggtcctatcccatcatctttgtcctccaatacaatatatctttttagacatgagcttttaggaaccaattaacataataagttcctaacagacttaactgcctactagtactaactagaaagtgactaatcttatattctaatagtaattacatagcaaaagtaacaataccctttacttttaatatattttataatgataaaaataaaattagctaggaagatagtttggtcaatacacttctgatttcataaaaaaatagtacctttacaactcatgttcttggggatatattccagtagtagtccgtatctaaaagttgaggaatactaataatttgatccacattctttccttttaatctcaaggcatcacttatatcatctttagctttctccaagctctcacacatatgtatttcaaatgtgtcacgtgtgtttttgcatttgtccaattcagcttccaactcttttatccttgttaaaaattaatcctccacttacactgatatgaagtccaagtacaacatgaacacaaaggacagaaaaggaaatacatgcaaatccctaagttgaccttcggtctctaataaacctaacagaaagtagttagagtggatttggctaaatacacttctaactacactctgtactaactaactaataca

SEQ ID NO: 223289 - DNA, 1158 bp, Cannabis indica
attcttcacagaagggtagttttgagtccaattttcccttgagtagcccttgtttgtcaagttctcagattaccctttcactcacatggcctaatttgagatgccacatttttgtgtcatcattttgacctgtaacagcaggtgcagcacttccaatgatagtcttcccaataagggagtataggccatgttttaattcatctttcatcactgtcatggatcccttggatatcttcaatatcccatcttgcaccttgattgtgcatccaaggttgtcaagcataccaatggatatcaagtttcttttgaggtcaggaacatacctcacttcttgtagagtccttgttgtgccatcaaacatctttatcatgacaggaccagtgctaagaacattacaagccttgttgttgtctagcaacactgttcctcctgagatttccttgagttcttggaacatctccttcttaggacacatgtggaaggagcatcctaaatccaggatccattcatcattgattccttcctttgacactaccaaagcccctgcagattcatagccataactacatcagcttctcctctattcttgcctttctctctgtcagtcttggctttcagtgccctgcattcatccctaaagtgcccttccttgttacaatagtaacacttctttccagtcttgaattttgacttggagtttggcctgtatccacctctgttcttatcttttgactctcttctttctgatcttcctttggagaacaacccttcaccattagattcaattctgtcctctgatttcttttgaatctcttttgaattcagagcagactttacctctgacatggttagagtatcttttccatacaatatagtgtcaacaaaatgctcaaaagatttaggtagagagcttaaaagaatgataccttgatcttcttcatcgattttgacaccaatgttgttcaactcgagtatgatcttgttgaattcatcaaggtgtttccttagctcctttgattcatccatcttgatagtatacaatttctttttcaggtacagtttgttggccaaagatttcttcaagtagatctttgccaatttgtcccagagaccaatggctgtctcttcatcagacacttctcgaagaacctcatctcc

SEQ ID NO: 223290 - DNA, 2352 bp, Cannabis indica
aaagggttttatttagggcacaaaacccaacactaccacctctgcccgacccagttccgagcagctggaggcaaataatgatgctttgtctaaggaggtcaatgagcttaaagatgagagggagagtctccgcactcttctcacaaagttagagggggacttccggattaagcatactagagatgaagagctcgtgaaggaggtggaaagcctggaaacagctgccctcgaggttttttatgaattttggaagggtaatccagaggaaattttaattaccttggtgaatccaagtggatatatcttgattactgtgtgagtcaggcggccaaaggaaacctcgaggcaaccacttctatagttccagccgaccagagcaacgaaacccctgttgctcagaatgttgaacctccgacccccatagaccaggcccctatagaccagaccgatccatacagagagcccgagacccctactgtttaaacacttttccttatcttttcttttttctttttgtatctgttcgacccatggaccttttttagagacaaagatgaccggctaagcagtttttaaacttgggttatgttttctcatttttagataactggctaaccgggcagcttttaatctcaggtttatcgtgatttgctatctttttttattgaatattgtcccttgttttgataatcatctgtgcaactgtgttttttttagcttattatttttaccaatgctttgtacgggtataggtgtcccccaagtgatcgagcagacttttgactcttggtcacttgtattttacaagtatgatttttatatcttcagttctttggattcgagaagacctttgtacacatttaatagtaaatttataacttcctaatagaattgacacaatcagaatttaaatagacatctttattcattcattgatcataatgtttttgttgccgtagtaacttacataaaagctattatattgatctaattcgatctttagctaaatttaaacaaaacaaattgcacttgaaagaaattttactttcaaaggtggtcatccgacttgagtacttagtcatttcatccgaacctttaggcaggatccgcctagaaggccatttactaagagtaaatgttctttatttttgtacttaaagtggtcatccgacctagtacttttactgatagtacttttttaaatgttccccattctaataccttggtactagaacaagtttcatattttcatcataccacccaagtttgtatgctcctaattttagaactttgagcacctgatatggtccttcccagtttggttggagcacaccagctgtgctatcctttgtgttcaaaaatactcttctgaggaccatatctcccacaaaaaattatgtgcccttacttgcttgttgaagtacggagccaccttttgttgatgggctactaactttaggtttgttgaagctcgtttttcttcaatttcgtcaagtgattctgctaggagggcatgattagcctcttgatcatagttcactcttctgtgggacggaggttctaattctacaggaaacatagctcatagccataagccatagcgaatggagtctgtccagttgatgtttttttcaattataccatatgaccatagtacttctggtagttccttcggctcattccccttggcttctacaagtcattttttcaaagtatctttaagtgtcttattaactgctttgacttgatcatttgcttaaggatgtaccactgcagagaaactttttacgattccatggttcgtacagaaatcaatgaataatttgttgtcaaactgcgtgccattatccgagactattttgtacgggagtccaaaccgacataatatatttttcaccacgaagtctagtactttcttcgatgtaattattgctaatggctcagcttctgtccacttagtgaaataatccactgcaactactgcatattgtactccccctctacctttaggcaattgtccaattaggtcaattacccaaatagcaaaaggccaaggactctacatctgagttagctcattggacggtgcacagggtatctttgaaaatctttggcatttatcacatttcttaacataggcctttgaatctttaatcatggtcggccaaaaatatccttgcctaagtatttctttaataggcttcgcccggctacatggttgccacagaatccatcatgcacattagacaaaagacgtgcagcttcttctggtgtaacacatctaagtagtggcatggagaatccccttctatacatgactccttctacaatgatataccgtgcaaccttcct

SEQ ID NO: 223291 - DNA, 2261 bp, Cannabis indica
atcccaagtatccaacatggcaataaatcccagtgcctgaggaagaagaagatgtgactatgttgctcaaaaccattatgaaaacaatctaactacttgggaggccgccaagaccacagaaggggctccccgaggtaaaacttcttacttttattgatggtctcctaccgtccttaggacagagccaatgagtttagtaaagtttagggataatcaatataacttttatatttggaactgcattgacttaatagccaataggtttgatagttagtaacttggtaccctgagttccatgtctaaaccttgtgtaatagtttattttatgggattgcttatcaatacgggtcaaatgaatagcgagctaatgagtgggagttatctcccttatatatttttaacctttatgatatcactaagtctatggaacctagtgaccctcctattatcaagtctcctcgcactaacttttctctactttgatcaacttctactatttatgactatagtttaagttgaatttcactctcataaataaagaatgtttatgtattctttccctatttttaaccaacaccttcttttattccacagacatagacttcgacttggagaatctccttagcaaccccgctatccctgttaaacgaggtaaaaagcaaagttcttctcaagttgagaccatcgagaagcagctgtaggctctgcgaaagaaaaaagaaactacttagaaaaataatcctcctgtctcaagcattgttttggagaaaaataatagttcggcccctaaagtttcccactcggcccccgaggttacaaacaaagaaaatcaaatcttggggtcagttcatctggtcattttctatgcggcaaaccttgtagtggttttgatagacccaatatgcccctagcctgtgaaagctagtatcgaaggatcctaatcctgttctccgcacatagcccaggcgtgtcgccactttttagagttttagccagtcgactgcaacttaattaaggctggcacaccttctgaccttctggcaagaagtgcagaacttttgacctgctggcacaccttgaagcaaccgagggagaagaagatgaagtcccctctaggtctcccaccatgtagatttagtttaattattttaatttttgaacaatggccttttggctgagacaatatcttatcttttgtggcattcttatttatgtaattaagtttatcttgctttgttggacgaccaagttgacttttaatcacatttataatttatgttactttattacatatatttccttcactttttgtgagaaaatttatccaagtttgaattatcacaaattaattaagaaccattgtctataggtatacttaatctaataattacataacattttgtttaaattctatctcgagattcattactcgttaatccatcaagtaaagagtaaacttaaatattttaaacaaacaatttctcgattattttttaatatttttgatcaattacgtgcgagtatttagtcgtctattcgtacttttagcttatatattatttattaaaactttattgtggagttttgtttataataactactaggtatgcaagtcgttattcactcaggtcgcattagcttgatgttgtttgcaagattttaagtaatctagttttttcaacataggttattttcattcttgcttacaataagacttcaatgttcgattttcgttgttccgaaccaactttaatcgaatatgttgtcttttgcaaacattttatttttttagtatttccaactcttattttcctagacacctatattactatagttatcaaaacatctaattattatataattatatagccctaagaatttttttttaaaaaattatgattacttgagacaaataaaaataaaattccattaatatataaatttaagatttacatactctgaataaatcgacagttataaacatacaatcattggtaacatggtctcaaatatttgttgttccaagtattttttaccagtaactcattcagccatgctagtttataaacccttgatgctataacaacttcaattacgtatggaccttccctattcgggttaattaatctcactgtaggatctcttgtatttgctaatactcatcttaataccaaatctccaacgttgaagagccttgacgttactcttttattgaactgtcttgtgatccttggttgatatgcaacatttctcacttgaga

SEQ ID NO: 223292 - DNA, 1297 bp, Cannabis indica
ttttttaaaaaatattaaaatatactgatgattatttagtaaagtacaaataaaactatcttaacattattataccgataccgattggtatgggcaaacaacacattttgtctagtgaatagtgaaagggtgttttagtacattcgcaagtttgctttttcagtataacaagcatctaagtggaccccatcctaaaccctcattgtgggtttttaaagtatgcttttcgtgcatgcaattcgattctttcccggtaattatttttgctcattggacatggaatgctatttttgccgaaacaagtagagagagagtgtaagacacgttctcatttgattggacaaatatatatattatgaatagagtagcgtgtatttgacattaaatgtaaagaacagcaattgcgcctttcccgtcaatgcttggagggtaacaacggccccatataattaaagagggttggaataagggtaattagaagcggccaacaatgcccattgaaaaaaaaaaaaaaaaattgatatttgatactaggcaaggcacagacaatattactggaaaattttaaaaatttacataatatactaatttttactatatttgtaccgaaatactatcatgcagaattttttatttttttacttgaatttttttataagtttcatactatagtatactgtgttaagttttactggtgttttattggtgttttttagttgttctactgttattttgagttattctgctttgtattttactggtgttttataaaacacagtatttttgaaaaaatttctgtgtgatagtatttttgtaaaaattcactcaaattctaatatttttgtaagtttccttaaaataatgtgtttgtaatttttttttattatagttattaaattagtaaataatctgcatagttatatattgttattgtgagttattataaagaaattttttacactaaaaatacaaaatgcatactttattactaaaataccactatacggttaagcctacatttatactctttaactttattttattacaattttaccacttgccacacatttcatatatcactacacgtcagtggtctatgaactctatcaatcaaccatccatcatttccctatttttttctcttctttttcttattatattcaatttcttttcagtttttatttttaaaaaacaaaacctccatagctaaactcgtgtccctccataatcccaaccctttttccctcttctttcttttcttccattttttttcaactcacattaaccgatttccata

SEQ ID NO: 223293 - DNA, 3182 bp, Cannabis indica
aaaattatatataaaaatatatttaatttatattatttaacagaaaataaatttatgaaaaataaaaaaaaatgaaaaaaaaaagaatctgagtgtttaaatttttaaagaaaaattagaattttttattttttaattaataatttaatatatatataaactgtaaaaaaaaatatatacaatatatttaaattgtgggttggtgggttcaacccgaattccagtactcctaaaaactcaactcgcgaatccgacccgcccgaacatttttttaaaaaaaaaattgcggttcaccggttcgggttcaggcgggttgctcgggttcgggtcgaacccgctcgaaatgttcagtcctatagtaaaccataaaattttatctcaggtgataatttataatatatttaaggaaaaaactattttagttatgtaaattgaaacacacacaaaaaaaaaattaagttgttgtcatcatcgtatcttattttgcaatcgtgactatattcaaagttattttaatcatcatatctcacttgtagtgctattgtattcaaatcttttattatcatcatatctcacttataattcttcaaacttgttgttatcgtatctcacttgtaatagacactacattcaaaattgttgtcatcaccggtattgaagatattgactaagcattatcaaaattaatatgcaaaaaatgataaaattattttaactaatttttttactatatataaatattataataaataagacttttttacccccaaactataattattgtatatttatctactatcaagtaaaaaaaatatataaaactcattataattatttaatagaaaaatatatttacttactcaaaattaagaaatcgtttcttttttttgtcgttccattaaagaccatcttttctattatatagattggttctatcaagaaaatcactcaagaataaaaatattaaatacaaaagtatggaaaaaaaaataaaattgattaaaaaaaataatagaataacacatatatatacacgcgtactcatcaagtaatatataatatacaacttgagttacatataatttaaataaaattgattaagaaaataataatgtagcatacatatatatatataatatatacacacatacgatcaagatcaagtaataatatacatcttgagttgcatacaatttttccatttgaatatttttgaaatacctataaaagtaagtgacagtgattatctaaatagattgaaaaagagatgaaggtatatttgaatgtatgaattaataggtttgaagtcttgcacacatccacctaaaaaaagagaaagagtagacataaagatagagagtttagaagttaatgaataaaaaaataagcctaaaccattattaaaaagtaaacaaaaaattaacaataaagatattaacaattaattgtcagaaatttatgaagattcatgaatgtaggtatatatatagttgttatccgcattttcacaagcatgacatgtggatattaattaaagaaggtcgaggagtcattaagtcgcccaagtgcctcacttagcaccccgggaggataaagacactaacctcgcggataaggcctccgtgaaagaagtctccccaagtgttggccatgcgaaaagtatccgtgagctaatgtctcattccactccgaaatacgaggccatttgctcccgtgaagagtagggatcttctccaaccaggatgcaccgtctggggtacgcccttgccttgcggaagctcagcccacacgtgtcagggtatagacccaacgaccaggcttcttcgtgtacgatgtcaaaggttgtctcccacgccacgctaccgtgcagagcatgcatgtccttgtgtactgagctaaattatccaacggctaggaatgaggaaaattcaattgagaatggccctgaggtgacacgcgtctaaagcccaaccaatactatctgacatccataaaagccacatgggaaatatgccacctaccaatctaacggtgagaattcatcccaacgaagatccatcaaagataacccatgcaatagaattggcctataaataccctagaagaagcacaaagaaggagcctttttttggatcctttttccgaaccttcaccttgaagttgaagacttactcttcatcaagaaaacacattactgtaatcctgctataaactccagaatattcctactaagtttcctcttcctcaagaggaacacggtggaatggagtaaaagtctattgtatttgtatttgtgtaaatagtcaccggccaaagagcctaataaaatggactcgtggactaaagataattaacgcctaaaccacataaaaatctcgtgtttattactatataatttacacctttgttactttttttaagctctaaaatattcagtttccgaaaaactcggtaaatatttttgtactttcattgatagctaaagaaagagatatgcacggtagttaccgacgcaagactattaagaagagagtccatgcgagaaaagaaggaagacctcctgatcacctgccgaggtccgacaaaagaccaaaaatttgcagatccgtggtgttgcccaaaaaaagacttgatgcctccgtacgcccgagaaaggtggaaaaagcaaacgcatgtggtcttaaaacacctattgcaccaatatctatccttggaagctcagatctggctagccaactctctgagggcaagaccgaccgccgatatccttaggctcagatcccccaccgtgtcactacgcgaaggcagaagagtgtaagaggcgttggggctagataaaggagctatgacttgatgcgattatgacgaccaactcaaaagaggtcatcagatgcaacaactctattcagctagagactcctgcgctggtgctggtacaaggccggaattgtcttccgacaactacttcccatgccatttcgccaggtggtgaagttgttcgaaaaaagatcatgcgatggcagccgttgatgctttctatcaacgcatatttttttttaacgataatgatcctattttcataatagatttaactcataaattataaaagattaaagaaaattagcaaaaacaatttaacaccaggttttttacgggttttgcaattaactctgcatagtcca

SEQ ID NO: 223294 - DNA, 2694 bp, Cannabis indica
ttcatcctctcaaagcgatcctttcttctttcgaagatttgcggacgaaattaccaggcattgccccaagccctaacttcaaactgtaagctgctttcttctttctcatgtttgttacattgtgtggattagttacttaatttgtttgtatcgttatcatctcatctggttttggtagtttcttagggtttaaactgttcataccagggttcaggcaatatgtaggttgttttaacatctccaactcattaccttctagtttgataaaattctctccaaggactaggactactttttgcttgcaataatgtcccactctggtttaggattttatcgtccataagtcttagagttggagttccctacagaatcagccatcctgtataaaaccaacccttcaaaacctacctccaaattagagttgaatgatgctaggattagggaacacgtagtaaaaacccagcaggaagatattggtagtcgctataggcatttcttgaaagaaatatccaaaggcaaacgccgattcttgcgagaagcagcctggctagaacctcccagcgtgtcctttattccaatagcaaagcctttgttttcactcaacgtcacaattgctttagaaccaggggacttggattttgaaattatgcctcccaagccacgtacatcaaaaattcctcaggatcctaatgtgacctttgaggctgagttgatagaatcgaaggtgcgatctatctcaggctacacggtcgaggtgctgaagacctgcgaaattgaacttgggcaatcatgccaagttagattagtgtgagaggttgagtttatctgctaccccctgtgcattttacaagtagtgttccggggatcgatggtaagactagtactagtggctcaactagtataggtgcgtggagcctcgagcacatcagtgtaggggccatccttccttttcgggactacttcaaagattatataaaccacattggagtttccccattctagcggactcccatctccttgaggattctcgctactttgaaagttctgtacaaaattttgaattgggagtgtctgacaccaatagaaattgagtatctctactcagttaaggccattccatcgagaaagaacgctgttgtgggctttatctatcttgatactcaccttagcgagcctaaaattattgtagacttccaaaataaagtgtctttcaaggacaacctcttctagacgtctagtctttcccccatcagcacaaccacgtttcgcaaactttgtaagtgattgctctcttcttacttgtttacatcagtcttcctttttcaacttttttttttactaatgttttgtttgttctcgcagctcttttgacgagaccaacacctacccccgagaggcttagtaggcataggtgcttgttaactcttccctacggttttcggtcatgcaacttccttttgagcgaagttaacttgcgatcggtgggacttctccctgataaagaatattcttgtgattagaagattcccaagtattcttcttcgcagtagataattgttccacccgaggaccaggcctgggatcgcttggcccaagcataataccttcaaagcactgcccctcgggaatctggtgaaagagcatcttgaggtaatcaatgttgctggtctcctactgtacttagggctgagcataatacattagttaccttccaagactactgtcttaatttttatacttggaattccattcttatggactgcattgctcagaagtttgacagttggcatcctagattcgacgtccagattaactatcatgagtcattttatggtatagccgagcaagacagtactatggaagatagggaaggtcatatagatgcgagctgggatttagagccaatcgagccttttgatatattgagaattacaggctgtagggattttagtgcatattattgtccttctaccccttcatctagtgatagctcgccttctaaagatttttgtaaatcccttaggtgtaaaattattctcctctccctttttaatcggcctttataatgattgtaatgccttgtcttgttttgcagacatgggttatgaagatatcattgaccagaaagggaagaaaagggcaaccaaccctagggcccctacagctgctgaagtagttctcccaaagaaataaaggaaacccactgcccataagaagaaatcactggccgagaccattgatcaagaggtctctgttggaattaattttaccaggatcttagatctactcacaagtatgttgattgaacaacttaaatatgaacttctaaaacgataaacaaaacacataaaagttaagaataacttatagtgatggcagcggaattaagtgtctccttccactgagatctctaacccttgattcctgtctgtagcagagtataatcaagatctgagcccgaatgtccttcagttggatgtgatccttcacagtcttccaaactatgattactgaatgatgtgtgtgggcacatctctctcacaaggattcgaaatttctctcttattttctctcttaatttcgtgtatagtgattgcatacaaagagcaatcaaaagcatgctaagagtagagagagggggcggctatatataggaaacgggaagagctcaaccttccaaataagcagtttact

SEQ ID NO: 223295 - DNA, 3175 bp, Cannabis indica
tacttcttctcgacttattgtcgagtaagccaatacgtcaacaggaattacatcgagtaattcagcttctctagtcgaggccaagcgggccaatgcgtctgcgtgtgagttatgagcacgcggtactcgggacacgactactttcttgaatttttgcaacagctcacatactatgacgagatacttaaccaagcgcccgcctctagccagatattctccattcacctggcatacaatgatttgggagtcgctgaaagcctgtaagtattctattctcatctcgagagcgagcttcaatcctgcgattaaagcctcatactcggcttcattattagatgcaaaaaattcaaaacgtaaagcagagtgtaccttaaaattgttgggactgattagtatgattccaccgctgtaacctttgctattagaagccccatcaacgtacaacgtccatcttctccatttggtacagcagtgtcgatcttggtttatgagtgccacttcagtactcgggcactcgagaatgaaatttgccaaggcttgccccttgatcgccgttctcgatttgtatctgatgttgaactagcttaactctaccgaccatttcaacaatcttctcgatgtctctagttttgctaagactttcctcaaagggtagtttgttaaaacttcaatgctatgggcctgaaaatacggtcacagatttctcgacgatattaccagggcgaacgctaatttttccatttgaggatagcgagtctcagcgtctaacaagtgtttactgacatagtacaccgggtactgtcatccgtgatcttcgcggatcaataccgaactaatcgcatattctgacaccgccaggtaaatggataagacttcaccggacatgggttttgataggattgggggctgccccaaatgcatttttaatgcttgaaaagcctcttcgcatttctcggtccattggaactttttattgccttttagaatctgaaaaaactccttgcatttatcagaggatcgcgatataaaatggtttagagcggcgacattacctgtgagactttggacttcttttggcttaaccggtgatcgcatttcgactaatgctttgatcttggcaggatttgcctctattcctcgctgattaaccatgaatccgaggaatttccctgaaccgactccgaagacgcactttagtggatttagccgcaatttatatcgtctcagtacctcaaacatcgcttgtaaatggttgacatggtcttttgcctgttgagattttacgagcatatcgtcaacatacacttccatggtatccccaagcaaatctgcgagcatcatatttaccaatctatgatacttcgcacctgcatttatcaaaccaaaaggcattactttataacaatacagacctcgatctgtaatgaacaaggtatgttcttgatctggttcatacatcgggatttgattatatcccgagtatgcgtccatgaagctgagaagttcatgacctgcagtggcatcaacaagttggtcaatgctaggaagtgggaagctgtctttgggacaagctttatttaaatctgtaaggtcaacgcatgtgcgccatgagccgttcggcttgggcacgagtacaggatttggtaaccaatcggggtagaacgactcctgtatgaagtcgcatgataggaggaggtcgacttcttcttttagcggttggtaccttgcggggtccattttgcggcgcttctgtcgaacacctcgcacttcgcggtcaatgttcaagcgatgacacataatctgtggagatattccgactatatctgaatgtttccaagcgaaaacatcaagattttttttgagaaatatcgttagtttttctcgcttctgaaaagtcaatttagagccaattttcaaaacttttactattatctacgggatcgataggtacctcaatagtgtcttccgcggcttgggcagttgcggcataatcgaggatcctaggatcctaatccggtctgtctttatgcggcatttcatctatcctaaggacctcttggaaaggaggtggtgcctctaacaaatagatgacattaaccgatttcttctctgcgagcttgactgctgcattgtagcattctcgtgagtttgactggactctgccgaatattggtcgattaccgcaaactcagccatcgacttggctactacaggggtggttcccaaggtaatcgggagcttgatcatccctttcaatgcaatgacgtcgccggtaaaactgcatatactcgacgtaacaggtcgcagatccttctcatgcaaccccatttgtttaaaggcttggaagttcaagagattcactgaacttctgttgtccacgagtatacggtggacgttatcttcgtcaatattggcaacaatgaacaatgcgtcagaatgagggtgatgggcccatctcgcatcactttccatgaacgtgatgtcatcgcattctcttttgaacaacttctctagtcgctcactgagattgttcacgttggtgagcggcttctccttggcttcctttgcatatcgctcctgcaactttctggagtcacctacgatatgaggcctgcctatgatggtcaatatattgcgaggcgttctcgagccattcacgttttgattttcgtctttgtcatccgcccggggatgactttccttgttccttttatatttggtgaacttccccctcctgatcagctcttcaattttgtcttgcaaaacccaacactccaaagtagtgtgagcaatatctttatgatacttacagaatttttttgggtccctcttgtcgcggtttcccctgatcgggggtggcttcttcaatagcgtagatatggtctcgtggtactgcgagcttagtataattcacgaagcgcagtccaccttttcttttcggcgaggattccttctttggaggggacttggccaatttcggacttcgatgtctctgtggactgcttcttcttgggcttcgacctctggaacttttccctcggggactgcgggatcgtgaccgcggcactggtgacttacgcttgtctttgcccttctccaattctgctagagaattctcaatccttttatgtggttctgccatggcaaagaactcgactagcgattctggtcttcg

SEQ ID NO: 223296 - DNA, 1670 bp, Cannabis indica
tcagacctcaataacttgaatccgacccactatctttaagtattatgtgccataaagacatggagtaacctaatccaaggttcaagagctaaaattacacacacatgcaacacagaagtcaacttggacacctagagctttcactcggtgcccatgttgacatcatcaactatggttacagtttctaggaccgtcttagtgtaaagtggccaaaacttgtattggaacatcaactatacataccatagacatgtttgaggtatcaaaatcaaattcagagcaagttaatttttgagcacccggggcctcggggtcccgagaacctagcgcccaagttaacaatttgtcaatttaagctccttccaagtgtccgatcgaagatccgactttcgcattgaatctatcttcataaaaaatttggaaatagatccttttggaggaaaagaataattcctaagcataaaaacagggtccatcccccaggttgacacctggggctggccctacgcccaagttgacaatttgccaacctgggcaacaaaaaatagagtttttcaagattttttttttagcatcatctccgtcttcaaacatattgagattcaactatttttggggaccaaaaaaaattttaaaaggcaaaaaaagggactcagagctcaggttgacacctagggctgggccttgcgccccggctgacattttgtcaaactaggctgtttccaattcagttcagcaaaaattgctttcaacatttttactgtcatcagataaaaaatattcaagtaaactcgaggagaaaaccacaaacccaagtccctggaaacagggcccatcgcccaagttgacaaggtactgaaccaggcacccaggttgacaatcaacctaggatgctatctttaattactcaaatgccaaatccaatgtgaccattgaatctgacatggtcaaaaataggaagagagaccccgtcctcaagttcagaagccttggaagtatcaaaaacagaatcctgaaagctgggtttaaagggcctagtgcctaggtcaacaaataacctggttcgttggtttctgcttatctgaatctaatgtcgttttgacttgttgggattttatgccctaaataaaatccatttcaatataatctgatttgttaccaatagaattttagaagtcatttatgtttacatgtatttttcatgtttatggtttaatgtatacaatttctgttaagtccaaaacatatagttattcacaattatagtgatgtcaacacagtggaaggtaattgtgattatatgcttcaaaagttaatgtcccttgattcatcagtgcactggatttacactgatgtgatagtgagcgatacagcttacttacacattggataagtgttatgttctttccagaacattggccaagtatgctagtatcggatgtatagagtatacattagattgagaccgataattatcttggtaaagatattataatcttaccgttgtatctttctaagtcaatatcactggttgatcttagatcaaaagatcttaatcctgacatggttaggtttgatttcaagagtgttatttgtgttctttgagttgttagttaaagcctaccatttggatcgggtcgaacgtacagtttgggaacatgatagtcaat

SEQ ID NO: 223297 - DNA, 2443 bp, Cannabis indica
gcaatggtaatactctcaaaccttggagacctgtgccataagcgatggcagtgctctccggccttggagacctgtgccataagcaatggcagtgctctccagccttggagacctgtgccatagagaacgacagtgctctccaaattggagacctgtgccatagtgaaatggcacaggtcgattaccacactaggaagagaaatttattgaccaagttatattttcaacatccatgtaccaaatacaagtgagagacatcacccatgacttctcacgagccatgggtgacagtgccattatccggccccaactaatagcaatggtcaccttttagggtctcagacgttgaaatgaggtttttgggtcacaagacctccaaagtatgacttgccatcaaaaaacaagtcaaaacacacctcaaggggtccgataacatgcatttctgacctctaccatttggtcatggcagtgctcgcaactggtacaagacaggataaactcacttcagtaaaatatgcataactctctcaatttttattgaaatgacctagtttaacttgcgttggaaagataatttcaaaatgaatcaaagtctctcttatagctatgactcaattctgaagtatcgggtccaaaattagcttacaaagaaagatagtgcattttactcgaaaattgggaaatgcggctaagcgaggtttggtggtgcacaccgtcacagcctatgtggcgttgtgcgcaagaattgacagtccaaagcgcgtgtgttcagcactccatttcaaattggtgcatcctcaaccgaaaataactaattgtccaatattggtgggatatatgcctagatacaaggagattattattgatatttatttatttgtaatattttatttataaaatggaattgtatatgagatttgttagtgaaatatctcgatatgtgagggaacgctaacaaaccctttagcctatatatacatcaagcagagactgagaaaggcttcttttttcttctatttggcttctttttgacttcttcttttggagaccttcccatcttttttggatcttcctcatcgtgactttcccattgaagttcacttgaagacaaccaagaacaccacattgattccttgaccttctttattaactccaccatactcaggcgacgacagacctcaaaacaccatttaatacacactttgttctacaaattattggtttattgttcccaagaactttacaacctttaatttagatcagatttatgaatatgaagtctcccatgagccttctattcataaatctcgattaagacttcacctagaaatcatttgttgtacttttatccacactcttgagaacataactctggtgtgtcggatccaatcaataaaactacaagtagacgtaggcccattaccatcgcgacatggagggtgaactactataaattcctggtgtccatttaatttattgcgattttattagtcaaattaattcactgtggtcctcttttattttacgatcttcttagattagttgacgaaaaactgcgtcaacatcatacaaactgaaaaagaaaattgaattgcaactgattcttctcggtactagtgcaagctctagaatttaaaggtactactgaaaactctcaacttggtatggcataggggtgcacatgggctaggtttggctgggctagaggtattttaatagactaacctaattattgcggtttagataagctataaaccattcaaattttttattatacacccaactctacttaagtacaataatatgggaggtgggttgggttgagctgaatattttaaactttaatatttatgctacaaacaggataaaattatttaacctagtgcatatacaaaaaaatgatacatatttgtgtgtgtaatatagtgctttaaaagtaactatagactacatgttaatgatgtgttttagtttattcactttctaagattatcacaatataatttatttatgtatgaaaacgtaaactatatatatttatatatattttgtgaacgtaaaatacattttatgtatgaaagttgtctcaaatttggaacagatttcaagaaatgagttggtttgagttatataaagttaaaatgtatccaaccataaccaacccataattatatgacctatcacttttcagcccaatgagccatgacctactcttaacataaccctttactataaaaataggttagggttgtactaggttgaatggttttaccctatatttttgttctacccctacgtatggcagactgtttcaaattgtttgccaccttgacttaataagtggtaagagggtccagttcaatcatgtgtctgatttgtcaaagaggtgagaaaattatttttctatgcggtcattttctgttcatttcgctactcaatgcta

SEQ ID NO: 223298 - DNA, 1739 bp, Cannabis indica
cccataaaccactcctaggcacttcaaagacattatcaaaatggagctggttcttgagatacatgccacggccagcctgaagctttgtttccataacaaagaacaaaatgggtcggtgttgcttgacaatcagggagaggttacggaatgctcgagggctccctaaaccttgagcatttcagctaagaagacttatttttctcgacggggtcgcgaagcaatacctgccgttttatcatcatcagacataaaagggaccaccacatcctcactcggcacagcccttgcccttttaagcaagcttcggactgaaccaccaatttgggtagtcagtcgagtaaaaggacgcttaggaagtggaaatgaggcacggttcattgattgtgagacttttgtttcgggtaggattgttgacagttgggggaggaggggaaggatcaggcatagcaatgcctttgcctttgttgatgtgtgttatggcagaagttaccatgatgggtggtggaatagttgattggctgaactggtgcacgttagatggttgggaaaaaggatgaaaagattgagtagggtggctggtggtgaaaacaggggtagaaagctctagttccatgtggagaaattgatcaattgcctgttgtaggccttaatcgttgttggtactgggagggatatactcttcaatgggggtggaatttgagatttcaaactattttttcttgaaatttgttttggtggaggctcgaaggtgctctttgtatcccaattcaggaggaattgggaagttatcaccgcgaaggagatatttcccacacttgttgtaagtgtgatccaggagtccacgaaaatagcagaaattttggagaccttcaaacttaaagctaatccatttagggcgatcaatggtgcgaaaacggatgttcataccccttctcaggggcttagtgacatccagaaggacctaaatacggagatatggaccaaaactttcaagaagggacaacagatgaatttcgataagatcaccaaattcatcagcgatgaactgagcttggctggataaaacaacatcaatcatataagaggtaaaataaattatttcttaaataacaaaattaaatataagaagttaaatttaatatgcattcatatgtaatacccagagaactcgtatctatatatatatatttatagtttaaatggtttgactagttgtagttggtaaatgaaaaggaaggtgagggagcgagacttaaatacaaaagggcaagaaaataatggccaccattggaaacattaaaactaaaacgatgggtagcattgtagcaatgtgaaatatttttttactcttttattcatatttagggttaattgatggctccctttaatttttatattttataacaattattaactccaatttaatattttggtagcaatatcattttgcatattatttttttattttacaaatttagtaagttatacattattaggagaagaatatttttagtgaaattttatttgtacctcaaaaatatacaaatatactctattttactatttttattttgcataaaatacatatacttttaatttatacttattttactaatgtacatattacttatgtaaaaaaaaaagtaatgtattatttgttatagagaatttttcttatttgtgtatcagtgaataatttttcaataaaattatgtcattataaaaataaaaaaaaataa

SEQ ID NO: 223299 - DNA, 1338 bp, Cannabis indica
ggaatggttgcaagaaatgactcgggcatcattattgacagcaaagctggctgtaatactgggacctttactcatgaaattgtagaaatcattagcatcaaggaagccttaagctggattaaaagtcataactggcacactgttgagttagagactgatagtctgctttctattcaggctattcgaagcagtattcctcttaattcggtttttggtgttcttgttcatgattgccaagttcttttatcttctattccttttttcacaattcattttgtaaaacgttcagcaaaccgtctagcacatgctgttgctaggttgtctcggtctttatctgaacgtagcttctgtgtgtctaacgctccagcatgtctgctggatattatgtattcagaatgctaaatttaatgaagttctcatttcatcaaaaaaaaaaaatataataaaaaaaaaaaagaaagctgagatgtaatcaaatatagtattgaactctgcgtaaccaccaagttggatctgtcaaggttagataagatacatatatgtttaggctaagtttgaagttgtgtcaacaaaagtgaacgaactttagagctgtttttagtttttaatttttaatttttaaaatttgtatttttataagcgagaatagaaaatagtttttggtcaatttaaaatttaatggtgtttagcaaaatttttaaaactatttttagatttttcttactataaaaatcaatattttaatatcataccatgacatgaacctatccgggtctgggttcgggtatggttatgggtctaagatgtgagcaaaaatataaaatataatatgttagacaaaaaaaaaaaatattttgaaaattaaaaacaacattttgatattttctgtttttggttttttaaaaattacattttaaaattttttgccaaacaacccttattagacttaagtaaagagtgatggtatattgagcaactcactcataaaataagatatattttaataagagtatttttaaataatagttttttaaaaatatattaatcaacttattttgggcaacctctcttttctctctcggttcccactacctttttggcacccggctaagttagcctaaaaaatatattattttataggggtatttatataaatatggaaaaaataaagttaatttagataaatataataaaggaaacttaatagaaaagaatatggtatttaaaataaaaattgaacatatataggattgaatgaccataaaaatattaaaattcccttcatatattttttttaaaataaaacaaatgaaactacagtgatcgccggagttgtca

SEQ ID NO: 223300 - DNA, 1445 bp, Cannabis indica
atcatttttattatttttacttatgctccctactttaatttgtatttaattattttaataattttataatttaatttttaaaaaataatagtatttttgttaaaataatattaataagttttaataaaaaaaaagtagagaactcactatatttatagaatttcatattcattctttattatagggaattactttttatatgactgtacttgttcaaacacattttttattttagctaaagagtgattagagatgatcagtatgttaataataagtattttctcacgaagtacgcgtaactacacaaatgagtatatatgatctctaaatattaattgaatttttaaattttaaattccaccaactcttttggctgtaattaaccttaacttgagtatttttttagtattaaattaagggtttgggggttactaagtggttagcaacgttgaaaattaaccaaaaatgctcaaaatgagttgttaggaaaatggctataggtagggtagtgtagacaatttgtgtgttatggtagtgccaaggtttttaggtattataaaaaaatgtcaaatccaaatcgacacatttattaatcatgccgaaaattaaaattaaaactcaaatccaacttatttacaaacagattgacttaacgtgacatgtttagctcatttatataaagaagagcattgttattagagcatcgatctctaatggtggtttgtattttttaaaaatgttaaaactcttcacatcatctaaacatattacaatttatttatcatatgtcaaatccaaattgacatatttattaaccttgtcaaaaattaaaattaaaatttaaatccaaattatttataaatggattgacttataatctgacctatttaacccattcatataaaaaaaaattattattattagacaatctccaatagtggtatgtactttttaaaagtgtcaaaactctttatatcatctaaacatattatattttactagaattatctcatatattatttttaattttttttttctaaatttatggtttggtttctaaagtagttttttcggtggtttctatattgattgatatacgatttttggttgcgatttacgttgctccgttagttgtaatagggtttctatgtaaaattccataaaaatagacaaaaaaaaaaaaaaaaaaaaaaacaagctttgaagtataaaaattaaaataaaaaaaaaaaaatacctatattttatttattattcttagcactcttacttttaaaagtacttcaatgataagtactcttaaaatttgctctcatgatctcacacggtcacaccttattatttaatatattattggtcttagttttatttaagaaaaaaaaaaggagtatgacatcaatgccaagttttggcctcaatgttaaattataatttgacacctaaat

SEQ ID NO: 223301 - DNA, 1141 bp, Cannabis indica
agtacaaataaaatagtcaaaaagatacaacacaacaagaacaaaaaggcattttacgatgcattaaaaaactttgtaatttaaaaataataataataacatatttatcaattataaataaattaaagtaataataaacttaaacataatattgaatattataattctataactacaattattaaaacaaatataaaactaaaactaaaactataactatattaatttatttgtaaaatgcaatttaaaaatttaagtatctagaagtaaatattcaatttctattaactctaataattttttgtaaaatattattaaaatttataaaaataattgaagttataaaaaacaaatataatttagtaagtagcttattaattataaaaaaaaagtgaaaaactttagcacaaatttgagtccggatataaaaacagactaacatatttaagaaaaacgagtcaatccaaataaaacactacaatagaaatatcaagtctatcctttaaaaatgttaacacgcacgatacgatccatattttaaaaaacacacacgaaaatatataagtcaaaccaacacgacacatacatgaatttacaacactatatgctcataatataaaatcacacacaataaacacacatctacatgataagtcagtctaaataaataaatccatattaaataaaaataattaattaaaattactaaaatgattgaaattactttatatttataaataaaactaattagaatttttacccatgaactatgacatgtacgaaattatacttttgaactttttaagtcgttaaaaattctcttaatttgaactattgagattgttggatttaagaatttttatctaatttcatttaattttgctaatgtggcgattgtccatatactaagttgtgtctccaaattttaatatttacaaaattatgtccaataaacttaacatatatcaaattatacccccagttgaacccagctttcatctttaccgtttgtcttaatcttgtcactaaagtgaatggaacttggcatgatcactcgaccttatccagtataattgcgaagatcaggctctccctctccaattttcctgaggcttctttgctgcacttaccacgtcaattt

SEQ ID NO: 223302 - DNA, 2573 bp, Cannabis indica
agggactaaattaccattttaccttttaatatactttatccttaaaatacttagctacttgtaaatgatattttggaaaactaatataattaccaagattagcccttaatcatttaaacaagttcagctaagctctaagaaaaccatcatttgacttctatgtacttgtaaaagctataaattctatatttatgattaatgctcccactcaattgaactactgagttcccaagatataagtattgggtcaatcctattggtaagctgtaacagacaagtcaaagaatccatatagtataattaagctagaacttaatcatctcaggattgagatcaattgacctaagatcaactatgtgacattaacttaaaaaagacataacaatgattttattattattttttttcactatcaatgtcggtccagaccgatgtatagccgatacatctaatactactttattttgataataccctagaaaggacattccacttatacaagtataagtaaaccacatcgccaattatcaagtcagtgtaaattcatgtactaataaattgtgggactaagttgtttgaagcatacagtcttgattatttttcactgtgtagataacactataatcatgaataactatatgttgaggatttaataaaatttatacattaaacaaataattatgaaagtaatcatgttaaccatgtaatataaaatgatttctaatattttattaattaataaatctaattatattaaaataagttttatttagggaataaaatcccaaaaaacttccacttacatcaatataaaactaaaaaatacatttcaattaatctcatcatcttaatgtccagatcaaatgtagtatgtagttctatcattgtaatagtatctgacaagttgtatccaatatcaacattctctaccattacatcttcttagtaacaaaatccttgatgttgtgaaatttctatctatatatttactcatcttagggtattgcattctttattatttgccaacgatatatgtgttatcaggaagtaatactaacagataatctatgactgaaataatgccaaaaattgtgtaaaaactttccataggctaaataattaatctagtagccttttgggtccactttaatattcagtctcacttgtagagttaaagacttcaaatagatttttacacttctccaaaaatcactgctccagccccagagtaatcactatcaaaaaatttagactttttttagcattaatgtaaatctagaaatccgagtcattgtaggtcctccttattcttaagatttatttgattgtctttcaatgttcctattctggattaaactggtacctactaataactcccactcaacaataggtgtctggtctaatgcataccaaagcatacatgagacctctcattgttggtgcttaaagaattttttcattgtcctttatcttttttggaatagttgaaattgttccttagataaataaactctatgtctagtagtcagaagactcctttagagttagccattagaaataatgctctagcatcttactaaaataagttgcttgcaccagagtaagtaaattaccagatataccataagccataagttatgataatctcaaaactatgatactaggatcgagaagttttattaagtacattgagtagacttattatcaaaatttcccttcttatccctgtaatagaaaaattttggtttctccatgtaaatgattttaaccatagctctcttggatttgattcttagttccatgttaggactatccattgcttgtttaaactaacaatgactttttatcacaagtgtcttccaagtcacaacatggtgggttcctagaagccctcccactatgacgaggtaccatgactttctatttagaacataagtggtattgacctcatcatttgtgtcaataaaactgatgtagtgggaccatcttatataaactaagatgatagagcacttcggaattgaatcagatagtatctcctctactttgctactttattttttgagtaagtcatgctcttagaaaagtagtatttattgaaacaaaaaatttcttatcataatgaccataggatggtccacccctaatcactttagaatggctatcaaatatgcaaacctttgttagatgttctagcttttcttaagaccatgtttagggcatccttgaatcaagtaatggtgtatactaagtatatgaccattccatcattctgaagttatcttgggatcagacttgttgaggtttgatctcttgatgttggattttactgtcagatttgagaaacagtaacttcccaactaacttaactgtttcgacagttaagttagttagttactaacagtataaatacaccttgaagtcctctcatttggtgtgatgttaagatacaaattcagagggttaagagaggattgagagtgttgttgagtgttgtaattggtttctcttgagattgtgagagatagccatttgagagacacttttgtaaggagcaagtctccactttgttt

SEQ ID NO: 223303 - DNA, 1786 bp, Cannabis indica
taatttttataaaaaaaacttactcttttactgagcttggtggtggcgacggtttgactccgggttctctctgtggttcgtggtcatgatagtggtggttgtggtggtcgtgggtcgtcctgggtcgtcctgggtcaacgtcgttctctgtggatcgtcgtgggtggttctcttcgtcgtgggtcgtcttcgtcgtcgtgggtcgcctgcgggaaatggagagagagagagatagagagggagaaacagatggtggttggatggagtgggtttaggcatttggggtgggtttctatcacatcggttgtgattcttggtgtggtagagagagagaacgacgaagagagaggaggaagagagagaaggggaagagagagagacagttagggagggaaaattaaaataaaagggtattttgggtagtttaggaaaataatggtattattttgtacaaactagtggaaggtattaattttgatattagggttttattatgagtaaatagtgaaattttccttttgaaaatgataccaatgcacatgtaattttttggtgttttttttttcacaaagtatatggaagcaaatgggtttctcgtttcttgcaagcccaaaagaggattttactttcaaatgagtattactgtatgtaggacaatatggtttgaaagaaataagaaaatttatagaagagttgcaagaacctcacatcaagttaggatatggatatcttcctattatgatgaaatatgtcgagaaaggaaaaaaactaagaaagaaagctcagttcagcacactagtgagcaaagtaatgcaaaggtagaagtctttagctataaactttatgtggatgcaatgatgtcaattcctcaaaatgtgattgaatttggagcaattattttctcattaaatgaacaaaataaaggcagtcttatcactattccaagataactcattctacatataataagtattatgttgttcttatgattctacctacaaattacaaatatatgaagtaaatatcaatttaaattgttccttaagtagtattaacattatgcttgcaatttgaacttattagaaatacaaaagaatataataatagcaagtgtggcttgataaaattatataatagtgaaggtaagaacaataattgatggcacatttcctcattaagataataagattagtcttcttatagtattagttacatttcaatttcttcaaagtattttgtttattttcttaggatgtctaaaactttaaggagacaagatttttataaatagagagtttgaaatagttttgtgaaatttaaataaattaattttaaataatttaaaagtaaatttttatctggatagactttaaagaaatttaaataatttatgatatatttaaaacaaatttatgattagctttagcttggtaggtagttaattttaaactattttattccattaaaatgttatcaataatgggtcatgtaaagagtcaaaccaaaaaggttttcttttggtaatcgactcttttacaatttttttataatgatttttagggttgaaaattaaaagtacttattggttttaaaatattttgttgcaagtttcttttagaagtagtgctactggtaggtttgtgttgggttcaagatgtgggacagggcgagacaatgtacatgaatgaattgggggttatgttataattttggataagatgaatgaggttccatctcagaaccaattgacaatgggaggagtagctcattcatcttatatatcaca

SEQ ID NO: 223304 - DNA, 1295 bp, Cannabis indica
ccaaaacctagttgaacactccaagtttttacaaataaaacactcttctcacaaagaaagatatgaaaatatgagactagaagagataaaaacgtttggttgctcttcttgatttgcagcatcagaattgggtttcgcagtagcagatcaggaccagaaagaaaaattttcaaattgaaccaagatcacgaatttggactttaaacctgccaaataaagataatttgatttgttctaataaagacaaaatcgaaatcatcaactagaaaaagggaaagtcaagtttcccaaaattagacaactttccataagagaatttcttctcttacaagaagtttccaaacaaagaaaagtctagctgaaaaatgatcctttcctaagatagaaaagagcaataaaatacataaaatcaatgtaataaaaataatttaaatgcccaataaaaattcacattaattcaaaaatattttgacaactaaattgccaaaaaaagacctaacaatgagtaataggctattgtaattgtagggcccaattaaggctatgaaaaaattctttagcctccatttcatttgatcagaaacatcctagcaccgactttgataaagcatcaactacatgtccttggtgattccttataatcgcgcttactcccaaaatttaagactctaaattgaccgtaacatttatgttcatttttagcccaaaagagtctggtggtccccataggatatcatatgatagctgcctagtaggagggacatctaatgtttctgagtttctagttgcggacgagttggtttgaacaagagatggcttgttacaatttgtagctcgtttgtatttgtcaaggaatgtacttgcaaattttgatgtatagatgtctttttgaactcccccatgtaaaaccttgtttctttcattccaagtggcctatataatgcatattatcaattcaaaattgatttggaatgtagagtggataaatagattaagtaatcactattatagttttgagcattgcgatagtcaatggtgaacttagtttgcttccaaactgacttagctctatggcaaatgaataaggcatgcccaattgagttcaagcatttgtgcacatggaacaagatgctgaattaatgactattctttgccttagagctgctgccactgaaagagcacttttcatcacccttcaagcaaaagttttgatttttgaaggcaagtttagattcaaaaagttttccaccagcccctgttggaaattattttaccagaatcttagatctactcac

SEQ ID NO: 223305 - DNA, 1261 bp, Cannabis indica
acctcaataaggctactgctcagcatagttgcaactgaagacctagagctagaacagctggatgtaaaaacagcttttcttcatggagatcttgaagaacagatctatataaagcaacctagaggctttgaggtcaagggaaaggaggaccatgtgtgcttactttaaagatcactctatggactcaagcaaagtccaaggcaatggtacaaaaggtttgatgactttgttctaaaatctggctttaaaagaagtgcctatgacagttgtgtctatgtcaagaactctaaagcagatgtgtatattcttctatatgtggatgacatgcttattgcaagtaagaatatggaagagataacaaggtgaagaaggttttgaacaaagaattcgaaatggaccttggaccagcaaagaaaattttgggaattgaaatcattacagacaggaagctgagaagcatcaaaccggctcagagtggatacatctcaaagattctgaatagatttggttttagcaatgtgaaatcagtttctacacccttcacacagacatttaaactcaccaaaagtcaagctccaacaatagaaagatatttgcatatatttatatttgtcaataattgtctttatagaaagatcttgattagtatatcaaaacaattaaagacctggagctagcaacactatttcaatttacgagaaaagacaatgcaagcttgtgttgcaactacttgggtggagctcactcccaaaagactatcctatgagaggagggtagccaagtgactatagaccaccaactaaacccatggttagttgatgtgggatccaaataaattgttttcaacaggcagctaaatggtcagcatcttttgaatgcacatacatgagactaccctacgagaagatagccaaaggttgtttacctgcatatcatgtttctttagtccagcaccaagacgaagggctcttataagggcctctgatctttttgaaaagaactcatcataaggcaaaccatcaggcggcgagagctgtgcatgtgtaaggacaaccaatgccctattccaaattgcttttccaagactatctgttatggctttgacaacctctctgtccaagttatcaaccctatatgaatctaatcgatccacatagagtagaacatctattgtcttgttcaaaagaaagctattcaaataacaattggaatatcacaagtcaagaagcatatttgataattgtaaattcagatgagatac

SEQ ID NO: 223306 - DNA, 3171 bp, Cannabis indica
taactatactaatgcttcttctaatgttcatcatcagccattcgagacacacaatgtagcggctccagctaggatgagtgtcgctcttccttcaaaattcaaatttgttcaccccactcacttacaggattacatatgtgagtattctactgctcaccgcatctctcttttctttttatcctatgataagttttcacccattttatgggtcgccatcctatgcgcccctcggtctctgaacccactagttttctccaattttaaaaaatgcctcaatggtggaaagctatggacaatgaaattgaggcacttcttgccaataaaacttagattaatgtatctctccccttggccaccacttcattggttgcaaatgggtttattaaataaaatacaaagccaatgacgaggttaagcgattcaaagattgcttagtagccaaaggctacaatcaacaactaggcatcaattaccaagaaacctttgccccaattgtaaagttcaatacattgaaagtccttcttgcctttgttgtcaattataattagcaattatatcaaatggacatcaacaatgccttcttacatgctgacttagatgaaaaagtttccatgtctcttcctcaagggttgaaacacaaaggggaacttcctcctaatgtcgtttgtaaactaaataaaagtatctatggcgttaaacaagcatcgagacaatgacatgcgaagctaagctcaaatttaattaatgataatgtatcacagtcaccttccaatcactctttcttcattcaatctactaatgatgctttccttgtggttttgatttatgtagatgacatcgccaaagctagcaacaataccaccaatgccgatacattcaagaggtaacttgactccaaatttaaactcaaggacctcggtccactatgctttttccttggctttaaaattggccagtctactaaagacatatttgtttttgaaagaccctttaccttataactcctaactgatacaggttagttaggtgccaaggccgcttcactccaacagaacccaacactcgtctcaacaaggacaccaactttctcttggccgaccccacctcttatagaagcttaattggtaagctcatttatctcactatcactcgacctaacatctcctttattgtcagaaggcttaatcaattcctttcagcaccccgtcaacctcatctacaagttgtccaatgcatcctccaatacctaaaaggcacacatggccaaggtctcttcttctacaatagctcttcacctcaactcaacgccaatgctaaaactagccttgttgggaatgatatccaacttaaggtcttttctgatgtcgattggggcacctgtcccgacactcaaagatctatcatgggttattaccttttcttgggacaaactctcatctcgtggaaatcaaaagaaacaaaacacagtctcttgctcctctgctaaagtagagtatcatgccatggccaacactacctgcgagctcatatggcttctagctatcctcaaagactttggtatcaaccacacgacacctgtccttatgtatagcaataacaagactgccatccacatctctgagaatcctatcttccatgaacgcacaaaatatgtcgacactgattgtcacattgtttgagaacgagttcaaagtggtcagctcaaacttctctacatcaacaccaagcacaaccttgccgatctactcactgagccttctttttttctcccaattcaaagagttactatctaatataaatgttactaatatgtacattccatcttgaaagggcgtattaaaatcatttagtctgattggttatagatttaatattatacttgcttgaagtacatcctaatttgggtataagagatcatttaccctacttgtaccatatatgaggaatattatattgtaagaattgtacattgattcattctcactcatttcctctcaaaaaaagatattttctatctgtttccttacattttgtatttctcattagtaaaatcttgagtcattactaattattaattgtcatttatgtagtatatgtgtaaacattaaataatataataataacaattcctggtgactgcataatggaatttgtggttggaaactttcattaatatttttagctagtatacgtaatagtttcttttttcaatcctatttatctaattttttttttagtttttggcagcgaaactgttttaattattgtttcacttgcacttaactttctaaactcaaattttaatggtaaaaccttctaaactacaaaactgtgagtaaattttaggtgttattcggctaactgtcaccatggactacttatgtgtacactcttatacacctgacacatttatattagtccacctaatattattatttcaaaattcattttaaaattaaataaaattataaaataaaagatagaatattaaaaaatacaaaatattataaattttgaaatattattttataatttttaaataataatattaggtgttccaatatacatgtgtcacgtgtataaaagtgtacacataagtagtccatgtgaaaagttaacagtaaaaaatagatgtcaccttaaatctactaactatttagtagtttggagggttttatcaccaaaatttgagtttgaataagtacaaataaaataatagtagagaggatttaaccgcgaataattttttttttttttctaataagggacttgaaatcttatattatatgaatattatactttaaccccatatattttggtccattttgcatatcttttacaatgcatgaggcacacataattgtaaatgtggtttgttataaaatgatgtatgttaatttccactacaattgagaggcatgaagcttgttgcatatttgacgggctgtagatatatgacaagaacgcatgaagtttgctttttctgtttttaattatttcttttccaaaagaaaagtaggtttagaaatagctcgaaaagagaggctgttgactagaaataccatcagcagatggtatttgccttacttttttttcttttttattttttctaaatgtaatttcatgaaaaaaaaaacaaaattagttactactactaacacaatactgatg

SEQ ID NO: 223307 - DNA, 1807 bp, Cannabis indica
agccttgatcttgtctatatcctcattggtcctctagattaacacaccccccagatatttcctttctctggtctcgtctgaatgaattgggtaatgacattttctaccatacaacatctcatagggagacatccctattgtactctattggctgttgttgtaggagaattctatcaaaggcaattatttactctatgaaccctcaaagtccatgacacaggctcacaataaatcttctagtatctgtattgtcttctcggactatccatcagtctgaggatggaaagttgtacggaactttaactttgtaccaatagctctttgaagacttacccaaaactttattgtaaattttggatccctatttgaaacaatggattttagagttccatggagacaaactatctcttttacgtacacctctacatattgatcctatgtataggttgtcttcaccaacaagaagtgtgatgacttcgtgaaacggtccactatgacccacacctaatcaaacattcctatagttctaggcaacccaccacgaagtccgtgtcacatcctccatttccactcggggaatgttaatggttgcagtagtacattttggtggtacatgggtacaatgaataaggtgtagtatgagcctcatccattatttctttcctaagctcaccattgctcgaaatacaaactcaagccttataaagtaaaattctattgtttgagattgagaagtctttagcccgaccagctaatacttcatctccaacctcaactaactcagagtcttccaattatgctcctctaattgtttctgacaagtctggttgaagagttaggttatgtagttttccaaccacgaatgcaataccagccctaaccatatctaaagctaactatagagagatctttgtagtagtaaaaacctaaccaggaccttttatgctcaaagtgtctgccaccacattggctttcctgagatgatacaaaatctcacaatcattatctttgaccatttctaatcaccacatttgtcttaaatctttttgagtaaagaagtacttgagacttttgtggtctatataaatctcacacttctcgccatacatgtaatgccgccatatctttagggcaaacacaacagtggcaagttttaattcatgagtttggcaacgctgctcatattcattcaactatcgagaagcatagacaaggaccctgttagcttgcatcagaacgcaccccagacgttgtctggatgcatcacagtataccatgaacttatcttgatcggatggcaaagctaacacaggtgctataatcagctgttataactcttgaaagcttgttttacacttgtccaaccacacaaactgttgattctttttggtcaattttattaacggcatagaaattttagaaaatccttacacgaaacatcgataatatcttgccaatccaagaaaattttgaaccttagtaactgtctttggcctcgaccgaacccaatagtctaatttcacttcttaaagtagaacatatattcataggctcgtttggaacatcgtattaggtcatattgtattgtattatattgaatttgattatacatcatatttttatataatactatgttaaattttaagttatagcaaaatattatatatttaagtgtccataaaagttaataccatatataattttacataaaatacaatttaatataatactatacaatacaatacgatgtaatacgacttaccaaacgaacccataaagaatagtgggtgaggatagtagtgtgtta

SEQ ID NO: 223308 - DNA, 2222 bp, Cannabis indica
aaaaattaaaaaatagtatatgtatgaaataatgtccctaaaatatatcttgatcgttatatattagcacatatttcattagcttgaatttattttttaggtgagagatcactaatatatatctcgaccgttatattcgaggacatataaatctcaacttatatataaattttttactcttgtcataaatttaaacacataggaggcattaagtataaaaattctaatagccacataaactatatagacactctcgtcctatatcgaaatctatgtctatttcactgtagcataatcaatactcatttttagattttgtattgaaatcattaccagttaattgatgaccagataattaaggaaattaactatgaatgaaataaatgcacaagagaattagggaagaatagaattatattaaactaaaacaaagtgttaaacaatctccattaataaaaaaaaatagaggaaaaaaaagaactcttcaaaaaaaaaaaaaataattaccagtttttagaaccgcttctcgcttctaattttcgtactccaaaattgaccccttaaaagttttcaaaaaggcatttatatatagctttgggttaaggttaaaaccctatttttcgttagaatattagcaagccggtcgcgactctacattgtagtgttgcggcccgtatcctgtaagcacgagatcccttcgaattttttccatagcgggtcgcggctctacaaggtagtttcgtggcccttgaagcccgatttttggcagagacgattccagcattatgtgaccttgctgccaaatttctgcacctggcgttgaaatctaatgttgaggcacactccttactttctaattcttcaacattagaaggagcctcaatcaatctagatcatttggatttctttcttggattattttctttgtgttctatcaacaaaacttcatttaattaatactttttgcacatttttttttctcaaatttgctctattcttttctaatactaaacctgaaaatattaataaccaaaaaataaaattgcacgaaatacaattaaaactaattaacaacacttaaaaattctaattaaaataggactaactaagtcctaataatggcctcctttgggtctcaatttgactcctcaatcagtcaagcacgacaagaagcagtaggtctaggcttcaatgctccaattcctcctctagctccgtctgtcgtcaaaattccaactccgactatccctacgattcaacctccagtcgtccctttgctagcactcattaccattcatctcgacatggaaaactaccctattggcagtcttaagtgttgcctgcggtttgtactcatgaatacgatgggattctgttgggcgccaaacccggccctgtcctcctgaatatctcaacatttaggctaatcaaaatcatatattaccaagggagtaaatactcaaggattaaaaattaccaggctgttttgagttggctcttagactcatttcataagaaatgattggctcatgtacttcagtgtccaattatctcgtgatttgtgggttttactagagaatttgttcaccaccagtctcgtgctcgaattccttctagcttattgtatttcaccttcaatctctcaaaaaaagacccctctctatccattgatttatatccttaagatgaaaactctggctgactagtctcattgctacaggtcaagcatttagtgatggtaatctcatttctctatattctaggaggtctcggacccgaatatgactctgtccctatcaatcctaaatccaagggggatcgcatcactctctttgaagtttcagtttcttctccagagcccaagaatgcgaatttatcagctaaactttgttgtttgcctctcctgatcttactactcttatctgccaacttgttatggatttttctacgcaagtgtacgtatcgatttcaagtaatataatattaagtagagtatcgttccccagagaattgtacttaaatacctaataaattaaattcttaattctatctaccaaaaaaaattaaggaataatattaaaatctaaagcaaataaaagcaagtaatttagaataaaaaaattaacaatgagttagagtttaacttcaattagtatctatcctattatagcctaatataacttaattcctaaatatcaatttctatgcaataagaagtttac

SEQ ID NO: 223309 - DNA, 937 bp, Cannabis indica
ggcgagtcttctcatatcaatgacttagaaaatcctactactaatgttccacataacactatgccaaatccttcagtatccaagtcagttttatcccagccaccttcggttgtttttcaaccttctgctactcatgatactgccgtgtctcaatctcctcatgtgggaaatatcaaaatgaaagggcctgctgcttcactttctcatgagtctcctaccaactacactgatctcacatccatttatatgcccatttcatcttctccattggtctcaaacatttacgccacataccctcccccacctccagccattacttcccattctaatcaaacattggctacccctgtcaccaaccattttaattctattattgcaccagccactgttaccactggaaaggaaaattccaacccaaatgtgcaattcaaaaggcagagtgaaggcctttcactaaggcaaactcttaagagatgcagaggaaatattccaaatgatcacaactcaaccttgtcagttgacgaaaatgattgccactttgtttccaatgattacatggattcggctggtgactatgacaatacagcggagactgttctgcagtcccgcgagcaaccatgaaaattgtgagttggaatgctcgtggtttggggaacccgagtgctgtccggaaacttcgtttgcttgttaaagagcaaaaccccactgtactttttattatggaaactaaattaccttgtaattcaatttctcgttttcgtagtcttttacatttcagtaatggtctagaagtccctagagttggcttaggtggtggtctaatgttgttatggaaggatgatgttgatgtaactttgaatagttttaatgcaaatgtttttgattgttatttggcttttcacaatggtcctagctctcactttactgctttctatgg

SEQ ID NO: 223310 - DNA, 2343 bp, Cannabis indica
tgtgtttaattttcatcgttttataagttcatatttaggatgttaaaaacatacttgttagtaaatctaggtcatggtaaaatatattccaacattcttgaatattgttactattgtaacagcctgttttgagggtgagaattcaccacaaattgtatcagagcccagggtttagagttcaagaatcacattcaaccaattaagactcatcttcaacatttcaagaatcaaacttgaactttcaagaactagattcaagcaatcaagaactggtttgaatggcttcagcaagatttgagatggataagttcaatagtttgaatgattttagtctatggagaatcaaaatcaaggcctttctatttcaccaagggatctatgaggcacttgatgatgaagccatgaaattaattgaagaatacaagaagaaacttgagattgaagccaaagcacatagtgccatcctcctcaatcttggtgatgaggtttagagggaagtttcagatgaacacaagtccttgggtctttggaacaagtttgcatcaatctacatataaaaaatctcttataaataagttgtatctcaagaagaagttgtacacactttgaataaatgagtcaaaggaattgagaaatcatcaagatgatgataacaaaatcattcttgatatgaataatcttgggatgaaaattgattgatgatgaagaccaggctataatcttgatgagttcacttcccaagatgtatgagcactgtattgatacaatcatgtatggcaaagaaactctaactatgatagaggttaaggctgcattgaattctaaagaaatttagaaaaagggagatgagaaagatgagttcaatgggtaaggattacttattgttaagggaaaattccccaaaagggaatataagggaaatcagaactcaaatggctacaaaggtaaccattcaagatccaattctagaaactccactggagggccaagctctaatggagctgcaggaaagcaatgttattatttcaagaaggaagaccactttagagattattatttggctttgaaggttaaactaaagagagaaaatcatcacaagtctaggaatcatggagttactaatgttgctgatagctatgagtcatctgatgcacttgcagtgtcatctgatgcacttgtgatgtctagatcatatttaggtggagattggattctagattcaggttgttcattttatatgacaccaaaaaagaactgtctaggactcttttagagagtcatgagggcatagttcttcttgggaacaacaaagtatttgagatcaaaggtgtgggaacaatcttgtaaaagaatcatgatgaagtcatgaagaccttgcagcaggtcagatatgttccagatctcaaaagaaatcttctctctattggtatgtttgataaactggggtatgttatcaaagttgaggaaggtgtaatgaaaattgtacaaggcacaaaaactgtgatgagagtaaggttgagtaatgaattgtatttcatggatggaaagacaataacaggttgtgcagcacttgttatggactcaactaaacacagtcaagcaagtctatggcacctcagattggggcatgtaagtgagaagagacttgaggaaatgaacaggcaaggactgttcaaagagtagttaatagaaagacttgaattctttgatgaatgtgttttggggaaggcttgcagattgaagttcagcaagacagaacacaccaccactgaatggttagcttatttcattctgacctttgggagccatctaagattccaaccaaaggtggatcacactactttatgagtataattgatgactacagtaggaaagtgtgggtttatttgttgaaaagcaaagatgaggctctaggaacctttgatatatggaagagcctactagaaaactagtcagggaataaaatcaaggtactaagaattgacaatggtcttgagtactgctcaaatgagttcaagggattatgtgacgaaatgggaatcaagggacatagaactgtgatcaaaacccctcagcaaaattgtgttgcttagaggatgaatagaacattgatggagagggttagatgcatgttactaggagttggtttggacagaaccttttggggagaagctctaaaaatagcatgtacctaatcaatagatcaccctctctgccaaacaaatttaagaccccacaagagttatagacaggtaaaccctcaaatttagatcacttaaaagtgtttggatgtactatatttgtgcatgttagacaaggtaagttgtgttggaaattatttta

SEQ ID NO: 223311 - DNA, 1380 bp, Cannabis indica
tttcattaaaccaaagaaatactaacttaggtgtgcgaaatttttgaatgccactgcaacccttgctcccgtataccagggtaacactaggctctcgtataccaaagtgtatgtgacatacatgactctcgtgtactatgatttttgtgacataacgtacataactctcatatactatgttttatttgccccccgagtgatcgaataaatacctttattggtcacttgtcataccgaatctcgttgggctttgttgatcatgtgtctcagagagttattacatgtgtaagcatctgtccacttattcagagatttatgggttggcagtgtttaactcactaaagaaataactgtagttacctcaagaccaactctacaagctttgtttagcgcttgagagtgtcgtcagcagttgcagacttttgtttttcatcaacacttagcttaagtgatccccactacactaatgtcttgttcgaataatattgtaggggtcataccttagcgatggacctcccaaataaaagatgactttgtcgcatcttatcggctcgagaggcgatcgtttcacttgcacaaggtaaagtaaatctcattgtgaagcgtactgtttagggaacaattgctttattgatgatatcgtcttagatgctccctgttccaataccttggtaccaacactggattcaagtggcagtcatagaaaattcaaacctgtttgtcccgggttctaacgtttcagtggcgatataaggtccttccctctttcagtgggagtcttcagtgtcactttcttgatctatatcttcagaagactcataggacatcttcaattctacttctctatttctgatcattgttggaaatatggggagaatctttgtcactgccttcctctcctgagtcgtcttgggaagtagggggagattcatcatcactgttttcttactcgagactttcttgagaaatagcaggggactcgtcatcactatctccctgctcgagttcatcttaggaaatagaaggaatctatttcaatgaaggcattcgatgttgactcttctttactatcttggtcaatgtctattcgagactcaggaaatagataagcagcgtaattgattgcatttggttaagcaactcctctgaccttcttgacggcttcttcgagcttgatgaaatcgtcacctctatctaaaatctcttaaatggtgtaaattgatttgagcttcaagtctttcaagaatggactcatttctgttagtccagctgtcattgctatgaccttagcgtcttcactgagtatcttcttcgtctgtgcggtggcctctaagaattgttgaagatgatcctttaaaggtttgtcttcttgttgcttga

SEQ ID NO: 223312 - DNA, 2105 bp, Cannabis indica
ttcctgtccatttgtgtgtggccgcatagaaacttttgatgactccgtgttgatcgtaaaaatctgtgaattcgtcacagtcgaattgctttccattgtttgagattattttgtgaggcagcccgtatcgacatacaatattttttatgacaaagtccaaggctttattgacagttatggtctccatgggtacgacctttgtccactttgtgtaataatctacctccactatggcatattttaccccaccctttcctgtgggtagggagccaatgagatctattccccataccgcaaagggccggggactagtcatcaaagtaattttattgggtggggctcttgggatatttgcaaacccttaggatggatcacacataaggacgtagtctatacaatctttcttcattgtgggccaaaaataccattatctcaatattttctttgagaggcttgggcctccagtgtgatctccacagaatccctcatggactttttgcatgatctgtttagcttctagatctgacatacacctcaaatatggcatgctgagcccccttcgatagagaataccatcgatcattaaataccgatgagcttggtactataattttctaaacatggtcctttcgtgaggcaattctcctattgttatgtacttaatgatatggtccatccaacctgacccttgctcattagtagccactatttctttggtactgatgctaggctctacaaggtgttcaacaggtaccacccctagcttctctatctcattatctgaggctagcttggctaggcggtctgcatgggcattcttttctcgtgggattcactccactttatattccttaaattcttacagcatttccctgacgaatgatacgtaagcaaccatcttttctccccgggtctgatattctcctgacacttggttgaccaccggttgtgaatcactgtacacctctactctgttggcccctacagccttggccaatctcaatcctgctattaaggcttcatactcgacctcatttttagaggtcgggaatgtgaattatagggcatcctggagtcgtaacccatcaggtgagatcattgctattctggccctagacccattttcattggatgccttgtcaacatatactttccacgtgggcgtaccctaagtcggggcgctggcctccatcttgttgcattctacaataaagtctaccaattcctggcccttaatcgagatacgtggaatgtactgtatgttgaactggcttaactccatggcccacttgagaagcctccctgaggcctcaagcttctgtaaaacttgttacagcgggtgatttgtaaatatcttgatggagcgagcttggaaataaggcctgagtttccttgatacaattaagagacagaaggctagtttttcgatcaagggatatcgaatttcaacccttatcatgcatttgctgacataatataccgagtgttgaactttttcctcctcccacaccagagctgcgttgaccgctttctcaaaaacagctaaatataaatataagtcttcttcgtgaactggttttgacagtactgatggcttagtctatgaaaagtgaggtttaattaaaaactttttgattaaattagaataaaacttctttataaagtaccactaatgtatggggatccctgtttataaaaatttacatatatcaaatctcaaaaccgttattataaaatcaaagtcacatttcaaacataaaagaaaagaaatcgatcatgcttcccgaaagccatgacaccacgactgatatgtacattgctgggagacctctgattcatggccgaacgtagcactttcttacctgcaccatgaagcacccgtgagtcacaataactcaacaagaaaagttattaaataagaagcattgcaaacgcagatattcacatctcaatataacatatatattggtgattcacgcaagtccatcatacacatctatatggttttaacatttatacaattacctatatgtcacgcaataagaaaactacaacatcttagtcaacatcttcatcattatactaagtgaatagttaatcaatac

SEQ ID NO: 223313 - DNA, 1192 bp, Cannabis indica
atcttgagcaggagcatgttgtttgaccatttgtggaataagacgattggttggtattgattctatatagctctgataccatgaaaggattcaagcacatcttgaatatttgcagacaaaaaaaaaaaaagagagagaaaattagagtgagagaaaatggaacgaaaaagatgaaaatggcttgatcaaatccacagcctttgattgcactgattatatataagtacaaaaccattacaactgaatacaccagtagaaataatagaaaacagttagaaaaagttagctggacaaaagtaaatacagagtaacaaactttaactaactaactaactaattaaccattctttatatttctaatagcatcacaagctgaatttcagttgggtgatgggaaagagcattgaactttactaaaagcagataacatcaaaatcaatgtggatggggttttgttcgagagtggtcatagttacggtttgggcctgattaaaagagatgccaatggtattttgattgaaggtcgtaccatcttctcccatgggcaagagtgtaacccgtcctgactgaagctatcagaattatggaagctcttagttgaatcaaggtttacatgttcaacaaataaaggtgaaaactgactgcctgtgtgttgttatcctcaaaattttgtagaagaaacacacgtgaacgtaatacatattgatgaagcacagtactattgcctgcacaatccatttttcctctagaaagaaaaaaacacaagattataaaataatcaagcaagccatgttttaccacaaaacaaaatattaaaggttagatatattttttttatttttctctttttcttcttctttttctttttggtacacaaatctgaaattcctttactaataaaagttgctaattgcaacagtgagaaaaagacagaaggaaaaaaaaaaggaagctagtaattggtttgtgacactccaaaagaacaagtggccaacttcacatttgcttttttcaatatttgcttctctaaattattgtactcgtttgctttctttttcaacactcatccgcagtcaccacagaaaaatatgtaaaaagataaaataaataaagtttagattcatatctttcgattcttactggccttcattgctggttatatctatctctatatatacatatatatttacct

SEQ ID NO: 223314 - DNA, 1951 bp, Cannabis indica
tttttataaaaagggcatttataacttaattgttagatttaaggtcattctgcatctaggcccctatatatatgcatggtagtttgtagaggtttatatatgtgtaccataagtaaaataaattccaaaataaattgaagaaaaacttgtctgtgttttatggtagccactctcatatttatatatatggacaagaataatatatatatatatatttaaagagagttagcctactaacaaattgagaaatgcgaaagggcaccagtggtggcaccctcctatgtgttaatatcactattagtccaactaagtattgggtctcatataatttaatataatggcttttagggagtatcgctagccaatcgcaacgcaatatatcaagaaggtgctaagcatcactggtgcctaatagcaatgctctaacaaattctatttgtgtataatacaattagccactaaataaatttatattgtttaaaatatttaatgtgtcaagtatacatttatatatatatatatatatatataactctaacaaataaggacatataagctatgtcattaaagtacgaaatgcacaattaattcaataagaaaaaattggaattatatgtgtcaaataaaaattttaatatcttacaaaatacaaaatgacttaaaaaaatatagtcataattcttgtcaaaatatcattctcaaatattgtgggatttaatttcataatagaatattcaaattactttcataaaaatacaaaatcttacaaaatctctcgtgaatttgaatcattttataattcccatcaaaatagtattgtaattcaaatgatctctaaatctatttaagtgatattagttttaatgaaaacaaactcattttctccaaagaattcatttcttacaaagttatatgaactacgttcgatttgattcctcccaaaggatacgtaggcaacctaattgtaaagattagctacaactacaaatcctcaaaatctcaaatgaggtcattcaccttattaaatcctaaataaagtcattcacctcattaaatcccaaataagatcattcacctaaaaaatccgagtaagatcttttacctcaaaaaaatcccaagtgaagtcatttatctcaaaatctcaaaatgagttaattgtccacaaagttggcgaagatacaaaatcttttaacactctcaaaactacgtttgacttgattcctaaaaaagatatctagccaacttagatgctaagactaagtgtagtcgccaataccacaaaatgatatgaaacaaaaatctcaaaactctataaaaggtcatccacctatgagtttttctaaatttttaaataacaaagaattcctaaaaagagtcatattccggaaatcttatattcaaattctaaaaatatcatattccgaactagaagtggcttaaactttcacaaaaaaagtatgtaggcagcttagttagctaaaattacttagtttagccgcaattccaaattcaccttcaatttccccaaattatttcaaaacatttgatatcatcgtaattgcaatcgaaaggtattttcattaaataaaaagatttgtaattaagagattactcttataattttagatggatcgaacttaaacgtacaatttgacatatataaaattgtgttttgtatttattttaatactttaaacgtacaattttttgcttaacaatatatatgaaacatttgtcaattgctattacctatttatagttattaaataaatttatttacagatatattttaaaaatattaaatcgttatattttgatccgatggagaatataaagtaaaatttgaacttttatgtttaatttagttatttattaaaaaatatttttttttaaattgtttacactttcaaaagtagttttttttttttagtttcgatttttacggttacga

SEQ ID NO: 223315 - DNA, 1775 bp, Cannabis indica
atgcaacataaaatgatttctgatctttactaattagtaaacttgattatatattaaaattggttttatttagggcacaaaacccagcagcacctgcagagctttattggaaagactcgagctatcatctcctaggtgatagagaccatctttgattttccttttaagcaagattgcacccgttttcttgtccttaacacattttatgaaattctaagaaaacaacattgtcattagtaagtttggatacactaaccaagctttttagttatggaaggaatttacaaaactgaattcaaatgtaaagaatgagaatttaaggaaagagtagttgtaccaatgttagaaatgaccaatttcttaccattagcaacaacaattgtttcttgaccagtgtagggagtgacatactcaagattgtccattgagtgtgcaatatgattggttgcacctgaatccacataccacccaacatcattaccaaaatctagcacaatttgagcaacaaaggcctgaggatcgtagttaagagactgctctgtgagattggcttgtggctgagtagtagaagtttttggagtaacccaattttgatcaaacctatagtggcaagtgacaacagtatgcgcaaatctcatgcacacttgacaaagaggtttgttattgttggtaggtcgagatccatttcttcaatttaggaatcttggcacattttcagaaccttaacctcttctagagccattaaaaggtctgtatgtatcatttcttgatcccaaggtaagattggctgccatttttgttgaaagatccaagacagtggagtgtctttccaattttgactcatgagacatcaagagagcttgaacttcttcaagtgaaagagtttcacttcgagagttaatacaggagacaacagagttaaacttgggactaagtccattaatcaggtgtaaaatgagatcaaaatcatttacatgatgtccagcaatagccaaagaatcacacacggatttgatcttgtcaacataatcaaaaatggacaaattacctttctgcagatttgttaactggcttttgagttgaaggagtcttgccttggactgacttataaatttttgttccaaagcctttcaaacagaattcgatgtggggtagcaagcaactatatccaagattccttcagtcattgaagatcggagccatgacaacaatagttgatctttgcgatgccattgcaagaacaggggattgtcatcgctattgatgagttttgaaagaggagcattgttaccgaagagtaactcatcaagatcatgacctataacagtaggtatgacttgcgatttctaggaaaagaaattcatgcgatcgagtttcaagataagcgaagctgtcaaagagtttgagaaggggttccatggttgtgtcattgaggaggacagagttggcacaacaacaggatcagaggctccaacttgagatgagtggtcatcggaggaagccattgacgcaagtcaagtgctctgataccataaagaaacaaaacaaaagaagaagaagaaagaacagagtatgctcaaaagagaagaaatgcaaaatagcttgattgcattattgaatgattaagtgtttatatacacatcagaattatattctattaaaattaacaacctaagaaactaacaatagctttaactaacactaaaaaactctaaccaattaacacatcaattagttagttatcacgagtagttttcacggtatgtaatgcaagc

SEQ ID NO: 223316 - DNA, 2134 bp, Cannabis indica
atttataattccttacctatttttatttttactcttttttatatattagggcttcagcttttttttttttctctttatttcttaaatcttttccttttatttttttttctttagctgatttttattttatttttattctcactctatttatcttttttttttttcaattctctttatatatttttttcacactaatttatttttatttttatatatagtatacaattttttatttttattttcaaacacatttttgctctctacaaaatttcattttaatattttcttaaaaaaattattatatttccttttctatcttttatattttttattattcacacttaatctatattgtactatttttcttttattaatcacattttataaaaaaatattgcaagtgaatcttggtcatcattatcatcatcatcctcatcatcatcattatcatcagaatcttggtcaacaaattcatcagatgactttacctagttgaaaacaatattgcaactaaaataaaatatgaaaaaaaaccaacaataacagaacataaaatatgaaaaaaaaaagaaaaaaactatgaaaatatatacctcaacagaaagtcgattataaatgacattaattttttcctgaatatctttaataacagtcatgacagacttgaaattaaggtcaacaaaacatctcaaagaaatagaatcttcggccaaggattcttgactggaaataaccaattccaacttagattttaacatttctatatcatctgaatcagattttctagaagatgaaccactctcgaatgtttactttgttgtaccacgatcatcgatagactcatctaaaaataagccatccaaatgcaaattctgtctttcttcatcagatggacgaatgttattcacttttaactgaaaaaaaaaattgtaaatataaaacaacaaaaataaaaaatagaaaagattaataaaatgagacaaaacaaaataaaacagtaaagaaactgaaaaatcacttgctttaacagcaaatcaaaaatcttgcctttcaagtccctcaaagttggatttttagccccgacatcattggtccaatttagaattcttggaattgtagatgcaactcttttgcaaaaacaatttaccatcgcatgataacattcataaaatcatactacacccacggacatcccaacgctctataccaaccatcataagactaacctccatttttctcttttttatttttcattttgataccatgttcaactctgcccttgaatgaatcaatcgtcaactcaaaggactccctaccccaacaatattcatcccaacgaccgctatcaatgatatctaattcagacctaacaaattccttctcaggagtattactaagaaggaaacaatggatgaaatacaccagagtcaatttcaaacctagtgattcatcttccccacctagtgcccaaaaaaacatcctcaatagacttatgatcaatagtttttgttccaggaaaacaaacatcaactaattggtttgattcttgggaaaaaaataatttattgcaatcaccaaaacaatcaagaccagaaatcaagtaaaactcttcaacactaaaccgtatacaacggtcagcaaactttgtccaaatttctttaggattgggctggttaacctccctcaacaaaaggctgtgaacaacttggggatggaaaacaaactcatgaatatctaaaaaatgaccaaattgcgtatctcggaacatttttaacaaattccccaagatagtattctttatattaagaataacagagtaagtgctagtagatacacatttggatctataaaaatctctgggactgaatttatttacccaatcccgcattttaaaaagaaagtaaataaaatgattgggcatacaaaagttgcaaactctaatacaactacaaaacaactataaataaaccaacacacagagaaaaaaaaaataaataataacagaaacatagatataaaaccaaacctaatataaacaacaaaacatatagaaacacaataaaaacataaaaataaaagaaagtagtagaccaaccgaattaatctactttaatatcaacatccatgatagttc

SEQ ID NO: 223317 - DNA, 1789 bp, Cannabis indica
cgtttctccagttattagtttttccaaaactagaggcatcgctaaatgccttttggtgctctaaaaggcttcttcacaatcttctgtccactcgaatttcttgtttccttacaatacattgaagaatggctaacacttatcagttgacttcgaaatgaatttattaagtgcagccatccttcttgttagggcttgtacttctttaggctttgttggtgatggcatatctatcaaagccttgattttttcagggtttgcttcaatacccctcgcgttgactatgaattttagaaattttcctgaggaaactccaaaggaacactttttcgtgtttagcttcatattgtacttctttaatatttcgaagcattttgcaaggtctgtggtatgactcccacttttcacagactttaccaacatatcatcgacgtaaacctcaatgttttctccgatctgatttgcaaacatcttgttcaccaatcgttgatatgtcaccccagcattcttcagcccaaatggcatgaccttgtagcagtaaagttccatattggttacgaagctcgtatgttcctgatctgccacatgcattttttatctggttatatctagaatatgcatccataaatgacataagatcgtgcccgggagttgcatccactaactggtcgatcctgggtagtggaaaataatcttttgggcatgctttattcagattagagaagtcaatgcaagttttccaagttccattaggttttgggacgagaacaggattagctatccacgaggggtaaaacatctcgtgtatgaagtcattgactaacaacatatccacttcctgttttagcgccccttgcctctgggaatccaagggtctcctttttttgcctctttgctgggtagtttggatcgacatttaaatgatggcagataatattagggtcaatttctatcatatctctatggttccaggtgaattgatcctagttggcccttaagaaacttattagctgctatttcaactgctcgtccaggttcttcccaatgtacacacactttgtgggatttcttgggtcgagaataacttcttccatttcttcaattggtattaacaagtttgtttcatcttgaattcgaggatcaagatcttcatccttcttttcgctttcttctgccaaaaccaccattaacgggtgactagcttttctgtgttgtagctctatgcaatagccatcacgagctagcatttgatcgcctcgcaccactcccacacctttcggtgtttgaaacttcagggataggtgcttgatcgaactaactgcccctaatatgatcaatgatggatgacccagtaatatattgtaagccgatggcaggtcgacaaccagaaagtcttgcataattatggtagataagggtgcttcgcccagggttaatgctagctcgattataccttggctggcgatagtgtcgccagtaaatccgtatagattcaccatgcaaggtctcaatttggctttttcaagccccattttcttcagtgtttccctgtaaaggatgttcactgaactctcgttatctaccaacaccctctttatccttttattggcgagctagatagtaatcaccaatacatcgacgtgagaataccacacgttcttctcatcttcctccgtgaatatgattggaggttcttcagtttttaccttcttggaaggttctagagcaaataatgactgctcattttttatttccttcacatacctcttttgggcattgttgctctctcctg

SEQ ID NO: 223318 - DNA, 1942 bp, Cannabis indica
aagaacaagagagacacaacaaaatagaagagaagttagagtgagaaatggagagagatatctgatagagagagggttgggattagataattgtattgagcaacattgtcgattatgttggctcaagttagtgagttaatgagtgttgagggattacaccatggatgacttattggtgattatttccttgtagctcctaagattgatatctctaatttttattatcaataaagattggtggcaatgcttccaaactaaaatatgaccaagttcacaatgaacttaggattagaaccagtataaatatcgtgtgttgttgtgtctggaagctatctagattcatctgtgttatattttctggtttaatgtgtttgctggttttttgttcttgatttgtttgttttgatttaacttttgcttatttaagtgtgatcttgaagctggaattacagagatcattttctatgtatcagagctaaatttcttacaaatcagaacatggttctttaatcatcaagggagattcaaagatcacttacttccgtaccaagaactcatcaaggaattttacaagaacaaagattgaaggaggatgtcgatggtaaggtttgaactagagaagtttgatctaattttgcactatggcgagagagttttaagggtattcttgagcaccaaaaggtggcaaagatactcagagatgaaaagttgttggctgagaagaaggcagaggaaattgcagaattggaggagatggcatactacaccatcatcatgtacctgcccaatggagctagaagaaagctaacccaagaaaagactgcaaaaggattgtggaacaaactagagcagctatacatggcaccatcaaaatctcgagcaaaattaatcttcttgaaagattatacgggtttagaatgaactcttctctttccttagatgataatattgataaatttaataaaataattattggtttagctaacattaatcataaagtagacgaagaaagtcaagcaatcatatttctcaaatcattgccaatggcatatcaagaagttaaagcatcaatcaagtatggcagggatgtgatcaagttagagggtgttcatgcggcattaaagtcaaaagactttgaattttaactcgagaaggagactaggaaagaagaagcctatctcgcaagaggaagacgtccaaagagaggatcatcaaggaacagctagtcaccatcaagatcgaagtcaaagatcaaagacaatcgacaatgttatcaatgtggaaagattggccacattaaaaaattctgcagtcaattgaagatgcaatttggtttcagaacaaactacgatgacaagatatgcaacaaaaaccagaaccagtactcaaaatctaatgatcatgaaaatcaaagaaaagactctacagttgtggctgagagtagcggagatagaagttcacatggggaattattttctatttcacaaaataataacaataaagagtggatccttaatttaggatgcacttatcatatgtgtcccaacttagaatcttcctttgattatcaagaaatcaataatggtggtaaagtactaatgggtaatggtgtttcttgtagggttgttggaattggtaaggtggctataaggaaattcaatggtgaagtgaagattctgcatattgtgaggcacattccaaaattgaggaggaatgtgatatcacttggaaccttggaagatgaaggttatgtctataagtccttgaatgggagcctcaggatcacaaaaagttcaatgcttgttatgaaaggaaaaagagtacatgggttgtatgtactcgagggtgaaattgtacttgtggcgaagcaaaaaaaagtaaaaggtttaaaaagtgatatgcagctattgttgggttttgtgccctaaataaaacccattac

SEQ ID NO: 223319 - DNA, 1367 bp, Cannabis indica
gagcgtaatcatagatataaaatttatagttctatgactatctataagtgaaacgatagttttcttagagcttggctaaacgatataaatagaagagctcttattttagtatttatattactttactgaaatatcatttataaagagctaagtattttaaggataaaatacatcgaacgataataaggtaagtttgtccctactcaatgtaacttgtctatagaggatcattgattatttagattgacacaatagataattcatagtgtatctatattggatatatagagcgtattatgtaatcaatagtacaattctaaatctatagtggagacaggaggaattaataaactaggaaatttatttggtaaattttttatctgcttattgggagctttgttatagaggcccatggtccccatattatctgagacaatattgtcgtgtagactcaattaattgattttataagtcaattagaattcaaaaatagattgtgtcttatttgagaattttttactaagtttggataaatttgagaacaaaagaaaaataaaggtttatttattaattaagatattttgtgggtctaattaataaatatattttaaattttatttttgtttgataattattaaatgaaaattagtatttaaataattagattagataaatggtaaaattaaaaaagacaatttatttcatttgagcttaattgaaataaaaatgagaaaagtcaaagtccatgggtcatagtgtaattttgtcctgggcttttagtttaggtctattgtctttttcctagcacatttaatctaactcttatcttatgaagtgcctatataaggaatatatgattgctttgccaaataatctaagtcaagtgacttaaccctaagtccaactagaaaacctctctagatttttttccttaagaaatgtgaatttccatagtctttgtagaactaccgcgtgtagaagactgtgtagaactatcgtgtgtcgagtttaagaaagcaatacaggttcatcacttgacaataccttgctatagaaaaagaattgagggttagagtgattgaacggaaggagtcaataatttctgctacaaccaatgtgaagattctattcctttacgtgtttatttatcattttatgaattttatattttaggatgttaggttatagtgtatgttgcggataaaaaacctgatcaagatcatcataacaacatttcaaggacaacaatttcaatggcagcaaacatgtaatcaaaactagaaccaaagcttaagaaaattgaattttattaaagatgaatgaaactaaaaaatgtcataacattgcattaaaatctgagagagaaa

SEQ ID NO: 223320 - DNA, 3541 bp, Cannabis indica
ttatttggtgtattattcaaatttagacagttattattatttccacattgtttttttttttttttagacaatattatttccacatgttaaaataacatgaaacatggaaaatgttcacatttcatgaattgtcatttagataagatcaaaaagaataacggccatagttaatccctataaatagtaaaaaaaaaattaattgtaaaggggatgaccaattctctctttactgagagaaaatacgctaagttgtatcttgtaatcagaaaactcataaataagagtgacttgtaaagtatgttgatttaactacaaaatcacgtaaaatttcatggttttttatagatatataataatttccttaaagtatttattagagaattataaattgtcaagaaccttgtttatgttaacgaaattctgatttaacattttggtgattttattgagaacttcttgaaaattaaactctaagaaacacttgtccccctgaaaaagtttgctaaatattttcccaccatggaaattaattcacaaaataacaatgtcgaactagaagagacggtgcaccaccctggaaaaagggccctcaaaaacggactaacccccacgaagcgaaaggctagaaatgttggaagaggtcctactgaatgggactttgaaaggaatagaaaacgaaataggaaattacaagggagaagagattgtggagcctatgaccctactcgttatgtctcgctggtagaactggaaaattgacaacttcatcaaagattggtcatctcgaaccgaagaaatgcagaattggaacgcgaggctgcaatggctagatggctcaaggtggcgcaccaccgacaaaaattgatccacccataaggcatctacaagggaggcctcgtgggtctagtgcaaggaagaatgttgatgcccctgttgaagggaataatcaggaaaaccctacaaatccttaaaagcaacaaccagggaaattcttgtggacaagaaaatccctcaaaacctcaggaatgtgaatgtcagacaaacgtggcctgagacaccagaaccttctcacaggaatgagatgactccatgagaacaaaaatttggtcaaccgcataatcattctagtccaccgcgaggaccacaaaggactggtaagggtcgtatgtcaacctagaaaggagtcgcatgtcaaacttgtttgaacaacgacaccccaggcaagaagcccattctgagaggactcaatcaaacactgttgtgagtgaattgaggagaagccaaacacaaagccaatcctcacaatcttgaacaaaggaagttttatagcatgagtggcgtaatacttgagatagtaatcgagatgcacatgccagtgttagtgactttcaaagttatcaatctgaaagtatcttgcatacgagattgatgagcaattatgatacaaggagagggcgacaccgagaacaacgtgatctaatattttagaacattttaatcggagataacatgatttacgtgaacatctgtatcgtaatactccaaaccttcacgagtcgttgaatataaacgttctagatttgcgtgagtagcagaataatcaaattccaaatgaccctcacagggtcatacaattggatgaaaaaattaggaaatatcaagatggtgaacatgggaagttgctcgaatatgaatctgacaaggaacctgaaccacaattcatccaaacataacaaaatcaattttttcaaaagcatccaaaaatctcccaagtcactccatacgatagaaccacagtccttgtcaggcacttcagtaatttaacaccatcgtgcgagccaaaaatgttggactcaactttagatgtatgctattcgctacatccttaataagagcaaccaagagtttgtttgaaaagtttactcgacgttctataacttcatgggaacaattatcacaagaatttaaaagatagtttaggttgcgagaacaaggagacctaaagttccttcattgaaaaatgtgaaacaacaacctagggagtcattaaaagcattcttaagacgctttaccacaacaacaacaaagataaaaaatctgaataatagcattcagttaacttccttgcaggttgggatcacgataagaggtgagctttgggatgatttataaggtcgacctgttaggttaatgaataattttaacgagaggacactcgtatacatatgaaaataagaagctcacttagaatttaaactactaaaggctagttctgagtcaacaactagcttgagtaacgcaagcgtagacaactcaaacgaaagtagcgagcccaatgggaaaaggaaggacgaatcaaaagattcaacaaaagataaaaagaagcaaaataaacatgaaaagtatgtaccaatatactcagtttgcacaaagttaaacgagacacgagaaaatattttcattgcaaatgaaatcgggtcgcattgcgaaggcctgatcctatgagaaatgcgaaaaataagcgcgatccgaacaaatattgtccacttcataaagatataaggcacacaaccgaagaatgccatcaactcaaggacaaaatcgagagcttaatatcctgatgatatttttggcaatatgggaaaaatagggaaaataatctcaatcaacccaataacgagaatcaaaaccaaaatatccaaccaccttcaattgacgacaatgatatatttgtgcaattacttgggaccccatctgtcagggcacagatttcttgtatctcgaatggttgtaagacccatctaactgtataatcttcgcccattatctcattggacttttgaactggccttaatctattaattttgtactgaaaatatcacgtgtttttcttcaaaaaatataaataacgattataatttagcttaaaacccattttatatttacgaatcaaattaaacaatgtattttctccctccaaaaaaaaaaataaaaaaaataaaatatgaactaaaacttttttattttttatttctacataaatatatttgaatcttagtacattatcataattattttgtttaaagtgaaagaattttggcgggcagttgtggaaggtgaaagtgatcccaccaaattccattttccctccaaattataatttattttgtccttataaaaatctcactaccaaattcatacgttttgtttcacagcaccaaaaaaaatcaaaattatccttttgcttccttcaatcaaccgagtcactgagttggctcactgagtcacctccgcactagttactttattttcttttataataatcatttaatactttttgtatattaaagaaagcatattaggtgtgactataattggcctaagacttgtgatgagttatgattgcatgaggatggtactataataactattttgtgtacttgttgctttaaacttaattgacttttgacttttgtttttctttgtgtaaattgatttactctaaacttaaatttgttattaaatcaaattaatttgttgg

SEQ ID NO: 223321 - DNA, 2122 bp, Cannabis indica
tctcggggatgatgaagccagcattagttatttgagactttgctagggctgaattagagagtcagggttaggactagttttattgcttttttttctaagtgcatgcctttctcatgaatatcctaacacttagcttatttctttgttgcagcagtcaggcctatggaagatctcctggctactcttgctgaggcctacagtcctgatgcctctttgcctctggctccctcccagtcggtgacccccgggaggtcatcctccaatgccccttcaggcacaatcgtcttgatagacgaggagggggaagtcgaggaaggcgaggtggaggatgcggccgcccttgagcgcaagcgaaagggcaagatggtggaggctgaaccacccaagcggacccaaacgggggacactccggtgccgagcaatgattccagaattccttccaaagcggaggagtacaccgtgccgcacgacatagtgttgaccccggttcccgcggatgagcagaggcaaaatctctgagtggccaagcacaactacgcccttgacgagtacagttgggggcatgctgaggtggaggccttgatagaagattttgcgggaggagcagcagagcactcttcacgaggacgccttccggaatctgtgggacctgaacatggatccgctgacggactggttgaaccgtttcgtcgggcccaccttggctccctttgcctcggagatgaccagccagttcatctcccacctcagtcaattcccaactaaaagatatgcggcttgtgcctctctaaactctgttttccaggtcgaagacattagctctgccatggccggggtgagtacttgtaatttattccttcctttgatattttgtctaaggcatatgatctcactcttgtctcttttttcagattactgccgagaccggccacctttccaagaccttgatcgaccatggcttcgtcatgtccgaattcaggggcatagacgaggccgcgaggatcctgcgggacttgtcttccgaaaggcgggcgttccaggaggaggctcaatgaagggaggcccctgaggaggcgaagttttgagaggaggccaagcagagggaggctgaggtggaggcgaggcaccaggaggcgctgaaggtggagggcgaagctgcagccagggccagacgcgagcttcgagaggccagggaagctatggacgagatggctgccaaggtgaagtccttagaggagttacaccaggcagacttgcagtctacgaccaacctaaccgtggaggtgaaggagctgagggacttcagagatcaggccttggaaaaggccaaacgagatgagctcttgacccccgtcgtctgcaagcattgcgtcaagcgctttgatgacgacgtctacatggcctggcagtcgaatggccagagtatcaagcttgacttctatcccaagcctgaagaggctcttgctaagttccgggagaagaagaaaaggcttgatgctttactcgaagagcgtcggggccctcgtcttcctcctcgcattgattaggccgcagagtccaaccaatttcaccattataatcatatttttcttttttatttatagtcttgtttcctcccttatagacaattttaatttaattattatcttctaaggggagacaattattacggcccgtccccaggctcttagtatgttatgtatttttctttttggacctgccctttgggtcaggatattttaaatatatatgttcactttgatacatattctgtttgactttatttttacttttggcctgttttacatctgtccgtgtggtatgccttggtacccccctgagtggcatgaaaactttgtttttaaggcacttagttttatttgaaatttagaggttgcatacacttttacagtacaaattatttttaacaaggcctaagttgacatatttggactattggtaatacttccggagatgatcggcgttccaagcccttggcacgatggttccgtccaatttttttagcttataggttccgtagccgatctcatcctcaatttcgtatggcccttcccaatttggcccaagtacccccactccgggttcttgagtggttgggaag

SEQ ID NO: 223322 - DNA, 1496 bp, Cannabis indica
tgagtagggaaatttagacacaagtgcgtgattgacgtaacagcgccgaaatccaccagggccggtcggccgaggattgcattgtaagctgttgggcagtccaccacgacaaacgtgcagtatttgaaagtgctttggggcgtgtctgggcacaaagtgactgggagcctcacttttcccattgaaccccctgtgctgggaaccacttcgcgagagatcccggtctgtgaggcctattgccgtgaaggcttccttaaatagcaaattcatagaattctcattgtcgatgagcattctggccacaatcttgttggcgataggagtctctatgaccagagggtcatgatgaagaaaacgcactgtcttagcgtcctcttctgtgaacgtaataggctgatccatgagtcggggcctttgagcagggagctgagtaacttcccaaacctcattgtgttttatagccccgacgtataatttcaattccttccgagtagtccctccgatatggggtccttcggagatcatagctactcttccattgggtcttggtggcagaccaggaacttgctgaggctcccccggtggagcgactggggccaatgctccggacgcaccccccggtgctccttggggcaaaggtcctgctacttgaactgggttgagatgaggcagccggttctttatccactcataaagatggcccaatcgaatcaatttttcgatcttatctttaaggtttttgcatttgttggtgctgtgtccaatgtcgttatgatactcgcaccttttgttgggatccctttgggagctatctctgtatagaggaggcggtctccggtagtgtatattttgcctggtggcaaatacacacgttcctgggagtccgtcagctccatgtactgggtgtattggggagtgtacccccttttctggtgcttgtcctccgtccggttgctacctttcgaggacctcttgctccgagagccttgagaagggcttgctaggcttacagtaggagcggagtgagacgggacttgtccacttatcccagaaggattcccgtaatgagaatatgcaggagccaacgcctgattctgattatatcctggggtggcagaaaattgtatgccgctcagtggtggagtagctgctggcaaggtccccaggagctgggctctgggtacataccctgctattcccgtcagatagtatcccccgtaagccagtagttgggcctcttctaagttgatatatttttggactcttttctggaagtcttgaaggttggaggctccttcttgctgtaactcgttccaaaacggagtgcccgtacggatccctgcttgaagaagcgcaagctgttgtccgtcatcaactttcttagtctttgaggcttcttctttaaacctctttatgaaatttttcagcgtctccgagggcagctgcttgatgttagtcagggcgctgacctccagattaacctttctcgcggcgac

SEQ ID NO: 223323 - DNA, 2167 bp, Cannabis indica
aaataatttccaacagtaactgcattgatagtcatcaagttgccttggacatttatgctcgatgattgttggttcacccacgttctctctatttgtcaagagattatgctgcttcagagccctacaccaaaaagaagctggttatttgtgaacgaattagttacataatactaagttaaaatttgtagcacttacttttccacgcaatccctaacaacttcacgagtacgttcattctttgagtctagatatacaaccttctgagttgcggactggatgggcaccaacatccagtgattactacacataataaaaaatgattggtcaaattcactaatcgatctatagttatatatattaaattataaacctacttacatatcttgccacgcgcaaatagagcactgggtgggttgtatctccatcaaccgctcacacagattctcaacacgaacatggggctgtgcactttgtgtagctattgaagcaggattaataaatgcatatatttcatccattcgaacctgcaaatgactgataaacaatagattattgataataaatattaaataacataattattaaattaattattaactattataccttcaccaaatgaagatagcatcgactccgacccaatccaggttgcaaaaatctttgacattcttcttatcgatctaagtcttagtcctatggtgtccgaacacatttgtcttaaattcacatgtgttttcgtaatgaggaatcgcatcccatggctccacaatttgttcaatcctctccagtaattatgttttaacaggtgagtgtaacaatcaagtgatgaagaaagcttcttctacttcttttgcctctttgagtgtatgggagactgattcacatcccatggctccacaatctgttcaagtgctctctagtattggtgttttagcatgcagagtgtaacaatcaagtgatgaagaaagcttcttctgcttctttgcctcttcgagtgtatgggaggctgagtggatggaactaacggatcttcccgatatccattctttgatttcttctagagtaaaaataacattaattaaaagttagaagtttcaatattaattaatgactatgtttgcttgaagctacaaccttatacaagaagcaactcaaatatacaagcctacatcaagaataaaagttcgtctacaataaaagtccaaaacaaatagaactcctacatcaagaattagctcaaagttgtttaacaaaaaaaaaaaaatcagctcaaattcttgtaatacaacttttactgttaatgcagttagagcatgaaattttctcaactcttgaaaatgatgaatcctaaaagtgagttttgtttatacaagatattttataaatttgcagaaatggctatagagaggaataagaacaggaaaaattatattaggctagtgatggtcattgatatgattaaattactcagagtagtttctacaaatatacactttatttttacttagttaattatgtaaggtgtatagattatgtataattgtgtgtcaatttttttatgtgcatgtaaaaatctatcaaagtagcactaaaaagaaaaaaaaatcatttcagttatagagagagaaagatttatatgatagacattacctgtgacaaattgtccttgtctatccattcaactctccattcttctttcagtagcttattacccaaaaaacaactcgagatataccttggagatttcatcataagagattctaaagggtagcttatccattcctccaccatggtgtccaactctttactccatatttcatcatccttaataaaataattatccttgatgaattctagaattttgtctaattgggcttgcttcaaaataattttgacattatcatccatatcttccaaatctattgaccttagacccaactagatgggattagaaatacttaaattataactgtcgtaagaagatcaatgtgaacctattttatagtccaaatatatcttaaatccataaatatcataataaaaaagtcctaagatagggatgtcgatcctctctaacaatttgtttagaaaccgttttgtgtttagatcaccatatccagaagtcgttacaacgatactgtaacgccctaatgctaaggcacgctac

SEQ ID NO: 223324 - DNA, 1661 bp, Cannabis indica
aacactttgctagcaagagagtccatgttgaataaaagtcgccagccttgttttccaagcatggctagattaaagtccctcaagcttctgaaccccatacctccatcgtgtttatgtttagtcattctatcccaactcatccaagtgattccactaccattaccattagagttgtttgatttccaccaaaagcttgccatcatccgctctatttcgttgcaagtaccaattgggaaaaggaatacgttcatagcatacgatggaagagattgaaccacggtcttaataagaatttctttcccagcccgagacagaaaccgaccctcccaactattgatccgcttcccattctttctttaaggaaccccagaacagcgttcttgtttcgtcccactatacttgggagccccaggtacatgctatcctcacccgcttcctggatatgcatcaagttacaaatgcgatttctgatgttggccgaagtattagaactgaagaaagctgatgatttgtggagatttactttttgaccagatgcgccttcaaacgtttggagaagttgtaatacatggctagcttcttcgtccgaggcttggcagtacacataactgtcatctgcgaacagtaggtgagaaatggtaggggcacttctagcaactttgcaacccgttatgagtcttgaagcctcgtagtgtctcaccaaggatgagaatccctcggcgcaaacaatgaacaagtaaggtgataacgggcagccttggcggatacctcgagaagggacgatcggtcccatcttttgtccactattaagaacatggtaacggacagagttcacacaactaagaatcaagcttatccaccgatcactgaaccccattactcgaaggatcgaaccaaggaaactccattcgacacgatcataggccttgctcatgtcgagcttaagagccatgtagccttttttgccattagtcttccttttcaagtaatgcattgcttcaaacgccaccataacattatctgaaattaatcttcctgcaacaaacgcgctctgagtttcagagatggtatgattcagcacacctttcattctgttggccactaccttagaggcgattttataaaggacgttgcaaagtgagatcggcctcatgtcactcatatgtgatggattctttttcttgggaatgagaactatatgagtatcattgatagattccgggagcgtgcccgtgtcaaaaaaatcacgaacaaattggactacatccgccccaacaatgctccaatgcttctgataaaaagccggggtcataccatctggccccggggatttatccggatgcatttgaaagagagctttcctaattcatcctccgaaataggctccaagagctcattattctgatcacaagtgatggttggacggaccccattcaaaaccgaacccaagttgatatttgaagactggaacaactcacgaaaatacccagtaataacatgatgaagacccgtttcccagttcacccaagcaccattattgtccattagttgactaagactattactcctctttcttgaactagcaactgaatgaaaatacttactgtttctatcgcccgaattcagccaaaactgttttgatcgttgcttccagaaagttt

SEQ ID NO: 223325 - DNA, 949 bp, Cannabis indica
tttttattattattgggggtactagcaaatattaagagtgatgttttaaaatagattaaccacacattaatctatttttggctgggaaaaagattacagaaagaggggagagctaggacataggcttgtttataggaatgtgagaggtttgagtaagataggctcagagagagacaagaccagcctcataaaccactttctctacatccccaaaaacggcgtgttgcttgtgatgtgttcctatgcaaaaatctttcttcacttccccctaaacacaatgtcattcttcttctttttcttctccttcttcttcttcttccacctttttctcgagagccgtaccaatcctggtcccacctcagtactactttcttcaagagggccccaccctgacatcatcttcacggtgaaaaccaccgccaccaccgctaccatgtctcctcagatgccatagctggtacttttatgttttgctctttttattgtgtattatgtctggttggttcatcactttgttacatttatcttatgtatcattgtcatgctctaacatgtattgcctttttccctttacgagtgtttgactattggttatttctacagtatatacatataatcttatctatctcatttaaaagtttccaccataatggcttgtgggcatatctgggttttcaccattactcaattatagtacgtggtggtgagaaaagttagagactttgaatgatgtaagcttgaacaattgggcaaagcatgaagatgggtgcaatcatttgtgacccatgtcatcaaaatactttttgtcttatacctttctttactttcggttaaaaagagtgaaatattctcagttttttatttttagagtttggtcccctttcaccccatgagattaagaaggcggaggcaatgctttccttcttgctcttcccatcacagagtaaac

SEQ ID NO: 223326 - DNA, 1776 bp, Cannabis indica
aatgaagacattatcaaaaatgaccctatttttaataaaagcactttgattaggagaaatgacatcgttaagcacattcttaagtctattagctaaaactttggaaacaattttataaattgtagaacacaaacttattggccgataatctcgaatttgagaagcattcttcatcttaggaataacaacaataacaatttcattaatggaagaaatgtcagcttgattattaagaatagaaagaacaacactacataagtcagggccaaaagtagaccaatttttttggtaaaacatggcgttaactccatccaaacctggggctttatccccagccatttggaaaagagcatccttaacctcatcactgtggaaagtttcatcaagctattgaatagcagaatcacagagacggtgagggataaactgcaaaagatgatccacagccctagcatccgaaccttgcgaggtaaataaagtactataaaaagtaagaaaatgtttactaatatcttgttgagaatcaatacgctcaccaaaatctaggacaatctcacgaattagattattcctacgcctagaatttgctttagaatgaaaatattttgtatttttatcaccagccttaagccaatctattctagaatgctgcttccagaaaacctcttctttaaaaagaagagaatcaagttgagattgaggctctttggcctgattactattaaaattagaatgagattgacaagagtgaagagtctcaagacgatcctgtaaagacttaattcgacggctaaagttttgcttagtagagctccaagactgaacagtcttaatacaggagtcctgcttaagcaggaaggtggaaagaggatcagcattggggagattagaagaattgttcccccaaccttctttaacaacagagagaaaatcaggttcggaaaaccagaaattctcaaacataaacctctttctaccagacgccttacaaagattatcctcaagaataacttttaaagccctatggtcagaaccaaaaaaacctaagtgataaagagaaaccttaggaaacaaatctaaccaagagttattaacaatacaccaatcaagcctttcaaaagaattaccatgtttctaagtaaatttgttccctatacacggcagaggaagcagactatatttattaagaaagtgctgaaaattagtcatggcatacacagaagggttagaagcattagatctatcatttaaagtgagataatcattaaaatcaccaaatataaaccaaggcatactaggagcaatatcatacatccgatgcaatagagtccaagtatccattttattagaaacataaggagagccataaaaacaagagagattccatttagtattaatattatcattcatagatacaaaacagtcaacatgattagagaaataattattaatatatacatcaacagcaatagtccaaaaaagaagcaaacctccccctaaacctcttctaggaatttccaaaacattatcaaaagataacctagacttaaaactagaactagacccaacccctagcttagtttcaataacaaaaagtaaacaaggtttatgctgcttcactataagggaaaggtttcggaatgctcgggggctccccaaaccccgagcattccaacaaataagactcattttcccaggcggggttggtcagcaacattcgccggtacaacatgatcagaatcatcagaaagaaccataacatcagcaccattggcc

SEQ ID NO: 223327 - DNA, 1357 bp, Cannabis indica
ttccgaagatcgtcacgacatgtacattcatcatcagcagtcagctcgttccacggttcagtaagcttttattgctttagtagtttacttttatatagtatgatttaagaaaatcctattagaaagcatgttagtaacctaacagtggaataggcacatgtttttatttctaaataagcgacattagtaagtttttatttggtcacgatctgactagagtagctcttggttacgcaggctgttctaattagaatggacgccagacgaaataccaggagccagggcaattcatttggatccagtggtggtcagggagcccaaattccctaaatatccatcgctgaggtagaggttctagaggcagggcacgtggcaggggtgatactaactcgccacaggctgcccaagattaggaaaataggtttgcagcgatgcaagccaggatcaatgaacaagatgaagagattcggcggttgagacagtagggtgctcctacagtccctgctccaaaaataccagtagctcctgctcctactttgtaggcctaacctgtgcttgcactgaactgaatggaacccctgtacaaaaggttccgtaagcaagcacctccagttttcctaggaggtcctaatgtcatgaaagccgagcaatggctaactgtgatcaccagaatcttgaactttatgggcgtcaccagtaatgatagtgtggtctgtgccacttttcaatttcaagatgacgctttggtttggtgggacatggtgtctctgagtcatgatgttactacaatgacctgggaaatgttccaggaagcattcaatgccaagtattacaacgagtcagttagaagtggtaaaagaatagaattcccccagctgactcagaaggagaacatgagtgttactgaagagacgactcagtttcatcgcttgacaaggttggccttgggaattgtgccaatcaattttagtaagaaagagaagtaccttgatgggttgaatgcgaagatcagacacgacttaatgatcactaccgatgacagtaccacctatgctgatatggtgggtaaggcaatgcgagctgagggcgcagtggagtgcaccttagagtctcgagggactctagttgtttgtggggctcctactcctcctacatcaggctttagtaggggaggtagtggcttggccactgattataaaaaaaggcacctactgcaacaagtggctcaggtcagaacaaggggtgttgagggaagcagggtcgaggcaatcgtcagggtagctctcaaacccgatacacttaccagagtccccagttgttaaaagcaccatctaggggactgtaaagggcaggggtg

SEQ ID NO: 223328 - DNA, 1451 bp, Cannabis indica
aaaacattaataacaactaactaatactattaatactactactactactttttattcttataaaataatactaccacttctatactttttacgtattagttaaatagtaaaaggaagatttaattattttacttgcccctagtaattaactattataaatagtatgacttaatttactaatatatctattttgttactagcgtccatataattcttttattttggaaattaccataggttagtactattctcagaaatactaataacatattttatgcaatcattatttccacattaagataactaaactattgtaataaatatatacatataaaaataattgaatattttagttattacagaaaattaaattatatgtattgaatcttgaaagaatttgaataaaacatatttaagattagtgttccacatatattcatgctgtttttatatggtagactattgtaattacatatgttctgtgataagaaatatatgtagttctcttatatttaattggcacgaatgaagtactagctaaactataggatttggattgttgttgatcatcaccattaattatttaaataatttttttttttatagagtactatgcatattttaaataatataaataaattatgtttatgatatagtgacacactaagaaaggtactagtcgcatttgattggttgttattggtcaatatatttttttctaaaagaaaagaaatagaatttatggaagttagtttttagtgacactccatatttttagtgtttcaaattataagacactaacattgaatttttagaatcattttatgtgggtcactaaaacttatccctaaccttataatggcactcacttttgtgcgagtcactaaagagtgccactaaaagctaaatttgtagtagtgagtggaggttgtagattatattggcatatactctttctcccactcactattttattaggttaatgtgttttttttattaattctcagaattaatatacattaaccgctttaatacttatgattaatttattgcaataaaagcttcaaattataaataaatttctcgtcataattattaaatttgaattaactctttaattcataatttaaaatgattttaaattaataggttaattttaaattaccgagttaattctaaattgatctgagtcagtttatatgctttcgatttcaaaaacagtaagcacgtaaacacatgaaaaaatcataatatattatgtttttaatatgagatgcatgataataaaactatgtgagattttatgtatgacatgttattcgctaatgcgtgagcatgttattaatcaactattaatgaatatttatttaaaagcaataaataaaaataataatgaaccaagtaataattgggtattttaaattttataacctttgaaaaaattagaaaat

SEQ ID NO: 223329 - DNA, 3356 bp, Cannabis indica
aagtgacatgtggccctagtgttcgagccaaaggtaacatacataacaaaatccgtacaaccttttacaattaataaaccagtcattagagtccagtaaaccagaggattaacagaaagtaataactaatcaattctcttaacaccacccctcaaacgagagggtgacttttttactctgagtttgccaatcaagtagagaaatcttgaatgtgaaagaggtttggtcatgcaatccgctatctaatcagctgaaggaacatatctaacttcaagttctttgttcaacactttgtccatcacaaaatttatgtcgatttcaatgtgtttggtgcgagcatggtatacaggatttgaggctaatgcacttgcactcatgttatcacaccaagttatgggaggagcaggaagaggaaatctgatttcattgagtaaggactcaatccaggttatttcagcacttacatgcgcaagagctctgtattcagactctgtgcttgatcttgacacaactaactgcttctttgaagaccaagaaactagtgactctccaagatatacacagtacccactaactgaccttcagccatcaatattacttgcccagtcagcatcagaaaacccattagattcaacttgtcacagctgctgaggtgtaggccttgtgtgctggttcctttgagatatcttagaattctcttggctgcattccagtgtgagactgtgggtgctttgaggaattgacttaaagaattcacagcatagctaatatcgggtctggtgtgattcaggtactataaggctctaatgaggcttcagtagttagttgggttctccattagtttgccatctgtgagagataaagattttccagttgttataggagtaggacagggtttcaagtgctgcattttgttcttttcaagcaaatcctcaatgtactttgtctaagtgaggtaaagacctgtttcatctctggcaacttcaatgccaaggaagaagtgcaatgccccaagatccttaagggtgaacagtttgttgagtttctcaatgaaactgttcaagttgacattgttgttgccaatcacgataatgtcatcaacatagatcactaaagaataatactcccattactgatgtaaaagaataaagaagtatctggcttggagtttttgaatttccaagtcagcaatgtgtctttcaacttgtcaaaccaagctcttagagcctgtttgagcccatatagagacttaagcaatttgcatacatgatcaggccttgtagggtctacaaaaccttctggttgacacatgtacatatcttcatcaaggttcccattcagaaaagcattgtttatgtcaagttgtctgatatcccaaccttttgagtgtgtcaagtctaacttctaataatggtgtgtttgttgaatttcactctgattattgttttgtgaaggacaacatcacaaagaaggtgttgttggaaagagtgcttagagatggtctctaccagtttcccaacaaacctgcttcaaatcagggtcagtcactgttgttttctggtgtgtcaagtctgtccaaattaagtgttgttaacacagccagttttcatctttccaagaaggatttatggcatagacgtctaggccatccatccactagagtccttaaacttgtatgtgagtcaaacaatgtaaaaattttaaagaatgaaatggaaaatttctgtgaagcatgtcgatttggcaagtcacatgcattaccatttaaactgtcttcatataaagcctctaaggtgcttgagttgatacacactgatttgtggggaccagccccaattgcttcgaacacaaattttaaattttacatacactttatggatgattttagtagatgcacctggctatatccattaaaacaaaaattcgatgcattgaatgcttttatagattttaaagcctttgttgaaaaccagtttgatactaaaatcaaaagcataaagtatgattggggtagagagtatcaagtgtttgagcaattagtcagagcaaatggaattcactttcagcactcaagtcctcacacctctgcccaaaatgggagagatgaaaggaagcataggcatatagttgagatggggttaacactccttgcttaagcaagtatgccactcaagtattgggttgatggttttcaaaattctgtgtatctaattaatcgacttccacaccagtttcacacacaaacaccttcgaaactctgttctgtagaaaaccagactacaagcagctaaactttggagctgcttgctatccctgcataagaccttaccagaaccataagtttcaattccattcacttaggtgtgttaatctgggatagtaatgactcatatagaggctataaatgcttgagtacaactggaagagtatatatctctctaaaatgttgtattcaatgagagcatgttcccttttcattctggtttcttgaacactcaagctccagagaagcaacttgtcatacacaatgagtcttggtcacaacttcctaacattcatttcagacatttcagctctaatcctcaaaatacaaatgctcctgtaccatctcaagcctccacagattccactcctacaccagcatcttcaccaaatcaggtaaatccctcaaactcaccactttcaagttttgactcacttgatcatggatctatgtcacctgatggtatctctataggcatcagcagagataattttcacatatagcaggaacaccacagtgaagaattaagaaatttagatcaagaaactctgacctgttgttgaagcttcaacacatgagaatcaaaatcttactgcagtccccagacatcatatgattaccaggtccaaagcaggtatttttaaacccaaaacttacctcaatcaagctaagtgggtgcccacttttgaagagccaagaaatgtaactgaagcacttcaacacaagggttggaatggagctatgaatgaggaaatcatagccctcaagcgaaaaaaaacatggattcttgttcccaggtcagaggcaaacaacctgattggatgcaagtgggttcacagaatcaaaagaaatgcagatggttcattccagaggtacaaatcaagacttgttgctaaggggttccatcagagagctggtttggactatggagaaacatttagtcctgttgtgaaagcttctacagttagaactgttctgagtgtgtgaaatatatagtttattaccattaccaatggtgagatgttccttaccaccatagtcctgcttgtgtagcatgttgttctcatcaacagttacatgattgcttgcccca

SEQ ID NO: 223330 - DNA, 5133 bp, Cannabis indica
tgggtaataatttctaggaaacaaaaaaaataaataataataatttctaggaaacaataaaaataaataacctttcaaaagaaataataataattcaaaaataactattgtgaacttattattatgatgatgtaattatatgaaaaataataaataaataagtcataatagttggcttttggcgagaaaaaggtggattggcttagaaatggtttgaaagaatgaaaaaattacaacaaagaaaatggttgtttgttaagagaagaaagaagaagaagaagaaccagagaagaaagaagaagaagaaaaagaagaaacatagtcagaggagtcaggggcaggggaaagggctagctaaggccacgggcacgggcacgggcagaaagcacggtcacccaagcccccccatttccatttttctttctatcttttcatacaaaaaaaaaaaaagaataaagatataatttataacaaaatccttatttgatcttgtttaattcccaatacccattacccaaaacatccttaatcttatgtttatggggttttttgatcacattaaaagtgggtattggtgaataaaggagaattttgtatttattattgttattgattttaagaaaattatttataaaaattaaaatttaaataataataaaataatgagaaataataaggaacaaggttggagatgctcttcccatggtacgaatacagatatagctcctccaaagcccaatcttcatcgcctctaccaagtttggaagggtaacaatgtaatgttcttcatcttcttttaaatgtgttataaaaatctcatctttagctgtatgatgattttgttgttttgtttgtttttgagaaatgaaatgagaaatgcattcatttctcataaactttgatcatatcttattttgtcattgctttcattattgttgaattgtgtaaatgttggtaatgattgaagcatgaatttgtgtatgaggcattgagaaaaatctagtacattgttaggtagatcctcttaaatttctcataatgtttcattgaatgtatattgtaaaggtatgtgtgcctttgtttcttcttcaaaaatagttttatttcatgtttcgaattgacttgtatgtggaaaaacgagtgctagcccccccaatttgtattaatatggtgtgtttcttagcatgattcttattgcacataggttacttctaatgaatattgaatgtgcttgattgtacataacattatgctgctcaatctctacttggagattattacgcattacaactgacataacttcttttcatgctagaaattcatgtgtggtggaagattagtcttcggccacgatgctggatcattgttcttaacaacattcttaattggaggtcctgccataacattctgcataagaatgattgtgatgagcaaaggacaaaatccattctttttctaccctgtactaattggaggaattgtcctcactcttttggttggtaaattgaaactcttcttctactattcatttaaggaataattgcggcataagtatccaaaattttatatttgtaaccagtataaactcaataagtacccaatgtttgtcaaactataatttttattcagtttcgtcaatacaaactctgtttgagtttattaaatggagatttggacgtaattcataatacatgtttccgtttagaccaataatttcgaatttgggtcttacatgtttcctgtttaagacaataacagagtctgtactgacaaaacttgtgaaaaattatacttttattaatattgggtacttatgctgcttataaactcaaaactttgggtacttatgtcactatttacccttcatttaatattgacatttttttttcattagaagatgttaaaaacttgaactttagtaaagtaccacacttctattcatttaatcataatatggatgagttaaaaacttgaactttagtaaaggcatgatacttttgattgatcaatccaaagaataagaatgtaaggagaatgttgaagattatgaagcaaaactaagagtaagaaacaaacttgacttgtcaatggtttttatgcaggatttttgttttttgttcttaacatcgggtcgagatccaggaataatcccaaggaacacacggccacctgattcagaagagacatttgaaagtaccccatcaatggaatgggtgaatgctagagtctctaatctaaaaatacctcgaataaaggacatgaaagtaaacggtcaaacaataaaagtaaaattttgcgacacatgtttgctatatcgtccaccacgagcttctcattgttcaatttgcaacaactgtgttcagaagtttgatcatcactgtccatgggttggtcagtgcattggattggtaacttattttttaactcttctattttagactgttatgtttaatttagttacttctatactaaaagtgttatccttgattgactttgccatgaaactaactgcttttcttaaccaaaatcttgtcattgcagcgcaattatccttacttcataatgttcatatcaacatcaaccattatgtgcatatatgtatttgtattttcctggatcaacattcttcgagagcgatccagcatttgggttgtcatgtctcgcgatatcttatcagttatcctcatagtgtattgctttatcgccgtctggtttgttggtggacttaccgttttccatttctatcttatttgcactaatcaggtaaaccttctcctttccttattggtcatgttttgttggattgcctcattagttggagaagttcattggcaaatttacttgttttctaagaactcaacttgactgactatgcttgaagatacattttagtgtgatattggagtctgattgtttacttgtagttcaagccattcgaagttctgataacatcttttgttaaacgttctgcgaataaagttgctcatcttgttataatgttgatcatattattagtaggggatgtccctattgatgttttgcctattttgctaggcgatttccattaatgaagttgctttaatatgatagagtagactagtccaaaattttcaacagttgtcaccataggatcattcatcagcttagcctttactcattcacaagattattttgctttatctatctctaatgacattatttatttcataacgacatgatactcatagaaccatgtttttgattatgtagcttgaaaatttcggttcaaatgtactgattcggttactattcttttgcagacaacatatgagaatttcaggtatcgatatgataagaagaagaacccttttaacaaggggatatttggtaaccttaaagaagtcatgtgcactaggatcccaccttcaatgataaatttccgagcatgggcgacagaagaggatgatgcactttcagaatccgttaccacaacaagcgagagagagtttgctgactcgtcgaaagacatagaaacgggaaataaatttaacaaggatgatggtaaagaacttccatttattttgcagaatttggattacagtgctctacaggataacattaagaagaagaagttgaattcgggttctgttcctataataggtcaagaactacatccacagtggagttctgctgttggaagtagtagtagctataattacaggacaaaagaagcctccattagctaacatattgttgtttttcaagggaaaaaaaaaggtaagcttttttcttgttttctttgttcctcttttgtactttagatttatagatatttctatacttgtgagtgaacccttatctataatagctcaaatagctaggcatatggtttgttacttcgaagtctgaagttcgagtcatttctttatgagtacctacataacaattgttgtagtgtcttggtcccgagtttagtaaaatgaaagagagagcttataaaccttcataaattacaactctagtagacttttacaaagtaaaatacttgtgagtgaacccttttctctcttggatagctcaaatagtcacacatatggtttgttcctacaaagtctgaggttcgagtcctttctaagtacttacataacaattgccttagtgtcttggtccccgagtttagtaaaacataaagagagagcttatagaccttcataaatcacaaccctaatagacttctgcaaagtaaagatacttgtgagtgaacccttttctctcatggatagcccaaatagtcaggcatacggtttgttcctacaaagttcgagtttcgagttctttctgagtacctacataacaattgctttagtgtcttggtcaccaaatttagtaaactcacaaatcacaacacctaataatagacttttccaaagtaaagatctccaactcccttcgcggctaagaaaaccccctaagggaccttaagaccctataacaaaatcagaacttttatgattctttaacaagaaggcttggttaaaatggagatatctctaaaattcattgttttccttggctttttgaagacacattttgtcctaaagaaaatgaatataaactagagatgataaaacaaccttaaaccaaatctatttgcatagtgacatgcatgaaaaaatacttttagaaaaacagtgtcacgtcactgtgtgtaattaataatagttttaacacaagctttttaaaatatgtaccaaaatattaattacaatgacgtgacattgctttttaaacgagaattgttaaaaaagtactactggtgcgtagcaccttctttgatgtcatatcgctactagtgtaaatagcaaatctcatataactttcttgaaaaagatgtcatgtgagtcgggaagactactttgcaaaggaattatcaaaacgaaagttattatacacaaaacaatacttgaaaatgaattgttgatcattagtgataaattttcaactattttataattgattggtttttatatatactaataaagggttttaacagagacttagttcttcaaagaggacatgtaatgccatgttagacagattgaacaacaacaactttgatggcttgatgaattgaaactaaagaggaattaatgc

SEQ ID NO: 223331 - DNA, 2389 bp, Cannabis indica
tcaacctaaatagctcacaaaaacttgtatttcttaatttttggagctcttgtcaaaggagtttaaggatttccaattacttttggaatccttagataaaatttaaaagaagaagaagaagaagaataaataaataaaattgattttttttctacctgaagaacgcttgaaaaattaatgaagttgaaacactcaagctctcaagaaaactataggtgtggagcagtgaagaaaaaagtaggagaaaaactaaataagagttctcttatctatagtgatacaagtatcttaatcctaaagcagttgagagtcttttaaatttaaagtttaaaagaaaaagataaatgataagtaaaagataatcatcttttctcttatcctttttaaacttaaatttcaaattccatattgaaaaaggaattgaaattcaaaatttaaaatatacaacaactcctaatgcaattagaatttaagtaaatttaaagtagaaaagaaaaagataaatgacaaacaaaagataaatatcttttctcttctcgtttctacttaaaattttgaaatgcctctactaaagggaataggaactcaaaacttagaaactcacttaatcctaatgcaactaagacttatgagaattttttagttttaaaagagaaacataaaagataagtaaaaaatgataagtgtttttcctctttcctctactcataaaattttgaattcttcttccttaagggattgaaattcgaaattctaatcctatcaagaatgcttgaaatagagacaattactcaagattgtcaaatttgatgtccacttggtagttttgagagaaacagctcagttcatgtcatcaagtcaacctcacacatgtatgaagttgacttgggggcacatgttaacctaacaacttaccctagtgacgtggacatcaatatttgacatgtggcaagaaagtaaatatctcagagttaagcagtccctagtcatagcagttgacctaggagaggtcctaagccatgcgcccaggttaactttagaaactttagaatggttgtttggatcccaccaagttgcccccaactcaccatgtttcattattctgtaccataaatacataaagcatccaagtccaaggcccatgagttaaaaatacatgaaacaacaccacagaaatcaaccctggcgcctagggtcttacccatcaccgaggttgacaacccaactaaaggttaagtttccatgactgtcttagtgaagatgggtcaaactttatattgggacataaattagacatgtcacgaacatatttaaggcatcaaaatcaaattaggagcactttcatttttgagcacccgaagcactaggtgtttaagcacccagcacctaggttgactttttgttaacttggggcacttccaatcatcaaattgaagaattatcttgtgattttcttcatcttcatcaaaaacaaaggaaacaagtactttcggggaagaaacagactagcttgagagctagaaagagggcctagcacccatgttgacacttggtgcctagtcccgcacccatgttgacacttggtgctggtcccgcacccaagttgacatttttccaacctaggccaattctaaggaattttttcgagaattcttccaggcatattatttattttagttaaagattaagataaaagtgtttccaggaatcaatcaaaaccatctggtggcctgaaactcaacccagtgcccaagttgacacttggtgctgggcccaacgcccaagttgacattttgtcaacctaagctgtttccaataatattttcaaaaaagtgttttaggtatttttcccatcatcagaaataatgaagatacaagtaaactctgggagaaaataagaattccaaaggcatgaaaattgagcccggtgcattggtttcgatcacttaaatgcaaattctactccgagcattctctctaaaatggtcaaaaataggctaggagacctcgttctcaatttcaagaaccttggaagtatcaaaatgacatcccgaaagctccaaaaaaaacactcagtgcctaggttggcatgtggcctggtgcgttgagttctgcttatctgtttctaattccatctttaagcattcgtctagtttttcatagtaacttagagctatgaagtcagacaagtcaaatgacaacttcatattttcactttttcggcaaagagacttacttgcaaatcaggagttttgagtccctcgatttcgtaaaacacatctctgagaactggtgaatagctttaccataacactgaaactagctaagtgatgtcaaaatatcacttaggcaatcaaaaaatacatcccaacacattttcccactcacc

SEQ ID NO: 223332 - DNA, 2312 bp, Cannabis indica
ttttttaacttttttttctaattcatattcttaaaaaatatacctaatcaaacaaaaataaattatattttaaatattatgaggaaaaattaaaataattatataaaatttcttagaaaaattaaaaaaatatacatgagttagaaaaaattaatgaaaataaaatcaaaataagtattgaaattaacataaaataatgtgagaaaaattttttaaaaaaatattaagagtaatttttaaaaattatttaagtttatattttttttaataatagggtgtacttatcatttttgtgggtgtaaatagaactccctttttttatttatataatgttctaaacgttttaattttttttttaaaaaaaatataggaaatttatgtggtacattctttaaagaagtgtttcatctagggtggttgattgggtggtacaaaattataaattgtagcttttttttttaaatcaaattgcatgtatgttttttgtaatttttcaaactgtaattgtactgcgagatcttaaaatttcaaaaattacaccgcgaaaatataatgtagagcgatacggtttgagcagtttatactattattattatcatatattgtaataaaaaattaaaaatcagttttaacaattttaaaaaaaatatattaaagttttcatatcataacatatatattgatcattaatgtagatgacatcttagtcaagaaaagtgatgatatagatctaaatcagcttattgaagaacttagttcaacctttgctttgaaagatcttagtttggtagactacttcttgggcatacaagttactagatcctcatatggcatcttactctctcaaactaagtatcttcaagacatacttcacaaaactgatatgcaaatgttaacacacaaaacattcttatgaacaatgtcattaaactctccaattataaaagtgaatatgtcaacaatgttaccctatatatgtccattgttggatccctcactcgacattaacttgcctgttatgctaacaaagcgtgtcaatatatgcaaaacccgttgctcacacattggacgattgtgaagagaattctcaggtacaaaattgggacattagattatggtttattgctcaaacctactttagatttctctctagaagtgttttgtgatgctgattaagatccaccacataatactgtgtttattttggagaaaatcttgttgccgagaaatctcagaagcaagtaactataagcgttcattgtataattgatgagttgttgaactcaaatagtctttgattaggattatatgtcattagcaagattcaagactcattcatgtaaaagagaataatctcattatcatatattttatagatagctacaaaatttgatcaacaagttaaaaaaaatgtatctgattaaactattgctacaaatgatgggagtgactaactatagatcaaagtaatgaacactgtcatactgctactcacaaggatcaacatccaccctctacttgttcttttgcatactttatcagattgagaagatggtctaaaaaatgtcaaaacttgtaccgaaattatcttcaaaatcgcgaaacaaatgaagaaaagactgattgctagcactgcaagctctttgctttccaggctggcttgaacatctacaatcttttcgatttccgatctgtgtttgtgtaaagaaagaacaatttttttaccatgtcaaaagggtgaaaatgatatgaagagaatgagaaacaagttatttttcaaagtaaaactaacctcaacaagttgttctcttttgccaaaacttccagctgagttgacacaacagttttccatgactcaagatcagtgactgctttttcctgagttgacaatgctaaataatttaagctttcaacaaaataaaaagagtaaatactattttaaactatttgttttgcaaaaattaccaactggactctaaaaccggccttgaacttcagtggattataggaaaaaaataaattaggcccttatttagaaagaaaagtggtattttcaaaattagtaaacaaaatgtgtattttttaaagagaattttattttgggctcctaggctatttgagctttaggcacaggcctagtctacctatgcgtaagaccagacatactggaccctctgttttataaatgacaattcggaccctgttttttttaaaaaaaaaaataatacaaaatagtatcttgaactcaatattcgtcaaattaaaaaattaataataacctaacctagacttttttgcatctattcgtgcta

SEQ ID NO: 223333 - DNA, 2095 bp, Cannabis indica
ccttcaatcctcctggtgcctcgcctccacctcaacctccctctgcttggcttcttcccggaacttcgcctccgcaagggcctccctctgttgagcctcctcctagaacgctcgcctttcggcagataaatcccgaaggatcctcatggcctcgtcaatgcccaccaattcggacatgacggaaccatgatcgatgagggtcttggaaaggcggccggtcttggcagtaatctgaaaaaagaaacagaatgagatcagatgccttagacaaaatatcaaaggagggaataaactacagatactcaccacggtcatagcagaggtattgtcttggacatggtgaacggagttcaaggaagcacaagtcgcgtatctcttgggcggaaactgagtcaggtgggagacaaactggctgttcatctccgaggcgaagggagctaaggtgggcccaacaaagtggttgaacaaatccgtcagagggtccatgttcaggtcccacagatttcggaaggcgtcctcgtgaagagtgttctgctgctcctcccgtagaatcttcttttattcctcaacctcaacatgcccccgactgtactcgtcaagggcgtagttgtactttgccactcggagattttgcctctcctcatccatgggaaccggggtcagcacaatgacgtgcggcaccgtgtactcctccgcctcggaaggaatcttggagtcgttgctcaccgccggagtgtcccccctcagagtccgcttagaagactcagccacaaccatctatcccttttgcttgcgctcaagggcggccgcatcctctacctcaccttcctcaacctccccctcctcgtctatcaagacgatcgtgcctaaaggggcactggatgaggaccccccgggagtcaccaaccaggatggagccagaggcagagaggcgtcggggctgtacgcctcggcaagagtggctaggagatcttccataggcttggctacggcgacaaagaaataagccaagtgttaaaataatcacgaaaaaggcgtgcgcccaacaagaaagcaataaaactaatcttaccctgattccctaattcagccctagcgaagtctaggactacaatgctggcttcatcatccccaagaaagctgtccgaggggaggaataagctggaagataaattggctaaatggtccaggggaataggcgccggaggtccagagcccatccgggaccgacccaagaaatgacacaagtgggaaaaataatattccttggcatgattcccccaccgggtggagggcattctaaacctataaaggcgctcatcaaaccctataggcctacgttgggtatactctcggacaggaggaacatacttaattattaaaggaggcttacccgaacctgaactgctggcgtcgggagcaccagagttgggaactgggacaacaggcttgggtttgaggggccttcactccggaggagcttccagacgaagggtcctcccggtagccgtctgggccttaatgtaagccagcttcttttcccacttaaagaggtacttctggtaccggtcctccgccaaggcaataatgtctacccggagcgccctttctgcagccggagtcctcacgttcgggcagatgaccttagaaagattgaagtcatccactgactgattcttagaaatcagcttggccttttgacagttctccgtcgtaaccaagtccccaacattgagggccttcttatcatacgtgcagaaagtcttggcccgctggaggaatacttgggtaggcgcggtccgcatgtaaggagggatcctaacgccctccatgagaagctccgggcggtccatggcctggaaaccggaggaaaagaagactgggccctcgttcaaaggatgggcccggaggccataaaatccgtctttaaatttgtcacccttcttggtgatagaaacaagttcgtaaaaatacaaaatttcagccgggctgggcgaaccccaactccgggcggcatacaaaataaaaaggcctgaaagcaggcggtaagcttgacgaattagttggtacggcgcaagtgttggaaatttatttt

SEQ ID NO: 223334 - DNA, 1133 bp, Cannabis indica
tctaattaatctcttaattaaactcacatgtaatcagctataagcaataatttaagtgtcacataggttatgcaaatactctcgtttcacatagaaccttgattatccaattttagcattctcaattctcacttttcagattttgaattgagatcatagaacatgtagaacgtgatcaagcttacacatggaattaaacacaaatatagataatttcacaatcaagattgaaggaatgacaattatcattaactaggcaaaacgttaaacaacattcatcatcctccctaaataggaatttagttcataaaaataaaataaaaatccatgattaattctgaaacaaaaataggcataaaagaaaaatagagagtgaaagaaagaaactagatggtgatttccctttgggtctttaagatcgcttcctctcctccttcattcacttttcgggccgatttctgatgcctttggcaatctgagttgagtcccttatataggaattagggttatgcctccaattggaaaaagatcagaatcaggtcaaaaaatctcattttccgtgcctggtcgtgacccacttaaaggctgttcgcgaccacaggcaaaactcgaatatcagagtttctgccaaaatcctctagttgcgaccatagtcgcgaccagataaaagggtcgcgactaggccatacgttggtcgcgactactgacccaattttaatagcttcggccgattttccaccagtttgtcccgtctttctctcaattgattgaatttaaactcaaatgcaccaggaacctgaaacaaaaaaaaaatcaagcgtaaaaccgctccaaaagacaacaatatttgagaaaaagcttcttgcgacccaaaacttaggctaaaaatagcctaacaaaacttacaaaaatttcgaacttgaaaactattactgctattttttaaggtttgagatttatctacatcaaagtaaactttttgaaaatttttgctacaatttttcaaataattaataataagaatatcctttaaaaaaaattataagaaaaagtaatgaaaaactacgttaactatgtatatctattctatataaagtgtgcctatataaccgaattcttggtttatgagaaat

SEQ ID NO: 223335 - DNA, 1032 bp, Cannabis indica
aaagagatggaggcattaaggggtcaccatgcagagattaagatcgtagtcggcacgccaccgtgctgatacgaagagcctaccaaactgtaggtcagcaattgccgaacgtcattcctatgggagaaatgaaagaagatccaacgatgaatacttcctagacttctaatagtcagtcgcccaatccctggtcacgagttccgctcgtgggcccagcggtaggcgagcagaccttgtccgattgttcatcaggaggagtcatacctgatggctccaaccagatcattggtaccattctacccgtcaaccaagcaaatcaatcgctaaggcaaccaggcacttctgtgacctaaggaatgatctaaatagaaggaggggaacaaatgatcattatgttacggcagttgtgcagcccggagcccgtactcaaatgcccgctcagaaagatgttgacgtaatcctagttgaccagaatgtcgagcaggtcagcccagccctataggctcagatagacgaactgaaaaatatgtttcacggcatggctggataaagaaataatgatcttgagttagacagagcacgcggaactcctttctcgccggagatcaatctcctgccactgccccacaagtttaaaatgtcgacgtggaaaatgtacacagggagagaatatcccctttcccatctcaagtactttgaaatgcaaatggatttgtaaggggtacgatgagatgtatgttacagaatcttacctgccactctgtcggaagccgctcaccaatggtatttcaagttggctcctggaaagtttagctcatggaaaaccttctcttcgtaatcccttgcgcaattctcctcctcgcgccagctaccattacatttgggagacttggtcgaagttaagcaacgaccaggcaagccactccgggaatacattatcagattaatgacgtaggcaaccaaagtttcacgggtaacagaggatggaaagttatccgcgatactggggggcatcaaagtcctcggtgaact

SEQ ID NO: 223336 - DNA, 3481 bp, Cannabis indica
taggcccaattagatttgggcttattcaatgaataacaattgtttattttaaggttaaattcctctcttttgggccttgtgtgagagttgggggccaatagaagtgggtacgacatactgaacccagctccccctcacatgaactaccccaattgtgaaggcccatttgccttatttaaataattgtaaatctaggtcctggtaaaataattccaacagtttgggtcttgggttggcgggattctatgatagaagctacgccaatttccttcccaggttcatctgcaaccatgatagatcactcacaagatctataccctcaaagatcacttctaaggatcgcccatggcaagctacggggttcccctagttttgattggttagaagctcctccaccttagaatccatcgtttccggttccaattgagacttgaagtcttttggaacaaatggaaaattgttggtgcatctaggtattataagtttggaaggatgaaattctaaactaagaagggacattctagcaggaaaaggatgatccattctaaaaatggacagaggtttgtgaaaaaatgagaagcttgagccacccttttatacacaaagtccagtgacaagaaagctaagtattgagaaatccgacggttggcagaagagcagaatatgaagagatgattcataatgaccctcgaaaccgtacaaccgccagaatcaaaggatgtgttttttccaagaagagatcttgacaaaaatacccttgtaattatttacaaagttatttttaattaaaaaggtattttttaagggtcaattgttataactgaaattcggctatactccagaagctgacatgtgtattatagaaggaatatgaatcaactcaaatgatataataatgttatatcattaaatgcatattaaataacttgttattactatataaaggcttgatagataatattcaaaactcattgactatataatcttaagcgagacaaggataataactattaagctgagattaacgagacatatgcctgcctcagaatatataaacaagaaagggatattcatccatttcagcagaataaatgtaacagcataactgcctcgcataacacatagcgagaagatcatctcgcactattaattccaataaaggaatatgacgagacgaactacttcccaacacttagcattttttcttattaagatagacaaggaggataactcgtatcaagcgagatacaaccttccaagtcaacaatgactgtctaaaggataagagtaaagaacagttgagtagttattagatattattccacatgtgattaaatgaaacatggggattgtccacgtttcatgaaccgttgtatttgaatcaatcctaaaaaagggtaactgccaacctatattcctagaaaaggggcaaattccatgggaaaggggatgacaaatttgagaaagaaaatactattattcaaattctaatattgtattttgtactcaataaatatccccaataataaggactcgtggagtatgtagattttaactacaaaaccacgtaaaaatatctagtgttatctaatcatttattgcttatatatatttctatagaaaatctattacgtaaaggatattttggttaacgaaaaatctgcgttaacactggtaattcacctaaggtgacatttttcaatggaccacctttggttaacctgtgaagtctatcatagcctatatgacctaaacgtaagtgccacagatatgttttgtcttcattatcgatcttttgctttttgtggtttctaggtttagctatcttaaactgttcattattaagcgcaaatggttcatttggtctaagaacataaagcccttattccatagtagcaacacaaatttgaatatcattgcgaaaaataatagaattaaaactcaaaaaattcattttatattgttggaattgtaaacatgaaatagaaatcaagttatcgctgaaatttggaataaacaaaacattgtctaagtttaaagttttgttctaaaacttttgttttgctttttccctagctctaactgataccatttcgccattataccaactttaactttcaactcttcagattttaaataactccaatgtttaagaagatgtaatgaacaacagacatggttagtagatcgagaatcaacaatccaaatggatttttcattctctaaaacacatgattcaaaaactgaagcattaccattgttcttagtgttgagaagtctgggacattttgatttaaaatgacccttctgttctcaatgataacattgaataatatgtctgcttaacagttcttggattgttcttattgttggttcaatctgttgtgaaagataatctaaggaagtggaataactttctctattcttctcaactaagcctgaagtaataggattgttggaggaatcattctcaatatcttcaacttttctcttgcccttttctgcaactctagagcgacccctccttgcaagtgacaatgtccgttcataagcacgcattttagcttctagcttatccatgtcgaacgagtgaaagttgtttatcttgtaagatacaataattttgttatactcaggtgaaaggctgttgagaatgaactgaacccattgctcttttgatagaacaattcccagcaagttttcttctgaaactttaagttcatcaaaagaaagtgtgaagtgatgctttaaccaggagacatcttcacacttgagagttcatttgcaaaggcatataataaatgaggattggggtgtgggttgttcattttgacactacaaatatcaataaacagaaatgaattacttggttcaaataaactcatacacaaatttagaaaataacaagtaaggaaacatgtttgcaaaaataccaaaataaaatacattcaattatttttcaaggtttccaacaaactgatacagtgtcctgtttagacgagagtcaaagatatcattcattgaatagggtagtcaactcatctaaaatggacaccattgtagcatccttttattcgatcaaaataagaatcaaacgttgtcccagtaggcgagagtctaagttattctttttttatgagtttctactattatttcatactttgtaaatttatttgtaagtagtcaccgtaagggagagtgtaatagaaacaaatacttacaaaatacttatcatacgagatcttacggtgttaatgcttcaatggataatcatccacaagggcgacgaagtctagcgtctcgaggttacattaaaacaattaaccatgtaagactaacaatggagatcaaatgtccttttgagattaaagctcattattaaaaataatgtatttttgattaatcatttattttaatctttatattttaatatttaaaattacttaatttaagttagtctaaaattaattaaaaaaactaa

SEQ ID NO: 223337 - DNA, 1398 bp, Cannabis indica
acaaagtatctccatttctctctcaaaaatatgtactaggatcaaacttacttcttttcaaacttatcttggtcacataatcatcaaatctcctcttccactgtcttagagattgttttaagccatatagagatttccgtaacaagcacacccagtgttccttcccgtatccttcaaatattttaggctatttcattagaattttttcatccagatgtccatacagaaagactataacaccctactagcttaggcatgttattgtaattttaacttaattgtgtagctcgttgctaatcaatgagtttattgaaaatcatgaataattaaatctttatttaaatacttataaataccaaaataatggacatatatataacatgaatcccgtgtacaaaacatttacaactgattcaaagttcgtaatacaaaagttgtcgccatcgactatacaaaacataactagctgtccaaagatcatatgctcaaggcctaaccatcttgaaatgtacaataatcctcatccgctcacactcatggcagctcaaccttagcctagcccttacctacacatgtaaacaatatcgatgagtcgacagactcagtaagaaaagtatatataatcaataacataactataacccggattataatcacgcacttatacacccaatcataatcctatccccgtgtccaacacgatactaagtctagaacattcgtacgataatactatcaaccataatatcagcctatactcagtacgctagacaaactttagccgtactgatgtgatagcatcgatcagtatctgagccaaacatacatctattggtatccaatatgactgtacgtatagtgataccactatcgatgtaatctaacaagcttaataaacgtgtacactaaatatataaacacgtatgcttattattatactaatcttacctcactttcgaattcaggtgtgtcagccaacctgagtggaaccgctgcttgacaatttataaaatttctcggatattacatactcaaaaaagaacaaaaaaaattataaaaatataattctacaaatatttacaatatttttacaaatttaaagtttttactcaaaaaaatagggatgattgtttttttatatatattttgtattgtttgtattgacatttttgctttacactatgctacttttacattgtttttcatgaaaatataaattcaaaaaataatcgaaaaaaaatccaaaaccgttaccatgtaaacatttcatgtgtcattttaaataacttttgtatataattttttaactaagcacaactagaaagtccaaggagtagagatgaaaatcggtggaagtgggtaatgtacctcctagcaccatcctcgtttcttaattta

SEQ ID NO: 223338 - DNA, 1388 bp, Cannabis indica
taatactgaagagagctgtagctagaaattacaaggtctaggcctgtaatttgtatggtattatctcaagtgtgaatacgactaaaagaagagtaggtcattacccgttcatcaagggagtcaaacccctataaattcgtgtattatttttactatttattatttttatttacacatggtgataatcaaatattaataaggctccgctatcagttgagcaaattccgagtcaatattttggtgcttcaataagagccttttttgagttttttcatctcattcttgtcaataaccttggttctaactagaaaaactgctacctcgaatcctcctcaagatctcatgatggtagatccctatgatcgtgttcctcccacactactacaaaagtcaaaattcgcgacggtcctaacaatactttttttggggggatcgtcgctaaaaaagttaagtaactgtttaaaactgtcggaaaaattagtattcctgacggtcctctctctttctctctcctcgagctcggtataaatatatttatttatttatattatttttttatttattatatatattaattttgttgctgtataaatttaatgtattttaaagttagttgttattataataaaattaagtagttgttttattttaatttaggtaaaattataaaactaatgtaggaaaaatgggataaaattaagcagaaaaatctgtatttttttcttttttttttacattcccgacgatttttaaccgtcaggaagtccacattagtgacggttttaaccatcatctattgtgcccattttacgacggccgtataggcaacggttatagaaaccgacaggaatactttaaacgactgtttaaaaatgtcgagaaaaactatttttgtagtagtgcctccacaaaaggtcctactaatccggctaatactttcaatcctaccaacttcactaatcttacaaatcctgtcaatcctgctaatcttgttgaacccaccattcatccaagattagaacaacccacatgatcttgtatagaagagcatatcaacatggagcaacctgctcataatactaatgagaatgccttgtgagtttatgcaggagaaactgggctaggagttggccaatttgctattggtaaaccttgcttggaccttggggataatgctgagctggttaggctcaggaaagctgtaagccaggtcagttaaataggataacaagaaacacatgttgttgtatgcaatgccttcactcagtagagacatgaattcctaaagtggatggatgattaggaggcgaccctctaggcccaccatgcggagtcgaaccactgtaatcaggaggccaatgaactaataaggcagttcaatgagagaa

SEQ ID NO: 223339 - DNA, 2546 bp, Cannabis indica
aacgccgagttccaaaataccggacaccggaaatgcaaaatatgcaagctactgaataacataaataacagtatcataaattatttaaatagctataaataatttcatgattaaacataaacaactgataatttccaaattaactaagcgggctttacaactattccccccttaacagtatcataaattatttaaatagctataaataatttcatgattaaacagactcaactgattaggtatactcctggcgacatactgggcataggtatgggcatcagtgacatataagtaccaagcataggtacagactcacattattaggtgatgcgatactcctggcgacgtgtagatacgggcgtcagtgatatgaaatttccaggttagggcataaaatgaaaccattgtagggtttcctcctggcaacgtgtagatacaacatcagtgttatgaaaattgacaagttatggcatagaatgaaatcgttgtagggtttcctcctagtgacgtatagatacggcgtcagtgatatgataattgccaggttatggcatagaatgaaaccgttgtagggttttctcctaacgacgtgtagatacaggtctcaatgacacatgataagtaccaagcgtaggtacgggctagtctaattaggcgatgtgatatattggtgcaggttgtggcacgggctcacctgattaggtgatgcaattatattatatatgggtgcaagtttttggcatgggctcacctggttaggcgatgcagttatgcgatatatggtgctaggctatgacaggggcttgcctgattaagcaatgcaatacaggattatcagatcatagtatcaacttgcctgattaggcgatgtgatgtaatgaaaatggttactttatgaagtaacatatatgtaatttatatttttaaattaatatgattcctattattggtataattgttttgtattactaaatatctgtaaactgatgcttattcctggcagatgccagtagtgatttgaatttcatcatatgaacaatgcataatggtttgattctaattatttacaaatgataatattcgaataataaattatatgattattattattgcttttcttgttgagtccttgtgactcacgggtgctatgtggtgcagctaagggcaaggaaaagttagagctgccacgaggtgattgccttcttcaccaatgtaaatattgacccgatcagcctatgtgccgagttacccggagttattttggactggttgtaactgttgtattttgaattgatactgtctatagtcttttaggtaaattataacagggatccccggaacacctttttattgttgttataatgttcgtttttagtctttcattttagtcaagtttttaatattctcacaacttttaataattaattgatatattagtattaatctagtatatgaaatcacacacgttgtgtccctatggaatagggcgttacaacttggtattagagcagccatggttttaaaggtcgtgaagacttgtcaaatatgtacatttgctgtgaagatatgtcgaatcatggcatcataagtgtttatgttatttgctattgccttacctgcttagataattatagtgtttgatgggaagaagtaacttactgattatccataataagaatatgtgtatggtatatgcatattgatattgatatttgtttaagttttaagtgtttggaagatatggattaaatgtgggataaattatgcagccaggcaatcaaatagtccagttagtgagctgtctgggctcaggattgatagtaagaaagaaaatcctccaccccctcaggactgggaacaaatggttgttgccatgcaagagacaattaggcagcaaggggagcagattcgagatctgagagaacaacaggtttctcttatgtctagtggtcaaggttagaacaagaaatggcgaccttatcctaagagtccaagatataaaaagcgccatttgggccaatgtagagccagatctttttttcattgtagagtagtaggtcatctgaggaaagtctgcccgcaatggagaaagactgtgttggggttttatgccctaaataaaacccatttcaatctaatctgatttggtatcaatgaaagattagaagtcatttgtgtttacatgtagttttcatgtttatggtttaaaatatacaaaatctattaagtccagagcatatagtcattcacaattacagtgatgtcaacacagtggaatgtgattgtgattatatgcttcaaaagacaaagtccctgattcatcagtgcactggatttacactgatgtgataatcagcgatgaagtgtacttgcaccttggataagtgttatgttctctaccagaacattggcaaagtatgctagtttcggatgtatggagtatacattggactgggaccgatattgatcttggtaaaagatattataatcttaccattgtatctttctaagtcaatataacttgttgatcttagatcaaaagatct

SEQ ID NO: 223340 - DNA, 3545 bp, Cannabis indica
gattgctgaagaagtgcattccacatattcatgctcaatcacaattccctcagcaaattcacttggattcaatatctaatcaaattttgaattgcattcaaattagttaccaaacacaaatattgagttagactttaatttcaaaattatttaatcaaaatatttagaataattagtattttttatatctgaactttttacactattaaattgtgtctctcaatatatacaatttgtaactaataccactaaaaatataatgtttacaatattaacgtgactctttcatcatattttattcaattttttcatgaaaccagtgatatggtgaattgtaaaaagattgaaaagtatataatttgcacccattcattaactattcttcacatcgtcacttatgatcacgaaattattgtatagatcatgtgatgaaagaatcattttaatgtgaaagttatatttcgtagagtactatttacacagttgatcttaaaagatatataacttaataatataaaaagttcaagaaacaaaaatactaattatatattatttatcgtataataaaagtcaattctatacctccatccactcttgtcctattgctcgctcccaaacagttaaaccaccatttttcctctagcaagcaagtaaattatgttaattatataattttagggtttcgacggtacactactaaaaattagatgtatcgatacactcattaatttgattcatttttttttcaatattttatgaaaattataagctaaagaaaacaaatatatatcattgttatgaaaaattattattacctgtaaagagagtaaaagattaacagaatcataaagacgctcaagttcaattttctcaccaacaatttttgttggtaacaatgagagagaaagacaacactgtaaatatacatataaagtagagttaggaattgaggcatagagatatatatgtcaaaaataaaaatatcaaattaattatggaaacagtattattaattaatgatacttaaattatgatttaaataccaaatttacctttaaattttctgcagtggaatcagatacttgccaaccttgatcttgatcggaaaatgtccatgatcctttagaaatgtgacgatacatgcttttgaagttaccagaaggattatcttttacctttaaaattttatgtaaattgtagtaaataatacaactccgaagaatgaggtgaatgaggttttatctcaaaattaattaaaaataatgaaatagttcattcatcttatatatgacattttatttccacacattagtaatatgagaccaactctaataggactaataacaatattgacacgtaaaaaggtattagacactaatttttaattgtatttatatatgtacctgggaatttttaatgaagtgatgacctcttgcaagtgttggtccaatttcatcaacaagatcactatcaagcaatgcctgaatggcaaaactagtgtcccacgattgactaccaaatgtctgaaaaatccatggtaaatattaattaatagacaatttatttgtagagtaatattattagctacatacccatgcaaattacatatatacacttaattattacaatgtatattaaatattaaccaatttataataaagttacctgcattttcattccatcctcagcaatccacataaaatctgggattctagctaggtgtttcttaaaatagtccccatttggatcttctacccaacaagcaagcatacacaacacctatatatatatatatatgtatatatattgaaatccaatgttagcatataataaactaagatagtgtatgcattaaaaaagaaacttagatagtgtaactatttagttagttacattatcatagtagtttatatttttaaaatggtacaaataaaatctcgaacttaattttttgtcaaattaaaacataataatataaccacgagcatttgttcgtacatatattaaaaaaaattaataaaaattgagttcagaatattattttatattttgaaaaacatagagttcgaatttttatttaacaaaacagatgattcaatttgtatctttcgcgaaatacaatcttcaaaatagtatttatcctatataatatatatgtatatcaccttttgtacacatccgagtgtgatatatcgactattttcatcctcgtaatgaatgtgatccatagttttttgaagggctctttctctaatcaatttgtttaagggccaacgagtaacaagagactcaaaaaatatatagagaccatcccaaatcaaatcttgtacccaaggatgtgaatagtatacatcctcctatatgtataacaaaatacacccaaattaattatttaaacatgtacaaaaaaattctataaatacatagatttttgaaactaggctacaatttttgtaatgttttttttaaaattttattaccttggcacaaaaatggcaaacttttctccaatttatttcatcataaggttgagtatgaagttcttctctcaattgcaaaataagaggtgtgattggacccacaaatctttttccatataagtatgacataggcatataaaccattcgagaattacaccacaatttagctgcactagtttaaaaatacagaattttattgtataacattttagaattttattgtgaattattctatattatacatgacataataaaattatatgcaaacctgggtgtatgggaagaaagggaggaagaatccaaaattcaggaggcattggattgcatccaacccaatcgaaaagaccaagtatctacaaataaaatgatgaagagaaaaagtgatggaaagcatagtttattgttaattataaagtaaaattaataatcaactgtgtatatatattttagactaatttatagcgtaaataattaagtttaactcttatagttgcagataaatagctaagcttaattttttgcgataatattacttgttgagagtaaaaatgtgacgagactgccaacaactgtgagtaaccttttcacgttgcggttgtggagacaatagacggtggtttgagcgggaattgagtgagaagtttggaattgagcttgtgttagggtgtattctctgtagagagttctagatccattctcaagttgcttacgtacccttatataagggatcaaaccttattgtagttcagttgaagggtagaatagtcatcatgctccatgattcaaatgtgttaacctatcgttgtgggttgtacacccactttctcgcagataccgatccatgacctagaatagtaggtggttgtaactgtgacagtcagtagtcccgtgatccgtaaggggaaatactgggtaagctgtgcaatcccacatcgcctgggaaaggtcaagtgggatgattctgagagtgtgtaggtatgggactacacagttgaaagagggcttaaatggattgattggtactacctatataaccaaggtgcatcttgtttttcggtagcccat

SEQ ID NO: 223341 - DNA, 1733 bp, Cannabis indica
tatttaggtcataaaacccaacagcctgggcggaaccatccagcttgtcctttattcctatggcaaaccctttgtttttacccaatgtcacgattgcttttgaaccaggtgactttgattttcaaattaagcctcccaaaccacgtacctcaaagaactccccaggaccccaatgtcacctttgaagcttagtttagagaatttaacgtgcggtctatctcaggctacacgggtgagatgctgaagacctggggaatcgagcttgggcaatcatgccaagttagattagtacgggagggtgagtttagttgtcacccccctatgcgctttgcaatcagtaacccggggactagtacgagtggctcaactagtataggcgcctggagccttgagcatatcagtgcaggggccacgcttcttcttcgagactacctcaaggactatataaatcacattggagtttccccattctagttgaatcccatctcttacaggatcctctctagtttggaagtcttatacaaaattctgaattgggggtgtcccacaccagtggagattgagtatctttactcagttaaggccatttcgtcaaggaagaacatcgcaggggactttttctatctcggtactcatcctagtgagcctaaaattattgtagacttgccaaacaaagtatccttcaagaacaacttcttctggacgtctggtctttccccatcggcacaaccacgttttgcaaacttcgtaagtgatttttctcttcttgctcatttacatcaatctttgttttacaagtttattaccaatgttttgttcatttggatagctctcctgacgaggcctactcctatccccgagatggttagtaggcacaggtgcctgttaactcttccctacggtcttcggtcatgcaacttcctttttgagcgaggctaacctacgatcggtgggcattctcactgataaggaatacacttatgattaaaagattccctagtattcttcttggtagcaaataactacttcgcccgaggaccaggtcaggtatcgcttcgctcaagcacaataactttaaaatactgccccttgggaatccagtgaagaagcatcacgaggtaatcaatgttgttggtctcctactatacttaaggcttagcgtaatacattagtcaccttccaagaatcccatcttaattttaatatttggaattcccttcttgtggaccgcattgcccataagtttgatagttggtatcctagatttcacgtcgaggttaactgtcccgagtcatacttcgatatagctgagcaatacggtactatggaagataaggcaggtcacgtagatgcgagttgggatttagaaccgatcgagccttttgatatattcaaaattacagggtgtagggattttagtggatattatggtccctctaccccatcatttagtgataacttgccttctagtgactttggtaaatcccttaggtggaaaattatattcttccctttttcatcggcctttttaaaactgtaccgccttatctagttttccagacataggttatgaagatatcatggaccggaaggggaagaaaaggacaaccaaccctggggtccctactgtcgccgaagcgattcctcctaagaggcaaaggaaaaccaccgcccataagaagaaatcattggccgagcccatcgatctcaaggtttgtgacaacgagatccaa

SEQ ID NO: 223342 - DNA, 2660 bp, Cannabis indica
aaaattaatatcatatgtatgctcatatcatttttacactattatatatttaatgataaacaaataaaaagaaaaacttaaaaaaaaataagcaagtaaaattcattaaaaaaatataggagaaaaaaagggtgaaaatggtatcttaaaaaaacaaatagagtaaaaaaacatgagagcctttttaagaaaatggaaaaaaaaaaagttgaaagattgattaaaaaaaatcattaaaaggacaaaaatattaaaaattggtaaaaataaaaacaaaacacataactccaaaaatagcaaataaaaaaaattaaattactaagataatcttattaagtttgagaaatatatataaaaaaaaagagcaagaattgtagaaaataaatataaaatttagagtcatcatattttaaattacaaaatatttttatgtatgtttactgaacattttggaaattaaatatttttacgtggttcaggcgttaactatccttagtccacgagtccattttattaggctcattggccggcaactgtttaaacaagtagagatacaatggactaaagctcccttccaccgtgttcctcttgaagaagtgaaagcttagtagaaatattttagagttaattataggattacagaaatgtgtttgcctgggacgatgaagaatgagtcccctgtctcgaaaaagggtcccccccttgtgcttttttgggttatttataggccaacttctgtacctgggcagccttggatggatcatcatagtggtaaaatccgactattggattggtaggtggtgtacttcccatatggcatttaagggtgttaggttgtactggttgtacaggctgggcctcggacgcgtgtcgcctcagggttgttcctattgaatttctcttatccctaatcgttggatcatttagcctgacatacaaggacatgcatgctctgtacgatagcgtgtcgtgggagacaacctctgacattgtatatgaaaaagcctggtcattagatatgtagcttgacacacgtgggtagagcctccgcgggccaaaggcgtaccctggactgatgcattctcgaagtgttttggcctttctgggaaaatccatattcctcgcggtaatagatgtcttttgttcttagaacgaagggagactgtggttcgcggttaccttccgcgttgctagtagtcaggaaactccttatcacggaacctcttctcgcgaagctgatgcccttgtcttcccagagcatcaatttgaggaagttggctagctggtgacacattatccatccttgataaaaatccatgtgtcatccttgcaaaagtgcgaataacatttacccccaagcttttggggcgtactatggtctgggaacttgcagtatcttttcttgagagattttgtgcacgtgggacttatgacaaactttttattacacaacgtccctagctgccaatctaaagtgtcattattcagaaggcataatttcttcttctttcttgtcatgactttcaatgctgacttttaggttttgcgtgcgtgctaggcgcgtgtcccgtaggatgtctaaaatgatggtgattggatctgcgtaatcttcgaatttgctgagcattttcacaatgcatgcaatgatggaagccgactgctgggaggtgatataccttctcagcttccccctgatccaactatcagatgtctattaggcaagcgagttgaaccgtctgcttctcgtggaaggtgcctcttcctggtacccattaaataccctcagcaaccattccactttttcatttttcttgcctatcaaactagagttctttagttccaagtcttcccctatcttgtgagactttactgtcattacaatcagacattgattcaaccggcaaggacgttgcaccaagattaccagccccatttttctcttgacaactggtatgccttcttctccgtttacttattgtaaagttttgaggcaattgtaagggtgcattttctctaaaaatatcagttctgcgtctgtcatttttaagaattctggggtcatgcaatgagctttttttgctattgtgtcgacttttggtaggtataccaagtctgcaatggagaggaattgttcctctgaagtagcaggcgactgttcttcttctagaaaaaagcagaggctcgagacacctatttttggagtgggggcccacccccagtaccatgatcctttattgaggttgggccagcttcggtcttctcacccttcagctctgctaaggatacctccggtggggtttaccttccccaggaaggttgttcctttcgatcccctcattatgcagaaggagaaggaagtaaacaaggccctaaaggggcacctggaggcagaaaggctgcaagtctgctggagggcagccgtgctgtcagcggttcgcaaggccaaaatctcggacattatgcacgctttgccccctgcggggcatactaaggaagttaaggccttggagaagcagctgacatacaaggtggggaaagaatctgtcccctttgtcgctgagcttctgaactaggtggccgggagcgcctctgaactagccatggagacctaggcttcctgtagtagcgtggatgctttcgcgttggcccactctgccaag

SEQ ID NO: 223343 - DNA, 1000 bp, Cannabis indica
tataggcacgatacccgaggtgagcttggccaaatggttaaactttattgtatactgagtaactgacataccctctgtctccaccaacttagtgaattctttgggattagcactgcggactgcttcattataatacttggcgttgaataactatcagaagtcttcacagatcattacagtgacgtcctgggtgagggacaccaattcccaccacactaaggcatcttcctagaaaggaaaagtggcgtaggtcacccgatcattaccaaatacccctataaagttcaaaatttgcaatatgacagtgagccattgcacaaccttcatcacatcaggacctccgagaaacacttgaggtgcttgcttacgaaacctcttgtataacgactctatacggttaccagcaacaacttgttctgctggcaccgatggaactacaacagcctgagcttgtggtggaggcactgcaggatgaccctatggccttaatctcagaatttcttcttcttgttggcaaatttgatcttgcatctccgcaaacctctgttaccaatctggaggagcttttggtggattcacaggatgaccaccctgaattctaccacgacctcagccgcaacctcagggattctggggaatttgattttcctgaccgcctccggtctgaacactattaccctaaattctcgtattttgttgggtgtccatttaataggacttaacctgcgaacccataagccattcaagttagacaacgatcatggacacttaatactgctcttatggattttaaggcaacgcattaaagtaaacaactataaactaatatgcttcctaacatgctttaataatcacatataatactaaagaagtacgggcttactaaaacgtgagacaagctttctctaatgaagattgtacatgtcttggcgagctttggtagacaaacctggccgatctgataccaaaattgtaacgccctaatgctaaggcacgctac

SEQ ID NO: 223344 - DNA, 4201 bp, Cannabis indica
cctaatcaggtgagcccgtaccaaaacttgcactcatatattacataattgcatcacctaatcaggtgagctcgtgccacaacatgataccaatacatcacatcatctaatcagacgagctcgtacctacggctggtacttatcatatgtcactaacacccgtacctacgcttgatacgtcaccaggaagaaacacaataatggtttcgatctatgccttaataagggtttttcatatcactgacgcccgtacctacgctcgatacgtcactaggaaaatcacatcacctaatcaggtgagcccgtacctacgctcaatactcatcatatatcactgacgcccgtacctacgactggtattccaccacctaatcaggtgaacccatatatcagatgcataatatcatcacattattaatactcaaccaaccaatattttcattatataacgatattaactatataatattaataaattcataacaattctaattgtattacacaacgtactatgtagtacaatatacttttttttactcttaatccaggttcatacatttcggccaactcaagtggagaactatccctgatgatctcggccctatgccatagcaacagtaaaccaataagtgtttatcccaaaacactgcttaatattcacataagataatttagggttttctaccaaatctcgcaatataaatacactaaaataaaacttatattttgactctaaatcatacaccatattgtagagctcattgcaagcttcgaaacggtatatagaatgtccaaaacagacacccaagtcaaaagttttgataaaaatacgatttctgatctcctaggaatttctaaaaactatgaaatacgaaaatattaatttttgcactcaccgaaaaactaccaaagcttaaccaaatcactccaaacttcacagggcacataaatacaataaatattaccattcttacgtaacagaaattacaatcgagcccttaagtgaaaaactccattaacgttcgaactaagctttaaaaagttccaaactcgattcctaacccaaaatcacctcaatttcagcaagaaaacattgaaactggtcacatgttacccgagaacaatcctataaggtcagaaccttcataactattctaattcacaaaacccctatatgaatccaattattttgaaacttaaaacgaaataaaaccataccttaaactctccttcttcaaggatttcctatcttactactactggagcttagatcgctaagtttcgaattaaaaattgaagaaaatacatataggaggagaatgttttattgagaagcaactagagtgttacacttatgtataagagccatcattccgtgggtataagggtccaatggaggcttgaagtgaggacattatcagggtaatgtataaaagaacgtcagggagagtagtggtatcattaaggtaaagaagattacctggattacttatagtgatacggtaatgatggaaagtgcttatataattgactggatagtcaatatggtatatacggataccactgaattaaacaatgatggaagtgtatactcacctaggatggggaaaaacttacaaattgagatacaataatttaatggacatgtattcgagtaattggtgaatgttagatcacaaaataggttgtttattaaataatggactacataattgagggtaaaatagattttagagtgattaaccaagtatgaaaataaggatgaatgcaagaaagcaatataatagcatacgaatcatggagtgaaacattaatggtaatgatgggaaaagtgtacgaaagtcttaaatgttgatgaattagtatcatcaacaggagacacactataagttggcatatggtagttcatgccaaggtattgtcagtaaaacagagaatatacttgaggtacatatattcatggatgtgtttggaaagatttttaagacttctacaaaatactgaaatgaactctgagatcaaagaatgatctctgattaattgttatcagtaatgttggctctactgtaaagattacattaaattcactttataactgtggttaactgtaagtgatcgagaaatttaaaagttgtgtcagttcgaaggaaattaatgcaagttacaataagtagggatgatcaggattcaagttgataataaggtggaatcatggttaagtgaacacaatggatgaggaattgtaaaaggctaatgaaaggagtaatggaaattgaatataattaacgaaaaatagaagtaagaaaatacaattatggtctctttagtttaaattctcattgcttaaaaaattaaaaataaatacttaggagatttttaaatgataaaagctcataaagtagatgtcaaatgtaaatgtggtaatggaacattggatacggaagtgaaagaggagaatgaatcatacagtaatttttattttggtaagaaataagttgtatttgatgttttgattatcatttgatatgtattgtatgacctaatttatccatgtttattacttttctatttagctatataaataaattagtacataatggtctgttttattctcatttttgttacaatataaattagtacatgtcatttaatttgtatttattttacactatttgaattgttttttttttttatcttatattagttattttattttatttttctacatttatttttaaataaattttattttcattgttagattaagctagtttttgttattattattattttttattttttcaagttttggaagatctcactcatactttttatatatttctttgtataatttgagatatagttttattatttgagatttggatttaaaattttagatttaaatttttattttttggtgtttaaacaaatgttcatattatttgtctgatattgtattattttttcattaaaggattgatttgatattgtatttatttttggtcagaattgtttggtttcatatttattttaatttaatttttaaaatatttttgcttcagttcataaccaaggcaaaaaaataaagaaaaaaaaatcagtatttacgtctacggctataacgtcgttacaccaaccgaaataaatactttaaaggtcgcttaaaaatcgaaccaaaaagccatttttgtagtagtgtatatttagtgagtgttactatagtttccattgataatatcaattcaagtgattagccctctttgtgtcagttcgtaattagcttttgtcaaattaccattttagcctcctaattacttctttatcctttagtaccgttaattcactagtgaatataatttagatccaacctaaatttgtacacaactttttagttccagaattataacacttaaagggaaccaatattcaatctgttaagaaagtcaagattctataattgtaaatcatgttccagtcctctacattattagcttcccaacagaagttgtaagaatcatcttttttgagaaattttaacgagtgaatcaaaaaaactaataacatgaacatgagttcaagattactcgagattcaggcctattgatcatcattgtgatatgtattatgtctttatagtaaatgacatgtttgataaagataatttcattacatatcagtctatgtcatatataatctctattatatacaaaagcttcacttagatgtcttcctacattagcaattcgaatcgagatttgttatttcgaataacgagcatcagtgaatcgtactatagcaaccgttgatgaaagaatccttaactttaatacgtggctgaatattttatttatggccaataatcttaattttctatacaatacaagccacagcctcatatatgaataacaaattttttatatttgtatatgttgcctcagatttttcccaaaatacatggcaacggctgcatgtggcacgtggatttcaagaacacctcacccatgaaaaattggctaagtcatgaatagataggaaagtgcatcttaaggagtgagcctcagagaggagcataaggcacgcctttattctccgggagctagaaatataacaacgcatctccgagagaagaagagctcgttcgaacagtcatttcacatttaatgcggcatgagagaaacgtatcagaacccccataaaagga

SEQ ID NO: 223345 - DNA, 2480 bp, Cannabis indica
aaacgtttaatccccttcatcggagacactcgtaggaatacatgatctctacctgtaattctacatttatgcattacggatctgcataacgcttttgcctactatgagagacaagcattctggccttgatcttttctatagcttcattggtctgttgtactgatttcgaacctaaatatttcctttctctagtttgatcccagtgaattgaagatctgcacttcttgccatacaacacctcatagggagccatccctatagtattctgatagctattgttgtgtgaaaattctatcagcagtaagtacttactccaggaaccttcaaaatccatcacacaggctcacaacatatcctttagtatttgaattgtcctctcggattgtccgtcagtctaaggatgaaaagtcgtagtgaacttcagcttggtacccatggctcgctagagactttgccaaaactttgaggtgaatttcgaatctctatctgatatgatggacttcgaagccccatgcaacttcactatttctctaacatataagtctgcatattgatccactgtaaatgttgttttttactggtagaaaatatgcggacttagaaaatcaacccatattagatcgaacaatcctgtgattctaggtaacccaaccataaaatccatggtgagatcctcccatttccactcagaaagagtcaaaggttgcaacaaccctgcagatctctgatgttttgccttaatctgttgataagtcaagcaccaagacacaaattctaccacatccttcttcatcccgcaccaccaatagaaaggttttaaatcctgatacattttggtagtgtcaggatgtaatgaataaggagtggtatgagcttcctcgagaatttcatttttaagttctacactgtttggaacacacacactagttttgtataacaacatcccattacctgacactgtaaagtctttagcttgaccaggtaagacctcctctcggatctttaccaattctaaatcagttagttaggcagttctaattttgtctaacaaatctcattgtaacgtcaaattattaagctttcccacaacaaactcaatacctgatctgaccatgtcatctgctagctgaggtgaaatcataaccatgctagatacttgcccaagaacctttctgcttacggaatctgccactacattggccttcctaggatgataaaggatttcacaatcataatctttgaccagctccaacctctttttgagtaaagaaatatttaaggcacttgtgatcagtgtaaatctcacacttttctctagagatagtgttgctagatttttaaggaaaaaactactacagcaagttctagatcgtgagttgggtataactgttcatactcctttaactgacgagagaaatatgtgattacccgatcaacttgcatcaaaacacatcccagaccttgtctggatgcatcatagtaaactacaaacttctttttatccgatgatagtgctaatactggagttgcaatcaaacgttgtttcaactcttgaaaacttgcttcacacttatttgtccatagaaatcgctgattctttttggtgagttcttttaagggcattgagatctaagaaaagtcttcaacaaatcgacaaggataaccagccaaacctagaaaaaatctgacatctatgactatctttgatcttggccaatccctaacagattcaatcttccccggatcaaccatgatcccatccttacagacaatgtgtctgagaaacgatacttcagacagccaaaattcacactttttaaacttggcataaagcttgtgttctcctaattgttgcaaaaccatctgcaggtgttgttcatactccacttctgattggagtatacaaggatattgtcgataaacactataacacatatatcaaggaaatccttgaatatcctattcatcgaatccataaaagttaccggagcattgatcaatctaaaatacataaccaaaaattcataatgcccatacctagtgcagaaaacagtatttagaatgtcctcctctgagattgtcaattgatgataacctgatcagagatcaatcttaaagaagattgtcttcccttgaagttgatcgaacaaatcgtcgatcctaggtaaaggatacttattcttgatagtaaatttgtttggttctcgataattaagacacatgcgtagggatccatctttcttcttaacaaacaacactagagctccctagggtaacacactaggtcgagaaaaccctaagtcaagcattccctgaagttgaatctttaattctttaagttctgcaggagccattctatacggtactttagagactggctttgctccaggtgctaagtcaataacaaaatctatttcccgctatggtggtaaacttagaagattatcaagaaacacatctaaaaattcctgaaccacttt

SEQ ID NO: 223346 - DNA, 2344 bp, Cannabis indica
actgtcaaatagtacagtgttcttgaccataatatgagcctatactgggtacgctagtcatactctagccgtaccgatgtgatactgtcaaatagcacgaaagccaacatacatatctaatgtaatctaacaggcttactaacatgcacgctaagcatgtaaatacttatgcatactgttatactaatcttacctcgattctgaattcaggtgtgccggtcaacctgagtggaacaatctgctcggcaaattacaggctcctaaatcacattaatcacaacactcataagcgatacgctaaatcacttcccggggacttaaacttgaaactaaaagtttccctatcgataaataacatgacaatatcctaaataacacaataaatgggaaaaactatggttcccaaattttccccaacctgtagaccagctccccaaccggaattccggtttcgggaagaaatcctggaagctaaccgaaattctggttcctacaggcctctctgaacctgaattccggttcattacaggaaagaccaaaatttccataactcgaccaaatcaaccccaaaccaattcaaactttccagacctgttctatacactctagagaacaaattcaagggaataaaacattcacccatacacataatcaaaatttgccattaatgagccaagcttgagttcaaaactccaaagctttcgcaaccaacataacagcctctaaatcttgcataaaccaacataacaaaccataattcaacctctgaacacaacaacaatcaactacagcaaccacagcaagcacaaactcaaagcatggaaaatttctttttccttaaaacccaagaaactatagagaaagattcaagaacttacctagagcttaggatctcctaatccctgctgaaacaagcttgaaatgcagcaaaacaatctaaatcgtagctgctctaagggggccgaaagagagagagacttgagagaaaatgattttcttccttttctttgttttttgcaaaattaaataaactaaccctttacttacattttctaaataaatttcagccaacatcaaaccatttactaagtaaaccaagtccactaaaggacaaaatgcatatggtgcaacccctccacaccaaaataacataaaaggggtactaagggtattttgggaaattatacattcccgaccaatatcgacattcccaatgtctaaataagctgtcccgctatacaaaaatactaagatgtgattttactaagccgtacaccgcgttccaatgttgctgggcaccgaaaatgcaaaattatgaaatttctatatatgacatataaaatgcattctgaattcaaataaatcatcataaataattattgtaatatcaataaataatttccataattaaaccgtaattatctgctaatttccaaattaaactaagggcatcaagtatctgtctaccctcttcgtcctctacgcttcccaagagtggggtactccttctcctcacaaagttacctaggtctttgatatgaagtccaccccaagcaaggtaggttggggtacttctatttctctcgaccaggcttgaagtggttgaacagcacgaacgacaaggccatcagcaacatagggcgttttgctgatgagtacttcatggtgaaggacgcgggcattacccagacttggttccagcagattctgagatatcaccatcctcccctcactcttgctcttagggatagagctcaaaaacttgcccagctgccggcagaagaccagaatattatctagttgacctccaaggataactttgtgaggtacgggctctatcctgaggactttactcctacgtccgtggcggggaagaagaggaaatttggttctggccggactgaacaagctcatctggagaatgagatgattcaactaaagcgtgaacctaagttgaaaggaggtgcaagggccaaacaatatgctcaggagcccttgaattctaaagatgaagctgaggaagagcatgtgactccactgaagaggaagaagaaactcccagcctcgcccaggcttattgaacatgcgattcgcatcagggagcccatttcacctgttcgaccatcccctcccgtgtttggaaaagagaaagctgttatgtctgaaataagatcgatatcaggtgatgatggatttctgagtcttgttcgagcggtcaccttgcctcttactttatcttgtttttgagcttcttgactttcatgccttgtgtttctgatggctttcttctaaccacactgtttttgttctgtgcagacatgtctcggcaaatgatcgacgctct

SEQ ID NO: 223347 - DNA, 2070 bp, Cannabis indica
cttcacaggctggggtatgaagtttgttagataaagcttgtacttcagaaagttgtcctcttaggttaacaaagtgatattttgagcagcatccagcagttggacaatcctccaagccctgtccctaagtgccagtgtgaggggtggaaggcaatatactgggatctattgaaacagagtataggtagaatccatgccttccatgaaataatactcgtcaataacaccccttatattgctaacatccttatccacagagcccgtcagccacttgaagtctggctgagagaagtagaagtaccccgacctgccctgcttaggggtagacttcaagtcataaaactagttgacctcatgtggggacgacacaccatcatcttgaatggcatagaggacgaacagggcagacaaatacttaacgcccttgggagtgaacttgttcaaataaaggcaaaaataatctgcaaccctcatgaagtacgagtgcaaaggcaccatggccccttgtttggtgtgagcagccgaccaagcacaaaaccctttttgtgggttatttgcccggtgtttcgaagaggggacgtaacactccagtccgcccaagtaccaagccttatccaaggctctcatatgtgcctcccttatttgggatggagggctaacccattttgaacctaaggcacttagcctcctgtgggaaacttgtttagtaagctcctcagtgacatagtcctccccctcgaccaagacgtcaccctccgcaaacactcgctcccaacctcattataccctccaaaatttggaggttcagcggctccatccttctcaacttcacaagggctattaagacgaacgtcatcctgttcctctatctcttggacctaaatgtccccttatgatcctcctcctccgtagagggcagatcttgctcgacacttggaaacttggcgagttgaaccatgtgagggtcaaatgcgttgactttctgcatagtctgctttgtgcgagccatcatccttctcctggatggatactgatgtgtgtgtcatgcaatagtaatggtagggacaactattgggatgttgaagttaccaaaacttggacggccaacaggaagggtatcagcaacacctggccagacaatgtatgtctagttggatggaagataatgcctccaacccttcttcaattcccatatcaaacgaccgtacacttctcctgcgatctgctcgaagtaagattgatgttgcactacgggttctggagtaggagaacgatcactactcacttccgaatctacaaagctcgagttagaaagtatgtcacttgaaaaggacggactggcacgaaggcgaggttgatcctcatactcaagttgaagcaaatccttgtcaattcggtgttcgcctccccaaaactcaccagggttcatttacaaaagacgacacacgagattagtgtttggccgagatatcaaacaataaacaggcaaaagtgcttactaggaccacccaacatattaaaagggcaaaaaatgcacaaaaaattatgtcaaaacccaaaagttcgagatctttgggttaagggttaaatttctcgaagcttcgaggacctttggattaaggattaaatctcacagtagacttggagaaaattctttttttgctctgagtttgtttagtggagaaaatggtgaaagtaaattatgaagaagttcctgttgggctttatgctctaaataaaactctattttaatgtaatctctattatttgaatatcaaaaaggagacaaaagtattttcatcactaatttaatgtgtcatttggttcatgttatcatttgtatgtttatttgatttatcaattcatcctaacccttatcacagtaatattcttgttcattgtgtcgtcaacatagtggaaagtaatcaagattgtgtgattaaatatatattcctaagatttatcagtacattgggtttaactgatatgacaatctacaacatagtttacttgcaccttggctaagtgttatgtcctttccaggacattggttaaagtaaagcttgggct

SEQ ID NO: 223348 - DNA, 2455 bp, Cannabis indica
agttaagtcgcaatcaagatattatcaatagcaaaaaacagagtactcgtgtactgcaaaaaatgttatagacaaatatccccgaaaggatgtaaattcgttccaaaggaaaataaacataaatttgtccaagtacaagttgcgagtacccttgtaccgcatatataagaaaaggagtttaacacaagtaaatattaaagtaaaagttaagcgttaggagcggcaggggcagatccatctgcgactttcttgacagcctcgtccacgacttcctcattgttcgcagcatcagcatcctcgggaaacagatttcctccaccgccttgagtctgcgtaggcaacatggctcgaaaaacctcagccatctcagcggcttctgccccaaggattgagaagtcgaagtctggaattttggaaagagtggtaaaaatatagtcagagaccgcctggtcatacttcttcttcccattctccttcttgacctccaagtcgcgagacatctcctcgaccttcatctgagagttcttggcttcaagctctacttgctccttagacttacaaagttcttcgaggtccttgtccttgtcagccacctcctattttagtttcttgacgctctcttgaagctgggcactctgcctcttcagcagttcaacttccttagagccagcagcaacggctttcttgaacatggtcatggattgcgaagccaactccacagaacgcggaataagctctttggaaggagtcctctccgccttggacatgaagtcctcgcccacaaacttttcctgcagaatcaggaagtcgcgagttcggacagctggatcgatcatgattttcttccccttgtcttgtggaaccttagccagcttcttggaggaatccgcggcaggagtagccataacatcgcttttcctcttctgaggaacgacaggtgatgtcgtcgctgttcccgcttttggcttgcgattaaggacaggtgcggacttcaggaaagtcatctctgcgaggacaaaaacaaataagtgccaataacaataagattttaatgcactagtttatacatgcgatatgttacctgacgttggtcgagaagtttgcttggagaggcgtttgtctatccgctcttgttgcttctcagaaggctccttgtacactggctctctttgaaggcttgcgttcactggaatcaacttgtgttctcgtagctttgaggtcgtgcacagtaatcgccaatcacgatcttgcacagggaggcttccaagaacttcagcagtttctctgtgagtcgcatcaagtttaggtcgagccggtctatctgcgacaataaaaaggacgagttagcttaaagtcacaagataacttgaaaaattgactaagtaaagaagcacgcgacgtactaggtcgacggttaaagtcagtcctaatccctggaaccttaaacacataaaaccatttggatttccaatctcccatattagaaaccatacgttccaccccgttgatctcacaagtggcccacttgctgaaacagtagaagccgttgtggagacctacattctttatgtcatagacatagctaaactcttccgtcgagggtgccctatgcgcatactccatatacatcgcgtaaaagcctaaggctatgcaatagctattaggggttaattggaaaggggatacatcatactgcttgagaatagcagagatgaatggatggaaggggactgacactccgcatcggagaatggggatagagactacgacgtcttctgggggtatgatcgcagggttggtaaaaggaaggtgtggtctttgggtaggacgaggacgcatggtgccgagacgcaataaatttaacctcaaaaaagtggttaggtcagatttggtgacccgcgagactaagtcttcgcaggagaacggctcatttaattgtgtgttgtcaaccgaatcagactggctcccttcggcatctccatccttgtcagatccacgattaggaacctcccaatcttcacccatctcctcgacttcgacgtcaggagcatgcctggagtgaataaggtgatcacgggctgacaccgtagactcgctgtctcgaatcttgatagttcctggttcagcgagctcttacaccatcctcttgatgtctgcagaggacaacggacccagcgctgtgtctccggcagtagggacctcctcttctgagatcgaagtcgggataaagctatcttcctgatcgccatcaaatgcgttgcctcctgagccaagcatttggctgtctgatagaccgctcatctgaaagatagaagatcttttttagcgtggtgaatgtgcgaaaaacaaaataagtgacctcacccgcatataaaaaatttacattctccttagaggatcgattcagattcttgcaaacaccaactagccccccaaggcatgaaatcgcaggtgt

SEQ ID NO: 223349 - DNA, 927 bp, Cannabis indica
aatcaaattggaaaaatttaattttgttaaattgaattgagacaaatctagtttaatttaaccaagctaaatgaatttaactaaaagaagtattttattttttggtttattttagatatatcacaatttcactttaaaaatttggaagcattagttttttcttttttataatgaatccttactatatacataaaaaaaaatgtgtgtgtgctcgagcttctcagatgacctcttttgtctacaaaaagaagagagttgattggctccaacaaaagtgtcgaatgacaccaaaggagtcaattggcatggctccataagctcctaaggcaaatgaggtattttggtcaaaaggggacctaattggcataattttttattttatttaaaaaaagaaaaaaaatacaaaaagacatgagcaggtgagtgaggatatatgtttatgcatataacatatacatatatgtatgcataagagaactcatcaattcctacttttttttttttcttacttttagtctactctacttttgtctttactccattaagcctaaatagccacaaacacatttttttcccaaaattaaaattttttttgggatcaaactagggacttcaaatgttcatcactatcatcatcatgttcttcattttttctcaaaaaagtttatccaaattacaccaaatatataaacctctatcatttctaaaataaagagtggattaagagaactcatagcctacattagtaagttccactcatagattccaaaaaattacaaactaaatttcacaacattagcaaaaagtaaatatgtaaaaagagggttttatgaaaaagtttaaagaaatacttatattcatgctttctatgtatttcaacatggaaatagaattgaatagtaaatagtgtggaaataacttactcaa

SEQ ID NO: 223350 - DNA, 1989 bp, Cannabis indica
gttttgtcgcaccgaagagaataggagaaagttttgtatgtttcttatgtttttaaaacatattatatataattaaactcataagttttaaacttatcagttaataataataataatagtaataaaaattttattattaaaataattctaccattttagcactaaaaaatctctacttctagagcactaggtcaaatcctaaatacttctaattactctaataagcatactatcaacttatcgtaatattctcatcaaaaccactaattaaacccgttatgacattttttgtccccgatcgagtctcaaagatcgccaaacttaagaatatttttattccacaaacagttcatatcacattcatacatgctaaataaatcttcataattaataaattacggttatttatccacttatgaaaaaattacgatttatgttgaaaaagattagtaggatcataatcccactcattacctaattagcccataatatatattaaaccataattattaactattaggcttatcaggatattacaaaggaagttggacgtcaaccatgaagagagacccagatcaccctaacgatggttatttctttttctaaccaggatcaaatcttgtcctctatgttagaccatggtagtgcgcgcaccccacctctgaacatacctttttgcctgacggtttgtttaagcatctccttttcaaggtgaaacctttgagcaatccctcattgtctagctgtttcttcacatgagaaaataccttcttgggggcccaacagttaacatgtattttactccaatagtgggctttttgcagaaatcctaggcgggtcataagcgtgtccatacccgcaatttagcctataaatacccgtttattttcataggaagggggatcgaaagggagagagtcgaagctctgtcaaatttcttttaagctttcttcttctccaagagaaactaagagacaaaattaggtttttcttgcaaacactattgtaaaatatattatacaagcctcttaaggccaatagactgactcatggactaggaatcattaatgcctgaaccacgtaaaaatatttatcttcttcattactgcatttaatatttcttaagctcttatataattagttttcaaaaatctcgataaatatttttgtgctttcattgagagttgaagaaagatctaagccacggtattgctgaaaccatggtggttacccaaaaaacaattacaaaaaagattccttaaggtggccttgacgttgtcatggaatatgtaaactctctctttccagagcacgcccagctgggcaatgtgagagaaggggatgcatcagaagctgacaactgagagggtgacctaagcaagcatcgtaaatatgttgaaaagactgacatgttgagaaagaggacgaagatgacgatggagagtacatcaagaaggactattataaggaaggttattattatgagcaggacctcgaagtggtttgagtgtccaaagagctacatgagacccaagaaaagttggcctgctaagagaaactttctcaaaagatggagagaatgatggcccgcctccaagaaaaatatggagatctagaagaggattctaaagaagaaccctcagtggaacttgttggcagaaacaacgaggaaaaccctaccaacactgaaaccttagctcctgcaaaggacaagggggaggcgaaggtaggtgaccctcaaaacccgacaactcctgtacctcttaggaaaagcgtgaatctaaccaactgacctgtgcaggcgcagaaggccactgatgcctctgggcttggacgctcttctgctctgaaacgtcttattgcgcaaatgggactggtttgaaagtaccaaggcccaggggaaggaaaaatcaccccgatgattctataaaccaggatagtgggactgggggacagtattctgatgacagctggtccattgtagacctt

SEQ ID NO: 223351 - DNA, 1446 bp, Cannabis indica
ttttctttttctacacatcatattttcctcttgtttctttttgtcttcacttcagtagattggtttacttaaatttagtattggaagtatgccctttacccttttccacctttttttttcacactaaagagtaaagacaaaacactgaatagatctagggatggactcagaatcagatacacaatatcttactgcaaaaataaataaagaagtaaatattttggaaaattctcatatgtattaggccatctgatacactacaaatatagtgtaatttttcatataaaatgtttcaacctaataccttaaaacccattctattttttgatgggaatctacattctctcactaataatagtgagacattgtacattattgcatttttttttttaactttttagtaattaaataatttatttatcaagtaaatgttctgattatattaataaaataatataataataaagtattttttagtgttatagttggaaatagaaaaaaatttaatactgaaatagtacttttttggtgtaaatttaacaccaaatttaaatttagatttatatacttaaagatcaaagacagagcaaatctagggatggattctaaaaatacacaatatcttactgcaaaaataaataaatattttggaagattctcatatagggtatttctgaataattaattaagagattgttttaaactctagtttcgatatctataaattatttgatcttttttttaaaaaaaaaaaataataataatggggaaagctaaagtgacatcccctatagtaaaatctctctaaatatgtatacatcaaaactgtcccaagctttagtttgcttcaatcacacttaaagaccatgcaacatgggaagtttccatgaaaagggtagctggaatgaagtttcaatatcaaatatttattatgtcaacagattccatctctgctcaccatatatggggtaggagttgcataaattgatttaatccaataataattgatcaatttaattataattcactgctaaatattattttctaattatgatcagatcagattaaatgttattttttaatatctaattgaatgagatcaaatgttgaatggggtactatccaaatatccaatacatccagcattcaatcaaactaattagcattttcatttaattcaagcgagtaattaaatattatgttgttataggtaatatatatgcatatataaaaaaaaaattaatattaaatttatatatatatattttagattagattgatccaatctattaaatctggaatctaaaatattagatggatccatctaaatctaaaaaaaatgttaatgtttaaaaatatttagataaaacctgaaatcaaaaccaataatattagatggatccatctaaatctaaaaaaatgttaatgtttaaaaaatattaagat

SEQ ID NO: 223352 - DNA, 1105 bp, Cannabis indica
gggcacaaaacccaacattttgcccctatttataggactataggttgtcagttattctttttgggattgattcatttacaactgttcatgaaacgtgaacattctccatgtttcatttattcacacatgggataatatctaataactacccaactgctccttatctttatcctctagacggttattgctgacttggaggttacaccttgtcaaacatgagttctccttcttgtccatctaaatagaaaaaatactaagtgttggaaacacttcatctcgttgtatctctttatttgtattagtgatgcgaggtgatctccacattatgagtaacgcgaggcggttgagtgtcactacttttattctgctcgtgcgggagaatattctctctttgtatatttaactgagtttatcccgaggcagacatatgtctcgtcaataccaatttaatagatattattcttgtctcgcataagactaagcaatcaacgagtttgaacatttctatcaaacttgtatttaattgaaacgagttatttaataatgcaacgtcattattatatacattgagttgattcacgttctttcagtaggacacgtgtcagcttctggtacatagtcgaatttcaggtataacaattgccccctaaaaagtactttttaattaaaaagaactttctaaatgattacagggatataatcgtattaatcccttttgaaaaatgcatgctttgagttttgacgattcaagacttcgaggtacaccattagcatttaatgctctgaccattcttattttctaatacttccatctgttagaacttatttcttatgatcgaacggtaattaacaattgggtataaattgatgcacgacatctatttcgccaattttgttatttcaagcctccaagctttttgaaaatcatggttacttcctcttctagatttgcatgccctcgttatctttctcatacttcctgcgtatttcagtcgacttcatctatttttccaaaggcctttgaaacccgggtttacatcctttagaacttcaatcatcgagtttctctctgcccagaaattacagtcaaaacagtaagtgattc

SEQ ID NO: 223353 - DNA, 1328 bp, Cannabis indica
tgagttaaagtgtaaagctttaacactttcagccattacaatagacttgaaatcagcagaaacattatgctgattaaaaatacaatctgacgaaaaacaagactctctagcgagacaatgagcagccctatttgcagatcgcttaacaaattttaaagacacattatttaaagacgatattaaagtcctacagtctccaacaagtaatccaaactgagaaggcattaagaatgagctattatagcttgaaccacaaccagagcatcagtttcaatcactacattggaccattgtttcctctctatccaacttaaggcctcctttattccaatcgtctcagctataacaggcttaaccaccccaagccgtgatgcagaaatagcttcaagatggagaccatttgtgtcacgggccacacacccaaagctaaacttgtttcaattttgaaaaatagccccatcaacattcatcttgaccatatgagatactagtttcctccactgctcgtccacattagtaatattgttaattaatagtgcacccattttcatagattgagcataaatatattggtcaagcaacactctagccgatcggactacatccatagcagaacaaatttttttattccatagcagttcatttcgagcagaccaaagtctccaactaatgactgctgcctccttcaccacagcagtagacgttgtcttagagagatcaaagaaccaggtattgaaatcaacattatcaacaccagcaggaacacttgaaacacaccagcaggaccttgcaaaccggcactcaatcagcacatgacgaatagtttccaatgccgagttacaaaaaggacagtataaatatacatttacatttttagtgccaagttgaattttggtagggaggcatcccactagaacacgccacagaaaatgttgggcttccgggggtatgtccagctgccacaaaaacttaaacaaaacttggtcattaacagcaacagcagcacgagtagcctgctgcaacaaccagtaggcacttttcacagtataaaatccactattgtcttcactccaatgccacttatcagtaatgggatgctcactcaactggatggataatatgaggttcttatccctatcggcaaacagatcattaagaacatcaatatcccaacttttagattgtccagagaacaagctagagacattgtgatttaataatccaggatgatcagacaagacatagggattaagtggatcgggaagccaaggatctaagagaatgcttacagtagaaccattgcctattgacttccttgcaccagcttg

SEQ ID NO: 223354 - DNA, 1690 bp, Cannabis indica
acgtttaaagaatttttttttttcatttttacgattttttatagaaacaacaataaaactacataaaagtaacatgaaaataacatacagaaaataaaaaaatcaacaataaattaacaagagtacaacataaaaaaaccgtatttgctgtaaataaaattaaaaaaaatataaaaatatttaaaattccgtgaaatcgtatttttgtaatttttttttattatttttgtgtatttgtgaaataatttcaaaaaaaaaaaaaaattggaccaaaatgagggcccttgaatctagtaggcccattcactctccttaagtcaagtctatgtgacatgattttttttcacaaaaatgtacacaatgcacttaaaaattaatttttttttatggattccatttttttttataggtgtttcacttttttttttaaagtaacataaaaatactttgatttcaaaacaacgaaaaaataacactacattgaaaaaaaaatttgtagatccataaaaatgtaaattcttcattagtttttggtatttatgaaataatctcttcttttttaaccaatcacatttatttaaataaactgactgtataatttaaaaaactaatacaaataattatgtgtaatatttttatacatattaggctaaatactcaaaattttaagtttgtaagcgacataaactcaatatttattttaacggcataagtaataaatatttgtaaaactgtaattttcctaaaagttcatcaacagagactccattttgaatttataaaaagaacatttgaaagtaactgatactacatgtttttatttaaaccaaataatctaaaatctaagtcttatatgtgctctatttaagataataatattgaccaaattagagaaaaattacagttttacaagtattgattacttatgacactaaatataaacatcaaattatactacttataaacttaaatttttttaaacttatactgctatttatctttatatatgtttgtatatgttacttgctttagtacttggctcttcacaagggtatttacttttttaattcttgatcaaatttatttctatcatatcataaaaaaaaaaaaaccccacaaatggtgaacaatactaaaaaacaaaaaaaacaaaaacaaagtgcatacctagtcatctcttaggaattaatttgacaattaaagaaacatgacaaggttttttaatagtggtgtcttgactagtgtagctaataagaccatgttctaatattagagaatctatctagtgagattacccaaatcaaagaagaaaaaattaccaaataaattactaaaatatatcatttatgtatatttataaatatgattattcatagactgagctctagtcaactactctacttattggaactatgacatacataatgactccattaaaaaaataagtattttttgaaaagaaatatggtctcttctacttcattatattatataaaattcaaattaataaaataatgaagagagaagaaatattaaaagcttctctcatttcatcaatttttgttagaacaagtcaagtggtttttttgacttatattgaaggatctaaaccaagagggtattttttcacactataggaattggatactaataataagacaaagccctaaagattttttttttaaaaaaa

SEQ ID NO: 223355 - DNA, 1278 bp, Cannabis indica
ggtcaaagtgtggattatctcccgcaaaatctcttaaaggacaatccatggctttatgcccaattatcccacaatcaaaacaaaaatcaggtaagtgttcatattgaaagattagagaaacctcagtaccttgaccatccaccgccactcttaagccccgtttaagtggctcagtgatgttaatacgcacccgcaccttcattgtgccattgacaagctttatgtcttcaagcttcccaatcctctctccccactcccttgcaaataactcagtcatacaagctagcgggacattgttaatcgatatccaaaatgacgtaaaatcaaagttcatcttcgatattttgcctaaacccatcggcttcacaaaacaaatgagctgtttatcaatcgtccatggccctcctccatacacccgctgcctatcctcacgactcccaaagaaaaaacggaaaatatttttcgaactcagctcttccacttggaaccgattgttaattctccaaatccccttcatggctctctcaataccctccttgttgacaggtttaggcccaatcactttaccaacaagacacaaatccattctcttcttaccctcctccacaccggcctgattcaaagtaaggacaggaccatcaccttcatctaataccagtacttcagcaagcctattaaccaattccaagtccattgtgacaaacagagagaacacaataaaaataaaatcaacacactgtaaaactgcccagaaaatcgcagcaatacccaaggaaaaaagatgataaaaccaaataactaggagagcaccagtacgtcgatcaattacacccttacccgcacggactgtccagaaaaaactcagaaaaaaactgtaacaaaaacgataaaaaacctggctgaagaaatcgcacagtcttcccagggagaacacgcacgaacagtccagtaatgaccccgatgatcgcagaagaccaccccacaaacactggaaatcgtaacccaatccaaaaagaaacaacaaaatcgaaggaaaacccagaaaatagccgccggaatacatcgactgaacccttcccatgaaaggactaaacttccaattctgtttcgcagctccgaaactcgtggaagactttttcaaaattattatgttatatttttgaaacttaaaaaattagtgtatttatataagccaaattgttttttttttccactcctaaactatagctttttccaattatatctttaaaaattttgtgtttgaattaatgttaccat

SEQ ID NO: 223356 - DNA, 1879 bp, Cannabis indica
aagagcatgattaggtagatatcaaaatttaaaagtataacttagtacatgaaccatcaccgaattattttaatggaataaaattgaacaaaaacccttaagtttaacaattttatcctaagaaaagaaattcaaaagaaataatttagtacctcaaaaattctaaaccttatatatgttaataagtatttatcttttcctttgaaaaaaaaaaaaatacaagactacgaatacaatgctggggaggagcaatagtagtagcctttcaaattctgaggccaccattagaagcagctttatcaacacctaaacatgggcaactgagctgccctaaggactttactaccgctgataagagactacaaatgggaggagaatcctattttccctttctcacattgactagggttgattcaataaaaaaaaaaaaaaaattagagtagggtcgctgacaaacgtgaactcatctctattagaacatttgatgggttggtactaaggctggacagatggcaaaacctaatgcttagttgaaaaatgtgtgcacacaaattagacaactcaaacttgctgtccttttgttgaaagtggaagttgtggctttgaaggtgccaggtgccacgcaaacaatcgatgttgtttgtactccatctcaccagactgattaaagatgatgatatgtgtgaggggtgaggactatttaggattttggttcaacagcataattattgacttgtacgtttcaattttatcacttactagggcccaagtccctttcattgtaatttaaatttgtccattggttggtactcatctccaaatgcaaaatttaaaatgtgttaaattgtggaaataataataaataaaaaaaaataatttactatataaatatttaagttttactttaagtaacaaataagtacctaagtcgtatttttgacagtaaaaatatcttctgtcgttagtatgaaacttctgtaagtatttttctatttataatcttacaatataccaaatggcataccatgctattaaaataaatgtcatattactcccattattaacttaaaataaatgtcatattactcccattattaactgttacagtatatgtcaaataaatatatatgtgacaatatttaataggctcgtgttatttaatatctaggaaaatattatgaataaaaatttcattaaaaaattatttaaaattaaaagaaaaatacaaaataataataataaaatttgaaacttaaaataaaaatactttctctctcttcaaccttgtcttcttcctcattctcaaattctcaattgggcagctataaccatatcatattaaaattgtagcttattcaaattcacaacaacataataaagacatttcaaaacacgtagctttaaaaaaaaaactgatacagtacacaaaattttagatcgcaaactaaaaatgattagttgtgacttagattcatatattaaaaattaaaaatcaatacacgaagatttgagacgaataagaaggtgtcggtggattgacacaaagatctggccttcgacgagatgaagaagcgatggtgccagactaagaagatgatctaggcttcaacgaaaaattaaggcttcgatctttttagccattaggttttgtcaaaaccctaatcttgacgatgccgattttgtcgaaatcagcaccatcgatgtcggtcttctcatctccagccatcggtgaaacacccacacaaaactctaatgcctaccctcagtaggaacaactatagaaagaagaaaatggtgaggaagggagaagaagacgttgaaacggctggtatttttgttgactcactaacatagagaaacaaccgatcatggctgtcat

SEQ ID NO: 223357 - DNA, 2153 bp, Cannabis indica
atatgatattgcattatgacacaagcttgcctgattaagcaatgcaaatatatgagcatatctatttctatgcatatgactagttatattacctactgttaaatgttataatttaatcattttgtgataatgaaatatatcattagctatttaatatatctttctttatcacttttcttgttgagtttatgtgactcatgggtgttttgtggtgcaggtaagggcaaggcaaagttagaacaaccattagatgacggtcttctccagcaatgtacatattgacccaactagcttgcgtgctgagttgctaagagttgttttagactggttgtgtctgctgtattttgaattgttgttgtatatcatcttttgaataaatcttttataacagggattcccgagactcctttttactgtcgttataatgtccgtttttagtgttttattttagtcaagtttttattatcctcacagtttttaataataattaatacattagtattaaactagttttataaaatcacacatgtggcgttcctatagaatagggcattacaacttggtaacaaagcagccatggttttaaaggtcctgaaaactggtcgaatatgtacattttctgtgaagacacgagaacgaactcgaggctctagaaccaggagacaggaaataaaccaggggaatccccaaaacaaccaggaagaataacctggggatacaagggatgtcccaatggataatcaaacaaataattaagaataacgacgagatattcctcaaagttcccatggatttgcaaactaagggaatgagcgaactgatgtgccagagacatctcgtaggaatgaagaggcaagagagcctcagccagggaaccagggaatccctcgtggtaacgagagaaatcctagaaataaaccaaggttatgtggactacctccaaaacaccctcaacatccttctcaagtaaatagaaaggatgtatacacgtatttgaatagaggacgtgtatctaacctctttcgtaggagaagatcaatacaagatgaagcgagttcaagtttgggacattcaaggtctcgaggacatagtcgatcgagtaggcaaatgcgagaaggaagtagatcttgacgttttgctaaccaagaaagtatgagcaattcacaaagttatcaatctgagagttacagaaacaagatctgtgagtaattatgagcgaaggcagactgaccttcgtgaacacctgaatcaaagatagccagatctttgcgagcatttgaaccaaaatgcatctgatttatgccatcaacttaatcaaaatgcaaatcaacagcaagtagatcccatccaactgtgaataattgaactagaggataaattcaggaaatattaagatggagaacatggtaaattgcaaggctacgactcagatgaggaaaccgagccattccatccagatatcctaaattctaaatttccccaaggatttaagaacccacatattttgcagtacgatgggaccacagacccaatcactcacttaaacaacttaacattatcatgcgagccagtaatgtctcgaataggttgcgttgccttttattcctgacctctttaataggagctgcgagcagttggttcaacaaatttacttatcattccataaagtcctgagaacaattgtccagggactttaaaaagaaatttcaagctgcaagggaccggcgacctgaagcatcgtccttagccaatataaaacaacaaccaagggagttactgaaggcttatttaagtcgctttagcacatttgctacaaaggtcaggaacttgaatgacaatatacaactcacgacacttcagacaggcataacaactgacttatccatggctggaggtgaattatgggatgatctccagggtcgccctgtgagaaacattaatgagtttaatgaaagagcacaagtatttatgcataaagaggaagcgagaaatgagatgaagctgttgaaaactggctcgagaagtgatcccagcacgagtacgacaacaacgagcacaatctcgactaaaatagataatcttagtggttcaaacatgaaaagaaaggatgatttgaaagaatcatctaagaataaaaagaaacagaaaaagca

SEQ ID NO: 223358 - DNA, 2220 bp, Cannabis indica
cgcgctaattttgttagtaatctagtttaggggattatggcttcttaagtatattgggtagcgtgcctaattatttagggcgttacaatggtggtatgggttttcgatgccttaaagagttcaaccttactatgcttgctaaattgggctggagattattatgtcaccccgagtccttcgtaggacgtgtattcaaggcaaaatacttccccaatactgattatctctcggccgaacatagcaacaatcccagttttgtgtggtgtagcatttggggcgcccaaagtgtggtccatgctagtgcttttcgaaccattgggaatggactaaccacaaatattctttcccacccacgactttatatgaacaaattgttgactatctctttgtaaccgaggaaagaagatgggatactgaaatcattaatgatttgttcaatcaccgtgaacctagtctgatttctagtcttggtctggagaacattcaagtatattctttgtgaaaagtgcttacactcttttgcaaaatggtaagcccaagagccagagagttgatagctctgtattctagcgcaaactgtggcatctaaagatccccccaaagattaagaacttcctgtggcgtgctacttctgaatgtctcccaacttgcctccaacttatgtcaaaacatgtgagaatctcatcctcttgcccggtatgtaactcccatcttgaaacgacttttcatgctttattaaaatgtcatcttgcttcgcattgttggtcaacattggaacatggcttgaccatcctcgttcggcaattggctccatgaagtctttctaaaacttgatgaggatcaagtatgttgtgctgcaatgttatgttgggctctgtggaaaggaagaaatgctactttttggaacaaaaaagtgtcttcccatagtaagattcttgcgtcagcttgtacaacctttgatcactagcgaaaagctcaagacaatacatggctatcctccttgttcttttagaacaaggatgatggcgctgagtgtcacgggctcacctattcaggcagtggaacacccgtgcggcaccttgacttctctaagccaaggtcagccttccaaccatcagagtaacaatgggctcatttttcatgcgactgtgtgcctcgtgcacacttccgtctgttgaacgactcccgtcgagtcatgctcgcaagcatccatgagtgaatccatgcatcaagactctctagccgagatactcgcagtgtccataggttcccaccatggtaagacaaatcccaacatggacgctcaccttgtcactcgtgaccaaggttgcatgtgtgggaagatgtcaaaaccaagtcaacgtgccaacgcttctatcatgccccattcgatactgtccgaacagtctccctcgtcgcccaaggacttctatacgtccatggaccaatcctcaaggcgataagccaccaaactagttgcatacattagacctctgtccctttccaacatcgtgcatccattccatgtgcgtatgcaaactagcccacgaatgactaaccgtgtcatctcgtgttgacacacatggccaaggtgcaccacaacgtctcttggaggatctaggccacgtcccgtgcaagcggcataccgacatgccaagggaaacgtactagtgaacctttggcagcattcttcgatccactaccgggtcggcccgataatgtccatgagtactccaactcatggagacatatgagtcccctcgtggtcctcatatgcccgcccaacaagtcccactgactagtagtagctcacttagcaccaaggtacaaggggtgatggagagcagacaccagtgtaccccgttaaggagcattctgagcttttacccttctaccaagaacatacatgattttggctctgtagacatacggtcaaatagtaaaccaaatcacatagtttttccaaactgattgcaccattctatttgtagacccaaataaatggcgaatacaaagtcccctcccgatctagacaatattgaagatatttacgaaaataccactgcacaacaaactaagaatcagcatgcgccacaacaggcgccactacttgaccaccactttgttggaaatattttaccaggatctagatttagtaccatgtatgtttcattaacatcctaatatgaattctaaaacaattaaataaacacatataaa

SEQ ID NO: 223359 - DNA, 1735 bp, Cannabis indica
ccgaaactattttgtacgacaatagaaccggcagattatgttcttcaaaaaaaagtcttgaactttcttagatgtaatggttgcgagttgttcggcttccgtccacttcgtgaagtaatcaagcgctaccactacgtactgcactcctcccttgcccttgggtaattgtctggtcaagtcaattccccatatggcaaaaggccatggactttgcatttgagttaactcgttgggcggggctcgaggtatcttcgaaaatctctggcatttgtcacatttcttaacataggcctttgaatcttcaatcattgtcggccagaaataaccttcccttaaaattttcttagatgaactctgcccggcggcatgatttccacaaaatccatcgtacacctcagataaaagtcttgaagctccttcttgagtaacacatctgagcaatggcatggagaaccctatctttacataattccctctgctatgatatatcgtgcagccttccttctaatctttcaagcttcatttcgactatctgggagttcccagagttgaggtaggctgctattggtgtcatcaagtttggggaagtatcaatcattttgatctcttccgtgccagtaatgctaggctccttgaggaactggatagggaccaagttcgctttatcacttacattattgcttgacaattaagctaacgcgtctgcaattgtgttttcttcccttagaatttgtctgagaccatagcttttgaattgtgcgagaaggtcatgtattttgcttagatatgctatcatcttctgtcccccgagcctcgtattctccagataagtgattttaccaccagctatgagtcactgcagatttcgatgtgttcggcttttcatccaccccccgagaaaatttaagcccagcgatcaaagcttcatactcggcttcgttattggatgccttgaatccaaacataactgcagcatgcaggtgttgcctcccaggctgacaagggcgattcctgcactggaagttgatctgtagtcgacccgtctgcatgtagtttaaagccggcttgtcttcactgttacttagctgaggtgttagtactggctcggggttgccttctgatatgattttttctttgcctgtgcattctagcacaaagtctgttagggcctggcctttgattgctattcggggttggaaggtaatttcatactgacccagctccaatgcccacttgagtaaccgtccagaagcgtccggcttttgcaatatttggcgtaatggtttatcagtgtacacccaaataggatgagcttggaaatagggccttagctttcttgtttctagaatcaggcagtaagcgagtttcgctatcaatggataccggcctttggcctcaacgagtctcttaatgatgtaatagaccgggtgttgtatgttgttttcttctctgatcagcacgacactcatagtgtgctccgtgacagataagtatatcccaagctcttctccgtccagaggtttcgaaagtacgggaggctttgcgagttgcatttttagctccagaaaagctttttcacattcctctgtccactcgaattgcttatttcctcgcaggattttgaggaatggaacacatttgtatgtagattttgaaacaaatttgcttattgcggcgatccgaccagtcaaactttgcacttccttggttcttgttggcgacttcatatccaaga

SEQ ID NO: 223360 - DNA, 2095 bp, Cannabis indica
aagtattaaagtgttctttaaaaaataaatgaaaataaaattatttttagaaaacattaaccaaacgcgagttgtgcttagaaaacttcaaaagcaatatttcgttctcatttcttaaaatacaattttgataataaaaaacagaaaacaatacaaaacatatgctctaaatcgtttgtttggcaagagaaagatggaaggagatgttttttctccaaactttaaaaaatcaatctctccaattttgagagaattttagaaaaacacaaaatcaaatttgtttaatacaataattaccctttaaaacgaaataaatatttatgttcaataggacaattttttaatttactaattaattttctctccatcctttcaataccacacataatatcaacaacacaaatgacaaatgagatcaactatcatctttatcattcctactcctatcctctctatgctctccattcatccttcttgctcgatcttcctaccaaacatagcctaaacccatccatgggatcctcacgatgctcaataacatcactcgtaccttataaattaagtggaaccacatgaattttttattatcatacagtatatatatattatatgctccctatattaaaacataaagaatataggcggtaaaattacatcataaatgatacttaatcctataaattaatttattttaaattttaattcacttttattttaattttaaaatatttttttaaaattttaaaaataatttttataatatttaaataaatttttttggaaaaaatactattattattattgaatagaatccataacaataacaagagtggattggagaagaaatttcccccaaccaagaacaaatattatccaatcgaagagcgaatctcgctaagtcatttgctgctttattagcatcacactttacatgcgaaattgaaactctaggaaaagaggataataaaagagaaatgtcatcaataagatcataaagagaaacttggcctacacaagatcctttgttgatggcattagcaacaatgagtgaatcagtctcaatatagtcaatatgcaatctgttgctaataatccaatgcaaactgtgaataatccccatagcttccatttctttcggtgagtagttgccagacaagggtttggaaaaagcaccaattacctctccaaagtaatctcgaaccactgctcccacgccaacaatagaaccacccgcatcaaatgcagcgtccacattcattttaaaaaaatcagcaggaggaggagtccatttaactaaacctgtgtgattattatgccctgtattagtagcagcaggttgagaggtgccatttgagtcgaatatgtggtgctgcagagtggagtttatgaattgattaacataactgtctgcaaaagatcaaattatagaagcaggtttcggctttgttccatgaatctccttatttctttcagtccaaatactccacataagacaaagaattctctcaagctccgagtttgtatgggcagcagccagtgaagagaaaatctcaaacccattcagatgttgcagatttggaatagccgtgataagcttagctatggaccaaacctgtttagctttagtacacaagaaaagggcatgacccaaagatctctggcaatgacacaaagaacaagctgcagattgaagaattttcctatgcataagattgacagcagaaggcaaagcatcattaatcactctccaagcaaatattttgacttttttcggtagctgtagagcccaaagacaattccaccagttgcggttagatgtcgatgcagaggtgtcatttaacttatcaagatttttagccaaatggtaccccgatttcacagtataagaaccagattcagaatggtgccatatcagtctatcatctcttgggttgggaccaatcgaaagagagagaattctatctatatcaatttgtccaaagtgttgttggagaagacttagatcccattggcgatcctgagttatttagtgttggacagtaaaattaggatcagcacaataagtgcatgggagaaaagttgtagtacccggaaa

SEQ ID NO: 223361 - DNA, 2176 bp, Cannabis indica
ccaatgtacccaaatttttagccacttcaaagaattctttctcttcatttctaggctcaatctcttctatgtatttatctaatggcacttcttcattattcaaaaaactctcaaaactttcattatttgagttattaccgttaaaacactctaaattatgcaccattagattatcacatagagatcttactatgtctgccaagtggttaatttcttctgcaagtgatggtgtgttctcctcttccttaaatggttggggtgagtttgggtaataaggaggatattgatgactctaactgaagtgatggatctcaatgtcagttgtaatcaaaatctgccatatcattcaatagattaattacatcatggcttctccttaacaaaggctctctcgtctgctccataacccaccaactttttgtttcatcatcaagtctgtcacaaaagaacaaagtaaaatactcacttgagaaattgggataacatctatctccaagttccttaaatctcccccaagtaatatagaatggtgcattatgttattcatttagagcattctcaatactcattttttagattttgtattgagatcataaatcatgcataacgtggtcaatcaaacacatgtaatagacacaaatatgaataaatcacaataataggaaagaaaatcaatcaaatagcattaatctatggaataatctcaatcaatattcatgacatccctaaatagggagtttagctcataatgaaatctatattaaactaaacacaaataaaaatataagaaatctagagaagagaaagaaactagatggatgattgttacagatcacccatgctcgctccaatagtcttcttcttgtatttctagggttccattctatctatctcccctaaaagtcatgaccccttcattaaaatagagttttcagtccaaaattgagaaaagacgaagttgcccatatcccgtacaaagtcatagtcgcgaccacaacatttctggtcaggactacaatttaatttcctacttcgacctctcttagtaaagtatacataattttcacatacaaaatctaaatgagatgatttaagatgcgttgataaaaaagagatctaaaacttctgtactttgactttttctaaattctgatcaaaacatagtttaatttaggcttgaaattttatctttattttcttacaaaattttctctattttatagatcgttgttttttgaaatttgatcaatttatatattgtctaaacttgaaaccaaagaaaataagcataattttattccaaaaagtgacgaataagaagaaaaataactctaaaaatgacccgaacaataggataaaaatagcctagcaaggtatgatcggtacctcaatgctagaatatttaagagaagtatctttgaagatcttcttatgccaaattactctattcggaagactcgacattcctggataatatggatctgtacgggcaatcacacaggttctgcctagatgatccttgctgaagatgtaaccttgataattttaagtaggaagttctctggccgggccatgaagagaaaatcacccgtccagatttcttaatgttctccacatgtcaccatgctcgatgccacatcaccctgtgcagaatttggtataacaagatggattgatgcatcacatcagtacgactagagttcaaagtacatgctgatattatggccaatcgtactatagttaagaaggtttgagactcagctatatacgttgaacgggggtagtagacttacggtagtttggtgtacggacgcctaattacatgtcagatatatgttgtatgttttattaggggtgttcatcaaaccgcctaaaccactcaaaccgcccgcaccgcatggaaaaaaaatgtggtttgaaattctttgcggtgcggtcgcggtttgaattttttctaaaccgcgcggtgcggtgcggtttgcagttttgaattgttaatatgcggttcaaaccgtaccgcacatcataaaaataccaatttttatatttatttatgtccaatatgtgaatgtttaactcaaagtccactaattattgtattgttgacacttaaatttttttttttcatatttatattcaagccttctggtattttgacaagttttgctcaaagttt

SEQ ID NO: 223362 - DNA, 2733 bp, Cannabis indica
aatgttagcatccaaaaaagaggttgttgagaaatatctatgtttgagtaactggcttaacaaagagtttggcatgtcaaaaatcctccaggcttgtttagctaagagtgcttggttaaaatgtacaaaagagcgaaaacccatacctccttcatgtttagatttgcataaagatttccatcttttccaatgtattttggtaccgttttgattagtaccccaccaaaaatcttccatcatactctccagttggttgcaaaatttctttgtgagcttgaaacaactcatatcataggttggaattgactgaaccactgcttttaggagcacttctttccctcctactgaaaatattttttcattccaagcatggaggagtttccaaaccttttctttgatattgctgaaaagttcttacttatccctgcccgaataagaaggcaatcccaagtacctctcatgacaatcagtaataggcatctgcaatgtttgtgcaaaataattctgactagcaatagatgtatagggagagaaagacatcaccgatttgtcattattgagtagttgtcccgaagccttatgatatgtttcaagtgaacgtttgattgctaaggcagactgctccgtagcttgacagaacaagagactatcgtcagcaaagaggaggtgtgaggccgatggagcacttcgtgttaaacataggcctttcaaatgtccttcagcttcctcatattgcaataatcaagaaagaacctccgaacaaataaggaacaaatatggagataatcgatctccctgacgtaatccacgataaggctggacatgaccaacaacttcaccattgagtgaaaaagagaacgagcttgtggttatgcaactcataatcaatgtcacccacctcggagcaaatcccattttaagcattaccgcttcaagatatttccattcgactctatcaaaagccttactcaatccaatttgagtactgaatatccaattctcccttgagtcttatgtcgaagatggtgaataagctcaaaagcaactaagatattatccgtgataagtctattggaaaggaaagcagattgtgtttcagagatgacaaacggtagcactttctgaaatctaagcacaatagtctttgagatgagtttgtagataacgttacacaaacttataggatgatagtcacacataccagaagggtttgaaactttcggtatcaaggtgattatagaattattaagttgtgacatatcattgccatcattgagaattccaagcacaacttgagtgacagaggagccaactatgctccaataattttgattgaccatagcagacattccatcacttccgagactctcgtcggggctcatagactgtagtgcagcaaagacttcagcacttgaaaaaggtgcaacaagtgactgattcatagtcatagtaattgttggagggatcacatttaacacatattgaagggagtctgaatgtacactctctgaagcaaacaactgatcataataagaacaaataatttgtgtcaaatcctccttaccagtaactgtcaaactgagttcatttttctgagatttgattgaattattggcctttcttgatgaagctttagcatgaaaaaaattagtattttgatcaccacattgtaaccaatccactcttgatcgttgatgccaatattcctcttcatgggccaaaagttcatcaagaatcgcttcagattgctggagttgtgtcacaccagcttgtgttcgatcagcaatattattcaattgtgcaacagttttctgcagcttggagatgtcctttttcatctgcccgaatttgtgttggtgccatcgttgaagggcatcagtacaagaagtgagattgagtgatatcacttgaagcaacaacaggccaattctcacggatcagtacaacagcttcctcctccttaagccacatcttctcaaaccgaaatcttgttttccttactggtttttcctggtgtacattgagaggcagaatttccacaacaatagctctatgatccgaagaatagaagtccacatgagatgttgataatggttggaatttagtaatccagagatcattggtaaaacaccaatccaaacgctccttaatagtttccacttgatgacgacctttaatccaagtaaaaggatctccattaaaaggaagctcatttaagttacagaattccaacacattacgaaactcctccacttgattttctcttctcaaacttcctccttgtttgttgctattgtacagaatttcgttaaagtcaccaataaccatccatggaagcattggagccacatctttaagtcttttaagaagcgtccatgagtgaattcagttatgagttgcaggagctccatagaaagcagtgaagtgacatattggtccattcgagaaacccatatagcaatcaaaaacatttatattgaaattgttcaaagtgacaacaacatcatcattcctgtaacgccctaaataattaggcacgctacttaagatacttacgaaatcctaatcccctaattgggattactaataagattagcgcagaaattaaactttaactataaacaaaattaaaataaaacttgtaataatttaaactttacaatctaaaagttacagaagttgggatcccaaaaacatttacaaaacaagtcccttttctttcagccggcctaa

SEQ ID NO: 223363 - DNA, 2063 bp, Cannabis indica
gtaaactgggaatcgggtttggagagcgtcattactggttacttttgtgagttgttccaatcttctaacattaacataggcacggtgcttgatggtgtccgcccgtctgtgtctcgagaccaaaacgatgagctcttgttgcctatttcggaggaagaagtgagaagtgccttatttcagatgcatcctgacaaatccccgggtcctgacggtatgacgccggccttttatcaaaagcattggagtattgttggaccggacgtggttcaatttgttcgtgaattctttgattccggtaagttcccggacttgattaatgatactcacatcgtcctcattcctaagaagaagaacccaactcaaatgggtgacatgcggcctatctcgctttgtaatgttctctacaaaattgcctcaaaggtcatagccaaccgtatgaagagcgtccttgattatgctatctctgaaactcaaagtgcttttgtttccgggcggttgatctctgataatgttatggtggcctttgaagtcatgcactacttgaaaaggaaaaccaagggtaggaaaggctatatggcactcaagttagatatgagtaaagcctacgaccgcgtggaatggagtttcttggaagcagtccttcgggttatggggttcagtgaacgatggattggtttaatgatgggttgtgtcaactcagtttgctaccatgttgtacacgggggagtgaagctggggccaatcattccaactcgaggcattcgacaaggttgtcctttatctccttatctttttattgtgtgtgccgaaggtttgtcctctttgattaaacattatgaagccagtcatctcctcacggggtgtaaagttgctaggagtgcgcccactatctcccacttgttgtttgcggacgatagttacgtatattgtcaagcaacggaggaagaagcatctcgtgtcctctctttattacatgtctttgaagttgcctcgggtcaaaaggtcaatctgcacaagtcttcggccttctttagttctaacaccttgatgatcacaagaagtagaatctgtgacttgatgcacatccatgaagcaggggtagatagtatgtacttggggctcccaagtatcgttggtcgtaacaagaatgcagtgttggggttcctaaaggagagaatgaaatcaagaattaatagttgggaaggtaaattcctctcgcgagctgggaaagaagtacttatcaagtctgtggttcagtccctcccgtcgtatgccatgaatgtgtttcttttcccaattggcacttgtaaggaactagagagattgatggcgagcttctggtggaaatctaataactctaatggtaatgggagcggcattagttggatgagttgggatagaatgaccaagcacaaagttgaaggaggtatggggtttcgtaatcttagagactttaaccttgctatgttaggcaagcaaggttggagattgcttttcagacatgattccctagctagtaaagtcttcaaagctagatactatccaaatggtgattatctttctgctgagttgggctcaaacccgagctttatctggagtagtatttatgcggctaaggacactgtcaagcttggcttaaggaaacgaattggggccggccttactgttcagattacctccgatccatggctccctactttggataaatgctacccttctccgactgttcctggactggaaaatttcactgtcaattgcttattccaagtaggccagcaaaggtgggattctgatgttgtgtgtgatctgtttactcccacagaagctgctattatcctgggtatacccatctcgcaggcaggtggggaagattcttggtactggctcgctgaaagtaatggcttctactccgtccgtagtgcttacaagctgctccaagcccaaaaacatcagtcggatacgccacagccctctcaattttggaaaagattgtgggaattgaaagtccctccgaagaccaaggatctggtgtggcgagcgtcgtcaaactgcctcgccaccaa

SEQ ID NO: 223364 - DNA, 1694 bp, Cannabis indica
tccatatccatatgaccagagactatattctcattgtcgtctttgagaaatttgatagtattcttcctctttcgttgagaagcaaaacggtaaaaaaacttagtatttctatctccagccttaagccactgagttcgagccctttgtttccaataaacctcttctttataaaggagactatcaagttcagattgaaggcacttaagccgaactcggctttcaggatcaacaaaggaaatatcctggatgcaggcgatttccttttggagatcagagatacgagacttaatggaaaaattggacactttactccaagatttaagtgcagaaatacacaagtcctgagtggacaaaaatgagtgaaaaggggacaaaggattcttattgagaaggctgctatcccaagcagtcttaacaacagagaaaaaatcagggttctcaagccaaacattttcaaaatgaaaccttttcccatgtctagggtgagaattaaggccactatcattaagaataagctttaaagcacgatgatccgacccaaaaaaagaaagatggtgcaaagaagcattaggaaaatgatcattccaagaaaccaaatgattatgccaagtaaatttgttaccctcaaaaggcaaaggggaaagatgaaacttatgaataaaattagagaaatagtccatatccttactatcataataattacttcctactttatcatcataagaaagaaaactattaaaatcacccataattaaccaaggaaggttaagggcattgtaaaaaagtttatcaagaagagcccaagtaaaaggtctttgagaagagataggagaaccataaaaacaagtgaaatgaaacagttcattatcattaatacttatttacaatttatatgattacaagagaagtttataatattcacaaaaagactgtccttccacaaaagtaaaagtcccccccaaaatatttcctagggacctcaaacccatggataaaaccaagaccaaccttaaacctatcaaccgaaccaacaaccaaacgggtttcaatcaaaaaaagaacatcaggacagtgagttttcacaagcagggagagtcttcagaatgcacgtgtactccccaactcacgcgcattccaacacataagactcatttttctaggcaggtgtgcaaagcaccacccgcctgatccatgtccgtagaagcagatgaagattcctcctctctatccccagctcgagctctcttcaattgagacctgacagaaccaccaataaccacctgttgaggatggaaagatgggcatttaactcccgaagcagaggccagccctttcccacgaaccaaagaatcaggttggccaacttcagcctgagtctcaacaaccacaactgggctagcagagacagcctcagcagcaggattagtcgaaatacccatagcaacagaatgcataacattagtgcaagcagtggtagcaatcaccaaagaatcagtggaataagaagtgaatgctgaaggcctcaaagagtggcagccaaaaggattgagaccagtatgaaaagcatgaccactattaggactaagaggagtaggaatcatgacagtagaagaagtatgaggactgagaaagtctgatccagagttaccagtaacagccagaaatgagggaaaagagataatgttatccaagaa

SEQ ID NO: 223365 - DNA, 2454 bp, Cannabis indica
ttgggctgcttcgtggaaggagtcttttttggttcctcagtagcgattcctttgctcttatctttatgaacgcccaaagtttcggggtcctttggatcaaatttcataggtgcatttgttcttggaggagccagcacatcaggcgctgtcttagtcaatgcggtcattacaacctctattttggtcatcttggaaagtatatctcattgaattgatcttgttgagataaccttctctcagtcaattttagttgtcctgccataatgaccatggggtctaattcatcaggctagcatttttctccaacaataatctcagcggctttgtcttgagggtcatcttcatgcatatcctccagtgcaccatcggtgttagctttgacatcctcggaactactttctcgtaattctacatcctcaatgatgggattctcgattctgatcttcaccttgacgacctttctggcagctagttacttcctggggattactagtacctcctgctttggcatcggggcaagcaaaacaaaggctagatttggttctggtgagggccatgattacttaaataaaatcttgttaattatctcaacgcttcttttagctctcaatgaaagcaccaaaatgcttccctagattttctgaaatggaatgaaaattgtaagaactgaagtaataataatagaaagagaaaatataataagagacaagtagttttttacgtggtttggggattaattagccttagtccacgagtcagttttatttcgtactctatttacttgcaaatactttgagagatacacaggatgtatgttcatatgtttgcctgagcaaagtacgtaagagagttcaacccctaatccatgagattagtgaggtatttataatagttataggattacatttacgatttttccttttccaatccactatggagtttacaattaaacagtctctttgggctttctcatgaagtccagcccatgaagagtacgactgggtgctgactaggctgattgaggttgagttgatcgaatcaatattatgtctgataatggtgggtagttattttgaaataacatcacaattgttatggaaagtttctccttatatcgggatatgatattctggcccgatttgacagttggaattcccttatttataggccaggataaatagggaaaccggaagtgtctttcgggaacacaacatcttgcccctccgggctcggtcaagacgaaggcaaaagactctgcgagtatgaaaccaagatcacccccagcagggcatatccaggtggacttggcccactttattattgataagggtcctacaaaagggtcttaaatgttgacttagaatccacgtgtctaatgccaaaaatacggataacagtaaattgaatgttaatgtgtattaaaccatttccttactatgtttttagcttatcctcatcaatttcttcctacaggcaatagactaggaacaatgattatacgtatgatgaacagggtcaattttagtatgtgtattgggattgctacggatgagcaaacagtttagaaagttgatggaagcttaattttgttcatttgttaataaagcaatctaagctcagtggatgttgtaaatttattttgaaaatagactaaactatttattttatttttaaatataaatgatcattcgtttttgcatattaattgtaaactcactgtgtatttctaaccagttttgagtcttttcacgtaatgcatcaaaaatagtatttttataatataaggctaaaatatcaagatgttgcataatactcagttacggacaagaaagggttagagaatctgaaggaagtagaaaatatttcatttggctaccaatacatatattttttattctctttagaaacatattttaagttaattgatatttcaattaaatattagtgaatatgaaaatcaataaaatccttgtaaaagtaattccaacacaagtaaaacgtaatataattaactactagaggtattagggatggagatcatacttcctcatatcttttttttttactttgctctgaggatcaatctgctgctagttgaatacaagagcaaagttaaaatttaaagggttaaaatttctaagaatgcacctcctatttcttatttacttgttgatgatagttttccttttagtaatgttaagcaaaaaatcttgttatgctataaaagaagagtttttttctcctaatactccccctattgattttgcttttttatttgtttacatatataaatatatttatttatatactagaaggtaactacgtgtaaggcacgttgtatcttatatttttatattttgtagttttttttttaaaaaaaaaaattaattcaaaaatagaaaatattatttaataacctttaactacatatttcataacataaaattgtttaaa

SEQ ID NO: 223366 - DNA, 2318 bp, Cannabis indica
acgttactcaacaataacgagtgatgtcagttacgtagaaaagttaattggaatttatatgctttacaaactatttttacgcccatgattttatcagtagactatatttacactgacgtgatattagcgataaaatttactacacaatgatatgtggaatgtcctttccaaggcattagcaaagtatactagtattggatgtattggctatgcatcagactagaccgatattgatagtggaaaagatatcataaacttaccgttatatctttttcaagtcaatatcacttagttactcttagataaaaagaccttaatcttgagatgattaggttctggcttaaacgtattacatatgttctttgatttattcgttgaagttgaccacttggatcagccgaatacttacattttgtgaacatggttgtgcagttgagtggcagcgctaataatagatatggaatctataacttctatcactatttagaaataacacgatgattttcttagagcttggctaatagacataaatagaagagttcttattttagtgattatattagtttactaaaatatcatttataagaaactaagtattttaaaaataaaatacattgaaaggtaaaatagtaaatttgtccctacgcgatataaatcatctataaagaatctttgattatttagattgaaaaaatggataatttatagcgtatctattcttagtgaagagagcattctatgtaatcaggagtaaaattgtgactctatagtggcgttaggaggaattaataagataggaaatttacttagtaaattctagaactacttattgggagcttgattatataggcccatggtccccacactagttgagatagattatcttgtagactcaattaattgattttcattaatcgataagaattttgaataagactatgtcttacttattagtttcgctaagcaacggctcctttgagacaaaaaagagaatttacggtttgtttattaattaaaagactttttaaggtgtaattaataaataaattaaatgacaattttatttgatgataaattataattattaaatagatagaaatgaaatttatagagttagaactaaaagatggaatttgtgaaaagaaacataagtttcaataaaatggcaaaattaaaatcaactaggcccatgtaaggtttggccaaggttgtttaaatgaagcctttttttttatcttttttattctattttaattcaaacctaaccctaaaagctaccttataaatagaatgtcgtagctcttattttcatgtccctaattcagtttgatagtagagtaggccttcgttaactccttagctttacagcataggaggccttcaacatcccctctgctttgcagcagaggaggtctttgtcatctcctcagcttcatagcagagtaagtcttcatcatctcctcatccttgtagtagaggaggtcttcttgatgttttccaaagatttgttgaagcagtcgttggtcgttctttggtcaactgaggatgcaaacaactctcgaattaatatgcccaagatcagggtgatgtcttccccatcatgggtgcatcttagagtgattataagtgtggtctccaatttttccatggtctttcacctttgagttctttaccatcccttctattgtattcacaataaaagaggcattcttcttccccttgcatgtcttgacagtgaaggaggtcttccacttcctcttggttgttatcacaatgaaggaggtcttcctcatccccttagccattaatacagatgaggaggtcctcttgtcaaatgttagggaagtgttgtaacatgtgctttctactctttggtttccaaggagactgttgataccatctactgtcaagaacttgatgaacatgtggtagatacgtgagatggctcggaggttgctgggtgttgaccttccaaggagaattaatgtctatcactataaaggtagtcatagtgatgtttgccacaaggaagtgttgattatgagtggtaatttgattttaccacagggagctatgttagctcacttgaaaccatacatgagttgtttgcatggctctggctctcttagggagtgacccactcttttcagggtttgttttgattagaacattttgtgatgcttgattattaaccatcacctttgtctccatggtgtttgaaattttgttagcactgtctaagcttgactgctcttgccccccaactttgatctcttagtgattggggtgaaaaaatttaaagtttgtatgttgaagca

SEQ ID NO: 223367 - DNA, 5229 bp, Cannabis indica
aaataaaaattattaaaatggggtatacttagaaatttttggggtgtaaataaaatttcccttttaaaaattaatctttttttttattatcgtatacgtggtagttatttaagattacttataaattttttaaaaaatttgaatagtttacagtaccaaaaataagatttaaatagctacttactacatgcataagaaaaaaataatcgctcgtgtaataaattatataaatattattttcaacattgtaaattacttagaattttctaaaaattttacgagtagtcttaaataactaatttaaacagttacttactacatacataagaaaaaacaatcgtgagtgaaataaaatatattaaattttattttcagtattgtaaattacttagaattttttaaaaatttatagataatcttaaataactataaaatgcattgatttaaaaaaaaatagactaaaaaattctcacggatactgaaacagagaaattttttaccgaaatacccttctaggagatgtacaaacttacttaaatgtatatttaatatactttatattgtatttaaaataaaattgcacatatgtgataaattacttgaactttattatgaacatattaaattattttaaattttttgaaataaatttagaacatgttaattaagtaaatataatatatacacttttatatatatataaaaataattaagataatgatctcaatcttgaaaatatgagtagatgcacccgtacattctttcgaaaataatatatgattaattattattataaaaaacagttaatcattcacaaaatacaattttatgataataataaacaccacttacctaacacaatactaatttatatgtttctatttaaataattaattttaaaatctatgttacctaacacataattttaaataaacttattttttattttaattgtataatgtatatgagcaaaaattataatttaaccttaaaatctataaatgttattcgattatatttatcttaaatatctttctcatcataaattctcttgtaataaatttccctaccaaacattacttcattatgtatatatagccgcttatagcccacgtgaaaataatttaattcgtatatatattccacgtgaaaataaatgaacacaaatgtattggataaatatatagtatacatctcaaaatggaatttctgtacaccatttatttattttagctagaattttttttattttttatgttataattatttagaaatactttatatttttttaaaaaaattaaattatttataatgctaaaaataaaataaaaattaattctatatactatatttttaaaaattactttagtagtttttattgggattgttatgtgtatttggttacaatttaagttgctttattaattgctatatgtagattgttatgtgatttttttaaaaatataaaaaaataatttaaaattactaaaattaaaaagaaaaaacctacaaaataaaattaaaataattaataggaatggaacaagagaaacactcttgccattttttttttttgctggagaaccaatctctaatgcagaaaaaccagaagcaaaacaaaagttcacagacagtcaaaccagaaaaaagaaagaaaaaaaaacaaatgttcacatggccacaagagggaccaagtcctctgcagaaaacaaaccagaaaccgaatttgaaaacgcccactttgcaagcttgtgagcagctagaacacctgcacggggtgtccattcgatcttcacatcagggagtgcatcgagcatctccaccaactgccagaaagcaccagccagccgccaatccggagccctccgagcatgtaaaccatgcaccagcagttgacaatccgaggcaataaccatccggttccagcccctcatagtgcaccacttcaccgcattaaccaacaccaccaattcagcctccagcggctggtttgcctcataacacacagccatagcctccgacaaattgtcctccgagatagccaccactatcccagctgcagcacgaagatccttgaacgctgcatccacaagtaacaccgaattacctgtgtatattgcagcagggttgtgctgcagaccaccagcgttagtaggagactcccaagccgaatggagataggcagcagcactagtcaccttggcaagaacacctctccaagtaggactaatctgatcgtgaaaagctctattgtgggcagtccacaaagcatcaaacaagcaaaccccaaatctcaaaaactcacctaagacttcagcatcagcaccttgcaagaactccggagataagagccacaccaccatgtctctaggagctccaaaattaagtgtatcacttctaatagcccaacgacttgcaaaccacacggccttagcaagcggacacttgaagaataggtgtagggccgagtcctccgcttcaccacaaatcacacatctagtgctatttccgaagatcctttgaagccggttcccaaatggaatgatatctctacaaagtttccacagaaacattttcagccgctcagtgatttgaagcttccaaatccggagccatatttgatccatctcaccccagcgactcttgataatggattaatacgccacgctaggggagaacataccattagtagcatctttccacacgagaagatcatcttgagagcttggcaaccgctgaattagatgcagagagctagccacacttggcacaaaccatctttggaccgaactagctatccactctccatctgctccaatcagggaagagaccttgattggattcggcacacacaatggattgaaggcagctctagacttatcccaatctaaccaaggtatccatggggaggcccacagatccaccttccccccgtcggcaaggatccaacaagcttcgtttcgaatcaaatccctcgtcgccatgattcctttggccccgaaagaagcattccttggcaaatccaaattccaaaacgcctgctccctattcccccaatacttagccttaaagaccttacaccataaggaatcctcctcctttgcaagtttccaaccaagcttcgccaccaaggcaaggttaacatctccgaacttcttaaaattaagcccacctctatccagaggtaagcaaagagagttccaatcacaaagagctaggaaccgatccttagactcactacccatccaccagaacttccggacagcctaatccatcacatgacacagggttttgggaaaaaggtaagtagccatagaatacaccggggtactctgagctacagcgcggatcagagtggacctacccgcttgggataaaagcttgcacctccacccttcaatctttgaacaaatcttgtccttaatatacctcagatctttagtcttactattcgaccagataatcgggttccccagaaatctatcctccttgctaagcttccagaacccagaaactgcgacaactcagcctgggtgtcttcgttgacattttttgaacaaatgtaagcagatttctgaacattcagacattgaccagaccaagatccaaagagttggacacattccatcacaacccccacttcttcaagattggctttacagaatacaaagatatcatccgcatacattaaatgagagatagaggggctctgagggctaaccttaaaacccgagagcaatcctgtctcttcctttcgcaatagcatccttgaaagcacctcactacacaaaatgaagagatagggcgaaatagggccgccttgacgaagacctctaccagggcagaactgtttcagcgggcctccatttagtaagatcgaaaaggacacagaagtaatgcatttcataaccatttggatgaatctggactcaaatccaaaagcctccatagttcttcttaggaaactccactcaattcggtcataagctttgacatatccagcttgagaccaacaaacccagctctcccctttaacttgttgaaagaatccagaacttcatgagccattatactactctcagcgatccatctccccggaacaaaggccgactggtaaggcaaaattagctcctgcaggaggggccgaagtctgttcgccaagatcttagaaataatcttataggtaaagttgcagaggcttatggggcggaactcatcaaaacatttggccccgatcttcttaggaatcaacacaataaaagtctgattaatctcctttacaaactccccggtctcaaagaattggatcaccatagctaccacgtaactacccactatctcccagtggtctttaaaaaattttccaggcataccgtccggccccggggctttgagggaaggcatagaccacaccacttttttgatctcctccgcagagggaactcggacaagggactgattggcctcctccgagatcgagttcgaaaccaagtcatcaagcagagggtcaggtggggaggtcgacgaaaaaatcgacacaaaattcgaccgagaatactcaccaaccagctgacggccttcaatccaatcagactcattcaagcagaccacattaataaaattcctcttacgtttgatcaccgtggcagcatgaaaaaactttgagtttctatccccattgcgataccagagttctctagacttttgcttccgaatttctgcataacgcgattcgacctcatcaatttcaagaagaatatctgcctccaacttcaaattggactccgagggcatccgccgttgcacttccaacaagaaattattgagggtcttaagtttctctttacacatcccgaaatgctttttgttccattttgccagacaccgtcgagtattgtccaaacgggtaactagttggaaactcctgacccccctaacatcaatggcccaagcctgttgaataaccgctttacacccctcatccctgctccaggcatcaagatatctgaacggggtatgaaatctctcacgatccaaaaagaggtccaaaaccagaggggcatggtccgaatccttaatggccaaagcgcgcaccccagcctttgggtaagacaccatccactccgggtcacacaaagcacgatcaagtctctccttaatgagatcttgaaagctcctcccattagtccaagtaaaaagattccccacgcagcccaaatccacaccccc

SEQ ID NO: 223368 - DNA, 2120 bp, Cannabis indica
gacgacactataatcatgaacaaataaatatgttctggacttaatagaatttatacatgaaacataatcatgaaataaatcatgtgaaccatgcaacataaaattcaatttttgatcttttattaattagtaaatttgattatattagaatgggttttatttagggcacaaagcccaacaaaaactactgggaaattaaaattcaactagaaattcagtctaattcgcataaagacttcaattttcagatccatgaaatgcatatctcaaaacgttgaactggagttcccaaacaatctaactcaagtataatctaaaagaaataacatcaatactatagtaaaatgtttatcctggtgcacttttgttgttttccaaaattccaatggtgaatttgttcattttaaatcgcgaagagacatgtagatagagttacgtacgtggaaacactgttctaattttaatgtttcataacagttgcatacaaattttactaacagctatttctccacatattactattaaggtacaagtaattatcaatcagtgataaaaaaatactgacaaatagttttttacatatacacattcacatttaatatttttagttacaattaagttgcacgttagttgaataacagttttgctattacaatatcatagtattataaaaataaggttcagaactgtcaaatacgcaacctgaacagataaaaattgattgttgtaatatttgtttgtattaaatatgtggaatttttagttgttttgtagttttatgttagttgattcgcaatagatataattgttgcattatagtttcatcacagttgccttaaagttgacttcttctttccaatctggccgtcgaagttgaaatatttttcaagcaaagacactttcgacttcttcttcactagacgatgaccacctttagccacagggggaaaaattggagtcatcatcgtcgatgactgagagtttccctttagccttgttaacaattgatttataacccatttttgaagtttttttggcaatggagatggagaagcagaagatgatatatataaaaaaaaaaattgataaaggaggcagttggaaggagaagatggggaaggttatggctaggatgtggttttcgtaaataaaagctcattaaagataaaattgttgctcacaccttatcgagatatttttgaaaataaaatatcaaattgtatttttcatgtaataattcatttaatatttataattaaatttgtttagtaaccatcaatgggcagtacccattaagaagtgtttcctatatatatatattcgactaattaagatttttgcccctcgaactttgacatgttccaaatcatgcccctgaacttttaatgtcgttaaaaacaccccctaaactatagagattgttagatttaaggacttttgtccaattttagtaaaaaagtttaacatggatgaaagttcatgggcatgatttagtacatgtcaaagtttgaggggcatgacttggtagatatcaaagtttggggagcatggtttagtacataaacaatcactgaaatagtaaaattgaatgaaaataaacaaaagtccttaaatctaataatctcaatagttcactggaaatttttagcaactagaaaagtttagcaggtatgatttagtacgtacatgttaaagtttagcatgttaaagtttagggggtaaaaatcctaattagtatctattctatataaaatgtggatatacaacaaaattcttagtttaagaacattttctgattttctactttaagtttaacagaatatctcaatttcttaatataatattttttattaattttataatattattatatgtatttaaaataaaaattatgtagatattttatatattaaaaataaaaattatatatacatataatcacatctatatatttaaatcttaattgcacaacaaagtttttgttttaaaaatgattaatgatatatatatgcttctaataattttacactatattataactactctcctaactacaaattaagaatgtatcatcactatcattattttttaaaatatatgtttggacataatatataaaa

SEQ ID NO: 223369 - DNA, 3219 bp, Cannabis indica
ttttatacttatagtttgatctattacttatttgattgtttcattagtagggatttcggtacatcatccccttacacgttgtaagttggaaaaataactattagtttgcttacttttgagaactatagggaggtgcagctgaaatttttacaaaaatgaaataatcttaagagcatagattgtactatatgtatattacaaatttgaatgagatattttctttacccttttagtaatggagcgaaaaggtggatatgactcttgcccatatttttgttatattttaaatttgctgtgaattactttatagaggaagatgccgaccgacagaagttggatgattgcgaacccgcactcagctgagatttgaagtggcatcaacaagtttgttgcggttgctaggaaccacgtaaatcctgtctgattatcttgatgaccttgcatgcggtgtttgaatatgaattttcacacacttgaaaaatataagggttcatttatttgttagcatgatccaaccttcgtagatcccttggtttttccatggggagtctttttcccagtctattgttcaacttttggaaaatgacgaagaagaaatggaacatgtgttaaaggatattgtaaagaccgcatatgattaataccttggattattaaataattaaggtttatgtaagagtttttgttattattaataaaaatacatattatgggaatttatttgagtttgtatatgtttattatgctatttatgtaaatttcttaatttctgtggttgtgttcagaagctgtggaaagcgacgttgggcctttagagagtcgtattttatataatttagaatattatcggggtatcattgtttgatattagaggcgttagaattttcgggctttggtaattgaccattttactcttggtttgttttaacctttgtttttttaaagaggggcatttaggtcttttatcattttggcttgtagtgagtttgagaagctgcgattacttagtttaattggaaaaaaaaattatgttaataaatttaaggaaagaaaggaaagaggtgtgaatagagaactttgtagctccattctctctctctttttcgtgcaacccaaagaccagcaagcagagggatttttgctggtggaattgtagtattttaactagaataagaagattcaattttaaggtattgactcctagcctcttcccttcgattttattaagcataagttaggtttgtttgatattagaggcgttagaatttttggggtttggtaattgaccatgttacccttggtttgttttaacctttgttattttaaagaggggcatttaggtcttttatcattttggcttgtattgagtttaagaagctgccattacttagtttaattaggaaaacaaaattatgttaataaatttaaggaaagaaaggaaagaggtgtgaatagagaactttgtagctccattctctctctctttttcgtgcaacccaaagaccagcaaggagagggatttttgctggtggaattctagtattttaaccagaataaaaagattcaattttaaggtattgactcctagcctcttcccttcgattttattaagcataagttaggttttgaagcttgattttgggaattttggtactgtggttataattattgtttgaatagaagttctgaaggttaattgagtttacttgagttgttttatgctgtttttgttaattgtagtgaggttttggcaaggtttgagtttgagaactcaaaccttgacctctaatggtgtttttgaaactgatgtgaattgttgagttttgttggttgggttgagtttatttgggtatatacaggtactctagagaaatttatgaagtttgggattgaattgaggtgtgggggtcggatttttggttcccagttcagaaccagaattccggttcctgggagcctgttgcaaccggtcgaccggttggtcccaggaaccggacttccggttgggaaccggtctaccggttggggctttttcccgagccttagtttttcccgtatttgcgcaatttagggtattagcatcctatttatggatagggttattcttagtttcaattttaaatccccgataagtgttttagcgtgtctctcatcgaattctaaacattatggtttagggccctgtaaagcatcgagctgcgtttccactcaggctgaccgacacacttgagcacggaacgaggtaagatagcataagaatatattccttgactcaaatctcatgattgtcatgtgttgtgataaagtttaatgctagcaggtatctgtaagtacttgaaaagacaaatctgggacacaattattgagttatgtgtgtatttgaaaaaattatctaactattttgtacaagttggaaactattttcccaccagcattctttgacataatggtttacgtagttgtgcatctccctaaagaatttacactaggcggactggtgcactataggtggatgtatcccatcgagcggtcaatgtctgtgtacaaacaatatgtcaggaatctttcccctctagaaggatctattgatgaatgttatgtggttaacgaggcattaacattttgttctatgtacttttaggaagtagaaactcgattcaaccatcctaaatgaaacaatgacatcatcctaaacatgccagatcgataattttttgtattcaagcatgtcggacaaccattggataagacgacagttgacaccttaccaatgataaggtagcgtaagatagagtggtagatatttaataactgtacagaggttgagtcatatatcaaataagtgtacattcaattgaatgatgtagaatatttgacttcaccttgaaactcatgaacattccaatgctcatttaaattttagtgagcataaggagaagcttctagtgaggggtgtaggcaatattgaaaatgtgcaagagattgtgttccttgtttggttcaaaactcaagtaagcgttattgcctccaaattttcataatctttttcaccctaacacttgaagtgtaaagaccgcttagtttaatttagaaattagcagttaatcacgtttaattatgaaattatttatatctatttaaataatttattatactgttattattgaattcagagatgcatttttatgttatgtaatagtttgcataattttgcattcc

SEQ ID NO: 223370 - DNA, 1912 bp, Cannabis indica
agggcataaaatccaacagtgtgcaccaagtccaagcccaaagtgtaacgccctaagaattaggcacgctacgacaactaatattgaaacctaatcgcgctaacccggtattactagaaagataagcgcgggtaaatttaaactttattaacaacagaatgaaaatataacttgtaataatctttaactttacaataaactgaaaggtacaagtttcaggatcacataaacattttcacaaaattttacaagtttatttcacgtgccgacctaagcagtgaaatcagaggtttcaaaatacatcattggtagaccccaacccgcttgttatagtatggcccgcacatgtacaagcaccgccaagctctcgcactcatggctgatcacagactgatttaccctttcctgcatagtagagcaccagtgagccaagtccatcaagacaatatagatatcaacatatcgcatatataataatatcatttcacttattgtctatttgatatagacttgcgtgttacgctcacacgcctatatatgtctatgtggcatagacccacgtgttatgctcacatgtctaaatacaataaggccttagaacggttcatctcggttctaataaccgactccaaccaaattatgcctggaacacaaaattcttaatctcaacatatatagaatgacatagcatttaaacatcaataatcactaaggtaataaacctagaccatataaccgctcactttagggtaataaccctaatcccagtttttaattaatcataattataatattcaacatgagcgccaccgcgcttaactcttcgtgctaactactgtgttacctaatgttccataaatgtggagattccaaatccgcgggtgctcatggccaagtgccagaaatcctagtcacaattttcgagattcacaaatagggttaatccctaaatccattctcatataattaattggcattcaaatccaaaaaaaacatatagagctcagaacgagctttccaacaatactcgaaacatccaaaatggagtctagatcactaagggtgttcataaaaatcgataaaccgaaactgaccagaccgtaaccgaatttttgattccacatcatcaccgaatttggcggtcggtttcagttttggtttttttgacatggcattcggtttcgggttttgaaataaaaaaaaatggttaaacccaaaaattgccaaaaccgccaaaaaccacaataaatcgccaaaaaccgcccaaaactgccaaaaactatccaaaaccgccaaaccgaaaaactgccaaaaaccgtacgttcagttttatacggttataatttctaaacggtcggttatggttttcgtaaaataaaaaccgtaacctacctatgggttataaaattgtaaaaaccgaccatagccgactgatttttacccctacggatcacaaagttatgaatattcaaataacgcattcgaaactgcctagaagctcaaggcatgctgcaacacctagtttggaaacccaggatttagaaagggagggtcgcggcgtccgatgagtgggaccactgtgcctgggttccaaacccagaaaccccaacatgcaacaacacgaaaccaaacccaactcacacctaattcacctaaaacatgcttacataccaaaatcaatcaacacataatataactatttaaacagggggttatcgagacattaaacaagctcttccaacacttatatatacatttaagatcaaatttaacaactatcaaagtatgctcaaagcttgagctaaaatcaacacaataccaattcaaaagcttgaacaacaaagtcctacatacaacccaatatttcatcatgcaactccaagtaattcagtaaattaaaatcccaatcttc

SEQ ID NO: 223371 - DNA, 2711 bp, Cannabis indica
gatccactagaggcgaagccaccctatgactgtttttgtttacttgtttttattttgctttgctgatgtggatatttggtgtaaagggactggttataagtggattttaatcaacaagctgaaaaattaacttggatggaaagccgacactgtttccttgcaagatctactcagatggataaacaggtccacgaagagtaaatgcaagaagaaagtcttagctgcttccattgcagctttggttggcaagctaggaataacaaattatggcagttaaatatattgttagtttgaatctgttaatttaggaagaaaaatatgacaaattaaaactaggccggataacttgtgtttgcctaaacatgtagattatagaaacatagataagtttgacttattgtaattagatctcttgtatagattcttatacagggctctatatgaggtgttttaggttgtacaaatcaatttgtttgtgcaatgaattctctaattcatcaatatatgtaagagccataggcaaaagccttgcgagttacagagaaaagaaaaacaaagaacagatgaactgaattactaaaagcttggattcattaatgaatacagggtatttatacaaagtctttacagagaaacagttgaaacaaacataacagaaagtcagctagacccaactaactaactgacacttgtacacttaagaaccggtaataacagcattaacatcccccctcaaactaaatggtgtggacaccattttcagtttggatttaaggtacaagaacctgtctgtagttagagactttgtaagtaggtcaacagcttgatcgagagctggaacatatctgacaaagagctgcttatccaatatttgatcacgcacgaaatgaagatctaactcaatgtgttttgacctggcgtgaaaaactggatttgcggctaaggcagtggcactctggttatcaacccagatgacaggaggttgagttgtaggaacttggagttcagcaagcaatgaacgaatccatttcaactcaacagctgcatttgctaatgcccgaaactcgctttctgtgctagagcgcgcaacaacgtgctgtttcttagctgaccaacttatcaagttgtcacccaagaaaactaaataacctcctgtagatcggcgaacatcaatgcacgatgcccagtcatcatcagaataagcataaagatgtaaaccagatgcaggtcgcagatgaataccctcttttattgtgcctttgagatacctgagaagctttttgcaaccatccgagtgaacggatgttggagcttgtaaaaactggctcaacttattcactataaaagcaacatcaggatgagttaatgacaactattgcaaggcaccgattgtactcttgtacaatgtaatatctgaaaaaggttccccctctcgtaatgacagttttgttgttgcactggctagatttggacaggctttggctccttccatatttagcttcactaaaaggtcagtaatgtacttggtttgagacaagtacattcctgtataatctcgataaatctccacccctaaaaaatagtggacctgtccaagatctttcaaagcgaaactcttgttcaagtcagcaatgagcttctgtataagcctagagttaggccctgtgacaagaatgtcatctacgtagaccagaaaaatgactatgttggacctgatccataaacaaataaagagctatcagctcttgatccttgaaatccccatgagacaagagtttgccttaatttgtcattccaggcgcgaggcgcttgtttaagaccgtaaatagccttctgcagcttacatacaaaggtaggatgctctttatcttcaaaaccaaggggctggctcatgtacactgtctcagtgagaggaccatttaagaaaacatttgtgacatcaagttgggaaacattccaattattagagacaaccaatgatagaacagtccgaacagttgttggtttaacaactggactaaaggtttcttgaaagtctataccagcctcttgaagatacccctttgctacaagacgagatttgtatctgtttaaagaaccgtctttgttgagcttcacacgatgaacccatttgcatcctataacatgcatatgaggttcaggtggtacaagtacccaagtatgtgcctgatgaagagctccaatttctgttttcatagccccattccactttggatccgcaagagcagccttgagattcttaggctcagttggtaaaatagactctggcagtgggtgttttgtggccaaatacgattttggctttcttatgcctgactgagatctagttttcatacaatgagtcctgtgagatgtgtcaataggcacgggttctgagtcaatagtaggagcatgatgtagagaatcgggtaagggttgagaattggtattgggaatttgagtggtgttttcctgttgtggctgagtgtttgtgggatcaatgggtgggaattgtgtgacttcaggtgatggtaaagtagatgtggctggtgcaggagacatagcaggagttacatgaggaatttcagtgtttgtaggtggtgcgggagtagcatggttgggaattgatgtgggtgatggttgctcattgacaccagaaccagtaaacacaggagtaacacgattagaattagtctcagtttgctggtaat

SEQ ID NO: 223372 - DNA, 1528 bp, Cannabis indica
attggatcgaataattttcaaattcaattattaattaaaattaaatcgaataagaaaaaaaatattaaattaaatcggatctccaatcttaattataatattttaattttaaaaaaataatagttaaattaaaatatgcttattattatcatcatttgtcatttttcctaactacaaatttaaatgagctgcattgaatctcattattagttgtatcttgattcttgtgcatagttgcaaaccctttcaattaaaacagctagagctatctcatctaatcaaatgagataaacttaagttattatagtttatggttaatttttaaagagaaatgctaaagggcaccagtggtgcctagcaccttcttatgtgtcaatattgctattggtacaactaagtatcgggtcccatataatttaatataatagtttttaaggagtatcgctagccaatcgcaacgcgatatgtcgcaaaggtgctaggcaccactggtgcctaatagcaatgctcttttttaaaatataaatagagtatataataaatgttagagcacttttaatcatttctttattttattatttaaaatattttattaaatgagataaatttgagttattatagcttatttattgaaaaataaaaaaataaaaaatttacagctaaattctcatataggttaattaggatacagttaatctttcttaacttctttttttttttttttttttttttatggttaatacttttttatgttcaattctatttctaaatttgatgtttttttttgacttatttaaaagcctttcttaagaatattttgttgtgtaaacacatgatatggactggactattgatttagtgaatcacagttataaaacaaattgtttaatattatatgcaccagcagcttaaccacttgatgctagttcaagtggtcatagagggtgcgtgtgtattataaattttgggttcgagttccaagttatactgatgtaatatataaacgcttaaataaaaaaaaaaaatatgcaccagcagccccacaacgtgtacaattatttttaaatggcgtgtataatgagattgggtttcataaaagttaaatccaaatatattttcatcaaaattggaaaataaaatgtaataaaaaaagaagataaggtagctgccttaagtggaaaaagtgtagtcaaatacaaggaatggaaggctatagtcagctatgactttagaacaaccaaaccaatcatattaattctcaaatgggggagaggtcatagcgtaggtggcacgatgcttttctataaaataataaattcatcaaaataaaaatgaatcttttgttttatttatttagtattttttaaataaaataagcaaaaaaatgtattaatgagaagtcaaaaaaaagtacaagaagataattcttttacccaaataaaaatcagaagcaaaatacaacaaaaaccagacatactctaaaaataaggatctaaaataaaaattgctattaacaataatagaataa

SEQ ID NO: 223373 - DNA, 2844 bp, Cannabis indica
tatatagcatgtgtgaatgtaatatgagctatatttggaataaaaatatttttaggtttgacgtctctgaagacttgataagtggataaataagcgtaatttatttattaattacagaaatttatttgaaagacgtctatataatatgagttatttgtgaaatataaatattttcaagttcaacgaccttggaaacctgattggaggccaaaaaatatcacaatgatattagttagaaatattgatagaatttttgaggtaagttgatcttagaaatactgaggtattttgggtgtacttggagttggccaaatactttaaaagtagaggtttcttagtgactaaaaaatgataggataactattaataattttttttattaatatattattattattacttttaagattattattattatattaacgtattatttaatttttaaaagaaacgtatcagttaagttaagttatatttcacatttgtaggacttctttttgtcctccttctttttctaaagggcttccatggcaatgaacgccgaatttttgcacgaagcacctgcctctttattattttagaaggaaaagtatttgttaagttataaacagtacgaacatataaacgaaaccttctttttcagtgcaatgaaatcctcttttcctttaaactattttctttgatttttaacccgaaacctagcgatctaagctatggtagtagcgagatagcgaattctctgagtggaaaagcttaaggtatggtttaatttagttttaagttaaaacgattagttttatatagagttttatgaattagaatagttatggaggttttgaccttatagaattgttctcgggtagtcatgggactaatttcgatgtttacttgttgaatttgatgtgattttgagttagaaattgagtttggaactttttaaagcttagtccgaatgttaatgacgttttccatttaagggctcaattttaatttctgttacgtaaggatggtaatatttatggtatatatgtgccctgtgaagtttggagtgatttggataagtttcgatagtgttttagtgagtgtgaagtttgagattttcgtgttctaccgtttttgaaaattcctacaagattagaaattatatttttgtcataacttttcactcaggtgtccgttttggacattctatatattgttttaaagcttgcgaggagctctaccatatggtttatattttagagccaaaatataagttttattttagtgtatttgtactacggggtgtggtagagaaccccaagttatcatttgcaactgttaagcagtgttttgagataaacacttattaatttaccgttgttgtgacatagggctgagttcatcggggaagtttctccatttgggttggtcgacgtgcatgaatctggataaaaagtaagaaaagtataatataccacatggtatgacatgttttgtaatcattgactgtctgattagacagtaataatgcaaatgtgacatatgacttcacttgattaggtgatatgatatatgaaatttagattgtgaaatggatttgcttgattagtcaatatgatatataagtacccctgattaggggatatggtgccaagttatggcataggcttagctagcctgttaaggcaatgcggtatatgaatgttagattatgacatgagcttgccttattaggcaatgcaatatacatatatctatgatgaatgccaggccatggcataatcttgcttgagtaggtaatgtgatgtatggatattgacattcaggttgtacctgtggggaaaccgttataaagttatgactatgaatcgaaaccgctgtttgccaggtcctaaaattattgattgtctgattagacaatgataatgtatgatattatggacataatgtataggctcacctgattaggtgatgcgatattccgggcgacatattgggcgtaggtacgagcgtcagtgacagaatgaaactattgtagggtttcttcctggcgatgtatcaggtgtaggtacaagcgtcagtgatagaatggaaccgtgtacggtttccccattgccaggttatggcacagaatgaaaccgttgtaaggtttcttcttggcaacatatcgggcgtaggtacgggcgttagtgacataatggaaccgtgtagggtttccctattgccaggttgtggcacagatcagaaccattgttgggtttcatcttggcaacgtattgggcgtaggtacagacaccaatgacatatgataagtaccgggcgtaggtacaagctcatctgattagatgatgcgatatattaatgaaaaaataaattaatttttagtcatctttcataagaattctttaaataaaatgtagcataaagtgattgaatcggtcaatgtacacatctactatctatcgacttaaacattctacattttaaataaaaataataatatgcacaaattttgactatttttctaaattagtcgtacccttatgaattggcgtggctgtgaggaggttgtttgctgtgaaaaagaagattaattaattatgaaaaatattggaaggcaccacttttctttaagagcattactagtgtttagtactttttttttttttagtgttatattactattggtctaagtaactattaggtttattataattgaagaaaataattttaaaaaaatattgttaattaatacttataaaaagtgttgaggacaactgtctaataacaaagctcattaattacatagcagcctgccaaacttggaaaatgactttcactttatgacaaaaaaaaaaaaaa

SEQ ID NO: 223374 - DNA, 2770 bp, Cannabis indica
gaacgggaccaagacttgaacccagaaccggacccaacctcaaaccctaaccaagaccgaaacccatacctgaacctcgccctagacccaaatcagaaccgaaccctgactccgacccaaacttgacctgaacctgtaccctgtgacttgaaactggaacccaaaccaaaatcggattgggacccagcaacagaatctagacccagacccaaaactgtaatcggaccaggacctagactcggagacagacccaccctaggattgggttccaaagatgaatctcaacccgaactggaactcaggatccaaacccagacttgaagacccaaacatggaataggactcgagacccagaattgggatcgagacccataactacacccaagactcggtcccaaacctagacagggaccgggggcatgaactgaaactagactgggactcgtgattatgataaagatcttgtcctcggatttgggaaccggggcttggacaagacccatagtctgcatcgtgatctgggactcggagaaggacatgaagtttgacaacgacctggacccaaacacagacttgggacccaaaaccaaaacatgaacctgaacgtgaccaggaccctagaacaggactgggactgtgaccagcacttggacatagacaaagacccagaactatactaaaattaagccccagaactgggcctcggaccaagtcttggacccgatcctagccctagacctagcccctgacctaaactctaattcagacattgacatgcacataaacccagacccagactcgaataccgacccaattttagattgggatcgaaacacaagacctagacccagactcaaatgcacacgaaaacttgaacctgggacctagacgccaagacccgaacttggacacagactaagatctggacccagacaaagattcaagaaacctgtaccaagactcggactacgactcggaccctgatcccaactaggatccagacctgagaccagaactgaattcaaacgataacccaaactcataccagaacgtaaaccgcgaccttgactaggactgggacctgagacttgggacccaaacctgaccgtgacccgtatcaggacatggacctgacctggtcctaaaccctcaccaggacttgagacccgtgaaatttgaaccgaaactagaagtagattaggacccaggaacaggactgaaaccaagacttggacctggaccaagaaccgtaaccggacctggacctagactcgaaatcgtaaaccgaccaggacccgaactcaaacccagacctagacccaaactgggacccagacccagaccaggaacccaggaactaaaccagaaccaaatagggacacgtgatagggatctagatttcggactcagaccaggacccgaacccgaaccaggacccaaacctggaccctaagccaaacccaggactcgaaattggaacatgaacaagaaccgcaaaactaggaccctcaaaaccggttaaccggttttggcagattccccgaactactcattttctcaattcttgcccattttagagccttagttgggtgtatccctgtttcctaacatagtgtagtccctagtgattataatagaaccttgagttgtaggttcgagtttcccggattagggttttggacatttgatttacccagttttaatatgtgattagggcatccatccagcacgtgattttccgttccattcggctaactcacttgaatttggaaagaaagtaacaactatgtataatgtggaatatggatatgcaaatgtatgtatatgttaagtgtatatgcatgcttatatatttgttgcactaccaacacttgtacggttatggaacagagtgcattggtatagtgtatattgttaaggagtacattacggtgatactagcacaagtacgggaaagtacagggtgtttgtggtatatcactcagtggtactaagggtacgaagcaaatcctaccaacactcgtaatacgatatgtggtgtatgttgtatagtggctgtaccctagtatggaacatttttactcatctgttaagccttgtaaataggtgtatgggcgcctagatacaagttggtattatatgatatgttatatgcttttcttactaagtctgtcatcttacagttttgcttccatgtgtaggtaaaggaaagacgaaagcagaacacgagtgagcttgagttaggatgagattgtacatgtcatggcggaacgacgtggagtgttcagtctcgagacatttggggttgttatttgtagtcgctgtgcgatctgccatttgtattttgaaatatgttgtaaaaagtttaaaaacaggatcccgactttgtatgtatttatgtaaagattataaagtttaatatataatataaaagttttaatttgacacgaattttgagaaaattctttggttagcaaaaacaacactgtaattgaaaaattattgtagcgtgccttagcattagggcattacaataataatataaattggtatacaatagactgaaactctttattcctctcgttcctcttgaagaagaggaagcatgataggaatttcttatagagttgttaatataatgttttttcttcaaagagttacccatatctaattgtactcaggggtatttataggccagcttctcgtactgtgatcatcatgccgatcatacttagagaaaatctggcccttcattttgtaactccctaat

SEQ ID NO: 223375 - DNA, 2263 bp, Cannabis indica
tagcttcctataaatgatatttcaataaactaatataattactgaaataagagctcttccatatatctctattaagccatgcttgaagagaatcattatttcacttttatgtcaagaaagaagttatagattctatatctatgattagtgctctcactcaattgtactaccacgttcctaagatgtaagtattgagccgattcaattggtcatctttaatgaacaactcaaagaacacaaacaacacaattgaaatcgaacctgaccatctcaggattattgatctaagattaactacgtgatattgacttagaaagatataacggtaagtttatgatatctttaccaagttcaatattggtctagtccgatgcatattctatacattcgatactgtaacatactttactaatgccctggaaaggacataactcttatctaaggtgtaagtaaactttatcgctgattatcacattagtataaatctagtacagatgaatcatgggacataagctttgaaatatataatcacaattacctttcactgtgatgacatcactgtaattgtgaacaacaatatgttttaaattaaattgtatattaaactataatcatgaaaataacatgttaaattaaaaaattttattcttctattgataacaaataagatcatattgaaatgagttttatttagtgcataaaatttcaatactaacaactttgttagacttatattattggtttgtgtagtactactaaccattgcctcctaaaactaagtatcaaaaagttgtaactgtatttgataaaatctgctagaaaaaagacaatgacaggaaattgttcggacagatgaatgtgaatagaatatatgaccacatggcaagtacattgaaaaaaataaataaataagctagtggggaatacattatcaataattcaaaccaaagaaactacatatataggatatttgtgtattttgagatacaaacgttagatgtttgatcaacattatttgaaactttggatttggtggggtgttacaaacgttgctaagccgactataatgggttgtgcaaaaagcttcaaatgtggtgttcggttggtttgatgaaagggtggtggagtcaatttgtcgcagtgtccttgagaattcctcctccatcttattaatttgtgcatacacaaaagaaagtgggttacatcatgacagcatggagccctcatgaacttgttcacaacaaatataaagtacttatgttggataaaacatatgatattagtatacggtcgtatatatttatatatatatatactacaaaaaacaactacttttagtcacaacataaattttttatagctaaatgtgatttttagttacaacaaaaagttacttgtgcctaaaatataatatttagctacaataagttatcactaatttagttttagtcataacaactattatgactaaaaacacatttagtcacagcaaattgtaatttttgtgattaatacttttaaacacggactttttagtcataatatagaaatgatgatcatttataattagtcacaacttttgtacttttaatcacaagttctgttgtgactaaaagtaaaatcttttatagtgataaatagtacaagaaaaaaataagtcatacttcaacatatgctgtaaagtatatgacacttacttgctatcaaggtttaaccttataataaaatttttactactaataaaaagagatttctcggctgctaaaaataatcgggtatggtattatcgtcagtctctatgaacgatacttattcaaccatcacaaaactttttagaatatttatggataaaaatcgtcgtgggtatgtccaacagttttaaaccatcacattaaaaaaatctaaatctaagctacataatgcaaaagctaagagaaaaaaattaaggatgatttcgattaaaataaaaatttaacgatgtcgcgtttaagcgagagtaaaaattattcttattttaaaaatttcttcattgtttcatattgtaaacactattttaagttttcttttttagggatgagtcaactagatgtcacatttacaaatactatctgtcgagatttaacactattatgttatttaacggatgacaatcttatggagattaattaaacaacaaaccaagttagataaacaatgaagactcaaaatttatacttacatgattgatattaaacgtcattaagtttcaatataaattcataca

SEQ ID NO: 223376 - DNA, 1926 bp, Cannabis indica
ggtatggctcctatactaaaaagttgaacatgacaatagtatagtgaggatcacttcagctaagcttggattaaaaaggaaacctacaactactacttcaaatgtacttttttcttccaacttagattacaataatgtagttgtatttaatttgatgagaaaacgcgttgaaaaaactttttttttggtacttcattaaaattaatcaattacagctcacaaacctaacaacactctcaagcaatgagtatagcttatagggttggtcttgagataactttagttgtttctttagtgagttcaacactatcacccacgaatccttggataagtggagagtgctcacatgtgtaacaccacccaagagcaatgatcaaggcccagggggatttagtatggcaagtgaccaatgaagacacttccttgatcactcagcggtcgagtttcttaagacatggtgtactgtgtaagtgttaaatggtcaagcggtagcagataaagtaaaataaagaaagctaacatcagaataaaagttttattaagttggaaataatttctaatttaactaaaacaaattctgataatattttactaaggcttatccacatcgaaaggtcacccaaaaattaccaactaacacactacagctaaatgctaaaattaaaaataagaagaatggactcagacaatgtcctggaagtttattacatccatggtaaactcatccttatcctcactctctaaaactggtacatcaacatcaaaaggggaaagtcaggatgctcagggttgtagccttcagctttgacagattcttcgaccactgactcaccaccattcatagtaaagtctattttctggagatattcttcactaaaatgttgctcacaacgctttacaaacttcaacacttgtgtatcaaggaaggccgaccaattgaatgactttactgctccattagcaaaccaagcattgtagatggcatcaaagcataagccatcatagaaggtgacatcaagaactgcttgatctttaagggtactcacttgctctttcaagaccttgacttgatctctaagatcagcaacaactaatgtctattcctggagtgtaagacgagaagactctttaacatccatagtcttcttcctagcaattcccaagctcttcttcaagctactctctcgagctttggaaccactagccacttctcaaaaattagtcaaatcactctctagagaatcaatcctctccttcaaagcagtcacctggtcttttacatcatcaacatgatcatctagatcctcaagcttctcagcaagctcaactactttcttgtgttcattatccatggtgtaagcataaccaacataatctcgaaaacaagaaaacaatgtcaggtgatatttttttttaaaaagagattaagatagaaggacacaagaacaaacagtttcctcgaagatgtcaatgaagcatctttgagcaataacatgcagaggtttggtgctaaccaacttttgcaacaagatatgctcaaccttggacaaatcatggcatcaccatgtgtaattagctacgagctctgcgcacgcagttgctccattaaatctgaccccaagttcagaacaccagtctcagcctaattcacagaaatatcaattggagatctctcatctgcaccaatagtattaaacttctctctgctagagtcctgggcaagaggagcagcatcattaagtatactcctctttttgactttcttttttgaagcaacacaagcagtagggataccctagacaacttcccttactggaggtttagattccttcgacactaaaaatttttgtttcaagtttgaacaagataccatagcagtcaggaagctgatcaaatttttcttttcttatttttcttgctaatttt

SEQ ID NO: 223377 - DNA, 2404 bp, Cannabis indica
agaaaggattttttacgtggttggggcgttaatgagccttagtccacgagtctgtatatttatgagtgtatttaatacagagagtgttcttggtgagtctttactcttcttgcacttatgcaacccaaaattctcgatccccattaatgagctttgagggggtatttatagtgtttttgtggggtgatccccagaattatagtacatgtatttctgtaactatcagtaaactggtgtattcccaatgaatatactatgggtaatgcatggtcaaattcctacaaaatccctaggtgctgtagggattttatggagcttgtccttattcccttttgaccgatgtgattcttcagaaagtagccgtcattagactctagtggtcatagtctcgtaggtgcagagtgggggttgtgtcgtcagactttattgcgtgtggcagttccaacacgcctcctcccatgcggcattaaatgcgagatgactgctcagaggaagcctgacatctcccggagatgctttgatgccaccttgatctccgggagcatagaaaacctcgtatgccttctccgggaggcatatccaggataatgcctttctttataaagacttagctattaatttgagtgttaaaacctttgtgtccacgtgtccttatctggttggtccacgtatattgggcaaaatcaggggcaacacgctacgatattaattatttatctttttttaattaaaaatatacaaatttgaataaaaaatgaaatcaattttttttggtaaataaataaaagcttttgttagtgaagaaatcgtaaagtaaaatatttttgctgcctattttttttattagggtcatatgtgtaataaatataaatgctaaaaaagctttaccgcaaatatctcatttaataaagtatttttaaaatatttatcatctataaatttataatatagtttgactaatttttcatgatcacacttatgatagtcatactactagatttgatctgattctgaagtaatctatgaactcatatttatagtgttatataatttttaacttacgaagtgagatttatgaaaggaaacatatgaataatgtcatagttccacaactagagaatacatatgtatagagtaaattatatggctgaggaatagttacattaaatatgtaaccattatggttatatttacttttaaccattagatcattgttaaatggttgttaaatggttatcattaattaagaaattaaaaaaaaattgtaacttgatactttatttccttttaaaaacttaattaaaattaattttatttaaaattaaattattaagaattattaattaattttatacaattggaataattaaagatttttttagcaattattttttttaacttaaataattaaaataattgcaacaaaattccttataacttaaagttcttacacacataaccttaattaataaaaaatagtataaataacctctaattacatgtaattttgtgctcaatcttattttttaacacttttaagtgccaaattagtgtggcagtccaagattggttcaaattatttagttttttttttctttttaaaaataaaaattaattgaaaaatgtaattacaactataaaattaatgattgtttactatttttgctccttgttgaaatcatcttcatcaatctaaagattgtaaaaaaatattatcaaagtagattaccaattaattgaaattcttctttttcacaaataagcataacagtattaaaatagcagcaaattattaaaaactaaggagaaatctaactggcttgttgaatagagaaataggtttgtgacatagatgtaggagattgtatctaagtggaaattcacataatgtcaggttgggacaaactgaaaccctaatttaataaaaaaaaattataaagaaggaagatgggtcaagcggttgttgtaaaataataattagatgtaatttttaaaaattaattaagtattcaaaaacttattttagaaggcgtaaaagtctaaattttgtgaaaaaataaaattttattgtaaatattctagataaatggcttaaatgttaaaaacattataatagagagttaaatattaaaataaaattatttataaatattaattgttaaaaagagtcttattaaatatttaaattaaaattaattattttagaaaaattattaattatgattaatttaattctttttttaaaaaaaaattacttattagcaaactgcagttacatgtaaaaaaaaatattaacggtatattatgatagttataataaaaatataaccattaataaatactaactcatgtaaatcttaattatattatgatcagtataaaattttctcttaatgatgaaatt

SEQ ID NO: 223378 - DNA, 3026 bp, Cannabis indica
gttgatcccacttttctaacaaaaagattaaagatcaaaaaaggtctggctttagaaactaaatcggtgctgatagaatttttgagaccaaacctggacctttttgcatggtcacatggagacatggatgtaattgacccctccgtgatgacccatgcactcaacattgatccaagcatccggcttgttcagcaaaaatggcggctgctggataaggagcgcacccaagcgctcaaagatgaggtcaaaaagctgagagccaatgacttcatagtagaggcattctacccgtagtgggtgtccaaccatgtgttcgtgcctaaacccaacaaaaagtggagagtatgcatccacttcacaaccttgaataaagtatgtccaaaaggctactttccacttcccagaattgaccaactcgtagatgccacagctggccatgaaactcgagtttcatagacgtgtattcaagttataatcaaataaagatgtatccaccagatcaggaacacaccagcttcatgatggacctaggcctttactgctacaaagttatgcccatcgagctgaagaacacaagggcatatcaaaagttggtgaacatgatattaacagatctcatcgcccgcaacatgaaggtgtatgtggatgacatgcttatcaagtccaaaaaggcagggggcatgtggaggacctatgtgagtgctttcaagtcctttacagctacaacatgaagctcaaccccctcaaatgatgttttggtgtaagcttaggaaaattccttggcttgatagtcaatgccaggtgaatagaaccaaacccagacaagatccaagccttttaagacatgaagtcgcccacaactttcaaggaagtacaaagcctaacaggacgcatttccgcactaagcagatttgtgtctaagtccacatacaaatatgtacccttcttcaacattctcagaggcaacaaaaaatttgagtggacagaggaatgtgaaaatgcattccaggagctgaagaaataattggctcaaccactggtgttgtctaaacccctaaacaatgaagagctaggcatatacctagtagttacagaacatgttgtgagtgatgtcctcacaagagaagaagactgtgtacaacacctgcgaaactacatctacaaaaggctaatcaatgccaaaagtcgatacccactcatggagaagctgacctacaactttgtcccggcttccaaaaagctaaggccctacttctaggcacaccccataaaggtgtacactgaccaatgactttggtaggttttgcagaaaccagaagcatcaggccgactacttaaatgggcaattgagcttggccagttcaagatcacattgtaactaagaataaccataaagggttaagcccttgcagacttcgtggctgagtgcaccaaatcaactcatgagatgcgtcaagatttaggagaaaagtaagagctagagaagaagcgagaccaagagcagcaacaaaatcccaaacatttaacatggaactccatgttgatggaagatgcactgactaattgtccagtgcaggcattgcccttacaacacctgcgggcaacaactgcacagagcaatcaaattcaacttcaaagcctcaaataatgaggctaaatatgaagctttaatagacagcctcaagttggcgcatgaagtacatactaattgcctagacatattcaacgactctcaattggttgtgaatcaagtcctaggtgaatacacaacttgaggtgagaaaatggtggcctacttgagcaaaatcaaagacttgctaagtcagctcaaaggctacagaattaggtagatccctagagagcagaaagctacagtagatgcacttgcccatctaacaagtaacaccattgcaaacaaagcaaactctgatcccatatagttcctaaaggaaccaagcattattatccaagaagaagttgacatgttggatgacactccaacatggatgccaactatcgcagcttacctcctaactggagccttgtcagaagacaaaaatgaagcgagaaaatctagaacaaaagctattaagtacttagtcctagacaggataatgtaaaaatggagcttttccatgcctctcttaaggtgtgtcaccaaagccgaagttgaacggctaacggtataattgcatgaaggcttttgcgacagccatgccatggggtaaagcctatccaagaagatacaatgataggggtacttttggccaatgatgattgaagactcgatggactatgtcagataatgtgacaagtgcaagagattttcaaaaatatcaagagctccactcaacgagctcacgatggtacagtctccttggccctttgcagtttaggggatagacctaattggtcaactcccaaagggaaacggagaggtacagtttgatgttgtcgtagtagactacttcaccaaaaggacagaggctgaacctctggcaataatcacctttaagaaggtccttgactttgttgtcaagaacattatatgttgattttggctttccgaggagattgtgtcaaacaacgacaagaagtttgacagtgacatgttcactaatttctgcaatatacatggcatcatcaagagcttctttgtcgtggcccatcctcaggaaaatgggtaggtagaagttgtcaacaaaaccctcaaggaataccttaagaaacaccatgaggaagaaaaaggctactggcctgaatcgctgtttctttattgataaacgaatattcaagattacattgaaaatgattttatgtagtgcacaaaacccaataaactctgacttgaactaacataaaatattcagtacattttaattaatcctatattctctctatgcttttcaaatgtagtgattgtcagaattttaatgaatggatcagctacgttatcttcagtataaaccttttccaccagtacgtcccctctcaccacatacgttttaatgatgtggtacttcctc

SEQ ID NO: 223379 - DNA, 1957 bp, Cannabis indica
cggtatttcaataaacaagttaaggcttggaaattatttgtggaagatatggtcctaagaaggtatttctaaacacaaaagatagtacgacaggtgtactcggacctaaatgggaaggaccatatcaggttgtggaattcctcgaatctggagcatacaaattaggtatgtatgatgaaataatgcaacttgttctagtaccacggtattggaatggagaagatttaagaaaatacttccaataaagtaccaggtcggatgatcatattatatactgaaagaaaatttacttgtaagtgaatggcctgctaggcggacgacgctcaaaggttttgacaaaaatgaaaaagtactcaggttagatgacaaccatttaaagtacaatttctcatttcttcaatttgttttatttcatgttaagctaaaagatcaaatcagatcaaatagatttgatgtaagatactacagtaacaaaaacaccttcgatcaataaatgaataaagatgtttatttcaaaattcaaattgagtcaaaattcataacatgttgctaatttactatccgatgcgtacaaaaggtttgttccaacccaaaacttggaaaaaataaaaaagtacacttgtaaaaaaacaagtgactaagagtcataagtctgctcggtcacttggggggcacttgtacctgtacaaagcatttggtaaagacaaaacaaacacaattgcacgatgattataaatagagaatgcaattcactaaagttcacaaaagcacgtaataccaggattaaaagctccccggtcagcctgttctctgtaaaatgaaaaataattccaagtttaatgaccgctttgctggtcatggtgtcttaaaaaaagccttatggccgaataagatatataaaagagaagtataaaaagagatgtaattaaacaactagggtcccaggctctcagttcggatcttctgggttggtcggaaggtacatcaacattctggccagaagaagaagcagtcgcatcaggttcaccataagccacttaagaacacagtactcgagatacatgtctttggcctcgcccaggtaattgaaatttacctgcgggttagccttccaaaagtcataaaaaatctcgagaccaattgtctctaaggcatgtactttttcttccttcctcgccacctccgacttatacttctcaatctcatttgtaggcttctcctccttggtgttcttctcctcttccagccgatagaagacaattcgaagaactcccctttccttttgaaggctattcacgtctgccgacagagtgccaatggtagcctcatgctggtcggaagcctcgaggtccttagtaaactccgctccatctgaacatctccgtgttcaaccttggcatcatcagcgtccttcttggccaagtccatctccagcctcattgtgttggacatagcagcgttcttggaggcaacagatttagctcgggattaagtgtaagccaacttcagactagcctacatagagaaaaaactttagaatcttagctaagtaaaaaggattaaaggaaactgtcaacaaagacttacccttgttaattccctcaagactcctcccatcagcagctctagagaagattcattgttagccccgaccagctgctaacttacctcaggaaccaaccggttcatgtaataggcgagcatctctttttctttcttggcctcgggatgcactagcaaaggtggagtaggagcccgcatctgctcaactacgctcttggccagcttagatccaccgtttgattgctcaggcctatccgagcttcctcctcgagatatttggacttagcaacttttggagtagacggatctgcaacagttagctcctcggaaaaggtcgataacctcccggccggtgcctttcctcgaaggggtcgctcaccgcccctagatttct

SEQ ID NO: 223380 - DNA, 831 bp, Cannabis indica
ctgaaatgttaagtcttttactaagttgatgatcaattatagaaataacttctaaaaacaaaaaaaaaaaaaagttgatattctttttttattttttattttatatatatgttcaaaataagtgatacttatataataaaaaacaattaattatacgtacttttcatatttcataaaataataaagcttcaaaaattgttcaaggattcctttggtacgttgtattgtattgtgttggattatattatattgtattaatattatttaatacaatgctatatttagtattgacttgtattaatagactgtgtaaagttataatatattttcaatacactcggccccaacaccaactataggtcgggtctaggtccaggtgccggtctcaattcaatcgggtttgggtctgggtccgggtcgcagatcttgggtctcgagtccgggtcgtgggttcgagttcgagttcgagtttgggtcccgggtctaggtctggctccgggtcccaggtctaggtctgggtccgggtccaggtccgggtccggatatgggtctggatctgggtctcgatccgagtctaggtctaggtccaagtcctgggtcaagttccgggaccgagtccgagtctcgggtttaggtccaagtcctgggtctgggttcgggtctagggttcgagtctgggtttgggttcgtgtctaggtccaggtccgagtctcagtcccgggtcccagtctcggtcggggtccgagtcttgagtctgggtctggctcctaggtcttgggtccgggtcggggtcccgatcccaggtcccgagtctcgtcccgaacccgaact

SEQ ID NO: 223381 - DNA, 2778 bp, Cannabis indica
aaataaatttcttaaacaatatatattaattcaagcacaaaaaaataataataaatatatatatttaaattattacttttgggtaaataattgaaatattcacatataatattaactcacttcatggaatgtgaactaacatatgttattactagctttgggcaagtaattacttatatagtcagccaaaaaaaataattttttttacaacatataaaatttggtgataaaacaattattgaaaattgaataattttcagctaaattttaaaaagagatatattaattgcttgtaatatattgataatcaaaaataaaatagtctaccataatatattatttttgcatcaaacaatcaagttttacaagtttagagcaaaacctaatagaaagatgtgaaagtaagaatattggtagagactatataagaaaaaaaatcaaattaagtgagtgattatgtcaaacagaaagagaaaaaacccaatttttttctatgatttatagatttcaaaaaaatttcaaaaattatttttagtaatgtttttaacttccttattattattaaattaataataattattaaacggagttaaaaaattaatgaaaaatcataaaaaaaattataaatgaaattctaagtatgttggaaaaaaaattgtcgaaaaatgatgttgggaggagctgcacgtgccctcacgcgccacgactgcaagtgggcttcactaggaaaggttgtcttcaaccttgatctgggtcgataggcaagtcgcgttacttgatatcaggtcgatcaggtctgatgaaaatttaaactaaaaaattgtacaaaaaccttggaaaattaaggggtgtttctcggaattagatttctaatcaatctattgtattaattttgggtaaaaacttctaaaactttgttaatctgactatgcattgttattccaaattttttcacttgacgttgcatgtccacataagccaagactgaggacacgtggaatgcagccttgtcaatagcaggaaaaatttcatgcaaggcatggcaaaacaattaaacgacaagcgagaggagttaagcaagtagtcaaagagctacacaacaaccaacaaaaggttgtacataggttggccaggaggagcttgtatggtcggccagggtttgagcacaagctggccggccgaaagggtgattgtccgaccaaagagggcccattcaactaaggtaacatgaccttttcaaggaaagttgttcaaatgcttgacaacacctactaaggctggccaacacacacaaaggctggccaacatttgggaaagctgcgaggaacatgacctcccaaaccttggtaggaacatggctagccaaaccctcgaatgaaaatatccggtaaaaccatggcaggaacatggccggtaagaccctggcgggacatggccagccagaccttagtaggcacctagcctgccaaacctcagcctgtagacattgtgtggccggcaagcctacacctagcaagtgcatggccaacaaacctttacctaataggcctttggtgcacaaccttcatccgtgaacagcaagctaagctgggagttgggccttgacaacccacgataatatgggaaaaatataaacaacttccctatttttgagggataattaacttatttaaagtttattatttaattacataaatacagctttatttacctatctttatgggataatctggatgtaagctctattatataaagagcattagtcaaatcctaaagctctcaagctctaagtctaaaactcaaaatcccccttctcttctctctcaggcactctctctcacttgagatttgccaacttgtttcttatatagtaatcttaagatcagagttggtattatgtttggtattaatacaaccaaaaggggagtaggttattaccctttagctaaggggtccaaacctttataaaatcttttatctcatttacttttttattcttattgtttaacacatgaaaacattagtattaaatatgactctacgatcggttggccgaattcgaagttaataatttggcactttctttgagagcgagttgttaatttatctgatcaaacattattgttaacacaaggagaaccccaactttaatgtttgcctcatcaggtcttcctcaagaccctatggcaattgatcttgatgtctgtgttctagccacaactggaaataccacaaacctaatggatgtctccaaccccgccatctcagcaggaatcacaaacctggccacgaagactcgttcggtggatactaccaaccctgttggtcttaatcgcccgcctttgttgcctaagagggatcctccactggcgtcgcgtactgaaggaatgaccaacgtagagcagcccctatgcaccacgacaagttctggtccttggtatcatgctggagagatggggccctaaataggtaagccaacggttggcgagtcccatgtaaactttggagaagatctcgagttactcagacttagtggggccatctaccaagccggcaaactatagaaccacgcgctattgtttgtaatacatttttacaatagagacgcaaatttttgagatggatggatgactaagagtacatacttcgatctcatcaagcagaacaagactgccataacaaaagctagtgagttgataaggctgttcaatgaaataactcttggaagaggtcaggatctcatcagagatcctctccaagggagactaatcgacagat

SEQ ID NO: 223382 - DNA, 1593 bp, Cannabis indica
gaaggagtcattatattccacagcacccaatgtaaggtttccttgcggtcttctcactccaggatcaggttaattttgtgtattattatcttgtgtcgccctagccgcggctgcctcacgttccaactcagcgttccgtcagtttgcctcctctaggcagcgtctgagttggcagttttccgactctatgaatggaacgtaccttgtaggatcataggcaccatccttatcagttggcatggttgggcaccactaatgttcatttcaggttcttcataccatgttcctggattttgggtcctccttgaacgtgtggtccatgtacttcggccaccctcaggttgggtcctcctggaacgagaggaccgtgtagattttgagttgggaggtctccgggagcctattggctccttctcaggatggtgagtgctttcttcatgaggagtatcaacattttttctgttgtcagccatggagaatttttatatatatatatatcaggagggttttttctaagcttttttttaacaaaggctctcaatgaaagcaccaaactgttaatgaagattttcgttaactatattaaagcctaaatcattatggatttgcacagaaaataatagcagtatagaaaaaaataaagaacacaaagatttttacgtggttttgcaattaaaattctgcatagtccacgagtctatattagatatttctgatacaatttagggctttttctcttaaggattttccgtccttttttcagtataccttgatctaatatatagttacatagaagggtagttaattacaaattggactgatatcttacaacaataaccccctgaatttgtgggattcgattacgtcacacgtaaaataaatgcagttattatttgaaaatcacacagctgtgattggtctgcttttaccggatcaatagatacatgtattaaatacgttgtaaagcgtatcgttctgggacatctcgctgaaaacatagcaataataaccctggtagcgagctagagcttttctcatgtcttctcgagattgataatgtacatctcgtcgtttctgtgattgaagacataacactccatctaacaatcagagttcttggtgacaaggtgaacttcagtagtcaaaatcatttgaatgtcagcttctatctgatagagctgactcgacggagtagagaatctcattgaaagatgtctgaagctgattagtgaaggtacccatagtatgtcttcttatagcgagagggatgccttgctattcgtcgtccaagtttattcagctgttatgcttagtttgtataatgtatgtgtaagaaccattattttttgtagtgacaaattatgtcctcttgcattccagttgcgtctgggactcgtagtgttttgtctggagttcgtactgttagtgttagtccacgtcagcaaagatattttaggttttaattgttcagatggtaacagctgtctattttgggtttcttggtttagctgggtataaatacgatttctgggtattttgttgacgaactttttgatcagagattagggattacgtttctttcttcttgtttct

SEQ ID NO: 223383 - DNA, 5476 bp, Cannabis indica
acctacatcaataattaagaagttagccgcacatctttagaaccaaaaagctagtttcagagatattgcaaacatcatcatatgcaaaggataaaagcaaggcaataaacattttgggtttcaaaaatgaaaagcaaacccaataatgccaacttcaattgattgctaagagatgcatcagcacaggatactcaaagaaaaggacatctgtactaataatttatatgaatccgacaattcctaggtatattggaatagaataaaccaatgaagattaatcctactctctttgccattatcccccccaggagataaagagagtccccataatcgaactataaagtagccaagtataataaatatatagaaccatatgcacacattaacactatcacaactagacgtacacaggccagcatgaatgtaaattttaaatagtatatgcctctgtatacctgaagttctggaggaagataacggtacacatcataaatctgatccttgaaccctctgctcaacatttcatcagattcatcctggtgacaagtaaccaaaatattcgtctatgtcaataacagagcaggaaattaacactataaactcggaaactaaaggcactagtcatgacaaaactcacaagaattaataatttaatggctctggtgcgcagtgtcctcctctttatcatgtcacatactcttccaggagttccagacactacatgaactccgtattctagttgcctaatatcctcaccaacactttttccaccaatgcacgaatgggcttggatattaatgaaactaccaattgccagtattactttctcagtttgagatgccaattcccttgtcggtgacaaaatcaacgcctgaaccctaaaaggaaaagtaaaccaaatctaaaaataagatagaaaactggaaaaccaccgaaaagattttaactaaaacagagactatctaaaagagcatcctgaagctctaacacactcgagtccacacatcctgtttgtactcgcgatttccttcagcttcaagaccctttccctaccacacgatatatcccccaaattctcccaattgacaaaacaatgtatcacataatctcaaaatcaatgcaattcaaaacgttatacaattagaaacaaaatcctggaaaactatcacaaaccctaaaaaaattcatatacttcagaaaacttctcaaatttctgctcaagcgaaagagaaactagggtttaaaagtacaaaaagcagtaaacgaaattgacaagaaaaaaaaaaggtaagacttactcccgtgtagaagtatcaacgagctggcagacagttagagcaatcatggaggttttaccggtaccagattgagcctgagcaatgacgtcgcggccttcaataatgggtctaacagcacgttgctggatagccgaaggcttttcaaatccataaccgtagattcctctaagcaaatcgtccttaatacccatttgatcgaaactgagaatgggctcaactccttccgtagtgacgaattcgagcttatcctccatcggcatgccacctcttctggcggtacggtttgccggaaccacactggttgtggcgggggctgccatggttgattgataataccaagctttgccttagagaatgaaatagaatcgacaatggcggttctagggtttacgcagaatgggggcaattgaggattggttggtaatcgaagtcgaagagggaaaatatgtgaaattaggtcattttatatttatttatttttccaaaggtggtacaatatactacatagcgggaccggttaccgtttactcaattttctgaaattataatctaacctatttaatttaggaaaattttcaaaaatatccttttttttaccttttatttacaattttaaggcttaaagtttttatttataaaaatatttttggaaaattttaaaattacaaaaatatattttgtccaataaaaaataagaaaacaattattttcatcgtctatatatatacttatcgtctaacttagttctcataagcttcaatcatgtccaccagttcatcttcttcactatcttctactatggctacatcgctaacaccttttaaatcaataagcttactcattttcttatgtattattatttttttaatatatatggatcaaggaaccagtgcgagcaacacaattaatggtgtggctagcaatggtactgttcatgagagaggaatctagggtgattttaatttaaataattctcaagatggattcttaccttctagctacctcataggagttgagatttcagttcttatagttgcaatatgcaaaacaaatagaaattgactcaatcttattcaaattgggttagtatattggatgaccggtgttgctttgtacggattctcaaaccactttcaaattcttacaatttctcgaatattggctggttttggacaagggccgcttataattcttggagcacccatcattaatgatattgcaccaaatttgcagaaagctttatggatctcaatattttattgttttacatcactgggctttgcagctggttatatttatggagaatttgctggaaaacatataaagtggggacaagcatttcgaatattatcacttctcatgtctccactattctttctaagtttatttattgaaagtccaagaaatgtggaaatttgtaatgaggagggcacatgtgatcaagaacataaaaacttcaagtcccaaattaagttgaatcttgttaaaatttcttaagatatgaaattaatctgtaataagaatttcatacttaataatctcggccttgtaatatacacatttgtatttggtgcttattccttttggactccaaggcaggatatatactctaccacatgaataatggtgataatattttcggcataatgactttaatatatgagtattgggtactatattgggaggttttcttttgcatcatttgggtgattcaattaaaaatgcttttaggattcaatcttttaccacatacatagggcatttttatgtttgggtgcttttttcacaaataacacaatcctatttgtaggattatttggtataggagaaatttctctctttgttgttcagggtgtcacatattataataatcttcattgtttgccaccacaataaaatctctcaattagttatacatacattgagagatgttatatcttttccacttgttggtgatattcaggattggacacataattggaaaactacttgtgtccttttaacttgtattttatttttagccgccatattttagtcgatgggtttgcctacatatattatatttatatgaataatccatcataaactttgtaaaatgatgttttttttaataaattacaagtatttttgtaagtggagatactcgaagaacagagagtacaacatcgactgagaatactggaggagaattaacatctagttcttcttccgtttgtttagttgatttgtgaaacttatttttttatttctttatttcttatttagctttagttttcattttttttttaaatacatatacttaaatagttcttgaggaatacataaaatttgttcatacactatgtggtatcattttatacttagaattttttttagaaaaaataagaatgagaattttagaaatatttttattttattttattaaataattttcacattttagttaagcaaaagaagttttttagcacacttaagtaaaagtaagtttaatatttgtaacacttgattaaaaaataaagtagcacataggttggtaattgggtattagaagaggacttaattgaaaacacttccaaataataaagggatttagggatttatgtaaatagttagaaatttcgattttttttttttcctgaaagggggacttaaatcctagacttaattatacctttatcaatcttataccgaaattacaaaatttagaggcaatggagcaatttcgacctctaagagtaaagaatcttctggagtgtttggctacctacgagaagtggtcaagtcaaacttgtagtaagacaaaatctagtattctcttctccaaaaatatgtgtaacactaaaaaaaattctattttgaaaaagcttgtaatttctcaagttcagggagatgagacacttgggaaatcctttctaatttttaaaacaaagaaaaaatatgactataccaaatcgaaggatagtataaagaagatgaaattactttcctatgttggaaagacaactcttattaaatcagtggttttctctatgcttttctatgtcaacaactaaggttcctttggctttctgtccagaattcaatgatctagtaagaaagtttttgtcgaaatggatagacttttggccttaaaaacttgggatcaaatctatcaacctaagctttcagtaaaatttaaaactattgagtagttttgaattcaaattggtttgtctcaaaaccctatcttagggttaaagagagagtggtatcaaaaaaacagcattggttagtctttccctccaccattgttgttgttgtgattatgtggcctaacaaagcaaaaggcacaataaatagtggaaactccacattttctctgcttctcaaagccagagatacgatgagacgggaaagaagcatgacatgataaaagggttggttaataatctcagatcaatttgatgtataatgcagtatgttctctgctgcatttcctcaaaatcagaagcgtgcgaaagagtttaaataacattactacttgttttcactcatttactgtactgcgtttctgaactagaaaagcaaatgcaatggaggaaaggggtatgtgcttgttttattaagataatcttcatagcagaatgaagaattttatcaaaaagatggtagctattcctaaaacgaaccactaatttcaatgattttaacatttgataaatccaaactaacaacggtaaacaacagatgttaaaataagaaagaatgttaccagatgtgatagttttccaatgctcggccagaggagatgattggtcggaagccattttcagccagagtagatgatcggagtaagaggaaatgaactgtggcagagtagagaatcagcacagtcaacggagatagaagaatgggtgagaaaggtgtggtggtgtggtattaatttgatttttattaatgaagtgatattaatttaagagaaatttaacacaagcaaaatattactatactgccccaaacaggtagtattactagggaacatgcttacattaggctcagggtgttcgcggtgtcagtggtgcgggcgggttgtaattaacttttttcaaatcaaattgcatatgcaatttttgtaatttctcaaaccacaaccgcattgcgagattttaaaactgcaaaattacggtgtggtacactat

SEQ ID NO: 223384 - DNA, 1547 bp, Cannabis indica
aatatataaagatatatattgttattaatgaaaaaagctacgatctgccagttttttacaaaaaaaaaaattacggtgacccttcatttacttattaaaaatttgtatttatttaattaaaaaagaaatttacagctaaaaattaaaaaagtaaacaaataagcgtgtctttttttttaattaaaaatacatatagtgacacgcctgacgtgtggggatatgctttttcaatccctccaagagtgactctaaaagtcaaatatttttaataaaaaaaattgtaaaattatgggaattattttttagtgacgcttcatatttttagtgacacacattacatgagactaacactgaaaatttagagtctacttatgtgtgtcactaaaaatcacttataactctttagtgacacacacttttgtgtgagtcactaaatagtgtcactaaaaggtaaagttgtagtagtaatttggtgttgcgaaattttctcgacaacatttggcgccatctgtgggaatcgagaattaaaattttattcatttcaagtaagaataccatcatggctggaaaccaaacaaacggaggtgctaacaacgggtccatcaacattggaatgatgaacgtaccgttatctggagctagaacaccgcctgtggacgtcgttaatggcggagtagggagaagtaacatcagacctctcaatatattccctaaaatagctggtcctcaagtcggggaaacgtccacaccaccagcaaccatgcactttccacctgtcactccggtggtggtatctgagggaatcatccagctcaccaccgatcaatatactgcgatccaggatcaactgcgtgcactacaggctgaagtggatggacaaaactgggccgacgcccccctcgagcccctactactggcagagacaacctgttcgcagggaacgaagagccaaccttgagggtctagacctggaccagccaacctcgagagaccaatctatgagatatcctaaccaaggaacacaagctgatgaagatcctgagcgacggaatcctcacagccgaccatcgagagacaatgacgcagaatctgcctcttcatcttcgcatggtcgttcaccaagcagatacacaaggtccggctctgtagagacgcagcagggaggacactatcaagtacatcgaggtgatctacgtgatcacctcaacgcagttttcaaagcgcgctctcgcaccccccataacgaggaaacaccccgtgatccccatgtgggcgatcaaggtgtaaatactcacactaacccgcctagcgcaccgatagcgactactgaggtcactatcccagcaaacctcgccgcagtagtcgtgactcctgcagtcgccacagtcccgactcctgtggctggaggaatcgaccaaagcatgcttctgcaagctttgaaaatgctcgagcagcagagaaagcccatatataagttgcatgggacctctcctttcaacacggaagtgcgacaagcccaacttcccaagggatttcggctatccgaa

SEQ ID NO: 223385 - DNA, 1764 bp, Cannabis indica
gtttctgaattataagaatgataatagaccccattatgatagagttagctattttcttaatcaaaatggtcaatgggatactggtaaacttagtcattattttgataatgatgatgtatctcaaattctccaggttcctattgggggatgagtaaaaatgattacttattttggaaattacatcccttaggtatgtttactgttaaatctacctatcattttgctaatactgcttcacttcctcctactacttctgactacagttttaataagagatggtggacgaccctttggaatttgtgtctccctcctaaacttaagtttttcatttggagagtctattatcacattcttcccactacttctaatctgttctttaaaaattactttctgaaccctttctgttctttctataacagttttaatgaaactgttactcatgcactcttagattcttccagagcaactatatatgtatggaaagtctctccccataataaattttattttgaacatataaacaatgatgttagagagtttattctatctaattttgtttctcttaaaaggatgatttcatgatggtgttaagcactctttgggaaatctgggggaataagaataataaactttttggaaaaacctatatgtctcctaatgatgttgtagaatgggttagttcttatattttggattacgaaagcaatgtggctgagggcttctaccagttaaacactgatgcagccatggatgttaagaaaagaaagcttggaactggggtagtccttaaagattgcaggggcaatattgtagttggtctttcaattccattagcaagtctcactaatttcacaatggtcgatgctttggcgttaaaatctagcatttggtggtgtcataacataggggttcctattgctattgtggaaacagattctaagctactggtggataaaatctatatatctatatatatatctataaaggacaagtatgagaatgtagcggtctaagaatgctttaaaatcatctttcttttttctccttaattctctcagttttttaattttttaataaatttataaacattaattgattaattaattaaaaaaaaattaatgttatgcctatataaaactcatcattaataaaaatcatcattaatagatttataaacattaattgattaattgatgtggcggtgattttttctccgaatattttgagtaatctatataaaactcatcattaataaaaatttccactactctcactccctaattcttaaaggtatgcctattcttattgataaatgtacaattaatttactattcttttaaccaacttaatatatatatatatatacatatttttgtatttgctacatcattcacaaccatctttcattgattgcaatttttttgacaaattctttgtattgtcatgcttttttttttttgtatagcttttttcttcatatttgactttctcttaaaattttcattaatgcttaatgttgtattaggcaatctttttttggaaaatttgatctttcatgcttcaaaataacacatggtgttattttgacccaaaaaattacacattgtgtaaatatgcctattttgtcatgggaaccccaaaatgccctccctatctaacagcctccccttctctctctttccctctcgtttgatctctctctctctactcgcactctctctcttccactttctctctattctctattggctctctctctctctc

SEQ ID NO: 223386 - DNA, 1984 bp, Cannabis indica
gctatgtccacttcaaagatcccattgtctacttgtcgtgatttagattctctgatgaggaagttttggtggctggcaaatgtcgacaagagcagatacatggcctttaaagcgtgggataaaatctgtcaaccaaagagttcaggaggtctgggtttgaggaaatgcgaagatatgaaccaagtgcttttatcaaaattggcttggagtcttgcaactaaggaggacaaaccgtgggtctcttgtttactgggaaagtattgcaacaatgatagtttttggtgtgtcaagcaaaaaagtaatgatttctatcaatggaagtgcattctggatactagatctacgattctcaaaggctcgctgtcaattgctgcatcaagttctacaattaatttttggagtcaaccatggatcccttggttagactactcagattttgtagttctaatggatagtttgagaggaaaaggctatacaacacaaactttgggggatgtttccctgggaaatgaatggaatcctgaggttattttccagatttttggggaggaattaggaaatcgtatcattaatattcctagaattccttttcctcacaaggatcaagtcttttggaaacaaaatccagcagggaagttctctgtgcgtgctgcctacatttctgcaactatggacagatttgcaccagaagaggaagtttggaaatggatttgggaggcgggcattcatcccaggatttcagtcttcttatggagggctttgaccgaggctattcctacaaagaatcgtcttcattttttgcaggataaaacttgtaacttatgtggtgtggaggatgaaagtgcttgtcatattctctggaaatgtagttttttgaaagcagtatggtttggatgtcgtttggctctgaaattggatgatattccatctgataatatgattagcatgtttaaagccttaatcgatacactgggggatactgataggaaggaattgataagttattttggctacatcatgaccgagatttggcaccagagaaattccttctgtattaagggccaagttgttaatgtgcaaatggttttggcaaaaatcgaaaagaaggcagaggagctgaggcatgcgatgtctgcaactcccagtcgcaatggtggaatttcagacggtttggaaaggcagggatcgggagagttcagtgactcgatgtacaacaacttccctactggttcttgcaattttgtcttcactgatgcatcgtgggtgaagggtactactggtgtagctgctataagtgtggatgtgtcaacaggctgctggtttgttaatgcgcaaaagttacggctggactcgactttggaagctgaattctcagctataatacttgctctgaacagggcttatgatgcagggtggaaggaagtgtgtgttcttttagattctaaaattgcagtacaggctttgtcatcaaattctcttcctgactggagagtagctagtgtgttttatttatctttaaacttggctaaaaagtttcgtttatgttgtttttcctttattaagcgtagttgtaatgctgtggctgatggtgtagctaaaaacgctagaatctctagtgatttggcaattttgtatcaaggggagggcaatcccccggtgattcccatcaattttcttaattaatgaactcatggttctttcaaaaaaaagtttgtatctaaatcttgccctctatagctagctactagtactaaggatattattatttacaaacaaaatataaatataataaaaaagcattcaaatgccacttgaaatctatcatcatcatcaagatcatcaaagcaatgatttaaactcaaacaccatttcctaaaaaatcgcaactcaagctttccatttccatatccatccctcacgatacattaacattggaaagtcagaatcatcaaatacatttgaattatttttttttttaaatata

SEQ ID NO: 223387 - DNA, 1468 bp, Cannabis indica
aagtatttaagtaatcaattttattatagttaactattagtataaaaaaaattggtagcaagtaaaattattttttaaaaataaatacttatataaaaataacttaaattaattttttaaaaataataataattcaaactaaaaattaataaattttttaattattaatattatttattttttaaattaaatatataattaaatattattatattatgtataaagttttaattatatagaagcaatcttaacgtaagagagtatatatcttatatcttaatgatcacatgatctaaaatcaatagtcaaaaaaaactttttttacacgtaaaaactttatgcacaaattaacaagagtacaacataaaaatatcgtattttttgtaaataaaatcataaaaatcgcgaaaatatctaaaattccgtacaatcgtatttttgtaattttttttattatttttgtgtatttgtgaaataatctcatttttgggataataaaatactattttctgcaaaaaaaaaatatttaattttacgtttaaagatttttttttttgcatttttaccctttttttttatagaaacaacacgtaaaaaaagtaatagaaaaataacatccgaacaacatcaaaataacaacagaaaataacatacaaataatgaaaaattaacaataaattaacaagtgtacttttgtgtaaataaaatcataaaaatcataaaaatatttaaaatttcgtacagccgtatttttgtaattttttaaatttatagtcatttttaaagtcggaggcagtgggtcatgttcattgcatatataatcatatttaattaaacatagctcaatctttatttggtggcttatatgaatggatctttgcttttatggtttttatgcaaagccgaattgtctgtttgtttcttgcttgctgtggggaagcccacattcgaagggtgaaagtagcgtttcatccgcagaccgaggccggctatgtattttgcctcgtaagacggcaatgtctcaggggtatatccgtaaactcaactaacctttactagctagtacctcctttatccatcaaccggcccaggcccgccaattttggcctacctaaagccgtcttcgagtcaaagtcaagatttttaaataaatacatgtagttatctttaaactttttattttttttaaaaaaaaaaaaatcataaaagatttaaaatttgaaaagaaaattacaaaaataggtctacacagacaattttttatttttactttttaaatttttaatttataataagtaaaaataataagttatttttcaaatgttttataatttatttatagttgtattacatttgtcataagattattttttgattgttttaaaatttatttatagttgatttatagttgtcagttgttgtatagttgtattttattttttctaagtaaaatatatttttgtaattt

SEQ ID NO: 223388 - DNA, 1158 bp, Cannabis indica
atcaactactaggttacaattgttggaggattttggtagtgatatgttcacaattagatcttgccataaacataagattcaaagatctcattcttatctttccaacgtatcttgaatcatccaattctgatgtatatcgagaaggttatggtccaaatactaagactaccgaattgtgacaacttggtatgcgagttgacggctctcatgtgagccgacgggttgttgtgcggccccctaactattgtgcgaccccatggggtgttctgcgagcccatgggctgttgggtgagccagggggcatttgggtgagtcgtgaaacctttatgcaagtgttggagcatccgttcgacccgcgggtgaaagaaggagagattatacatgtgtggatagatgtcatgtgcgaggagtgttagagcatgggggatcgcatgtgaacccacgggggcacgcatgcgagacgtgggagagagtgcgtgcgagtggagggagtgtgtgcgagtggggggctcgcatgcaagccgtgtgtgcatgtgggggagtgtgttcgagtggagggagtgtgtgcgagtggcggttggcatgctagcctatggggggttcgcatgcgagccgtgtgtgcatgtggggggaatgtgtgtaagtgtggggagagttgaggggatgggagaagggtgccaagtgtaaggtgatatgggtgtattttggggagtgtgaatataaggtgagaggtgaatgcacgacgacaagaatgacattgggagaggaatcaaaggataaggcgtgcaagggaagagtctacaagtacgccttctgaagaatgagagaaaagaggtacaagtagcggtgacaacggacttgcaaggcctaaagacccaaccatgggtacgctgcaaccactctccaacaccctatacccaaggaccaccccgcctccagctggggaccgtgcgcatgtacccggagaccatcctcctgcaacctgcaacttgggaccatgcacatgtacctagagaccatcctcctccagcctccaactggggacgatctgacaacagacaagggtacagggtgccaggctaccttgagcacctgcatcatgcagcgggaaagcgacatcttgtccccatgggaccactttgtacaccaggccattag

SEQ ID NO: 223389 - DNA, 3314 bp, Cannabis indica
attgattgatagaaaataaaaaagagagggaagagagtaggatttgattgatgattgatggaatgatgactaagtggtatttgtgtaataaaaccaactttgtaaataaaaatgtagacataagcgtgtagaggtatttaggtaataaattgtgcaaaatggatttttcatgtaaaaatttcttaataaaagagtaattaattaataatataatctcgtacataaataaataaaattcatataaattgatacattacctgttgcaaatgcttgttttcttcataaagctgtacccccttcatattagaataagattaattttaaataatcgaatatgcagatttgcaaattttgaactaagctctcactttaagatatatagagataataaaattgttttgacattatattcaagataaagagtatggaaacaacaaaagcagatttttggaaagatctctacaatgaatgtcaggaagatatgttcaaggttattaaatttaataaaggtgaaaggactacaattacaaacaaagtcttttaagcctcagaattaacgttgaagcttcttaatataaatgtaggggaaaagagtacaaacaaagtactgtaaatcttagaattatatgtttacctgtattgttctgatgattgttccagcaaaaggaatagaatcacaactcacatgattgaaatacaacttttggagctatttccctagcagcgtttccaatattaagtatacataaatatgagtggtagaatatattgcaatccaattaaagttgtttgtggaacattaattaaaccacaactcacattgagcaaaacagggacattaaacggtgtagttaaatacatattcccaacatacaaattcacaatagactaattactaagctaacatatatagtaactccaataacatctatagtactgagattccaaacttctaatttgtaatttgtaatcacatataacagagattataatttatagtttctaacatatatagtaacttcaatgaataggtcaccacttgttcgaattttatatctttctttctctatttcaattcacaattattttgaggagcttatttctaagtagaaaatccctccataaaagtgaacagttaatgaagtattgggcaaaggttattctctcttctttctcttgttccccttagttcttattgattttagttttgacccactttgattatgtgttttcccaatataggtggtatatgctgatacaaaattcaaacaaggggagcttgtattaaaggaccaattttgggtgttggacattgcttaaataaggtcttgatcattttcaaatctcatttttgcagtctaatactctatttttccaggtttgtcaatttaaattctgtttcatgcactatttggtatacaatcagtgcacaaattcattattgagaaattaacactactcacaatgagaatatacatgcatttaggtactaaaagaaagctatggaatgcaacatacatatatacatacaaatataataagaacttggcaattgttagcaaagcccaaataaaaagcccaatacctttggacccactgaaaatggaccaaaaggtaagagagtggctaactaactcagtctaaaatggtgaagaagaagaaacaacggcttcagctgggattcacgaaggcgaagaggagaagaaaaaggctgaagctgaacaagaaatcccagctcacaagaacagggctcgagccaaaccaaaatggctggaggatttcgtgatgattgagcgacgttggggagcaagctaatgagccacccaaaaatttgttaggatgtaattcttttttttcccttctttcttctgtttctgcaacaatgtaaactcttttgtaataagttttgaattggctattgaatgaatttacaagatattgcaattagagattggtcatgtctcgaagaggactctttactctatcaattagtgctttcattgctcttcatccaatgaagaacgatgagattgctgctctgttcgaacatataaaggcaagcttcaaggaattctgagaagctaaatcgagacaatatgttgagatgcacaaccatgaaatcaaaaacgaggaaaaatttgcacaaattcgagctatgtttacacatacggctaattctcactcaaatgacgaaggtgaaatttctggaatagcagcccctcgaccagcttactaccgtgatctcaatggaattcttaaaaaacttcgtgtaaaggtagccaaatttgacgaatccaatgttaaggattggatttacaagatcaatcaatttttttatcttcaccaaatagaggattgcatccgcttaacagtggtgacatttcatttggagggggtgtcgacgaagtggttccaattgatggagaagagtggttcattcgtgaattgttttacatttctttaagcattgtgaatgcatttaagagattcggtatacgatgatcatcttgctcgtatctcagagattacacaaacaggtcatgttgctcaatttcgatctgaatttaaagaactgatgataaaggtagctggtgtttctaagcatttattcttgaatttctttgtttgggatcttaaaatggaaatatgtaaagaactcttgctctctaaatcggtggatttagctgatgtcatggctaaggcacagctatttgaggatcggaatgacgatttggtggttcatgcaaagggggatggattttgatctagtttgtctcctcgtactaccacttattcttctctattggacactaatacgggtatttcatcctcgtataactccacaccaacaagcacttcaggtcccaaatctttcaaaactagtacaactgatgtgtgtcatatggcgtatcaaatttattattttttttccaatacctctaattattttagtataattttaagtgagagtcaatctcacgagaactatgtttattcaattattcagaaattggtaactaaaattggagaagaggggggtttcgagattaagattaaaatagcaaaaataaaaataaaacaagaaaattaaaattgagactagttaaaggttactctccacccagaccaaaataatcctgcagataacgttgaagcagtcaattattctaatctccctattgtatgtaattaaggcgaagtgctcaataattaattcttttacctaaatagtaaatccaggaagcatgcaatttatttagcttagataaagctttgaattttatggagatggactaatctaggcaacaaatcaa

SEQ ID NO: 223390 - DNA, 1544 bp, Cannabis indica
tttcatacttctagtgcttttctcttactatgttgcttttatttcgtgcaaacatgcctcagaaaatggtcgaagctctgaagaagagagtgggaggaagctcaggcttatctccttcggccaagaagttcaggggcggtgagacaacaccatccagagagaaggcaccggtcgaagctgttatcgatctctccgaggagccaaccgttgtggatccttctgccccgataactaagtccaaagactctcgaggaggaagctcggacagacccaagcagtcaaagggcggatctgagctggtcaagagaggatctgagcagattcgggctcctgccccacctccagcactgcatctagagactaagagaggtaaagatatgctcacccactacatgacccggtcagtccctgaggtgaatgagtagctatctggagctgataatgagctttccctggaactagtgatgggaggagccttgaaggagttcacgagagtgagtcttccttgatagttttctgttatccttctttacttagctcagattctaatgttttttctctgtgcagaccggtgtgaagatggcatatgcttattccccggctaagtcagctgcctctaagaatgctgccatgtccaacaccatgagggcggaagtggacttggccaggaaggatgctgatgaagtcagggttcaacttggagccgtccgaatggaattgggtgaagtcaacaaaaaacttcttgctaccgagaagaaagtggccgagctgaccaaagatttagaggcttctgatcaacttgaagctgccatgacctccctatcctaagaagtgtacagcctccaagaagaaagggaggttcttcgaactgtcttccgctggtcggaagcggagaagaagtctaaggaggaggagcttgccgctgaggttgagaagtacaaggctgaggccgagcagcagagagctaaggttcaggagaacaagggagaggccaagcaacagagagctgaggtggcaaggctcggagacaaggtaaaagccttagagacagcaggtcttgagattttttatgacttctgaaaggctaatcccaaagcaaactttgattacttgggcgattccaaagacatgtttcttgagtattgcacttcttaggtggcttatggagaatccgaggcggccacttttgcctctggccaggacgttgacatgccccccgctcagacagcagatcctccagctcctatcggcctagaagacccgtataaagagcctaggactccagtcgtgtgaatacttctctttttatctatttctttttttatcagtctggccataaggccttttttaagacaaagtgaccgaccaagcggtttttaaaattggaattatttttatttttcaaacaacaggctgaccgggtagcctttaatcccaattttacgtgcttttgttatctttaatgaatttcatcctttgtttataatcatcgttcaactgtgtttgttttatttttaccaaatgctttgtacaggtataggtgc

SEQ ID NO: 223391 - DNA, 2257 bp, Cannabis indica
aagaatacaaggttattcatgggggttgatgaactcgagaaagatcatctacatatagctcgagaaagactgtctacacgtagctcaaaaaagaccgtctacacgtaaaaggtctcaacctctgcatagacctcattctccacatcagaagatcccatttcctgcaaccgggacctcattcccagcctcaggaaatttatcaacaccagagattggctggtccaaagattttcttgtgcaagcttgggtcttcggtcatttgggttctttagtagaacccatgacctcgccaactgggattaccttcttcttggattccttgtcagcctgaggaggacctctgaacttgctctcaaaatctatgtccatttctgtagagacaaagataaaagatcaataatattccaggtcagaccaccactcgcgaaggatgatacttaccctcaaaaatctcttgtgacgtttgcctgtaacgatcaactttatctccttggattgaatcaatcgaaagatcttcactctttgaatcctttatttccaatttaaactgtgatttgaagtttttgggaacatatggagaggaagagtggttggtgtattttggtgttacgagtttggagggataagtttctgaacttggatgggacatcttcgcaagagaatgacaatccaatttctggatgaaactcatcaaaaaccaagagcgtatggaacatggcaagcctaagccactattttatactcaaaatccgataacgggaaggctaaaggttggaaaatctaacggttgggagtgaggcagaagatgaaaagacggttcatttatactaataatgaccctcgaaaccgtacaaccgccaagatcagaggacgcgtttttcgcaaaagggattatgacaaaaataccctttgtaattattaaaaagcactttttattaaaaagaactttttaaggggcaatttttatacccaaaatttggctaccatttcaatggaggacacgtgtcaagttaaggaaaatatagatcgatgcgtgtaacggtaatcacatttaacagattaactcattaaatgcggaagtaacatagtatacttacaactcgttgactgtaaggtcttatgcgagataaagatatataaactgttgcctcatgtataaacgagaaaccatacgacattggatgcgcaaggcgagacatcaacttcgttacacctggaaagatgaaagcgatgcacaatgactgtgaaaacacttagcgtataatatacaaactaattataacagtcgggcgaacccaaacaactaatagcgaggcgcctatctcgctataggaaggcatgcctattactttcaccaatcaactccggatgtctttcagtgagacttatagtcttgacgagccagaagctgacattcgaatgatgattgctgaagtaccttttttttagaactgtgattgtcaaaatgaagtgttatgtcttcaagagaagaaacgacaaggcgtacatcatcaacctcggaaagataggggaaaagctccagctcgctatcaaggtcgttggtactgagtttctgtcgagacatcccataacgccatgatttaaaacgtgtttaaatacacgatcattttgacccagtaaaagcggataaatcacagctgtatgatattcaaataataaccacatttatactacgtgatatgtaattaaacctcacgatttcaggggataaacgttgtaaagatcacaattaaccctgtaattaactgcctactatgtgattataagtagaggcaagatatactgaaaaatggaggaaaaattataagaaaaaaggccctaagaaaccattagaaattaataagattgacttgtgcactatgcaaaattttaactgcaaaatcacgtaaaaacctttgtgttcattttcttttctttgccattttcatttttctgtgtaagtttattatttaagctcaattttagttaacgaaaatttatgttaatacttacaacatcatccttctaaattattgaaaaatttctaatagtttaccgtgccgaaaatacgtttgaagttttttgaacttgcgtggtaaactggaatatcaagaattctattttcggtactgtaaactatttggaatttttcaaaaatttataaagatgatactgtaactctaacgaataccgttatgaaaaaaaattaaaaaaaatatttcgacatgttatttcaaatataaaagttgactaagag

SEQ ID NO: 223392 - DNA, 1616 bp, Cannabis indica
ctttattgatgttgaataaaatagattacattgaaatggagttttatttagggcataaaacccaacataatcttcatccgctcgtactcactactgcatagttttagctttgcccttacctacacatgcaaacaataactataagtagatagactcaataagaaaaccataatcataatcataaatataacccggattacaattaggcacccataaacccaaccataaccatatccccccattctacgcggtactaagtctagaatgttcgtacaacagtactatttgactataatatcagcctatgcccggtactctagtcgtatcgatgtgatagcaccaatcagtacttgagccaaacatacatttatcggtattcaatacaactctacgtatattgataccgctatcaatgtaatctaacaggcataataaacatgcatgctatacatgtaatcacaaatgcatattattatactaatcttacattgttatcgaattcaagtgtgctggtcaacaggagtggaacagctactcgacgatttatagacccctaactcacaatatttgtaaaacttgtgagtgacacgctaaatcactttttgggaacttaaaatcaaaactaaaagtttccatatcgatagataacatggcaataccctaaatatcataaaaacgggaaaatctagggtttcctaaaatgccccaactggtagaccggttaccaactgaaaaaccagttctgtgggggtctgccagggaatgaactggaattccggttcctacaagtccatactgaaccggtcgatcggttcagtgcaggaactccaaaaaactttctaaacaaatcaaatcaatcccaaatgaatccaaatcttccaaaccacctatttaaaccacaacaagtattactcaagcaataaaacctaataacaccaactgaaatacaaatcaccattaaagagcaaagtttgagctctaaaactcaaaccttcctcaaacacaacaccaagtatcaattgcaacttaaatcagctcaataaacctcaatttaacttcagaatacccaagtgattccaaacaatacctacaacaaccttaaactcaatttcaagcacaaaacccaactcccaaacataaaaattcaaggagaagagaataaagaggcttaccttgagttgaattgctaaagttccaagagaattactgcttaaactcccaacaatttgagctaaaacctttacttgctgctggtcttcctaagggatagagaaggagagagagagtgtgttttggagaaagagagtttatttctaactttcattttgtaaaataaatcttaggttttatctaatattaaacctaataaatcatattattatctgataccaatcttctaagtcactaaaagacaaagatcaattcaaggcaaaagaccaaattacccttgcctaagccaaaaagtatctttgccacttaatggcattttggtaaaatctaatatctcaaatatttctgacattctcaatgtctatctaaatttccctactattactaagttactaaatcataaaaaaaatgactctatcggccaaatgtcacgtttcactgttact

SEQ ID NO: 223393 - DNA, 1400 bp, Cannabis indica
tcatccaccctttgtttcatcatgtatatctaatataatagaaataaaatattttatttttttatctaatattaactcttcttttttataaataatttcaatagaattcatagcattgattcaattattaaaactttattatggggttatgatttagtagctgcgagtgtaatatgaatcttacaaattactcgacaaacactaaaaacgtgtggagcataaaatccaagagtgacaaggtcacaaaaaaaataacaatgatcaataattaatcaacttcaacatgcttctgtcaacaaaagctttttcttttttttttagaaaacatattcaagcaactttttgttgtgactataaaagccacatttaatcacaaaaaatgatattgtgactaaaaaattgttttataatgaactaaaagccacatttaatcacaattaatgattgtaaccatggccgcagtaaaatatgagccagtgatgataggcatttgcttgtaccattcttccactgcttgaactattgattttttgtaggctaaactcatgaataactacactttaccgatagtgctctaaaaagtgtattaaatttgtcacatgctaaaagttgggctaaagttggtataagataataccactaattattgtgctaaatttagcccaaaataataatgtatttgatgaatctatattaataaaatgattcatattcatacggttaggatcgatttaaatcaagaaaaaaatcacctgtctccaatttttctatctcagtcatttccctccaataaataatttccacctatatttatttttccaccttatttattaatccttccaaacatatatatttttttttataatttattaccttgtactaatataaacttgtcacacatacaagattgtacacataaatagttcaagttgacatttaattgtgaaaaataaagggcaacataaatttactaacagttcaatagtttggagaatttattaccaccaaaatttgatctcggagagttaagtacacatagaatgatagttgagaagatttagcggcaaaaaattctttaaataacaaaagaataaagaataataattttttatattctcaataaaatatcaaataactattattaatataattaattattttttcttttattttacatcttgtgcattgaagcacaattataaataatttagcacaaagttcaaatcttctattgaagatggtgtaattggatcgtatttgtcccaccaccacgttgttcataaatgagtaatttgtgagatttatattatacttgtagctacaaaaacataatcccataaggttttggtaattaaatcaatgctatacgagtatgattgaaatttataaaaaagaagagt

SEQ ID NO: 223394 - DNA, 1996 bp, Cannabis indica
tttttattaaaaagaactttttaaggggcaattattatacccgaaattcgactatacttcagagagttacacgtgccgatcaagtagaatatgaaccaccagatataataacgattatatcatttaatgcaaaatggaataattcataaaaatataaaattaatagagtatatttataactctctgactgtatagtctaaggcgagacaaggatacacaaactactaattcttgtattgatgagagaccatattatctcgaaagacacagtcccgagaataagatttgtttcttaagtaaaattattcaaattgactacaagcaatatatagcgagacatccgcctcgctacacataagaaaatattgacgagacgaatcagctattgaaacacttagtgtatattccacattataataactaagtgtaacaacttggaaacatgtaggacatgattgtccagtctgcgaggccttatggttaaagaacagttcttaattttgctctgtatattggggctcatgccattgctagaaggcatatgattaaaccgagttattattggtcatctatatgcaaagcgagataccactgtcgcacgtcagcgtcaaccaccttgaagataagaatgataaattgttatgcggttatctactgttatctacaggtgttttaatgaaacgtgatcaaatcccacgtttcatgaaacagttatgtaattcaatttaaatgtaaataactgtcaatttatattcctataaataggggcagatcctacagaaaaaagagacaaaaaaatctttgagagaaaaaagatcactagttataatattgtatcaaatatttagaaatatcttgaataagatagactcgtggagtatgcagatttaactgcaaaatcacgtaaaatatctggtgcgattataattattatatttattaattttcctatatatatctgtgtttaatttattacgaaaaaaggctcattattcgttaacgaaaatctgcgtaaacagttattatagacatccaatggagagtgttgtaaaatattaaaaataaatgtcaaaatcaccaaaatcatctatcaccgtaaatacttgattgtattttcctttattacattgatttagtttatcattcttttagtcatattttcatataaataagtgttcaccctattaaaataaacttattaaaaattcttattctctttctctctttctctcttcatcttcttctctattttgtattattcataataattttaaaataaaacataaattttaaatacaatctcaaatataaatttatgaaaaaatatttaaacaaaatacaataaactacttttatattatatgatttttttggctacatgtataaaccctttaaagcatccatttaaaaaaaaaatacccttttaaaatatgataatatcttataatttgaatacctactaaaatccttataatactatagtgttcataaagtatccaatctaattcaatccgtagaatttaatccaatccaatccgcagtgtgaatatctgcacttgtgcgaattagattggattagaaaatctaaaatctgcacttgtataaattgggtgttaattgacatgtaaaaataacggacccaatacatatttatatatattttaaaaaaaattatatatacaattaatattttaatataaaaataaaatttaaaagtaaccataaatagaaacacgtgaaatattagcagaaatagatattttaggcgcaatagaaaggaatgttgtaaccggggtgggtgaaccctcatagatatcaggtgcccacatatatagagtcaaaagagatatggagatacatattatacaaatatatttcaaaatatagtatatgaaatgtaaattttattcatatttacaatgttaaatatttttttatacatataattattttcgtcttgctttaaatttttttttttttttttcctcaaaaaaaa

SEQ ID NO: 223395 - DNA, 1244 bp, Cannabis indica
ttgggtgtatgggcacctgattataatccagattatttctatgttattatgtatgtttttcttactaagttttttgaccacattggctatttctatgtataggtaagggcaaggctaaggttgagcagccgtgagagcgagcaaatgaggattgtacatgtcgtggttattaggcctggagcgtacggtctttgggatagcggggcttattttgtgtagtcgcttggcggcaaactattgtcacttgcacttgaaatggttgtaaatattttttaaaacgggatcccagtttaatataagcatattattttagtgtttataattaattaagaaaaattttaattaatcgcgattttcaataaacttgttgaatagcaacgagctgcacagttaagttaaaaatcacgttaacacgcctaaactagtaggttgttacaatttggtatcagagctgccaagttgtcttttgaagatcgtcgcgacatgtacaatcatcatcagcgttcagctcagctcacgattcagtaagcctttattgctttagtagtttattttaatagtatgttttatgaaaagcctgatcagaagcatgttagtagcctaatagctgagtaggcacatcctttaaatttccaaataagcggtaattagtaaatgattcttgatcacgatctgaccagactcgttcttagttacacaggttgttctaatagtatggacgccacgcgaaacacaaggagtcagggtgactcggtcagatccagtggcagttagcgagtaaaagttcccccaaatgttcatggttgaggtagaggccatataggcaaggcacgcggtctgggagatgctaacctgccgcaggttgcccaagaataggaaaacaggtttgaagcaatgctagccagaattaatgagcaagaggaagaaatcagacgcttgatgtagtagggtgctcctgcaatgccaactccaaaaatacaggtagccccttccctgctgtgcaggcaggacaggttgctgcagtgaactcaatggaaccactttacgaaaggttctccaagcaggcacctccagtgtttttgggaggtcctgatgttatgaaagttgagcagtggctgactgttattacaagaattcttaatttcatgggtatcactagcaatgatagactggcctggcacatttcagcttcaagaagatgcccttggttagtgggatattgtgtccctgacctgtgatgttac

SEQ ID NO: 223396 - DNA, 1517 bp, Cannabis indica
tgaaaatggaaataatccattaaacacaaaatacaaagagaaacacgaaaaaaaaaaattagatcccgaagccccaaccaccaaatacgagacccatctaaaacaagcgcccacttaatcttttaaaattattctaaatctttgaaatttagttttgttaatgtttttttttttttgaaaaatttatataataaactaaaaatttattaacacggaaaattttttatttttactctctgaaatttttttatttacaaaaattaacttttttcagtaaaagtataaatatttttttgattgttttatagtttatttatagttgtattatagttgttgtgaagtattttttgttgttttataatttatttatagttgtggtgagattaattgttttttttaacaaattgtatttttgtatttaaaaataaaacatattttaaaaaattctcctttttttagtgtagcatattgatacactactgtgagttggaaaaataactgtgagttggaaaaattgtatataagtatttggtaagctagatgattgaatgactattaaatatataattaccaaaataaatatgatatttattatttaatttatttaaataaattcatacatattaatatatttataattttttttattttattacaaattataataattttttttcttataatatttattttttaaataaaataataaaataattaattagacttttactaataataaaaaaaaattaacacaaatattatctattatataaagatgatagagaaagatatattggggagcaaagaatcttaagataaaatggtaaaaagggaattttataattagaatgagggtaattttgtcaagtgaaatattcattaaaccaataaattaacttcccgtacaagctaatttcccaaagttggtgttggccaacttttgcaaaaagctaaaaaaattcttaaattgttaaaaaagctagttttctaattttaccaaacacattttgaatgatagctttttaaaaaagtgcttctagctttcttaaaagctatcccaaacgcaccctgaaacttctacctaaaaatactctatttaagaataacttctaatttgttataaaaaaaattaagtctcaatttaggctagttataaataagaataacctctaaattgtaattattatacattttctaagtctcatattttttttttgaataaaaatcataagatctattaattaataaattcgttcaaaacaatagaacgcacttcagaggaacagtcctctaactgaagcacacgacctgtagagaaacaagagtctcttgccaagcaatgatccaacttatttgcagatcgttttacaaaacacaaattgtgaagacataaaataccgctctgaattgcttggacacacaccagcctatctgtttccaacatgattctatcccacgaatgagttgcaatccaactcagtgcttctttattgtttattatctcaacaatttcgagt

SEQ ID NO: 223397 - DNA, 1500 bp, Cannabis indica
atgaattggaagaccacacatatgagcccaattgagtccaaccaacagggctaaagtttcagcctgtaacattgaaattctacctgaaaaaacctctgaaaaccagaaaaaaatttaattagaaaattatcaagctaatcaaaaacaatcaaacaccaaaaactaaacaactagatccccctataaaaatactagaactagccaaagggtattccctttggctagtagcaactaaactcttgcattttacatctgaatcatcataggattactatctcttactaagatcctaaggccctaaaaaaaattttgatatgtaatttagtaacaacaaaataagccctacaatactcccataacctaggatatcaaaaagtttcctttggaaataaacaaaacaataaaataagcaacgaataatattttaaatgtaccccttatgactaacctttgaggaatttgctcaacgcagcgtggactatattatcttctgacaatataacagtacctaatctaattaagctcgtggtgctcaatatcgctgcatccaccataagtttaaagtgtaaactctcttcttgggcacatctagaagttccagccaaagctcctctattccattagtttggagaatttttttggggtcatccttcattgaaacgatcgaatcataataactaattatccactcaactatattttgtggttgtcttatctgttagccatgagtaatcttatttcttactgtccatattgcccatgaacaaagaattaattttgcaaaagtatctctttccaccacttcagaagcataaagtaaaacattcttgaaattaatctcttttttacttcatgcagaaaagagaattctagaaaattctaaatgccttgtaaaaaagggacactaaaaaattgcatgagcattcgactctcctccaaaaccacatagttgacaagaagtactagaggcgatattccgtctaaacaaaccattacgcgtaggtagaatttcatgataacccctccacacaaaatgtaagattttccttgaaattttcatcccccaaaattatttttaccataatgaaaacacatgactagtagatgaagattgataattatcaatagtcattgctaggttataaccactcccaacagaataactaccatatttcgtataatgccataatcacgaatcctcacgataattatctatagtattttgttgtttgagttgagttaatgacactaaattttgggtgggttttagttttttaaattaataaaatgcttctgttttttattctgtatttttatttttgaaaataaaaatattttgattttttgttgaagtggggaaagagaaaaagaaaagggaattacttcatatctattttttaatttttttttgggttgttttggtaattttatgtgcgtagttatgtgaattttaaatatgatttgaattgttcagttgattgttatatgggtttttatgta

SEQ ID NO: 223398 - DNA, 1074 bp, Cannabis indica
gaataatctggattacattgaattggggttttatttagggcataaaacccaacagagccttcactcgaggaattgaaaacatagccttcctgacatcttcattggagaactcaaacttgttcataggaattgtattgcgaacaagaaacttgatgtaattgttaaacttgttgccatagtcgtctactagggccccaatcgccatatgaaatctaaatttcattttttgacctgcaggctacttggccagttcttattcaatatttttccccttgtactttcccctaactccttttttttacctccacttgcacctgcattagccattctgataaagatagtggctcaatctttaccaaactatgcaatgagtgttttcttgttacatattgagactggtaaacacattgagggtcaaatggcgagtttctggtggaaatcctcttctactagcaagaaaggaattcattggatttcgtgggatcgtatgtgtcatcatagaattgttggtggcatgggctttaggaacttgcgtgacttcaatcctgctcttctgggaaaacaaggatggtgtctgatttctagaccccaatcattggttgcaaaagtttataaagctcgttatttcccaaatgagagttttcttatggcgcaactgggtaataatccaaactttgtctggaggagtatttgggaggcacaggacattgttcataagggtatacagtggcaagtgggcaatggttattcaatttctgtcttaggagacccatggctacctaatgtggataatccatttgttgtttctcatcatctggggttggtgaatgctaaagttcatagtctaatgagattggatgataaaagttgggatttagagatcttgcaggacatgttcgaggatcttgatatcagtctgatcactaaaatcccttttacaagttgcccaggagactgaccaacttctctggcgtttagaaaaatctagtctctacactgtcaagagtgcgtacaagcttattcaacaagaaaaggggctagtttttaggacgatttctctctttctctctctct

SEQ ID NO: 223399 - DNA, 1304 bp, Cannabis indica
atgtccgagtggatgcatttagcataatctactttcccatattcttccagtacgaaaccaaattaggtcgagaagtcattgctttgtttgctaggggaaaagccaattatgctaggattaatggtttgaaccttcctgaagtcttgcatgtttatatgttacaaacttcatgcattttgtttaatttcttttaatgatgactttgtgtgctttatgctgatcaacctgccactctctagatggggcttctaaaaaagttcttaagtagtgcccatgcctcttctaacaaggttagggagattgtccaaggcagtattgttggtagaaagaaccaggcctccaaaagtggagcccagaagctaacacccacagtactaaacctagaagctgttctgaaaggctctagtcatggagacaacatccactaccatcgtggatcttaccaaacctgcctatttgtggagcctctgaaccaagttccctagagtattttgaagaagatagttttgattgtgatgggcccatcaaacccattaagaagctggctggcccttctgatgattgagcaactaagaaggcgaagatggaagccaaaaataaagtcccgcagctgacagtcttgaggaggcaggttacataatctcgatccttgaagggaacatcctctttcaatgatgggaagactccaaggtgaagtactcattcgtcaagggacaagctggaccttcctccgacaccccctgggcctaaagtgatttcggccacttcgacccaattatcaaggctaaggactgaaattcctctgttgccaccggcaccgttcacacttctatcaggttcgtatagttaacggaaggggaggaagccagactggaagcagtggataaattttatcaataaaggtgcaactctaaggttgaggagatgaggaaatcgtctcctgtcatctcttccaagcgcaatgctgaatttgccgattatgacaaatggaacgagactgctcctccacgcataaacagggttgaattgataaagaaactttgtccatgcattgggacttatttgtcaccatttttggcagatctattggagcagaacgctaccacaagctataggcttaacgctgatagattcgccatgatggctagtagggacttgaggtacgtgactaactccgtgaggactcaggccaatgctgtaagttcgatactcttctaactccaataaggttttggggtttccatattatttaagcctacttatgttccttccattgtagattggtttgatggcagagaggatct

SEQ ID NO: 223400 - DNA, 2200 bp, Cannabis indica
aaaaagatataagtaaaactagtttaataaaattgtatattaaatatgtacaaaaataatatatattatatataatatatatgttcggtcggttctcggtttaatcggtcggttcgccattgacactaaagctgaccatgttaaagcggttttaaccgaatgcggttttttcggttttcgattttttcggtgtcggtttttttggtgttcggacagtcggtgtattcggtttggtcagtttttttgaatttttcgctcacccctatttttcatctttaatatcatgtattcttgaatattaaagcatgtttcgcttagttcttcattatgcaaaaatataataatctttgatgaaatatctttcattaaatcgtttacatttaattcttagaacataaatattatatttttcctaaacatagtttctttgattttctgtagtttcattaaattgtaacacatttgatgtttagaaattatattttatttaagtgtcgaaaaaaatcctacctttttgaaagtaacttgtgcttaaatagaaaatatagtgggatttatttcaactatatctaaacttgagaatcaatatacttataaatactattgaacttgcattttgtggattctaatatcttaataatcttattttacacattttatttgaaaaccactttatttttcattcaactttcattttaaatctttttttttgtattacttgtcttttatttttttttaaataaaatctcatcaaatatttagaactaggttagaatattcttgctttgtttaaaaaaaaattcttttgatgttggtcaactctcacgtgctcgacctcgtacttgcatgaatataatattctaaaacgacttgtgcacttgcaaatgtaaatattaaaacactcatttttgagtacaacattaatattatttgtaatcaactttggtactccattaagtcaactatcttcttaatatctaatttgactcattacacatgtcgtctgcactgatagcaagtgagttgacctagtgtatcttgtccattattatactggtggagtcatacatctttgtagtcttcggtaatctcactacaaaatctatagttatgtcttcccatttccatacgggagtcttctaagactgatgtaattctgctggccatcaatgctttgattttcacttactgacaaataaacatgttaatagatatcccatcatatcattcttcatccatgtctactactacattctcatcttggtattgatttagtcgtttattgctttaatcgttttttaattttaaatactctgctcatccctgttttaatctccaattattgtgtgtgaactattaatcttgtcattactaactgtttattgattaagttttagttattttgattctgcacattagttataattttcccacaaggtattatcacctttgtccaaaatcttatttcctctatctctaagcgcactaagggaactctctaagaaataactttgagaattatcaacccttatgttttctagcaagtgcttgttgatagaaaactagattgtacaaatgagcaccttagaccttcttatataatgtttaggattcacatttgatatcacacatccccatagatgttaccagtcaaaatagggcaataaatgtagataggaacgttggcaattagtgatagaaactcccttataaatttccaatattttgcaatatttttatacaaaaacggctccaggcgatatgtcaactagcactataggcgatatgtcacgtggagcaatatcattaagtccccgagatacattgaaaaatatcaaaaacctcccatttcttaaagtaggcaacatgtcgcttggaccagtttcagcatatcaaacttaagtttcaaaactcctctttgagtcaactcaacacccaacattctaaaacccatttaactaatgtaaatgaatattttgacaatttcaaactcttggaagcatctccatttgactttctaactcacatttataattactcacttaattgtatatttaccaaatgttaatcataggttacaaattcattttagatttgcaacttctcttatgttacaaaatcatgacaacttgttgcacactcacttactagtatgttaatcatatttaatctatatattatattattaaaaaataatata

SEQ ID NO: 223401 - DNA, 4046 bp, Cannabis indica
taagatatcctacaaaattttgaaaaaattcaaaataatttacaatatagaaaacaatgttcaaacaatctattttacacgcgtataaaataaaatagtcacgcgtgcaacacactgtttaaacgtagttttcggcgtgttaaactttttcgaatttcttaaaattttgcaggatgttttaaataactataacgtacataactatgagaaaaaatttgaccaaaaaattatttcggatgctaaaacagataggggtgcatcaatatatccattttaagggggtgcattgtagaattttcctatatatatattttttttttgacagaaacatgtgctacaacaagagaaatcacagctaataggaaggtagaggaccattccaaattaactcattatctaatccaaggcccatcctagccaccttatgtgctaaaagattaaaatccctaccaacatgagaaatggttaggcccggactgaacgataataagttcttaatactacaaattacatcatcaaacacactattattccaattacaagtaataagcttatctactatagatttacaatcagtcatcgaaacatccactggaagtcgaagcagttgagcccattggatagcttgatgaacagctttggcttcggcaacagtaggaggaacaagcccaaaaaaaggagtagagaaacctgccttcactctattacaaccatccaaaagaaccactccaatactatgttttcttctttaagaatcagtggttgcatcagtgaatattttgaagacattagaaccagatggttgaacccttgctgaggctgagttacaaactggacctggtcttggcacctgtctttgctcatccaaatgttggaaaaaatatgcaagactccaatcaaaaatatctttagggggaatagagaattgtttgtgtaagatattattcttttgattccataaagcccacaaaaaacaatataaaataccaagagaatctttatcttaatcaacaaccagccccataaaagaattatttagatccatatgtttattaatatcataataagaaacaaacctggaagatctccatgcctttctggatctggagcagtctagcatagcatgattggtactctcaggagcaagtttacaaataggacaaagaggagaatgaagaactttcctagaaaagagagaagttgcaaccggaagaacatttgataacattctccaaataaacaatttaaccttgggaggaatagtaggagaccaaacacgggaccaaaacttttttgaagaagtgaaggaagaagaagaaggaatatccagagaagaggaagccaaatgataggcagatttgacagagaaaatacctgaacttgtcttctcccaaatcagggaatccctgccataacaccctgcgaccggcacttcaagaatatcatcgatgatagaattatcgaaataagcactcaacctagtaacatcccaagtacccgaggcagagataaaataggataaaaactgggaaggaggatgaatagtactagagaaggatttatatttatgattaggtagctaatggtcagtgatggtgtgaatatcattcccactcccaattttccaaataagtcccgaagccaacaaatccctaccccataaaatgcttctccaagtgaaagaagggttgtgaccaggggcagcagcaagaatagaagaatgggaaaaataacgagctttaaggatcctactgagaagagagttaggattgtccataatacgccaaatttgtttagctaacatagcctggttgaaatgaacaagagaacgaaaacccaatccaccacaaaatttcgatttacaaagagacttccaggatttccaatgaattttcctagactctccattagaaccccaccagaatctagccatcgcagtctcaattcccttgcaaagcttatcaggaagcctaaaacaagccatcgcataagcagggatagcctgaattacaactttcaaaagaacctccttaccagctctagagaaacatttagaagaccaagttctaaggacagaggcaactttatccctaagaaaagaaaacgaatggaatttagaacgagacagacattgaggaagacctaaatatttagagacaaaaggcttatcctctaaattaagagtgtcaaaaaacatagtatgaatctcctgaacagtattaggagaaaagagaatagaagatttggaaaaattaatggcttgacccgaggccctagaataaatatggaaaacttcttgaagagctaaacaagactctctatcagcggagcaaaaaaggagactatcatcagcaaaaaacaagtgagaaattgagggagcatgtctagacacagaaatacctttaagaagatgagcatcttgtctagctcgaaggagagcagacaacccctcagcacagagaatgaaaagataaggggataaagggtccccttgtctaagaccacgagaaggtttaagagaacctttaacctccccattgacaagaaaagaaagagtagtagtagctatacatttcataatgagattaacaaaactgataggaaaattaaaatggtacatgacactttctagaaaatgtcattccacacgatcaaaagctttggccatatcaagcttcaaagcagcccatccccttttaccaacttttcgagaattaatggcatgaacaagctcatgggcaatgagaatattatcaaagataatacgcccaaaaacaaaagcgctttgaaaaggggaaataactttgtcaagaacaacctttaatcagttagcaatagccttagaaatgattttgtaaagcgtggaacacaaactaataggccgaaaatccttcatagtattagcatgttgttttttgggaataaaaacaagcaaggtactgttaatagcagagaagtctatttgaccatttaaacattccaacaccacagaaaccagctcatgaccaaaagtatctcaattcttttgatagaaaaaggcattaagaccatcaagtccaggagccttatcaccagagaggctaaaaacagcctttttcacctcctgggcaatgaagggctgagccaaaaactcataatccaaattttcaaggggaggccctaagcaatctagaatatgaccagttgcctcggcatcacaaccatcagtagaaaaaaggctagagaaaaaagaagagataatatcaaacatggcctcaggatcactagttgaattaccagcatcatcctggagatatcgaatggtattattctttttcctatgggaagcaaatctatggaaacactttgtgtttctatccccagccttaagccaggttacacgaaatctctgcttccaataaatctcttcttagaagagcatcaagctgagattggagatgcttaaggtgaaacttatactctctactatcagtgcctaaagattgaatcctagcaatttctctttgaacatcctggatacgaggctggaaaagtggcataacagacttatgccaagatgtcaaagcagagacacaggaattctgccgagctaaaaaagaaccaagagcatcctggttatcagaaaggtgggaagaattcttccaagaatcctgaacagtagtgtaaaaactggggttgtcaagccaaatattttcaaattgaaaacgcttttaaacctatgaggccgactagaattaggatcaggatgcaggacaaccttaatggctcggtggtccgaaccataaaaaggcagatgatacaaaagagcattaggaaataaaaccctccaagactcagtaccgatcgcccaatcaagacgctcatagacagtattattatgccaagtatatttactaccttcaaaattaagaggagaaagactaaacttatgaataaattgagcaaaacgatccatatcggaaatattataataattactaccagttttatcatcaaagtccaaaaaactgttaaaatcacccataatgagccatggcagattaggg

SEQ ID NO: 223402 - DNA, 1267 bp, Cannabis indica
ccaaatggacagaagctgaatccctagcaacaatcacctctaaaaaattccttgactttgttgtcaagaacatctatatgtcgattcagacttccccaaaagattgtgttagacagaggcaagcagtttgacagtgacatgttcactgatttctacagcaatcatggcattatcaaaaagcttctctaccgtggcccatctcaagcaaatgggcaggtagaagctgtcaataaaaccctcaaggacaccttgaaggaaacaaaaggcaattggcctaaattgcacccagaggtcatatggttgcataggactatcgagaagacggtcactgggaaaactccatttactcttgcttatggctacgaggcgatgttgcctataaagcttcccttgacgaagtagaagaaagaagagaacaggccaacctaaaattgtaggcctaccagcaaaaggtagcaaggcacttcaacaaatatgtcaagagtagaaaattctttataggagacttggtgcttcgaagagtgttcctgaacactgaagattcaacaacagacgtgtttagacctaagtgggaaggcctttatcaagttacaaagatcactagtaagggagcctacaagttgggaaggtacaacgagaacttggagctcgttctcctaccaagatactggaatggagtgcaccttcgcaaatactatcagtaaccaacttacaaaactctactccaaagtagcagttctacctactcaacattagagtacaaaaagcgctagcatccacgaccttattggcgtggtctcccactattcttcaatagtggcctctgctttactaggcaagcaggggtagccacttaacatctagaagctaaagttatgcaatgtaggctggtaaattcaatttatgtaagttgcacaataaaaaagaccaattaatgaataataacaatatttatattcttgtttattgtgtctatgaaccacttgctcacagattaactttttaaagttattcttttatttccacatgcgtactatggtaccctcacaagacagaacccaaacaaagtctgtgaaacttggttaatagcaagtgactaagagacttgtctgcatggtcacttgtggggaacccatactatacaacgcatcaaactagcacaaaaaacttatgcaaagaaattttaacacttagtataagctactaaacctgcctctaagtcgtgcatgcatacatcgacttggcacttacttgtcaaggccataag

SEQ ID NO: 223403 - DNA, 2650 bp, Cannabis indica
gtcttggtccgattacagttttgattcttggtctagctcctagtcctggtcctgttcttgggtcccgatttgcttttggtttcggttccagcttaaagtcacggggtacagatcaagtctaagcatcgagtcccaaatcctaagtcccgaggtgggtcctaggtccagatttgggtctaaggtcgggtcctgaatcgcgatcaaagttctgaggcccaagtttttttgtcggcttgggggcccaattcccaagttttagtcccccatctatgttcgagtcctaggtttcggttcgggtccaattttgtgtttcgatttcggttcaggtctcgagtctcgatccgagtctaggtcccgctttgggttcgggtccgagttctggtcccaatcccaatctggttcaaggtttcaggtcccaagtccgagtttgattcttgggtcctgggtccggccccaatttttgggtctgggtttgggtccgagtcgcggtcttggtccaagtcccgatcttggtttaggtcccaagtcacaggtccaagtctggggccaagtcccggtatgggttttggtgtgagtttgggtttaggtttgggtccgattatggtcctaggtctgggttctcgtcccagtcctggtccgattctgattccaggtctgagatcgagtccggatcccggttcaagtccaggtcttggtacggatctgggtcctagatttaaacactgactacaggtcaggtcgaagcctcaggtccaaatttggatctcgatcttggatcccggtcttgttccagttcgggtcctgagtccaaggctgagtcttaactttgggtttgggtctgggttcggggttgtgtcccggtaggcagttcttgggtttcaaaccaaggtcgggtcctatttctcgagtctggggtcgagttttggatatcggtctcggttctaaggcccagttttgggtccaagtccctcatctaagtcacggtttgtttcctaggtcccatgtctgagtctcaggtcctaggtcctggtcttgaaaactgggctctagtcccagtctaggtttagggctccatcctagtctgggtctgggccctagtcctaaactcggtttgagtcctgggttcgagtctgtgtctagagttcgagtccaagttcttttacgagtccagctcaatgtccgggttttggtatgggtctaggtctaggtccaggtttaattttcggtcttgggttgggtctgggtcttggtttgggtccgggttctggttcaggtctgggttctggtctaggtcccgggtcacaggtgctaggttcctagttgtgggtcatacgttctggagtaagtctgggtccgagtattgatactagtctaggtttgagtccgtgttcggctttgcgtctagatcccgttctttgtccaggtccaatttctgtttcaaggtcctgattctgcttgttctttcaatttcgggtcccgagtcaaagtctcggtttgggtcctggtctggaaatggttccaggtttgggtcatagtacgattcaaagatctaaacaccgactacgagttgggtctaagccccaggtcgtgggtcaagatctggatcccaatctttggtcccagtctcgttgtgatttgaatcctgggtcccggtccgtgttcgtgtccgactccgaatctaggacgaagaccggggtcgggtctggggtccctgtcccaatcctggatcccgattctggttataattttgagtttgggtccccaatccaggtcggggacctgggtccaggtctaagtctccaatcccagtccgagtcctgcatccagatctagatccaagtccgtgtctgggttcgggttcgtgtctagagtcccgattcgagtttcgaattgagtccgtgtctcggtcaaggtctgggtctgggtcctagtcaaatttcagttccgagaccgagaccgcgtcccagtcccttggtcgtgttcctgagtcccattctgcttccggttccggttctagttttggttcacggggtccaggtcttggtccgggtctgggtttgagtccaggtatgggtcctagatccaaacatcgactatcagttaggtcgaagcccccagtccagatctggatcccggtctcgggtcctagtctagttacactatcctaggtcctggtctaggtcctagttcagggtctgggtccaaggtcaggtcttgggtctcagtgccagttccaaagcccgggtctcgggtccaagttccccatccatgtcccagtcctaggtctcagtccgtgtctagggcccattcggggttcatgtcctagttcgagtttaggttcggttggtgatccctctccaggtccagatctgggttcgagtccccggttcgagtctagatccaagttggggtctgagtcttgagttctgatctgggtctgggtttcgaggcctgagtccaggtcccccactatgttcgggtccatgctcggtttcgggtcctagtcccaattcaaatttcgattctgtgtctgaattcgggttcgcgtctaggtttgggtcggggtttgagtcctgtcctgattctagggttggctttgggtcaaagtccggatccccgcttgggtctgggtttgggtcctggttcgagt

SEQ ID NO: 223404 - DNA, 3026 bp, Cannabis indica
tatttaaataacataacaatcataactaaataatgtgaatcttataaacacactatttatatacatacttaaagaacttgaattttaaaaacatattatttaaatatgtatctttagcaatgtccatgcgctaatactgtaaacatacataaataatacgaatcttataaatatattatttaaatatatattatacagtacattaaataacaaacaataaagagtctgacagaaaaccttagttaacttctattttactattcccactcttcttatgaatgttattacacacagaaaacttatattttttttacttaatttccttacctcaaatgtggagtcctagctttgattgtagtgagagtgatcattgaaaaataattgtcttacgcaaaaccaaaatttcatacttattaattagaatttatcacaatggtacatatatataaagcctaaccttgaattaatctgcacatctcaaaagtaagataacatgataaccataccttaacttgaaaggaaaactctagtcgagtctatgaacaattattgagcccaaaatttgtagaaattatccaaggttgatcaaagaataacatcgagaaacaacatatcgataataatgataaggcatgtttaagataatggtgatgttgagaggataatgttgatgtaatggagaagagtgaaccttgaatgatagtagtatttgactattagagatgacaaaatatactaaagtttagttttagaatgatgagaggaaaagatatgagaaacgtcaagacttggggatgatactatagtgttggctaggtgagcattgggttgtgaatgagtgaataagtgaagactagagtcctctatttataggaccaaaaatttattcgtgccctttttctttttttttttcttgaaactcaaagaacctttattctctcaactatttcttcctctattctctccaacatctttgacttccattgataacaaccacatcactcacctagactctgctcctctattattgtaattaggttcggtcaaagcttcctcaaaagtaatttctttcaatactttgttaagagtttagaaggaaaactccacctcttaagcttgccatgacacctaagcaatatttcaaaatttgaattgtttttcttatttcactccacgtaaaaagaataatgagactaacaacttagtcttaattttcttatctaggttggactatcactcccttgtcactatgtttcctttattaaagattgaaactaactagaactttttttcttatgttaataagccctaaataaatattctaatttaaatccctatattactcaacaaccatacatgaacacctctaatgattagtattagaccaagtctcatctattttaacttgtatgtatctcaataagtgtacacgtgcaagcttattaggctctatagtttttttaattaagtctcactaagctaatgtaactaaaagatctcctcatgcttcatatgcatgtcctatgtaacaaattaaactctctcactattatttattttcaactcacgaatcctataacctttactactctttagcctttatttcatttaatgatcaaataaaataataacatgcctaaatctttgaatagtactgtgccactcattatacatgtatattagagaatgagaatctaacataaatattattcataaccattcatgaaattaatagtcacccgttctcaccactttgttatcatgctcacaatcatctatgaaagtctaatttattaaaagtacatattttcataacttaaagtaatactattcaaataacatattctaaaattccactacctctacatcgagttaacaacaacaataataatatatatatataatgtagtagaaaatagtaataaaaaaattggttattacaatctaccctcaaaggaatttcgtcctcgaaattaacttctacccacatatagttggggtatcatttcttcatatcctttcccaactctcacattgctctattagaattgtcactctacaggaccatatctagggatttactcttatacttttgttcccttttctatcacgcataccagcgtgtcgtacaactcttgtcttattgtagtttcaaattctcgtacttaagcctctgtgtgggattagatacgtatttttttttttacatttcagatattgaaactattatgcatatccaatatcgtaggtggtagcacaattctatacactacttggccaacatgtgtaaagaacctatatatctcaggctttacttgcccttccctttaaggtacatactatttctatattgaagtgacctttaagaacatacggtcacctcttatcattgttaaatcctcattattatcaatccgttagagcgtcatgcatattctgtcgtacattgtctaccattcttgatacttcttacccacttataggtggtacctcactccaagtaaatttagcactcataaacatctcataggttgccatacgtgttgtggccaaccaactgtcgtcataagagaatgttatcaacaataaacacttactctaacttaccaggaaagtataccatttgtaacgtccctgcttcaagcctccattaggtccttacacccacggaatgctggctcttatacacgagtacgttactctagctgcttcctgtatacttcttcaactagtttatatgtttagtacgagacttcatctgattccctaaaggtttttatgcgaccttacacttgaaaaatatactaaaattctaatagagatcaccttctttgggaatgcaagggtcgtgtcatgttcattagtttttaatgctctgctcttacatgctggcatataggacatctaatcccaaatccaattgccaccttctgcatacttatccatcctataccaaatcattgtaccattttacaactgactcgggatgcatctagtgtggtgtaggtttgttggaaattatttta

SEQ ID NO: 223405 - DNA, 2338 bp, Cannabis indica
atactcctgcagatgcgtctctcgcatttgcaaatactcgccttaccaccaagtctccaacattgaataacctttttttgacccttttgttgaaatatctcgttactcggttttgggacgctgcattagtaatctgtgacgcattacatttttcatcaagtagatctaaggacaactttaagagttcttggttttcttcttgattataaaattcttgtctatgagtcgagatatttacttccacaggtaacattgcctccgagccaaatgctagcgaaaatggaatatgtcccgttgctatcttcttagttgttgtatgagcccaaagtacttaaggaagttcgtcgacccatctacctttagcaacgtctaatttcttcttgatagtatccttcaaggttttgttaacaacttccacttgtccattcgcttgaggcctggatactgatgagaagctcttaattattttgttcctctcacaaaacttagtgaataggtcaccatcaaactgagtttcgttatcagatactatcttcattggaatttcaaacccgcagacaatgtttttgacaataaagtcgaggattttcttgcaggttatggaaactagagcttcaacctcggtccatttagtgaagaaatcgactgtcaccactgcgttcttagctcctcctcgccctgtgggaagtgccctaatcagatcaatccccaatatagcaaatgggtatggcaaggtcatcattcttagttctattggtggtacgcgaggtatatgtgagaatctctaaaacttataacactttttaacaaaatcattggtgtcattgttgatggttggccagtaatatccttgtctaatgatcttttttgatagactttgccaacctgcatgatccccacaaaagggttcatggatttccttgaagatctcgtttgcttctacaggaagaacacaccaaaggagaggcatcgagtaaccccttctataaaatttgccttctactatcgtatagaaatacaagagtttttgtgcctcatttttatcagttggaagttgttcgtcgagtagatagttgattataggagtcatccatgtggacgagctacttatcatccgatgtcttccttttcacatatacttggctcatttaacacttccaccagaacaaagtttagttcatccaagtcattctacgaggccaattttgctaacgcatcagcgttacagttgttctcttgggatttgctcgattttgaaataatcaaacttttccaagttcttttgaactctctctagatacttaaccatttttaggcccttagcttggtatttctcaagaacttgaattacagtgacttgtgaatcaccgtgaactatgagatttttgaccttcaacgcttcagctatcctcaaagtagcgatcaaggcttcatactcagcgtcgttgtttgacgtgtcgaattggaatctcaaggcataatgaaacttaaagcctctggcgaaattaatatcacccttggacccgatctcttcttgttggatgcaccatccacgaataatttccaagtatccgcgtctcgctgaacaagcaaattttcctctagagttattccttctattaggaaatctgccaaagcttggcccttgatggatgttcgacggtgataagttatgtcaaactgccctagttcaattgaccattttatcaatgttccaaaagtatctggttctgataaaacttgtctcaggggttgatcagttaacacattaattgggtgtgcctagaagtaaggtcgtagcttgcgagatgtatggattaggcataaggtaagtttttcaagagggggatgcctcgatcgtgcccctagtaaccttttactaacatagtaatcaggttactggtgctttccctcttctcgcactattgttacgctgatcgcattctctgagacaaccaaatagaggagtaatgtctttccagttacttgttttgccaaaactggaggtgtcgacaattaccttttaatgctcttaaaggcttcctcgcattcctctgtccattcgaatttcttgttgcctcaaaatacattgaaaaatggtagaaatttatcagttgacttcaaaatgaacatgttaagtgcacccttccttcctattaaggcctggacttccttaggcttggctggtgatggcatatctatcagttgcttcaatgcccttcgcgttgactatgaatcctacaaactttcctgaggaaactcctaaggaacactttttcaagttaagcttcatattgtacttccttaatattttgaagcactctgcgaggtctgtagt

SEQ ID NO: 223406 - DNA, 1390 bp, Cannabis indica
ataaatcaaataacatttaaattattaatttcatcacaaaatgtccactaaaggacaaaacatgaatggggcaaaatgaccattttgccccttcacacaaaaatagcataaacaacactgaaggggtatatttgggaaattctaaattcccggccgatcccgacattcccaatttctaagtaaccgtcctaaaattctaacatactaagttgtgattgtactgggccaaacaccgagttccatgttaccgggcaccgcaaatgcaaaattatgaaaatcacttaatgacataaaatgcatttcagaattcaacaataacagcataaataattatttaaatatctataaataattttccataattaaacataattacctgctaatttccaaattaaactaagcggtctttacaatacctatcgctgattatcatgccagtcaaaatccagtgagctgaaaaatcagggaattaaactttttgaacataaaatagaatttataatcatgaaataaatcatgtgaaccatgcaacataaaatgtgatttctgatctttattaattagtaaatcttattatattgaaatgggttttatttagggcacaaagcacaacattgttctcgtgtcctcgtctacttctggttttagttcaaattttaggtcacaaggtacgggtttgggtccacgttctggtttggaactgggttcgagtttgggtctgggttcgagtccgggtttgggttcaggtcctagtctgggtttgggtctggggctgggtcccatatccaaacactgactacgggttcggtccaagccccaaatccagatccagatcctgatctcgggtcctggtcttgttccatttcaggtgctgggtcacgagctgggtactaggttcaagttcgggtcaaggtcgggtcttaggtcccagtcctagttccgttgcacacgtccctatcccatttctgggtccaggtcctaggtctggtctggttttgggtcccagtcttggttttggtttttgtcctagtcacggtttgggttttggtcttggtctgggtttttatttgggtttgggttcaggtcttggtcctggttcttgtcctagtcctagtcctagtcttagtttgggttcgggtctgaatctaagtctaggtccggatctggctccgggtgtgggttagggtccttggtctgggtccgggttaaggtccgagtcccaagtttcgatctcgatctaagtctgcgtttagtttcaagtctatgtcctgggttccatcaaattctgggttcgagtttgggtccgggtgcagctctaggtttgggtctgattctgggcttgggtctaagttcgggtcccgagttcgagtccaggttcaggtttggtcct

SEQ ID NO: 223407 - DNA, 975 bp, Cannabis indica
cacaaaactcaacaataatttacttggactatctactaactttaccatgaaaatctttttccaattgacaccatcctaatatctcaagatttttagattgtatttgttataagttttggtttgttggcagaatataaacaaagaaatcatgtatatggcatatgaaactaagtatgtaaatattcatattaccttgtgtttatggccatattcatcacatttttaattaaaaaaatcatttttacacttaaaagcaattttttttatatatatttttacaaaaattcatgtaaaaactcacataacaaccaacggagtaacctaaatcgcaattaaattttacataacaacccacagaaactactagagcaatacaaactgtaaattttacaaaaaataaaaaataaaaatagtatataaaataattcctctaaaaatattacaccaaacaaaagattcacttcaaatgctcttacatcctaatacttctccaataacaaacacataatagttccatagttcctactttgattcggggtcaatcattcatgtcattgtagattttgccatccacagcacacaagatgattgcaaaattgttttgagatttaaaaagggaaatttgattaaatatgcataaaatactttaatatttttttcctaaatctatatgtattaaaattggtcatatatgaccacattactattttccccataatacccctcacatttgaaatcccaatcagcctcctctctctccctctcgctcaaaccacgctcaaacccacggcgacggcgcagcaccccattcgacccacggcgaacccaatcgacaaccgaaccaacgaccctatcgacgaggcaatcgatgaccggatccacaacccatacggtgcacgccatccataacaatgtcgaaggtgtgtttttattttctttttttttggttccaaaagtgttaaccatttatgtcgg

SEQ ID NO: 223408 - DNA, 1467 bp, Cannabis indica
atagtttcttttcccttcttgttaactaacttttggttagttagttgtagagtcttttggctcaattggttgtatataaagccctgcaatctcgttccttaatttaatgaattacatagcattttttttttcaaattgctctttaatttacaaatactaacagctcggttcggcaaagttaacaaacatggagaaggagagagagggggcgaatgagagatagattagagacgagatagaatgataccgacactaaaagaggataagagagaaagagagtagagttttattttaagtgtgggctgaaatagacttttaattaataactttttttttaatatatataaacgggtcatatatatgataagattttttagttttaaaaaaaaaataaaacttttgcttctattgaaaaatgacggtaaaaattaccatctattataaaacgacactatagatactccattagcatcgatttttaacagtaattcatttttaataatgtcagtttttagtagttactcattttcaatagcgtcgattctcaaaaaaatataatttattgataagaatttcctctttatttgtagtagtaaaaatattttttttatgtcctagatatcatgttcagcaaaaaaagacatgaaattaatgttttcatatctctttcataaaagagtttcatgcccaattttgatgatcatggaatgagatttttgtagtatagtattgaaccttggaaaatcatcccctaattcaattttagtatttttatttcataatcaaccgacccgcctaccatcttttgtctcgagtcaagttttcattaattttgtaattttctatttacttaattaaacgaaacttacacctgtaggcataagatggttgaatattaggttgggtgaaaattcaaaaaaataaattgtgctactaatacttgaccaaaatttaaaaaaaaaataaaaagaattggtgttggtgtcaatattgtgctactatacatgatacgaaagtatgattataatcaaaaacaaaaatatcagctaaattaggatgttcacacatgttacgagatcaaatataaaaatagatgcaacattacaaagtctttctttttccttgttaaaataaaatcctccattccttattataaatcaaccgcttgacattctacacgaggagaattgattattccatttcttattaatattttttatataaaaaaattaaaggtaatgaaaattctattaatatgtaaaccgagcacagtataacaaatattatttatttagcaaaatcaaagaaatagacttaatttacagtaaaaataacgaaaattctaacaacaccttcaactaataaataacttataagctgtaaacaaaaaaaacatcaaaatattgtaaaaaaatagatttctattccaaataaacatgtgtcagatcaatatcaataacaattagt

SEQ ID NO: 223409 - DNA, 1399 bp, Cannabis indica
aaaagggttcaagattgggatgggaagcttctttctatgctggaaaaagattttgattaaaacaattgcgcagtcattgcctacgtatgccatgagtgttttcttgctcccaattgatgtgtctaaagacttggagagaattatgagtaagttttggtggcattcaaattcttctcatggtggcggtattcattggatgagttggaaaagaatgagtaaacataaaactatgggtggaatgggctttcgtaattttcatgactttaatttggcaatgttagaaaagcaagggtgacgtttactaacaaaaccaaactctttggtgagtatgttatataaggctcgttattttcctaggggtaattttctttcagcattccttgggaataatctaagttttatgtagaagagcgtcttcaaattgcaggagcttctcaagtctggagttcattgggcaataggttctagtgtgatgcttgatattttgcatcagccatggcttctggttgatgtgtgtccttttgttacttcaaatgcccaatatttggtgggccataaggtgagctcattaatgtgtacggataagagggaatgagattcagatattattaatgatttttttaacaagcgcgatcaacaacatatttttgcatttccattgagtctgaatgtagccgatgatcgttttttcgggtctaaggagcatcatggtttctactcagtgcgtagtgcatacaagttgatacaagctcaaaaaagaaattggattgcagatgattcttttaggttttggcacaagctttggaatttgaaggtaccaccgaaagctctcaatttggtatggcgggctgctttaaattgtttgcccatcttgactcaattaagtggtaagaggatcccagttcatatcatgtgtctagtttgtcaaaaaagtgaagaaactattttctatgcgcttatttcctgttcaatcgctgcttaatgttgacagagacttttggctggggttaggctaattgttgctggtgatttttacagctagttgatcaaattttgcaaaggtgcaataaggacaagtgtggggaggttgttatgttgtggtaggggttatggaaggcttgaaacgagttggtttggaaccaaaagtatgctacggtggatggtatttttatctcatctatgagttgtcttgtgcaatagaagtcaacccaaaatagaggttcaaaggcttcttttccaatttttgaagctggtgatggagttgaattttgggttaagctgcaagagaatataattaaggtaactcttgatgtcgccatttttcgtgatcgagcagtgtttggttatggcatagtcgctcgagactttcaagggaaagtagtgatggctaagtcaggta

SEQ ID NO: 223410 - DNA, 1275 bp, Cannabis indica
atgcaacattaaatgttatttttcatctatcttaataagtaaatctgattatattgaaatgagttttatttagggcataaaacccaacaagaacaatccccacttgcgtcattttgtgcaaaatgactaaactcaggcacaaggtgcccagaatagagaccctatgccagctcctgttacgggtcacttaggggtcattatcggtggacaccattttgtaggtgagaccagcaaagctagggagcgctatgcttggacactccatcattagcccaacagtgacatcctggccgtcgaagaaagaggctctaagcaaccaaagcttggagagcttactatctctttcactgaaggagataccgcttaagttagtttcccacacaatgacccctggtaataactacacaaattaggaatatgactgtggcaagattcatggtggagaatggagcctcctctaacattcttttcaaatcaacatacaaaaagatggggtctagttaactgatttggcaccctacactcaaataatttatgtcttctttggccaagtcattggacttatggggtacatcagatcgcccctcactattggagaaaatccacctaccagaactctgatggcacagtttgtcattatcgatgttctctcagatttcaatgccatgacaggtcgaccagccctgtacggcctaaagacagtgacacccatctaccacctcttcctaaaattcccaacaagggatgggtaggatgtttgaggggagaccaaaagtcttcctgtcattgttacaacttggctttgtccaaagttaagaaagagaagatgcccgccaaaagctttgaagaaaagcccagcaaagggtaatgaagtccagcccaaagcaggtacatagacatagatcctcgttttagggattgtgtaggtagctttggacctttagaagagctggaggaagtggaggctgatcccacttctccagctagaagactgaagatcgggagggtttagcgctgaaaataaaattagtgttgataaattttctaagggcaaacctggacctctttgcatggtcacatggagacatggtcggaatagacccctctatgatgacccatgccctcaacatcaatccaaacttccaacttgtacaacagaaaaggaggttgtcggacaaagaacgcgcccaagcgctcatagatgaagttgagaggctacaggtccatgacttcataaccaaagcattctattcactttgggtatccaaccctgtc

SEQ ID NO: 223411 - DNA, 3046 bp, Cannabis indica
gtttttgtgtttggagaagaatctagaatagggggaattggtttttctggttttgggtattttgtgcgattttgtacgatgttgtgcgacgttttatgcgattaaaaaatgcatttctgatttctgttagttttgggaatttgagcgatgttgtgcgattttgtgcgatgttgacctgacaattgtgcctataagaattgtactattatttggcgatttcatgcgatttctgtgcgatgacttacagcatttgttctctgttttttatgcgattttatgcaatttatgataaataagcatttttgttttgtttgattgtagatggctccagaactgattctaccattggctgcgcattttccaggccgtatcacctacagagggaatgggtactttgcttcaattaaagcaaagtttgaagccttcaacttgatcgagagggtgaaggaaactccttttggagttttttggaatgcgaatgaactgaaattctccggggtcattgtgcatcaactgctgttgaggaaaatgaaaattgagtgaggtaaaaaatgatgaagtctggttttacgtgggtaaaaccgaggccagatttggaaggtctgagtttggattgatcactagcctgaagatgagtggtggcccctcgactgaagaatttactacactatgtgagtctgatcggatattgcgggactacctgaataatgccaaacgggtcactttcaaaaccctttggcttgcttttgaggcgtgcgatgtggccgacgatgtgtacaagctggggctgtgtgcatttgttgaaggtgtgctactatcaagggctgagggtgtttatatatggtcggatatgctgaagttagtagaaaacgcaaaaaagttcttcgaatatccgtggggccttctttcatatcagaccatagtaccacttccaactaacaagagggctataggatgtagatgggtttacaagattaagtataatagtgacgggagtgtagaacggttaaaggctcgtcttgttgcgcaagactatacgcaataagaaggattagacttctttgatactttttctcccgttgctaaaatggtcacccttaaattgctacttgctgttgctactatcaaaaactggcatattttacaattagacgtgaacaacgcctttctcaatggggatctcaatgaagaggtctacatgtccataccacaaggactaattcttccttcttctcttaatgcagaaagcaatctggtttgcaagctacacaagtcaatatacggcctcaaacaatcgtccagacagtggtataagaagttgtcagatgccttaatgcaagaagggttcaaacactctcaagccgattacaccttattcactagaggaaccgaagacaccttcatcgctctcttagtttacgtggatgacatcgtcataactagaccaaaaatcaatatacttcacgagctacaaatctccttacaccataaattcaagctcaaagcacttggaaaattaaaatattttctctgtttcgaagtggcacaagctcaagaaggcctatttctctcccaaagaaaatatacactccaattgcttgaagattctgggtacataaacatcaagcctagtaagacacctaaggatcccaaactcaaacttgacaatgaagatggtgaagcattggaaaatccctctcattatcgacagcttgttgggaaactcttgtacctaactctgtctagacctaacatcacatttgtcgtaaactctcttagttaatttatggcaaatcctcgcactacacacctccaagccgtgcaccacctgcttcgctacattaaaggaaatcttggacagggacttctctactcaaagtcatcaacattacaccttcgtggtttctctgattttgattgggcgtctttcccaattacaaggcgatccactaccggtttttgcatcttcttaggagattgtctcatctcctggcgcacgaaaaagcagcctaccatctccaaaagctcagctgaagccgaatatcgcgctctggctgcaactactagtgagataacatggttacaatactgttacacgattttcacattcctcaaccacatccagccttcatctactgtgataacaactcagctatccacattgcaaacaacccaacctttcatgaaaggaccaaacacataacacatagagcttgactgtcacttcatcagagacaagatcaacaactcaacaatcaggctcattcccatatccagcaaactccaattggcggatgcttttaccaagccactaacctttcctattttgagctcccatatttccaagatgtccgtttatgatatacacgctccatcttgaggaggggtattaaagaatacatatacacaatcttatacccctctggagtatatatcagcaatatatatctttttccccttgtattcttaagtctgctcctctgttataggaaaactgttaggaaatcagttagtggttagttagttaggtttctttcttccttttctttgtttgtaaccgacttaggctgagctatatataaagttcattttctttctttgtatactactgtattttcactttttctcagaataaaataaaaacacttttctctgttttcttattatgagtttttgctgtttttaatttcaaagtatttagttgcttattgtttgctgacgtcatgatcaattttcacattatatctatcaatctatgggatttgtagtcactctcaacacatgcatggtagttgttgatgtggtgttgatgtcaactgataatgtcacataccatcacgtctaatagcttacaaaaaaaatacatactgtacaatattagatactagttttttttttatatatataaaaattatttaattatttaaagtgagagtacaagtttattaatagagtaatttgcggaataaatacccaagtttatcttctagttgcagtttaatacctaagttaaaattttggcggtaaaaataccttctgtcacact

SEQ ID NO: 223412 - DNA, 6483 bp, Cannabis indica
tgtaggcctcatacacttgttggccgaatgtttcaggctagatattatgtgggaaaggagtttcgtttggcgaagtatctttgaaacaaccgagctggtgcggatgggggcacgtaggcgagttggaaatggtttcgaaattagtattgttttagacccttggctaccatgtgttaagaatctgagaatcagtttgaatcatccctgcccttttaaatcaaaatgttgctgctcttatggtcactgatagtttggtctgggatgttgacttggtgcgtgatttgtttaataccagggatactcaacttatcttaagtattcccttaaattcaagtcgtattgatgatgtttggttctggtcttttgagagctcagtgaatttttcagtgaaaagtatgtatagacatttgcaacaaagaaaggaaggtgatttgcagctggtggggtttgatttctagggtaaactatggcgcctgaaagttcctccgaaggtaaaaaatttactgtggagagctgcctcgaattgtctaccaactaaggttcaattgcgacttaaacatgtaaacattgactctaattgccctttgtgttcctcagatagtgagacaatattgcatcaactggtggattgttcttttgctcatgcttgctgggatagaatgggaatccgagttagaatggattatgctggagcttttacgggttggcttgactcttattttaaaacttttgagggggaacaaagaaagattatagccatgacttgttgggctatatggaaagtaagaaatgattgtgtttggaaggagaggagtgctaatgtggtagttgtcactcttttggctaaaagcatgttggaacaatggagcaaggcacaagataaatttcaagttttgactgttgcattttttacagcagctgatggtgctgaactgtggcagaaaccagcagcaggggaagttaaaataaatgtagatgcaactcttttttcagatgcaaacaggtatagcttcgcatgtgttgcaagggatgaattgggtcatgttttggaagccatttcctactgcaaacaaggcactgttactcctgatttagcagaggctatgagcgtgagagaggctttaagctggctaaagaggaaagattggaatcgggttaccattgaaacagattgccttactgtggttcaagcttttcgcagccctcttcttatgttttcctactttggaagtgtaatttcaaattgtaagactttgtagaatgatgttaatgatgtgtctattttatttgttaaacggtctgccaatggtgttgctcatgcaattactcgagcttcatcttgagttgctgatcgtgtcattaggagtaacgagtttactcctgatattcgtgatgtaatcatgaaagaagtttattaataaagcttcctttactttaaaaaaaaaaaaataataacatttcgtgaaataagagctgtaatttttaaatataatttcttaatttatttaaaagtaatcttgaaatcatgcacccttattttcatccattggtaatctcacaacattaacattaccaaaattgcatttgacaaagtttgctgcaatttgattgaagtatcaaaaaatatttatttgaattccttttacaaagaatagctctgtatatacaaacttatagagtggaaagaatcaaaccaaaaacagtatactcacacacacacacacacttgctttacagaactgagcaaccatgaaccacaatacctggttcagttgggcaagaagccaaaggacagccttctgagccatttccccaccatgtgagtcttacatgttccatcccgaggcacaagtacagcaacacccccatgaaggctaatccagcatcaagagccccggacagcacatagttgtggcgactccaccagctacggtagtacctgtaagcaataaatccagaggcaaatccaattagaatccaactggtgtagttgactgctgtagctgggggcatgttgattgttgatcctaagatcacaggcatattgatgagtgcaatccaatgcttgtctggataggccttgtgtgcaagccaaactaacacagttgccacaacacccactaggaaaaaccagtttatggatgaataaaagccaagatctccaaagattctacgaggtccgattaggccccagatgacagaagcatcataaaacacatggtctccaggacaggtccatggactatctgaaggaagcaaatccctgtcacatatgtctgggattgtgtccataagccaccatgctgtcactaaatgtgcaagagcagatacaacagttcccactacctgatataagaagagaaaatgttctttaaaatcattagaaaacttcttacaagtcactgtgatcaagagatttgatggaaagttaaacaggacatgaggataacctgggccatgaacattgctctaggaggaatcttcatgtaatgacctagcttgaaatcttctaaaaatgctatcccctgtttcatacttatatagccataaaccttgaagcacatgttagcaacagggtaacctgggtatatatatccaatgatgtactctgtgattacattcaagccgggtaactgtgaaccaatgaaaaatatgtctgattaggtaccaaaggtgaaattatttcaaaggttgttaatatattcaatcaacaataagagatggagttaaacctgattagttgtggctttgataactccaataggaagagtgaaaaaaaaatgctataccacatgcgagcaagacaccccaccacttcagttggagttgatcgttgtaatactggcatatatatatggtcgctgctatattagcaaaaaggatgcacatgaaccaccattcaggaacttgtttatacttcctcatgagtcttgtgtgaacatccattttcttttcttgaaaagcagacttgcttagctcccatatttgtctacaagcgaccaaaaactaaccccactgataaaatgaactatataacgttgaagataacagagtaaatatattaacgacaggttttgtggtacacgtcatgctacattataactagcttatatgtttttctatagaacttttcgaccattgtcttgcagatgttgaagtggttattccaaaaaagtatattaacttaacttaaacaggtctataacaaaatggaaggcataccttccatgaaagagaaaaacatgagcaatagtggcagtgaggcatgcgaaattgaaaccataggtgatagcaaacaaagtgctcatatgaagagggccttggcgttcatatgcatccatgtcaaggtggaacttggagtcagttatagcggaaacattgtagcgctggccagtagatgtgaaaaggccatctgagaaaatggggaatgttttggctttgtagaaattgagccagtaagcgatcgggacaatgacatagagtacaagcccaaaaccaacggctacatttgcagtagcaaaccatggactggcaagtgggcttccgaggtaagaggctatactggaccaatcgaacccaagagcaccgattccgaggccacgaagtcctgaacccagctgatgggcaaggacggaagcggggaatatccagcagaaccaggagagagacgttagcctcgagaataagtaacctgggacaacatagtaagcaaagctgcatataaaagctattagaaagaattgattccgagttaagctccccttgggcctcttctctttctcatgtaatgccctgcaaataacacaataacgtctaagacaaacaactacgacagtaaggaaaaaatgattaaagggtagttaatcaaacattgagtttagttcttgcatcattaatatttactacagagaacaaacattattggctgctcacaaatttattttcaaatattacaatcttttcttttccttgcggaataatatttaattaggggaattactccgtactgtttttttaatttttttttttttcaaatttacagttaggttttctagagtggtttttttggtagtttctatgtaggttgctatacgacttattgttgcgatttaggttgcaaagctagttgcaataggaattttacgtagaattccgtaaaaatataaaaaaaatctgtttaaagtgtaaaaataaataatctccctaatatctataaggttgcaggctaaataattgttagtaataacaagaatatttgtctcttctttttttattatagaccacaagtgtccgatttgtcttgaataaatggtcaatataaacttttacttacgctgggtatcaatgacaatgaataataataactattcctaatataattatcaaatcacttttaaaaaaaataataataaataatcaggtatacgatcatttagccatattgatatcactatctaaaaaacataacaaaaacttaacgatcgatcacgttgttaagattcattacccagccaaaataaaatcacaacgtataagaaattcatactatagaattgtaatcttattagtaatgaaaataccagattgaggcttaaattactattcacgtgagagccgtagtagacacccaacaaatgtactgatttgaataaagaaactaacttttatatttttggcattatatatgtatggttgacttaggagatcaaccaagggcagcgccataacataagagatcaaatgatcaatcaagagtcagtaaataaagtttacctaaaaagagaaacctggacgagattctggggccaccacatagcggcgggctccaccaaatagcgccgaaaaaccccggcccaaccgaatccgagaacctgggtcgtcagaacaactaacaaggccacaaaaaacgtgagattttttttgtaaaatatcttcacagcgctgacgatgtggattgcatacacattcccagctcccgaattagcgaagatagtgatcagaacatgctctttcacattaaacggtcctggattcagcgtaaactcccatttcttgtccttgaagaaaacccgatcggtaatcactgaggccatcagatgaccaagcggaacaaccgcgatctgagccgagatcgaagtaagagacaggggttccttcctgtaccagaagaattgtttgaggaacgataggagaacgcaagcgaatatccccaaaacccatgttctgaatgtcacggccggtagagaaggatcgtcggtgacgggaacagtgagcgcaacctcctcgatcggagagttttcttcggcggaattaggtcccggcggtggcggcagtgttgaatcaactgtcgcatcgtattgggaggcttcctcgttgttctgaactgtagacgaagagaagttgcaataaaagtgtttgaatggtgagaatctacgcgagaaaatgtaaagagtactaagtgagggggaaatgtcttacttagaagtggagctgagatttcgtgaatagtcataatcttgatgtccgtacatacagtcccaaaaatatccagcccagttcgttgggtgattataccatttttgcccgttgaccaatagtcaccgttgattaagggcacgtgtttgcggtaacaattcgattctatgtaataataaattaataaaaagatgagttaatttggtttatatataaaacgaactgcttatgtcactgattacgaagactaaatgtatttgaaagaatatattggctagatgcacttttgttgagtaccttgtcaagttttaaggaaatagagatgtagtaataaattagctaaacgacagcatatctacacaaacgacaacaaagaaaagtgtgtgtagaggcagtcactcatagttggtatgtttagttgagagagtcaacgaataaaatggactattaagttaacaattatgtgaaatgggaaccccaaggcccaaggtacatttatccgagttgaggtatgaacgtttgagtctacagtattgtttaagagcggagtgaataagatatcaacacgatgtgattttcatatatttaggcgatttaggcatagtataattaattgcttagtgtgagatgtctttttaattttaaattttaattagttgctaaggtggcagttcttttttctatatatacatataaacttaagagactggtctgtagagtgttgtaaccctcttgacaggtcacagcaggagattcaacctcgaagagcttgatttgtaattctttgaagattatagagattctagtgggatttcagcttactggtttaagtttaattgctagacttattctaatctgagaaaagtttgtcagattaaagtaaataggagcaatgagtgaataaatcatcaatcatcaacaacatactgcaacaatgccaacaaataggttgatttggattgtcattatgtgataatgataaataaaatactataatgaaagcaaaaa

SEQ ID NO: 223413 - DNA, 2458 bp, Cannabis indica
tggtgaaatgtattcttttttttttgaaacaaagattgcaacttttttaatgcaaatcagctaataaaatagcttccaaacctgtagggacagaccccctacaggaaagacgaccgggacatgaaccagaagaacgagctaaccaattagccgcttggttcccagaccgtttaacaaactgaactgaaatatcaaacatcgaaagagatcgtataagactaatacaatctgaaacaattaaaccaagaggagaaagaatttgcctattattgttaatagcattcaccaacactagacaatccgtctccacacacaccctagtagggatccaaccttcaaacgaaccaccatcaccccaagtttgtttaagccagcttaaagcttccttcattgacattgcttcagccaccacagggtcgacaccaccaaatctcttctcggcagcagcagtaagaagcacaccagccgagtcacgagcaatccaccccaaaccatgactcttttctcttgaaaaaatagctgcatcgcaattaaccttcaactcacccaaagatggtttactccaaagctcagaaccagccgaggcatggctagtagatgtcgaaacatctccatttttcaactgagcaactttccaaagttcaaggtacgtaactgcagcagatacaactctttcaacagaagcaagctttttgttccaaagcaagtcatttctagctccccaaacaccccataagatcatagccattttatcaataccatctcctgggtgagcattacagaagctctcaaaccagtaaccaaaatcagcatctccactcaagacagaaaaacccaatcctctctccaaacaagccatagtaaaaggacaagtaaccataagatgaaatgtagtctcgacatctccactacaaagagggcaaatactagtcacattcactcgcttagttcgaagtgaaacaagagtcggaagacaattagagagggcccgccaaagaaaattcttaacttttggagggagttttaaataccaaaactttttccaaaaaccagagttgtcttgagaattccatctcccattaagctcttgcaacgcacgataggcactcctaacagaatagcttccataatcttcaaacgcccaataccatgagtccatattcggtgttaaaggcagaggtatgttgcgaatgagatcaatatctctcggttcaaacaaatcttccaatatttcttcatcccaactcattttttcaacttgtaacaagttaaaaacagaacaatgacgaagagcttcatgagaagaagtcacatacggattgtcttttgaaggaagccacggttgattaagaactggaatggaagtgcccgatccgatcctccatcgagctcccatttttacaatttcctgagcttcaaagacacttcacgaagcatagctcgggtttgaacccaactcagcatcaataaacgaaccttgagggtaatatcttgcttgaaacactcgagcgacaagggacgatggatttgttaataatctccaaccttgtttaccaagcatagccaagttgaaatcccgcaagtttcggaatcccatgccacctttatgcttatgaagacacaacttatcccagcttttccaatgaattcaaccaccttgggaagatttagaatgccaccagaatctacccataagacgatcgatatccttacaaatctcaatcgggatcagaaaaacactcatagtgtaggatggtagagattgaataactgactttagaagcacctccttacccactctcgaaagtaacttactatcccaactctgaatccgctatctaactttctcctttagaaaaccaaaagccacattcttatttctaccaatcacacttggcagaccaagataaaagcttttctcatcagcaacacgcatgtgaagagtggaaagaagtcaaagacggatcccatcacccgtgttggagctaaagaagacagaagacttgtttaaattaatctttttaccagaagcctgttcaaacttgttaagtaactccagaacacgttgagcctcctccaaagtagcagaacaatagagaaaactatcatctgcaaataaagcccgccgagccacccgacacccatggatccattttctttcttcataaagccgaataaaagccgaaaatccttcagcacaaatgataaagagataaggggaaattagatccccttgtcggattcctctcgtaggaataattggcccaagaacctcccctccatgaataatattgtaagaaatcgtgcgcagacattccattatcatcatcacccaatcaggagaaaaacccatgcgaagcataatagattgtagaaaaggccattccattctgtcatatgccttactcatatccaatttaagagccatgcaaccatttcttccttgttgtttacgctt

SEQ ID NO: 223414 - DNA, 1678 bp, Cannabis indica
attctttagctcaaaattttgagtgaaacattgcttggttgcgtattttaattctgtatttggctaacaggagaaggttgtgaatccactgtttgagaagcgtcccaagcagttcggtattggaggagctttgccaccaaagagggatttacacagatttgtcaaatggccaaaggctgttcagctccagaggaagaagagaatccttaagcagaggttgaaggttccaccacagttgaatcagttcaccaagactttggacaaaaaccttggtatgatccagaacaaccatttttgttgattttcttagttatgaatttgataagtttttttggactggaaatgagttaattgatttgtttagactggagctggaaatgagatagtgatagtgcatgaggataaaatcaatctgggttccctcatttgattattaatgattaataattggacggttcatcactcataaaacaattagtatattttgattgttgtctttgtgggataatgtatttcttttatcctatattctagtgcacttttttaagttggtttctgtgctatttacttgtagtggtcttcttactttatcatatgaaaattcgatccagatgttatttactctatctggtgattgtcatcccataacattagaattaattggaaaaagtgaaatgttttaatattaattactcatttctttttcatctctttagtgctttatttttcttatcgtaccttgtagattgaaatataacacttgttaactctatctggtgattgtcatcccataacattagaattaattggaaaaagtgaaatgttttaatattaattactcatttctttttcatctctttagtgctttatttttcttatcgtaccttgtagattgaaatataacacttgttaactctgagcataattttttgtaaaattcttatgtttttcatttctcataatgttgtgcagcaacaagtctgttcaagttgctccttaagtacaggcctgaggacaaagccgaaaagaaggaacgtctagttaagcgtgctcaagctgaggctgaaggaaaaactgcagagaccaagaagcccatcgttgtgaaatacgggctcaatcacgttacataccttattgagcaggttgataaactagtcatcatattttattgattattatatcttaaataaaagttgctgtgcattcgaattcattagtaatgtctaacaagttacaaacccaattatttcttcttttttcagaacaaggcacaattggtagtgatcgctcacgatgtggacccaattgagttggttgtctggcttcctgccttgtgcagaaagatggagatcccatactgcattgtgaaggggaaatcccgtttgggatcggtattgatcttcctaatctgtatgcttgataacatagggctttgctcgtaggggaaatatctaattactcttgttttttcattctggtttcaacagattgtccaccagaagacagcagctgcattgtgtttgaccactgtgaagaacgaggataagatggaattcagcaaaatccttgaggctattaaggtaaatccagaaaacatattctttattggaaggatgaactcactatctttgtctatcttaacccaaatgcatttatatgtttcaggccaacttcaatg

SEQ ID NO: 223415 - DNA, 1759 bp, Cannabis indica
catctcgaaatcacattctcatctatgcagatacctaagagttggctcttactcatgttaactctcaaacctgatatcgcacacaaagcgttgaccaccaaagccatgttattcagtgacgtctcatcatttacaaagagtactgtgtcacctgcgaattgaaggtggctaacttggatcttctcctttccaatcaggaagccagatagattcccagactcagtttctttgtccatcattcttccaagtacatccgccaccagagtaaatagaaacggcgagaggggatcaccttgcctaagccccctagatcccaatatcttacctctcagttttccattaaagaatattgaaaaagaagttgacgaaatgcaacccctaatccatttcctccacacttctcagaatcctttgcgttccaatactagatcaaggaagtcccactcaactctatcataggccttttcgaagtcaattttgaacaccattccttttttgtttctacttctatattcttccaccgcttcgttggcaatcaaaactgagtccaatatttgtcttcccactacaaaagccgtttgagtctctgagattgtatcttccatcacacctcggagtcgagatgccaagactttggcaattatcttatagacacttgtgatcaggctgattggtctatagtctttaaccttacaactgtcaatcttcttggggatcaagcataagaaggtttcatttacgctgcctgggattcttccttcatcttcaaattctttgaagacttccagtaggtcatctttcattagatcccagttattttggaagactactagactaaaatcatcgggtcccggtgctttattgccttcacaatcaaaaaaaactctccttacttcttccttatcaaatggtcgctctaattctctagctgattgagtagatatttgtctccaacaaattccttccacacccatcccctctcttctttcagaggtgtagagtttggtataataacccatcaattctttgactatttcatcttctttgtcgaccacatctccgttttctttctcaattctggatattgtgtttctggccttccttgcattcaatagattatggaaaaatctggtatttgcatctccctccttagcccacttgcatttagacttcagccacacattcatttcttcttcaaaagctaacttttgccattccttcttgatctcccttctctcttcactccatccgttgcttccttctagtctatctagatcttctaaccttatttctagagcaattttcctcacgcgattgtctccaaaagtagctttgctccacacctttatcttctcttgtttcttctttaattttgctcatgaatttggttcctgaccaatcttacaccgatgtctctttccaccatttttcgaagagcttggaaaaagacttgtgttccaaccattggttgtcaaatctaaaggggcaagggccccaattcggtagatctgaatcaagtattaccagactgtgatctgaaactactctgactgccatttcctgtctgacatatggataggtgatgttccacttgttagtaaacaaaaatctatctagtctactacagatcagattttctcgaaagtttgaccacgtaaatcttccattgttaagtttagggtcaatcaatctcagctcattcactaattcatcaaaaatcttcatactcctggtacatgaattactgttcagcttttct

SEQ ID NO: 223416 - DNA, 1407 bp, Cannabis indica
acatccaccatcatagtcatatcatcatgggcgatctaaataatcttttctaccttagaaacaccactgctctcattatcattcctttataaatcatttagccaaattatatccccaatactaggattcaattcctaccctcggactaagtccttcattatacaaacattccttttgtagtattgagtagcttaaaccacttaaccttcgtcttcaacccacctgaagtctcaaatggaagttgtcatacctatctgctatcccaccttcaatggttctgaatctcctctagagaaagaaggttccattctctgaaccatttaaacaaccgcctctaataattattcacattctataactcactcgggcacatcaaaagaatttaacttatcagaatatcattttgttgctttcttaattctctaatctacttatttcatcaattaattttgtctataataacatatatctctttgtgttctaactgactataaattactgtttctctgattatttttaaactgtcgaatttccctttgaatctctcaaattcacacctgagcattgtacccaatgatttaccactcattaactattactaattatactgctcacataacaacaatgttaataagtatttccctcaattcgcagtcaaacatataaatctactacactttctcaactagtagaagctcataggatactactaataaacttaaaactcatgcatttctaaacatatttctaacaacatcacatatcaactaatcacataacaagtaagtaaataatacttactattcatgagtcgagcttgtctttacaataaatgtacatatccaactaatcttcaggacctttaaaaccttggctgctctgataccatgttgtatgtcctaacctctaagaatgccacatgtgtacttttataaattaatttatgataataaactaatggtttaagtaaaaatgtgatttactaaatattttgttaattaatataaaatataaaaaccatggcataatcacttataattggggatcccctttaacatattataagacatgctattagagtattattacaaaaatacatttaaaagtaaaaaaatacaagtcctaacaactcaacataacttgctggataagttgaaatgtacatttacgggagaagatccctaactcatggctctccaaacatttcttacctaaaacctacaccacatagcacccgtgtgtcataaagacttagcaaaaaaagcaataacaacaatcacataaatagcatcaattaaattcaaacaatcaaaatcaaacgattgtatattattaatataactaattcttgatcaacacaaatattcaatcacaataaacaccggtataaaaacattcgataataca

SEQ ID NO: 223417 - DNA, 1233 bp, Cannabis indica
ttttattttatattttactttttgaaagtggtaacttaaataacactctttgaagaacccaaatattcctgggaggagtgaataattttcctgaacaaaacctgtatgaaaccataacactaaaagcattagcaataaaaataatgactataattctcttaaggttgagattttcttctggaacaaagacaaagacaagacattatgaaccttaagtcaactcaaaaattaaggaccatgaagaaacaaacattaaacaatacaaatccctaaggatttcattagagagataaaacgaatcgagttaagagttttagtaaaaatatcatctatttgcttgctagtttcaacatattctaggacaagtgttttatttccacaaactctctaataaagtgacgacggatgtctatgtgctttgtgcgagagtgttgaataggattttttgaaatgtttatagcactagtattatcactgaaaatagttaaagttttcaaatcaaacccataatctaccatcatttgtttcatccataacaattggctacaacaactacccgctgcaatatacttagcctctgcagtggacaaagagattgagttttgcttcttgttgtgccatgaacaagattgtttctaagatagaaacatccaccactagtgctttttctatcatctgcattacctgcccaatcagcatcactaaagcaaacaaggttagaattagtgtcttttgaaaaccaaatcccaaaatcaatagtgctatttacatagcgaatgattcttttcacagcagaaagattatattccatgggatttccctgatatcgtgcccaaatatcagggtgactagctgtgagataaagcaaactgcatatcatacttcaatataaagtttgatctacccttactccttgttcatctttggttagtttcaatgttgtgcccatgggagtattggtatgtttggtattctcaagaccaaactttttcaccaagttctttgcatacttactttgagagacaaacataccctcattagattgcttcacttggagatcgagaaaataagtgagttcacctaccatgctcatttcaaactcctcttcatttgagaaacaaaaacctccatttcagagttagaagcagaaccaaaaacaatatcatcaacatatatatgagcaactataacatcagtattaatatttttgatgaaaagtgttttatcaacatt

SEQ ID NO: 223418 - DNA, 3289 bp, Cannabis indica
tttcttgtcaaattgattttcaaccaacactttgaaatgtttgaatgcagcaagagcatcagatttgtgtttaagtggatagagccaagtgtgcctactataatcatctatgaagtgaatgtaaaacctgaagttagtgtgtgaagcaataggggcaggccctcataggtcagtgtgtatcaattcgaggacagtggaggctctagaattagagcttttaaagggtaaagcatgtgacttcccaaattgacaagcatcacaaaataaaacactttcattcatagcaggttttacattactagacttcataacttgactcaagacaactttagatggatgaccaagccttctatgccatagatcggacatagaaggagatacactactgttatttgactcgatattagtggctgctgtaaaggagaacggttgactatgactaacatggttggtattgagattggtctttgtagtagtcaggtggtataggccgtctttaagcaccccttgtagaaccaccctctttgtcacctggtccttcacacaacaaaaagtgggaaagaattcaatcgacacattgttatctctagtaagttttgatacactgataaggttcttagagatagatggaacaagaagcatatctttaagaaataaagatctagatgcattagctttgagtaaaccagtaccaacatgagaatgtttagttgattaccatcaccaatgttatcttttccttaccaccatattgagttttggagttcatttgtccctcatcggatgtaaggtggttgctcgcaccactattggcgtaccaagtttcatcattcaaagtctgaggagtggcaatgagagcattgaattgtttgtccagatttggttcggctggtagatggttgttgtcccataaaattctcatcatatcgattatagcaaatcgcagctgaatggccgtattttctacacacctggcacgttagttttggcccccctccaaaccggcctgacctgcctcgacctctctgactacctcttcctcttgctcctggatgaggtgagtttttgtaccgaggaccattgttatgagcaggtttctgagcataattagctgagggccctccaagtgtatgattgagtttgttcgagtttgagagacccgtgagcctctcgagtctactatcaaagccgattagggtgttttgcagctcttgccatgatatttgaggcttggcttcaatctgcacaacaattgagagaaactctacatccaaaccaccaagaacattagaaaccaagagtttttctgggtatggttcccctgccagtgcaagtgaatcggcccacatgcgcttttgtttcaggtaatcagccatagatgcagaaccttttctcacggtctgcaacttggtccgaagttcatccatgtgagcccttgaatgagccccataaagctcttcaagagcagcccataggctagatgcggattggcatcccatgacctctgaggctataccctcggtcatggaaccataaagccatcccatcaataactggtcatgaacaagccagttctcataatcaggattaaccgaaacttgagattcagtagagtttggtatacctgtggtgatgaactgatctgggcagggcttttgtccattaatgtagccttcaagtctgtgtccccttatgatggtgaataccatagtcttccatagagggaagttgttcctgtcgagcctcaacgaaaagggctgactcaatgtactgctgaacggagaagtaaaggaagttggtagagtcgtctgtggtgttgcagcgactgaaactcctggagctgtggggttctgttgagacgcctcagaggtggctatcccttcatcattgtctggagctggaatgtttggatcggccatggcgacggtgacgcctgcgatgctctgataccaagtgaagttttgatagtaacaagattaatttgaaaactcagctcaatcgcagctgaggcagaggttttgtatttataatgataaggcaatcaatacagaatcaacaagagcaaatcagctcttgacacgccaatagtttgttacaaaaaaggagaatctcaaagatttaattgcaacggcattttaggataaacatagaggaggaatattccctctccaaggaatgaggaggctgacagatcatcactgaggagaattacaaaaaggtccctgcagatgttcaatttcttttcacaaaatcatttggttgcaagcccttaaagtaaataataaatggatttaaaatcactacgacaaaataaaaaaaacatcatctacgattaaatcctaaatttgagcattagtcataaaatttgaaatccactttttaccccaccttttcaagaatcctacataaataccaccccactcattaagttcataaaaaagtggtacaatattttatggaaaaatgaaaaaacttgttatagagtttcaattctaatttcccattattccattgaatattcaccatagatattcaaagaaaataattggatgttgttggtggaggacccttctacaccttcaaatctttcaatttcaaacttttaaaagatcaatttttattttttttttctttttaaaaaaaatcattactttataccaaatacataaaaggatcaaaacatatatagctatctgataaaggagagcatgacacgtttaatgaatctaagccacaaattagaaataaaacaaaaaccaagtgagtttctttggttgggagaacccacacccacacatttgctgtctactcattacaaaataatcaagatattaatgagttacttttgagtgggttgttgttgaactcataaataaatttatacataataaataaataataaatcttgtaaactcataagataagagttgatgatttgatgcacaagtctaggaagcaatgaattttgagtcctaatcattttatgaccactaaatcatattcaatctcactaataaacatctttatgcttgaaaacaacaatttttttttttactagttccatttgattagcatattattaagttttaaatattttaatgtatttcaatttttgtattttacttttaggaccaatggcccaatggcctttcttctctctcaacggccactgccatggcagatataatttgggctggccctaagtaagagcccattttctgctatttaaattgaggcccaattgtagggtgtatgtgttggaccatttttagcaacaaggtaactaaca

SEQ ID NO: 223419 - DNA, 3061 bp, Cannabis indica
tgccatttttgaaactctgaaaattttttgagcttctccgtcgaaaaaccatcaccagagttgttcaaaaatttgtatgcccactctatcactgacattttttttgcgaatttcatctgatttaatattcgacttcaagcactcgaagagatattcacaaaatttcgggattcgcagattgtagagccactcatcatctcaaaccccaacttcaaacagcaagtggcttttctccttaatatctcacatgtttattatttgtatttctaggtttaattgctaccttttttatacatatcgttgtcatctcatttggttttagtaatttgtagggctgaactatatcttggaaaatattagggtttagacagtacgtaagttttccagaacctccaattcactaccttctggtttgataaatttctcacaggaattgggattgctttctccttgcagcaatgtcccaatctagttcacaagtttatcgtccagaagatttagaaattgagtttcctactgaaatttccatcccttaccaacccaaaatttcaaaacccacatccaaattagaggtaaacgatgaaagaattaaagaacacttagtgaaaatccatcaggaagacaatgctagtaaccacacagatgcttcttgtaagaaatcactgaaggcaaatgttgtttcttgtgagatgctgcttggcctgaacctcctagtgtttcctctattcctttggctaaatctttatttttacccaaagtcacaattgcttttgaactaggtgacttggactttgaaataatgtctcccaagtcacgtaaatcaaagactcctcaggaccctaacgtcaccttcgaggtagagttaatagagtcgaaggtgcgaactattcaagctacgtaggcgattcactgatgacttgtggaatcgagtatgggtgagactgtcgggttaggtcagtacgagccggtgaatttagttgttacccacctatgcgtcttataggcgagacctcttagggggccagtggtgagaccagtacaagtggctcgactggtgtaggcacttggagccttgagcacatcaggcaggggcaataatccccctttgtgattattttaaggactttgtgaactacctcgggcttgccccatttcaactaaatcctatctcctacagaatccctgcaaggttgagggttctgtataaaatcctgaattggaagtgccccactccctatgaaatagagtatctttactctgttaaagtcgttccagcgaggaagaatgtcgtaggaggcttttattacatcgacactcactccggcgagcccaaaatcattgtggatttgccaaacaaaacatctttgaaggacaacttgttttggacaactcgcctctcccaaattggcacaaccactttgcatataatttgtaagtgattgcttgcattagacttggttaatttaatccatgtctttttattctaagttatctgatacaagttttttttgtttttgatagctctttcaaaaagatctgcccctacccctgagatggccaatcgatgcaggctcttgttgactcttccttgtggccttaggtcatgcgattttcttctaaatgaggtcaatttgagatctgtggatctcctgactgacaagggagtttacttgtgattacaagtgtcccaattattcttcttggcagtaggttcctatccaaaatgaggagaaagctcgagatcgcgtggctcgggcacattactttagaacactgccccccaggatgccggtgaaggatcatcctaaggtaatcaatgtggttggtcacccacactacttagggttgagcatgacactctagtcacattctgatatagcctctttaacttttatatttggcaccccctcctcgtagatcgcataaaacataggtttgtatagttggtatcccagattccatgttcaaattagttgtgatgagtcatactacagttagctgagcaatatgggaccatgacaaatagggcaagtcacctagaccgcgagctgggatttagaaccagttgatctctttgataaatttaagatcactggttgtagggatattagtggatactatggtccaattctaccccatcttctagtgatacctcatcttctagtgactatggtaaattccttaggcagaatattatggctaaaactccccttttacttatctttaattaatgctaacatttttatcttgtcttgcagaaatgcattttgaagatgttatgcagaggaaagggaagaaagagagtgacaattcaagggctccttcagatgtcgaggtggagcctcttaaaaaggccaaggaaaaccaccactaatagaaagaagaaagcttcttagccctttaaccttgaggtccccgagactgaaactcaggatcaaactcctcctccggtcaccgcacgtacgaatgaacctctccccaaagaaactcacgcctctgcctcttcgagccaggccattgaaacactatttgtcgaggcaggaaagactagctcagagttcacccaagagtttggagttgcttgcttgcgccagttcaaggctctccttctccatgattgggatttaatcaatcatggggatttggaaggaatgcttacgaggggcttgtctcataccctcttggtaagtttcttcaccctaatgtgcttacatcttttatttcttttcttcttcctccttgttttttatacatctttgtttgtgaatctccagacttctttcatctcttttgtcgcctagcgatgggcatggaaaagataaaatacctggagaacgaggtgaagaactcactaggccaacgtgaggtagttgtcaagaaatggagcgatggtcaataggaaattaatcacctcaccaaagaagctgagaggctgaagaagagcctgaaagatgttgggaaggtgacaaaggccaaaaccgatgaatgagagaagctcaaaggggtacttgaggggaaagaggctgaaacctgagaatggtgcaacaaagttggccttcat

SEQ ID NO: 223420 - DNA, 3390 bp, Cannabis indica
acctcgtttcgacccgtgtttgaagtctagggtcagtcctagagttcaggattaagttgattcttattccaagtctagactcgaggtcgaaccgttcccagggccaagtctatatttgggtcgggattgggatccaaggtttggttccaaatctagggtctagatttgagtcgagatttgggtctacccgattatgtgaacaaaaatataaaaaagaatatgctaaaaaaattgaaaatagttgtcaaggtatgaagctacacagcctcatgatttctccattttttttttcatggttacatcaatttccttagtgagctctcattttttccatgtgctttatttggttttattgatcttttgtgctatatgttatttaattattgctccaggggaaacccatttaggaatttcattgtttatattacaatttttcttttcttttcattgaggctattttaagctcttctacacgttttattttgagtattgtaccagtgtgtctagcaccttctataggtagcactctacgattggttgacgatattccctaaaaaaattattttcttaagttatatgtgacgttatacttaattataccaatagcagtataacatcgaggaaaataataggtaccaataatgtattaactaaaatttaataataaaatattaaaaatagtataatagtaaatataaaagcataatatttattataatgtatattttacatcatgttatattgtgattcacatttggattattttttgttatatatgtgataaatttacattaaaatttagcacactactaaaatggaatttttataaagtaaactatattttatatttctatcacttatttacatctccctccggtagagttactcttatatatgtaaaagaaacacaacataatatatatttcatttgcgcccttctcctatctcttacaaataattcaatggaatatagaaactaatattaaaaaaaaaaacatatactaatcaactaatgtaattgtaacgttctaccaactaagacggttacattatttttttaatttatgtgttaatctttactaattaaagaattttaatataaaattgtatttaataaaatttttgtaataattaaaaaaatttaataaacttataatacttttacacaattttataatttgagaccttaaatactatttataaaacgtacatgatacatatactaaacaaaagatattgtctaaagacacaaccaaaatactacgagttcgtagtgtctcaaaaatttcaaccctctaagcttaaatgaccatatatgtacaatttttattaagtttgtcactcactgttgttcagcttttgttttaccttcacctacacacaaaaatatatttataagtcgacagacttataaatatatttataacttaaattaatttataaaaattaattttagcatatttttaaatctctttttcacattattttctcttaatataattaattattttaattttattttcactttttgtttctaattaaaattcatatagatgtttattttaacttattttgtcttaatatttaaagtatattttttatgaagttgatataaattatgaaaagaaaaaaaaagaaaaaaaaaagtaataaaagtttttttttttttttaaatgaagattattataagttaaaaatatatatattttataactttatggtatgcaaagtaaactcccaaaaaaatatcaaagagagtaattttccaatttggtgggctcattaatttcttggtgacacataacaatgtcaataacaacaaaacaaggggaaaaaagaagcatctttttaagcatttccccaagcacatttccagaatctatttgctcaataggtacattctattttccttttggtatcattcctatcaactatttttaattactcatttggaggaatggaatatacaatgggatactaatacactatactcataaccaatcctatagctcctcccatttgctcttccctttcaattttcaattgtaaaaattacactaaatataagttttttaaagaatatttacaacctcgtttacttacatataatcggaatgactaggaatcaaattcacccttaattaaattgatgaatcaaattaagaatgagttgtttacttaactaacaggaatcagaattagaataggcaatattctatatgtttacattaatgtggaatcagtttaaattaatttaagttacaaagtactctttattaaagttttatttgatatccttacaaaaaaaatatatatttggatatttttaattttctttaattaaaaatattaaaagagggtaaaaattaaatttcataattttaaattattatatttgtaacacctaagtttcaattttttttgagcaaaaaagtactcaaattattatgtttgtagaacttaagtacttaagttatttattttgctacttaagtttttatatgatgtcaaatttacttataacttgatacttaactgttaaaagtaaaaaatttaaattgggtacttaagttctaccattgtaacaatataaataatttttacaacctaaaaagtaactttgcctcataatggcctgttcaacatgcgaggctcctaaggacaagtcatcccacatcaggaaaaccaagggttccaagtgtatggtcaacaccgaaataacaaccaacaatagaagcaaggccggagaatgagatatgagcctgaagtctctattcatcgacaatactccaatggatatgacgatgacgagcttggaagtcgagcttgagatgacaatcgacaacaaaggcgcgaagatcatcatgtcaaccaaaacaataatcacaatgatggctagaataactgcaccaatggccacaatgatagaaacccacttaggaaagaaaggaaagaaagccaaaatgtaggtgggagacctcagacagatgttgtgttccgaaggatgggtttgaggcctgaagatgacttacaagacaacttgaaccaaagaagagagaattgagactcaaacttcactccaccgtagggaaaccagctgaataatcagtgtaactttgtcctgaatgatcaaaacaagtttgtaccgaatgaccaacttcgtaccaaatagagttctgagtgaacaaccggtggcacaagttggtcaacaggtggcataaatatattcaggggtacacgcataatttgatttacgtaaaagtatagtacaaagcatgactgactcaaactcactgacctgaaacttgatcaaagctgaggttccccattctcttcgaggaacaattcggtggaaattttgaccaaatttaaaattccaacttggaagat

SEQ ID NO: 223421 - DNA, 1491 bp, Cannabis indica
caagcttgtgttttctctgttttgctagtttcctaatgctcttgtttcaggtgttaagtcatagttctctgtttattgaaagaaatattctattatgtgcttggtatattgatttatgataattttatgcttttgatgtaaaagaaatgatctatctactatctatcttttttatttttattagataatataaataatgaaatgcttttgatgtaagtaactacccctatcgcgttcaaaagctctgtttatgcacactgcaagaggttgcttgttattgtttcatcagcaaacactcgtgtctgaattaacgtgatttcaaatttatcgttccttgttgcttaagtagtgaaagttttaccatgtttaacttggcaatgtctttcttccttttcactttttgattttgttgtttgaaatatgataatggttctattcaaatagctaggagctagcttggaaagtgagcatgtgggtttgaaatttttttatgtaggtgttgattgttgcttttggtgcttcatactaccatctattcaaacacaatttatcaaaatactgatactatttattaatgtttgtttcaacatgaagttcttcttggaaagcattattgcatttacttcgatcatgtcaatctttattacattattaaataaaaatagttaagttaattttgatattttattatactaacaataaataacacaatgtgttgctgttgtgataatattttggatactttatgtttgccagaaattttcgaaaagatgaaaagagtggaaggaaaaagaatgagagaaatgccaaaatcacttatttaactgctcttaagtttcctgttttaatcattttgttgatcgtgcatttgacattactgtgattaattgagtttctagctgttgtgttcttgaatgaggtgaatccaattcaccacactttgtgataaatggaagaactgatcaattgaaaaaagaaaaataattgttatataatatatggacataaactggcattatgctataccacattttgaaactttatatgtttgattcgtaataactgtattaagatataactttcattgtctatttcttaattttttcagcgattatgttattttagagtttaagttttgtgttcttcatatttgcattttattgtttattggtttgcatattgacatatatgtatattagtttgttatgtatgtagatggagatggagagagatgattgtgtagaagtatcaaaacagattggaattccatctccaattgagtccatcaatgaaagtcagcctcaagcaaatagttctcaaattaacaaaagtggagctgcaaatataatgatgagctctaatagttttcctatgggaccatcaattgataaattaccatcgctaacatctacaaataacaactttaaggtaccaactaaacgcaaacctgttaaacctccatctcctacttgggatcatttcacaaaagat

SEQ ID NO: 223422 - DNA, 2513 bp, Cannabis indica
tttagcagcaactatcacatcccttgcgatatgttcatccaatcctttaataaacttggcttttctagcagcttcagtagccacttcatgtgaagcaaatttttcgagctgatcaaaattagtggcatattctgttaatgtcatgctaccctgagtcaatcgtataaactactcttcagccttttcggcccgaatagactcattatagtacttctcataaaataaggtccggaaggcatcccaggtcatgttatttagattatgaccctgagacacaatctctcaccagatgcgggcatcttcttgtcgcaaataaatggcacatctaacccgatcattatcctcgacccgcataaaatcaaatatggatgttatcataatcatccactgctctatcttgagtggatcattgccaccctcaaacactggcgggttctgcttcctaaaccgctcatacaacggttccaaacagttccctgcattcggtggcactactagaggtactggaggatcaagattagggttttagagcaggctgagcttacttctccctccattctcgaatttgttcaccttgctgccagatcctctcttgcatcgcgacatataactcttcccagtttggggggggggaagggagggttctcgccctcaccagcaactccgagcccaactagctcgcagctacctctaccagtatgcctcgagtgcataatttatacacctatagtcacattctaggtattaacaatactaataagtatttccatatatcataatccttcccacacatttccaatattaacaaaattcaaataatcagataattaacaaattatctattaataaaagcttactgaaccatgagtcaaacgagtcctcgcagccaatgtacatatcaaaccaatctttaggaactaaaaaccttggcgctctgataccatgttgtaacgccctgtccaatagggacgccacgtgtgtgtacttttataaatttcgtatttatatactatataattataccaaaagtgtgggtaattaaattttgataaaggcagattcggtgcgaggcataatgaagaacataaaaaacaacaagagcagttcaacaacgagaagaagcatgctgaaagttttaatagctgggctgatttatcatatttgggaggctaggaacgatgttctatggaaccaaaagatgaggcgcatccaggcagtagtgaagcacattcaaagggagagcaagcttaggatcatagaaattattcccaagaaaactaaagatgtagatagagaatggattgtgaatatctaattcattgatagatagattgattcggtgtaattgtttgcatagatagtctggtgggtagattgaggaattcggatcattgtaagtaatcaacagttgtaagttgtgaaattgtaaatgttgtttgagcaatacaagtaccgtattcatcaaaaaaaaaatttgataattaaaatcagacatataaaacttctttataacaaaagataagtaatattaactatggggtccccctgttttcaaaatttttacaaactcgtttaatagtgcttttataacataaacattgcattcccaaaataccttcaaaatagagcatcctgttcactgggtcgtgccactgcgactgatatgtacattgctactacggcctcgaactcatggttgctcaacctttgccttccctttacctgcaccataaagcacccgtgagtgacagagactcagcaagaaaagtgaataaaacaataagaagcaatattctacaatttaatctcaaattaacatgcatacacatttacacaatatcacaaacacacaatcctggtactttataaagtacccaaagtacccccttaccactcgttaaccatgagctgaatatgtaactatcattgcccgatgaagcaaataataagtaagaaacatatctgcgatttcaagagtaattactcgtaacggtaatgaccgtttccaaccctaggtcataaccgaggctcaacaaacatttaattagaatcttgataataatcaagactataacaattcaaccgctaacatttagccacatacggtgcttaacacttttcttacctcaattcaaaactcaagcgtgtgggccgacctgagtggaaaataagctgggcaatcccgttcctatgtcacgacaattgaaacttaatgaataccttaatccaaaattccaaaataaaaccctaactcaaaatcaataataacctaactctcaacaactcaaaaataggtcaagcatcccataaacaacctaaaatggatgctacgcaactcctcaggccaaaaaatgaacctcaagaaaacccgagaattctccctgcagggcaaccggtcgacccgttttggcaaaccagaatttcttgggttctctctttcgattttgacccaaaactcctccaaacctaaccaatctttccaaaatagtataataactataatacaacatatc

SEQ ID NO: 223423 - DNA, 2081 bp, Cannabis indica
gagtaaatttagacctagattgactcaaagtagaggcatacgctagacaaccaaaggcttttagatgttcatatgcaggtggtttggaatgaagtatatgaaaaggagatttgttctttaattgggtgttggtgtccaattaataaggtatgcagcagttgacacacactttccctaataaactaaaggaacataggattgaaaaagaaatgctctagccacattgagtaaatgctgatgttttctttcaacaactgaattttgttggggtctttgaacacaagaatgataatgcataatcccaagctcaccaaacaaagttttgaactgtagttcttttgcattatcagatcttacccgtttaatagtcttattaaactgattttgaaccagcctaatgaattgagggataacaatttgggcttcacatttatgtttgatgatatgtatccaagtgtatcttgaacaatcatcaacaatggtattgaaatacttaaaaccctcagttgtcaaagtattaaaaggtccccatatgtcaatatgaataagatcaaaacaattctcagtaatattatgattagatacaaaaggcaaccttttttgtttagcatggtggcaaatagagcaatgaaaaggagaattatagtgagaatggaaattcaagactttatttaaaggataaaattttacacatgatgggtggcctaacctgtagtgccatacattttcattagaaatggtagaatctgaaatagaagaagatacaaaaccagactgctcattattcgacagattacaattcaacaaataaagatcaccacactttttacccatcccaatcaccttgctcttcatagtgtcttaaattacacatttttcatgagaaaaaaatgtgcaattagtagtggctgttaaagcattgacagataataaattgcatctaaaagtgggaacataaagaacatttttcagaaccagatcaggtcccaaaataactgttcctatgctgtccactttagcatgcataccagtaggtaaaaggacagatttaagattggaattggtatgaatattctgaaataaagaaagattgaaacatacatgatgcatagctccagtatctataatccaattggaaaaagaggtaatcgatttcataccagaaaaatgagatacaattggctgatctgatgaagattctggtgtagcagcattgtcagcaaccttttgagccagcattgccatcaatttttgacattgtgaacttgacaatccaacaaccaagtctttttctccattagaactctctctcaggcttctgctcatctcctcctgagaaatttgctgaagctgatttcattggggggcctttagaattcctattaggaaacttcccatgtaatttgtggcctgatggataaccaatgattcgaaaacatctttctatggtatgatcagacataccacaattagtacaagaaaacttaggtcgaaatggctgaacaattccagcaaattggccctcagtgttcgaattgcttttctctatttcagtacaggaactaacactattagttaagcctctttgcctttcttcttgaacaacaatagcataggcttcattaacactcgacaaaggatcacgcataagaatttgtgatctagccaagctgtaagagtcattcagaccaacaagaaactctaacagcctgtctttatctttatattcttgaataatcttcatagcaccacaactacaaacaggttgtggtctatattccctgatttgatcccacaatgacttgagtcgagtaaaataagttgtcactgtgcacgatccctgagttacactttgcatcgttttctttgcctcgaaaatccttggagcattcttctcattgaatctttcatgtaattattgttgggttttatgccctaaataaaactccatttcaatgtaatctatttatttaacatcaataaagaaacagaagtatttttcattcatttgtgtatgttttggttcaactttatcaattccttgtctatttgatttataaatccatcctaaacccttttca

SEQ ID NO: 223424 - DNA, 2487 bp, Cannabis indica
tgccttgtaaaattcttttaagctacttcgactttttccaaccaagtttcactttccttgagttgtaagtagcataaattattgatcttgagatggctagcgtgaagagaagcaaaaggttacttgatgaatatgatccccatattgctcatttcattagagctaagctggcagtgcctaaatgtaaggacttagacaaggcaggtggtggaaaggtgattgcaactgagcttctcaaagctgtcattgagagtgatgatctgagagatcgagccattaaacttagacctcttgtgtctagtacctttaccgagcttcaagctgaaacaatttgggatgattactatcttcctgaaactgttgatcggaagcctcgacatggtgcccccaagggttccaagaatacttgttagtagtgtctggtcaagattccacatgtatgtaggtgcttacttacccttgcatccatagtttatatcaatagctaacttctttagtgtatgcccttactagataaacctaaatgactataggattctagccaccttcttcatattttaccaccttaggaattggtctatcccaacccctcatgagatgaactttctctgtgacttaaaaaggagtccaaccagtagagctaaaagtttttaccacttctatcaattttcccattcataggacacataaccaagagtaattgtggcctttaccaccaagagtatatatactcttgttcttccatcgagacacattacttttcaaaaagtcggccctttcaaaagatcgactcattttattgacatgatgaggagagctaaacccatgttgatagatattccatcatgggagagagatggttgaaccctctttaatactaaaaatattcgaaagttgggttgatcatgtcatgcctgagagtgtatgctgatgttggcttccctcgcgaatctttgcccatgccacttgagcaaagtgacgatgatgcttaaactactactgttattctgtctcaaactatgacggaagaattaaattctgttcaaaatgacacaaaatatttagggaaaatatatgtgttcttaggtcaggatgatggagaagtacctctgctaggactgcaacaaagaaggatggggaatcagcaggttgctgacactctatgttgtgctcttaacttgtcgacttgtttctctttgttgtactaacctcttgtctttactttttgcaaataatatgagcttcttggctactatggcatcttgttcgaacttaaagaggaagcttttgacactaaaggaaactgagcctttggtaagggaagtggttcaaggtattcctactgccactgctgctttaaagaagaaggtcagaaagaggggtagaactgttaatgccactcttcctgctcacgactctggtagggagaaatctaacagtgttggtgctaatgagagatgtctggttgacctctcttcatattattcaaaacatgttgttctgaacttgggtttagacttaatggagcaattgcgtgagcaacgctcctacctccttgcaaatagtgaggccttgattggtgctagggctgagaacattccgttgtaacggttggttagcaccaagcctccacatataatggctcaaagatgcttcaccaaaatctttggagtaagtgttttatattgtctccttctggaataactttcttttgttgtatcatcacatgacattgttctcttgtctttaggcctgtgttggttatgcttacaccatggataatgagaataggaaagtggtggagctttctaagaagcttagggttactaaagaccgtgctattgctattgaaggccaggtgactgctctgaaggagaaggttgtttctcttgagagtgagatgaccaagcttaaggaatgaggtaaaggtgccaagattagggaaagtaatttaaagaataacttggtagctgctcaaaagaaagcttctgatcttgaagagtcttctcgtgatgccttagagaagcaggttgttgtggatgatgatctaagagatcgagttaaagtcttgaagaagaaagtaacttccctcaaagatcaggcccttcttgatgttacttactataatggcctatgcttcaatgccatttatacggcttgggatgctaatggtagagccaactcattcaactagataggtttccctaacacagaggtgctacagttcatcaggccgtgtgagcagtgtcttgatgcagcatatcttaaggaaactgacttcactatatatggtcgtaaaccagttgtcggtgaaactttaagagttgaaggctacaatcctaagtgctccaacttccctccttctgttggtgatgcccctcctagggagagtgaaggcaggaaggaaactcttgttgatgtgataggcctctaggaccttctttgagtccattcttcttttttgtttttagcatttaactttagtgt

SEQ ID NO: 223425 - DNA, 2384 bp, Cannabis indica
atgggacaactaggaaaagtaattactatcaattggaattgttgttatgttctctactttccagttatctctatagataacgacaatgacatgaatattggtagtgttatttgggttgatccacatgggacaattgggaaatgtaatgactaaactgaaaccgttgttaggtttcttacttgtcggtgatcctgattaggtagcgacagtgacatgaatattggcgagtggtattcgggttgtctagtttgacaacgacggtaacatttggatactagggattgggtgttcatgttgcctagctcagtgataattgtgatatttggataccagttttgagtatcagggttgtttcattaaataacgacaaagacattagtatgccaagttaggcgcagagttgtttcatgaagaaaatggtctgaatggttactttatgaagtaactgttatagttattattgttagactagtaattgtgtataactgtatattcttatattggtattcattatgtttgagtagccatgcagacctagattcaaatacatgagtaacgtacaattgtttgatcctggtaatgtgagtttacttgttgatattcgtgtgatgaattatatgattgttgttattatttctcttactgagtctttgtttctcacaggtactttgtggtgcaggtaaaggcaagggaaaactaggacaaccatgagatgacagtcttcttcggtaaatgtacatatcgacttatcttgcttgtgtggtcgagttgtcaggagttattttgagttttacctaatgtgtattttaacttacttttgtatacatctctttttgtaaaacttttgtaataggggatccctaaaacaaatttttagcgatgtcatcatgttcattgctatggtcttattatagtgaagtccttactattattgtagatttgattgaatagttaatctattattacaaaactatgtttcaaaaacacacacttggcgtccctagctagggattagagcgctacaattttctccttggaaagctcatgaatggactaacacaatgccataatagttctaagcgtgtgaaagtgagagtaacataagagaacaaatgaaggtgtgtgaaattcacttgaacacaatactaccggtcttatcaattaaggacttggagattcaatccaaaggaataccaactagcccgataaggctttgtagggttttaactaaggcactattcaactcaaaagatacattattttatgcaccaacattgtctatttagagatgagaaaggcataagtatttaaccaagtggaggattgttagaattggttaaatacttaaggttaatacatgaagatttgtaaacaccaatcaatgagatatggttaggttaacctaatggttcaagttaaaagccaaaacacattaagaagtgtacatttaaacttgaacttgtaggatataatggaacatgttattgggtcctaaacattgttttgagtaaattaagccacccaaaaagttctgagtcaatcagaagttgcaaaatgcatattttagagaaaattgtacagtaacaagcaaaatatcgcatagcattaggcgacatgtcgcctacaacatttttcgagcaacaaataaaaatattttcaaagtcccgggagacatattggctggaggcatcatgtcggctagagcatgacaaaagtttgtattttgcaatttatttcttgagcatgtgacatgtcgcccaatgattggcaacatgtcgcttggagctttgcatgaaaaatttcaaggtttcttaaacgaaagaaatgacccaaataacctcatcaagtaacctaaccatatgggttagtattaattatggttcctacactatataagggtgttaggagagcaaaaatgattagatcattcatttttactctctctcgaaaatccttctctctaaatgttccttagttctctctaagatttgttcttagggttttgctaatcctaaacaactaaaatgcttgaagttgcagatcttattctatgagagaggtcattagcaattcaatgaaggcttggagtaaagatttttttggatagcattgaactaatgtggcaagccttctttgaagaattgatttcacagaaatcattagtgatgttttctaaaataatatttatgctatttgtgttaatctttatttcattcttaattgtttcttttgaattcatcttgttgttcataataacaacaatattaatgttattctattattgttgatttaatctctattattgttattccaattgttgttgaattttttatgtgttcatactcgattaatctaatactctaataaaagtgacaatactttgg

SEQ ID NO: 223426 - DNA, 1301 bp, Cannabis indica
ctctcgttcttcatggcttaaatatggtgattcaaacaccaagtattttcatcaaaaagcaagttcaagaaaagctgttaacacgataactaagctgaccggttcaaatggaattgtgcattcttctcgaccacacattgctaatattattcaggagtatttctgcaacatttattccagtgaaggaattaattcagctgcaacacaaactgttcttgcaatagttccctgccttgtttctgatgaatttaatgaagctctctccgtgccttacactgctgaataagtctttctcgctctgaaatctatgagcgaagatggcagcctgggtttggatggcatctcagtcatgttctatactaattattggcacattgtcggtgaaagtgttaccaaaacagtgctgaaagttctcaatgacggtggtgatccttcctctttcaacactacactcatcaccttaatccctaaagtaaagaagccgttgaacatgtctcatcttcggcctattagcttgtgcaatgtgttatacaagcttgtagtccaaaaccattgttctaagaatgaagcctcaccttaactcagtcatatctaaatctcaaaatgcttttttgccatctcggttaattacggataatatcttgttgcttttgaactcattcactctctcaaacaccttaagagaggcaagcaaggatttgctgcaattaagcttgatatgagtaaagcttttgatagaatggaatgacactttattcaaagtatgatgctcactatggagtttactcctctgctggtcaatcttataatcaggtgcatctccacagtttcatactcatttcaacttaatggatctgtccaaggaaatattgtaccacaacgaggactaagacaaggagatccattatctccatatctcttcattatttgtgctgaaggattctcaagattactacaaataaagagcgcaatggttctttacatggcttctagctttcacgcaatggtccatcagtctcacacttgttttttttgcagatgatagcctcattctctgtcgggctaatagcacctcagcaagatcaattcaaaattcgattaacacatactgctaagctttgggacaacgattaaacacagagaaatcagtcctctctttctctcctaacacaagggaatcgactaaagatttattccaacaacaactgaatatgcaaacacagccatgtcatgaaaggtacttaggcttaccatcttattcgggtcgagacaaaaacatactctttggtgaaattaaagat

SEQ ID NO: 223427 - DNA, 1404 bp, Cannabis indica
caaatcttcaaagcaaataccaccgtggcaagttctaaatcacgagtcgggtaccgcttttcatactctttcaattgacaggaggcataggtgatgactctatcggcctccatctttagaatatcctcctcttagattctcaactgatgatagcccgattggagatcaatctttgagaagaccgtcttcccttgaagctgatcgaaaagatgatcgatcctaggtaaaggatacttcttcttaatagtcagtttatttaattccaggtaatcaatgcacatacgcaaagatccatctctcttcttgacaaataatacgggagctccccagggtgacacactagttcgtgaaaaccttaggtcaagtaacccatgaagctggatttttaattcgttaagttttgctggagccattctataggatgccttagaaatcggttctgctccaggtgccaactcaataataaaatcaatttttctctgcggtggtaaacccgaatttcatcaggaaaaacatctaaaaattcctgaaccaccctgatgtcttctggccgaattgtctcaggtcgtgtggtatcaaataccacggccagaaaccctaaacatccgtcttgtaacaattctctagctgttaatactaaaatcactggaatcctagatccttgaactaatcccacaaagacaaacggttcctcgccctcgggttggaagattaccatcttccgtttacagtcaatactggctgagtacttggataagaaatccattccaagtataatatcgaaatctgctaaacccatttctattaaatcaacactcaactccctatcctcaattttgatcggcatagacctaatccacattttggagatgactaattctctgccaggcagtagggttctaaaccctttatcataactatcatgcgatctatccaacttactaaaatttttggctatcatataagattgagtggcctcagagtcaaataacccagagaggtaagaattgttgaccgagagttgacttgttacaactgaggggctaacctgtgcatctgcccgagttagagcaaacacccttgctggagcaggttttgctgcagtcttctgttcttctttcttaagcagtggacagtctcttttatagtgccctagcaaaccacactggaaacacccttgccctctacactttccgaaatgatgctttttaaaattggggcattccgagtaagtgtatcgggtttcagaattaccctgatggttgcctcgaccctggttccctcataacctcttattctgacttgagccatcggatgcagttggtgcctttcttttctaattagtggtcgagccattatcacccctaccataaccagaggtaggaagagtaggggccccaccaa

SEQ ID NO: 223428 - DNA, 1596 bp, Cannabis indica
aatttataaaaaaaattaaaaaattatatatacaaatactattttaatataaaataaatagtaatttaaaaacctaatacatataatacaataatatttcaaaacttaataaatcaagtatatattctattcttatatataatttaaaataaaattaacatttctgtgtacatataatttttttcttccttttgttatttactattttacttattttaatgtattgttgaaggcataaaataactataatttattttattttgtggctagttatgtgaaagaaaaatatttttttcataaatattaaataatttaatattaaaaagtaaccaatccaaaataaccaatgtgcggattggatttgaactgttgtacggattggattggatctagaaaataaaatccgcacatagtgcggatcggatacactatgagcaaaatagtgcagattggattgaatgaacacccctactctcgctccacttccacatatcccccttaaggggtggggtgagaaatctcagttttagtccgtaatcccataaagattctattaatttatttaaaaacaaataaaaataaataatataaaataaaaaaaaataatatatataattcaaaacatacaatattttctaacataaataaatacatttaaaaagttactaaaaaattacaaaaaaacataaacatatatgtataataactaaaataatattacaatacatatttatatataattaattaaaaaaaattattaaactaggcgcatctattggggttgctatccctttcccgctacttagcactcgcgaggattaaaagttatctctgctcccggcccgctctttatttaggcgaggaatcaccacccttagaagtaggtaccatgacaatattgcaaaactatgtaatataataaagcattaaatttgtgttataatataacatatagaatgttttattttattaaaaagaaatataattataaaaagtataaaatatggtataatttttagtgttatggttggaatgaaaaataaatataacatcatatttattgttagtgcaacactaaatttattattatggttgaaaataggtactagacactaatatactgcgtttttctatttctctaaatataattgtttgtaactacttgtatacatgcatgatatacatgctcctaaagactaatcttgttcttatatacggctcttggaagtttgaaggttcaattaattgagcagcaactaatattaattaggaattgtagaaatagagtaggcatagaaatatgatacaccttaagaaagatattagtggtgttggagccttgtacatgatttattatgattctctccttatagtgcaacccaccctgcagctagctttctcttcaaacaactaaattttccatgttattcacatgctactattgtacgaagtaataaattttcattataacactctccaaccactacgcaccaagtgcatggattaaaattaggtaggagtgtccccattatacttattaattattaaccaatctgcacgatccaatctaattcaatccacaaagtgcggatatcc

SEQ ID NO: 223429 - DNA, 5558 bp, Cannabis indica
gtttaacaaaattaatcatgactaaaggtaaggaggccaacaaagtacgacaagcatccacatgttgaccaaaaggagaaggaatgataaccgagtctcggatttcctgaacaacgaccaaagaatcagtctcaaactcaaccggaccccattgtttgttttatccaactcaaagcctccttaacccctactatttcagctatagctgggtccacacgcccctctaaaagaaccgtgaaggcttcaatgaaccaaccatcatggtcccgagccacgccagtcgctccatattttccgtcatttgcgaagattgcgcaatcaacatttaccttaatctttcccataatcggtttcacccaatgctccaaatctatactcgatcacgaaggaacaaataaagaccccattctcctttgttgagcatttctccattgattaaggactactcttgccaatagaataacctccgtcgtagacagtgatttctccctccagaccagctcattacgggcatgccaaatcgcccaaataaccattaacaattcctcctgggccattgttgagtgttgaagtagcatctgactgaatcaatcccaaaacgttgccaaagacaccgaacccatatttaaactcgacctctgccagcaagatcttgcaaaggggcattgcaccaataattggatgatggtctcaggcatttggttacacataggacacatttgttcaagagggatatgcttggtagtaagttgaacttttgtggccaaacaaccagtcagagcacgccacataagttgatgtacttttggagggacatgtagcttccaagcaatcttccaaaatttcatctcaaagtcactagtatcaataacatcgacatggtgcatcaaacgataggcctccttcatagtgtaagcaccatgaagatccaaatgccaataccaagtatctatcctagcctcctgatctatattggtcttcaagattagctctttatctcgatcattgaaaatatcagaaactacttccaagtcccgtgatatttctcctggcaccatgaggttgctagccttccaatgctccataccattagcagaaatggtaacccacggatgagagacatcatcaagctaggaatcaaactgaacactaatatttgtacctggaccaacaacccgacgagcaccttgtttaatcaacgcttgtgtttcgaagatgcttttataaataaaactatgattcgggccaagagaagcagtcaaaaacgaaccatgtgagtaatatcaggccttgtaaactcgactaaccagagaatgctcattcgtaacaaacctccaggcttgtttcctagcatggctaagttgaaatccctcaggtgatgcaaaccaagcccaccatgatgtttatgacgacacatattcttccaactagaccaacttcccaacgtttttgattggatcccgaactccaccaatatttactcattattccttccaacttattacaagtttccacaggcaacaagaagacggacatagcataagtggggagagcttgggcgactgttttgatcaacacctctttgcctgctttagaaagcaagcgaccttcccaactcgggaatcttttctgcattttatccttcaagaaaccaagaattgcattcttgtttcgacccataacacaagggaggccgagatacatactattgtcaggagcttcattcatgcggagcaaattgcacatatcttgtctagaagccgaggtagtgtttaaactaaaaagatagttgacttagaatagttaacacactgaccagaagcttgttcgaaaagctaaagcaagaaaagaacactataagcctccctatcaatagctttgcaataaatgtagcaatcatctggaaacaacatgtgagaaatgactggagcaccattacaaacacgacacccatgaagagcaccccgagcctcaaacgtcctaataagagcagaaagaccttcaacacacaaaggaaacaaataagcggggagaggatcaccttgtcgaatacctcttcctgggacaatcggccccatctctctacctccatgagtaattgtgtatgaaaccgttgaaacacaatgcataataagatccaccacacggtcatgaaagcccattttaagcatcatatttcgaagaaaggccactcaacccgatcgtaagctttgcttatatcaaacttaagagccatataaccttccttaccgacccgctttcacttaagctaatgcattacctcaaacgaaatcataatattatcatttataagacgactcgggataaaggcactttgattttcagatatcacagaaggaagaacaagcctcaaacggttagctagcactttagagcacaccttataaagaacattgcagagagcaataggacgcagatctcccatagtggtggcatttttctttttaggaatcagcaccagattagtatgattaagaccggttgccaactgaccaaataagaagaaagaacgaacctgttttatcacatcagcgcccacaactgcccaaaacttctggtagaaccccggagtcataccatcaggtcctggggacttatctgggtgcatctaaaaaagagttgctttcacttcttcatcagtcagaggttgcagtaaagaatcattctgagctgatgaaaatgagattgaaatgccatcaagaacatcatccatagttagaactagtaaacaggtcttcaaaataagaacacataacctcagataaacccaaatcccagtcaacccaacttccgtcttcacattgaagcttatcaatagcattcatcccacgccgagaggatgtcgtatcatgaaagaattcgctatttttatctccctcttgcaaccataattgtttcgatcattgacgccaaaaaacctccttctgagtaagcacttcgaaaagttcagtctcggcctctttgtatttagcaatggcatcaggatcacgacctttcttccatcgtttcaccttagatttccaatgtttaaaacgagaagaaaaatttttggagtaatctttgccccaatccgagagaatctccccacactgttggattttctcttgaacgcccgccaaatgatactcctcccaacactcctttacaacttaaaaacaaagaggttcacggagccaacaattttcaaaacaaaacttgcgtctaatagagacaatatttttaacaaccatatcaagtaaaataggacaatgattagaagaagagacctcaagattaataagcttagctgaggggaagcattgaagccaactttctgtcactagagcacaatctaaacgaaactcgatctaattattcgtaccacgactcttctcccaagtaaactgatggccaacaatgtctaaatcaatcaaaccacacacgtggatagtatcacgaaaaccatcaaggaaccagttgggatagggatgtccccctcgtttatcttcctgagagagaacattgttcatatcaccgatcatacaccaagggagagtattaccattagccaaagttcggagttgttcccatgaagaccaccgaagacttctttttgactgcccatagaacccggttaggcgccacgccccaacatcactagagaggatttccacatgaacaaagtttgtagcaaaattcagcaccttgacatcctccttattcctccataataaagcaacccctctacttctaccataagcatccacaacaaacaccccactaaacttcaattttattcggacccgctccaacacatctttacgacataaagtttcacataagaaaataaaattaggcttcttttgggccacagtatcatataggaaatgtatcgtccggtggttgcccatcccacgacagttccaacttagagtactcataatgctcggtgggtctggagaccatagcccacttcgaactcatttttttgagagtccattaatatccatttcagcattatcatcctcatccatatcaacataatcaagcccaacaaccccttcattttgtctccttctttttgtatctgtagagagcccacggcccccttgtccaccacgtgtcactaatgggccagaaataaaaagagaaggttgactttgcacatgatttccaaacacaagagactttcctttttcattgacaatggtattggaaacattatttttattaccattaattagtagtattattcccattattaactttatttccattattaagaatattcccatcatcccccaaattagggatattgttacctatctttgacccttgattctctccaacttctaaataggagaattttgaattatacgattccatttgtggcgcttctgtttccggccgcaccgatgtaggatgggcgaagtgttcatccgcctccgtacccatgcgtaagtattgagaactcagcaaataactcttcctccgtggtggcgctcgcatgaaaatcccatacggtttaacaagctcctcctcaggtgtatcaaaaagtttgtgacagaaattttccgagtgtcctataagaccacatataaaacaaaacgtcggaacaaattcatatttaaaattggcatagaaccaatctccacctgttttctttaatttcattcgtcgtttcaaaggaagatcgatgttcaccgtcacccttactcagagataatccctccaaaggccattatagttttttggatccgattcaacgaaagtgctgatgtaatttgctgctgtagaaacaactttctccgtcataaatcccgttgaaagaccatgaatctgaacccatatatcaagtttgttaaggctaaccgccttcggatctccacccctcggcactctactgaaaatcaaaagaagtcgattgaatgtccatggactgccattgatgactctcttaatatcaatttcatggtaaaactgaaataagaacagattcagacccaagtactccttgacaaataaacctttcccgggcttccacagtccagccagcgtgtgcttcatggctttaaagtctaacgattgggcattcaagaacctccccaccaagcaccaacgatcatccacaagaacctcctcctctgcatcatcgtcaatctcaatcccaaaactctcctcatcctccaattatatgttcccataactatgctccatatcctccataacattactgcttgacgccatacctgaccaaaaactaaacgccgcaaccagaaaaaagaaacaaaacagtcacagtaaaccagtcacaacacaggaacctgcgaaacctttagtattgttattcgttaatttttctaatttttttcaatcaaaaaggaaagtcaacaaatcaatactaagagcacgtttggtattgctttctgtttttttgttttcaaaaaagtatttttagaaatgagaacaaaaaatagtttttgaagtttttaaaatagaagtcgtgtttggttagtgttttctaaaaacaatattgaccaaaagtaaattatttttaa

SEQ ID NO: 223430 - DNA, 2887 bp, Cannabis indica
ttagattaaaattgaatgatggtagagttgctgagttgagacaagtcagacatgttcctgagattaagagaaatcttatctcagtagctatgcttcatcaagaagggtgttctgtcaagatagaaggtggggttatgaaaattgtcaagggctctatgatagtcattaagggaatcaaagagaatggaatttatttgttgcagggtcacacagataactcagaagtgaatgcaacaattaaatcatctagagatccaacattaatctggcataggagacttgctcatattagtaatggaggaatgcaagtgctcaagaagaaaggagtttttaggaaggatcaaatccaagaaattgaattctgtgagcagtgtgttctaggtaaatctacaagagtcaagtttggaaagggtcttcatgtgtcaaaggctattttggactacatccattcagatctatggggaccttcaaggactgaatccagaggtggagccaggtattttctatcctttattgatgactttaccaaatttgtttgggttcatattttgaaaaataagaatgactcatttaaggtgtttttggaatggaaaaccttgatcgagaatcaaactggcaagagaatcaagaagctcagaactgataatggccttgaattctgtgtggatactttcaatcaacactgcaaactagttggcatttccaggcacaagacagtaccaaggacaccccaacaaaatggtctagtagagaggatgaataggactattatggaaagggtgagatgcatgttgattcactctggtttacccaaaaatttttgggctgaagttgtcactactgcttgttatcttatcaacagaagtccatcttcagctattggtaccaatagaagccagaacagggagtaatgccaagtatgatcatctcagagtttttgggtgcatagcctatgctcatgtgagacaagacaagcttgagcctagggctagaaagtgtatattcattggctaccctgaaggtgttaaaggatacaaatgtggagtattgaacctggtgatcatcaaaagaacttcattagcagagatgttgtatttgatgaagaaaaggtttacaaggatacacttaaaactcaaagagatgatgaacacactgaaactaatgagaatacacaaatggaggtggagtttgacaaaagaaatgaccctgcagatttaaacttgaggaaagaaaatgaagaagctccaacagaacacagaactaaagtgggagatgaagatgaatcagatgatgatggtcttgactatcaactagtcagagacagacagaggagagctataaaaacacctgcaaggtatggatatgtagatgtagtgaattatgctcttcatgtggctgagatgcttgaggatgagccaaggtcctacaaggaagccatgaaatcatttgataaaattaaacggtgtggagcaatgagaggtgaaatgattcctcttaaaagaaacaaaacctggattgctgtacccaagccaattggacagaaaattattggctgcaaatgggtttacaggtacaaagaagggattccaggggttgaggaagcaagatataaggctaggcttatggctcagggataatcacaaagagaaggaatagactaccatgagattttctctcatgtagtcaagcatacatccatcagaatcttgctaagtcttgtagcaagtgaagaccttgaacttgaacagttagacgttaagactgcttttctacatggagatctggatctacatgaagcagcttgaagggttgaagggtatgaagaagaagaagaaggaaaggaagatcatgtgtgtctactgaacgaatatctctatggtctcaatcagtctccaaggcaatggtatagagatttgatgagtttgtcaccaagattggtttcaaaagaagttcatatgacaattgtgtgtatgtgaagaactcaagagatctggtatacctactcctttatgttgatgatatgcttattgcaagcaaacaaatgggagaaattaacaaggttaaacaagctttgagtaaggaatttgacatgaaggacttggggtcagctaagaagatacttggaatagagattttcagagatagaaatcaaggcaacttagactatctcagaaaggatacatcaacaaaatcctaaatcgattcaatctgtttccactcccataagccaacagtttcgattgtcttgctctcaatatccctccactaatgaagacaaaagctacatggagtatgtgccttacactagtcttgtagggagtctcatgtatcttatggtctgtactagacctgatttatgctatggggttagcatagtaagcatgttcatgaaagaaccagggatcgagcattggaaggttgtgaaatggattgttaaatacttaaaaggaactacaaatgttggcctggtttatggacaaaacaacaaaaacaataactctgatgtaatgggatttgtcgactcagactatgctggagacattgattcgagaagatctcaaactggatacacattttaaatgagaggctgcactataagttggaaggcaaatctccaatctgttgttgcattgtcaacaacagaagctgaatatattgcctgcactaaagcagtgaaggaagctctttggcttaagggcatcactaaggaacttggcaatgatcaaagatcaattcctatattctgtgatagccaaagtgctctccatctaagtggaaatcaagtcttccatgagaggaccaaatacatagatgtgagactccatttcatcagagatataatcaatgaagggaaggtgaagctgttggaagttattttaccaggatc

SEQ ID NO: 223431 - DNA, 1525 bp, Cannabis indica
actttttacacacaagaaaaataattaagaaccttatgttatgtaggtttaattttacacagttttatcagtgtataatttatttatatatgatgatcaaactatatcatcaaataatgataacttattaatcattgacgattcaagtacaatgtatattgtttatattaattatttggaaaaaaaatatataaagggatatatattgatgatcatcacgtatacataggatcgattttcaagaatttttcaatatatatttcttgttgagaaatgttaaaaaagtattattggtacttatagtattcttatcgatattatattattattggtataattaagtattgaattttatatataatttaaaaaaataactttttaataaatatcattaactaatcataaaacatcaactatacaaaatgctagctcctattaatatccaataacaatacttatttcttgatcaataataagcagatgagtaagtaactatatgcttctcacgttttatgaattgaatagtgtgttgtttatatatgagtaatttgcggaataaataattaagtgtaactcccaattgtaaataaatacctaagtttaatttttgtcagtaataatacttaagttatatttttggaactctgtaccgttaaatattatatgtcattatccatgtgtcattttcttattggtatatttaaattatttttttaaaaaaaaataaaaatttaatgacttggaccaatcaggaaatgctacgtggcaatttacttaattaacagtcaggcacctacaaaagttttagaattataacttaggtattattaccgccaaaaattaaacttaggtatttatttgcaaatgggagttaaacttatgtatttgtgccgcaaattactctttatatatagggtaactctaaagtagggctggtgcatattctttctcatattataccgaagttatttagaccaattaaaagtaaagaattaaaatgtacatatattgtgttgtattgatatagagtattgttattggtcactagtggtaactagcacctttagacacatgtcactttgcgattgactatagtccataaaagttattacattaaaccatatgagacttgatattttattggactaatagtgataataacacataagaggatgctaggcaccattggtgacttttagcctttctctattcgtataatagttgattttttcatgaaaagggagtgggaagttggtccaacaatgaccgtgaatatcacacaaagtccaagtgtgattgtgtcgttcaagtgcgcgtggtgggagtccggaggggaatacaacctgtatctctgtgggtcccaactccatccattcagatctctagcccttgatacttgtctgtagtagagtattatcaagatctgaatctggatcttctctcttttaatttggttagacacagtcttccacattatgttaggtattgcttagacatgagtcgacatactctcaatcatcatgga

SEQ ID NO: 223432 - DNA, 1384 bp, Cannabis indica
ggggaagtacaataattctcccacgacacgaaatagaaaattcaaggaggagaagtacacctgcttcaccctcctagcggagaaacttgaggtcatcttcatggccacttagggaactgtcctatacaagaagctccctcccatcaaaagggagttgagcaagagggacatgtcaaagttctgtcggttacacaattttagccatgacaccaatgagtgtcaaaatttgaagtgggagattgaattcctaataaggaaaaataatccccacctgcatcgttatgtacagaatgaccaaacttaggcacaaggtgcccaaaatggagaccatatgccaactctagtggggggtcacttagaatcattatcggcagaccctacattgcaggcgagaccagtaaagctagggagagctatgctcagacactccatcataggcctaaaagaaacatcctggtcgtcaaagaaaggggcttcaagcaacaaaagcttggagagatcaatatctctttcacataaggaaatgctactcaagtcagtttcccgcacaatgattccttggtcattattgcaccaatcgagaatatgaatttggcaagatttattgtggaaaatgaagcctcctccaacattcatttcaaatcaacatacgaaaatatggggctccagataactagtttggcaccttgcactcaattaatatggcttctttagccaaggcattgcacccattgggtacatcagattgcccatcactgttagagaaaatccaactaccagaactctgatggctcactacagatagctttggaccagtcgaagagttggaggaagtggaggttgatcccacttcctcaggtagaagactgaagatcaagaacagtttagcaccaaaaataaaatcagttctaataaaatttctaagggaaaatctagacctcttcgcatggtcttattgacacatgatcataatagacccctctatgatgacccatgccctcaacattaatccaaacttctgacctatacaacaaaaaaggaggtcattggatagagaatgtgcccaagcactaaaagatgaagtcaagaggatacaggcccatgacttcatcattaagccattctacccactttgggtatcttaatcctgtgttggtacccaaactaaacaaaaagtagagagtatgcattgacttcaccaacatgaacaaagcatgtccaaaggattgcttatcgcttccaagaattgaccatctggtggacgccatagttggccatgaaatcttaatttttatggatgcgtactcaggttacaactagattaagatgcatcagctagattaggagcacattgttgggttttgtaccctaaataaaactcatt

SEQ ID NO: 223433 - DNA, 2068 bp, Cannabis indica
cctttcaaatacctgagtaattttttgcaagcttcccaatgaattgttgtaggagcatgcaagaactgacttaacttgttggtgatgaaagccacatcagaccttgttaaagacaaatactggagtgcacctagtgtgcttctgtacaaggtaatgtcatgaaatggttccccttcggttagtgagagtttgacagtagagctcattggatttggacttgccttggcaccctccatatgtaatttgactaataagtctgtaatgtatattgtctgagacaagtccataccagttttgtctctgtatatttccacacctaagaaataatgaacttggccaagatctttgagagagaaagatttattgagatcatgaatgagacccgagatgagagtaggattgagacctgtgattaatatgtcatctacatatacaagtagtattacaaagtttgtacctttgccatagataaacaatgagttgtcagctttggaatcttgaaaaccccacgatcttagagttgttctcaacttatcattccatgctctgggggcttgttttagtccatagatggccttttggagtttgcacacacgagttggtttagtaatgtcttcaaaccctggtggttggcacatatagacagtctcatttaagggaccattcagaaatgcattgcttacatctaactgggatacattccagttgtgagttacagccaatgaaagaattgttcgaacagtagttggtttgacaactggactaaaagtctcatcaaaatcaattctagcttcttgcaagtacccttttgctactaatcttgatttgtatctgttgagagagccatctttgttaagtttcaccctatgtatccatttacaccctatgacattcattgagggatcatatggaataagaatccacgtgttggctttcttaagaaaagaaagttcactatccatagctccatgccactttggatttgacaatgcatcttttagtgttctaggttcagtaggtagaagtgactcaggcaaagggtgttttgtggctagaaatgattttggtttgaatatgccactttgagatctagtgtgcatagtatgagttcgagtgatgcacggtaactggtggttcatttgtatttggatgagacgttgtattgggtactgagcttggacaagtaggtagtggtgttgtgtcagtggtaaggatggagacaacagtagtatggttgggattgtgtacaaagttgttatggtgaggtgaggaaggaactgtttgtgtagggaccatgttggggggctgtgatgttataggtgcctgttgtggatggtaaggaccacgggtaggtgtattatgttgtgtaggtggcatggtaggtgatgtaaagaaagttgtagtaggaaaaggactagacaaagaattctgtacctttgtggcagaggcgtgtgaggatgctggaaaaagttgttcattgaaaataacatttttagctatgaatagtctaccttcaggactttcacataagtagcccttgcgtgaggatgagtatcctatgaagatgcattgttttgtcttgaagtccattttgtattgattgtatggtcgaagatgagggtagcaggcatagccaaatggcttaagaatattataatctggtatttgaccaaataaaacttctgttggagattgatgactcaagactggtgttggtagtctattaatgagaaagactgcaatgtgaaaggtatgccaccagtaagagaaatcaagacctgattgagcaagaataataaggtcacatttcagttatgtgtctatgttttcgttcggccctcccattttgctcactggttttgggacatggatgttgaaagtggattcctacttagatatctagaaaatggtctgcattctccaccccaatcagcttgcactttcttgatgggtaggttaaattatttttcaacaatggctatgaactttaggaacatgtcaagagcttgagatttttgagtgagaaggtaaatccatgtgtatctgctatagtcatcaagaaaatgaa

SEQ ID NO: 223434 - DNA, 2346 bp, Cannabis indica
acaaaaagaaaaaaaaaaataaaggtagagatgaaacatgtttgtacaattttggttgggttttgtttaagggacatgttgtgggtgtgggtgtgaatctgatatctgatgttgttttgggccagcgtggttatagctgcgtgtccctgccgcctcatctcggccccttaacatgtcgtacaccactaccgcactacctacatcatcaaccaaaatactttaatattattaaaatgtatatatatacacttcagcaataaatgccatattagggtattagagatgaaacctctcacttactctcacggcaaaataccaaaaagttatctgtacgtagggtttataaatgaggtttatatatatatggcataaaataggaaattaaaaaaaaaaactgaattgaagtagagctaaaaaaaacggagctactaaaaatctaaatagatccaagagccaacaacatcagtgttgccaagagagtgttagtgctcttgttgaacaaccatagagaacaccttttatagtgaggggagggggttctttccaatcaaagaacttctccacgctacttagccatcaagaaagttctcgggatgcagtcagccatggaaatcgggaacgtccacttggatcccacgatctcctttatctcgaagcccttttattgccctaaaagctcaaatgccccagtaagatttattgagaccaatcaagaactggaggatttgatctcttgtgtaataatcttgaactttttgcatggcaccgtaagtatagccacaagtacaggggatatttggtcggtattcattaagctcaccccaaagagcttacagctgggtgaagtaggtggtgactgagttatcaccctatttaacgttgttaacaccgatttcgagttgggaaatacgaggactgtgcaaccatggaggtttgtccacatttcacgggcagtggttttgaacatgatactagcaacgatctcgcaagatacagattgaagaatccatgactaactatgttgttgccaatgtcccacgcagagcgagaggaatcatttggtggtggatgagatatggtaccttcaataaaaggagttttgttttttgcagcgatgttgatcaaagctgcttgcttccatgacttgaaattttcttgaccagtcaagaggaatgaagcaatgaggtgattcgggtgatctccagatcccagatgatacggagtacgttcatcatgagaaggttaatcaaaaacagcacaagataagtcgtgattagcaataaacaagaaattatcagtaaaaggcatttggccttgatgtccaagaaaagaattgttaccagcaagaaagtgagaggagctctggacgggcgggtaagcgaaggtggtggctggagtcgtggtggtgctgaaagggagggaagtcggaggtgggaccgtcggagccaagatcaaaggaaaagatggcggaagcgaaatgtgtgtttgagaggccatgaatgatgatgtcagagcgaagctagattcgatcgtggatgtagaagtttgtccaatcgttccacaagtagggagattggcggcataaccggagccaagtacaccaaaaatggaaggatcaaacacagagggatgagcactgattgttttcgaaagagatgtcacaatcggaggagaacaaggcagagcgacgacatcgaaagtggtagcgtcaatggaggagatgtcttgactggagatgacggtcggaggtggtgacggctcactgacggaggcgacagcaatggaggagttcgttgttcttggagcaatggaagaagatgaagagtcggctggggttggtgatgtgcagctgataccatattagagatgaaacctctcatttactgctatgtgaaacacgacaaaataccaaaaagttatatgtaggatttacaaatgaggtttatatatataaggcacaaaataggaagcccacaatacaattgggccaaaaatatggggcctacttatcctaatatagggtttttcttttgtgtatatataattaaacaatgataacatactactgatagagagggactttatacattgttgagaatatgatttgttaatactgttaggattagttaatgctgttagttaattgctttcggttactactgtttagttgctagctatcattgtaactaactttgtagctaatctttagctttaactaatcctgctttatctgtatataataaactgatctatttatcattaaaactgtaattttatttcatacaatcaatctacagtcaactgtattcaactcatttttgctatgtctttcgttctctccaaatc

SEQ ID NO: 223435 - DNA, 1524 bp, Cannabis indica
cgagggcgggcggcggcatgcaaaagccatgccgcggcaccagggaccagctcccaggtctcaccaataggggtgggccgcggcatgcaaaagccatgccgcggaacttgagttccaaacccagaaaaatccccatttcagcttcgaaaattcatgtttaaacacaccaattcatgctcaaatcttaatcaaactctcaaatcataaattaaagttatcaacatacgtacaaagagttgaaacacaagaacaagaacaaggctcaaaatctatcattcaattaccataatttcatatttaaccaacatcaagataaagctccatacttgagcataactcatcaaaaattcatattcaaaaacttgagttgtcaagctagtttcaacctcatttccagcaacaaaacaacaaatggaacttgaattcacaccctaaaatctcatctagagctcatcaaacataatccgtacataaccaaacagtttacaccaaaacttatcaaaattaactcaaattctaaccacatgcattcaagagcaactcaacacctatctcatgcttttcaatcaaaaaattctcagcaataaattcaactaaaaaccagcaagagaaactacctccaatttcttcaaactcaagcacaaagtcaccaactccaagcttgaatcaagcaaaaaccccacaaattcaacacttgaaacaaagagataatgagtgggagagagaggtggttttgaggagtataaaccagaaaatgaaattcatttttcaatcaacattcatttgttgcaaataatcaaagtataccaagttaccaaaatgctcaaatggccacataatccctctcatgaaaatttaagggcaatatagtcatttaacacctcctcatactttaaataaattgagattactcacttattaataaaatgccaataaataatcccaaaattatattttggccccgaacccggtttgacccgaaatactcaattgtgactataccgccccaacttatcagaacacacctgaaaaagagaacacaggcatactatataataatatagttccataagcacgttaataaatttattttattgttttacccttctcgggtcaaaattactgaaatgcccttgactcaccaacagggtcttaaaacgtcatatatcatattaattcacatataatataataatacacatttaactagttaaggtttgttaatctatttctttaaatcttagggtattacattgggagttggataccttagtaatcaccttcttggggggaggaatctctcgaacgttagaagaagaagttgtagatgtgaccttaggcttgcaggacctgtgggctttggtcttagacttccccttacctttggagccctccgccttggccagacttttagtgaccttctcacttaatgctttcaacattctgaacttcaaagagtaatagagtagaacaacaacaagcacacagttaacaagtcaacttcgaagtggcaaaatcaaaagc

SEQ ID NO: 223436 - DNA, 2209 bp, Cannabis indica
gtgtgttataataataataataagttggatatctagcacaacaaaaccattttaaggtacaaatttgtattaaaaaataaaatattattaataataattattaaattaaatattataaaaaaatattaattaaaaaattatatattaaatatattattaatgattaattaatgataaaattgaaattaatatatagtatttattgttatcaaatttgattttataggccatctccttaaatatgctctagctataaacaaaaatgcaactatagtttatttattcattcatttatttattataattattattattgcaatctttatgatagttatattcatctcctaaataatttcaaaaaaaaaaaaatcatattaaaacatttatcattaagtggtaataaaagtaatatatatggttaatggtttcaaaagagattattttcaatattattttgcactatttatgtgtttgaaatgttatgtgcaaaaggatacaattctaaaagataaatataaatataaataaaaaattattttgcaagaaattaattaatcacataaactaattaaagatgtaataccttaatgaagaagggagtttgggaaataaattagggttcctcaatgcatgtggcaaggtaaagagaaacaagtcatctttccaattaactttttgttcgtcgttaaaaacaaaagtgtgaccaaaaccttctacttctcccggcctttgccatagcttttccctctcctctattggcaattcgaacaattttttcacttcttccttcattttctctaccacagaattacttacaccatgatttaccaactgcaaaaattatcattattattataagaattaattcaatataaatattgaggatgtttacgacaaaaatagttaaaattaataaaaaatttatacaatttaaacacttaacttttcaaattataatatttttagcagcaaaaacatttaacttattatgtttttaacacataattacgtactcaagttatcaaatcttcttttaacttagatacaaacttaagtatatttttcgctgaaatattataataaatgttacgaataacttaagtatatttatcgccgaaatattataattaaatacctgaaagaagccccagttcttgcatgctaagtggagcttagtgagctcagattgatagagttgtgagttatgagagattggcaatgacaagttttggaagttgataactggaaaatcatcagaagaagaattgagatctacattggcttgatcttgatcttgttcaagttggatgtatctacttggaactgttaccatattgggatcttttgtcatttcaagcacacttggcacaatcacactgcaactttcaaactccattatgaattaagttgagattagttttaggtgattttgattttgaagaggtgatatgaccaatggcaataatatatatatatatatagaaattagttgtgtgaatgtaattattttttttattttgtataagataattaaaataaaaacaaaatatatttttttttgtaaggaattataagaattaatttgattaaatatgaataaatattagttattaaaaaattacaacaaaaattttaaatgaatctaatttaatgaaagagaattagattttaatattaaaacaaatttattttgtataaatacctaataataattattataaaaacaacattttatatttaactaaaattgtatttattaaaaaataattttgttaagcataaaaattaaaagaaacatgtaatgaattttctgtttcacttagattgaagaaaagaaaatgaaaaagagaaagtacaaaaaaaaaaaggatttatattttttaaaaaattagagctgacttgtaattatgttttacaatatagagataaaatttaaaagtttggaaaagaaaaaaaacaaaaaacaggataaaattaaaaataaagaaagaagtaattgttagtcagtctcttactttttcaccatattataagaactaaaatttgataaatataactacatgacaaaggttttttgcctttttcctttctaagcacctcaaaaggaagagttttataaaaatgattgattcttattatatataataactatataataaagagatatacagatgaagctatagtaaaatttaatttacacaatttaatt

SEQ ID NO: 223437 - DNA, 2224 bp, Cannabis indica
cgatgccctcaaggcatctctgtatctcaacgaccattcactattcaattgctcaaagattctggctgccttggttcaaaaccagtgtccactcccatggaaccaaacattaaacttagcactgaatcaggggacttactaccaaacccaactcaatatcgcagcctcattggcaagcttctatacctcacaataacacggcctgatataagttttgccgtaaataaattgagtcaatttttacaatcccctcgacaacctcacttgactgtagccacaagaattttacactacctaaagaattctctagggcagggcctatttttcgacgcatcatcatcctcaccactccaactcaaagcttttgctgacgctgattggggagcatgcctcgacaccagacgctccatctctggctactgtgtatttcttggcaaatccttaatctcctggaagtcaaagaaacagcccacggtttcccgctcctcagccgaagcagagtaccgggcaatggccaatgctacgtgtgaactaacctgggtcatctccatactgaaggattttcacaccaacattcagctgccttcaactcttttttgtgacaatagcgcagcaatccacatttcagaaaatccagtataccatgagagaactaaacacgtcgaaatcgattgccatatcgtccgagaaaagatcaccaatggcactctcaaaatgaatcatgtttcacccaaagccaatcttgcagacatcctaacaaaacctctttcctgcttccttcaacgaaattttgtccaagatgggtgttcgagatctctacactccaccttgaaggggcctcttagatcagttaggaattagtagttttgttagttatttttctatttattctgttatgtactgtagcttggctttgtgcctataaatacttgtaatactgtttcattccaattatctaataacacaattcattttcactctgttttactcctaatacaatatatgctctaaataatataaaattgactcagaaaattatagtggttctaattaattcacttttaaaagagtactcttattttgtatttttatttctcatcagtctccctttaaatacaggtggattcactaaggtactcaatgaatgttataaaatcatgatcataataagaccattgcaagcatattgacatatttattagtatatgaatgtaacatctaaattatgttgcttaaatgcttcatcgtttgttgtttggtgtgtgttcgcatttttttttttggatgatactgtgatattgacttaatattttgaggactcattttaaaccatgagatctcttttgacgaattccttctcgcggctgagtgaaaatttatctcattaacacatgcctctagtttattagtatagcttgttcagtcttggagaacttaaagtagactgagcttacgtttttcgattgtttaacctctcaagtttcttataagatatcattgcataataataatgtttaacctctcaagtttcttataagatcattgcataataataattatgtgaaccacgtgaggttcttatagacgcttgaacctctttggtttctaatagtcgcatgaaccttgtgggattcttattgatgaagaacatctaagggctcttattaacacgtgaacctctcggggtcagtaacacatgaacgtgatcaactttgtaccgttatataagcgatagcggccaacgaatatttgaatagaaagtaaacagagaacaccacaattatagtatttcactgttagaaatattttaccaggatcttagatttactaacattgtcgagtgaatttcgtaacaccagattatatgatattattagtaacaagaagaaatttacgtgaagaacaagtgcgagtattcaacctagaatggcgagtactcaaacagggattgagaaatgattaacaaaaagttgaaaataacaaagagacaaggaattatagtggttcagtcagatcacggtctgcttagtccactgtagcaagagtttcgtaggtgccatttcacggtggatcacccctttatgtacaaagcaggtgtacgattagttacacaaggatagcattcattgccaatcaatttttacacattgaattacaataattaactaaacaacgctaacattaataaatgaacggcagttactaagttcatcaacgtatgcgt

SEQ ID NO: 223438 - DNA, 1305 bp, Cannabis indica
tgtaaagactcaccaacttcctgcttgatgttagccgagggttgtataaggcattttgtacatcatcgtggcttgaaagtgtgtcaacaatagatctacgaaagtctcccaagtcgatatggtcgcctgaggtaactggctaaaccaatcatgagctttgtcctctaaggtcgctgccaagatgcgatattttgctaattgaggtacctagtctacttccataattgtattaaatttttctaaataatctatgggattagtattacctttatattttagcgattcagataacctgaatcccttaggaagtcgagcctgttgcacttcttcagtgaaaggagaagttgcatggagcttgtaaatgggctttctcgaatactcgattattttcaacgctcgtagcaggatgctctaatcaacaccctttggcatgacgatgttgttctgagttgtcgctggtgcagtcgcaatcgcagctatgttagctgggattactaccttagtagtcacaactggtgcgttaggcgggttaacaacatttcctgggttattgccattgtttgtgccttgatcgcccacttggggatcacggggctcatcgcggtttttgggcatttgagaccgtgccgtaaagactgcattgaggtgatcatgaagattacccctgtgaacatggtatctccctcctcgaggtgtctccacgaagccagacctggtatatatactgggagaacgactttgtgaggatgaagaataagattcagcatcatttacctcattttgtggttgggctctgcttcgagggttgcgtcactcgggatcctcctcttgtggtacctcacggttagagttttgtgcgacttgttcctttgcgtagattggttcaaattgagtccctcctgtccgtttcgttgttctcctcaagagcaattattagtttgtcacctagtgtttgttacctaagggttatccgaacgagtgtttggtacctggggaggacatcgggtcctgcccttccattgacctcagcctacagagcctgcatttgttcttgtagagtcgtacattggtccatagtcagttcaatgattccatcagaaactatagctggtgtgataggcgagaattgtcccacagtggctgccggtgttgatgtttctccaacatgaccagtggtttcaggaaataagttgaggggagtaacggtggtacgtcccactcctccattgatggtgtcaacaggtgctatctaataatattaatacacttatagggatttcaatatatcacaatgaataaatattt

SEQ ID NO: 223439 - DNA, 3630 bp, Cannabis indica
taacaagtgacaatgatcatttcagcaaagaaaaattcattcaacttcacaatgagccatacttaataaaaagatgagacaacttctaccaatccacatattcacacacacttgagaaagacaataaacaaggagtagccaattcacaacgtattccatgtctctatgttgagaaaatacgtttaagatcctgctcacgtacttagttatgaaaatcttgagctacaaccagacatgtcttatgaggagtagcaaattcaaatccttgacagattggataaggtcctttggaaaaagaccatagctttggtcaaagtactctagagaaatagcaaggtggaggaagccacatgggagttaaaatcagacatgagagcccaatatccagagctattcaagtaagatttcgaggacgaaatcattttaagggagaaatagttgtaatgaccgcttagcttaaatttggaaattagcagataattagggtttaattatggatattattaatttatagtgttttatttgaattcagaatgcattttatatgtcatatatagaaatttcataattttgcatactcagtgcccgacaacattggaacgcggtctttggctattacaatcacatcctagtatttttaatatagcgggcgatatagttagacattgggaatgtcgggattggttgggatttgagaatttcccaaaatacccctaagtggccttttatgatttttagtgttaaaggggcaaaatgttcattttgccaagttgtgttttgtcttttgtgggatgtactaaatcagatttttaattgaggcttaagctgaattattcggataaaaccaatattatctcaatatttgacaaaaaatagaaattatcaaaaaaatcacatttcactctcaaatctctctctttcgaatccacttagaggcagctagggtttgccatttcttcgtcattttcagtagaattcagcaagattcttgtgtgatccaagcaaaggtatagtctctagcaacctcctctttgatttcttgggttttatgttatgaatttatgcatgccttgtgagttttattgttgtagttgctgctagtgtttgttattgttttcagtggataaattatgcttagatatgttgttttaggcttgttgtaatggctggtttgatgtttgagcaagctttgagttttagaactcaagcttagctctctaatggtatattttgttttggagcttatggatgtgttttgttgctttggtattgttctttgaggtctaattaataggtctggaaggtttggtatattttggggttaatttgatagagctgtgaaattttgaaactttcctgcactgaatcgaaattccagttcagggagacctgtaggaaccagaattcctgttggtccccaggaaaccccgcagaactggaattccagttgggaaccggtctaccagtgttggggcagttttaggaatcttagtttttcccatttttgagatgtttagggtatttccatgttatttgtcgatagggaaacttatagtttcaagtttaagtccccaaaaagcgatttaacgtgtcacttatctttgttgtgattgatgtgatttaggagactgtaattcgctgagctattgttccactcaggttggccgagacacctgaatttataattgaggtaagagtagtataatgttatgcatttgttactacatgtttagcatacatgttgtttatgcttgttagattacattgatagttgtaattgtatacgtagagttgtactgattactgataaatgtatgttggctgaaatactgatcgattatgtcacatcaatatggctagagtatgactagcatatagagtacaggctgacattatggtcgatagtattgtcgtatgaacgttctagactcaataccgtgtgcgacatggggattagggttatgatcgggtgtatgggcgccaggttataacccgggttatttgcatgtttatgttatgcttttcttcctgagtctgtcgactcacagtgctattgctatgtgtaggtaagggcaaggcttttgattacatgtatagcaaacttgtataaagtattttgtaaacgtgatcccgaaatgttatatatgtaatacttcaaatttttaattaaataagaaatttttaattattcataattttcaataacctcgttgattagcaacgagctgcacagtacgtttaaaatcacgctaacatgcctataatagttagggtgttacaacttcacttgtcctttggaccaattcaagtccaggataacgtctctctccaacctcatcccaatggattggcgatcaacatttcctaccataaagaatctcgtaaggtgccataccaatggtactctgataactgttattatatgaaaactcaatcaagggtaggaacttgctccaagatccttcgaaatctattacacattctcgcaacatgtcttccaatatctaaatggttctctcagactgaccctctgtcttagggtaaaaagttatactgaatctcaacttggttcccatagctttctgtaaactctcctagaacttggaagtatatttgggatcatgatctaaaacaattcactttggggaatcatggagtctcactattttcttaatgtacaattcgaaatactgttccacagtataagtcactcgcacaggtaaaagtgcgatgacttggtgaatctatccactatcacccatatggattcatataacccaatagtcctaggcaaccccactacaaagttcatagttatgtcttccttccattcaggtattctcaagggctgaagtaaacctgccggcctttgatgttcagccttaacctgcttataggttaaatactttgaaacgtattcaacaataccactcttcattcccagccgccaatatatttccttggtgtcatgatacatctttgctgtcgccgagtgtagggaatacagagtattatggagctcataaaagatttcccttctgatctgatcatttgccggaacacaaattctacccttatatcttagtagtccatttggagtcacagtgaaatcgtttgtagcaccaatctcaacttttgtttctgagttcattcaatttgggatcattgtgttggccaataattattctttccagtaaataagactgcaatgtaatattttccaacttaccgactacaaactcaatctcagccttagccatatcctcagccaatcttggagagatttccttcaactcataaacctgccctaggcctttctagctaagtgcatctgccactacgtttgctttgtcaggatggtagaggatttcacagtcgtaatccttgactaactctagccatcatcattgtctcatattcagatctttttgagtgaaaaagtatttcaaatttttgtggtcgctgtaaatctcacacttttcaccatataaatattgaggccaaaccttcaaggcaaaaaccacagctgccagttctagatcatgagtggggtaacgctgttcaaaatcgttcaactgcctagaggcataggcaatgacctccccgattgcattaacacacaacccaaac

SEQ ID NO: 223440 - DNA, 1190 bp, Cannabis indica
caaaaacatagtatgttgttacggatatccacccaggattgtatgagacaatggaaaacaatttgatagtgatcaattcactaatttctgcattaaggatggaataataaaaagctttttagctgtggctgaaccacatgcaaatggacaagtggaagctacaaatagaatttttaagaacacattgaaaaagaaaattaaagcttacaaggctcattgactgaaagaactttcaagaggtgtttgggcataccaatcaatagagagaaattaaatggggcacactccgtactcaatggcctacagctgcaaagcagtgatcccagtagaaaacactttgtcttctcatagaagagagacttatgataccacccagaaccatgtcttacttaaagaattgttagatctaattgaagagctctagaagcaatcacatgtccaactcaaaatgtacaaaggaaatatcagtcagtacttcaactcaaaagtcaaaacctagatgtttaaacttggtgaccttgtcctgagaagagtgtttttggcctctcaggagctatgagtaggggttctcggacctaacttggaagggagatgaaataaaacaaaaaatatgtgatggaacctcccaactcaaaagaacttatgaatcttattttccactagcatggaatgttgaccacttgtatggatactttcaataaattggggtgtcaggattcattttatcttactacaatttatttcttttcttttccatatatgcctcaggccaggaaacagttaaataaaaaataaaagaaattttcaaagcaaaaatatagtctttcgttattttcagttgtgttgtgacaagtaaccaaaagtccaaaatctcagatcacttggaaataatcatgcattatgtaccctgtaccttaaaggttatgtgaagattggataaaaaaaaaaagtgggagtagaaacataaactgaagttcataatgtttaggccattggatccgtagccgtagggatccaggagtaagtttttatcttaccctaccaaggattaataattcaccaagtcaatctaggttgacaaatcatgaagaagttcaggcttcgacataagaaaaataaattgaagtcgaaaaggttcagccattagaatcgaagcctcacagatctaggagtaagttattatcttacca

SEQ ID NO: 223441 - DNA, 2714 bp, Cannabis indica
attattaatagtaatcttattattttttagccaataagaaatttccactttttgggtatttggctaactttgagtaccccaaaatactccgatatttctaaaatcaacttatcccaataattctatcaacatttttaattaaaatcgttgtgatatttttgacctccaatcaagtctctagggtcgccgaacctgaaaatatttttatttcacatataactcatattacattcacagatgctatataaatctctataattaacaaattacgattatatactcacttatagcaaaatttaaattttatgctgaaatgaattagtaggatcaccatcccacttattacctgattaactcatattataaatacaaaccctaattatttaccattagacttatcgggatattaaaaccatcccctccgtataaaaatttcgtcctcaaaatttatttaaacaatttggaatattacccctatatttatgattctaactctcaaattgctacttctatcttgttgtttttctatagcaccttcttaacaactgggattgtctcatttcatagtacttccttttttctagcccaaaacttggacaggatgtttttcccatagaataattttgtctgaagttcaacaacgtcacatttttgaatatgggtcgagtttgatacatattttctcaaggctggagacatgaaacacattatatacttcagacaatgcaggagttaaggctagctaataaactacctagcctatttaatccagtgaacatgtatttaatatttttcttataccatacttattaaggtacctaacaagtggcacatttaataatcaattttaaataaaagcctcattcgggaagagattattctaagataatctaacctttatcaaatatgctcatattatgtttctaatattccattaatcttctcaagttacccacctttcaagaataaagaatcatactattttctatttaatctccatggttctcaataaccttctttaatttttaacatcatagccaaagatatcaaccttggaatttcacaagattagactattcctttgtatgaattctgtatcctcatttattgtataaattgtctacactgtaatagacaacatattaactttgtatgtccaactgttactactcagtcaaaatcataagatctcatagtacataattcgtaattatgtgtttctactcctatgagatctcctaagctgatctactgacttaacttagtaacaagttaagtattcatttctgataggtattcaattagagcatttcttctttccacccactaacataaactcatcttgataccttgtaaatctttacttattgacatatattttttttcctcttagaaatctctagaatgactattaattctgcatcctaatatgaatctttctagcgtactttgtcctcactcatacgcttcttgagatgactccccgaaagatttcccatcttgagattaccccaagttaagtatgcttaactccaaagtaagctcatggtgggttatcagaaagtagatgcatgcttctttgtcgttcctaattgtatttcttgctttcattctttcattaataaaattcaattgccatcactcccttcattaacctcttgcaattcctcatcggtttttgttcacttaaacttgaggaattcccatcttattgtcaacttgaatcttgttcagttctacttattttaacttgcatcaatttctcctgaactggcacaactttaaaattttccaatcacttacagttaactaccattataaagtgaattaatgtaacttatacggtagaggcaacattgctcataccaggtacacataactaaactggaaatacacatttcccgaattctcaactaataacaataaattaaagatcattctgtgatcctaaaatttattttctgtgtttggtagagatcttgatgatcttttcaacacacacagaaatatacatacctcaagtatattctctgttatattgataaccctttggtacaaattaccataccaacttatagtgagtctcccgttgatgatgttgattcatcaacatctgagactctcgtgttctttttccatcattaccactaaggttttactccataattcattcgttaccattggtttcttacaatcatcactatcttcatacttggttaaccactctaaaacttattttgcactcaattatatagcttgttgtttaataaacaacctactttgtgatcaaacattcaccaagtcaaatacatgtccattaaattgaatccaattcataagctttttcccattgtgggtgagtatgtctttccataatttcttaataaagtaatcctttcctagaatttcaatggtctccttataaaccatattggctatccagtcaattataaagtactctccatcattaccgtgtcacctcaggtaatcttctttaccttagtgataccactattctacctgacgttcttttatacattaccccggtaacgtcctctcttcaagcctccattgggcccttactcccacattttgatgactcttatacacgagtgcattactctagctatttccgagactgacgactggtcccacggaccaatccaaatgtttctaacgtgcttcgctctgactcacacacttcatggggaaat

SEQ ID NO: 223442 - DNA, 3542 bp, Cannabis indica
agatggctccagaacttattattcccacttcagcccacttttcaggtcgtgtgacatatagagggagtggaatatttacttcaattgttcaaaagtttaaaaaacatgaaggattaattgaaaggatgaagggaactcctttttgccaattttggaaggctgaaacttttgctttctcttcagttttggtgcaccaattaatgcagcacaaaataaaggttcaagttgagaaggcaggcgaagtatggttttacattggaagaaacgaggcaagatttggcgtgcttgagtttggtctcataaccgtgttgaatttcacgcaagggccatccattgaagagaaaaatgctcacttgggaaacgaccgattgttgaatctttatttcaacaaatctgggaacgtgcagatggaacatcttactgcgcaattcttaaactgtgagattgtcgaggacgtttacaagctagggttgtgcttgttcgtggagggagtcctaatgggtcgtgagagggatacagagattacaagtggtatactaagttttgttgaggatattgacttcctttttcagattccttggggatgtgctttttttagtcggcttatgtattctgttcagaaagacatggtaaaaatgaaggctaagttagataagaaggaggtcaccgagtcagcggggtacacaatttatggctacgcaccagcattacaatattgggcctacgaggcaattttagaagttggaaagaagttcgctgttagtcatgggatacaagtacccaaaatgcttagctggggcagtaaggagattgatggaagttatgacattccaaagaaaatacttgctccaatattttctaaaagggtatgatttttttctatcattattgtattatttatcttttattgatatcatttgatgaagaaggtatgccagaacaatcacatacaatgatgttgaaatagtgattgagatgggtgtcaacgagacccttcgtgaatatgatgccaaggaccctgctgtttttcaaagccatgcagaaaaagtcgcacaacatatcaaaccttctactattgcatcttcttcaggcctcgatcgtgtggagttcaaagatttggtacagaggttagacaagatcgaggctgagcataagtgtctttccacttgtcaggcccagttgaaagaggcataccaggctagccacctagaactgaaggctggccagaaccttattatggaacagctcaaggtcattttgagtataatacataataggacaggagcagatgcacgtcctcaatcgcctcccatggaagatgttgacgtactgcctgacgactatgatccttatgttgatgagaatacttctactccagcggatgccaccaatatttccatagtggagagtcagtcacagggtgaggtactaccgttagagagaccaccagaaggtattcagtttcgaaagaggaggaagacccctcctacatggtttaaagactacactgaaatgaagaaaaaactcaagtcatctacgccttttgatcctctcgtcccaccagatgataggttgttggaaagttttcgtaggtggttgtgtgggagtatccccaaccatcgtcttcgggacattaagactggtgattatggtcctgtatggtttacgaagatgttgacacgacaggattggattgaagattctgtaagttaacatatattattttattattagaatttaattttagtttatttaatttacaaatgtaactgctcatttgtatcattatatgcagcatgtagatgcatgtgtccatatgcttaggaggcgacgccacttctttccacgcagagagctatcattctttccacctatgtggctgggatatccatggcgcttggaaaacacacaagggtcccagggccgacttcaaatgggaagatgatgtgctcaactactgtagaggtgttaaggtacattatttggctcttgttgtcatgttttgtttttatcgacagaatgttatcgaaatatctcgataggttctcgatagtatcaattagtcttttcttgctataatgtttagttgttatcgacagattatcgatgagttctcaataatatttaacctttgtgggttgtcatttggttattgtcgacagtttatctaaagtatcacgataggttctcgaaaggaataagagtttttacgtgctatgatgtttagttgttattgtcatattgtcgactgaatcagttttttgtcattgtgttaacggtacgttttatacaggaccgattctacccgaaatggggaggaaatgattacctctactttgtgttgaatcttccaaaacatggacattgggtagctattgaggtggacatcgacttgtggaaaatagcagtgtatgattgtgattccaccgtttgccctaaaaaagacttagcagccatcatgaaaacgtggcaagatctactcccaacattgttccatgcaagtggagaattcccaaacaataaccaaatccttgcggttgaaatgaatgactgcagcaagcttctaaagatgcactttgatagagttagtcatgaaattgttccgaaggtgaaatccaggtaactttgttttttgtagtgcctaattatttttattcttacttttacactaatttcttaatagtttctatatgcagtggtgattgtggcatttattccattgagtatgtggaacatccaatgataaaacattccctaaatgatgtcacagataagaacatacaaatgtttcaagatcggtggtgcgtggacctattctatcagaacctcagttgagagaacattggtgattgttgactgattattttttggtgattgttcacacatagttattatcgaaaacattatgaactgttaatcgatagctttgagatatgtaattatcttttgtgataggtcattatcgacagattatcgatattttgtcgattgattcttgactgattattgattaactatcgactgattgtccatggtgattgtagaatggaataattatgtgttatttattgtgatagttcattatcatcgattgattactttattaagtatgtgtgatgcaagaatgaaaaaacatttgccattacatcaataaaatatcgacaatattttgataatatgtcgacaaaattcaagatacaagcatttcaaatgcagactttaacattaaaaaaacatcgagaaagcatcgataaactgtcagtaaaggaaaataagaagttttatgtaacaaatctagttcaaaaaacatattattacaactaatattattacaacaatagtatactatgcctcaaatacgggctttgcatgttgctctattgtggcctaaaccaccacagaggccgcagtttcgagatatcgtaactttcttatcaccagacgggaaccgattctcccgtcttcttccaaccttgcttttccttggatgacctactggttttttctccacaggtaccccaactttcatattcttgatgtgt

SEQ ID NO: 223443 - DNA, 2031 bp, Cannabis indica
attatgccttaagtgcataattctttttatcaacgtatacaacacattattatattcataatcacttaaattctagagtaataatcctagatcacataaccgctaaatttagggtaataatcctaatctccgtttctcccataaaatacacataatacatgagcgccactgcagctaaattctatgtgctagtttactgtcttatttggtaatccaagtatgtggagattccaaatccccaggtgttcctgagcaagcgctggtaatcctagtcacacattcttgagatttcacaaatagagttaataccaaattcattttcacatataccacataatttgaattccatttacagattaacatatagaactcgaaacgagctttccaacgataccaagaatatctaaaacggagtttggagtcaaaaattatggtcaaaataagttttaacacattctgccctaaaaaacccctagctggtcgcgacactcaaagactatgccgcagctcctgggttaaaaactaaaaaaaagtcacctttaggtacccaaaaatgcaccaaactcaacccaaaaataccctaacttgccaacaagcttcccaatcaaattgagatttttccaagcatatatacaccaaaatacatccaataatcatgcataaaccaagattctaatcaacactaaattcatctaacgttggagatgaattgagctccaaacaaatctcaaaatcaaaaaccaaaatcataaattaagcatgtcaacaaaaacaacacactagcacactattatacaagcttgaaacccaagcattcaaactttcaaagaaatacccagaaagtcaaagcaaattcccagaatttaaacataaaaaataaagccaagaacctcccaaatcaatctagatgcatacaacacaatcacatataaaacattataatttccctcaatctcaacaacatgcatcactaaaatcacaagaacaccaagaacatccacaaaagttataaacaagcttaaaattcaaaaattaaatcaagtgaaatggattaaagcaattcacccaaagtcctcaagcaagagtatgcacaacacacaccaaatccaagctcttttcttcaaaattgggtaagaaatatacaatagagagagggagagagagagagagttcagttttgggagaagcaaacccagagaatagtttccaatttgctaaaaatctgatttttcttgaatattaacttaattggccaaaagaccaaaatgcccctaaggcacacatatgggcataaacatacaaaagggtaaattggttattttcactcacacacacatcacataaatcacattttctcatttatcccataaatgcgatgaataaatcccaaaaatgtattttaggccccgaacccggttcggaccaaaatatccagttgtgactataccgcgccgacttgtcagaaaatacctagagaaagatagaataaacataccatataataatatagtccataaacacagtatgccataaaaattcaattttacccgtctcgggtcaaaattataaaaatacccctgacataccaatgaggtcttaaaatgcaataaatcataatagtttcacatattaaatcatataataatataatttctcattaatacatatttaacctagttagggttgctaatcttgttattaaattttagggtattacacctggccaatactgtctcgctagattggcgagataagtaatgagttaagtaaatattaaagagagacacacaatatttatagtagttcactcctcgtattgcgacagtaatggagctatgtctacttcaagttttattgatcaaaagaattacaagaacattaactaaggtaagagcttagatttttagagagaggaattagagagatatgctctaaccttgtggggacttttctaaatgtgaaaaatgagcgaatggagctctccttttatatgcaaggaagtccattaaaatattaataaaataatacaaa

SEQ ID NO: 223444 - DNA, 2724 bp, Cannabis indica
gttagtttagtttaagtttaaagttagtgtgtgtgtgtgtgtgtgtggtggtggggggggggggtttcctttgtggtcgtgggcaggcggttactatttttgaaattggtttccttttgtgctccaccctttcatgtttatttaaaccaattttccttgtcatttattctcaccacctacccgattctttttctttgttttcttgcttctttgttgttcattcattctttcagatcaccatggctaaaacaaagaacttagggcaaccaaaacgggtggaagaatctgatgctactccctccaatgctcctcctgttgctccaattttgctgtctgctgctgcaactgcttcaaacccatgagattcatcacttcctcagcgtgaatcttagctcgtgaagcccaagccaaaaataattcctaaacaagtggttagaaaatctgtgcgacgctacaaatgttggacttcatcgtcttcatcttcgaaggggtcccatccacctactatcgcatcacctcctgctgcatcagggaagggagttgttacatcaactccaacaggtccttccgactcgtactcgtgcccagcaagcatctatcaagaaggaaacttcgcatgaaacgatccatgacaaaccagctcctccagccaagaagctgaaattgaaccctctctcagtttcttcaagttctgaagaagaagaacccatggaggatccctctgttgattctgagaccaaatccgagtctctccattctgaaaaagagattcctgaagatactgtaactcaggcattactcaatagaggtgcaaggtttacagaagtactgaaacaaccacaatatgcaccacttccaattgaaaaacgaattctagtcatttatgcagctgtcaatggattctgtgatcgaatgccactagacagaatttctcaatatgagaaagccattctaagtagtgtaaaacctgaattactacaatcccttttagaaaaaggtgggttaactaatgaaagaaagatggaactagatgcattcttaaaagaaaacgctttgccgggctgggctatctgaaataagcggtaattttgtcagtcctaataccatgcgaagcgcgtgatcacccagattcctaatgcccggaggagtctattcctattcctgctaactgaccggcttacttgctggcttccttcctattaccaggcctgcttacttggtgtaccagaagtggttacggtgacttgcctctttccttttgcttgtgttgtgccagttgaagtgaagggcttgctactccaatcaagtaagattagataaatagacattggagtctcctttgacattgaagacactgaactcgaacccgagtctcctttgcccaaatctgctccagcacctcctcgagcatcttcagcaaccaaggcatctgcggctgccaagggcaagcagcctatgaagagttcatctcctggtaatctctctccatctcaagctgtcaattccagattttactttcgtgataatgagcgtaattggaatatttatgctacccgaaagtttgaaagtgaaaggaattatgatttgcatgctcatagggtatatggtattgttaagtttgttcaataccatcaataggaaaatactctcactggttttgaagggtatattgaaaatattgtcaaagaattttatgccaatttgactaatgacatgcttgatgagaattctgatttttttggtaaagtttatgtttgagggcattggtttcttttactgtcaaggacattgcagtggctttgcaattacccgaaggtgtgcctaatgctatcatgtctatggatcgccatttgatgctcactgaacttactggtgcacgggttgaatggaaatctggggagagtcttcgaattacacatctcacctatgctcatgcatcactcatgaggttttctcttagcaattggcttccaaattccaacaaaaccgtggtgtctcaagatttggcatcctttctttttcgaatcacctcgggggcatctattgatctggcttcttcaatcttagaccaaattgtttcatttcagagaggtaaaaaagcaaactcataagcttgtgtttcctaatttaatctataaaattttgtctttttcagaaagaagtgacccaatctcatgaaacacttgagcctcccctgactgacaccattttccaaccctcagagtattttgatggagcttttcccaagcgtcctaaagctggtgttgctgctgctagtgcaagttttagttctgctcctgcagatgtccaggaagtcaaaaacgaggttcaactggtgaacaattgtcctgctgccatggaggaggtttagcaagagatgtccaagtagctgtcctctttgatcaagctctatggggcataagttttctttcttttttatgtttttgttagacatatttctatattttcttgtctttttgtctttggcccttagataaacaaaaagggggagtaatactttgtttttaactgcaactctggaccctttttccagggggagttgtgttaaagttagcatgatattttgttgtttttggtttttgattgtgttactcagggggagttgtaatttgctcttgctaattttaatttacaggtacttatttgttaaaaaatattttgttcatttaaagtgccaaagggggagactgtaaagttcttttt

SEQ ID NO: 223445 - DNA, 1964 bp, Cannabis indica
attaatttaaattttgactattgcagccaaatcacttttaatatttataattgttacatttatgatcctaattaaaaaagtgatgacaaaagtaatttattttacgattttgttatattttttggtcattaagttcaatttaaaaatagatggcgatatattattggactatatattaaataagttaaaaaaatatgtcatcacatatttttgagctaacatttaacgaacttaattagcatttaataataaaaaaaagtacgattacaacaaaatcataagataaataaagtagttattctttttttattattattaaaatcatattttcacagcaaatattccatgcatgtatatataacatgtcaaccaccaagaaaaaaaccacgtcctatatatacagttaacacatgcacaatagtacatcatatgtaaaaaaccatatgacaaaaaaccacgtactatattagtattaaggataaacacatattttgacactataaaaaatcattttacttttagtaacaacaaaatttatgattaaaagtaaaacaattgcgactaattataaattaatttttattttatcgatctttatatatttttctacacgtctaaagatctatgttatacagtgatagataatatatattcaatatctaaacaacatttttcttcagcgataatctgtcaagtatcgaaagtcataagataaatctgtgcttcggtattgtgattctattccacacacctctatgctaagggattttctgcttagacgagtaaattaaggagacttaggagagtataccccttactaattaattttatacttccttgtcaagaatatgaatgcatcaaatttaattatattcttctttcgttttgacaaatacatgtctccaatacccaattgttggtactcgatgccatgtaagttcaccaattctgtgccaagatagactgatgaacccattgaacccaaatttttgttgccactgcccatacatatttgcctattactgatcatttcatttaacaatatttcggcaccaacatttgatatggggttgtaaaaaagaattgcccacaattaaaaaatttaattttttttaattattcgataattatacaccaaaatagataatataaattaccccataattatttttttataattattatgctcctataattttttttttcttggagtgattataaatttttttacttataggtacaaaattttattacaattaaattcccacaaagcaaaaaatcatgattctttatattgatgataataatccaattaattagactaacgactaataatccgatcaattcttttcaaaaaaaaaaataaataaataatccgatcaattaatcaaattattattaaaaggagaggaggttagtacacgtgagaggcacgtgatcatacagttgtatagatagagagaacacagaattgtgaaaattttaataagtgtggaatttttgggaggtggggtaatgggtcaaccacaaaagcagtttctctgttgggaaaaacagaatatgttccatcatcacacaatgagattgaatctccaccattggattctaatttcttcatacaaaaaacaaatgatcatattcatatttatcgatttattaggttactacaaaccatttttattcaagtgcgattacacatcaaaaagctccttagtgggttcctcagtgaagtgaatatgtgaaaagaagaggaaacacacaataaaaattaaaaaataaaaaataaaataaaattaagccctctttctctggaatcctggcagaaatttcttcaagcaagttggcctcccctatttggacatatccacagaaaataactatatatggtcctttagttttggtaattgtacttaaggatattcagtaattgttatatgtatgtatattattggattatatatata

SEQ ID NO: 223446 - DNA, 1504 bp, Cannabis indica
tataacagtatttttcacggcccttgtaccctcagaaatgattccccgatccactttactatcaacagtaggtattgcaacattactggcaggtatagcagtgtttttaagttcagtatcacccttttcagattccgtagcaccattcattttctcagttgaaatccccttgcttccaacatcatgttcaacagcagttagcttatccccttgttgttttttcttccacacaatcggtttccctttgttacagtttgaaattgagtgtccaagcatatcgcaggccgtacacttggttggaagccactcatattcaacaggttgttccattagttgtttcttctcatttacataagcaatagttctcaaaggttcttccttaatctcaacatccactaacaccctagcgcacttgatcatagaccgctcaagagtgaccttgtcagccataatcggctttcctatcgtgctaacaagtgcactaaaattcttcttccccctatattggagtcccaagccatttaacctctcccataccgggaccgatttgaccattcgggttgtatccatatcctcggaccaaggccttagaatcacaggtttcctgtcgaattgaattactctgctttcaagaataatcttcctaggaagctcatccttgaaactaacaagagtgaaccctgagtgcattctcactatcctttccactcccaaattcccccaaattctcttgataaatccttcaaacactctaaaaggaggattttcccctaaaacgatacatataaccgaagatctccagtgtgatgcttctaacttagcttcatccaaatctaaatttgcaaccacatgatccccaattttagatggttcagtaaaagtaagttgggaggaaggggttttcacctgattcagattgaatttactccaagtaaattgtgcagatgcctgaaagtccatcgcctctacatcgtccgcccaagttgtcgatttaggagtcgactttaccccttctgcaactacttccttctccggttccagttcatcacacgagtctaagaaaatctccgtagcttcatcttggatggagggcagctcagggctcgctctcgtgccattgatgctggcagcactaggcttcgaggcacctttcctcttcttcaccatgggaagagcagcacagcatcacacgcctttttatatttggtaaagatattgaatactcgaataacttttaaaaaattgttatattggttttgctctaaaaaaatgtgacaacccagactaaaccaatttgtgaacaccactatcaaatttagtatgctacggatattgcaatacatcaataacactttggtacataatatgaccattcaaaggttctatatttgtttttgacgttggtttccctaaaattgttgaagttgggaaatgtttgatgttcgacatatccaatttctgcagtaagtctgtaacatatgtagtttgtgtcaagtacaaacta

SEQ ID NO: 223447 - DNA, 2400 bp, Cannabis indica
ttgagcctattcatcatagctaaccatagtaggaagctatgttttgggatgttcaatctagacgacactgcattgctccatggtaccttctcaaagtgttgtgcaaaccaggtttgtccctctgctaaacataatttttgactttgtctttaagttctaccatctttctccaataccaacttccactcaaaggaaccttgtattcccaccaagtttgctgcttaatataaacactatggatccatttcacccacaaattgtccttctttttttcaattgcccatacatgtttcaccatggctgctgcattctaatttggaatatacatcagccctagacctcctactttttttggacaacacagcttttcccatgctacagccccttctccattcattatactttttcctgtccatagaaaactcctacatattgcttcaagctctctaattatttgcttaggaaggaagataatttggcaccaataaatgtggattgagagaaggactgatttgatcaaaaccaacctacctgtaaatgacaagtgcctcgagctccaaatcctaattctaactgccattgtttgcactaagctgctgcaatcaatagtagagatcttcctagcacagggtactcctaggtacttgaaagggtcttgctgctttgtaaaacctgacatgtctagtacccttctaacctcatattcactcattccactacaatacactactgatttagcattattaggcattaaacctgaggttatagaaaacaatttgagagcttgcatcatcaaataaatgctttcgaagtccccactacaaaacattaaaacatcatctacaaatcttaagtgattcaattccatttcagcacacctctcatgaaacccaaattcttttttctaccaaaccttcttccttatttttgtttttttgatgaatttagaattttcattacactatttaacattttttattacaagctatgactcacaatggagaaaatacaactgtaaaggagcgaatacatctgtacatgtaatatttgagaaaattataattcactaaaccaatctatatccttttgatctacacattggggaattacacaagtaattctatttttcactaaccacttgatttcttgcactagtagcttcgaatcagtatcttctttgcatcagtattttttattccttgcataccaggttttgtatactgcaacagctacacaagttgtatagcagctctttttgaattttctttattttgctctattaatccacctcagaataccctgcaacgaattgatttttgctttccatcccagccaatttttcaattcctgcaaacaaggttgtgtaaaacctacaatcaaagaacagatgacacacactttctcctgcattattacacaacagatagtttgcatcacctataatattgaattgttgaagtctatcccatgtcctcaattttttgtgtacagcaatccataagacaaaattatgctttggtacattaagtctgctccaaatctgctggttgaggtgaaaattcctctattcctgcatcagcagcttataaacagcagaaattttgaaatctgatgttacaaattgatcaggaggaatgatttgtttcaccaaatcctttgtgtgcactactctcctccaataccagctgctatgactgggagcttcataaccccaccaattatcctcttcaatatacacactatgcacccactttacccataggttatccttcttagtagcaattgcccaaacatgttttgcaacagcagcttgatttcatttggcaattgttggaattattttaacaggatcttagatctactcacaagtatcttatttaacatcctaaatatgaacttctaaaaccatatgaaatacacatatacaaagtataagaaaccttacagtgattgcagcagaatataatgtctccttccacttagatctctaacccttgtatcctttctgtcgcagaatattagcaagatttgagcccgaatgtccttcttgttaaatttggattcttcacgatcttccacactatgattgaggtaccacttgctgtgtgtggccactactctatcactcaagggtttcaaattttaatggtgaagaagaaggcttaaagtggcagctaggtttagggagagaaggcactcagtttttctgaagaaagatgtgttatattttctgaagccatcactacctatttatagcaaaccactagggtagggttagaattatttggcattaaaataatgaaaaaataaatgataaaaccctataatagtggccggccatgaatgtggataatgggccccacttttgcaattttgctgttttatcatttctgcatctaa

SEQ ID NO: 223448 - DNA, 5583 bp, Cannabis indica
gctagattggcgagaataaaatacttgttaattaattataagacaaacacaacaaatttatagttgttcactccctgtatcgctaaagtaatgaagctacatctactttgagtttttatttttcacaagatggtattacagaaaaaggataagtctcaaaagctccaatttttagagagagtaactagagagagaagctctaacattgtggttagctttctaaatataaaaaatgagctaagggagataaccttttataggtgaaggaggcccacaaaaataggagaaatataaaagttagatatttttgaccatatatgatgatctaatagtgaaaattagcttcccatggtgatagtcatttttaggagcttcgcaagacctaccctgggtaactcggagcttattttcataaatctcttaggggtaaaatttgcagccaatagtttagaattgcaattgaagtgttggacatgactatatagagcattgaaatatcattgaaatgcaagttgaattatgtcaatcagatcaatattgagtgcttatggctgttttggtgaaggcagttcatgaccccgtgctcaggttgacatctcaacgcctaggttgacatatgacgtcaacctggacactgggtaattgttaaaacgtccaaggtgtgaactcttttaagaacttgggctaattttttatgatttttttagagaactcttttgagcatcttctccatttttagcaaagattaagatttaattgttatcaaggatcaaacaatacttctaaagggccataactgggacccaatgcccaggttgacacctggcactgggcccagcgcccatgttgacatattgtcaacctgggctgtatctaatcaagttcataaaaaagtgtttcgaaaatttttcccgtcataaaaaataatagagattcaagcaaacttggggagaaaaccacaaatctgagcccctggaaatagggcccagcgcacaagtggacttggtgttgggctagtgcctaggttgacaataaacctggtacgctggttttgatcactcaaaagccaaatctaattcgacaaataaatccagaatggttaaaaatgtggtaggagacctcgtcctgaagttcaagaatcttggaagtataaaacgagaactctggagcttggaaataagtacacaatgcctaggttgacaaatggcttggtgcgctgggttctgcttattcgattttgattcagtttcaatcattcatctattttttcataataaataagatacatgaagttaaagaagtcaaattcacaactttgcatttctcatttccagcaagggaaactcactcggaaatgaagagttttgagtctctcatttttgcagaatagtaacatctttgagaattggtgaccagctttaccagaacacaaaaatagactaagtgatatttcaacctgggcggtaggatgttaaccttggcgtggggtcatgaactgccttcacaaaaatggtcataactcactcaatattgatctaattgacgtaatttaacttgaatttcaaagatattttaattctctatatagtcatgtctcacacttcaattgcaattatgaagctattggccccaaattttacaaaaataagctccgagttacccacagtaggtcccgctgggctctgaaaaattggtatcaccatcggaagctaattttcactttagatcatcatatacagtcaaaaatatctaatttttatatttctccttttattgttggcctccttaacctataaaaggatagttcccttagctcattttttatattcagaaagctacccacaatgttagagcttctctctctagtttctgtctctaaaaattggagcttttgagacttagcctttatttgtaataatgtgaaatacctacaactatttcccataggtgtaatgagggaaatacttgcacaagataggtggttcgtatagcttccatcaacgtgcaacttccaagttgacttttcttgatcttacttcttctcttgctctcgcttcttctcttgttctcacttcttctctagctcttgcttttctcgtaaatcttcaaagattttaggaggtatgcatgtacgttcaaccacgaactcagtgagagcatggacttttatcgccactcttggttagtaggtgattttatattgaccaagttttattgcccacttgaggtactggctagatgcttcaggcttttgcattacttatcaaaatggttggtcagtgtacactcttattggatgggcttgaaagtaaggtcttagctttctcaaagctaggaggaattagtatgtcagtttttcaataagtgggtattgactttcgaccttctgtaggctgcaagcggtctggcttgctggttatcttgccagggtcttatcaatacttgtgtatctctttatttgctcttgacttggaaggttcacggaatgtacctgttcagttgtaattgtttttaccacatgtctgctgtttttggctatgtggaggtgctaagtcaggtggacaaaaattaggagagcatgtatatttatatcttttactaatcatttacctcttcctttaaagctttaaattcaaaagtctcctaatttctctaggattaggagattgaactcatctataaataagagagttttttcgtcaaatttttcatttctccactttgttctccatgcccaagcctaagaaaaagccttggaatttcatcttcatcaactcttcaattgttcttcatcctctaaggtaggaatttttttttcagcgtcaacccttttttttttgagaaattttttcttctcctcctttgtttatcttactacatggattcccaaactcccaaaaacccttgaattatttcctcaaaattgcttgaattttttcacaacctaattagacatttcttgggctgtaaataacttgtattgttgagcttttatggctaggattaagagaagtagaaggtttcctaatgaatatgactcccatgtggcttagttcattagagctaagctaattgttcctaactctaactacttagacaaggcacatggtggaaagttatggcaactgagcttcttaaagccgccaattagagtgatgatctgaaagatcgagctttcaagctaagacctcttgtgtttagcagtcctactgaacatcaagctcaattaatacgagatgattaatgtctttctaaaactgtggtttgaaggccacgatatgatggttccactggctcccagaacacttactatagtgcttggtcgagattccatatgaatgcgggtgcttatttgcccttgcatccatggttcatttccatagctaatttcttttgagtctacccttaccagataaatccaaatagctatagaattcttgccaccttctttatcttttactgactgagaaattggcctgtcctaactcctcatgagattaacttcctttgtgacttgaagggaagtccaacccggagagaagaatgattttaccacttctaccaatctagccatatgtagaaaatattatcaagagtaactgtggcctttaacatcacgaatacttttataccctgtacctccctcgagacacataactttctaaaaagttggctctttcaaaatacttgtttagcaacaatataaattttttaaaacaattttagataaaatttaaagaacttttaaagttacaacaaataaaatttaacatgaaaataatatatttaaaaataaagtaaataattatttactaactctacaacaacacaaagtgttattattatatatttgtttagattaactgcatgtaagacatgatgcatctgtcatcttctatttttaatggcgggtggtattcttttttaacttgatattgtggttgtatgtgtgttgttgcaatattataatatagttgttgcattgatataagtaatttttctttatagttacaattctttcctatcaattgtaatgaacacataactaaacataagaaaattagtaattaattagtattatagtaatttttaaagataatgtgtgtaattaaaaaataaaggcctattattaaaaaataaaaagaaaatatgttattagtactcaattatagagattttataaaattatatgtgtaacatatgtatatgttatgtatttaatatatttatgattggcaatagtaggaactcgatagattagcagaaatatcaaaatagtatagttaatattttagaggtaccaaaaatatttttatggataattagaaatattattttatgtggtctaatttagaataaccttttttttttcctaagagtttaagtatgtaaattattttagtaaatggtagtttagcaattttatctttgctattaatgatgagttttgttttgtgtagaattcttttaaaatatgtaagtagaaatcaaaaattaaatatacctcttctctttgttttttcctttgccgaccctccgtagacactaagaacagtcaaattttaattttttttcctcaagtgtttggaaaggaattcaactagttttggaaaaagatttagctagcaaagatcttagagaagaatgatccaaggtatgatgaactaacttttgtcttttaatttgttaaagaaaagaaatattaggtttttgtgatttagagcataggattgtttattcttgagttaaaatttgttattttttattttggggttagaattcatggtgaaggagggagaaattcaactataattgaattgataggtgagttcaaagcttcaactctctaatagtgaaatttgatttcctagattattttgtgttctaagctattggttatgtttagaatgcaatgttatattgtgttggagagtttgaattgatttggaatatatgttggaggagtttagaactcatactggttcgagttgggatctttgtcgaaaactgagcacccaattggtctggcagtgtccaaaattctaagcactcggttgtgactttggctacccaattgaggattcctgaaggtatctcggtttttgtgtttttaggatgtctaggatatttttaccttatttttcgatagggaaacctaaaattatgaattttaatcatagaaagtttttagcgagatacttaccagtttaccaataatgtgacttaggcccttcgatcgtcgagcaaattttcactcaagtttaccagcacacttgaatcaggaattgacgtaagaaaaatattcaaatgcacatatacatatgtatagtatacatatattatattttcatgtagctagcatattagagatagcggtatgagtgtacatagagtagcactaagatatcaatatctaatatgttaggcaatataaaatagtattgattaattctaccaacactaatacgactagagtactgagcttaggtttgtattatggttaatcatactataagtacgaatgtttggatctcagtttatactcattggatgcggttagtaaacttatggtaattgagtctg

SEQ ID NO: 223449 - DNA, 821 bp, Cannabis indica
gatcccttacttaccccactaacaccagaggcaaaattccaggctttctttcgagaacttctccttggacgactaccagaacccgtccccaagctaaaattattaagctctgcagtaacagcactcgagacaccatcagccttctcctcaacaaccggacattcagggagggaaaaactcgtaactgctgggtagggatgataccacgtatgtggtttccttttctttgagcccaatagttgaacaatcatcatggataaatcagggggattacaaataagggaagcctgggctttgtataagtcagtaacatccggcccataaagctgaaaaaacatcttttgggcttccaaatcatcattgggccatttaatatgagtgggctcagggaagtcatggggagtttgggatctacacaaccaagagtgagggatatctaaactttgagcgattgtaggcccaatatcagggatcagctcactaccttcaggcccaaaggagaaatcaggggttggcaaatctaagaaatttggcccaacttcattcaaatccagctgtacattttccataatctccacgttttgcacaccagagacattacctaatacaaatccatccggcagtttgttgcttgctgcctgtttttgtagctaagttttgttgaagttttcttagtttctctgtttgcagccccagttcttgttcttgctttgcggctgttttaaggcctttaatcaaatatgtaataataagattattattctatatgtaattgagtctatttttttttatataataattagtatagtgaataatagata

SEQ ID NO: 223450 - DNA, 2640 bp, Cannabis indica
aaaaaaaaaagaaaaagaaattaatttttattatttaaaataaaaataataatttggaccaataatatttcgacacgtggcaagaaaatggctcagttaaaattaggactaacagacaaataaaaagtgtgaccttgaggactgttgccgctatttttagaggttgaggactaatctgcatcaatgtgaactttttggggacttttaccgcaaatttcccatttatatattccatttccatgtatataatatattaattttaatttttggagcctctaaaattgtggggcctaagggctatgccccagctgccccaccatgtggtcggttgggcatgaggaaaaagtgtcaggagaaattcattaatcaataatagtctcactgtaaagcaacaaaaatacagtttgaatagtcaggccaccaaacataataatcaatcatgaatagtgagtggtaattttgccaataagtgtgcaatactgttagccatcttaagacaatacaagaaagagataacataaaagtaatgacaacaagcaagagtatctctaacaatagaagagataatgttaagaatgattaatagtatcattaagaatagaagagataatattattacaatcagattccaaaactacatatttatacccgagttgaattgcaagctgcatgccagaaaaaatactcatagcttcagcaacatcaggaggataacaaccagaccaagtccaagttccagaaacaacgactggacttgaatcatcatgaataatagcaccagcccttatcttcaaagacccaatgctaagaccagcatcacaattgattttgaccatacctgtcaacggtttgtaccacttaacaacatgggaatgatgcagactccttgtattaatagagctcttctgtttattagcagaatgtaaccgatccaagtaatctatactccaatcaaacaacacagcatcattcaactcaactgtttcattaacccatttttttttctatacgaaattcttcaaagacaaactataagtttttcaaatatgataatagacatacaatccaaacaattcaggaaaaataattcatagctatcccaacacaaaaaattaggtacctgaagattatgaatgatcatctcacgaatagacttgagtttatcacaaccccacaaaacatggaaagaatattcatgccccatgaaacatcagggaaaatcagtgacagcaagaacaccatgcttactaaggttagcataagagggaagccagttgtgagaagctttccaaagaaaatactttacttttgttgggaggttcaattgccaaactatattccacaaaaccaatcttaccattagaagtagagtattgcccaaaccctagaagacgaatagagttccaatatccactcttaacagagtaaagacccaaactcttaaagtgccacaccagagtattatgtaaaggaataatgatcttaacaaatggaaagaatagcattcgcctctttatcagaaaaaaatctcaaaaccacagaattgttccaactcccattcgacatgaatacgaaattcacattagcatcatcaggcaagcaacaaaagaagacttattaccatccacactaggaatccaacaatcattatagagtgaaacttgggattcatcactaatgagccatcgtccaccaacttcaaaaacttccttaccccataaacagatctccaaatgaaagacgttttcttggatgcatcagcctttaaaagggtagaattaggataatagatagcctttagaactctaacaaccaaagtgtctagagcacaacacaatctcgtacagcttgcttagccaacataacctggttgaagatggccggataaattttgaaagtccataccgccatcagacttgtaccaatacagtttctctgaggtaaactagtggagcttatttttactcatattttcaccccctaaaaatgtgcgcacaatctatgactccagaatcaaatatgcacgaaacctaaagagatacataaaataaataaggatagtttgaatgacttattgaataagaatttcccttccaccagacaaaaaagaacgagccttccaatcatatagtttatttctaatctagtcaagaattaattgaaaaagtcccgtcttactttggcacgcataacaagaaagaccaagatatatatatttctcatgacaagaaatcacattcaccaccccgagatagagatagcagccagcttatctctattctcattagtaactcaagaactaaaccaaatagttgatttatcattttacagaactaataaaactacattatattttacttgcacgtgttacaccaactagtataaagaaaaagtttcaatttgaagtgcaagtgagatttttttttttatcaagaataaaaacatgcctttcactagtaccctttagcttttccactttttatattttcagactttatattgtcttctattcattattatcttaagggaaatttgcgacaaaagttttcaaaaaattcagtttgatacagataaatctccaacttcaaaaaatagtggtaatagtcctcaaagtcgtgcttttatttgtccgttagtcct

SEQ ID NO: 223451 - DNA, 1311 bp, Cannabis indica
aaaaagttaaaaaaattaatataatggtgtaattccccaaaattttattagccacctcaaataaaaagcctagttatattttttaaaaaaaaaaactcatattaattggttaaataagaaataataaagggtatcccttactcttaagcagcaatacttcacataatattattgatgtaatttaatattaaattctatatatttaagttaaggtaccagctagttagcggtgactaatactaccataaagtaacgcctcacgaatagttaataatattcaataaaaattattatactaaattataatttatagagtaatttgcgacataaataattaaattttaattcctaggataataatacaaagttatatttttagaactctggaagtatctaaccgttaactattaagtcattaatatgggtatatttaaactaattttgttaaaaaaataaaaatttaataacttggatcaatcaaagattgccacgtgacaaattatttatacttaatagccaaacacaattaaacttaagtatttaataatagtgtaactcaatatttaattcacacataataataataataataataataataataataataataataataatagtaatagtaaggctcattgttgaatatataaatacgaaacaaacatctacttatagatggttttgaactttgaaatagtactattcatttcaacaccacccctctctctctctctccttgttatttcaatgtggttttgataaggttatggcatgtttagaaatgtacaactccgatcataaagcccaccaccaccaccaccttcttcatcatcataactacccaccaccagtgagcccaagaatctcattctccaatgactttgccgattcacatcaactcattaaccaacaccaccttcgacctactcctccgccatcgtcggacttcgaattctcggtcaccgaccactccatgatgagcggcgccgacgagcttttctttaaaggaagactcttgccctttaaacaaacaaccccatcttcttctcacagacccaccaccactcttagagatgagcttcttgccggagatgaagatcgtgacgtcactctccgaccctctaagggtagtactgggtcgaccaggtggaaatcctttttgggccttaagaaggcccacaatgggcccaactcaaagaagcactctgaagcttcttcttcttctgcttctctttccaatcttagcaagacctcttcacaggttattattacaatcattatttattttgttctttgctaatgtttatt

SEQ ID NO: 223452 - DNA, 3619 bp, Cannabis indica
ataaattcctagagaaatttcttttgggagcacatttttttaagggcctttaggactagttggaaaatttctccaattgtagcatccgttaggctttttcccgatctagagtaaccttaaagtttctttgcccagtggctctagaatagagataaggaaggcttgctttagatttggatcaccaatgccacctatttggtagaatcgtttagtcattcttctataatgcttttccaagtctctcttgtccattgaacaacacttgagcttcaaaaactctactctatgtctttcaattacttgggtgtcttggccacaaaattcaacatagagatggcttagggcattcacgacaaatgggagttgcaagaaagtcatctgtatgtattcacctaagcttgtccaccaatcttacaagtttctggtgaatcttgacacaaaattcaagaggattgtccctgtctgtgcctatagtttttatgtttccaggctaagctaaacatggaattcttggaatctttctcgccatttatatgggggaatgtcctcaagagtaaaagtttgaaacttaaaatatttactcttttgatgatgattggattctattttcattggagctacttcttcttcttcactttcatcctcacttttgacaataggctcgatttgagagtatgcttcttctgcagattgagccataaaatgtgagggtacctcatctttagaagtatttgaatcttgagactcatcactagtatctaaatcttgagactcgttactagtatctgaatcttgggaccaagttttaaaagtctcttcttgtttagaggaagaagattgattgtcaaatgcttcatctgtttggtggatcatggaaaaaataggattattcgcagtttgttgggccatgaattgatttggctccttttccaatagggaggatgctcgtggagaagaattatccatgctttcttttttctttccctttttggttttttgttgttgttgagtttcgtcaagcatttgcctaagtcaaagaagtgagtcttcttgtgaagagatcgagaaaggtgatgtcggaaaagtctttgggattgttgagaattgccattgtactgatggtgtatttgctccaaaaaggtttgtatttcctcccaaaagtgttgattgagaccctgtagaatttgattatttttgaaaaaattgctttttcagagattcatactagattttaagggttttcatttcaccttcttttaccaagaacaatgacatcagaacaaaatttgattttatgatggtcatgagttcgtcatgcgtctgttgaatcttgtttatcaacttttcaatgatcgtatcttgtgattgttgtttgatgattgtctctgtgcaggtgatttgtttttctactcttttaagacatggttttgggcaatcatattttttgttgtccaattcaatacttcttcggttgcgaagaccttttgtagagttccatcggcattcctagttgtaggattttgtacttttggatggtgggaagcggtaccttgctcttcagttttttcgaacctcttaagaggagggaaatatacatcataatcaatggatggactgggggtgatcatggactgggggagattgataaaatggtcaatcgagttggggcagttcttatacattgtaatcttaagagagccacttcagattcaacaatacttgtgatctgagtagtattatctttggtattaatacaaccaaaaggggagtgggtcattacccgctaattaagggggctgaacctttataaaatcttgtgtcttatttacttttttgttcttattttgtaacacgtggcaagcatcagtaagaaatatgactcctctatcggttggctaaatctgaggtcaacaggggctagagcactcaaagacatgctggtattttgtttttggccggtggaaactaccctaggagcagcattccgtactccctcctccaacttaatgaatccatctgccttgtccaagaattctaccatggagttcaccataagcctcttgatgtctttccacaaatctcccaatggcataattcctccgagcacggcagcaagtcttccttctttagtcaatcctcttactcttgtggcctcagtcatgaattgacttatgtgatctttgagtggctcatttgggagctgcttaactttgaacaagtcctccaagtgtaatgggagtggcctgaaagacgggaattgtgtgttgaactctgatatgaacgaatcccatgaatcaaacttccccggtgttaatttgaaataccattgttgagttgcctctactaacgttgttggaaagactctgcaacatacattgcaatatgttggctgcaaatttattttcagctcaaaattctttatatggtataaggggtcgtcttttctattatacaccttctaggtatgaattttaaatttgggcagaagagggagagcatttatccaagcagtgaagggtgaaactgttgcttagtcaagttcaaggtcagtgagtttggtaccagtcaaacttcaactaagcttttaagatgatctagttgggcttccacccatagatcaacttgttttgcatgttgctcgacctaagtcatgtgctgtcctccttgagtcccaaccgacgcataattatccacattaatggattgtacatttgggggaactaccccagtcctttgttctctcttctgatttaatgtgtgtttgagatcgacaggttaggttcctatcctctcaaagatggattttccaagagaccttcttgcatttttagtgttggccaatggaatttctctctgggtacgctgatctctttacctttgagcacaagattgcgctatttgctcaatcatcattgttacttgaatatgactgagtgcaagcagttgtagtttgaccatgttgtaggatcgtgtacagaacatattggatatactgaacatgcccattttgatcataaatggatatagggtcctaaaattctgcattttgctactcaggtgttcccacatggggtcagaagttctgaattttttgccaatattctgacctgacaactcctgaccgtctacctcttggcccacattgtatgtggcctaggattggacgattcggggcgtaaaggatcctaggtgtgagtcaatggaacttctgacccgtggttattcgtaggcaggatgtacgattcctttcaatggaggggatctcaaataatagggatgtctacctacaattgatgtcttgtacgttgattgaactgccttattaacttcatggtttcgcttgactggtgattgatcaatgcttgttgggtccttaagctctccacctgtttatccatcaattcttggaagagcctttttggttgagcaaaggcctcattcatagcttaccgggtatcagcttggtcgtgacgaagtgtgttagtgtggctttgaacttgagccactacttcccgtaaattttgcagctcggtgtcattgttgaacgtcacctgagttcttcttgttggcggtactctggaatttagaccactcttcgtaactgttgggttttatgccc

SEQ ID NO: 223453 - DNA, 2338 bp, Cannabis indica
gttctatcctagtactctcaatatgttcattattcccaatcgtaagaatatctctagtagatgcgcttccactatttctcaattcaaaaggaaatctatgttcataaaaattagtatcattagatcccactattacatgtacattgagatcatagaatttatacgctttgctattcatcgcatatccaataaatacatattcatatgctctactagctagcttaattttcttaggttcaataattctaacataagctaaacaacccaggttctaaaataagacacatccagttacctatttttcaagatctcataaggtaaaattttacttttagatttaggaactctattatgaacatagcaaacagttaataaaatttctctccatcaatgagatgcgcaacaccagaattcaacaaaatagccacaactaattcaataaaagttctatttttttccaactttaccgttcattttaggtaaatatggcgctatttttttgcatattgtgccatgtaaattataaaattcaataaacaagtttgaatcatattcagttcctctaccactatgaaacatttttattttcttgttgattttcaatttcagccacaaataatttgaacatgttaagtgtatcatttttatttttcatcaggtacacataagtaaaagccaaaacaatcatcaataaatgtaattaaataacatttaccatttgtggttagagttccatgaagcttacatatatcataatgaatttaatttaaaggttcaatttttctagttactaatgtatgtggtgtcttagttatttttgcttgactaaaaaaatcacatttttcaaatttattttttgacattttctaaattaaaccaatactactcatgttcttagtggtacacttattaacttgacaaagtctagaataccaaacattaaagtgacacaacatgtaagcagaagaataaactttattaatttcaacatttaatttaaacattccatcagtaccataatccttcccccacaaaaataccattcttagtgatggtgttcaaagcagctccaattgtttgagtaaacccatccttgttaagaagaaacccagacactagattcttcctcatctcaggagtatgcattacatcttttagcaataagatctttcccgaggtaaactttagttccacgttttcaattccagcaacaatagtagtgtgagaatctcccaacaataatttcttatcatcagcagtcgtgctatgttataaacatagcacgatcatagcagacatagcgagaggcgtcaatgtctacccacaacctttctgatccacttactaggttgatctcagaattcatagctataaaaacttttttagtcaagttagcctgcggagtagtgctaggcttattcttgcactttcatgccatatcacccgtcttgttgcagttgtaacacaaaaataaaaacaggtgatcaaactctttaagaaaaattccttagtcttacacatgagagtgcttttaaaatcttttaaggaagggggtaatttttcaattaatacaacaacttaaaactgataatctaaagtcataccttctaagataatctcatgtgcaattttttaaagctcgtgagattggacttccactgatttattgtctaccatttgatacttcaggtagcaactaacaacatactctttattatgggtgttcatcaaaccacccaaaccgcccgcaccgtaaaaaaatgcgatttgaaattctttacaatgcgatcgcgatttgaatttttcctaaaccgcgtggtgcagttttgaatgcggttcaaaccgcaccgcaccgcaccgtacattattaaaatacaaatttttatatttatttaagtttaatatgtgaatgttcaactcaaagcccactaattattgtattgttgaaacttattttttttttcatatttattttcaagccttatggtgtttttgacaagtgttgctcaaggtttgttgttgcaatagtttaattatttggtgatagtccaaaccgcaaaaaccgcaccgcgctgtactattttttgcattgcagtttctacagttttttagtttcacggtgcgggtgcagttcagaaaattagaaaaatgtatgtgcgggttggtttaaaaaaaaaggtcaaaaaccgcaccatccgtaccacgaacacccctacttcttagttctaacatcttcagtatcatattgcttttgcaatgcttcccaaatttcatttgttgatttattcgagttataataatcataaagatcatcagaaaaacctttaagaataaaatt

SEQ ID NO: 223454 - DNA, 2530 bp, Cannabis indica
aaaattgtccagcacattgtgaatcttatgcaggagattgctttcagccgagagatgatgaccctagttgttgatctcttccaccagcaccctgcaaccagtctgaacctctatctggtttgttgcatcagctggaggattcttcaaagcttccaaaatcgcccaagcctcagccatttttgctgagcagatactctgcatataaatctgaccagccgaaaggatttggccatcaaccttgcgccagatgaagccaagacctacaccagcagctttgtcgataacagctgcatcacagttgacacaaatgcagccattagcaggagggatccactgcttctgcttgatagtgataccagcctcttggtgaacaacatcattttcagctttgagaacgttcggatatgcagagaaaatccaacttatcagttgctgaccagtcatacttgggagttgcttccatttcctgtttcgattttcccagatagcccacatcactttgatagtatcttcaaactcacacctggtagttgtctgctcaatggccattaaaacatcaaacatagttccttccccaaacttgaacagtttttataccaagaaaagagtttcccaatgtttctaactctatcacaactccataaggcatgtgtaagagtttcctcataccttccacacatatcacagcaagtattaatatccattcctctatatttcagattagtttttgcaggcagccagttgtggcaaactctccaaccaaagagcttcatcgaggaggaagttgtagactccatagccttttccaccacttctaaatctcagccatgttagaacatcgagtaggattaagatttaattccctaccaacccgatacccacttttcacattatattgaccattaggggtgaaaggccaaatgaaatcatcttcgtgaaagtgtttagtcatctcttccatattccactctccatcccaagttataaacttatgaagcttggtatgaggtgtaatatcaggaaatttagaaagggtagattcatgaggtctaggaagccatttatcctcccacacctttatctttctaccatttccaactctccacctagccccttctttgagaatttttcttccccaacaaatccctttccaaacacaagaagcaccattaggacaacccgcttccataaatgaagtggaaggatagtagctcttcttcaaaatccgggtaagaagagagtgaggattatgaagcagcctccatccttgtttagccaaaagagcttggttgaactcggttagactacggaatccaaggcctccctcctccttaggtctacataatttatcccacgaactccaatggagtttcttatgttctgttgtatctccccaccagaaattggcagccaaggagtgaagatttttaatgagcttctttggaagacggaagcaactcatggtataactcgggatagcttgcacaacaactttgattagtattttcttaccagcttgagagaacatttaagctttccaccctttaagcttgttccaaactttctctttaaccaaagacctcttgtttccttcttcccacaaactcggaagccccaagtacttggcatggtgagagacaagccgaacccccaatctctgtgctaaagcctgtccttgaacggtggagatcctcttacccatactaacttcagatttcttcaggtttatttgttgacccgagagtgttgaatattgctgaaggatccgcttcatagtatcgcattcattatcttttgcattaagaaaaacaaaactatcatcgacaaagaataaatgtgaaaccttgattctatctctcccgaattgaactccattaatgcttctagccctttcggcttcatgaataaggcaagaaagaccttccgaacaaagaagaaataggtatggggatagcgagtcaccttggcgaaggccccgtttaggatggaatttaccaattttctccccattgatgaggaccgagaaggagacactctccacacaattcattattttgtcgatccattgttcctcatatcccaatcctctcatcattgttcgtaaaaaattccattccactctatcgtaagccttggacatatccaatttcaaagccatttttcttccatttccaaaccttttagtcttcatgcaatgaaggctttcaaacccaatgattgcattatcttgaatgagcctaccccccacaaaggcactttgctcctcagaaattacttgatgcatactattcttcattcggccagcaaggcattttgccacgaatttatagatcacattacatagacttattggtctaaattctgacattcgggttggctttgggatcttaggaataaggcaaatgagtgtgtcattaatgtcttctacttgcatcccttcattgagaatacctaagcacactttggagacctcgggaccaatcaatgaacaatattttctgtaaaaaagcccaggtaatccgtcgctgcc

SEQ ID NO: 223455 - DNA, 2241 bp, Cannabis indica
ctatcctcagaggttgcgcaagaataatgcggataagcagtttagtaagtttcttgaagtattcaaaaagttgtatatcaacattccctttgcataagcctttgaacaaatgtcaagatacgtcaaattcatgaaggagattttgtctaaaaaatgaaagatggaagaatttgagatggtagccctaacagaggagtgtagtgcgattcttcaaaagaaactccctcctaaactgaaggatcctgggagttttactataccctgctctattggaaagctttaaaatattcatgcattgtgtgatttacgggctagtatcaacctcatgcccttgtcggtgtttaagagacttcaactgggagaagcaaaacctaccactgttacactacaactagttgatcgttctttagcccatctaggaggagtaatcaaagatgttcttgtcaaggtggacaaatttatatttcttgctgattttatagtctttgacatggaagaagacaacaatgttcctctcatcttggggagacccttcttggcaacagggaaagcactgattgatgtccaaaagtgagagttaaagctgagagtacaaggagatgaagtcgtatttattgtattcaaggaaataacttatcctatggctagtgacaattgtttctcaattgatgtggtggacaagttggtggagttgaagaaacacattgaacaccctctcaatctgactttagtacaggaggaggtggtggaacaagacggtaaagaagcgaacgagtatgctatgtggctcgactcttatggaccgttgaatagaagatattataaagagttaggagtcatcccaataaagtcagctccatctattgaaaagcctcctgaactagagttgaaagtcttaccagatcatctgaggtacgaatatttgggggagaataagacacttcctatcattgtgtcagcttccctttcttctatagagatagataagttgttgcgggttctaaggaaacacaagagagccattgggtggacattggtagctattaaaggaattagcctctcaactgtaatgcgtagaattttaatggaggaaggagcgaagcccaccatcgatgcggaacgaagattgaatccacctatgaaggaggttgtcagaaaagaagtcttaaagtggttagatgctggggtagcatatcctatttcagatagtaaatgggtaagtccggtccaggtagttctgaagaaagaagggatgacaatagtgaagaatgagaagaataagctcattccaaccacaactgtgacgggatggagaatttgtatagattatcggaaactcaacaaagcaccgagaaaaaatcactttccccctccattcattgaccagatgctagatagggtggcaggccaagagtactaatgcttccttgatgggttctcagggtatcaccaaatagctattgcacctgaagaccaagagaagacgacattcacatgttcatatggtacttttgcttttcgacgaatgccattcaggccgtgtagtgctccaacaacattctagaggtgtatgatgaccatattttcaaatctaattaagaagtgcatcgaggtgttcatggatgatttttcagtattcggctcatatttttatcaatgtctaagaaatttggaattggtattaacaagatgtgaagattttaatttggtgctgaattgggagaaatgtcacttcatggttaaagaggggatagtgttgggtcatagaatttcaaaaagtggtattgaggttgataaagccatggtatctacaattgagaacttaccccctccagtttcagctaagggaatttgaagcttcttggggcatgccgggttctatagaagatttatcaaagatttctccaaaattgccaaacctttatctaatcttctagctaatggagtaccttttgaatttgggaaggattgtcttgaagcattccaaattctcaaggagaagttaatctcagcgccgattgtgactacactagattgggaattaccttttgaaatcatgtgtgatgcgagtgactgcgctattggagcagtattaggacaaagggttgacaaggtatttagaactatctattatgcaagcagaaccttgaatgatgctgttgggttttatgccctaaataaaactcatttcatataatcaggtttacttattaataaagatcagaaataacattttatgtt

SEQ ID NO: 223456 - DNA, 5284 bp, Cannabis indica
ggttcgagtcttggtctgagtttgggttcgggtttcgatataggtctggatcaagctccgggtgtgggttcgggtccaggttcgggtctgggtccgagtcccaagttccattctcgatctgagtttgggttcagttctgggtctaagtcgtgggttccaatcctagtctgggttcgagttcatgtccgggtctaggtctaggtttgggtctgattctaggtctttgtctgagttcaggtcctgagtaagggtccgattttgggtttgggttcgggttcgggtttgatcctggttcgtgtccaggttcctatcctagtctgggttcggggtaggtttcgagtcagggtctgggtctgacttcagattctcgggtccaggtcaagtcctagtttgggttcgagtcccggatttcgatttgggtctgggttctagggcctaggtccctggtctaggtcttccatctatgtccggttcctaggtcttggtcttggtccaggttcaggtttgggtcccgagtcttggttcgagttcggtcccaatttgggttcgggtccaagtttcgttcccagtcttggtccgggttcgggttcgggtacgacttcgggtcccagtcctagtgtgggtctgatttttaagtcccatgtctatgtctggttgttagttcctaggtgtggtctcagtttttttggtctaggtctgggtcagggtccaggacccggtctgggtccaggtcctggtcttggtttaggtcgcaagtcacaggtcccggtctgggtcgaagtcccagtattggttcaggtctgaatttggatttaggtccgagtctttatatagggtcgggtcccgtgtctcgagtgtagggttcagtttttgatctcggtcccagttctggggcacaattttttgtcaaagtcccccatctaggtcccgatccttggtccaggtcctggtcaaggttcaagtttggggcccaagtcccctatctaagtccgtatcctaggtcccggcctaggtccaagttcaggtttgggtttggatcccgagtttgggtctaagtctaggtcccagtacgtgttcaggtttgagtttgggcccaggtcccggtctaagtccaagtccctgttcgggccagggtcggggtcccgatctgtgtcccagtcaaggtctaggtgccggacaacgttgtggtctgggtttgggtctgggttcaggtcctgagtttgtgtctaggttcaggactagattatggtctgtgtctgggtcttgggttccaatctcagtatgggtatttagggttttagggtttagtgtttaggaatttagggtttaaggcttagggcttagggtttagggataagtgtaaaaagtttaggatttagggtttaaggtttacggtttagggtttaagggtacgatttaaggttcgggtgtgggtctgggtctgagtcctggtctgagtctaggtccgtgtttgggttcaggtttgagtcctggtcccgaatccaaacaccaaccacatgtcgagtctagtttgagttctggttctggtccggatttgggtccgggttaaggtccaattcccaaatttagacaccgactatgggtcgggtccaagcctcgagccttgggtcctgtccagagtccaaatctagatcctagtcttgttctagctcatgtcttgggtcctggttcgggtctcaggtctaggtttgggtctaggtttgtgtcttgggtcctgagtcttgggtttcaatccctaattcaggtcagggtgctaggtctctgtctacgttagcgtcccacccgattgcaggtcccggtccttgttcggtaccagtcattctctcgagtcatggcctggtctaagtctgggtcaaggtttggttcttaggtcccaggtccaagtatcgggtcctggtcccgttcccagttcccaatcccggtcccagtctgggttctagtcctattccaagttcaggtctcggtttttgtccaggtctgggtcccagtcctaatcttggttcgggtctgagtcccggtttcaagtaagagttctggtatgagtccgggtcttggtctaggtccaggtttcagttagtgtttgggttcgggtcttggtttgagtatgggtttgggttcctgtacgggtctggcatttggtccaggtcacgagtcacaggtcctgggtcgcaggtcttggcacaagtcttggtctgggttcgcgtcttgagctagttttgggtccaggtccaattcctgttccaaggtccttattccgattcttgttctgatttcgggtctcgggtccgagtttgggtttgggtcctggtctagaaatggttttaggttagggtcctggtacgattccaagatctagacaccgactacacgttgggtccaaccctaggtcgtgggacaagattcgcatcccaatcttgggtctcggtctcgtttcgattcggatcctgggtcctagtctgtgttcgggtctgggtctgggaccgagaccggtgttgggtcttgggtcccaatcccaatcctgggtcccgattctggttctaattttgagcttaggtccccaatttaggtctggtccttggtccaggtctgagtctccaatctcagtccgagtcctgggtctgggtcatggtccatgtctgtgtctgggttcaggttcgcatcccaagtcccgatccgagttttaatttgggtccacgtctcgatccgggtctgggtctaaggtcctagtctgatttcagttcccgaactcaaacctagactcagacttggacctaggtctagggtaccggtctaggtctaggtctgggcctgggtccgagtttaggtatgtgtcccaaatccaaacactgactacgggtcaggtccaagccccaagtccagatttggataacaatctcgggtcgtagtttagttccacttcgggtcccacgtcctagtctcggtccatgtcctaggttagggtctgggtctagtgtcaggtcttgggtctcggtccaattctgatgcccgtgtcccggtccatgtcctaggttagggtttgagtcccagttcggtttccaatctcggtctaggtcaggatctgggtttgagtcctggtccaagtttgagtctgagtcttgtgttcggatctgggtctgggtaccgaggcgcaggtcacagtcctagtcttgttcaagggtgctagttttgcagttcttgtctaggttctagtttcgtctcctgggtctgggttagggtccgcgtttgggtcctggtctgggttcgggttcgggtcctggtttgagtccctgatctggtcccggtcacctgtcctggtctagttccagttaaggtcctgggtcccaagtccgagtttgggttcaggaccgagactggggtgcggttctagatcccgaccccaattttgtgtcccgagtctggttccatgtttgggtctgagtttgggtctaggttcggcactgagtctaggtatgtgttgggatctaggtttgggtcccgattcgggtctaggccttggttggagcctggcacctggtccggttacagttctgggtctaggtttaagtccaattacggttctaggtctaagtccaagttctggttacggttccaatcccgttcccgggtcccggcctacttccgattttggttcaattttttggtcacagggtacggattcgggtccaagttttggtttaggactggttctggtctgagtcttggttcgggtcctggtcttgttctagttcgggtcctgagtcttgggccgagtcctaagtttaggattgggttcgagttcggggttgtgtcccgatagtcaagtccttattttcgggtccagggttgggtcccgtctctcgagtttggggtcgagttttggttcttcataccagttccggtgcctagtttctagtccaagtcctcaatcaagatccgaatcctttgtcaaaatttgtgtccatgttcgggtttggggcctaagtccctcatctaggtctagatcttaggtctgtctaggtcctagttcagtttcgggtttgaatctcaagtttgggtctgagtctaggtcccagtatgggttcatgtattagtttgggtctgggtccagaatgagtccaagtccctatttgggtccaggtcggggtcccaaaccggggcctagtcaaggtctaggtcacgaaccaggttttggtctgggttttggtccgggtttaggtcttgagtttgggtctaggtttgggtctggatctgggtctgggtcttggtcctgggttccaatctcggtttgggtatgggttttggcccatgtccaggtttgggtttagggtttagggtttactatttagggctttagggcttagggtttaggggtaagtgtaaagagtttagaatttagggtttaaggtttaggatttagagtttaatggtccgcttccagatccagttccaatttcgggtcacagggtacgatttaaggttcgggtgtgggtctgggtccgagtcctggtttaggtctaggtccgtgttttggttcaggtctgagtctttgtcccaaatccaaacacaaaccacatgtcgagtctagtttcgagttttggtacgggttcgagttctggtctgggtctatgtccaagcctaggtctaattaccagatttagacaccgaacatgggtcgggtccaagccttgggtcttgggtccagtcccgggtctaaatccagatcctggtccagttctagctcatgtcttgggtcctggtctgggtcttatgtccaagtttgggtataggtttgggtctaggtttgggtcttgggcctgagtcatgggtcggggtccccaattcaggttaggctcctacgtcccgatctgggttagggtccctgtccgagtgcaggtcccggtccatgttcaaaactggtccttggctcgggtcttggcctggtctgggtttatttaacggttcagttttgaggtcctgcgtttgagtatcgggtctcggtcccagtcccagtctgagttctagtcctagtccaattttaggtctcggtcctagtctgtgtctaagtctgagtcttgatctatgtcagggtctgagtccagagtttgagtctaagtttgggtacgagtccgggtctgggggtaggtctaggtcggggtttgggtctgggccaacgttttagtccgtgtctgtgtccgggtcttggtctgggtctgggtcttggtctatgttcgagttctggtaggggaatgggctctattccatg

SEQ ID NO: 223457 - DNA, 1764 bp, Cannabis indica
cgctaataatgaacgaatttttttaattttttgacttttaccgtcggttgagtaattagtgacggacatagaactgacgcaatttatttattttttgtgacattttaaaaatgacgaatatattgaatatggcactattcacgtcggtcaacgtgatgaaccgtcgtgttgactgacgtggatagtgaattttgtagtagtgatacttattaattgttataccaattgtgtcaatacgtgtattggatcttctacggtcatgaaaattttaatgtatttctttatgtagtatccacattgtttaccatcagattatttaggacatataggagttatccactggataagtctatccggctgtcttatcatttgactgtatatggtgaacgatctacacacaaagtaagttagcatatataaatataaaacacgcttacgcattgggatgttggatatagaacttacgtggaaatgatgaatttcaaatcattcggtacgtcgctattgcctgaatccaagtatgccaccgtctacatacttggttggatgagtaaaggcatctagtgaaatattttcctacacgaacaaatatgtataaaactgttaatacataataataaatattatgaagagttattataaatactaaaattatttattttaaatctatatatatcaattgttgtatggggcaataatccatttatctagattggtcatcctagtcatacgagtggctagtgcttgacaatggttacgattaatccttgcttaggtagcaattgtactaggatttaaaaattcatatactctgttcagcccattgatgtccaataatctttctttcacgcacttgataaaaagtcataattaataatcttcgttgtcaaaaaaccattatcaagtttattattaagagttagaaatcatacttgtacaacactccaatcagctgggctcctaagtattgcatggtacacaattcatgaatatcatttttaaacaagccaaatagagctatcatcaaccccaaatagatcacaagcaacctggaattggattatggatgacttcggccaccttttgatggagttccaaaaggtaatgattgagatagtttgtcgtggttggacagaacgaccatagcctgttggcttactcagtctctcagggtgttttggaggccttgttggaggatcgagtaaatctttagaggcttgtcttgctcctgaagtttcttggtgggtggttgtgtttatgtatatgaaacaaaaataataaatttagcattgtcattaatcaataaacacaataagttaagtatacaaattcaaacataccaagtatttttcaacaggtataagatagtctttcgaccaagctacgtaattttcatagctagacctactattatgaatgcatcactactacaaaaagtataattcacgtcggtttttcagtgtcacttaaagaatttacgtcgtttataaaaccgacgtatatatcgtagtcgcaaatagttttttattagcgtcatttttaaaacgacgcaaaaaataatttttgacatttataaaccgacgctaaatacttacttttctattttattttatgcgtcagttaaaaaataatgctaaatgtttcatgacattttaaaactgtcacaaaaaacttattatgtcggttcaaaaatgtcatatcaattgtcaaaatactttttttttacctattgcgtcacttataaaatgaagcacaaatgtaggt

SEQ ID NO: 223458 - DNA, 1675 bp, Cannabis indica
ggatgaccaagttttgaatgccatatgttgacgtcaaatttttgagcaagacaagacaaagattcattagttggaggtaaaaaatcattgttattatttgaagagtcattacatggatgagttactgatgtagcagtactcttattacatgaggaaaaacatgaatgtgaaatgggtacacaatcttgaatggttgcagatgaactagaacttggtgactcgggttgggatttcttggtaacaagctgacattaaagctgaactttggaaggaaaggagctgtgagccagcatgtagagaccatttttaagcctccccttaaggagcaccctccctgtgattttgtccttaacaaaacaacatttagagtgaaattctaagaaagcattattgtcagcagttaacttagagacactaatgagatttttagtaatggtagggattttaagaacattttttaaatgtaaggaggagtgagatgaagggtgagaggagttaccaatatgacttatggcaagtctttttccatttccaagagcaagagtatcagaacctgagtaggggatttcagattctaagtgttccatgccctgagcaatgtgattggttgcaccagtgtcggcataccagtcatagtcttctgtaaacttgggtaatgcagaactggagtaggcttgaggatcttcttggtcatcaatttcagcaagaaacactttggattcatttatttttggggtgacaaaagccttgtcgaatctgtagtgacagatggcgccgtgtgtcccgctttgtggcaaacttgacagagtaaccggggaatggatgggttgtttctgttgtatgcacgatcttgaggacgattcataggtggataaccacggttctggctgaaatttgggcgaaagttgtttctgttggtggatcgattgttgtgaatgctcaggtgggcagaaagattagaagtagagtcattaatggagcaatgtctttcaagcctgatttcatgggttagtagaagagattgaatagactctaaagaaaggttatccacaagacttgtgacatgaactaccacaggatcatactcagggcctaacccattgagtatgtgcatcacaagatcactgtcatcaagaggatgaccagctgtagccaaagaatcagcaagaattttaaccttatcacaatagtctgtgatggagagattacctttcctgatggtagatatctgagatttgatctgaagcaatcttgctttagattgacttgcgaatctctgttcaagggcacaccatgcttcataagatgaagtgtactgagcaagagagccaagaatggtctctgtcatagaagaacggagccagctgagtaaaagttggtctttacgtttccagatcaggaattctgggtttaaatcaccattaacaagaacacgagcaggggcaacaccagtgagcaaaatatcgtcgagaccatggccaataacagtgggaattacttgcgatttccatgcgaggaaattgtttcgatccaatcgaactgtgagggacgaattcaaagaattctgaaagggattccattgctgaaccggagttgcagcagtagcagtagcagagtgtgaagcagcggtttgagcagtaggttcagggtgccgaggatccatgaacgacgtagg

SEQ ID NO: 223459 - DNA, 1253 bp, Cannabis indica
taacaaaaagttacttgtgactataatttagtatttagatataaattatcactaattttacttttagtcaactatgactaaaaaatatttagtcacaataaattgtaatttttttaactaatatatttagccacggaccttttagttgcaatagaggtgtgataatttataattagtcacaacttttttactttaatcacaatttttttttgtgattaaaaataaatttttttgtagtattatgtgattataattaagtatatagcctagtgatttatttttgtagtacctgtatatattttaattaattaattttatctctcatgtatcacttatttgtgtaaataaggaacaggaaccaacaatacaggagcttgtgcaacttagtaagaatgaactggaaaccatgccatttttcgacaatttttgggatcaaattcaaaataatgaaaatatttcacttcgtcttgaaaatcttgtgagctcttgcaatgatagcaagatagatatggtgatatattgcattgggagcataaaacatagagaaagctcaaggttgcaactaagccttgctcttttgttgaaggaaaaagtgaattggattagtgataccatacaaatatttgatccaaatctcacttatgtagagaatcaagctttgagggatatgggttttcaagtgttggagaataatgaggaaggtgggcgaaaggttaacaaaccaacattgttctacatgcctcattgtctagtggatttgtatgtgaatctattgaaagaaaaccaagaggaaggcacattgagaaacgtagtgatattagggaatagcttcaaccactataatactataattcctagtgatgatgtcaacttcttggctcaaaaatttgctcatgaattccaaattgtgagaaacgtagtggatatattaccattagttcaagttgcctttaaacgcttaagttggatgttttgctcagtgtaaatatataattaagtggcaataaatccacacacaatatatatgagactcttaaggcaaaacacaaacaaacaaatttaaggtcaccttaattaattattgagtgtattattttcattcttcttttctgtattttatgcttaaaaacataatataatatttatggtgtgtaatttatgagaataattatgtgaaaatatatatttaattattgtttttaaaaaattatcttcaaattacgattctacctccagggtaataattcacatac

SEQ ID NO: 223460 - DNA, 1484 bp, Cannabis indica
ttttttttttttttggtgaatatataaaattagttacttccatttatttcgatagtaaagcataacaagtgaacagagattttaacattcacaagcatggccataagggaatttaaaatgcaccataggtctgcaacgcgtcttttctagactttgtaggctagtggaaaaagtatagacaaaatgagggggattatccatgttcatatggatatatggaaatttttgagaaaatttacaaacggaatgtggaggtctctagagactttagatttatcaaaggagcaactacaaccacctaggcagaattcactcttgaaataatagcagatgagaagaagatgtccaagcaataatgaactattaattaattatatacttagtttaggcatggaatataaacccagctgagagaagcactaccctgttggattaagttttccttgaattaacattgaggtaaactgtggggaggggcaccaccttgcataatagataagaaaattggttaggtttagttaagaaaaactcatgtgaatcacaccttgcataatagataagaaaatgggttaggtttagttaagaaaaactcatgtgattcacaaaagttgatatggtgttttcgaatcatcgaccttaactacaaaagcttttggctcttgcccacctttaccatggtcctagttttatggtaacatacaagctacttttgtcttctgccaaaacaacccatcacttcaacgtacaatggagaacacgaccctttccttacaattacaagcactactcttgaccgaatttcaggttattgtagaaccaacgactgtgttagccactcaacaacaacaaagtgtgcaactgttgcttgttggaagttctatcaaagggtagagcatggctccctacaaagctacttggagaactttcagagcttacaattgcacagattcttaatttccatcttagcagacaaagatgtagagttcagaatggggcaatgatagaactccacttaagcatacacatgctaggcttaagcggttaccaagaggagatggtaatgtgtctataatagattcttttcagatgaaggaagagatgagtggcaatgtgcttgttagtcttaggagtaggagggtctagaagcatatgtagctattgatatcattacccatgaagggagtaaaatagtccgtagtggttttccaggtccctcaaagtaccttgcagtttaatacttactattgatatcaatagcacatgctatcaaatttcctacactactctctattgtgatatggaaaatcaaaattgttgtatgtttagcttttctttttttttcctttttatgttttgattggtgtgcttgatgaacacttcaagctttgttttgaatggttgtaaattgtagataatacaaattgcattttttattacaaaaataatcctaggtaatagcaacatgtttgtttagttttatttag

SEQ ID NO: 223461 - DNA, 1716 bp, Cannabis indica
aagatgaacatttgtacgtagtagtgctagttactacataatcttgtaagctacctataattatcgaaaaaagtaacttctaagtggatcagtcgttctagaaactttagtgggaaagcttgggagtattggaagctcctcgaaattgatgtgagaaatcatatacataataacagagataggggttctgactgcattgttgagcctaaattttgattactagattacttgagacatattttagtatttagcttatgaaatgttctacaaattataaaaataaatgggggaaagtacccaaaatcttaaaaaaaaaaactacttttttttcggtattatagtggatggttcatgccccaagggacagctatccaaagtaccagcaggatgccctgagcgcagaaaaaacaaaaaaaaaaaaaaacgacactaatcagacaagcaagagaacctgcactcaattcaatgatacatcacccattacttcactgagattagcccaccaggcctcttttcgacatacgagacctcttttcgaaaagaggctagaaatttgttacgcagccaactttaaccgctgttacagtagctccttcacataaacctctattgcatagaaaagcttaattaaataaaaaaatattacgaaaagaaaattaaaattattatttacgtataaaaaattaactttgaacttaacttttagggtcttctatttaaagaaaacccttcaaaaataagcgtatgccattgtaagtgacgagcacacggtattctttagtaaaaggcgaaagaatagttcgctttgtgctcaacacatggctgcgtgatttttaaacattaattgccacttactatatagttactctttcacaggaatgcttatgcactttccagtgtgggatagtataacaaacgtacaatttctaacgtttaattaggacattcagattagttgagtcacttggtgttggtgaatagtgaattattcattggattaactatttcaagcttcaattggagttcttacttctatagattgtgatgattagttcttccatctatttgttaggttttagaatgaattcaaaatatagatttcttttccaaaaatgaatatgattagttgattggttatgcaatttttcctcagatacaaatgccatacatcctcaaaataagtttcaatttgtctcaggaactagagccagatatgatatgaaaagagatgaagtattttttcaaaagggcatacataggatttcgaagaaacaactctttatttgatagaatagaagaatttattaatatatattgttattataattcatcatacatattaaataaacataatttgaaatcataattttatttgtatcttatgttccggtggaaaagaaagttaattggtccattatctgcttaactaagaaggttttgatcagttcttttatctacattcatgaaaatgattttgattagataacagaagattgaatccaatcttatttgaatatgagtaacttgaatctataataataaccaatcaaattcaatatatgtgaacactataacatgtggttttcttttaaaataaatagtaaagggcacatcatgtacaatacatagaacaaacaaagttaaacaatttaaacgacattaattggacaaatgcgttccatgtttaaactggattttagagttttctataagaaa

SEQ ID NO: 223462 - DNA, 2953 bp, Cannabis indica
ttaaagacgatattaaagtcctagagtctccaataagtaatccaaactgagaaggcattaagaatgagctattaatagcttgaaccacaaccagagcatcagtttcaatcactacattggaccattgtttcctctctatccaacttaaagactcctttattccaatcgtctcagctataacagacttaaccaccccaagccgtgatgcagaaatagcttcaagaaggagaccatttgtgtcacgggccacacacccaaagccaaacttgttttgattctgaaaaatagccccatcaacatttatcttgaccatatatgagatactggcttcctccactgctcgtccacattattaatattgtcaattaataatgcacccgtaatctgagattgagcagaaatatattggtcaagcaacactctagccgatcaaactacatccatagcagaacaattttttttattccatagccgttcatttcgagcagaccaaagtctccaactaatgactgctgcctccttcaccacagcagtagacgctatcttagagagatcaaagaaccaggtattgaaatcgacattatcaacaccaacaggaacacttgaaacacaccagcaggaccttgcaaaccggcactcaatcaccacatgacgaatagtttccaatgccgagttacaaaaaggacagtacaaatcaacatttacatttttagtgccaagttgaaccttggtagagaggcatcccactagaacacgccacagaaaatgttggactttcgggggtatgtccagctgccacaaaaacttgaacaaaacttggtcattaacagcaacagtagcacgagtagcctgctgcaacaactagtaggcacttttcttagtataaaatccactattttcttcactccaatgccacttatcagtaatggcatgctcactcaactggatggataatatcaggttcttatccctatcggcaaacagatcattaagaccatcaatatcccaacttttagattgtgcagagaacaagctagagacattgtgatttaataatccaggatgatcaaacaagacatagggattaagtggatcgggaagccaaggatctaagagaatgcttacagtagacccattgccaattgacttccttgcaccagcttgaaccaaaccttgcgcttccaaaatgcttttccaaataaagcttgggttttgtcccaaggtagcagtaagaaaactacccgagggataataccgagcgttatatatcttgcttactaaagagtcttcattagtcaaaagccgccacccttgtttaccaaggaaagcaagattgtaatcccgaagatcccgaaagcccatactgccatcgttcttatgtctactcaaacttttccaactcatccaactcactcccttagaccccgattgtgattgggacttccaccaaaacttagccatcaacccttcaaggttagagcaaatctccttcgttaacaagaacacattcatggcataacaaggcaatgcctgagcaacagacttcagtaaaacctccttgccagctttcgatagaaaccgactctcccaagtgaagattttcttcttcatcttctcttgtaaaaaaccaagaatagctttcttgtttcggcccagaatacatggtaatccaagatagaagctatcatccccagcctccaccattcccatgagttgacacaaactagaccgagtgtcaacagaacaattcttgctgaaaaagactgaagacttagaataattcacctgttggcccgacgcttgctcatatatttgaagaaggtgcatcacatgtgtagcttcactcacattcactttacaatacacatagctatcattagcaaatagcatatgtgaaacctgaggagcactcctagccactttacaaccagtcaaccatctacgttgctcataaagagttaaaagcgaagaaagaccttcagcacaaaccagaaataagtacggagatatggggtccccttgacgtatcccacggcctggtacaatcggtcccataatctttccaccataagtaacattatatctcatagtcgacacacaatacattatgagagcaacaaatctcgagttgaaccccatttgaaccaacatagcctcaagaaaagcccaactaaccctatcataagctttgctcatgtcaagcttaactgccataaaaccatcttttcccattcttttccgtttcatgtaatgcataacctcataagagatcataatattgtcggaaattaaacgacccggcaaaaacgcactttgattagtagagataactgatggcaaaacagacttcatcctattggtaattactttagaaacgaccttgtaaagaacattacaaagcgatataggccgaagatcacccattcgctcaggaattttcttttttggaacaagaacaatattagtttcattcaaaacagaaggaaactcaccagtagcaaagaaaacttgaaccagccgcaccacatcatcacttaccaagtgccaaaatttttgatagaagcctgaagtcattctatcgggaccgttatcgggatgcatttgaaacaaagctttcttgatttccatacgggtaacttcctcaagcaacaaagaattttggtcttcagtgaccaaatgagggacgcaattaatgacagaagaaaaatcagtagctgaatcatgaaacaaatgctgaaagtaatttaccacagtatcaggaagtccggtttcccagcccacccactctccagtagtatttttcaggcgctggatcacgttggaccgtcttctagatgttgctttggcatgaaaatgttttgaattacgatcaccctcccgcaaccataattgtttgctcctctgcttccagaaaatctccctttgcaagtaaagattatttagttgaagttca

SEQ ID NO: 223463 - DNA, 1756 bp, Cannabis indica
agattagtgagaattaatcaattattattaattggcaaaacaaaaaaatgtggcaaaattaagaaatcaattttagatcttaaaatatggcccacacgtatagggtgacatataaagacccataattaatttagtttaattgttttattggataaaataatttaaattaaattaagttaattatcttttatttattaattaaatattttattaaataattatttaattgaatgagtaattatctaaataaaagatctactgatattttgatatttgattattagatatttatgtttgaatttaaattttgaattcaaattaaattaaatattcatcttttatttaaaataaaagattaaagactttatttataacactatatataatacatagtatcataaataaatagactttccttcgagccacagaatagagacagataacaaattgaaaagaaagaaaataagattgatattttctcactcatctctctctgctcacacgtgtgtgagatctaaaccctaatctcattataatttctcatgagttgagtacacactgtaatacataaatatgttcatcctataaaatctaatagcccactctattcttgagtgttgaggctgacttggaagatcaaggtgtggattcttcaatcaagttctggattggatgttggattgtttatacgaaaagaatcaaggataccctgataggtatcaagaggtaattgaatttctttcagtagattagatttaatctatattcattatgttgagatccttcaacttatggttcatattagataaaaattattttattaaaattttgcttccacttttataactctgatatggaccataaaattaataattggtatcagagcaatcttcataatgatataaattaaatactgtgttgggtgattatgcatttatatatatataatgatatattgtgaatggatggaattaagttttttatgcacaaatgtgaatagttaattatatggtaaatttaggtcaggaaatttacagttttactaaaaaaattgtacactatatttgtggcataggttgtgatgtaatttttattttaaatttatttgtaaatttttgtcaaaaattgtaatatcaaaaatccacaatacctccattgatgagtgcgctcgggtttaaggagagtaaaccgcaacctcattgagatgatgagttttgaacctcgaatgatgagccacaaacccttaagggttataactgcaggacatgaggctcaaaacggttgaaacacgtggttttgacgtgtgcatgtgacccatgcaacccatgcacgtggacaaaaagaggagaaactgaacttgggttcgggttgaaccaaagcccaccaaagggacccaaaaattttgtggctggagtaggtggtgttgactggccttgaagggcctaaggtcgatgtcaacgagcagtaaggaggaccatggtggtccttggccattgaagctccttggagaagcagtcgggtccttcgactcgttgcagccacgaacggagctcgattttgtgagctcctccaccacaactggtgaaccaccgacctcttccttccctagttgaccaaggtggccgacgaccaccagccctgccaccaccattaacagccaaaagatcagccccattcgtatatatatatatatatgtatatacatgtatatatattattttatttattttaataattagattattaattagaaaaa

SEQ ID NO: 223464 - DNA, 1879 bp, Cannabis indica
cgagcttttcaacattataaagaacatcccaaacggagtcccaagtcaaaagttatggcaaaaacaaaaactcaaaaaaattaataaactgccattaccatggtcacgaccagacctatgataatcgcgaccactaggtttaaaaacccagaaaactcagttctcagcaacaaaaattatgcccaaaacaaatccaaacccaaaccaaaacttagaaccatcacataggctttcaatcattaaacagagagtctaaaacaccatttcatgcattaaacatcaacaaaaactctctaaattcagattgcacaaaataaaaatcatgctcaacacacaactcttcaagcttaaagacttgagctttaaatcctttaatccccaacattttccagtagcataattaacaagtagagaccaaactcaagcattaaaaacatcctaggattatatccatagttcaaccaaatccaaaacatcatacaatcaaagattcatgcttgaatcaactaaaggtcactaacatgcaacacaacttcatcatcttcaacaaactcaagcttttcaagtaaaaattcagcaacaaaaattaaaataaaaagctgtaaaaactacctcaacttccaattccaagctatgcacaattaacccccaagattcaagctccaaccaagcaatttcttccaaaaatcaaagagaaaataagagaggggttgagggagagagggggtcggctaagaggggatccaaagccaaaatatcctttttcatttccttaaaattcaagttttatcaaagtaactcaataaaggtcaaaagaccattttgcccctagggctaaaaatacacactcacacacatataagggtatttaagtcatttcacacataaataaacccaattaaaatttcagattattcaccattaaataaaaatgtcaattatttcaatccaaattgcaatgcgagcccgaacccggttcaacccgaaatacccgattgtgactataccgcgccaacctatcagaacacacctgaaaaagacaacacaggtataatatataataatatagttgcataagcacgttaaataattaatttcactgttttacccttctcgggtcaaaattactaaaatgcccctggctcaccaacataaatcatataaattctcatatattaaattatataataatataatttcctcaattatacataattatctagttagggttttgcgaatccatttcttaactctatggtattacactagtgatttggtgcctatagatttcaccaagaaacagaaatatgatagaggactgaatgccacaatcagtcgggacttgaagattaccactacccatgaaactttgtataagaaagtggtagagcaagccttaattgctgaggaggctgagctacatgtaacaaaggagcagactgcaaaggatgccgccacgacatcgaatcctcctgctagtggtaatgtcagtaagggaaccgacggtggtaaccctgatcacaaatggaaggctgatgcttccgaaacatcagggagtaacaaaaagtttcgagggaacagaggtggtagtcagggccgcaaatcttcattctgatcttatccttagtgtccaaaatgcaagaaacaccatcatggtgaatgtcgggccaagacttgtttctagtgtggcaaggtgggccacttcatccgagattatcctcatgtcaagaaagaggagcctaagagaatctaactcaaaacccgggacaaatttttaccatgactcaagctgacgcagatgctagtctgtcagtggtgatggtcaattatctataaattgttgttcctatactgcattgtttgactcgggagctaccca

SEQ ID NO: 223465 - DNA, 1203 bp, Cannabis indica
cctctccgattactactccaacttctaggcttggtgattttgatgaatctcatttatccgatcactctttatcgaagtcttcttcttggaatggtgctccaaatgtcgagaaagtaatagttcccttgcccacagtgagttctcgagcaaggtccaaggtatccacagcacaaaaacccgaagtggttttgccccaaagtgtctccaaagggaaaaatgtggtgtctttatcttcaaaggccaaaagtctcaaagaaaatcccccttccaactcatcattgaattctgaacctgaagaagaaactgaggaggataaagattcagacggtttgtctgattcaagtgaacacaaccctctgctgaagattctaggtctgaaagtgaagtacctgaaactgaagctgttagtgcagaaccagttgttgtccctactgcagttccaaagaaggacaaaggaaaacgaaccattgtcactccaagccctattcttccttaaaaaagaaagaggccctctggttttactcttgaaaacttcaagccttattctcattatttttgttacaatgataatgctagagacatgaaattttatgagaattgaaattttactattaagaaaaatttcaatgtcattactcataagccatttgaggtttataacatattaaaagaaagacaatgagtggatactttgatcggttttgatggctatgtggatcgaattgtgaaggaattttatgctaacatcactgatgagtgcctcaatgaggactcttttatgtttggcaaagtatttgtcaggggacaatggtattcctttactgtgaaggatgtggctgaaactctaattatgcctatgggaatggagacaactaatgtgaaatttgatcgtcaaaaggtgtttgggtatctcacttgtgataatgatgtggaactctctgacacaatgcatatgtctcaactcacctatcaccatgctgctctcatgaggtttgccctatccaattggtttctttgctccaatccgataaatgtgtcaaagaacttgttctttttgtataaagtttctattggtgctaaaattgatttggccgatatgatttgggagaaaattgtttctcttagaaagggcaagaaacctagactcaaccttacttatcttctttcctcatttgatctataagtttttttttgtctgaccaa

SEQ ID NO: 223466 - DNA, 1073 bp, Cannabis indica
tatggggatcccctgcgaataaagttctttttcaattaatttacaatacatctattacaaaattaaggttacatttctaaatatagaaaaaggagtcaatcctgcttcccggaagccaagataccacgactgatatgtacactgctggatgacctctggctcatggctgaacatggctgaacacatttgcttttcttcttacctgcaccacaaagcatccgtgagtcatagtgactcaagaagaaaagctactagataaagaaaatcgtggaaagtgatagcagatttcattacaacagattatacataccaataagtcatactctttcaacgtgcatatgcaattcaacatctatacgagcaaacttattacaaaattaaaagtatttatagctatacataatcaacaacctcggtgtttcataaaacaccctaatcatacattgttataaacacttactttcaatgcttcataaaacactttagttcactcattaatacatccacataatttcagtgcttcataaaagactctaatcacacatcaatataaacatatattcttacatctctatgccactgagactacaagaaaagtgatcaatttcataagtaatataacattcattcaatcatattataataaaaatatactcaattacaacttaacacataataaaactcttgatcaatttcacaacatcgtaactacataattttggtacttcataaagtacccctaccactcgttaagcacgagttacatatgtcactattgttgcccgatacagcaaacgataagtaagaaaccaatttgcggtttcaggagtaattactcataacggtaatgaccgtttcttttactcgatcataatcgagtcacaacgataataatcgtttcatatcatttccctcgatcataatcaagtcataatgatgataattgtttcctattgtttccctcgattataatcgagtcattacgatgataatcgtttgttattatttctctcgattataatcgagtcatacaaatacatatcattaacttcaattaagattaagtcacaata

SEQ ID NO: 223467 - DNA, 1127 bp, Cannabis indica
ttatttatttagaaatgattattattttttttttttgaacataaatttagaaatgaattatatgtgtatttttataggagtgttcaagatgcctcccaaacgattgttatctcattataagctggatattcaaaggaataggctccttaccgtgtcatgcaatgcagaagatatgctacttccccgcagtaattttacattttatggtaaaataatacatagattaatttataataatgttctaacagttaaagctgatgagttttatcgttttaaaaaaaggcaatactaatcataatgcaacatttaatttttcatcttgcagaattcgactcaaatttcaaattgttgcataagaaagagtttcacatatctgagcacttaatgattcacgattgggcttttaccgacagttactacataatatttgccaacagaatcaaacttaatgttcttggtgattaaacaactttaatttttatttcattttattttatgatctgttttatgtaatttatgaaaaatatgtatatataatattggacaggtgcaataacagcagtaagtggggttagtccaatgatagaggcattatcagtaaatccagacaaaaccaaaacgccaatttacttgcttcctcgatttcctgaggaaaataaaataaaacgtgattggagagtgccactggaagcaaattcacagttgtggttactccatgttggcaatgcttatcaaactttggaggacaacgggaataagatcaatatccaaatacatgcttctgcttgttcttatcagtggttcaatttccgcaaactatttggtaattaaattataatatatgtatatatgtgtgaaatttattgtaattaatttaattaatttattgggaaggtctatcttataggttatgattggcataatggtaaattagatccttcaattatgaacttaaatcatggcaaaaatgacaccttgcctcacctacttcaggtttgtatttttctctcttgacttggtgtatgtctgaataaattagcactcataatttataccaaccattcattcataaccttggcgaaagattgagtaatttttaaccatgttgcataattaagttgacacat

SEQ ID NO: 223468 - DNA, 1437 bp, Cannabis indica
acaagtgatccctttctagggatccccccaaaaaatactatatgtaccctatagacagaatggaaatggagtcgatcgattaattaaggaatcgaaagaagtaaagaagagagagagagagagcgattcaccaagaacattctctgtaaaaacactctcataaataacaaagacttgtggactaagactcattaatgccccaaccacgtaaaaatcacctacattaaactttctacagctcttctcattctactacttaatttcttgccgaaaacctcggtcaacaacttctaataacctttctacattgtttccaatgagtagaatgtcgtcaacataaagaaataggaatactactacattacctttaatgtatttgtatccacaggtttcatcttcgttttgttcgaatccatactctttaatagtcttattaaaggtgatattctaagatctaaaggcttgcttcaatctataaatggatttagggagcttgcatacctttcaatcttcccttggtagcacatacccttctggctgtcccacataaataatttcgtcaagatttctatttagaaaagcagtcttgacatccatttgctatatctcataatcataagtggtagctatggaaagaagaatgaaaatggatttaagcatcaccacaggagagaaggttttgtcatagacgacgccttcttatagtgtgtattctttggctaaaagcctagctttaaaggtctctaccttcccttcaacatttctattcttcttaaaatatgggtgtaaaatatgggtgtcgtcgttgcagattatgttattttaatggtgaaccagtgaaccctggatctttatgcccgtattgcaagtctcaccgacacaataaagacttttatatttttatgttatgattgtttagtggtcagttttaatgtttgtttagtctttacttatgtttaaaaaattttacttggttcctgtcaattgtttaaaagttttcatttttttgtcttaaaatcgacaatatatcgacatattgtcgtcaaacagaagtcgactaaatgttgacataatatcgacaaactgttgatacattgccaaataaataaaattatttaaataactttttcgacaatggtcattcctgaccttccttcacatattatcgacattgcatcgatattctatcgacaaacgattgataacctctggaaatcccagattctgacaaaaaattagatctatcagatctaccatttcaaaccaaaaaataccagtttcaacaaataccacatatataacgaaaggaaattacatattattactaatgtctaacaaaatacttaaaatacaacttacccattataatggtgaatgattcttgagtgattggggggtgttgtctggttttccaccacctagagagagagagagaga

SEQ ID NO: 223469 - DNA, 2320 bp, Cannabis indica
ggtaacgtgcctaatagtgagggcattacaccatgtatagtatatatttcgttaaatctatgtggttgttgtttgtttgtttgcttttgatataaattttacagaaatcgtgagatctcgttatttagagtattttgtctgttcgtatttttctcgatgggttctcgacacgttctcgatgggttcttgacaccattgtctcaatgttagggatgatctttctcgactggttcttgatacgttctcgataggttctcggcacggatgtcccaaggtgagggatgacctttctcgaggggttattctgaaaatttggtcagtttggaatggtggtgatggtattttctaattcaatggtgttggttgggaaaaataaaaacgatttatgttcttgattatttatcgacggactcttgatagattatcgacatgttttggtgggggtcattaagtttagatattatcgatgtgttatcgatatgttatcgacatgtttttgatagctgagacattgaaaaaattgtaatttttttcattgattctcatttaaatgtcgattgattatcgacgagttgtcgataagatttagcttttggtgatagtcattaagtttagctattattaaagggttgtcgatatgttatcgatatgttatcgatagttgaagcattgccaaaaaaattataattttgttatttttattgattattgtttgaatatcgattaattattgacgagttgttgatagattatcgattaagatttagcttttggttcttgacatgttaaagtctgcgttatcgatatgttcttgacaagttctcgatagttgaagcattacaaccgaattgtaattttgtttttttttatttattatcccttgaatatcaattgattatcgatgggttgtcgacagaatcttgacagattataacacaataaaagtggtctaatttttggtgcgtaatgtaatattataagattaaaacataaaaatagttgagtaagaacaatagatctaatatataatataatttgttggtatctcgtaacattacttttttatttatatattaaaaattatcacttgcatgttaaacaaacaatagtgttagttaagttatattattacaattaatagtataatttttttttttggttaatgacaactataacaaactctttttgttacataaaagatttgtcaatataaatagcacatatatgtatatgtcaaatgaggatgatgatgaaactttaagaattactctattgctagaattaatataattatgtacttcaataaaattgtaaaaaaataaagcaaatatcaatgaaagtatagaataaactatccatttgatgaccttcaaatcagctttgactcaacgataattaaaatttttgtaccattacctgcccatttaaaagattaatttagttcaatatgaagcaaaagtatactaactaattaaaaaaaagtttaatggataaatcattaaatataaaatgtaacagaagaataaggtagaaagggaaacacaagtgttgacctcgcttttagataacgataatgagtcaattcaagtgattagaaataataagtaatgacaataataattaaacaaataaaacacataaattgtgagaaaaaaactaagaagttcttaatctatctcgaaagctcttacaatagtttttgcaatttaagtgctctggaaatattgattttggatcccataatagtgaaatgatttcactatttataggtaatgattacatcagttaggtttcccaaaactaataagaattaaaataggaaacttaagtactttccttaaacaaataaagtaaaaaataaaactaagtagggttcctcttattttcttgtcaatgcaaatttgtttcataaaatagggatattatcgtgacctgaatacttgaagatttatagaaagtatctctgaagaaccttttaagaacatatcgataacctgtcgagaaaggtcttcctgaccttgggacatctgtgtcgagaacctatcgagaatgtatcaagaaccagtctagaaagatcatcctaaccttgagacaatagtgtcaagaacccatcgagaacgtgttaagaacccatcgagaaaaatatgaagagacaaaatactccaaacaacgagatctcacgatttctacaaatttatatcaaaactaaaaaaaaagcaaacaaacaaacaacaaccacataaatctaacaaaaatatactatacatggggtaaggaagtttacaaaacactttcaaacaaaatattttacaaaacactt

SEQ ID NO: 223470 - DNA, 978 bp, Cannabis indica
ttaaaaaatatattttaaaattacaattttttttaattttttttcttcttcgtcttcttcctccaaccacagtccgacctccacccacccaatcccaactacatttactccagcgagctcttaacggagactgaacaacgagctcttaacggtgactcaacggctagggccatagtggccttgactccaaataatgtcaatgaggtcattagtggcctccatttttgatgacgaggctttgtcggtggcagagagagagataagaaaatggttaactaattaattagaactaggtgtctctctgtagttgggaatttactctttgtttgcaagttgttatccgtatttatggacaggtcacacgtggcataaaaggggagagatagtctcataatctcactagttaaaattcctcaataaaaccaagtcacggagaagcttcgctaattcgggagtaggtcaagaccgagagatacgcggaggtccatctcacctcactcctgctccccagacacggaagacttattaccactctaagactcgaagtggtctaatctcaaagactaccctaatgatacccaaacaggtattcaaaggacctatcgcagacgttgatcgcccaaaagagttgcgaacgtctaccttggatgcaaaccttgatcacccaacgatggttatgctatttttgatacaggatctgatcctttcccctgtgccaagacatggtagtacgcgcacttcacacaccttttttgccagatagtcatttcaggcatttacttttcaaggttaagccttttggcgacacacgtccattacgtacaacggtcccctattatctagctattgctacgcacgagcacaaatccttccaagaggcccaacagcagggcggctctgaaatttagtgggccatagggaaaaaatatttttgggccctcatttagaaaaaaatatggtatttttcaaaattgataa

SEQ ID NO: 223471 - DNA, 1144 bp, Cannabis indica
ttagatatggatattggatatggaatgtattttggaaatatttttagttttcacttttatcatgatttatgaacatgaatatgaactttgatttgattttatgaacaggttgtttgttggttggtttggattgattaatgcatcttttcttcaatagtatataaacaaattgttatatttatatatgcttaatttaataaataaataaataaaaattaattttttttaaagagttgaccaagttgactgagttgaccgcgtcaacccgccaacccagtaaacccgaccaacccaaaccggccaactcgtgacccgccaacccgctaaaccaccaaattgtgccctattcgggtccgagtttgggtttatttttttaaacccgaaactcgccaacccgaaactcaataaactcgcccgatgttcagccctaatacttagacttgttcattcattttcccaaaacatctgcaaccaagtttcccatattggagcaaagagactgagaagagagagggtcgatccctataaatctggcttctttacttcacataatttaagttgtccttacttcttatttatcatgaaacttgtattgtccttgtgctgcaatggctactttattaaatttaaatgccttatgttttttctttgacaatgattgcctttttcattttatagtagagtggactctgttttggctcagttaaacttgtaagtttgtaggggatgatgataggtagttcttattttgaagttatattgtatagtgctgaggttaatctcattttttgcattgaaactgctagacaaattttactttgttaatgcttttaaagagaagataaattctctgctttgaatatatgtctaaccctttctctatatgtatgtatatatgagtgtgcatgtgtatgtatcatagcaaaagcatgatggaaaagagattaaaattaatgttggtaatagagtcactcacacatttgttttattgatcaacataatgtgattaatctagaataatagcttcagttgtgtttaacctagaataatggcttttaaagagaagacaaattctctgatttgaatatatgtctaaacctttcttttgttattaattaactaggaagcggcggagcttgttaca

SEQ ID NO: 223472 - DNA, 3963 bp, Cannabis indica
aaccttatcccatagggatatctggctgagaatggttccaagttaactttgatggcgagcagttacttgtcatctgatttcccgagtctaatattgttctaactctgataactatattttctggtgttgagatgatctccctcgcatgcacgccatcttctagctagataaacgcctcgctgtctgttatcttgacttaccaaactatctacacttagtttgtatatcgtgtaatatatgctaagtgtttttagtgttatcgtttttcttccacgcagcgaggttgaggcctcgtcatgcaaacgtgcacccacatggtttctcgtaaatacataagttagcagtttgtacgtttctatctcacagaaggctattcagccagccgagttataaacatactctacgaattatgtttccaacgtgttgttccatgctaaatatactttcgtttgtgtgattaagttcttcgtccttcctatctcgacacgtatcttcctctgatgtgcttaccaaatttcgggtataacaatagccccttaaaaagttcttttttaattaaaaagagcttttaaattattacaaagggtatttccgtcatttttttcttttttgaaaagatgcatatcctcttattttggcagttgtgcggttttgaagtacatcagaattaaatgaccctcttttccacttccgctttcaatcatatccataggatcaaatctttctttgatctaacaaagccactgtcatgggtataaagtaagaaaaaaggaaccacctttccaccattttctccatttcaaaaagtttgagaaaaacccttaaacttctccgtcaaggattatcaataaatttttccgaagacttgcatgccatccttgtccttgacctttttccagggagtctcttccgacttcatcctctcaaagcgatccatgcttcattcgaagatttgtagaagaaactatgaggcactgccccaagccctaacttcaaacattaagttactttcttttatctcatgtttgttacattgtgtggatcagttacttgatttgtttgtatcgttatcatctcatctggtttggtagttttttagggtttaaactgttcatactagggtttaggcactatataggttgttttaagatctccaatcattaccttttggtttgataacaagggattgggactgctttttgctgcagcaatgtcccactctggttcatgaatttatcgtccagaagttttagagttggagttccctacagaatcagccatcccatataaacacaacccttcaaaacccacctccaaattagagttaaacgatgctagggttagggaacacatagtgagaacccaataggaggatattgctagtcgttacaggcgtttcttgcatgaaatctctgaaggcaaatgccaattcttgcgagaagcagcctgggcggaacctcccagtgtgtcctttattcttgtggcaaagcctttatttttgcccaacgtcacgattgctattaaaccaagtgacttgcatttttaaattatgcctcccaagccatgtacatcaaagactccttaggaccccactgttaccttcaaggctgagctgattgaatcaaaggtgtgatccatctcgagttatacaggcgagatgctgaatgcttgtgggattgaacttgggcagtcatgccaagtcaaatcaatacgagagggtgagtttagttcctaccccctgcgtgtcttgcaagcagtaacccggggaccagtggtgagactagtactggtggttcaaccagtattggcgcttggagccttgagcatatcagtgcaggggccacccttcctctccgggactacttcaaagactatataaaccacattggagtttccccatttcagctgactcccatctcctacaagattctcgctagtttgaaagtgttgtgcaaaattctgaattgggggtgccccactacaatggagattgagtatctttacatcagtcttcctttttcaagttttttttactaatgttttgtgtgttctgacagctcttttaatgagacctacccctacccctgagatggttggtaggcataggcatctgttaacttttccctacggtcttcgatcatgcaactttcttttgagcgaagttaacttacgatcggtgggccttcttactgataaagaatatacttatgactacaagattcctaagtattcttcttggcaactgattattattctgcctgaggatcaggcttgggatcgcttggctcaggcacaataccttcaaagtactgcccctcgggaatccggtgaaggagcatcccgaggtaatcaatgtggttggtcacctactgtacttaaagttgagcgtagtacattagtcacctttaaagactcccaccttaattttttatatttggaattctcttctcgtagaccgtattgctcataagtttgacagctggtatcctagattccacgtccaagttaactgtcacgagtcattttatggtataggcaaacaatatgaaactatggaagatagggcaggtaacatagatgcgagctgggatttagaaccaatcgagccttttgatacattcaaaattacaggctgtagggattttagcgaatattacggtccttctaccccttcatctagtgatagctcgccttctagtgattttagtaaatcccttaggtggaaaattatactcctcccctttttaatcggcctttataatgattataacacctcgtcttatattgaagacatggtttatgaagacatcacggaccgtaaggggaagaaaaggacatccaaccctggaatccctactgctaccgaagtggttcctccaaagaggcaaaggaaaactaccgcccataagaagaaatcactagccgagcctatcgatcttgaggtttcggacaatgtgattcaagagcaaattcctcttccactctttcccgatgccaatactcctcgtcccgaggcgaccccgagccaggccattgagaccctgtcgatcgcagcaggggaagccgggtctaaatttgcccaggcatatggagtcgcctgttggcgtaaacttcaaactcttcttccccctgatggcgattttctcaatcttaggagtccaaaagagatgctttcaacgagcttggactgtcacttcatggtacgttggctttgttattataattatattattcttctttttcttacacctctttcatattcatctatttacagttctctaggcttcttttgcttccaaccgactactctctgagcggcttgagtacttagagggcgaggtccacaagttactatcacaatgtaaggttgtgagtaagcacctagaagactcccaacaagataatacccgcctcaagcgagaagccgagaaaccaaaggaggaagctgagaaggcaaaagaggaagctgagaaggcgaaagggggagcagagaaggtgaaagaggaggccaagaaggcaaaagaagaggccgagaagaccatcaaagcccaagcagaagagtttgagaagaagcatgctaaaaaacttgttgagaaagaagtcgagaccgtagaacggtgcaataaggttggttttcgcactgtatattgggcctggctttggaaccctaatatggataccagcttcttggaggagcaagaggaggaaacttttgcactttgcgagaagaccaagatggaggaaaaaatggcgaggtcgaggaagaagaagaagaagacatgtcaaagtctcccaacatgtagacttggtttttatttatcttccttttctcttttagaaaatggccctttggccgagacaatgatttgcccctagcggcacttttttgtaaagacagatttgtaaggttggatggccagctttgctttttaatgcttcacacttttaaatttaaactttaat

SEQ ID NO: 223473 - DNA, 1211 bp, Cannabis indica
taaaccttatgtttattctagacctcttacgataattttctcagataaaattaaggtgcacacaaatatgagaaaatatcgaaattagagtttcatttaataagtttagttgtacaaccaataaactgtataaggggtaactgaatcccatatttactttacgatccttgaatttgtgttacggcatgcatttagtcaaggatatacgataatcaaattcagtttgcatacttaatgaccacttatcacgtctctttatgactaaacactaaatatcgatatgctagcttcgaccaataatcttatagttcttcgctataattattgtagttgaatttttcgcaaaattttcttaatggcctaaaatataattctgaactctaggcctactatgaaactctataataaatcatacgaggtgtatccttaaaataatgaataaatctgaattctatagtagaaataataattaaggttctccacaatacaacttactgacaatcttaaggacgtaatcaaatgttgatttacgtaaatcaatcatagctagtgaagtacgttggaatctaattggttaactttatttctagaatgccagctcatctcaaaaatatatgtatgaatataatatttaatatcttaaagatacctcatcactttgaatgaaaaataaagtggtcttaacttcagtattctaatactacttaacgatcctgaaacaaatgcaatgtaaagtcttattccgactcttaagcatacataggcttctaaaaatagaagcaaatggatgttcttaaattatatattgccattccagatcattttactaatgctggtttgagttaaatttattacacttaaagttaaaagtaacatgagataaataatacataattttaattaatcagagattttgtggctactctcaaattaattaaaattatatatatcatttatattttttttatgtcaaaataataatttgagatatgaattatttcaccttatactcttttcaaaattaaaagaaaagatgagaagataaaataccgattgtgagaaattgttttaatctactggtaggctctttatagcttgcatatgttcaccactattaaaggaaaatctttttggttattagtataccttctcctctagtttattatttcataattgatgaatgaattgaaacgagcaacaaatgccaaggt

SEQ ID NO: 223474 - DNA, 1386 bp, Cannabis indica
ggtaagaaaagcgaagctggaggacagtgagatagagctcggcagagattatacatatcgcggcgagtgcaaccggaggttttgatcttcaatattaagatgtattttgagttgcgaggttatggttataaaaaaaatctcttagagtggttttgtatcccggactttgttattaaaataattatgatatatattaaagttagtttgtaaatttagtatttcaaataccggcattacaagaatggtcccataaaatcaattcttcaaacatcaaagatttcaataataagaataggattttgtggcatttgatctctggctattatgttgcccactcgttgacaccgatcacaagctttacagtaggcatataaatctttaaagatggtgggccaatagaatccactgtcaaatatcttcatggctgttctgttttgtccaaaatgacccccacaagcatgtgcatgacaggaagcaatgatagaccggatgtcagaatcaggaggacatcttcagatactttggtctacacaatgcttccaaagataaggttcatcccatatgtaatgacgagcctcgctctcaagtttattttgctgcgctggtgtgaaatcacttggaaaaacttttgaagtaaggtagttgacaatatcggcatactaagaaatcatctcttgagggctaggagttgctcattgtgaaatctttcttctatgactgagttaatgagacgactcaaatgatccaccaccagattctcagaacccttcttatccttaatctccaaatcaaactcttgaagtattaggatccatcgaatcaagtgaggcttagcttctttctttgccagtagataccgaagagttacatgattcgtatagacaatgactttagttccaatcaagtaggaccgaaatttcaccagatcaaaaatcattgccaaaagttctttctcggtggtagaatagttgagttgtgcatcattgaaagtccaggaagcatagtaaatcacatgaggcagcttatcaactcattgtcgaagaacaacccccatagcatagtcacttgcatcacacataagttcaaatggaagctcctagttggatggttgaataataggagatgaagtcaaagattcttttgaaaagttgaaatccaccaagcaattctcattgaaaatcaaacttgacatccttttgaagaggatggcacaatggtgtagaaatctttgatgaatctcctacaaaagcctgtatgcccaagaaacaatctgactacttttgttgttgttagtggaggtagggagcgaataaattaatcttagccttgcctaactttattctttctcttaaatcacatgtcctattactatgctttgatttacca

SEQ ID NO: 223475 - DNA, 1781 bp, Cannabis indica
attttcataacattaattgactctttttgtcagacaaatagaaaataaacaaagctcttaatatttttgaattcttttcttcttcctcttgaaaaattcgagccttatagtgaatgagttattgcctacacaattcaaggcaatactcaagatagtgtggacaattgtgtagtcttttgtcacctaaaggacaaaccaagttcacatcttgattatactctacaacaaaaaagatcaagaattatagttatgaacgaaatgagtcatattattctactgccattaatgtaaagttttctataactttatgtgttcaattcattgtttttgagaaattcacatttagaatgttagattattgaattataatccaacatacatgttaataaatttaaattctggtaaaatattttcaacatttatctccattaatgattttaaatttctttttgaaggagctcaacaaaatcattatctaacttctttcttcctttcttttttttggaaacagatttcaacctcattttttatgcttgagagtgtgtaaatgtaactttttctacagagggagatggagaaaaggaagaacgaattatcgccattaaaatagataattgtagaaaaaaaaaacttaacaaaaatgtggataggacaacagttgaagatcgtgggtttcatgtttttcagagaaacatcttcttcaaagatcgtaagtttcatgtttttttagaaaaacatcttattcaaatcgtgtagaagtagggttgagcataaaatctaaaaaattaaaaaaaccattcaaaccgaccaaccgaacaccgttggaatcgaaatcgatggaaccgaaaactgaaaaaaccgctaacgcttaaaatcgccattaaacggtcagttttttttataataaaccgaccgaaaaaatcgaaaccgaccattatacatatatattaatttattaacttttttttgctttatattgtagtttttaataatatataacaatatataattttttttttatgtattattttattaatattaaagttaaaagaataagataattagtttttgaataattaatttgtatgtttgtaattgtaaaatgtagaataatagaataaattggatcatattttaaagaaaaaaagaagttcggtttgggcggtttaaaccgaccaagccgaggttcaaaatggttggttttaagataggttctagatttgtcggtcggttttcggattgtaccgatccagaccgaaaatcgaattctgtatttttatataaaaaaaaaccgaccgatgctcacccctatgtagaagtttaaatatgtaaataaaaataaaaataaaaaattgatataggatgcaaaaattgaatatgaaagagagagaaattagttgagtgatatgtaagaataatgacatcatcatcaatggacattgtgtgtgcaagtggtattttaataaataaaaataaagaaaaggaaaatttgttgcccaacttttctggaggtatttttgtaaataaaatgaccatttgtatttttcatgtaaaaatttctttaaaataactttaaaaaaaattataatcatgataatgaataatttaaaaaatcaatttaagaatattaatacataaattgaccatatttataggacaaaatatcgacttatcagctataatatcctcaaatttcaatttgactattaaattattattttattttcatttatgttgttctttttagttttatagtaaatgctgttggaaatattttatca

SEQ ID NO: 223476 - DNA, 2307 bp, Cannabis indica
tcacctccccagtcagtttggaggcattttaatttgactcccaattgcaactctgcttcagctttaaagtttagaaaaactttaacagcatcaaacttgttctttaacatgtaaatccaagtaaacctagattaaacatcaatgaaatgcacataatatttgtatccattgaaagataaattgtgtgcaggaccccataagtccgagacaactagctgaagtggtgctgtgtaaatggttagggatgcttttggaaaaggcaacttatgaattttgccaagacaacaagcagcacaaacagtatgagaagttttattaatggacagattacaggcattgagaacctgttttacaacttgttcagatgggtgtcctaatctattgtgccagatatcaaagtcagatagcttggcattattacagttggtacagtaggtattatttggatctacatgtgtagaagactgtgaagacactaaattggtagacttttgatgctgaaatgaagtggaatgagatgactggtttaactgttgaggtgatgacagtagctggagatcattggagtcaaatgaatataggccattcctgtatctccccataagcaaagttgctagactcacctggtccttaacaaagcaaaggtcaggatgaaattcaaaaaacacacagttatctctagcaaactttgaaacactgaccaaatttttggttagttcaggaacatgaagtaagtttttgagtagtaatggtttagaaggtaatgtgtttgatgaaatataagtatgaccaatgtgtgcaataggcaaacctgttccatcaccaatatacatgcgatctggcccctcataatcactgctgttgagtacattctgagcttctggtgtgcaatgattagtggcacccgaatctggataccagttggggtcatgtgcacgatctgaggcagtgagatgggtttgagcattgggaatagaagtagaggtggatgcagacccagtctgttgtggggaaaatgttttatcaaacctgtaatagcaatcctgagctatatgaccaaggcgaaagcatatttggcattgaggtttgtttgcggaagcatgaaattttccacctcgaactgagttggaatttgaacctcctctaaagttggtactgcctcggccataagaaggaacttgattttgagattgtcctctgttgaagacactactagatccaccactgaagttgcttctcgagccaaaattaccataactattgccaggattgttatagtaattttggttagagtttccctgcattgatggcctgaaatttctgttgttgttggcatagtgagcttcaagtacaggatcagattcgttcattgagacataagctgagagatcaagatctgatttctcgattcgtgattcagacgcaagaaacaaagattcaatctctgcaactgagtaaccttcaagatgagtgttagtagagatcacaaatgtgtcatattcacttggaaggcctttgaatatggcagctatgtgatctcgatcagttaatacttcaccaactgaagctaacagatcaactgtttgtttcactctgagaaggtactcattcaaagaaagatggcctttcttgagattttgaagtttagttatgaattcaagaattttagcagataccttaagtgtgaagtacttttcgagtgttttccagatctgccttgaggtttcacatccaaccattcttgttagaagactttcggacatggatgatagaagccacgagacaagaagctggtcttgaacatcccactcgacaaaggcagggttcagatttttcgaagcttgatccagatcagagaggaacttaggtggtggagtagtgtcttgaatgaattgtaggagtcgatccacgaattgctacaaggacttgctgcttccaaagtagatagttgtgatcatttagtctgacagagaggttgttgctgaacattattggtgaagagtcactcgagtctctgtttttggcctttaacgcagctccattgccggagtttggatttccagtgacaacgttcgccattaacggcggaaaatactctgataccatgttaaagtttctagacatgaagaactgagctaaagaaagaaaggaagcaaagaaaagtaaagaggaagaaacagaggacaaaggttgaaaaaagagttgtattgaaagggctgaacacagccattatatacagtatgaaccagtagcaatctctaacagaaatacagctgtaataaaggataacagaatgctaactgaaac

SEQ ID NO: 223477 - DNA, 1507 bp, Cannabis indica
tggtgttgataggagacttcaacaacattctcagccatgatgacaaaaaagggggaagaccttatcctgctgcacttatttctgggtttcagtcagctgtaacagattgccatctcatcgacttagagcttcgtggataccagtatacttgggaacgttgccgcggtaccaacagaagtgtggagattcgtctcgacagagccatggttactcatcagtggttggatttgtttaatgaggtatctctctctaacctgactttctcatcctctgatcattcgcctatattccttgaacctgtaactatggttaatggaactactctggggctgttacggtatgaaaattgttggaatagagaaccactttgtgctcaaattgttgctgatgtttggctctctaatcagcacgaacatattatgcgtaaatttgagatttgtattcagcagctggcttcatgggggcgttcaatttctgggcatttcaagactcggctttcaaagagtaagaaacttcttgctaaacttaaaaattctactactactgctggtgtggaaaattatgtgcttgaaaaaaccaattactttgagattctagcccaacaagaagtttattggaagcagagatcaaaacagtattggcttcactccggggataaaaacaacaaatactttcatgccactgctagtgctaggaagcgatcaaaccaaatccatcaattacaagatgcaaatggtgtttggagaaactggtcaactggtttggacactgttatcaatgattatttcctcaacttattccaaacttccaacactacgtcccagcttgttattgacaacataagagcctcggttagtgtcagccacaatgatgcacttctacaaccgatctgtgaagaagaagtgaaatcggtcgtgttctctatgcatcctgacaaagcacttggtcccgatggcatggggccaggattctttcagcatcattggcaagtcataggtactgatgttattaaattagtgaaagatttctttgcttctgggactttgcctgaaggtctaaatgatactcatcatgtgctgataccgaagaaaaagaattttgttgctatgactgatcttagaccaatttccctttgtaatgttctttataagatcatttccaaggttcttgctaatcgtatgcgggatcttattgatcatatcatctcagagacacaaagcgctttcatccctggccgtctcatctctgacaatatcatgatagcgtttgaggtgatgcattatctgaaacggaaaaggaaaggcaagaaagggtttatggcgctcaaacttgatatgagtaaagcatacgacagagtggaatggggctttctaagagcggtaatgcttcgtatggggtttgctagcagatgggttgaactgattatggcttgtgtttcaacggttcgttacaaagtggtgcatggcggtcatatccttgaacctatttgcccatctcggggaattcg

SEQ ID NO: 223478 - DNA, 2043 bp, Cannabis indica
tatcaagataaaatgtccctttgaattggattcagtaggctggcttaattttttcctatttgagaaaagattgtataacagtgtgaagacgagccataatttagacctcgacaacaattgtaaagatgcgtgttaagtaccagaaaatattggctattcgttttaaagtgaaaagtgcatcccggaggggtgccaaattagcaaaagaacactttggatgaattagaaaacatgttaaaaatagggttcaagctttgagagtagttgggtgtgaatataaacaaaccttgtgagaggccctttctttagctgacctttctttagctgaccttttagatttggaaaggatgagctttgcatctctgggaaatgagtaattcttttatgatgatgatgatgatgaggatgatgtcattatatatatatatgtgaaatggtatgggaagagttgtaggagattaaggggatagtttggagtggatgtgaagacaccatatttatagacgtatgtctaaatagaaggtcagccaaaatattttctttttcagaaggtattttatttcaaaagagtaatgattaaaccatgttgccttctcaaaagttgagcatcagttgtcttgttctttctcaaatttatctctctttttgatgttgcaatcaactttttgagtgttaattaataaaggagctgagaatctttgaatgtccactcttatatccccatactcttcttttctcttgttcatcttgctcgagaatgacaacaccccaatgttggtcactagcatctgtttgaagaacatgttttccgtcagaagaaatctgtaaaggtggtagattcttcatgatttctttcagctttttgactgctacagtttggtgtgtgaccattctagattattctttttaagtatattgttgagtggtcttgtcagtacagaaagttaggaacaaagtctcgtaaataattgatgatacccaagaatagttgaacttgaactttcgtaagatttttatttggaaatttgagtagttcttgggcgatatgtggttggacttcatattgtcttatagatagtttcatcttaaggaaatctatttgtgattatctaataatcatgttcttttttgacaccatgataccatgggcttcagttatagaagcaaacttggttagtaacaattgatgggctttttcattagaagaaaaaagaaaaatatcatcaatgtagattagagccttttccaatattgggccatatacattagtcgtaaccttttggaataaagaaggagaaatttttagcccaaaacggtgtaacagtctattagaaatgatgatttaaaatgcaaaaggttattttggaccagtgatctagtttaatgtctagttgcaaaaatctcgctttctacattgaattatgaaaaaaaatgtataggctttggataaactacaaaataatgaattcttatttggtaataaaaatttatcatttggtaagaactcatttaggggcttttaattaatgaccaacctttgctttccttgagcttgttctgatcgattattgacacaaaatgcatgacatgtccatggagaagaagttgattctattaatccttgttgttgtaactccttgcattcagtgaacgttattttttgatgttttggattcatgcttgggtgactaagaatagatgagatctaagagctttaacttattcaagaaaattgagttgcttcatttgggctttggtaagacgatggattgtactcaaagatttagaaatattcccttgaaaggaaaacaaaaaagatataactaggctcaaaatttttttttgaaggatatgaataagagaaacatacaaagtgtagaataaagccaccaataaaaaatttcgttgggagtgggcgtggtcagagcacggtgctttcggtttagaatctagcgaagcacaggtacaaccgagagagataacgggaaagagagagaaagagaatgagttagatttggaaaatgttaaaatatgatatttgat

SEQ ID NO: 223479 - DNA, 1327 bp, Cannabis indica
tgtacagttcaaggcatacaacaaaagagatgatatggcataatattggtcgatcgaaagaagttggggttatgcatcaccctatggatgggtctgcatgaaagagtttgacgttagttgtcctaattttgcgagagagcctagaaatgtacgtttaggattggcttccaatggaattaatccttttggaaatttgagtcaattgtacagcatatggcctgttgtgctagtgaactacaatctccccccaatggctttgtatgaaagataataatttcaaattgactagtcttattcctgtgtcaagatcacaaggtaaggacagcgatgtacttcttaggccattggtagacgagttgaaagagttgtggagtaatggggttcaaacaagagatggtaaaacagatactatgttcaacatgagagctgtccttctgtggacagtgaacgatttttctgctcgtagtagtttgtctggatggagtggtcaggggtataaagcttgtcctacgtgcaatgaagatacatcttccatccgtgttattcaaaagacatcttatgttggtcatagacgatttttgccccataatcatgagatgaggcgggacttggactttgacggtaaagttgaggaaagacatgccctaagaaagtttacgtgcaagcagattttagagcaagtaaatgctctaccacctcaaatcctaggaaaacatgaaagttttggaggattgaaaccaaaaagaaatgcgagtgaaagtaattggagaaaaaaaaagagcattttttatgaacttgagtactggagtacactcaagctaaaacataacctagatattgagaagaatgtgcgtgatagcctcctcgacaccgtcttagataatgaaaagtctagagatactgttaatgctacacatgatcttaagaagatgggaattagagagtggttgtggatttatgaagatgagaacaaaacaataatgaagccacatgctccttaagtgctggatactgaagaaagaaaacggttttgtcaatttataaaaggggcaaagttcccagatggcttttgttctaacttgaagaagaaggtaagtgagaatgacaacaatatattggggttgaagtcccatgactgtcatgtaataatgaaacgattactttcactcggtgtttgtggattttttcaaaaaatataggagacacaataatagtgttggaatatgttttaccaggatctaaatttactaccatgtatgttaattaacatcctaaacatgaatatctaaaacaatgtaaataaacgcatataaagtttaggaaacct

SEQ ID NO: 223480 - DNA, 3138 bp, Cannabis indica
acaccgctattttatttttctagatttatcacgggcttgggtgcaaaattgagtactatttatatagtacgatgggtacttgagtacatcacacaaaggacctcgtgatatgcaaagtagtgtgttggacacactacccggagattcacacatttctgcatatacctatgaacataacaagttgattagtgagtcaaggtaaatcaacatatgatgcgtaacaaaacattaatgttaatagtaccttgttttttaacatcatgtactgaaatttcgataatgttcatcttgtacccatttttgatttcgtgccttagtcggattagtagtcttgatccaattaaaatgttcccttcaagtgttcaatggatttattttagtttgaattgatattattaatatgttttaacaatgaaaaattaacttaaacttactcaatgtacggttggacaacatcagtattttgcaacacaagccggtgcgcttcttcacaatcagctcgactcacaccacaaacagaaaaacccctacccccctgcttatttccctatcgacccgagtagagcgagagccaacagtggtaacctctgacaagtagtctgagcagaattcaatcgtctcttcaacgatgtatgattcaacaatacaaccctcaggcctacttctatttctgacataacccttcaagattttcatgtatcgttcgaatgggtacatccatctcaagtacacaggtccacataactttacttctctcaccaaatgcactgttaggtggaccattatgtcgaaaaaggaaggcgggaaaaattgttccaagtaacacaaaacttctataatttctatcttgagattctgtaacttaggcacatcaaccactttacagcaaagagatttgaagaacaaacacaatctcgtaattgcatatctaactttctttggcaacacagaacggatactcactggtagaatatgttgaatcaatatatgatgatcgtgagatttcagaccactcaaaattaattttttcatatctacccaatcagagacatttgaggagtacccttcaggtactttcacctgggagatagaaccgcacaaagattgtttttctgctttagttagagcatgacaagctggtggtaagaacgttcgtcgaccaacaacttgtgggtgtaaattggaacgaatccctaactctttcaaatctaagcgggatttgattccatctttgctacgcccaggaatattgaacaaggtattaagcaagctgtctgacacatttttctcgatgtgcatcacatctacccgaaaaactcttatcactccacccgtgtttggcttttatgttgtataatctaataagtgtcgacaacttagtaaacctattacaattagggtaaataggcttctcggcatcctctacaaaactttgaaatttcaaaggatcgacatttaattcatattgtgcatctccaatcatttctggaatgtgatcatcctcatactccaaattaacacccttaaccttgttagacttagacgttccctcgcccggaactctattcttttccccgtggtaaacccaaaccttataactcttgtctattccgttcctaaataaatgctcctttatactagcaatgtccacacgctccatgttaccacatttaagacaaggacaaagaaccaatttagtatttttagcattcttctgacaaaagtccaagaaatggtcaactccttcactatactccgctgataatctattcgcactcatccaatttctatccatttcgaaacttctaaaaaaactttattcagttatttgtttaaattttagtgaattttatgcattctagtaaaatttattctaatactagtaaaattttggcagcataacgactgtaaacggaaatttttgaaaaatttaaaacatgaaaaaataactaataaacacataaaccaatacaataataataaaaaaaaacattaataatacaaaattatccacccatccgaccgcaatacatgtatttgcagaactaaatttgtgcgttcaaaacattaatgaaaattttaaaattaaaaggaaagtcaaaagtatctaatttataaaaagctacaaaagagaaaagaataaatgagaaaaataaatatatatctgtaataactaaaatttaaagcaaaaataaaataaaataatttaattataattagagtttaaatgaaaacattttaaaataaatagtagcaaaaccaaaaatagtatacaataatagagaaagagaatattgtgtaaatatatttttaaagatatctgaacattaatttttgaaatttaataaaatttcataatatattccaccattaaagcctaacttcacgcgtaaatcagtaccataatttcagaccagtcgggatatctgaaacttcattgtggtttgacagacatcgaccccgtggagaaggggtggtggttagaatagaggcactagtggcagacgcaacccattactaaaagattcctcaaaagaaaataaaaaactattgcaaaaactcaacaagataccgaagagaacttaacaatatcaaagaaatgcaaaaagaatttgaaaacaaaattacattttctaatcaaaacaaacatataaaaacgaatgggataaaaggaaactaaagaacctggatcttgataaaactagagagctaatcgtagctagcaatctatggaggaccctagccggcaggttacaattttcgaccgagaacaacccaggatgagctctgctattaagaaaaaaatatttatatataaagaagctcttagttcacttacactctttgatttccttccataactattttctgtctctatcccttcatagaaaaaagtcaggtcgtggtcggggatggcgatcggagaattgtcgcgatgatcctcttccttcgccaaaatatcaccgtggaggtggagccagaggtggacgagaataatgtgttgaaattattttacgagaatttagatttactaccatgtatgtttttaacatcctaaatatgaatttatataaaacaatgtaatttaaacacataaagtttgagaaaccttacactgggtgcagcggaattaaatga

SEQ ID NO: 223481 - DNA, 12121 bp, Cannabis indica
actacttgaaacgatacgtacacttgcgtgtgcaaaatatcgcaacaactacctatgctgatatggtatggaaaatactgcgagctgagggcgaagtggagtgtactcaaaagcctcgagggactcctagtgttggtggggccactgctctacctacccctagttatggtaggggtggtaatgacttgacctctgattagaaaagaaaggctcctttgcatctggtggcttgaaccagaataagaggttctaggggaactagggctgaggcaaccgacaaggtgggtctgagaaccggtacacttacccgaaatgccctaattgtaagaaacatcatctgggcgagtgtaaagttcgagaatgttttcaatgtggagtaactggacattacaagagagacaacccacaattgaagaacgaagagcagaagatcgaagcaaaacccactccagtaagggtgtttgctcttactcaggttgatgctgaggtcagtcccttagttgttacaagtcagctttcggtcaataactctttttactctgttttgtttgactttggggccacatattcttatgtggcgacaagagtaattgataagttggaaaggccgtatgatttctaagaaacaggatttttagccctactacttggcggggaattagttatctccaaaagataggttaagtctatgccgattagaatcgaaaatagggagttgagtactgacctaatggaattgggtctagaagattttaatattatacttggaatggatttcttgtccaagtatgctgctaatatcgattgtaagcagaagttagtgatcttccaaactgagagtgaggaatcgtttgtctttgtgggatcagttcaaggatctcgaatcccagtgatttcaatgtggaacgcgatagatctgttacaggaggggttcctagggtttctgtcagtggtgttagataccactcgccctgagtcagttcacctagaggacttcaaaatggttcaagagtttttagatgtgtttctagaagaacttccgagattaacaccgcagcgagagatagattttgtaattgacttagcacttgtttctaaggcaccttatagaatggttcatgtagaacttaaagattaaagatacaacttcatgggatggatcacttcgtatgtgtatcgactacagagaactaaacaagttgacaataaaaaacaagtatcctctacctagaattgatgatttattcgatcaactacatgggaaaataatcttttctaagattgatctctgctcgggttatcatcagttgaaaatccgagaggaggacattccaaagactgtctttcgtgctaggtatggtcattatgaatttttagttatgtcttttgacctaactaatgttctagcaactttcatgaatctgaatagggcattaaaagattttcttgatgtatgtgttataaaatttatcgatgacatccttactctcagtcagaaacagagcatgaacatctacaaatgattttgcaacaattacaaaaacacaagctctatgccaagtttaagaagtgtaaattttaattatctcaagtcatttttagaagagattgtcagtaaagataaaattatggttgatccaagaaagattgaatctgtcaaaaatttgccaaggtcaaaaacaatcactacagtcaagaattttttaggttaactggttataaaaccaaccagattgtaatatttttcaaatatatcttaaatgatcttacattgagagtgaaaatataactagctcatcggtccaatgaaacgttatgaaattagtttttcaataaaacgtaaataatgaccgcttaggtttacattcatgtaatgaaaccatgatcataaaaacaattggagtatcatctttttaaatatatcttaattgatcataaatgagtaaaaagataactaaattaatggcctgatcgatctgatgaaactttatcaaattatttttaaataaacataaataatgatcatttagatttacggtcgtgtggtgaaaccatgatcatgaaattataactagatcaataatctaatcggtcctgtgaaattttatcaatgaattttttcaataaaacgaagatagtgacaatttagatttacaatcgtgtggtcgatcaaaaaaaaaaaaaaaacactatcctatctgcggatgaaactttatcaaatcatttttttaataaaacataaatagtaattgttaaggtttacttacgatcatgtggtaaaaccatgagcaagaagacaacctgagtgtcatttggtcttaattgatcataaatgagtgtaattagaagtgaatcaacggtcggcacactaattggcactattaacaaaaaaaaaaatgactgttaagattcaaattctcagttaccaaattctaaaaagcagcaacattttcaattagtgattccaaatacacaaagtatttactagatttcatatatcaactacaaatagccaagtacaacatttgtgattatatatacatcatgtgtataagataacaaaaatctctatagattgagtacaagaaactgacagtgaaagtaaaagagcaggttaccacatatcatcaaacttcacatatcagccatctggtacatgaaattgaaactacataacaccataaaattctatgttcaaagtgttcctagatcattcttattcaccaaatattagaagttgggttagagaaatcctcttagataacaactaccaagatatcaatagtatttttttatgagtgattaaatctagagttttcacctagtctataattatacttgttttccagaataaataaatgtcaagaatcatgttacatgttactaaaacaaagtccacctaaataaagttgtaaaaataaactgatcacctctatctatatgataaaactctaagagtgtaaaacaaacctaaacataagtctcacccaaactgtatcaactaaaatccggaatcaaaatctcgatgaacaccattgaaaatatatagatataacagtctccccaacatttatttgcataattgactaaattatacttgacaagcctaatcacttctactccttaaaaagaaaaagcatgacaaaacctgaaaagttcaaattttgattcctactaaatatcctctaaaaaggaaagaaactattatacacctccaaaagaaatatcccagaacactgcaagatcgtgcattttatcgccttaaattaacatagaaattcataatatatatttatatatatacacaccctgcattgcaaatctgcaacttcattctctccataaaatcttcaatatcatttttcagagaagcccccatctgaataagtaaactaaagtctcccatctctataggaaaactataatcttaacctgaaaccttttacttccagtaagtccccactttgtctcttttaaatcacaagattaaatatcatcaagaaatattgatccataccaacaatttatataaagcagaaaatgaaatctgcacttatgcacaataactcataactcaagtcatcaacctgttcatacctatgggtatagggggcatctctgtatctctccatcatacgaaaagtaaatcatcatcttaattaggaatcttagaactcggaagacaacctaactcaaaactctacaaactctggatactctatcgaaaatatatataagagcaaaccatgaggaagaagaaattagagaaaagcaaggagtaagaagggaaacgatatggaacttcagcttcctatcaaacagcaagcctccatcagaaaagtttctctgcattttcatgtccacctacacacaaaatatatgaaaacctttaaaacattaagatgggtaattatttatcaaaaatcaaaaccattgcaaagtaatttttaataccaaagttctcttgagattaatagtagtagccacgaccgtatggaggaggggggtcacctccatagtaagaaggataaggacctccagcattctgcaaggggagctgaaaaattagagatcagtaaaaatcattggtatatcggatcattaaatgcatcgatttcttacatcagggccataaaaatcacgaggatagacactgctgccggctccataagtatctaattacaaatacataagaacaatatatgattagaacatatataaagagatatatatatatataaatacatgtgtacatgacagtattcatgagtagatactaaaggtcaaatcagagtagaatccataccatgataatggcttccacgaaagggagctactggatcagcataatctaatcttgggcgaattccagttggctccacgaaatcaggttctgggtcctaaatccaggagaatagtaccaatcataagattcaatggattttaagataaaccatactaaaagttaacaagcaaaatagaaaacttaccctcatatgcaatggccgcttcatgccacgcataccgtcaccataaaaataagggtcatcaaagtgacttcctggaaaaggtctgtcaaaatgttcttgtggaggataaggctgcctcataggaggatagtgcatttcacgttctctgtcggggccagcaggccatggtctatcaaaattacgtccagcaaacttaccagaagggtaattaccacctctgaacgaacctctccttccacctatttttgtttaggcttgttaaaatggttgaatattttacatttaacaattggaatagagaagataagaacaattaaaaataaatgataattagaagaaaatttgaaaaataacctcgtccattattttgtctcccatgaaattcagcatgtggtttatcaaatccatattcattaggaaaattcatcatgctcggatgaccacgtccaccacgatgagaacccctgcgaaaatttgcattgttaaaggaattaccacctcttccattacctcgccctgcaagaacaagtaaaaaagacatgacacactatccattgctgagttaccacaccataaataagcaaatatagacatatgaacacaccaaatttaggaatatatccatcaccatgaccaattcgaaatccaccacacattccacctttcacagcctgagtttttggcataggatttgagagtcttgcttttacttttacctgtattgcaaaacacaagacttatatatcatcaaaagcgaattatattgaactactgaagtttgaaagaaattacaatctctctttacaagaataaatatatatatacatatacatagtatttatatgggatcctcccatgaacaaagtaaatttatttcaacatctctaataaaccaatatctccaaaattgatacctttgagttcccatcgtacaactcagttttgtttacaccctcaacacaagccacggctgcttcatgtgtagagaaatcaacaaatccaaaatcttttctcttggctgtagacatatttcgagcaaggcaaacacgtacaatttctccataaccttttaattgttcccttacctggtgttcattccactgaggtggaagcccatcaacaaatattgatttaacttgggccatgacgtctggatcaggctcacgtaaaggttcagcaaaagcaacttttgcagttctctcaaggtggccaaatacaacgtcaggtttttgaagcctcttgtaggcagacatggcttcagcatgacatgaaaattcaatgaaagcaaaacctcggctcaatccttcacgctgaacatcagcaacaagagtaatgttctcaacaccttcaatgccatactccttcagcttctcacttatctgacatgccgtgtgaataaaggttaaacataaatctaagatcaaatgctcacgagaaaatttaattaatttttaagtttttaattatttatctagtcactcactgttttcttggtccatgtgttgcagatatttcccagaaacaatgtgtcattgtcttcgctcggtgcagtcccacatcgctgtccatgaatctgcattaatttttaatattagaacaagacctttaaatttttgaattagaggaaaacaggtaaaacagatgcatacaactggatttttcatttctgacaaagctcgcattgcatgctccttcttcatatattcaacaaatgcatatcctttattcttatgtgttgaaagattcttgtgcaacctaatttcaactatttccccaatcttctcgaaaacctttctcacatcctcctccgcaacatcacgatccaacccaccaacaaatacttcacgctcttttcgactcctgcgctcattaacaatagcagccacttccctttgttcaatggcagccacttccctttgttcctcttccttattcttggcttcttcagcatgatcatcaacatcatcctcttgaagctcttcatttccattttctccaagatcaactttttctccatattccatttcatgatcacaatcaacctcccttatcggctcattagcaccctcacttatcagctcagtatcagcctcctttatcggctcattatcaccctcatttattggcttagtatcagcctcctttatcggctcaatatcagcctcctttatcggctcaatatcagcctcctttatcgacttatcatcttctagttgcataacctctgtgacattttcctccatattagaaggcccaacatcctgctgctcattaactccaccatcccttgacttttgttgatttgcatccccttctatttcatcccttctgccacaacacgctatgttatttagttctacagtgccttctgtaccagtaagctcttttttgtccaaattttctacagagttctcactagaaattactactacttccattgggtgctgctcattcaaaatacattcaccgacatcttcagcaactggttccttattttcttctgcatgatcatacatagattccacaacctggcaatctacaactaccgtgggttggctcggttcctcatttacaactactgcgggttggctcagttcctcatttatagactctacagcctgggaatctacaactaccgtgggttggctcggttcctcatttgtagactctacaactactgccggttggctcagttcctcatttatagactctacaacctgggtttccataactacgccaggttgattcggttcctccttcatagactcaacaacctgggtttctacaactacacggggttgattcggttcctcattcatagactcaacagcctgggtttctataactacacggggttgattcggttcctccttcatagactctacaacctgggtttctaaaactgcaccgggttgattcggttcctcattcacagtctctactacctgggtttctataactacagtgggttccctcggttccttctccgtacttcccacgaccaaggcttcccccacttcatcattagactcttcaacattcgcctccccggaatccctaacatcagacccctgtggagaaataccttttcttacagtagttgtcttaatcctcccagatgttctggtcgccactgattttgttactctacccaccttcgaatctggtgtcacttgaacagcaccagccgaaatctcttcacctttcgtaccttctcattcaagataatgcgaaaaataaactaatcaaaatcatcaaactatcaaaaccaaattaatcacttcaaaatccaattaattatatgaaattcactaaacctatcaaagttcagaaatttaatcaaaaccaattccaatcttcgtgttctctaatcaattaaacaaataaacaattcaaacatttatttaccagatggttcttcgagtttcgaatcagtcgtggttacgatttgcctcttcttaatcggtggtctacctctagtagaaggcgaacgcttggtttggccagtttctggagtggacgagccggcgccggcctcggcagatgtcggagtgggtttggcggtggatttcttgggcggtggcgtcttcttcggagctggcgatttaagattggcgccattacgagttctcatgatgattgccggaaaccctagttacgaaaatcgagggagttgagtaatgataatgaaaatgtgaaacacaagtttagatttttgattgaaagaaagagaagagatgatcaaaacaccaatctttgtcttcgacgaatattgtatatttgtatcggtgtccgtgtatttatagtcactacttgtctggaattttttttcatctaatataaagttaaatttgataatttagaattaaaaaaaaaaaaaaaaaaaagactatttatccttaattatagttaaatacattaaggagcgcttaaactcttaaactcgtgtttcgtaaacaaccattgggaaaacaacttcactacttctactgtttatcatttagattattatcaatcggatcaccgggctattatggctgactttaacgcccaatctgcaccagttactgaggccaaacgtagaagccgattctgttttgaaaagttatggttatccgatcctgaaagtcaagatattatccgctcctattggaataacatacccaatgctgacccgatttctgcggtctttgatagtattaacttatgtgctgaatcactacaatcttggcatatccgaaaatatggaaagatgaagaaacagatcaatgcttgccaagataaagtaacctaagctcaacaatttaatctcccacaccagcagcaataccactgaattgcaacaagctaaagctattcttgatgatttgctggaacaagaagaggtctattggcagcagcgctctcgagttgattggttgacaaatggtgatcgtaacactaaatttttccacgccaaagcatcagatcgtagatcgaataactgtatcaagtttctctttaataacagcggccaaaaagtgcatttgaaagatgatattgctcatgttgtacaagattattttgctgacatgtttactgcttctgatattgatgaatctgccctcaccaccacacttcaatgcattccaacacttgttacattggaagataatgacagcctcacccaaatcttcgcagcagccgaggttgaagctgctttaaggaccatggcagcagataaaagccctggagtagatggtatgtccgccatgttttatcaacataattggtctattgtgggggatcttgtttgtcaagctgtattaagtgttttgaatgatggagctgatccaacaagtttgaaccgaacaataatcactcttatcccgaaggttaagaaggctcaacgaatgaaataattccgcccaatcagcctatgtaatgttgtttccaaacttgtcactaaaattgttgtagcaagattcaagcatgttcttccaaaggtgatctcggaaacccaaagtgctttcctacccaaccgcttaattatagacaacattttggtggcttttgaactagtccatgccatcaaaaacaaaacctcaggacgcaacggtattgcatctctgaaacttgatatgagcaaggctttcgatcgggtagaatggagattcattgaagaagctatgaagaaaatgggtttttgttctcaatggacatcgctgattatgagatgcttaactactaatagtttctcgtttctcatcaatggcgaggttatgggtgctctaaccccatctagaggtcttcgacaaggctgtcctttatctccgtacatgtttttgatatgttctgaaggcttgtcaagactgttacaacatgagcaagacattggtaatctctacggattcaagctcactaggcgtgctacccctatctctcacctactgtttgcagacgatagcctcctcttttgtcaggctaatgaaagctcttgccttgcaattaaacgggttctggatctttatcatcgcgcttcagggcaggttcttaattcagacaaatctgtaatgtccttttcccctaacactactttggctgcccaaatattttttcacaggcatctcaacatgcccattagcacatgtcatgaaaaatatcttggattgccatcttactccggaaaggacaagaaggaactttttagccacattaaggaaaagatttggaaacttatgcacaattggaatgaaaagactttttcagcgggtggtcgtgaagtgcttctcaaagcggttgttcaatctattcccacctatgctatgagttgcttccgtttaccggtgtacttttataaacaacttgaatccatgatggctaattttcggtggggtatgaatgagaatggcactaagatacattggcgcaattggaatttgctttgcaaaacaaagtgtgatggtggcatgggtttccgatcttttgtacactttaaccaagctctattggcaaaacaagcgtggcgtcttgttgaaaaacccgactctttacttggacagcttctcaagagtagatattttccacataactcagtattggaagctcacataggtcactccccatccttaacttggcaggctattcactgggggatagaccttctcaaggctggtctgcgttggaaggtgggtgaagggagatcaattcttagtggtgctgatccttggctcccaggacatagctccttcttgccttttcgatacatggggcctccaaatggtattgtttccaatctcatcacaccagaacgccaatgggacttatctctgctggagcaatttttttcgcctcttgatgtggagcgaatactcacggttccactaagctttttcaactccaatgataagcttatatggcatcaccaccacactggaatgtacacagtccaatcgggatatcacttggccagatcacttgatgatacagagaactccgccagctccacttcagcatctacttggtggaattttttctggtcacttcaacttcctccgaaagttaaaatttttgcatggagagttattaatgatgctcttccggtggctacttctcttgtcaagaggaagatcatcactgattcgacatgttcagtatgtcgtcaagcttgggaaaccattgggcatgctcttttcacttgtaaatatgcaaaaaaggtatggacgtgttcgaagctatattttgactggaatgcttgttcttcaatgaaaaaaggtgattacttgctgcatctccattcaattcattccaaagctgaaatggaacaaatattttgtacgatgtggtcattctggaatgaacgaaacaaggttgtacatggccaaaggccaaagccagcagaaactttagcctcctatgctcacacctactgctagaattttcttgttgcaacaactaaatacaacccagtggcttctcacggccaaccacagccacctcctcctcaagctgtccctgctcctactccatggaaaccgccgattgctggtggttttaaattaaatgttgatgccgctgttgacgccaacaacaatgtgctgggagttggtgctttaattcgtgattcaaatggtcttgttaaggcctccctttcattgccagctgttgggaatttttcttcccatgaaatggaggtcaaagctattttccatagccttaattggacattacaacacaatctctcagtttcacacattgagacggacgcactcatggtgttaatgcattgaaagctcccttcaattcaattttcgcttttcatgatctgattgttgatgtttcttgtcttttgtcctttttccctaatgtaactatatctcacgtcaagcgtagagctaatatggctgcccatggcttggctaagtttgctttaggggtggatgagacttgttattggttggagactatccctccacctatatactctgttattgtaaatgactctctttaatttataataacaagtattttccctcaaaaaaaaaaaatacattattttttattaatacttttttaaaattattttcttaaattatatagaatccgattctaaatttactatattttttatatcgattaaaaataaattatat

SEQ ID NO: 223482 - DNA, 2102 bp, Cannabis indica
ctgcgagcttgtgcgagaatatgaacaggcaactggtaccctataggtcgcatacgttgctgcatttattagaacggattaaactgttcttcatttattctgatttaatattgttatttattgtaaaacagttctataaccaatcagttatgtataactaaaaggatacttgcattctatataaaggagtgatccaagatgaataaactaagcagaaattatttacaacagtagactaagcagaccgaaatctaactaaactactatattccttgtgtttattttattttttcaattgttcaattgttttagtagtttcctttgaatactcgccattctaagtagaatattcgttgtttctcttttatttatttattatttgcatacctttggtattatccaaattcttcaaactataaaaaacgtttacatgtacatatttgtacatacaaataaagttctttatatataaataaagtttgatataaaataagaatttattatagtagtgttcgaaattgctaccttaattttttttcattcttttgggttttgagcaaaaaaataaaaaaaaaaaaaaaataaaaaaatgatgtggtgtgttgtgttgtgaagctttaactttgtatttgggtaactaaaaggcgaaccaggagccagacccacacccacccaaccaccacccataatcatccgcattagtcatggctggtcctgtctcagtctctatcactatcactaaccaaccaaactagctacttaagatatatatataataaattgacatatataatttcacaaaattacaaaccctttgctattctatgtgtaataatctctcacatttttgtccaaacctattactttattttgtttttgtttcctaactctgttccactgcatgattttactcattgttaagctatcattatcattatcattgtttattgacagtgatattttgacatattattattgaaattataataaaataccaactctttctttttttttttttttttgcaagaaaacaagttctaataaaataccaacttaaaggatacatctaatatcataattgcaatgttgttgctgtacttgtatgaatgtatgatgattatataataagttagtacgtacacaaacattacttatcagttatcacttttgcatttcactataagttcaaaaaaaaagattcgttttttgttttcttttttattttactagctcttttagattcctacgaagcgtttactcttttgtggtccaaaaccagaacccaactagcttttgaaaaagagtaataatcaaggcagacaaaaaagtcattatcttcattcttcatgaaaactttagaagttttcttcacgggccataatccaaggccagaaggccctacaaagcccaataatggccatcagaacagtaaaggtacaagttatgttttttagtccttctagtgggaaaaagaagtattagtctttttagttgtgtcacttctataacacatgtcataattctcttataattataaatcactgcctatttatttaaggtaattttatacacttgtggcatattgagaaaatgaaaattgcactttacttttattttctcttttaatttttatttttattttactattttttaatttatattcagttttataatttatattcctattatgtgttttttgagaatttctaacttttaataagttatataataaaagaagatattaatcaattaaaattattttagagttatatttagttaatatataataaaaatagtaatattttcaaattattcctattaaaaagaaaatagtttttttttttctaaggggcacgctaaccaccgccgtacatggcacatagttgttggtagtaggggtggtaatttgttcgtgtcgtaagacttaggaattataaacaaatgttaaatctaatctatttataaattgtattgaaaattaaaatctaattaacctaacgaatttattaatagttaacatgatcaaacctatttaatccacttataaaaatagtgaaaattacacttattatgggattttaaaagttcttatgataaatatg

SEQ ID NO: 223483 - DNA, 1393 bp, Cannabis indica
gccttactcatatcaagcttaacaaccatgtaaccatcttttccaagccttttccttttcaagtaatgcattacttcaaaggaaatcatgatattatcagtgatgagccttcctggaataaaagtactctgattatcagaaatgaccagagggagaacaacttttaatctgttagctaacaccttggaacacactttatataggacattacataaggcaatcaccctcaggtcagacatatgagagggattctttttcttaggaataagcacaatattagtgtgattcaatccctcaggtaatgaaccaaacataaaaagcaggagtcatcccatcaggtcctggagacttatcagggtgcatttgaaagagagcatctttgacttcttcatcggaaataggcgcaagcatagcaacattatgaccctcagtaatcgtaggactaataccattagtaacatgcaaggagtggcacgtcccaccagtaaaaagggtcttgaaataatcaactatcacattcggaagaccattgtcccaatcggcccaagtaccatcatctctctgaagtttatgaatggaattagaacgacggtgcgaagtagcagtagcatggaaaaatttcgtgttctgatccccctcttgaagccacaactgtttggatctttgacgccagaaaatttctttttaattaggacttcaaaaagattgttctcagcatctttaaaccgctcaaagacatagcatcgtgcccattcttgaactttttagcttcgctcttccagtgcttcaaccgagactgaaatttccccaaataatcactattccactcagttagtttattaccacaaagcttaatgttctcttgaataccacccaaagaagactccacccaacaatcattaacaacttggaaacacataggctcacggagccaaaaattctcaaaccgaaacttcttatgccgagaaatatgagcctaaccaacaatattatgcaaaagaagactatgatcagaggagctcaactccaggttcaataattgagctgaagaaaaataaaccaaccattgcttagagacaagcgcacggtccaagcgagactcgatccaggcatccgaaccacggcttttttcccaagtaaattgatgaccaacaagctccatatcactcaactcacactcttgaattgtttgctgaaaaccctcaataagccagttaggataaggaacacctccccgcttatcatcatgagataagatattattaagatccccaataaaacaccacggtaatgaagagacagtagccaaagttttcagttgatcctaagtagacaccctagcattacggttaggctccccataaaaaccagttaaccgccacacaccttgatc

SEQ ID NO: 223484 - DNA, 1751 bp, Cannabis indica
gtggtatgacttccactttttactgattttactaacaaatcatcgatataaacctccatgttccatccaatctgattaacgaacttctacattcaccaatcactgatatcgttgaccccatcattctttaaactaaacggcatgacctcgtagcagtaaactcccatgttggttacgaagctcgtatgttcctgatctgggacgtgcattttttatctggtttatatctagaatatgcatccatgaaggaaatacgcttgtgcccagcagttacatccactaactggtcaatccgtaggtagtggaaaaataatcctttggcacgccttattcagatcagagaaatcaatataagttctccatgtttcgttggttttgggacgaggacaagattgatgatccacgagggataaaacaccttgcatatgaagtcgttaaccaacaacttgtccacttcctatttgagttgccccttatctcttggaatccaagggtctcctcttttatctttttcctgggtagtttggattgacattgaaatgatgccatataatattatggtcaatccctatcatatctacatggctcaaggcaaaatgatcctggttcacccttaagaaacttattagctgcaatttcaattgtccatccaggttcttcccaatgtaaacacacttggtgggatttcctgagtccataacaacttcttgcaactcttcaattggtttcaataagtttctttcatcttgaatctgaagatcaagatcttcatccttcttctcgctttcttctgtcaagacggccattaactagggactggcttttctgtgctacagctcgatgcgatagcaatcgcgagccagcatcagatcaccttacactactcccacacctactggtgtttgaaacttcagtgataagtgcttgatcgaactaactgcccctagtccgattaatgttggacgacccatcaatatattgtaagccgatggcaggtcgacaaccaaaaaatcttgcataattgtggtggacaaaggtgttttgcccaaggtcaatgcgagctcgattataccttgactggtgatattgtcgccagtaaatctgcaaagatttaccatgcaaggcctcaattttacctttttgagccccatcttcttcagtgtttccttgtaaaggatgttcattgaacttccgttatctaccaacaccctttttattctcttgttggcgcgcttgacggtaatcaccaatgggtcaacgtgagggtacctcacattcttctcatcttcctctgaaaatataattggaggctctttggtttttactttcttggaaggttcttgagcaaatacagaatgctcgttcttcacttccttcacgtacctattttgggtgttgttgctctcacctgcaatatgtggccctcctgagattactaggatatcctctccctcaaaaggaggaggttgtaatccctggttacttggattgttgggcggattgggttggttatgtccatcttcacatatttcttgaagtggcctcacgtgatgagactctctatctcatctttcaactggtgacactcgtctgacgtttgctcgatgtctttgtgttacttacagtacctgtttggatctcttttatgcctcgcatgcctcatgggcttcagtttactaaatgcaaccttgtgctcatgcgcgaagtagatattctcctgtgtttcattaagctcgctataaatggagtaa

SEQ ID NO: 223485 - DNA, 2288 bp, Cannabis indica
ggtctgggactgggttcgggtcctggtctgggtttgggtacggggctgggtcccagatccaggcattgactacgggttcaatccaagccccgggtccagatctagatcctgatcttgggtcccagcgtggttccatttcgggtgctgggtcacgagatgggtactaggttcaagttcaagtcaagttcgggtcttagatcgcagtcctagttccgttgcacaggtccctatcctgattttgggtccaggtccttggtctcgtcagggtttgggtcccaatctaggttcgggtttttgtcctagtcggaattttggtttggttctcggtctgtgtttttatttgggtttgggttcaggtctgggtcctggttttggtcctggtcctagtccttgtccggttctaattttagttgcaattatgagttggagtttaggttcgagactgtgtctgagtttgggttcgggtctgaatctaagtttaggtctggatcgggctctgggtgtgggttagtgtcttgggtgtgggtccaggttcgggtctgagtaccaggtttcgatctcgatctgagtccgcatttattttcgagtctaagtcctggtttctgatcccgatttgggttcgggttcgggtgcaggtctaggtttgggtctgattcttggcctcggtctgagttcgggtccccagtttcggttcgggtccgagttcgggttttatcctggtgtgggtgcgtgtctacgttactgtcctggtttgggtccaaggaaggttttgggtctgggtctgggtcaaactttggattccttggtccagttcagctcctagttcgggttctagtccttgattcagatctgggtctcggtttcggggtcgaggtccctggtctaggtcccctatccatgtcctgctcctaggtcctggtcggggggtccaggttcgggtttgggtcctgagtcttggttttagtccatgtcccagtccatatttgggtccatgtctcgatctcagtcttggttcgggttcaggttcgggtccttgtctgggtctggatcttggtttgcatctcgggtctcaggtctcggtgagggtttaggacaaagtcaggtcctagtcccggtttaagtctgggtccaaggtctcatgtcccagtcctagtcaaggtctcagtccaggttctggtctgagttacggttacggtttgggttcggttctagtcttaggttcgggtcctagtcatagttctagtgctaattttgggtctgagtttggttcttggtttgggtctgggtccaagttggggtcggggtctgagtcttagttcgagtccgggtaagggtttttcgtatccctgtctgggtgcaagttagagttcgggtccaggttcgggtcctgggtcttggtcctaggttcatattagggtctgcgtctgggtccgggtctaggtcctgtgtttcgatcccggtctgggtgtgggtcggtattcgggtccgggtctaggttcatgtccatgtcaaggtctaaatcccagtttaggtcaggggattggtctgggtgcgggatcaagtcccgagttctggtttgggttcacgttcgagtttcaatcctactctcggtttggaaccgggtccaggactaggtttgagccttagctccggggttgggttctggtctagttccggttcctggtaaaggtccaggtcgtgctcctggtcacattctagttcaagtttcggtttagggttcaaggcttaaggtttaggggtaagtataaagagttaaggatttagggtttaaggtttagggttcgggtcacagggtacgatttaaggttcgggtgtgggtctgggtccgagtcctagtttgtgtctaggtccgtgtttgtgttcaggtccgagtcatgttcccaaatccaaacacccaccacatgtcgagtcttgttcgagttctggtacaagttcggtttctggttcgggtctaggtcggggtctaggtccaattcaataatttagacactgactatgggtcgggtccaagcctcgggtctaagggcgaggtttgggtctaagttttggtcttgggtcctgagtcatgggtccgagttcctgattccagttagggccctaggtcccggtctggttagtgtcctgtctgagtgtaggtctcggtctgtgttcggtactgatgtttgtctcgggtcttggcctggtttgggtctgggtctcgattttttcttaggtccggtcctagtctcgctcccagtcccgggtccgtggtcgtctgtcctcgtctg

SEQ ID NO: 223486 - DNA, 2053 bp, Cannabis indica
atacaaatcatttcgattgctatttgatgtttgacaatggtcctagatggcacttctcagctgtttatggctttcctgaaactgataataaaaagtatacatgggctctaataacacgacttgctgatgtctctccactagatccttggttgttaactggtgatctaaatgagatttttttctaatgaacataaaaatggtggtcctttaaggaatgagttgcagatgaaggaatttcgaaatacactggatagatgttttttaaatgaactaccttattcgggtgatgatttcacatgggccaagaacaagaaaaatccaagtgctcttaaagaaagattagattggtgttttatcaacaacttttggaaagatcaacttccacaatcggctgtcacacatttggattattatggttcgaaccatagagctttactaattgaggttgtgttcaatcctcatcaagatcagtctggtagtttgcaaaaaagaagatctcggtttcgctttgaagagatttggctgaaagaagccgaatgctcagatattattcaatctagttggaagatggattctcattgcgaccctgctgcaatgttggtacaatgtttaaataattgtgctgaaaacgtacagcaatggcacaccaggaagtttggatgtatgaaacataatataaagcaagcacaaaagcaggttactatgcttaataattgtgcagcaactggtatggatcacacccaacaaatcctcatggctgaagctattttggatgaattgttgtcaactgaagagcaatattggaagcagcgttctagaattgattggcttaaatctggagatcgaaacactaagttttttcatgcgaaagcatcagctaggaaatccaacaatcagatcaaatttttgcatgatcatcagggcaacaaagtatcatcaaagaatggtattactgatattgtttcttcctatttccatgatttattcactgctggggaagaagatcattgggctctttcacatgtcttatctaccattcccacaacaatcacttcataccataatgaatctcttttaaaagaagcgcactcactggaagaaatggaaatttctttgtacttcaaagatggaagggggtatgcagttcaagtcttatgttcaattcaatcaagctttacttgctaagcaagcttggtggattttgcaaaaccccgagacacttttggctaggatattaaaggctcgatattataggacatctgatttttaagtgcctcttctgctggtgcatcctccatgacaaggcaaggcatatgctggggtaaagatttattgattaaaggtctccgattgcaagtaggatcaggtgccaacattcgaattgcttcggatccgtggattccagcacaaaaccggttcacaccagtattgtttactagtttccctgactctcgtgtagctgattacataaccgaaaatagagtgtggaatgttactaaactgcagaatgatttctcaacaattgatgttgataatattctcaaaatcccactttcttttgctgctcaggatgatagttttgtttggcattatacctcttctggtgtgtatactgtccagtccggttatcaacttgcctactccctagccactcaagaaaacacaactggttctgaatcttatgccctggtggaaatatttttggagtttaaagttaccatctaaggttaagatatttgcttggagagtattccatcactctataccagtggctgctagtttgtttcagaggaaaataattgattctagctcttgtagcttatgtacatgtgctgggaatcggttggacatgcgttgttcagttgcaaatacgctaatcggtttggcgcttctctgaattttcttttgattttgcagcagctaacagaatggattttttgatacacttgtctctatatacaccaaattggagcttgaacaaatcatatgcttaatgtggtctatttggtcgaataggaatagtgttgttcatcaaaaatcttgcaagaaacct

SEQ ID NO: 223487 - DNA, 1240 bp, Cannabis indica
aaattttttcatgcctatgcatcgtctcacaaaaagcataacacaatcaagtctctagtggacaacaatgggactgtagtcacctcaaagcatggcatgacagatgttatttctggtttttttggagatttgtttactgcatctgagatcgaccctgaagctttaaatcacactttatcaaccattccaacaacagtaacagctgatatgaatgagtctttgcttcggccttttaccaatgatgatgtctacaatgctctcaaaacaattaatccggacaaaagcccaggaagtgatggcatgtcggcaatgttctatcataaatattgttctattgttggggatgttgttacacgagttgtattgggggttttgaatgatggtcactgtttggattcacttaatcactcactcattactctcattcccaagatcaatgttcctcaaggtatgggagactttagaccaataagcctatgtaatgtcatttacaaaattgtttccaaggccttgactatcagatttaaagatgtccttccagtggtaatttctgaaacgcaaagtgcttttctctctaatcggctcattactgacaatattcttgtggcctttgaattggtacaccacttgaaacataagacaaggggaaataaaggctactcagcgctaaaattggatatgagtaaagcttttgacagagtggagtggttttacattcaagaagtcatgcgtaagatgggatttcatgatcgatggattgatatgatcatgagttgcctaagttctacaagtttctcattcatgctaaatggtgaagaggttggttatgtcaaacctactagaggcctccggcaaggtgatccattgtcaccttatttgtttttaatctgctctgaaggattatcacgactattacagtatgaggaatcggtcaatcatctaaaaggcttacgtttaacacgtcatgctccatcagtttctcaccttctctttgcagatgatagtctcctgttttgtgaagctactaacagcacagccatggcacttaaccgtgttttggatacttatcacagagcctctggtcaattgttgaatacaacaaagtcagttatgtctttctcgcctaacacttcacaagctgctaaggattttttccatcatactttagggatgcccattagtgattgtcatgaacgttatcttggccttcccgcttattctgagcgtgataaaaaagaaa

SEQ ID NO: 223488 - DNA, 2582 bp, Cannabis indica
tttactaatctttggtatgtagctccatcattcttgaggccaaatggcataaccttatagtagtacaaacccatatctttttggaaacttgtatgttcttggtccggtggatgcatcttgattttattatacaccaaataggcatccatgaagcttaatatttcgtgtcctgctgttgtgtccacaagttgatctattcgtggaagtggaaagcagtctttttggcacgccttgttgaggtcggtgaagttaatacatactcgccatttttcttcagcttgggcactagtaagtgattggcgacccaggccaggtagaaagctttgattatgaagttatttttgcgcagcttttctaccacttcttttagcgctagggctcgctccttgtccaacaatcttcttttttattgaacaggccgaaaattaggatcaatatttaggacgtgtgaaattatagaagggtagattatgaccatgtccttatgtgaccatgcaaaaatgtctaggtttgctcctagaaattttgtcaatgctgattttactttgagcaacagaccttttccaattttgagtttcctaggcagaacatttgggtggattccgatttcttcgaattcttccatttgaccaacattggtatttggttccccaagttggggatacacatcttcatcgccgccttgggcagttctctatttggcaatgtcttttcccttatccaaactctaactagaggatacttcctttttagccttggttagggcaaggttgtaacattcccgtcaacctgttgatttcctctcatgcacccaacccaattttttgttggaaacttaagcgaagaatgaaatatcgacgtgacaaattgtaggtcatataaggctggtcgacccaacatgacattaaaggctgatggaacgtcctatatcaaatattgtgccattatatttatgctcttcgaagcttgcccaatagtgaggggtaggtgaatttgcactagaggtgcagcactctggccggagaaaccatacatgggctgaagacaggggttaagtctttgagttggagccccatcttttcatatggtgtttaaaacaagatatttgcataggctccattatctatcatagttcgggccaccattttgttggctatttggaacggatcgttgtatgggaaattaatcttgacagcatcttcatcattaaacattatggggggctcccattcccgtggtatttttggcttcctttcttcgatgaccaagacatcttcctcttgctcgtgctgtagtgttcgggcatacctctcccgggctttgcctgaatctccaggacaacttcttacttgtatatgcccatccaccggtggcggctataaatcttgattattatctgtctgagcgaccctctgatttttatttgtcttaacatatttttgcacgtgtgggttattctttctaattaaaaattccatttcctgctttaaattgttgcatttgttggagtcatggccataatctccatgaaaacgacaaaacttggtcacgtctctcttacttacgtccttttcatgggagcgggtttcttgtatggagttaatgattgagtagccatgtaaatggtttccaaatcctcagttaagatagagaaagtagtgaacttggaaaaattgtctctaggcgcttgttcggttttggtaacaaactttccctttttcccattaccttgtccattgttgttgttagactgtttaccgctcgagcttgaattgcttgggtactaagggagctagacggatgttccaccagagggagctttcggatggccagacttaagctcaacttctgctcgctgaatggcctcttcaagcttgatgaagcgatctgcacgatcaaggaagtcactcatggaatatactggtctgtcccttttgatatccttccaagttctccgagaacttcaatgccctctagtatcacggtcaatttcccttcttcagtcaaccatacaaccttcgttgcctccatcatgaatctgttgatataagcttggagaggttctcctggcctttgcttcacttcgaccaggtcttccaaatgcaacgggagttggcaagaagaagagaattgtgcatgaaattctaaggagaaagcctttcaagagttgaatcttccaggtgtcaacttgaaatactattgttgggcgggttctgagatggtgacaagaaaaactctgtaacatacatctcctcatactccttgtaggtccattttcatttcaaaatacttaacatgtgataagggatcttccttcccagtatacatcttccaggttggcatcatgaacttgtgaggcaactctaggacattgatctctggggagaaaggggttccacgtgctcggtccaactcgaggtcattgttcgtctgacccgccagaccttggaacatattttttagttcatccaactgtgcctgcacagatggatttacttcttcggtctcttggccgaccagagtcacgtcagaatctctttgagcgggattttgaacacgagccctaggcgtagtggctggtg

SEQ ID NO: 223489 - DNA, 1786 bp, Cannabis indica
gtgctgagaacactataatcatttacaaaaacatatgttctggacttaatagaatttatagacatgaaataaatcatgtgaaccatgtaatataaaatgtgatttctgatctttattaattagtaaatctgattatattgaaatgggttttatttagggcacaaaacccaacaccaacatgggaagaagactcaaacgtgaagagttttgagtctctcatttatgcagaacaacaacatctccgagaactggtcaccagctttgccagaatacaaaaataaactaagtgatgtaaaaatatcacttagacatcataaagtacatcccctaaatatttttttacttttccatcgtccaggttgacaccatatgtcaacctggtcgctgggatgtcaacttgggcatttgatgtcaacctgagcgctaggtcatgaactttcttaaataaaacaatcataaatcactcagtattaatctgattaatgcaataattgcattttgaagatatttcaatgcactatcaagtcatgtatcacgctttaatcgcaattctgaagttatcgattctaaatttcaccctcaagggagttacaaaaataagctccaacttacctggtgtgagtcctcccatcgcatcctgggctccaaaaattgaggatcaatctcaaaagttaattttcacggtcagattatcatctaaggtcaaaaataggcaacttttattttttcattattttattcctatttgcaagggtcaatttatagcgatagatatatagtaaaacaatgtaaagacacaagaattttataaaggttcaggcatgcgtataaggcatcctgttcggactgtattctccaagcagatactcgaagtcaattccacgtgtcaccatcatgtgatgctacgtcagagtgcaaaaattaggataacaccttgtaacaccctaactagcataggcgtattagcgtgattttaaatgtactgtgcagctcgttgctaatcaacgagattaagaaaaacgtgaataattaaaattttcatacttaattaaaaatataaagtaatacatccataaaattccgggatcccgttgcaaaataaatttacaaaagtttgctagtttaatacaaaatttttgtcacctagtgactgttaacaaaagccttgatgtcctctaagatcgtacgctctaggcctaaccgccccgacatgtacaatcttcacctactcattctcacggcttcatcaaaaataggaaataggtactatcgggaagaaacaacacttcctaggtgccagaaacaaggcctagtgcctaggttgacacctggggctagggctggcccagcgctcaggttgacattttgtcaacttgggcaaattttgatgatgttttctgagaactcttctgagaatcttctctatttttagcaaagattaagactcaactattttcgaggaccaaactaaacttccaaagggccataaaaaggacccagcgcccaagttgacacatggcattaggcccagtgcccagattgacatattgtcaatctaggatgtttccaatctagttttcaaaactgtgttcttagtatttttttctgtcgttagatataatgaagaatcaaataaactcaaggagaaaaccacaaactcgaggcccaaaagtagagcccagcacccatgttgacaatctacttggtgcgctagttttgatcatttaaatgccaaatctgatctgagcattcaatctagaattgtcaaaaatagggtaagagacct

SEQ ID NO: 223490 - DNA, 1009 bp, Cannabis indica
acaaggtcacggtcccaagaggatgcatccatttcgaagagagaattgaccatcctattcagcaaactcgggtgtgtagttgtgacatatgggttggagttgtcaggtagccaaggatgggagagaatactggttgtggtccctgaacctatagtgcgtctagcaccaagtttaacaatatcttttgcttgccatatgcttctccaaatgaagctgggattgtttccaagttcagcaccaagaaaatcagagcgaggaaagtaccttgccttataaacttggctaacaagagaatttggtgtaacaagtaaccgccaaccttgcttagctaacatagcaagattaaagtcgtgaagacgacgaaagccaaggcctccaaagtctttgtgaactgccatcttctcccaagacatccaaattataccattacccttactagatgatgtcttcccccaaaaattggccattagagtttcaatctcattacaaatcttaagaggaatgaggaaaacactcatagcataggtagggagtgattgaataaccgtcttaagaagtatttccttaccagctcgagatagaaaacgaccactccagctatgtatgcgattcaccaccttagtttttaaaaagccaaggattgccgtcttcttcctacccatggtattaggtaggccgaggtacatactttggtcatcagcttcagccatctctaatgttgaacatatctgattctttagcatttgatcagtattggggctaaagaaagtagaagatttagtaacattcaccttttgaccagacgccatttcaaaactatgaagcatagtccggacattcaaagccgcagcattggtagcttgacaaaatagataactatcgtcagcaaacagcatatgtgaaattgcaggggcaccattagccacacgacagccttgaataagctggttagctacaaatttttggatgatagaagagaatccctcggcacaaataatgaagagataag

SEQ ID NO: 223491 - DNA, 1802 bp, Cannabis indica
ttagggcacaaaatccaacattaacaactaatccatcaatatcagaatgatgaacgttcctctgtcgggaagcagagtgcctcccgtagatgtgatcaacggcggagtaggtcggggtaatgtgagacctctcaatctattccctgaaactactggccctcacgctggggaaacgtctacaccggcagccacaacgggacattttccaccttttaccccagtggtggtatccgaaggtattatccagctgaccaccgattagtacactgcaattcaagaccagctacgtgctctgcaggccaagtttgatggacaaaacaggactcgacgtcctccccgagtacccgctactcgcacagaaaaccctcaggtaactaattctagacgtcataacaaccgtactcgcagagaacgaagggccaatcaggagggacttgatttgaactagcccaagtcgagggaccaatccgcaaggcacctcaattaggaggcgcagacggaggaggaccctgaacgatgcaatcctcgcagaagaccccagtcgcgagacaacgacattgaatctgcctcctcatcctcgcatggctgcacgcccagcaagtacaccagatcgggttcgagggaaacaccgcaaggaggacggtatcaggttcacaggggcgatctatgcgatcacctcaacactttcttcagggcgtgctcctagacgcctcgggatgtcgaagagccccgtgatccccgaatgggcgatcagggcgtaaacaatcgtatcaacccacctaccgcacaggctgcgactactggggttaatatcccaacgaacatcaccgcagtagtaacaacgcctgcggcaacacaagtcaatactcccttagctgggaatatcgatcaaggtatgcttctgcaggtcttaaaaatgctcgagcagcagagaaagtccatatacaagctgcatgggacttctcctttcactacagaagtgcgacaagctcgactgcccaagggattccggttatccgaatccctaaaatataaaggtaccactaatcccatagactatttagataaatttaatactattatggaagtggatcaggtaccccaacttgcaaagtgtcgcattcttgcggcaacgttggaagaaaatgcccacgattggttcagccaattgcccgaggcatctatctcaacatgggagacctttgtcgacctgttcctcacaaattttcaagccacgatgacctataggccaccctataccactctggctaatatcaagaaagaacctggtgagtctttaaaagactattttaaacgttttaatgctgaggtgacaaaagtagagaaggctcccgagtcttcactagcatgtatgttgataacaggtgtcctgccaagaatcgatttcaggaaggaactgcaggctcgaagacctaaatcgttggtcgagttcttcgctttcgcggagccgcataagaggattgaaaattctctggctgagttagaaaatggcaaagacaaatgtaagtcaccagtgccgcgatcacgatctcgcaatcctagagggaagaattcaagaagaaggagtccaagaagacgcagtccacagagacagcgaagtccaaaattagccaagtcccctccaaagaaggagtcctccccgaagaggaaaggtggtccgcgctttgtaaattatagagagttggtagtctctggggaccatatctacgccatcaaagaaaagaacggggtcttcaaaaagcctcccccaatcaggggaaaccgcgataaaagagacccta

SEQ ID NO: 223492 - DNA, 6533 bp, Cannabis indica
taggttatagtctttattttggatctggaaaattgactttgtatcgtgactctatgttggatggaaatggagctttatgtggaaacttatataaacttgatttacatgatgttgtacctgctacttcttccttttgtccttcttcgtctcttaaagttgttgttggttctaaacgtgcaagattagatttgaaatcttctacgctttagcataaacatttaggctatacttctagagatagaatggagagattggtgaaatatggtgtactttaggatcttgatttctctgatttcattacctgtgtttattgtataaagggaagttgattgccaaagttagaaagagtaagtcagacaaatgcacaaatatattagagcttatcaatattgatatttatgggccttttgttccaccattctaaagataaatactgtggcactttagcaaaaatagtgagtatacgatgcaaagcaaatataagacggcagtggctatgagggaagaatcagcacaatcagattcatcaagaatggaagcatggtggacctcgctttggagcggaaaattctttcaaaaattaagcattttgtttggaaaacatgtcataaatggctccctacgaatcatactttgtccaaacgaggtttgtccataaatcctaccgctacccagtgctctaaaggaaagaaaactgatgcttttcatgtgttatggggttgtcgctataggctgatagattggaagcaatgtgggctatgacatcaatttaaagataaacgtagtacagacgtgatgaccttcatggaagaaatgagagaggtatgacctactattacatttgatttcttttttattgtggcttgaaatctatggaatattagaacaagtgttgatccatgggggggggggggggggtctggcccgcgagctgggacatggtagaatatgggaagaataaagtggttgctactagagaaaatgttcactagaactggccaacagaaggttgtcttaaaatcaatgtcgatgcagatctacattgcaaagatgggtgtcttgctatgagttatgtggcgatcgagaggggatcgtggagatctcctatttgcaccacccaaatatatgcaacaagaaaaacaagtgctggaagttgaatttatgggtattcgggaagtattattagttgggatccaacacagtgctaggaaatttaatgtagaaacagattgtttaagggcggttcagctgattcaagaaaaagataatagttgtcgggacattgatgatttctacaccaaatttgttcactgttgcttcatttgaaggtgttgggtttgttttttatttatttttttatttttagagaagtcaatattgtggctcacattttagtcaattaagctttattattcaaagctagtgctatatggattgggattacacccccttaattatgttcgtcaaactcttcgagttgatgagccatttctttcctaattagtgaatcccatttcaaaaaatatatacatataaagggtcttcttttgatgcgaaatcagattcagagatttctaatctcttcaatgaaatgcattttctacttttctttcttttccctattttcttttattctttaactatcatcgcgtctgcaattgtgtctcataataacacaaaggatatagtcttcctcgtttttttatccaacaaaaatcattatcccatgcatatttatcatttgtaaagtaatatgtgtgaaagattttttttaagcttccatttacttatttatttcatgtgaaaaaaaaaagatgaaccaattatttctgagcattatttctacgagtgattacttctatgaacattgagaatgaagtgagaaaattaagtggtagtaccaaatgcatcaattcagcaataatattaaaattattttaatcactagacgtgtggattgggtacgtatgcatgtgttctaatcacaatgtaacactcctgcattgtgttgcacacacaacaaaaaagaactatattattattattattattattattattattattattattagaacaatatattcattcgatctttttttctttaattagagaggaaaaactcattaattatataatcatgctgatctgcatacatgcatgtttctaattttaagtcctagctagaatctattttagtgtgatgaagtacaaaagctctataattaattaagagtatgcataagccatgctgcaaaaactttttctgtgtagctcctcatattcataaaattatttttatgaataatgcaacgaaaattcttaaaacctctgttttcagttgctgtcatgatcatattggttattaaattatcctccggtattttttttaatataagttatatatttgtgatatgttttatatgacattatgttttgttgatacagagaaagaagatattttaattgtcttttatctaaatttagattatattctgattttgatgacatgcaacaactaataatatataatatagaaatatattatatttatataacttggttcatttctttattagctaactcaactctctctctgaaggtttcgtaagcaattattgaggaagcaaaagaaatacatttggttcctttcttcaaacaacaattattaaaaacttatagtatatacttattcacttcatcaaattaacacacaatgccacttatactaataactgtggttgaaaaagttaattataatttgactttaacacaatctttttaaaaatcaaagatatatatattcatataatgtagctcctgtaatataatatactagttcttttgtagactacagtatctaaatatacctgccccactctacattcatatatactatgttatatatgaaaaacatatataatatgtatatatgtgtgttttttaaataatcagccaaaaaaaacaaaagcgtaaacagtactagtactggacctaccgtttggtagtattattacccctatgttatcacataaaattggagccaagtaattaaaagaatggtttaattttatgtgcttatattcgattcctttcacactatatttataaattcatgaacccatatataatgtagctagtattattatttttaagaggtggatgtatataatcaggtgaacctggccagttactaactcgatctcgatcaatatctccaacccagaatatatatgtatatatatatatatatatatatatatagaatatagatacatatgcatgatgcatccaccttatttatatatttatatagttcactctttagttacatccaaatccctgttataattttaaatatggaaatgtatacatttgttaattaataagtactgctacttgtttaataatataatatatacgtatatacgtgtttttaaattagcattatcgactaataaacttcaatttcagagaaaaggtcaagctatttttagtcagcgcatatcattatttagaagtagaactatagatcaatttttttatcatatattgaaacagcttcgagtaaaatcgtattcaactttttcatcttaataagaaattgaatttaaatgacatatatgtatatttatatatgtttagatatgatcaatatagttaactaatattgctaaaaatatatataaaatataaatatatagttaagaaatagcaactagttcgacttaattatatattgttctctctctttacatacaaaaatatattggtaggggcatactttcggtactaaaacaaacaaaagttttaggggagccacagttaaaagttcacccaaaatattatattttatttaattaaataattaagaaaataatcgaaagtagaaaatgttaaggattgaaatggtaaccagtgacaagtcaccaatccagttcagcggctaattgaatatgaagtggcaattgaaagctcgttattgagcagtcacacattctgagtatagcaaagagcatctttctgttattaactttttaggaatattccattttattgttgtgcattattttttatgcaatgaggtgtctctattttacaatgctcttgttatccactataagtatcaataaaattacaaaagctcattgagctaaatttattcattttttatttgtgtaaaatcttacttggtatcagagccattgactggaaatgtcgattggtgaataaactcctagtgtagctgctcagggagatagatcagctctggtggtcagcaagcaacaagcctctgttgaaataacaacaaatttctctcaaggacatacctttagtgttgttgtccctcagtttgggaacacattgaatcaatcatttactctcatattagacaaaaataatctctctctatggaaaactatggtctaacctattgctacgttttataaattggatggtttcttcataagtactaggccaggccccaagagtttataccatttcctatttcagctaatggtcagtctgcaaccaacagtgaagtgaatccatatatatatatatagtttgcacaatagattgttcatgacaaacgcttgatgggttggttatatgagtctatgacagaaggcatagccactgaagtaataggttatcaatcctttgctgagctatggcatgcattaaagggtctttataatgatcactccaaggctaagacagatgagtataagaccaatatccaaacacacaggaagatatctgatacaatggtggaatacctaagacaaaagagacaatttgcatgtgaataggtgaatcctaccatgaatctcaattagttgctaattatttggtttagatacataatatatgccttttgtgcttctcattgagtcaaaactagctaaaacttggcaaacgcttcaggatatgctcttgaattgtgacaccaagatggagagactcactacactctaaaaactcaaagcaacctagtggtccattttccccaaatgaaaattatgcaaataaagaaaataaccctagatctagtcgtggctcaaaacattttgaaaattgcaaaggtggtcacaacaatggtaacaacataagcaatagaggaagaataggtggaaaaggcagaagaggtcgatataatggaccgaaacccacatgtcaactgtgtggttgatatggccattctgcagcttattgttacaattaataggttttatgaaataataacatttatatttaagacaactttattatcatattagttttgttttgaaataataacatttatattttaattggggttaagacaacttttgtcttaatatatatatatatatatatatatgattatagatttgaatttgaatttcaaacctaacataaatatcccacaaaattatattattttatcttaattatgaaaaataataaaataatgttattatttaatacaaaataattaagataattataacttgaatttaaagtccaaattaattaccttaatatttattttgaatttaaaactaaataaatatataaaataataattaattatttacattaaataattaaatgataatttatagtatatatacaatatatatacagtatatatatatacactcaaaaatatacacatatatatatatatattaatatagtcgggtacgagcaaaaaagagtcggccacaacagcccaccattttttatggctccatgagccagcatggccacggtgggcatggaagtcagatgaagagggtccgaggagcaataataggtaggtccaaaggactttatgacccttacgagtctcttcatgctgggaaagtatggactgagattcataggtgaagtagcaccttcacggtggttcacatttggataattaacggcctttcgtacatggtcacgactaaagtcccatgcaggttatcgtgcttcacatgaacgatcaggtggtgttcaaaccacctacagcattaacaatcaatgtttaaaccacctgcaacgttgatagtcaatgtttgaaccaacctgtgagcccaaagctgaaacagaccgcagatcgacgagactaccgttcctagttagatcggatttataagctaaacgacatcacatggaagaagggcacgaaacttgagaaccacttgggtggtctttcatggccggggttcctccatgaaccagagctcgcatgtaatgtgattttgacgtgtatagccgagtttcaagattagaaaacgagctcacatgcaatatacattacatcatataatttttacgtaaaaataatttcataaataaaattacataaaaattcctatgcttcaatattgacttacattattttctaaaaaaaataataataacaaaacctacacctaatttaatcatataattaacgatttattacctctcatacattcacaaaaatacaaccatccattcacatacatatcacatatataaataaataaaactcacacaacatttaatgtata

SEQ ID NO: 223493 - DNA, 1856 bp, Cannabis indica
tttttcagggtgtcaaaccaggctcttggagcctgtttgagaccataaatagccttgtgaagcttgcacacatgattgggaaaatttttgtccacaaacccttgtggttgagccatataaacatcttcttggagttgaccattgagaaaagcattgttaatgtcaacttgttgaatgtcccaaccattagagatagctaaagtgaacataattcgaattgtgcaaggtttgatgacaggactatatgtctcaaagaagtcaataccagctgtttgttggaaacctttggcaacaagccttgcttttagtctttcaacactaccatctgcattgaacttaattctgtatacccatttgttgtgaattacaatcatgtcagctgttcttggaacaagagtccaagttttcttcttctttagagcagtcatttctgatcccattgcagcattccacttagggttggcaagagcttccttgagggaagtaggttcatgttcagtgtgtgtattagcaagaaaacttctgggtttgtaaataccaagtttagatctagttaccatatgatgttggtttgttgtgtgaggttgaacctggacagtaggtatagattgtgttggagaaggggaagaactggtggctactgtggactgatttggtagttgctgagttatgatgggtggtgtttgatttctggtaggagagacaggaggtgatagggttgttgtatcaggttgtggtggaaggacaagacttggaagtggaaaagaaaattggttactggtttgggcaggggtatgtgtaggtgttgtgggaaataactcattgtagggaattggattttgagcttcagggactgggtctgcagctcgagcttgctgtggctcaactctttcacctgctggaggttcatttcgaatgccatgattcgacatggctctgataccatgtaagaggtactgaaactcagtactcaagattgagcaaaaactggaaaatgaatggaggaagaagatgaaatgaaatggaaagctcaactgaactcagttggcttgaaacatcttatttatagaaggaagagaaccaaaacagagtacaaagctaatcaaccgaaaataaaggaaactaactaactaactttgtaacagatttaactaatcctatgtacagtaaaaacaatataacagactagtcattgttacttctaacaaaggcgtttgaagagtaaatcaaaccaaaccaatccaatgcagtgatgagtttaaaaataatatcattaaagcttcttatataccagaagaaaatgaagaagcataaaaatgacagattaatgatgttagaccatgagaaaataaagagaaaaacagagaagaactctctggtgacataaattttccgagaaaactagaaatgaaaagtaaagcaccatgttcttacgaaccaaacaactcaacgccctgcctgcgtcttattaaagctcgttagcagaagagaaaaagcataaataaaaatggcagatgaatgagaagagcgtactctaacttccaaaaaaacagtgatcgatcatcgattataaaagatgcttgtggtgaaataatgatattatattctgagaaattaaagtgttaagcatgattttcttgggagccaaacaataagaataacaatatataaatttgatggaaaacaatgatgaagataaaagataaaggcgtgttacgagaggttgttaccagagtagaagaagcataaaaatggcggattactgagagtagagtgagtgagaccatgatctgaccaccatgagtagtagtagtactagtggtttggtagcagaggagagagaaagtagagagaga

SEQ ID NO: 223494 - DNA, 1795 bp, Cannabis indica
tgtttagaggacatgtgcttccttcataacattcacaagtacaattttcttaaagattttatttcaaaaatattatgtttttaataatttttttttctttctttcattatataccaaatattacctacatacatattgtttattcgaaaacttactctatggacatcaatgtttaacacgtagcaagaaaaaaaatattctagaattgagtagttttgagtcatagcaatcaaactgaaaggggtccctagcctaatgcccagggtgactccaagaacttcggaatgggtgtttggatcttgtcaagttgtttccaactcacaatctttcagaattttgaatcaagaagactagaagaatcaagtccaataaattgaaaagttacgaaaatgcacctcgaaagaagtcaacttagacgcctagggatttcactcagtgcccgggtgacatcccaacaagggtttcaatttttgggtccatcttagtgcaaatggctcaaactttatacttaaacatgaataacacctgtaacgaacatatttggggcacaagaatcagaattagaacacttttattttttagcacttgaggtaccaggcgcctcaaccacctagtgcacctagcgcgtaggttgacatattgtcaacttggggcgcttccaatcacaatattaaaaaagtatcccgagtattttattcgtctccatccaaaacgaagaatcaagtgctttcgagaacttggaggccaaaacgggcacctagcgccaatgctgacactttgtcaacccaggccatttccatcagcagtttggaagaaatcttttaggcaaatttttgttttcgtcaataattaagatttgggttgagagtaagttactttcataagctattcgtctgttgtcatttcatcttttaaaagctaacaggttatattaaatttgttgaattcctaagatctaggccattggaaccggaatctcagggcacacaaaattaaaaaatttattaatcctgtagaattaaaatcctaaggctcatggccaattggaacctgactcctatggtgttcagaattaacttcatgtggcgaaaattcatctaaaatttcagtacttgatgaatctaaaacaataattaattacacacaaattcccctcgattagggaataaaaattgtcttttacaatatcataaagggggacccttgtcccccaaaaagaaaagataaacaaaagaatatagctgtgaagctcagggttgaacgttgacattggcaatagttggggctagtgttggcttttgagcagctatgccagttactatttcccgtactagaggctcaaaatctggagcgttagtagaaagaacaattttggcttggaggatgattctgcgacctccacatttttggcaggaagaatctttttttctttgtcaaggagtaaagagcgaaagtatgattcctcgtcaaccaaaaccttacagtgggtgcagcggaatattatgactccttccattcagatcgctagtccttgattcctttctatagcagagcataatcaagatctgaatgtaaagaccgcttagttaatttggaaattagcagttaattatgattaattatgaaaattatttatagatatttaaataattgtttgtggtgttattattgaattctgaaatgcattttatgtcatatagtgaatttcataattttgtatttccggtgcccggtaatatggaactcggtgtttggctcagtataattacaacttagtatgttagtattgtgggac

SEQ ID NO: 223495 - DNA, 1910 bp, Cannabis indica
taataaaacgacaatgatgaggctaagagttgtgtagagtagtacggactctttctttcattgtttttcgacttcttgaatgcttgcgataatgttgcatgtaagtttattggaattatatctatatatctttttatatgtatctaataaatgagtgtagataagggtataacgtacttcaatgtgtagtacatcattgactacgtatgtttttcagattatagtgtttttttaaagaaaaataaataaataataataagtagtatcaatttgagtaaatttaaaaggtggtgacattatttgtggctaaatcttcctttttagaaataaaggggctaaattttccattatattttgtgttaaaataaataaatcggtttgtttagtatttatttataattgtattatatttgtaatgaggttgtttttattattttatagtttatttatatttgatctatagttgtcgtaaagttaatttttattattttttagtttttttttttaatttttgttgaataaaatgtagttttataattttaaaagtttacaaacttatatatatatataaaaaattttaggttgtaaaattataaattaaataatatttttaaaattttccaaaatttttcttatttgtcctatgtattatatcatttattgtaagggtgtatatcggtcggtttagtcggattggtcgggttatattgtaatttttaccatcccaatttaaatatgttgtaaatatctaattgtaacccgtccaatgaaaaaataaaaaaagtgtaacccacccaatgattttcgtcgttttggtcgggttaacccgtttaaaccgatatgtatttttattttttttcattattgttagttttttgtgttcaaataattgatttgaaaaaaataaatgtatagtagtatatgctttctaaaattaaaatagttataatttaaattaatgttaagaaaataaatataaattgaataaacattaaaatattaaacaacattttttaaaaaaaaaaataaaaaaaatatactcatatataaattctaaatttcaacttcaatattcaaatacaattaaaattattaattataaattttaaattttaaattaaacactataaaatataaactttaaatgtaaaatagtttaactattaaacgtaatttatagattatgttataaataattttagtaaaaaatatgaaaatcggtttattcagtttattcggattatttgggcagattagaataatattcaacctacccaatagattcattgggcagtttgaatttttggtaaagttattcggattgtattttttatcagtttaggttaggcagtttattcagattcagcggtttgtaaattattttgaatagccctaatttattggaccactttcttagcagagaagttatctaaaattatggagaagaacgtcactgggtatgtaagcactaattttttctagctagttgtgactacattgtcccatggtttacacaaaatcaaactttttttctttctttttgttttcctgtaaggcaccaaaaagaaacatggacagtcagtagtatcactgtatttgtttgctacgatagacaacataaacaattacttgcttacgtcactgaatacacatgcaaagtcaattattatttcaaagaattattagcaagtttacattttccacattacttatgtcctttcaaatataaagtttgttaaaatacttattttgaatatttatatttatagaaatttaatttttttttttattttgttaagttctgtcatattattccacttaaatactgatatggttttttaaattaataattttataatttaaattttgacaattattaaatggtactttttaaaataaaaataaaattt

SEQ ID NO: 223496 - DNA, 1389 bp, Cannabis indica
aacttgaatctttaaactggctcgataccacattagcagtactcttataactgttattacatgaaaactcatttacaaccttccattcagtattcttatcggactgatacaccaatctagtttatatcataaaatttccttcaacaaaattaaaagtcatttgtcaatctggttccaaatctttccttctacttctaaagttgggagtcactctactgggccattatatttcttcccactaaattgatctacaatataatattaacaagttctccaatcacgatctcaatccttgttctggttacatttcaagtaacatttggtaagatcttttcgttttacaaacttttcctagacctcttcggttaaaagtactcactactattttactccccaaagtggtagaaaatcacactgttaaaatttcaatcaactgtaaatgtcaccactgcctcctatctaacttcttccaaaacaaacagtatttaaggcttttttgttccgtatagacttctcattttcaccatagagataacgtgcccaactttcagtgcaaaataattactgccgattcaatatcatgactgaaataccattgctcatactccttcaatggtctaggcagttaggcgacaactctcctaaactatgttagaatacaatctaatccttgtttagaagtgtcaccctatatcacaaatttctcctcattgagcgacaatgttaatattggtacaatagttaacctttgtttcaattctttgacctaactccactaagagtctaaacatccctcatcaaatattctgtagcattctgttaattcccgaaagcttctaacctcagttgtaaacttgggttgaagtcaactctaagctgctttaatccttattgaacctatcatgatactatctatatccatttcatgctctaagaaaccaacttaaagtcggtaaatttgcatttcctgcaattagcatgaagtttaagctcctaaaatattacaataccattgaaaaatacctctcaaacgccttctttgatttgaaagaaatcaaaacatcaataatgataacattcgcgaagtcatcaggtatgaaaagcttctttagaaatacccttctctcgaatcttcaactagtaaaaaccatatcgaagactgatctcaaagaagacagtcctaccctaaaattaatcatcataacttctatccttgacaaaagtatacttactcttcaccatgaatatatttaatttccaatgatcaatatatacttataaagtttcatcctcctccttcacaaataaaattgacgtactccaagatgggatacccagtccaacaaatttcaagccaacatccagcatcctctgtaactaaaccttcaa

SEQ ID NO: 223497 - DNA, 2569 bp, Cannabis indica
taaacttgttaattatcttttcaacatagcaaacttgatttaatgcatatatttcttgaatctcttaacttttatccctaagatggtatgaacctctccaaggtctttcatcttaaaagttcaagatataaactttttagtttctttatgcctcttaagtaattgcttagtatcaacaagtcatccatatagatacacacaaaatgattacattatcacaagtcttaaagtataagcacttgtcagcggtattgtgattgaagcaattagaagtaatggcttgattaaacttttcatatcatttttagtgcttgtttaagtccatatagtgacttcacaagtctacacaccttgtgttcattttcctttcaagaacaaaaccttccagttgttctatgtaaatcttctcatggagatttccattaagaaatgttattttcacatctatttggtgaacacgtaggttgtgtatggatgacgaagcaaacaacaatctaatagaagtgattcttgctaccatatcataagtatcaaagtaatatattccttccttttatctatattcttcggccaccaatctagccttaaagatttagatggttccatcgatgttgtacttaattctaaatacccacctacatcctataagcattgatccaaatggtagatcaactacttcccaagtgtggttagatataattgaatcttttttatcatttattgcctctctccaaaaagcgacatcccttaatgacattgcttcttaaaggttttaggatcaccatcaatttgaagtatcataggtacatcattttcacttcctctcaacgcaccagctacgtcagccaaccgtgggatcacgggcagccaagccctgcctagtacaaggctggttggccatgtacagttgcccaacacgagcttggtcgcccagaatgaaccgccttatctgggagtgaccggtcaaggctagcagcacttgatagggctggctggcctccaccatacactctcctatggtatgtccgaccagaccctagaacatttgagtctgtagcccatccaaggagggctagtcagtcaagtctctgcagcaatggatgcttctgtgcaagcactgttggatcaaataagggacatgatcaagggcctagctggtccaaaaccttcagaccttgagctagacaagtcaaggggatcactattctcagcatacataaatgccttgcccttgtccaacttcaagatgccggtatggaagatgtatactgagcgagaagacccactagcacacatcaagtactttgatatacaacttgatctccagaagattactggtgatgtgcgatgccgcatattcccaacaactttgtcagaaatagctcaataatggtacttcaagctggctccaggaagattcaattcatagaattagttttctcgagaattctacactcagttctcgtcctcaaggcttataccatcgcagttagaagaccttgtcgaagtcaaacaacaacaaggagaacctttgaaggattacatccagaggttcatggccaagaccaccaaggtcaaaggctttacagaagagggccgatatacgaccatgctggggggcatccatctattgagtgacttctggaaagatatcgaaaggatctcaactaacaacatgaaggatatcaagctagaagaagttgtccaacaagcctagacagggcaagtcaataataggcagtcacaaggcatcctatagccccatgacccactaggcgcacaagcaggtaccatcaactctggccaaacctccagtgccaagaacactaggagcaagcccaacaacaacaactttggaagaaacagtggaaaaaaggggaagtctaacacttctccgacgcaacaaaaccagaaggacaaggaggagaactatacatgcctcaccctcctgatggagaaacctgaggccatcttcatggccactcagggaacaatcctaaaaaaaaagccccctcccattaaaagataattgagcaagaggaacatgtcgaatttctatcggtttcacaagactttggccatgacaccaacgacggtttaaatttgaaaagggagattgaattcctcataaggaagaacaatccccatctgatcgttatgtgcagaatgacaaaactcaggcacaaggtgactaaaatggagatccaatgccactactagtaccgggtcacttaggggtcttcatggtagaccccatattgcagacaagaccaacaaagctagagagtgctctgcttggacactctgtcatgagcctaaaagtaacatcctggctatcaaagaaagaggctttaagcaaccaaagcttggggaacccacgatctctttcacagaaagagatgatactcaagtcagtttcctacacaacgaccccctaatcatcactgcacaaatcgagaatatgactatggtaagatgcatggtgggcaatgatttggcaccctgcagtcaagtgatgtatggcttctttagcaaggacatcacacctgtggggtatatcagattaccc

SEQ ID NO: 223498 - DNA, 2554 bp, Cannabis indica
acattatactaatcttacattgattccgaatttaggtgtgtccaccaacctgagtggcacaaaaatgggaaaaactacggttcccaaaattgccccaaccggtagaccggttccccaactggaattccggttctgggaaaattcctgggagccaactagaattccagttcttacaggcccctctgaaccggaattccagttcagtgcaggaaagaccaaaattttcatatctcaaccaaatcaaccccaatccacatgaaaccttccagacctgttctaagcatcctaaagttcatttcccaagcaataaaacacagctacaagcacagaatcaaaacttgccattaaagagccaagcttgagtttcaaaactcaaagattggttaactcaacattcagctactactacaagcttaaattaacattaaacaacatatctagcttccagaaaacaacatcaaatcctaacagcagctacaacaacataaaccacaaaacatgcatatccgcttacttaaaattcaagaaaactcaagaggacaaagtcaaaagcttacctagagcttaagcactccaaaatattgcaaaaacttgctttaattgagaggaaatggaagcaaaccctagctggtctagggggtttgaaaatgagagagagagtttgagagaaatgcaatgttttttgtccaaatttgattttcttaggaaatgagataaacattacttgttttaatcaaataaaaccatttaattaaactttaaaaatcagattaatataacccacaaaagacaaaacacttcatgctaaaaagaccattttgccctttaaacactaaaactcactaaaagtcactaaggggtactttaggaaattcttaaatcccgactattcccgacatttccaatgtctaactataccgccccgttaactaaaaatactaagatgtgattctaataagccacaccgcgttccaatgttgccgggcactaaacatgcaaaattatgaaatttatatatatgacatataaaatgcattcagaattcaaataaatcatcataaattaataatttagaattaataactaatttttcataattaaactctaattatctgctaatttctaaatttaagctaagtagtctttacatatataatgtgtatataaaaactgattgtataaatatatatttatacatagttatgtacatggagaaggtatcaatggttacatttttattgtaaccattatggttacatttttttagccattggatcactattaaatggttgtgattaatttgaaaattaaataaaattgacctgtaacctgatattaacatgttaatttatttccttataaaactttaattaagattaattatattttaaaattaaattaagtataattattaatttattttttgcgatttattattaaataaggatcttttagcaatttttttacacttaaattatgtaaaattttataacaaaattctttataatttacaattattcacatataatttcataattaaaattttgttatacatataatttcataattaaaattttgttatacttataattttaatttaaaattattacacttaattatttaatttttttattgaaatatataaaaagtgaaaaataatatagattacagtgagaaagaagagagggacttaatggtagatggtttgaaactgtgtttgaagattatgttcattccctggttgtccaacactccttgcctaagacaacgtccatcatctcttaccagacgacgatctacacttttactccaaaacatctactctccaccatttatcgtgcgccaaccatctatatatttatgtggttttggttgatttagactttgttgacaatggataatgcttctatataacccaccattgaagaaataaaggcaagtgcaattgtattcatttgtgtcattctttggaaatttttactgtttggtcactaagaaaaaaaatatctatgcagtattgggattatatcatatgcctttacagtaacattttgtatgctttcaatgaagggttcttcattacagggaattgtgggaactctcatttgatgatcaaatcaaaattattgttttagcttgtctaagaagatagaagagacatatgaattgatagaaatgagagagtctagagagaataagaaattcatatattcttcattaattggttaagtgagccaatagttctatttaacaagtcgctactcttcacaccaataaccaaatatgttcttacactaataaacttctatactaaagagtaatatttgttagtactgttctttaatattggtttaagacaagggtgtatcagcttgactcagcaagtcttagaatgatggctggttcaagagtgagatataagaggggtagctcaatggttaggcatgttgtttatcctcgtaaggtttgaggcctcatcatctaattgtaaaaaaattaattataaaggcagaattttaatttatataaaaataagtttaatttttgtaaaaaa

SEQ ID NO: 223499 - DNA, 1206 bp, Cannabis indica
ttttttttttttttgaataatctctaaaatcacttttttttttgtacattttttctacattttttaaacacaaatatcacataattttaaaaaaataataactataaaatcacgatcctgaccgtaaatagacctttatgagcctttaaaatatcttttatgccatgaccaatgtcgcaattggtcctatacatgtgacccgctactagaaaaagaattacaatagctaaatgatggtgtgcaatatgaacgagaaacataacaaattagaaatcactaacagaatgagaggataaataattagggaatcatttggcatttttggggatagagagacttgaaccctcgtgatttttaaagtcaacggattttcctcttataataaatttcatgtctacgaaaacggcattccctacttttgaatatttatatcggattcggattaaatcattttttatacgatttcagatctttcaacaagaaacccttatccgatagatttattcgacatttatagagctccgctcttgcaattggatcattgtgattacgagttggatgtcgaattgtccaggtgataatgatagtatcttgtacctgaaccgatgcctctttatgagtgtccggtaaccatgtatgtaagggtgtaatcggtaatttgacagcaaaagcaataaaaatctaatatagaatagcatttcgagtgctacaggatacgattgattagttgatgttttaaaatttaatgttggttcattagaaccatataaacaaacacctagaattcccattaataaaaaagcagatgtaatactagtggggattgtgggacaaaaaataaatccatttgatttcagacttggtgcaacccaatgtcatcgttctctttggtttgcacaaaaaattattctaaggatctacaagaagatcaaaaaatacgaaattgtatcaagaattatgtaggactaaacattttgagcgggttcgacccggacctgggcaacctgcccggacctggcccggtcaacccgcaattttcttttaaaaaaaaaatattcgggcgggtcaagttcaacccgatgccttcggacgggttcacgggttaacttttaggaccaccgagtttcaggctgaaccccaacccgcatatttcatatattatatatatattttttttattttcttattacatattatatattaatt

SEQ ID NO: 223500 - DNA, 2334 bp, Cannabis indica
catcaacaagttggtcaatgctattcaagggaaaactatcctttggacatgctttatttgaatcagtgaaatcaatgcatgtgcgccatgagccactgggcttgggcactagtacgagatttgctaaccagtttgggtaaaatgactcccttatgaagcacatgcgaaaaggcaatctacttcctctttaagcgcttggtacctcacggggtccatttttgcggcgcttttgtcggacacttcgcacttcagggtcaatgttcagttgatgacacgtgacttgcgatgatatcccgaccatatctgaatgtttccatgaaaaacatccaaattttgtttgagaaaagtgacaagtttttctcgctgtcgaaaagttagtttagaaccaattttcaaaactttactatgatcagattggtacctcaattgtatcctctacaatggtgcggtgttggtataatcaaggatccttagatccagaacttgtttttcttcatgtggtatctcctcgattctgaacacttcttatcgaggaggtggtgcttccaacaggtatatcatatttactgacttcttcttttctgcgagtttcagtgctgcgttgtagcactctcttgaatccgactggactcctcgcacaattcctaccccagctggggtagggaacttcatggtgagatgatagatagaggtcacaatcttcatctctttcaaaatagggtggccaattactgcattgtatgtcgagtactgatcaataactatgaaatcagccatcgatttggcagtgacaggtgcggttcctagggtgattggcagtttaatcattccttttaatgtaattgtatctccagtgaacccataaatactcgagactacaggtcgcaaatacttttcctgtattcccattttcttgaaagcttagaaattgagaagatttactcagcttccattatccactaatatgtggtggacatatctcctccaatgttagcgacgataacaagtgcgtctgcgtgcgggtggtgaacccacctagcgtcactttccataaaagttatgtcatctcattccttcttaaagagcttttctggtcgctcactcaagttgttcacattagtgagtggtttctccttcgcttccttagcatatcgttcttgcgatcttggagtcttctgcatgtggggtcctccaatgattgtcagaatattgcgaggagttctcgaaccactcgcattatttgtttcttcattgtcatccgcttggggacgaccttcctcatgctttttatacttgccaaatttgcctcgtctaattaattcctcgatctcgtcttgcaggagccatcactctaaggtggtatggccaatgtccttgtgatacttacagaacttctttgagtttcttttatcgcgattacctccaattgggggagattttctaaaaactccgttcttttcttcaatcgcataaatatgatcatgcgggactgctaattctgtatagttaacaaagcgcgaacctcctttcctttttggggacgactctttctttggagggaacttagccaactttggacttcgctgtctttggggactacgtcttctagttcttcttcctctgggactacgagatcgtgaccgtggcacatgtgactcgcgtttatcttttcccctctctagcttagctagagaatttttgatcctcttatgcggctcagccatagcgaagaattcgaccagcgactcaggtcttcgagcctgtaactccttccaaaagtcgattctcggcaagacacctgtaattaacatacaaactaacgaagacttaggggccttctcaactttagttacttcagcattgaaacgtttaaaataatcctgcaacgactcactgacctcttattttataatagccagagtagtataaggcggtctatatgtcatcgtggcttggaaatgtgttaggaagaggtccacaaaattttcccaagtcaatatggacgccttaggcaactggctaaaccaatcatgagcgttatcctctaaggttgctgcaaggatacgacactttgccagctgaggtacctaatccacttccatatttgtgttaaatttttccaaataatcctttaggcaatcaagcttgtcgcacttccatggtaaaaggagaagtcccgtgaagcttgtaaatgggctttctcagctgttcgattatcttcaatgcttacaatagaatactctgatcaacaccccctggtaggatggcgttgttctgagtcgtcacaggtgcagttgcaactgcagctatgtttgctggaataaccactccagt

SEQ ID NO: 223501 - DNA, 1482 bp, Cannabis indica
aataaattttaactctacgttggcagatgtaattttctctaaaattaaatagaattagactgagatatttgtatccaacaatctcgatagtaaaatgaattttttaataactacaaatctaaaagacatagtttgttacataataaaatttggagaacaaaatagtaatttatttatgggtgtctacacatttgttatcatgtgttttatctaaatacaaaaataccttgtgtctttaataatacttatttggtacgttgtattttaaaatcatacatatttagtaatttaaatttaaatttttttaaataaatttaatcaatacaatcaaacggtttaaaattttataaattttgaattcaaatttaattatttgattatatataactgagatctggtttgttaaattgaaaaaattatattgattaaattttactttaaagtactaaatatatataatttaaaaatatttattaaaaatacatgatacaaaatgaagacacaaagtattaaataagtatattttctctatttattattatttttatatacaaaacaatacaattttatgcacaagcacacaatatgtttttttttttcacatattataaattttggattaatctattattaggtgaggttgattgtgtttaatataggaacgattttttcacattgaactagatgttcactttatcctagacaaagtgcttggaaaaatattggagatgaggtactgctatcatatgacccaatcgtagattgccttaccaagagccttattcacacaacattcatttttcaattgactatcttggtgatacattagtatcaccaagataatgaatatttagcaaaaaataacgaatactcagcctagaatagcaagtattcgaacaaggctgcctagacaatagaacgaaaatggaaaaatataatgaactcaaaggtgtataatggttcagtcagattatgtctgcttagttcactgttgcaaaggatttgtgttcaatttattcatgttagatcaatcctttatatacaaagcaagtgtccatttgattacacataactaaccggttacagaaccattttacaattaatattaacattaaattagaataaaagtaataagaataaatgaagaacagttttaaatctgtttcaataagtatagcaacgtatgcgacctgtaaagtgcgagttgcctgttcatagtctcactaagagtgttcgcggtgtgggtggtgcgatttttgaccattctgcacatgcaattttttaaatttctcaaaccgcacccgcaccgtgaaactaaaaaatgcagaaactgtaccccaaaaaatggtgcggtgcagtttttgcagtttttatggtttagactatcaccaaataattaaactatcacaaatacaacaaagcttgagcgacatttatcaaaaataccataaggcttgaaaataaatatgaaaaaaattaagt

SEQ ID NO: 223502 - DNA, 2921 bp, Cannabis indica
cattccaaatttaaataattaaagtaaatcaaaaaatttaaaagaccaattcataaatcaatacgagttataaataatcacattgaacaatatgcaggagactgattttaaggaaaaagaagaagacctgtaactagtttttaggacaaaaaagaagagaagacctgtagctattaggggaaagaagaagaagaagaaaatacatgattgagaggagataagcacagagtaaggagccatagatctcttccccttatttttccaatcgatgttatgagaacacggagaacaattttgagaaataatttttagaatttagaaaacaggtttttcatgttctctgagtttttgttttctttaattcaatttttaaaaacattttttctaaaattatagccaaacacttctacttgtttttaaaatacaattttctctttttaaaaactaaaaattatttttgaactataaagccaaacagactcttagtcattaatgggtgttgagaatggagatttagagataaggaccattgagaatttgaatgaaaaatgttagggctacaatgacagtcgatataatttaaatgaaatccgcgatttcgacaaaaaaaaatcaggtttagaaatttgagaaagatgaagatgatgataaaggaaggggattagagatggggcttcagcaacaaaaagataaataattttttttttattattttcttttcttttcaaaacaattctattaaagaaaagttcataaaaaaatgtaaattgaaaaaaaaaaagaacttaaacaaacataagagtaacacttataaaataatatatattaataataacaaaattataacaattattctaagcaaaaaaaaaaatcacaatatatatataataaatatcactatttactatttttaaactttgaaaatataaaaccaatacatgagaagagaatttgtctctaattaggtggaatcaccattttttatgacaaaaaaaaaatctcgaattaaatgcaatataacataaaatcttccaacacctcaacaatttatttttttaaaattcttaaaaacatgttataatattttgccatcatcaatataataatattttagaggttataaattccatttagaactaacacatatatacaaatataatacttatatatctttcgaaaaggagacagaggtcatgtcttggactgacctcttcttaaatcgtggtaacaaaagattaatacaataagcacaaatcctatagcaaataagacttaggacttccaatgcataaaacgaaacaaataaacatcaacgttcctactagcacgttccaacagtctgccttaccactagaccacccttggtgatggggttagagccttaaccataatgaaggtctaaaaattcttgagttggactttctatttctacagcagttctccagctgcactgaaatgggactttcttgcatattcatcgtctatatgagagaatactgaaacattcccaagggcaccgtcatcgtaaagtatttcccttcgaacagaagctgattgagatgttggactgacatgcttttttcccgtggcgtcaattgtgaggtcaatcacaaattctgaaagtagaatttgtgtttccacataaataaatatacaagtacatcctgtaaaattgacactgtttgaagaccaaaaaagaatttaaacaaaaaagcaaaagcccaaaccatcatcttcaaacatatcccattcctcatccaaaacatgggctccctgttgaatgcaaggttcccagccctgagcaatgcacaaatgaaacacaaagaagttaactgcaaggcagtataacgaagaaaatgacaggttgcaattgtgtataataatacaaattctcattttttctaattttgacaaagaaactttcacatacccaccaccacttacacttattagaaaatggcaacggtaattttccatcaaagcaccaaattagaggcaaggcttgccgtgaagcatatgacaagagaagcaaatttccaagaatgaaccatatgcaagtatctcaaagttcaccagaaatcaggctcatcttaaaacatatgtatttcaatatacacatttatatgtaaatgtataaatgttcctgcagaagaacatatattaatacacagatatgtagcatgtttgcaggtattacagtatgcgcacccaaagaaatgaactatttccactcgctatctaacaaagattatactaaacaatgagaaggacagtcaaaccttttgaatactcaattgttgcactagacttaacatgcaatccatgttcttgcaaggttcaattaaagccttcaaaagctcctcaagatcattgtataccatcagcattcagcacaaacctataagcactgttttgtcaatataagatttatctagaactgctaattatagttaattagtaatagcttatctaaagggtgaggcagaagagggaagactggggtgcactagagactgtaatgacaaccgatgagcagaagcaatacttgcagaatacacaccccgaagagtcttctttaggtagggaagggggtcacgaataacaaaacactatcaaaacctgaagtgtaagaaaaccatttacagaacctactacagctttgaggtcattaactgcgggttggaaaaacagagaagccagaggttgtggtctgggtacaggaggcgatgcagaaggagtgatcactctaggacgagtaagagttggttatgacaaggcagagtataatagtctttttaacatgccatttttgaaaattcagaaatgccatcccttagaacgccaatatcttcgggcattatcattcaaacgagcctccttaagcttcagaaacagcctataagctctctctactttatatg

SEQ ID NO: 223503 - DNA, 1303 bp, Cannabis indica
atatacgatcatcctcctgtaacataattatagcacaacatacactgtcgttaccctcaacccttataaaatcaaaaatggaagttttcatactcatccactgttccgccttaagtggatttggatctccatacaatggttccaaataatttctaatatctagtgacaaccaaaggtatcagagaattaggatcatgagcaagccagacctattgtttccatagttctctaatttgttccccttgttgttggattgtttcttgaattacaacatacatttgctccaattctagggtagtaaaggattcacgtcctcaacgccactctcgagctcacgattaatatatatttttataaaaactaccactcaattaatttcccaataatttcaataatttagagaaattataaatttaagagacacaatttaatcataattattattattatttagggagtttgttttgacccccaccctactactcagcccaccaacaaattaaaggagtttggtcgagagtagattagaaagaaaattggaaattgtaaaaaagaaaaaaaatgacagtaggatattttgataattttaaaagttcaattttccggagaattcaaaggcgaaaacatcggtagaattactataactatttattgagctggttttttctaattttttaggaagaaagaaaagaagcatgtgtttgctattgtatagaagagtgaaaaagtgagagtgagaatgtcttacctacaaacaatatacaaaaaaaaactccattgttacaaatgcactcctaccagtcaaggcagattagtggaccccaccaatttaataataataataataataacaacaataataattaaaataaaaggtgtcgtttcagaatcttttcaaattatacagacgatctattttattgaagttttccttatgtcaatttttgtaaaaatacagtgtcgtgttaaaacacaattaatggctccaactaaataggatatattgaccaaattaaattactgtttcaatatacagaaaccctgacaaatataatgtaatttttttttcaaggaagaaaaataaaattaagagagtaatgtcaccgaccgaagtgggtccccttatatttgagagcagattatgattaggttcactactacttcttcgatcttccacatgacaaagccatatcatatgatatctaataatatctatatatatatatatatgtgtgtatgagagaagcagagacaagtggttgtgtttccattgcgtacattgttaattcattcatacatataa

SEQ ID NO: 223504 - DNA, 1733 bp, Cannabis indica
taatttgccaaaaaaagactttacatatttgattgtcaaataaaaataagaatttgattgtttgatacttagcgacaatttttgtgtgttggatttatcacaatatgggtaaaattgttaattatttaacaaaatttttcaaagttcaagaatagtatttaacattgttaataatttaaagagtgtgattttttttctcaatttagattttttttttaattttttttaatttacggtttgagtttctaaagtagtttttccggtgatttttatgtaggttgctatacgattttttagttgcaatttaagttgatccgctgattgtaatagagatttctatgtagaatttcataaaaatgtaaagaaaaaaaacactattttgacatgtaaaagaaaaatccctttttattattatttgggtctacatgaaaatatgaatataacacaaatatattatagactaaagaattaattaatatacatttcaaaaaataaaaagttaactaatacataaaagcaattaccttgtttaaagggtaacatatttgctgttagctctttgaataaggaaaatttctttgagatctgtgctgaaaaagatttctaaagttgttttattaaataaacaattccaacttcaaagttcaaagtatagacttgtgaagttttatattccacataatccaacataatccaatcttttttaaatgaaaattagtaccaaaatatataagtgaagtttcccattttatggccaatgaattggaagatatatacattagaacttttagcacaagtacccaataaattctctcgaagatgtagaagaaagatacacatgtaattattttattattactaaaatgagaattctaaaaagttatgtcaaattctatggccattgattggtcattagtatatagatgaaatagatggatgtctcttcttttgtttcacactaaagagaaaattacaaggactttaaaaaaaaaataaaaaaggaaaattacaaggactttaataacataaaaaatgcatctactttcccatataaatattaaagtaaaaaaaatcataaattccaaataccaataaaccaaattcaccgaaaggctaactacataacagtaacactagaatattgttgcacgtgatggcacatgctgaccacttatcttagttttacaacttataagagtttttttgtttagattaagaataattagctcctaacaacttttgataatattaattctacctcttaaaatatacgatttgtaaagaagtttttcttaaatttttacactttacagaaatttagtattttcgttaagttttgacacattatttcgtttaaatattgatgtatctttgttaattaactttgcctcataaattttgacaactatcaaatcgcactcttcaaaataaaaatgagaaacatttaacattttttagtaaatcttaaaaaattaatttagatcttaaaaaaaaaaaatcattttaaatgattaagaaaattcaaaaaagaaattaaaattttaacggggaattaccctatatactttttttttttttactttttcaaaaataacgtttgggtttctaaagtgatttttgtggtgatttctatgtgagttgctatataatttttggttgtgatttaggttgctatgttagttgtaataggggttttttgttagaattctgtaaaaatgtaaaaaaactagttt

SEQ ID NO: 223505 - DNA, 1343 bp, Cannabis indica
tcttctccattgagcagcaaaatgaagagacggttaatgatctgattctggtgcaagaggcttttctagattattacaaaagtcttttgggaactacactggaaaataggaaattagtggtcaaaggcattttgagaaggggtcctatggtgtctaaggagcactcaaagttgctaatgaggaaaatttcaatagaggaagtgaagaaagttgtttttgacattcctggctctaagtctcctggcccagatgggtactctagttattttttccaagataactgggaaaccattggggacactattttctaagccgtctcttctttccttgagaatggcaagattcttaaggaaatcaactcaactgtgattacactggtgcccaaggtaaaatgtcctaatactgttaaagattttagacctattgcttgttgcaatctcattataagattgcaactaagcttttgagttctagaatcaaattagttttacctgatattatctctcattcacaaggaggcttcatcaaaggcagatttattgggcacaacattatgatctgccaagatttgatcatgcattatggtaggaaatccaacaaaccagggtgtgtgattaagttggatattcaaaaggcatatgacacagtggagtggcaatttatagaggagatgctttatggacttcagtttcaaattccctttgtcaaactgatcatgcaatgtatctcaacacctaggttctctctgatgttcaatggaactctccatggtttctttgaatctaagagaggcttaagacaaggagatcctatatctccattactatttgtaataggaatggagtatctatctagactgatggggaaagttggggacaaggaagacttttgttttcatgatagatgtactgagctcaaattgaaccaccttgcttttgcagatgatgtaatattattcagcaaaggggatgagagaagtgtcaggtacctgttgcaagctctgaagcttttctctgtcacctcaggattgcaaccaagtcctacaaaaactgcaatatattgcagtaacatggagcaaactgtagtagagaggctgctgaaactttcaggtttttcaagatagaaattgccttttacttacttgggaatacctatcaatgcaaagagaatatcagatagagaatgtgaaatactgatagagaagatgactgccagaattaggagttggagttcgaggaacttgtcttttgcagtgagaacagtttcgataaactctgttctaatggcgattcaaccatactcgagtcaaattcttatcttaccaaagagaataattagaggca

SEQ ID NO: 223506 - DNA, 2162 bp, Cannabis indica
gacaacagatcttgcaacatcacaggaattggaactatcagattgaaattgaatgatggtggagttgctgagttgagacaggtcagacatgttcctgagatcaagagaaatcttatctcagtaactatgcttgatcaagaaggatgttcagttaagatagagaatggggtcatgaaaattgtcaagggttctatgatagtcatgaagggagtcaaagagaatggaatttacttgctgcagggtcacacagataactcagaggtgaatgcaacaattaaatcatccaaagatccaacattaatttggcataggagacttgctcacattggtaatggaggaatgcaagtgctcaagaagaaaggagtttttggaaaggatcaaatccaagaaatcgagttctgtgagcagtgtgttctaggcaaatctacaagagtcaaatttggaaagggccttcatgtatcaaaagctatcttggactacatccattcagacctatggggatcttcaagaactgaatccagaggtggagccaggtactttctaagctttattgatgattttaccaaatttgtttggattcatattttgaaaaataagaatgactcatttaaggtatttttagaatggaaaaccttgatcgagaatcaaactggcaagagaatcaagaagcttagaactgataatggccttgaattctgtgtggaaatattcaatcaacactgcaaacaagttggcatttccaggcacaagacagtgccaagaacaccccaacaaaatggcctagcagaaaggatgaataggaccattatggaaagggtgagatgcatgttgattcactctggtttacccaagaaattctgggctgaagctgtgactactgcttgttaccttatcaacagaagtccatcttcagctatggtttcaaacaccatagaagccagaacagggagtaatgcaaagtatgatcatcttagagtttttgggtgcatagcctatgctcatgtgaggcaagacaagcttgagcctagggctagaaagtgtatattcattggctatcctgaaggtgttaaagggtacaagatgtggagtattgaacctggtgatcatcaaaagaacttcattagcagagatgtggtatttgacgaagagaaggtttacaaggatacaattaaaactcaaagagatgatgaacacactgaaactaatgagaatacacagatggaggtggagtttgacaaaagaagtgaccctacagactctaacttaaggaaggaaagtgaagaagctcaaacagaacacagagctgatgtgagagatgaagatgaatcagatgatgatagtcttgactatcaactagtcagagacagaaagagaagagctgtgagagcacctgcaagatatggatatgcagatgttgtgaactatgctcttcatgtggctgagatgcttgaggatgagccaagatcctacaaggaagccatgaaatcatctgataaagttaaatggtgtggagcaatgggaggagaaatgattgctcttaaaagaaacaaaacctggattgttgtacccaagccaattggacagaagattattggttgcaaatgggtttacaggtacaaggaagggattccaggggttgaggaggcaagatataaggctaggcttgtggctcagggatactcacaaagagaaggaatagattaccatgagatcttctctcctgttgtcaagcatacctccatcagaattttgctaagtctagtagcaagtgaagatcttgagcttgaacagttagatgtcaagactgctttcttgcatggagatcttgatgaaaagatctacatgaagcagcctgaagggtatgaagaagaaggaaaggaagatcatgtgtgtcttctcaaaagatccctttatggtctcaaacaatctccaaggcagtggtatagaagatttgatgattttgtcatcaaaattgggttcaaaagaagttcatatgacagctgtgtgtatgtgaagaactcaagaaatctggtatacttacttctctatgtggatgatatgttgattgcaagtaaacagatgggagaaatcatcaaggtgaaacaagctttgagtagtgagtttgatatgaaggacttagggtcagctaagaagatacttgg

SEQ ID NO: 223507 - DNA, 2111 bp, Cannabis indica
cagacttattcaaaaaattattatcaacatcaacatttgggaagatgacatataagatcggaaatcctcaataagaaaatctccacgaatgcctaaatgagagggagttaatcatactgcactctttttctattgactgaattttcagccaaatttttaatgagaaagttttttatggacattcaagggtagtgttataaaatattattatagatgtctaaatcaatgcattaataaacactataatacttgattatattttcttttatttcactgatttaatttttcattattctagtcatatttttgtataaacagaaatttacctcattacaataaactactgagaaaaatttcattctctcttctcctattaaaatttatattctatattattttataacaaaaaaatattatgtttagcgttaaaagaaaaagttaactggcgtcacaaacgaaaagagaggttaatttatatatggatttttataaaaatattatatttttaagtaaaaatttacaattttactgtcacacgaatttttaaaaaaaaaaataattgttttttataaaacaaccgtgaaactttaaaatatctatgttaaacctatttgtatcagagtatactagctcacacgtttttaaaccagaaaaaaatattgaattttatccaacattattttgataattattttacaatttagctacataattgttaatcttttagtttcttcatcgataatttataaatgaagaataataaatatatttgctttacatgtgatgtggtacaattcttaatataacaggatcacatctatctcttggggagacaagtcactatttgtaatccaatcgaaaatgacaaatatatgaccctagtgggtgcaattgcagaactaaattgcattatatctataaaaccagtgacaactatctcaccatttagaaagtctagtctaagtctcatgtacacaacttttagttatcagaatatgacacaagttcctacactattagatgacataacattcctccttgaaggctgaaagtgacaagaaaccagaactagaattcagaacccctatgactagctagcctatccagtaggattgaatctttatctttctatgactgagttggtgcattattaaactaactccaattcagtttcataactcttctgattctttacactcctctgtaaatcttttgctgccatgtgcactagcttacaacctgcaaagaaacaaaaacaacaagctcgaacttaaagtagttgattgcagctgaaactagttgtataactgaaaaactcacatttagcagtattagtcttatatagatatcgatgaatggactagattaccaattcttacactctttcttctctctttacagaggaagaaactcatatttaacagtaaatgtctatacacttctctaggttttaagcgaatgcgaagtgataaatatgatcattgtaacgcccttaatgctaagttttaagaaagacttttcatgtcattcccccccttttcccttccctcaatatatatgacacactttactaatagaatatcaagtcaaggctctaggaaacgaggaggatggaggcttgacgcggagccttgacttgagtattgtacaagttcactgaggtatatatagttagctggcaactgagtgaaaaatatatcatacatttcacaaaagcaaatgttcattaaacatggtcatctcatcaacccataactaattcatcaagaagtaaaagtgaaaagattgggagtttgtaatgtgctgtatttgatcttatattaagcccatgaggattgaggtcaaacttgtacctgatttataagtctatttgaagtccttgaggatgaggccataacttttcataaaaccagatatgaatgtactacaatagaatgctgcaaaagaaaattgtctactctggtacaataagttttacccaaagcttctcttcctgcatgaattaaacttaatcagatgtcatgactacctataaaattaaggaacattaatcatttaaaaactattttaagaaaacaatgtgcatgaaaggaatttgataagaagcaaca

SEQ ID NO: 223508 - DNA, 1878 bp, Cannabis indica
tacttgaaagctagcaactataaatacccattaagggttctaaattgtaaccgaaacccaaaatccaaagctacaaactttcaattagagtttactagtactttacatacaattctcttttctaagccaaactaactaactttatatactaaatcaacaactactcatcaacatcactactttactacattaccacaacaaaccatcaaacacataatccacatatctacctattttaaacaaaaccaatacaaatttattctcaaactattataacttttttataactccaatttgtttaagaattgagatgtctttttctatattttaagaatattatgataattaatggagatttagtaccatcatgagtttactgaaatgtattttgtttgattattaatatattactattagtagttagaaataataatattattttcacaaaaaataaaaataaaaattattggttatatagagtcaaaataaataaataggaatacgggtgtgttgtgttattttcaatctcaatcacagtatctcatgagttgagtgcacaccgcgattacaaaatcatattcattcaaatagaatctaatagccaactctaatcctagagtgttgaggctgacttgaaagactctagcgtgaactcttcaatgagtttttctagattggatgttcaattaaataaggctaattagcaatttttgctggaagaggaggaaggcttccagctccactttcaagagtccaatgtcaactttgtcgtcgtcttggacacactgttcttgactactactataggtttgataaaagcttcacatgtagtgttggatctagctctacacaacagaatcaaccttaggcaaatttagcttaaaactcaacaactcaagactcaaactggtaccctgactctggagcaacaaaccactgcactccagatgtttagaacttgatgactcgagctaattacagtggtccaaacaatctttatgttggagatggcaagcttgtccctgctcaggcaaatgtcttaattttagaaaataaagaatgtagtcaaactaataactctatgttccaaatgtggcataataggttaggccattctagtgagaaagttgtagaaactgctacttgacatccagtacaaggttatgggcaaggtatttagagagaggagtgactatatacgcgaagttggttacaatttaggaaaatttcatttgctatcctttgtatggaatatccatgttccatactttgtatggaagataaaaaatatttgctatcctattcctataaataacagaacaaacacggtaaaaaggacgactaaatttctaacttaaaaaaattctgctaaattgtaacctcattctacaaaacacagaaataatactggatcgttaggtatgtaaattttaattacaaaaccacataaaacttttgtcttcattattaattataattttaagtaagatataatattatttatttacataattaattttgggcattaattattaagcctcattttgtattaataaaattttaagttcacaaagcaaattatattttcgcaaagttttttaatttaaatttttcttcgagatttttttatttggtttgagtgaattatttaaattgggtggtttataaaaatttatgtataaccttattatattagtgccaacaagaataatattttttggttagtgtgattaatgatcttgcaatattttgggtgaagattttattgattaggcctataatatcttataataattagtcaggtaagcatcattatatttatttataagtctattattttagaacatgagaaacaaaacaaaacgtttacaaagttaa

SEQ ID NO: 223509 - DNA, 1235 bp, Cannabis indica
ttcataaagtacccctaccactcgttaaccacgagcttcatatgtcactatcgttgcccgatacagcaaacgataagtaagaaacctatccgcagtttcaagagtaattactcgtatcagtaatgtccgtttcttttactcaatcataatcgagtcacaatgataataatcgtaccatatcattatcctcaattataatcgagtctcaacgatgataatcgtttcccattatctttccctcgatcataatctagtcacaacgataataattgctttctaaaaaatctatatcagacacgaaaatcaccccgagccctaaaaccggccctaaggaaacactgaaaatttcccccctgtagcaaaccagtcgacgggttgtgttgcaccagaaccaaccggtcgaccggttcttgcagggctgcaaacttcaaatttccttcctccaaaatcaatcccaaacataaccaaagcaacccaaaagttcaagaacagtacaatatcataagtacaacatatccaaagcactaaaacatatcaattcaatctccgattcattttaccatattagaaccaagtctaagctcttaaatcaacaaaattccaacttcaaaatgaaacagccatgaatatcaatcaactcaaacttcgacacattcaaaataaggtttaaaacacaatcctaaccagtttaatcccacagccacaaagtctcaaaaaccctaaatcaaaatcatcttaaaacttgaaaactcttagttccatggcaaggacttaccttaatcctcctaggctgaacttgaatggaagaaacctgctaaaaaccacagagaattgatgaaaaacttctggttttgctcagctcctaggttgctcgaaggaaagagggataaaagcttcattttctttgctttcactcttaatttccaagttgtttttaaaataaatatagcagccaacactattcagccaaactttacttttaaatcaaatattctaaacttattaaacactaaaagaaaaaataaattaactcaagaagtgatcattttacccttcttaactaaacttattccatttacaaatttaggggcatttaagtaattttaggtaatcaaccaccgacaacctaaaactcaagactaatcttggtataagaatccaattcaatttatctttattgtcgtgacatttcagacctccccgtcaagttctacagttgctaagcccaaaattat

SEQ ID NO: 223510 - DNA, 2816 bp, Cannabis indica
aatgcgttttatttagggcacaaaaccgaacactaatgacactaatgtcatgctaggccaactagccctatatgacttaaaagttgttacttctatataccgcctctgtgtgaaacttttgacaaggaatggagtgagttgtcttaagggaaatcaaaggattgcatagggatgctacgacctttctctaaccaaggccaaaaatgaaccaatattttgccagagttcagagaatggtcaaagcattgctaaattaggattcgccaaggagagtatgaagaaatggatccccaccttgggaagccaattagaaatgtaaggcaaatcaacaagatgttagcttatactactacaaagttatgccatttgtgctcaagaatattggggttacctaccgaaggctagtcaacaagatgttcaaagaccaaaatggacgtaacatgaaagtatatgtggatgacatgctcgtcaaattcagaaaggctaggtggcagatagaagacctagacaaatacttcaaaatcgtcacaaaatactacatcaaagacaatcccttaaagtgttcctttgggtcagctcaggtaagtttgttggtttcgctgttaatgctcaaggaatagaagcaaatttagaaaaattcaagtctttctggatatgaagtcgccaacaaaggtaaaagaagttcaaagtcttactggtcagatagccacactaagcaggttgtgtgaaagttgaaagaaaagtgtgttcctttcttcaacatccttcgaggtagcaagaaatttaagtggacagaggaatgctgaaatgcattccaatagctaaagaagtaactcacacaacctcctattttatcaaaacctctgaacggagaagagctaggaatctaccacgcactacaacatataagggtattaacgacattaaaaatatgtcgtgtgaatcagttgatgacattttttgtgatgttgttgaatgggggtgccgtagaaagtcttgcactttcaataacatttttttagtatcatgcttattgttgttataaatttttttaacaacactaatgtaatgacatatattgaatcttttattgacattttataaatgttatgtgttatatttttaactattagaaactaatgtggttataatattacacatgaatttgtgaaatgttatgttaaaattttatacaacatccaataaatgttattactgatggatatcagtgacacttaaataatgaagttaatatattaacatataacataaaaaaatgttatgtatataagtttgtacaacttctagaaagtatcgttaattatctgttaatgattttaaaattatgtcactgaaaaatacaaaaaaattattattacatattttgggaaaattgattttgattaatgatttattttattttacagtatattaattcttattaaattaatgctctaaattttaattgttaattaaaattgttcttgtttacataaaaaagaaaaaataattgtaaagaaaaaatcagttatagaaatgataatagtactagatatatacaatgaaagttctttacaaaaatatataaataaaaaaaacataaaataacatatgtattatttagtgcctaacacctaacgaaaattatagctaattacaatatacatattaacatttatatacattatgaagcatgtatgacaaaataaacaaattgatgaagcttaagtactataaaggcatgtttatgcaacttccaagtctttcaatataactagcaacctttctccatcagattttttatcagcacttccacacttaaaattatgatgtttgccatgtttgttccacccaagggctttgggactatccacaatcattgattacaatcatgtggatactcagtactccatgtgtttgcacctgtaacagattgaatccaatgagccaataagtattcaggagacctccaaagtgtaaattcaggtttgagtgacatcaatgacaatgatggttctctttctttctagtgacactaatgactactgaatagagtctccacgaaataacataaccaacgcaattatataactacaaaccaatgatcatcattccaacaaaaactagtaaagcctctcttaagtattaaaaaaattacccgcaatgataataagggaaataaggacgagaatgaggcagaacaatccaactaaggacgagacagcagaagaaagctcagtagaaaccaatcaaaaatccaccaatgtgtgcaaaattaataataaggaaaaactccaatgccgtggttcacgacaatgatgaccaaaagagtaaacagaactccaacctaaacaaacgagtataagaatacttgattaatgatctttgtaataacagaaaatgtagtgtactttcaatataaattagattaaatgagttatgagtatgttcaccttgttagtgtaagtaaatagtcctatttggcagaagttcagaaattattgctccaagaagtcccaaaagagcaccagaagcacccacagaagtattattttgaataaatagtgaaaaaaatatactctccccccaaagcttgataagaggtgtatgattctaattcgcactgccaaatgttacaccctcaaaacaaagagaatcagaccatatttgcaagaggttgaatacgatttcaagtttatgtgaaactagctttttaaaaaaaaaaaaataaaaaaaaagaacataccaaagtcgaattgctgctctaagcgaattccgataaagaccaaactgaacatgcatgttcacaagacaat

SEQ ID NO: 223511 - DNA, 2304 bp, Cannabis indica
tgaactgacaaatcagggaatgaactttcgaacatataattaaaattatattccactgtgttgataacactataatcattaacaaatttatatgttctggacttaaatagaattcatacactatgtacatataatcatgaaataaatcatgtgaaccatgcagcataaaatgttatttctgatctttattaataagtaaatctgattatattaaaattaattttatttagggtataaaacccaacacaaaggctatacggtaatcatgtcagggggcgaagctaattaagtgtagacaggatcaaactgtagcatcgacctagcctctagaaggctggccaaccatgacctcagcaggttgaccagccatagaatccataatctggcaaaccactacctccacatgctggccggccatagcctcattcatacagccatgcaatgctcccttaatgtggctggccacatggtcttaccctagccagcccgatccaccactagtttgctctcatacttctggtctacagtgacttagtggtaaacaacatcttgctagtaggatcccttgacaaaaaggaaagaagaagagatcaagccaactcaaaccagcatggctgcccacaaagagttaccaggcctttcaacaaacaaatcaaggaaaaaaattcttcatgagagatttactccctaaagaatattccttgataccgaagatcctgcaacaagcttcataccaaattaaaaaggtttgtaccatgttacaagataataataaaggtgcatacaagtcttgcgagtacaacgagaaattggagttggaacttctacccaaacactaaaataagggaacatctttgtaagtactctcactagccaacttgtcaattagttcctctaacgtttcaccatgtagagacccataaaagagatagtacccattgttttttagcttggcctcccatcactcttcagtgatggttgttaagcagtaagccgcgtcggggtagccactgcgtgattttaaaggcagacactaagttgtaagcttttgttacacataagaacaattgtgtttaaaccacttgctaacaaagataacctcttaaagttattctttgccagttccacatgcgtacaccacgcaacaccccaagaaaattcccatgcaaggtctatgaaacttggtgaattgcaagtgaccaagagaccgtaagtctgtgcattcacttggggagcacctacactgtacaatgcatcgaactagcacgtagaacttatgtaaagaaattttaacgcttagaataagctactaaacctacctctaagtcaagtgcaggcatactctgacttgactagtaaatccagacacttacatgtcaaggccaaaagaagatatccaggacgatcataagtccatgataaaaggctttaaggctaaataatagtagtgttcaaaaaaaaaaatggcctataggccaaaagcaagaacatgaaagccataaggtcgaatatgaaatttgttcacatgcatgaggccaaggcactgcaagaatcgtatagccagaaaataaccggacagagttcctatcaggtcttgattcttaattcttgtcttattgccttttgccaattaatctatgcattcctcgatctaagagagctcataacataattcaaagtgagaatatctttgctgtacataataacagttctcaactccttgaattgatttggaaaaccattaagcagaatgacaacttgatcttctttcttaattttttcacccatgttagtaagaagtaaaataattttatgaaataatcaaaattttgttctaaagaaacaatggcattcatttttaatgcatagaacttctactttaagaaaatcttggttgcattcaattttatcatatacaatttatcgaatttattctagattcctagggtagtagttttctcactaattacttgcataaaaaagattcatgataatgtttgatcgagcatgtttcatcacagttttagcattacttttcctggttgcatccaaatattttcttctagtgtttaatcgagtttctaatagattaacacaaccatcatcttctccttccatagattaaagtctccatatccatcaaatctctcaaaataaaatctggttaaggatgaggccattgaagctgtttccttgaattcttgataccttcaaacaaagtctttaacatacaaaaccttgctctgataccactatagtaatcgtactacacaagtcaaaaaaattaaaaggtaaatcgaacgt

SEQ ID NO: 223512 - DNA, 1550 bp, Cannabis indica
ctttcttacaccgaatcttgtggataatttcttgagttagaatcgaggaatcagctatccatcttcccggtatgaaagcggattggaaaggcgagatcaaatcattcataagaggtcttaacctattagacaaaatctttgcaattactttgtacgagaaattacaaagacttatcggacgaaaataatccacactcaaaggaaattccaccttggagatgagacaaataaaggtactattgagccttggttcgagaatcccattggcaaaaaattccttcactgtagcacacaagttctctctcactacgtcctaatatttctgataaaaatatcccgagaaaccatcaggccccggggccttcaaagggtgaagacagaaaaccacatccttaatctcttcctttgtaggaactttgacaagattatcattggcaaaactatcaattctattagtaaacagcccatcgaattcaacatccagacacggttgggaagaagtatacagatttgagaaataagcattaatgacacttgcaattgtcttcttttccttccaaattctaccctcattatccttgatagcccaaatactgtttcttcttttcctgatgactgtagacgcatgaaaaaatcttgtgtttctatcccccagagagagccaagtttctcttgacttttgtctccacatgctctcaagtttagaccaactgagcaaaatccgagattgaagattggattcctcatccttgagggcgtctgagatgggttgactttgaatccattccaaacgttgctcaatttttttatttcccttcattaacctcctgaatgctttttctccaagcttgcagagccttcctcgaattggctatatttcgaatgaacatagcagtagcatttgtaccatccatagaccacaccttggatatctcctccttacacgaagcttcccaggaccaagcttcgaaaaaacaaaatgggatataacccctagcagcaaacagatgtgtatcaaagatgataggaccgtgatcagatatggagataggcaaattacggacacccgcactttcataatgcaaaatccaatcaggagagcaaagtgctctatcaagtctttcccggataagaccaccagtaaatctcttattttgccaagtatatttgtttccaataaattgaagatcaatacatcccaaattcatcatgaagtccttcaaccatctcgtatcattagcagaaacaagccggcccccaactttctcttcttgactgcaaatgcaatttagatctccaataacaacccacgggagttgacagagagagcattcactctccaaactcttccaaaaagcctccttgtgacaagaataaggtgtgccgtaaaccgcaaacaatttccaatgcatctgagtttggaaatcccaaactatagcgttgaagaaaccatcatcaaagtaatttaccaccagattaacattaatgttccacattaaacatgaaccgcccgccaaaccattagcaccaacactaaccacttttgaaaa

SEQ ID NO: 223513 - DNA, 1761 bp, Cannabis indica
tcctcgaaattaacttctacccataaatacgcggggtatcattttctcatatctttttcccatttacaacttttctattagaatttccactctataagaccttatctaggggtatactcatatattttagttacccgttctaccacgcatactagcgtgtcatataactcatgtcctgatgtagttagaaatactcatacataagcatgtgtgtgggattggatacctaccttctccacattaaaatgtggaattctgttatacctatctgctatagtagatggacctaaatatttcaggctttacttgccctgcataatatttctatattgaagtgaactttaagaacatacggtcgccaacagtacttaaccttttatcacttttaaatcctcataattcttcatctgctagggcggcgggcatactctgtcatatttcgtctactatttttgataattctcttacttcttgccgacttatatgtggtacctcactccaagtaaatttagcactcataaaacatcttataggttgccatacgtattgtggccaacaaactgtcttcataagagaatgttatcaactacaagcgcttactctatcttaccaggaagtacactatttgtaacatccttgcttcaagcctccattaggtccttacacccacggaatgatggctcttatacacgagtacgtcactttggctacttcctggatgatgcttctgctagtttacatgacttcatccggttcactaaaggtttgtatttgacctaacacttgaaaatatactaaaactcagatcgaggtcaccttctttaggaatacaaggatcgtatcgttttcattagtttttaatgctccgctcttacgtgctggcatgtaggacgtcaaatcacaaatccaattgccactttctgaatactcatccatcctttacctaatcattgtactattttacaactaactcgggatgcatctagtgtggtgtaggtggtgcttgcatcattctctcgaccttaagtttccattgcagtacgttttctccttgccttcgagtagcaacactaacatagatactttcctggttacaaattctgtccatatcctttgtttcatactctccttgaggttcgtcaatgtgtaggctactacatattaggccaaggaagctttcagtctctcttcggtctttgtgcgccgacagctcttgaatactaccacgcttgtaggataaaccacaagttctgtattaagaaataagcatttttttttaaagccagctctttgaaccaatagttttcatcttctaatcctccagttcagtcgagtcttctaagctcagtttggggtcgtatctaagtatccttaatatccttccacaggctggagtatggaaaacatcatcaataattagacaatgaattattccacctaatttttgaacacttacaccatcccctgggcattgaataatttaagaccaaattcctagtgcccccagtgtttcagtgctgctttagatgtcacactcttttgtacttctaattcttggtgtctagtttaagtatttattcccgatttaataatcaacattactttacaaacaaattcctatgtagagacgaactgtcttccttgttcattttttttttttgtgtagggagttactcttgggtcgataagtagaagaacttaattgaagaagaaagagaagaaaaaaaaataaattatttaaaagacgtctaaaatctctag

SEQ ID NO: 223514 - DNA, 1759 bp, Cannabis indica
cacagggttagggtcccctcccaagtcaactactatgacttgggtctactcaactccgcgatgtcatccttcatgccacatgtcaaacaatgatggccacgtgattatgggaataccccagcaggcaggcttcctctttgaacctccataaaagagtcaaaccaccttttcgacattgggcctcaacacagaaacctccttcaaaacccaaactaataagtctttcaacaacatcatttttacataaggtttcacacaagaaaataaaattgggcttcttttgaacaacaatgttctcaaaaaattgacaggctcgtgggttcccaagcccatgacaattctaactaatggtactcataatgattggtgggcctagacaccgaaacccactacatgcacattttttgaaccatattttctgcaggaggcccattagaattctctatagcaaaacattttatctttaattctgtttgagtcaactcttcatcatcttgttgattttcataaaccacgatctctttattcttgttatgtgagtgagaaatatcagggaaagatattccataaatgttgtggatgtggtctttgtagattaactcttggaatggtgttcacaccaggttgtgagctatcatgggctttgcctgatcgaagatatggggaatagaaaaaattatggtggcgtcaagaagtagctttcattctcaaaccataaggtttcatgattagatgtgccggtgtatcaaaaagacggggacaatacctttccgagtggcccataatgccacaaatgaaacaaaaagttaagatattctcatatctaaatgtaccataaaaatagtcaatatcacgcttacaaaacttcattttacgtttcaatggctatcaagagataatgttgtccgtacccgaagatattcacgtcacacacccatgaaattattggggtcggattcaagaaacgtacccacataattacaagcatccctagcaactttcatagacatcaaaccagattgcaaatcataaatttgcacccatagatcaagagaatttagcctcaaagttctaggattgtcaccattctttaaatgtgctatgattatttacttccgatcgtaagttcatggattgcaactattcacacgttgaatgtttattttattttatttattttaatttattgttgaagacataaaataacaataatttaatttattttgatgttaataatcaatccaaaataatccattcaatttgtactttaataaattaaatctaatttgaattattatacggactgaattataaatctataaaatctacaattatgacacgtttactaaacagtaattagaatcagaataatcaataggagaaatcaattggattaaaatataaaataatcagaaacaatattttattttgttgtttactaaactaaccagaaaagaaatcagaatcattttattttatttacataatcaagatatgtaatcgaaataacttaatttgactaaattgtcatttagaacatgtaattattttttatttatatatttttgaagggtatatttatcttttttatttttaattaataaagatataataattaatataaagtaagtaaagcaaagagaaatatatttcttatgaaaatgtgagacaacctttctttttattttcttcttaatttatatgggtgttaggctaaaattagtctaagtttcgggtcgtattttcagttagtttacac

SEQ ID NO: 223515 - DNA, 2077 bp, Cannabis indica
taatttttttttaattaggtaacacatctgataatacatatattgtaatttactacattcttaaccaaaactcacataactaactttgagtgtgtttacatataggctggattcgtaaatttaatatagaattttttattcccaaactttacgaaaaatatggtgtgtgaatccgtttaccataactataaaacggaaaacaatcaattccttatttcaactatttcaatttaaaatataaaataaataataataaaattaaaaatatgattaaaaatatttataatattttaaatttaaatttctttatataaaatatttatataattttttttttattttaatacaaagttcaaccaataaatttaaaaatatgattataaggggcctttttatttttacactttaaaacagtttttttttgtatttttacggaatttacatagaaacccctattgctactagttctgcaacctaaatcgcaaccaaaaatcttatagaaacccctatattgcaagcgctgcaaccactttagaaatccaaaccgtaaattaaacaataaaaagttaaaaaaaagtatatgtagtaattccccttaaaaaatatctataatattttaagtattttaaatttaaattaattttttttttatataaaatatctatataatttttatttttaaatatatataataatattataaaattaatagaaaatattctgttaagtaataggatattctattaaagttaacgtaaaactcaaaaaattttgttaaactaagaattccgttacatagtcacattgatataaaatacataaatagaaaattactcattaaaataaaataataaaaaaaattctcatctcttttctattttttttttttaaattataatattttataatatatataagtttgtatcaaatattagcagattttaagcgtattatattatgtagaaaatgaaatattttcccctcccttgcaaaaaaggaaaaaaaaaatgtctcatattcaacttaaatctgtgggttttcttctttttattttattttattttttttatttttttttttttgtttgtaaatcacttaaatctgtggtttaatacataccactcctatttaatttatgatagaataaatatttgttttgttcccccattttccacaattgattggtgaagaaataatcatgaaataagaaccctatagctaggtaaggttaacaatagatgtgacataaaataaagataattaccttgtctttgtatggaacgacgagatacaactatgtaactttttcataaattttaagtggctctgggtatcctatcatcacatcacagttttccatttttttgttgattttgggaaatacatattgattattattattcttatcattattattatttttcctggaacatattaattactataggcattgtttgtccttatatccgtctgtctatttatattttatgaaaaacttataaaccaatagaatggttaacagtcagtctcacacttaattctattcaagaagaaagaaagaaaaaaacaaataaaaaatatgtgacattattaatggttttttggggtttcttttataaaaaagggaagtatatatggttttataaaagttgtataaaaactcatgtttaactttcagttggaaaaatcaatgatacacatctgataaaatgtgtttttcacacccttatttttttatttttatttttatatgtaggagagattttttagttttttttttctcatggtaattatctatattatagttatttaaaattattttacattaaagtttttgttttggcaagggaattttttttttctttatacactttaaaacagttttttttttatatatatttttatgaaattcgacatagatatttttatagtaactaacgaagcaacttaaatcccaactaaaatccacataacaatcaatagaaattaccgaaaaaactacttgagcaacccaaaccgtaatttttttttaaaaaataaaatataatatataaaaaatttctctaaaaacaccacg

SEQ ID NO: 223516 - DNA, 4370 bp, Cannabis indica
caaaagattattaagtttggggaacccctattcaaaaagctttacaatttagttcaaatccagatttatcaaaatagggtaacatttccataaaatagtcaaaagggtggatcctatccactggtagtcgaaacagcgcggttgatatgtacatcgctggaagacctctgactcatggctgaaccactattcccctccctttacatgtaccacgaagcacctgtgagtcacaaagactcagcaagaaataataaacaatgtataacataagatagcgtaacaatgcatagcatataattccatcatacacaaaacaacatttatacagcacataattaatcaccataaccaaatgtacccaattacaacacatcacacgctaacatgcttaatcaatttcacatcattataatcacataatctcggtactttatacagcacccttaccacttacgtatgtcactatcgttgcctgatacaataaacgataagtaagaaacatattcacgatttcaatagtacttactcataacggtaatgaccgtttccaacccattttcaataacggtaatgaccgtatctttatctcgatcataatcaagtcacacacaatagtaatcatcacctcgatcataatcgagtcacatacgatagtgttcattacctcgatcataatggagtcgcatacgatagtgttcattacctcaatcataatcgagtcacatacaatagtgttcattacctcgatcataatcgagtcacatacgatgagaatcgtttctcacttaccatgcctagtagtgcaattagctttcttacctcaaaccaatatcgggtgtgcgggccaacctgggtggaaccatgctcgacgtccgggtcctatgtcacgaataacgtaacttgatcaaccacttattcaatccctgatacaaacctatttcacaaccggacaaaatctaactctcactggttcaaaattagcttaaacatccttagaataccctaatccaagctctgaaaaacagcctgagaaaactggttccgaaccgaaactagggtttccccagtaggcaaaccggttgaccgatttctcagctcctataaaaccgattaaccagtttttgcagcaaggtgggaaaccctggctttccacgtcgaaacccaacctattctccaccaaacctactcaaactttccaaaacagttctatatcttaaaaacaatgcatacaaataaataattctcaacaattcatcaaaactcttaattcaccattaaagagcaaaattaagttcttaaactcaactcctttaactctaaccttaatcagccaagaaatcattcaattcacacccaaacaatctcaaattgaacctaaaatacaatctgaactcaaactaaactcacaaacccgaaatcatataaacatcccacaaaatctaacttaaaacttaagaaatcattaaaaacacatagagagaacttacctcaaggttctaaactgtgcttaaggttgaaatctgcaagaattagtcaacaattgaagaggagacctgtttttcttctgggttcttcttgcatcaaaaaaggagagagagaaagaggaaagaaaatgatttttttcttagtttttgttttaggataaatcttccaatttctattaattatctaacataataaacatagtaataaaatactattttcagcttaaatcaatccacaaaagacaaaagctcaatcccacaaaaagactatgttgcccttctttcaacactaaagtctaaaataaaacttaatggtattttggttatttctaaatccctcgaataaactaataacccgactttctaaactagtccggtataattccaacatagcacaactttaatcactgtgacatctctgacctcctcgtcgagtttccacgggcggcgaactcgaaaatattttattttgaaatggtatctacaatgcccccttaattcgataaaatctctgtaattaataaattacgttttatttattcatttactcaaattctacttattaactcgtaattagcttaagtaagattataatcctactctaatattcatataattacatatttaataaaatgtgtccatttaaatattagtatattttttaggatattacaactatcccctccttaaagaaatttcgtcctcgaaattttatctgaacatctcgggatacagctactgtatctgccactctaacccctaaattgccttccaatcccgctgttcctccacagaattttaactagcacaataatcttgttctgcaatactttctctttcccacacaggttctaaaccaatttttcctcatatgggccgataaatttgggactcaactttcccttctttccaaatctctagatttccccttcattggggacacccgaaagaagacaaaattggccccaacctcgaatttagtttctctacgctttgaatcagcgtagctcttttgtttactctgagaggcaagcatacgagctcaaattttctcaatggcctcactcgttctttggactgcatcaggtccaagatacctccattcaccagcttcatcctaatgaatgggtgaacaatatttttattcataaagaatttcatacaatgccataccaatagtactctgataactattattgtacaaaaactcaatcagaggaaggtacttgtattccacgaaccttccatatctaatacacacgcccgtagaaaatcctcaagtatctgaataatcctctcatattgaccatcagtctaaggataaaagctaaactgaactttaatttggtacccattgctcattgcaaactctcccagaacttggatataaagtttagatctcattctgaaacaatcgactttggaacaccatgaagcctaactatcttcttgacatacagatcagtgtaatgatctaccgtatgggtagtccgcactagtaaaaagtgagataactttacctagatggaattatagatccctactgttcttggtaatctaaccacaaagtccaccgttatctcttcccatttttactcaagaatcttcagaggttgaagtaacatcaccggtctctgatgctctaccttgactcgctgacaggataagcattttgacatatactccacaatatcacccttcatccctgaccaccaatacatggcttgtacatcgtgatacatcttagctgtcctcggatgtagtgtatggcatggtatgaaactcatctagaattttctgtctaataccatcatcagttggtacacaaaccctgcctctaaatcgtactaattcatctaataaaactgagaagccctttttctgacccgacttcaaacttttctttatactcttgtaattctagatcactctattgggctatcttgattctttctagaaaatcagattgtaacataatattgactaatttccaactatgaactcaatcctcgctctggtcataacctcagccaactttggtgagatcttcttctattcatagacttctcttggactcttccaacttagaacatttgctaccacatttaatttatcaagatggtaaaggatctcttagtcataatctttaaccagttccaaccatcgtcgttgctaattccatatcttgtataggataccgttgttcataattcttcaattgcctagacgcataggcaataaccttctcaaaaattctttcgagttaattacgttaaggatgtagagagcttgacaaatccttcaacaaacctcctgtagtatctcctcatctcaggaaacttctaacttcggttgcagacttggatcgaggccaatcttgaaccgcttcaatctgtactagatccaccaaaataccacctttgttcacaacatgccctatgaagcttacttgagacaatcataattcatgtttcttgaatttagcatacaacttatacccctgaagacgttgcaatagcatctaaagatgtttctcatgtgcctcttttgattcggaaaagatctgaatgttatcgatgaagacaactacaacctcatctaaaaagtccttgaacactcggtttattaaatccatgtatgccaccagaatatttattaatttgaaggacatcaccaaaaattcatagtgtccataccgggtacaaaaagttatcttggaaatatcttcctctcaaatcctcaactagtgataaccagatcgaagatcgatcttaaagaagacagtcttttcctgtaattgatcaaacagatcatttatccttggcaaatgatacttattcttacagttaattcatttaactctcggtagtcaatacacatccataa

SEQ ID NO: 223517 - DNA, 4108 bp, Cannabis indica
caaaatcgattctatagattctggtacgctttcgctaatatatatattctattgtttaattctctaaaattaattagggctatattcagaatttacagtgttctaacagcctcaaccacaggatccaattgagcaacgtcctgctccgatcactactccttcgcaagactttattttcggcaataatggccaaactaatggttcacaacctattcatcgatccacattaggattcgatgcaaacaatttaaactatgctcgcattgagcgatcttaactcgttgctcacaaaatcccctatcatctcaataatggtgatcactctagttatcttcttgtttcaactcctctcactggccaataaaacttcttttcttggaagtatgctgtctcaatctccattgtagtaaagagcaagactcagttcatagacgtgttagaattttatgctttaaataaaatctatttcaacataatcagatttactaattaataaaagatcagaaattattttatgttgcatggttcacatgattactttcatgattatatgtttaatgtataaattctatcaaattctgaacatacagttaatcataattatagttattctattaatttttcgaatgcatgtaccagactaaatgtgagttttttgagtggagggtatctaggttctgccccaataaccttttgctattaagtaaattggttgttggtttctaccctcttctcgcaccaatagagcactaatagaattttctgagatggctaagtaaatgtataacgtctctctagtgattagttcaacaaacactggtggtgtggagagatgcttctttatttcttgaaaagcctgctcgcactcttcatttcattcaaattttgtattgcctcgtaatgttgaaaaatgggagccatttatcagtcgactttgaaatgaatctactcagtgctgtcattctccccgtcaaggattgcccctcttttggtttacttggcgaaggcatttcaagcagtgcttttattttctcagggttagctttaattcctcatgtattgataataaagcccaggaattttctcgaggataccccaaatgaacatgttttagggtttagcttcatattatattttcttagtatggcgaagcattctgcgagatcttttgcatggtcttcacttttaacagacttcaccaacatgtcgtccacataaacttccatattctgacctatctggttttcaaacatagtcattccattcacaaggcgttggtatgctgctccaaagttttttagttcgaatggcatgaccttgtaacaataaagcgtcagattattgatgaagttcctaatctgaaatgtgcatttttatctagttatatccagagtatgcatccatgaaggtcatcagcttgtgccctgttgtcacatctaccaattggtcaatctgaggtaatggaaagcagtcttttagacaagccttgtttaagccagagaagtctattcaagttctccatgtcccatttggtttgggaacaagaactggattagatatccacgagggataaaacgcttatcttatgaagttattggttaacagtttgtcaacctcttcttttaaagcattttgtctctcgagatctaatggtcgtcatttttgacactttaagggataagaaggatcaatgttgaggtgatggcatatcacattcgggtcaatctcgaccatatctgaatggctccaagcaaactaatcttggtttgccttcaaaaatgtgattaattgctattttaattcttcccccaaaccttttgtaatgttaatacacttggttgggtcatttgggtctaaattttcacctcttctaattcttcaattggcttgagttggttgtattcgtcatggatcataggatccaagtcctccatctcattttcctcactttcctctattaaaatcaccattaattgatggttcgcccttcgattcttgaactcaatgccatagcattgtctagccaatagatggtcacctctcaccgtcccttctccagaatgagtggggaactttaggaacaagtgtttgattgggcttattttccccactaatgtcaacgcagggctgcccatgagtatgttatataccaaaggcatgtcaacaactaaaaactcttgcatttgggtcgtcgatagtggcggctctcccatagtgagtgggagttcgattgtgtctaaacttgcaacactatcacccgtgaatcaacacaggttaaccatgcatggttttaattttgactcttcgaaacccattttctttaatgtttccttgtagagaatattaacataacttctgttatcaatgagaactctttttactctcttattcgcgagctaaaccataatcactaggggattcttatgtggaaaccgaacatgtgaagcatcttcattaataaaaataatgggcagttctttaggcttggctcgctttatttctggagcaaaggcagattcttgatttttcacttcatttatatatctcctttgatcagtattgttattttctatgaggtgtggtcctccataaataattaagatgtcctcactcttaattaagaaaggttgtattccttggttgttgttctggttattgggaaaattttgttcattttctcaatttcttatatactatctcaaatatccacgagaaataagattttctatttcatcttttaaatggggacatttctcagtggtatgtccgatatcttgatggaaatggcaatatttattgggatctcacttatttatagcatttctcataggtttgggtcatcagaatgcgacccaattttcatttacgagataaatgttctcacgagtttcacttaattccgtgtatactgagtatataagaatatatttcacgtgcttcttttgatttttcttatcttttgacgaatctcttgactcggctttcctctttccattcgagacattgtggttcgaattccttgctttggttgttacagcagtcgttattgcagtacttgtgttgggtttgtcacccgagccagatttgagcaattttatctcgcttagtgcctcttccttacacatgaagatttgtgctctttcatcaaattcattattatttctaatagggcgatcctataaatcatcccatagttctcctaccgtagttaataagtcagttgttattccagcttgaagagctgtcaactaaatgttatcatgcagattcctcactttggctgctgctatactaaagcaactcaagtaagcttttaggcattctcccaactgttgcttgatgttattcagtgaggatgcttccggcctctttctcttgcaacctgaaactgcttcttaaaatccttggatactgttcccaggaggttatggaatagttggtgaatttatcaaacctactgcttgctgctctcgttagagaagttggaaacagaatgcaacacaagttttttaaaacattgcttgctcgcattattgtgttaaaattgtctaggtgtgccacaagatcagttgtcttgtcatactgtgcgacatgcaagtttttaaatccttgagggaagtgggatttcaatatattaggatgaaaaggctctgtcgctttgtatgaatcgtatcctaataatttcctatactccccgtcctggtatatcctgaacttgtcttttaattgtattacccttaattagatcatatccattaggactgaccattttgagagagtttgacccggacccgggcaacccgcctggacccgacccgatcaacctgcaaatgtttttttaaaaaaatattcggccgggtcgggttcaacccggtacccttcaggtgggttcgcgagttatgtttttaggatcaccgagtttcaggttgaactcgaacccgcccgccaacccgcatatttcatatattatatatttttttattttttattacatattatatattaattaaaaaataaaaactaaaaactaaaaaaccgtaaacttccctttaccttttactatggatatggatgtattttgaaatattttagttttcacttttatcat

SEQ ID NO: 223518 - DNA, 1592 bp, Cannabis indica
tgtaatacatcaatcactgacgtgtcaaaaatattgaattgtgtgtgcatgtggtaaaatagtaataaaatatagaagatgagtaaaaaagttggtttaaccgtgtgtaggtatttatgtaatgaatctatcatatcattttagatttttggtgtaaaaatttctataattaatttaattttaaaatataattaatcttaattaaagttttataagaaaataaattatcaggtgactattaggttataagttaattattatttatttttatttaattttcaaattaatcacaaccattcaataataatctaatagctaaaaaaatgtaaccatgatagttacatatttaatgtaaccattagaatctcctccatagttatatagttattatatatacaacatagtttttttttttaagaatgccaacgattccatcccccatgtatttttgggagaatgacttccacttgtgagtaaaataaaacaaaaaaaaaaaacaaaacaactcatgcaaaactatttgattattttaatatttgaatttttatcaaggttgcatagtaatacttaatctatcataaaccaggtaatacatgtgttgaaactttgtgaaattttataaaaaaaaaaatgaaaagtgacatgtgtgagtgagtggagtccctcatgtgataaaaacacttcattagaagtgtatataatatgcaagtttgagatttgggtttggaccccgagggatacccagttttgtacgcatgggtgaggactcacacagtggaccaccacacgcgctgtcgtcgcccgtccgagctaggccgacaggtgaggtgtcacttatttttttaaaaaaaaaaagtatttaaccagataattatttttttttatttatttgttaattaattacttttaacgttaaatggagtagtaaaaagcgatcagtcaatgatccgcttttttctgccttgatccaactcctccacgattatattaccattttcttactttttaatcttggattgacttctctatataagtcgtatcagaacaacgaaagaatacatcttttcaacaacaaaaaagaattctcttcttccttcacaatttttctcagagcaataatttagggtgtaatcgaacgatatcgttcggtgtagaacatatcgcatacaacgactattttatcttgggaacgcgtcgtttctagactgtcgtgcacacttcgggtagagtcgtgaaacgtcttaaggaaagcgacattttccgcgactcagctagaattttctttcgaaaatttgttccgattttattatttttaagtttggtttaacaattttaagacattctattctgctatggctgctaccgatgaatttttttgttctacttctaacaatattaacaagcctttctgttttaaggggttacactttaagcgatagaaatagaagatgatgttctacctgacgatgaagattgttactttcgttctcactgctatgaagccttgtcgtctctgaagcttctactgacaaggaaaatgaggttgaacgtgagatgcataaaaagatttgaactcctgggtcaaaaacgac

SEQ ID NO: 223519 - DNA, 2076 bp, Cannabis indica
agaccagaattttctaacttcatttactctcaaaattctacttttattaaattaagaaaataaaggtaaaaagaccattttgcccttagggccaaatatcatgcataaacactttcaagggcataattatcatttcatacacatttgattccaaataaattttagattatcaaatatcaaataaaatgccaacatttaatcccaaattgcattttgagcccgaaccccgttcgacccgaaatacccggttgtgactataccgtgccaacctgtcagaacacatctgaaaagataacacaggcatactatataatgatatagttctattaagtacacaattaaattaatttcatcattttacccttctcgggtcataattactaaaatgcccctagctcaccaacggggtcttaccatgttataaatcatattaattcacacatactgaactatataataatataattcctcaattattcataattatctaatcagggtttagctaatctatttcttaattctagggtattacaagtacagtggatgaactattacagtaagcacccttaccgactgttatttttcagattatttgttattatctttactgatttcattctccttggttcaaagtgtttggattttgttatgttttaaaagttacttattttattgaatttggaattaattgtttttgggatataaacttgttcattagttcgacatctatttgagatgattttattaatttatttatttcgtttctgtgcatttctatgctctgtcatcaactggttttgaatttaggacaaaatattattaatttgtttatgtttgtgagatttcatgacttggtagctaatatttgattgttcaagcctttcgtagctaacctatgtatacacatatatatagggcaagactatggtagaactcaacaaaagttccctaccagtagggtactcttttcaaccatcaattttaaatcgtgtggttattatagtttaagatatattcttatcatacatttgatgtatacaatagaaattttataatttttataataatatttatttttaaaaataaaaaatattaatacttaaaaaacaaatgaaacttcattttctcactctccattacaacattcttccagttcttccaaacccacgccatctctgcagccagcccagacgaccccacgaaaacccctcgacgacacctcggctaaccaacagcgacccctcggcgacggcttactggaaattcgaatccctaaatccatggtctttcaattgagacacctttccgttgattagaagttcttctccaatttatcttcaatctaagaacagccaagatgatttaagaaaggttagggctctctctcgtttatggagttatttttcatatttagattctttataatgtttgatttgtttatcttcctcatttttagtttttatttttctaaaactggggatttatttacaatttttgttgaagattatttttaactatacattgtaatcggttaccaaaagctcccatggccatcaccttcttcttcttcttcttcttcttcttcttcttcactctactccttctcccattcccatattagtctcatctgaaaacctcattcactcaccattaatccaactcttgaaccctttcaccttcccaaccacaaacctgaatttagaagccataggcctctgctgaatgatgcaatgatgcaactaaacgagaaccatttagtcctagatggctcgaatcaaaacttacccaattacagacctgaaggaaggcatccccacattggcacaagcagacaggggggacggggaaggttcagttcagagggtgctaaaactaaataagatgcccaagtatagttagatggattttacattgtattttataaccccattatttatgttgatatgctataaagggtgtttgcccaatctccatcaatttgagatgtctcagagatagttttgttatccataggaaaattttgcatctcatttaccagtgattttatttatttattaacatattaagtgggttctg

SEQ ID NO: 223520 - DNA, 4274 bp, Cannabis indica
aattggtttcaagtagtaattttgaaaattagtggctgttagggttaggttgtttgatagtttgaattctagggttcatttgagttggttttagcttcttcaagctggttttgatgtatggttatagatcaagtttgagctttaaactccaagtttaggtctttaatggcataatttgattcactgagttttttgtgattttctagttggaatatgttgtatatgcattgtttaggtactctgaaaagtttggtaacatttggatgagttttgagcaagaaatggattattgggggaaacctggtgcaaactggctagccggttcgccaggcctgtaaaaccggctagccagttttggcaggatcctcgaacaagccattatctcaactctcatccatttcagtgccgtagttgagtgttttcctgtttcctgagttagtgtatttcctagagagtatagcagaacctagagtagtgggtttgggtttcctagattagggttttgaccatgtgatttaccgggtttcattatgtgattagggcatccatttaacgcaagactttctgttcaggtcggttaacacacttgaatctggtaagaaggtaagaactgtgtataatatgtgatatttatacgaatatatatatatatgatatatatgcatgctgtgtgtatgattgtatatgtttgggtgatatcatagcgacacaatcattgtgtcgattcagcagtacatgcatcgtactggattagagtgatattcaccccagaaagtatgaactggtgctatcataacgacacaaacattgtgtcagttcagcagtacagagatcgtactggttaagaatgatatcctggccaattatacttttggatgctattgatgctatcatagcgggacggacatagtgccggtcctgcagtacgatcatagtgctggtagtgggtgatatcgtggtcaatagcacaaccagttagaacgttcttactcatctgttacgccttgtaaataggtgtatgggcacctagataccagtcggtattatatgatatgatatatgcttttcttactgaatctgtcgattcacagttctgccttcatgtgtaggtaaaggaaaggtgaaagctgaacaggagtgagcctgagctgggatgaggttgtacatgtcgtggcagtgcgacctggagtgttcggtctcggacatctggggatattattttgttgtcgctgtgcgacccgttatgtattttgacataatttgtataaaagtttagaaacaggatcccagtgtttgtaaataattttgtaaatcataaattttaatatttaatgtaaaagttttaatttgacacgttttttgagaaaattctttgattagcaaagatagcactataattgaaaaaacactgtagcatgccttagcattaaggcgttacaccaacaatcccggtaattgaactttcaactctttcaattctataggtgccatctgatatggagcttttgatataggctctgcccccggtattagatcaatttcaaaatcaatctcttgttttaggggaaaccccggcaactcctcttgaaagacatccaacgtttctcgaaccactggaacatgttccagtcccgttggtgtttccttcgtagtatccaccacattggctaggaaactgatacatccatcccataaaaaatctcttgccttaagcaccgagattaatggtatttgggatccttgaaacttgcccacaaacacaaatgggttctcaccctctggtttcaaaagttaccatatttcttttacaatcgatagttgcattacactttgcaagccagtctatcccctatataacatcaaaatcctctagattcaattaaatcaaatcaactgatctcttccttcaacaaacactggaagggacctaacccatttgctagaaataaccagttctctagtaggcagcaaagtactaaaaccactcagtaaaatatcactaggtctatgcaaatttctaatcactcaacttgaaatataggaatgtgtcgcaccagaatcaattaaaacagtcaataaagtaccagaaatagagagctgacctgtcacagtggaaaggcaagcatcccaattgaatgaccatgctcctccattggccaaccaagcacagtagatggcatcaaagcatatgccatcatagatggaaatatcttcagccactttctactcttagtctgtcacttggctctcaaaacactgaacttgaccttctagcttaggaatgctaagggtcttctcatcaagccattgacgaagagagtcttcaactttggaagtctttttttgagaaacgataaggtctttcttcaaactgtcctcttgagccttagctttattaattactccttaaagtttagaaacactactctccaagttggtgatagcttcctctaagtcagccaccttactctttgcattaggggcttgcttctttgtaactaaaagtttctctacaagttcaaaatatttcttgtgctaattgtccatagtgtaagcataactgacacaagcctaaaagaaaaaaagtcagaaaactataaatgtaaggaactaagcttaaaagaagataagaaaagattatttgccacaaagatatcagtgaaacatctttggccaatgacatgtggaggcttggaagtaaccaacttccttaaaggaatgttctcaaccttagacctgatcaagccatctccaccaactaggagccatgtgccttgtgcacacaacttttccaccaactctaagtggttggggtttgaatcactagtattagcctccttcagagaaatttcaattggagaagtaggagacttctccttgacctcaataacttttgacttccctttgttagaatccttgagaggaggattagcttcagtcataattactttgcctcttttcctaaacttcttctttgcaggagcagaagaagcagcagggataacttacacgactttcctaattgaaggttcatcatccttcggtacggttgtctttctctttgaatagtttgccatagcagcaaggaaactcatgtggtttgcagaaaggaaaaagcgagtggtaaatacaacagaaaaaaaaaacatgaaaaacaagatcatatgttatgactgcaggaaatagagcatcaacgacctattgattccccaattctctctggcaaactactaccggagttaacttctttgtcacctcagtcatgaaacacaattaatatccctgaatagtttggatcattttgaatggaatcctccccttcagagatgttcttatcttctaagatcactctaaattcaatgacagtttcactttgaccgtcttcttcatctttaagaggcatagtgaaagagtccttagcaaagtgagcatccaaataaacttgctgacttgtcattatcaatccaaatttgtaaagatttcagtggtaaataaattactcccttctctcccatgttttgatgtcattgagcatgtcatctactctccttttcatgttaatcagcggagcatgtctcttgaatggatgagccttctgggaggtaatatgcctcgaatgaagaaccgaggtatagaagtattcctaatggtagaggttgcaattactgttagttacattctcaatgtatgaattaaattgatggaagtgatacaacccttcctcttttcaagtggacttctcttcagataacataggaagttgatctcgtgaggggtgagaataagccaattcctaagacgatagaagatgaagaaggtcaaaaaaatcttgtagccattcaaatttatttggtagggacaaactccaaaataatccacaattgagataaaccacgggtgtaaaggcaagcaagtacccacgtttatatggaaccacaaccaagtgctacaacacgaatactaaaaaccattaggacatccaagttgaggttttcaaacaacaatttgaggaagaagatagtcatttgatcaactcgacttgatgttcgaatatagtacaaaataagaggtcttaacttgaatgcttgatctctcgaatcatcactctcaatggcaaccatatggagtttggtttccatctctttcccacaacccgtgttgtctaaatttttggacttgagcgttgtgagcttagctttaatgaattaagccacatgtggatcatattcatcaagtattctttgagttctcttcatatgaggcaggacagcttc

SEQ ID NO: 223521 - DNA, 1686 bp, Cannabis indica
aggcaagctatatatactgtacacacacatgttcaatgagtaacttgtattcattcattaacatagtgaaatacaactattctttcccaattctctctataattttctttctagttttagagacctgatatttcagttcaagtgtgcaatcatgcatggtgtaatgcatcaataagaatcgattgtttcccaacaagaattaatgtcaagtaaaagaaatgcttcaaggattaaagagttctaggtgtgtagataccaactgtgttctaggtgtttgagacggtgatcacactttgttgttggctgcattctcctttttgataagttgtactctaccattggacaaataaattataaaacaaccggaaaaataatctcatgaaaactataatacaactataaaacaacaaaaaaaataatttattacttttactgaagagacatttttgtaaatacaaagttgaaagagtgtaaataaaaatttttccatgttgaagtaattttgtaattgtttttttttcctaagtgactttaatgggttcaatgctctgactaagtagtccacaattaatgtttgatgacattcttgttgtatagagtagcataagaaaccaagtaagatggctctccctcccatcaacatgacactaatgacaatagaactacctaagactatggacaccactgttagtctgttaccaatgtaaagtttaattaaaaagggtcttcaaaatttcccaactattcatatatttgatgaaagacactacactaattacagtgttatatgtcttccattaattactatttgcgtatttggagatgcagtagattgaggagagttccagatggagtaagaaacattgttacactcaatgagataaagatatctaatatgcctatgaaattcaaagaaaggatggagcaaggaggagacgatttccacaaagtcaaccacgtgccatcaagtgtattatgaaggtacatatctaatcatatccatctatctatcttttgttattaattccattttttttttgtttttctatcattatctaaatattatttgttttcactaaaacacaccttttggtggtgtactatatagacttatccattagtttttggctatttatttttagtttatgaatactttgaatatattttgtacagtatgtcaaatatatttattttttttaggactaattagattacatatcctaaatggtgtcaaagcaaccataatttgacatgtctaatgtctaattatgttattactttttaagctatcagtttactgtgaatgaatgaatgcagattcaagattcagattcagaggatgagtaaactatatatgaatgattaaagtaggagaatagcatagggaattttgattttatatacttaaaaaattataaaattttattattaaaccaaaaacctaaactcatgagaacaacaacaacaagcttattattattgttgttgttttttagcaaaccaatttggtcatctctagtaaatttaaaaaaatttatggtacattgaaaaacaaagtgcaagtatttcaagttacaaagttggatatagaatttgtggtggatttaactcatttgttctctgccacatcagcaaaatacttatcctagtggcaagctgacagttatttcggttggagcttacacc

SEQ ID NO: 223522 - DNA, 1740 bp, Cannabis indica
ggcaggagtgataatgatgtcacgtgataacttcaaatttcactatgcattaagattccaatttgatacttcaaacaacgaagttaagtatgaagctttgttagcgggcttgagaatagtcgaagcactgaaagtcaagaatctcatatgctatgatgactcgcaattgattgtgaatcaagttctaggtgagtaccaggcgaaaggattaaagatggcaaaatatttagagaaggtttggaagaacttggagaattttgattattttaagattgaacaaatttcaagagaacataactcaaatgttgatgcaatggcaaagttggcctcgcaaaatgaacttgataagttaaatttggtaccgattgaagttttgggagccccaagtttatgtgaaaaggaagaagttgagatgacagatgcctcgccaacatggatgacacccatacttaaatatctactcagcagagaacttcaaacagacaaaaatgaggcacgcaaactcttgtattcagtacctcgctatagtatagtcgagggcaaattatataagggggttattcaatgcctttcttatggtgtgtattgccaacagaagttatcaaaataatcaaagaaattcacgaaggcttttgtggaaatcatgcaggttggcaaagtttatcaaagaaaattatccgtcaaggatactattggccaacaataaataaagacacacatgaatttttcaagagatgcgataaatgccagagattttcacatatacctcatgtaccaccaacagaattaagaatgatgacctcaccatacccatttgtaatatggggcattacccacaaggcgaagaggactaaagtacgcagtagtagcagttgacttctttacaaagtggacagaggctaaacctctagtttccataacttgaaaaaagttctcaatttttttttgtcaagaacataatttgtagattttgaatacccattaaaatagtatctaacaatggaactcagtttgatggtgagttgctcactgagttctgtgaaaggaataaaattattaagagcttctcgtcggtttcaagaccccaagcaaatggaaaagtagaagctgttaataaaaccttaaaggatactatcaagaaaaagttggacgatgaaaaagggagatgggtatataaactaccaaaagtactttgggctcatagaacaacggagaaaacaacaacagggcacactccattctcattagcatttggctcaaaagcaatgctaccagcataagttaatattgtgacccacagacgtgaattctacaatcaagaagaaactaaaaacttcttaagttgtccttagatttacttgaagaaagacgtagtgagtcgcaaataactaatgtagcttatcagcatcgaatcacgaggtacttaataaaagagttaagaaaagactctttcatgttggagatttagtgttaagacgagtatttacaaatatacgagattcgtctgctggagtgtttaacccaaattggaaaggtccttatgatattgaagtagtagtaggaaccggagtttataaattagctcagcttaatggctcgctaataaagaatcactagaatagtaaacatttacgacctaattatcagtaaagttaaaatgtaaatgttgtatttatctctgtaatatgtaaattcttattattaataaagttaaagtctattcaagtaattacaaagttt

SEQ ID NO: 223523 - DNA, 2111 bp, Cannabis indica
agggctcagcaaacagccattgatgagtgaacaagacaagccaccttgctggtattaagggcctatcaggctaccaatcagcaacctcgaaccattatcctcctgggcgagttagacgaagatccagctgtgaacaattctcaaaccctgagtggtcagccgctcatccccagttgtgggtttcgtctgtgagccatggggtaggtggacagaccttgtctagtaattcgtcaggagaagtcatacctaataactctacccaagttaatggttccggcaaactaataagtcaaaccaactagtcactgagacaacttggtgtatccatatttaatagattgggaatgcctcatgatcttagagatgatctaaacagaaggagagggctagacgagtagcatgtcgcaccaatcgttcagcttggagcctgtgttcaaaatcctgttcaaagagatgctgacgtgactctggtcggccaggtggctgagcaagttaatccagctgtgcagccacacttggatgaactaaaaaatatgttccaaggcttggccagtcagaagaacaatgacctcgagttggaccgagcacgtggatcccctttctccccagagatcaatatcctagagtttcctcacaagcttaagatgctaaccaggaagatgtatactgggaaggaagatcccctatcacatctcaagaatttttaactcaaatggacctacaaggagtacaaggggatgtatgttgcagggtttttcctgccaccctctcagaaccttcccaacagtggtatttcaagttgacacccggaaggttcaactcatggaaggctttgtccttggaattccacgcacaattctcctcctctcgtcaactcccgttgcacttagaagacctagttgaagtgaagcaacaactaggagttcctctccgagcttacatcagtagattcatgacagaggcaaggaaggttgcacgattgaccgaagacgggaaattgtccgcgatactgggggcatcgaagttctcggagaactttggaaggatatcgaaagagacggacaggtagattctatgagtgatttccttgaccgtgtagattgcttcatcaagcttgaagaggccattcagcgaccagaagtcgagcgtaaacctggaaagccaaaacctccctctactggaacatccgtccagctacctcagtacccaagcagttgaagctcgggtggttaatggtccaacaacaacaacagacaaggcaataggaaaaagggaaagttcgctaacaaaactgaactggacgccatggaaaatcaaaccaagtttactgctttttctgtccaaacagatgatttagagactatctacatggctactcagttataagctccgtacaagaagcccgcacccatgaaaaaggatgtaagcaagagagacatgaccaagttttgtcgttttcatggggattatggccatgacacaaacgaatgcaataatttgaagcgggaaattaaatttttgataagaaagaataatctgcacatgcaaaaatatgtcaaggtcgataaaaatcaaagggccgataacaatcaagatttactaccaccatcagtagatggacatttacaaattattattggaggtccgcacatagttggagattcaggcaaagcccgagaaaggtatgcctgaacattacagcacgagcaagaagaattggttctagcgtcgaagaaagaaagccaaaaataccccgtgtatgggaacccaccataacatttaacgatgcagatgctgtcaagattaatttcccgcacaacaactcgttggtcgttgaagtccaaatagccaataagatggtggcccgaaccatgatatataatggagcctctacaaatatctttttcatgacaccgtatgaaaagatggggctccaactcaaagactcgactccatatctctagctcgtgtatggtttcaccggccagagtgttgaacctctagggaaaatttgcctacaactaactgttaggcaagctccgaagagcataactataatggcacaatttttaatattagacgttccatcagcatttaatgtcatgttaggc

SEQ ID NO: 223524 - DNA, 1701 bp, Cannabis indica
ttttagaaaaaaaaaaaattacccctaactctttctctatctctctctctcgtacctacttttctttgctcaccttcttcatcttcttcaccacaacttaatattcaaatccaccaaaaataaaaatttcttcactcaccaccacaactcctttgttcttcttcttcctaccttctagaaatttatacctaaatatacagtctatatacatataaattttaaaaattcaagctccatcctcaccgttagccataaaccgttgaacctccatcctccccgccagcaacaaactgttgaagctccatcctcttcgttagccacaaactaggtgttaccttttgcaaatgtcgacttcaagttcgtgtatagtgaagtacgagtatgacaaaaaaagacaactatggcagaggaggacgccagatgagctttgggttctacgtgagttcttcttctctagcccagatcttagagatctcacctagatttgggagttctcgatgatcaaatctgctgcttttgagatccccgtgaagcttcgtgtggtttgtcaaaaaattcatctaccgacctcggtaactgcacactattgttaatttgtggtggtgatagttttgactgtggggtagggatggtggtggtgttaggtggaagaagagaaagaacataagaaaaaaaaactcaaattatggttcaacaaagaaagaaaaatgaaaataaataaataatttttttaattttttaataattttaaaacccgccaagcattttttttattttgaaataatttttttatagtttgaaataattatattaggtggatcaatataaatgtgccatgtgtataagattgtacacgtcaactgtccatgctgtctgttaacggtggtaaatagacaacaccttaaatttattaacggttcagtagttcggatggttttaccactaaaatttgagcttagagcataactataagtgaaataatagttgggaggatttacccacaaaatactcttattcataggaaaattttactttttgcccctaataaaacccctaatatcaaattttagacccttcactaatttgtacaaaataataccattattttcttaaactacccaaaatacccttttatttaattttccctccctaaatgtctctctcttccttttctctctcttcctcctctctctcttcatcgttctctctctccaccacaccatgaatcccaaccgacccaccccaaacgcctaaacccaccccatccgttctcaatcacccatctgtttctccctctctatctctctctctccatttcccgcaggcgacccacgacgacgaagacgacccacagagaaccacgttgaccgacaacgacccatgaccaccacgaccacgaccacgaatcaccgagagaactcggagtcaaactgtcgccaccactaactccagtaaaagagtaagttttttcttttataaaaaaattagaattttcatagatttggatgcaaatttgtgtatgttcttcagattagattgtgtatgcgaatttggattttttttgccatgttcatcagtggtgtctgtttgttttaacaatgttattgatgagatatcgataggttatcgatatagtcgaccgaaattgaaagtagttttagcattataattttctgtgttgttactgtatatcgataggtt

SEQ ID NO: 223525 - DNA, 2773 bp, Cannabis indica
atagactcacaaagagtgaggtctatcccgcaaggattgtaattaagtactttaaaattatatttattattctatttagttattacaatttaagaaaaaattataactaaaaaataaaataataaaaacaataaaaacaagcaagtaaattgatatataaattaatgatcattgaaggttaggtttattgattttaattgtatctatctattatggtctaacatgattcaattcttattaccgaattctatgcaatagcttatttactcaagtaatttatagtcttttcagatatataagtctcaattatattcaaactttctattttcgtgataaattaaatataggcattaaatacagaaatcttataagctatccaaaccacataggtactctcttcttatattaaaatttgttcttatttcactatagcataattgacactcaattctcaaatctcgcgtcaaaatcataaatatttaattggtgatcatgcaagtataagtaattaagtacgaatgaaataaagtacatagaaaattggtagaaaattaaatcacattaaaatcataaatcgatgacaaacaatatctatcaataccctaataaattatttagctactcttttttatcgtaacaacttcacacatatcaattaagaacaaaagaagaaaataaaaaagaagagaatatagaaaactccatcaaaaaaagccttcttagttgcttcagctctcaaatttttgtactctcagaatgcttgctggaaaatatcaaagtcacactctttttatagccaaaaaaagattaaaaaaaaagatctaacaaatatcattatttgaaatttataggggcgggccgcgacacttaaatcctatgtcgcggcccatgttcccaaaatccacatcctttgggtgcttgtagacatgggcctatgcattcaattcctttgcctaagcagaacccccttcatttgggtagtgagcattttacgaatttctgcctaggcataaagatccaatgccttggcacgcccatgcctttgtctaattcgaccttctctgctaatttttaggtctttcaggccctggcatgggtttcgtaccaaattttgtatttgcttcgcctcaagagctctaatcgcaccaaaacttttagatttttttctcaaattaatttccaagtgctcttgccctaagagttgaactgtttgaccatttttccatattacttcattatttttctatttttcttctattttaaacctgcaaaataatagctaccaaaaagcataaaattgcaccaaacaagagtaaaacttacttatttagaaaggcatgtgtgtttcccttgcttctcccatggcaaagaagaagagggttatctgaaagccagtcaatgcaatcatgatgggcaatggagctgaggaggatctccctttaatccaagatgtgataactaaaccagagataatcgaagaattttatgattcaagcgagaagtgatttagaatggaacagagctctgcgaagcagagcaagatgttcagggatccccgaaaccagtctgttgggctgaggaagtcaagcaagaagatttccaatccatgctaggcatttatggagtaagttcaagtcgaaccaggtaccatctccttcttctagactctcttatactcaacctatcagagttgacgatcaactcgtggctaaacttgacctagaggagattgaggtagaggcatcatactagaaaaaatgatatagtttgtattgttctgggtgctaaacctccttttaaggtgttggagggatttgttaagaggatatggggaaatttgggagtaaataaggttgtaagaatgcactctggttgcacacttgttaattttagagatgaagctacccatgaccttatccttgaagttggagtcattcactttgataaaaaaaacatgtggttcttaggccatggacaaaagatcttgactctgttagaatggtcaattctgtgccagtttggatttgtttgaatgagttaggattgcaatattggggtaagaataatcttagtgccttagtgagcacaactggcaagcctattatgattgacaaggtgacttaagaacgaacaatggtgaaattttcccgtgaccttgtgaaaattgagatttcgaatgatccaccaaaaactatttcatttatcaatgaaaagaaacaactggtggagcaaatgattgaatacgaatggctcccttctagatgttcagcttgtgcaaacttggggcatacagtttccaactataataaggagaagaaagttatttggaagaagaaaccgattgctggaaaagagacaaagatggaaaagaaaaatgatcaactcaatcagggcacatgggatattctagggaaagttaatttgacaaaaaataagcctaaagtagaggatttagctgctgatcaggaattgtctggtgctcaggaggttaccatggagagggaaatagctagttttgatactggtagcaaatggattactcccaaacgaagagctctcagacagaataaagctaatatgtcaaaggaagctccaaaaatggtaagttccagtaacggatatgttgttctacaagtcgtaagcagctgatgaggttgtgattcccaactctaatctaattcttgatggaagcaagtaatatgatagggtggaatgtgagaggcatgaataaaaaagaaaagcaaaatgcgattcttgatgtttgtaggttgaa

SEQ ID NO: 223526 - DNA, 3457 bp, Cannabis indica
ggaaaagggggaagatttcgggttagtaaactttacaactcttttcttatcccttaagtcaaagttgataattataaaatgatttggtgtagattatccataccaaaacataaatatattctctggcaagcctcttataataacttattaaccagagatcacctgttggcaagatgtattaccatgatttctactagctgcccagttgtgaggttggtgttgactgtcataaccatcttttctttaattgttctttttccaagcatctcatgtgtactatcaattcttggcttggcaatgttatttggcctgagtcttacctgaattggcttttgtggttgaatgctaatcgacatcgcagtctgcttcataggattattgcagctgtttgtgcggcatcaatttattttatttggtggaattgaaatgctagtatcttagagcaaaaagttttctcatgtgaataatttagttagagtcacacttaaagcaagattactacttgttaataggagaaatctctctaagagggacaacaaatcttttaaattaatttgtaacatgtaagtaagtttgtcttttgttattttggagatgctggtttttgtagcatttgctcagttttgattaataaaattttctcctttaatccaaaatattttttactaggggttgtagcccctacaccataacaagtgtctctgtccctgttcacaaaggtgacttcgttcctcattaaatatatggtagtaggccgatgggtaattaataatgtatttttttagagtaaataatgtattattttaatataggattttattggagaatttgagttataaaattcatgtggcatagcaaataaaaaaatctcccataatataactctaactaaaatagtttattattttggaaattctctaaaagtactgttctctccctcaatttgacctaacctaaactccatgttaatacttctccatccactagattgacattgcagcctaacgaaagtttgaccctaatgaaaccttagcaccgatgaaaccaacaaggcaaaactcaagcatcgatgaaaccccaactctgacaaaatccaacatctcaaaccccaataaaatctaggcccccctaagaaaaaccaagcccttaacaagatactacaaaaaaaaacacatacagtatcaaaatcaattgaactcattgagcctaaaataataaaattgtataagttaacatgacgacatcgagttctcttgatgcattatatatcttatcaagtcatgatttgtcgcatttcaattcaaaggctgtctcgatatggctcgttgtctactcgatcctaaaccaataattaaatgaattttagaatttaacatagcattatcatatactcttgtatccatcgagcacaatcaggcgtattagcttgttgagctttgctacattttattttacaatagggcttatagtctacttgatcatatcgagttcatatcgagcctatagaacacacttcgagtaataaccaattataaaaaaacataacaatacaaaaaatatcaattaacatcaaaacttatcaagcatcatcaataattatcgagaaaaccatgaaaagctcgtatttccctaaaccatatcctcaaacttcaaaccgacaagaatcgtagtaatttaggtaattctaacaactaatttagccagattttacaactaattttaccatattttatacattttaacgctaacaatgttctaacaattaataacatataaaaattaacgatattgacataaaaccaaacaaaaagaacatatatgtgtttaacttatcaatgaggatgagtagtcatgggaggaggggttgtaacgtcttgattcctaaggacgctacgtgtatgtttttataaattagtttataataataaactaccaatttaagtaatattataatttaattaaaaacttgctaattaattttgaaacataaaatctcttggcatcacacttttaagatcggggatctcctttaaaatattacaagagatgccactatattattttagcaaagtacacttgaaagtccataacaacataacatatgaatcccgataactctactccacttgccggattagatgatatgtacattcactgaagcagattcctcactcatggctgcccacatgttttctaacccctacctacaccacataatacttgtgagtcacaaagactcagcaagaaaagtaataaaataatatcccaaatcagtacacaaataacatcaatttaaactcaaataatcacaatcaggtatttacaaatatataaacattcaataatacacaaatacttgtataatataacaagtcataccagttacattataaagtaatcaatttcgtcgttgtctaataagacaacactaatccttattccaacattcaaatataaatgtcattgtcttataagacaatccagatacctatcccgacatccatatgtcactgccgttacctaatgagataactaattgttatgatatttttagcatgttatttatgttatttttagagttaattttcttctttattatcactttttggaatagaattatgcttgttttcattaatttcaagtttcgacacttgggatgtataaattggtcaaatatcacaaaaaagatcatatataaaataggaaaaattgtgcaagaaaataaagctaaaacttcaagcctaaattagactatgtttagatcatattttggagaaagtcaaaacataaaagttctagatctctcttttatctttccgtaatattttgaatcgtttaatttcaagcaatatcaagagagttatggccaaaatactatcagtcgatgcagtagaaagctcactgcccaaataaaagggggttatgtcgcgacataagatatccatgtcgcggcccgccccttctaatcctaagaaaaataggttttcagcgtctttttatttttatttttttatcatttttttggctataatagaagtggacatcaatagttttcaacaaggaattaaggagtacgaattttggagagcgaaattgatattgaaggctttctcatcagggttttcaacattcttttcttctttattcttaaattaatatgtgtgaaattgctacgataaatatgagtagctaaacagtttattagggtccagatagatattatttgacattgagttttggttttaatatgatttaatttcccctcaatgtctatgtattatatttcattcgtacttaatttctttaaattgcctgaccatcaattaattatttatatttttaatataaaattttagaagtgagtgtcaattatgctatagtgacatagaactaaatttcgatataggtaatttcgatataggtaatttcgatagcttatagggtttctgtgtttaat

SEQ ID NO: 223527 - DNA, 1430 bp, Cannabis indica
aatataacagaaaagactaacttaacttttaacaaacaaacaaatcaactgaaataataggccatttcaagatggtgtgtaaaagtttttgacacccatcttggatacaatatcattgaagtgagtgggaaagagaagtttggttaagatgacaactaagttatgttttgaggaaacatggttcatttgctgctattggtgaccttttctcttactatgtggcagtctatttccacatgcttagttctttcatggtagacatgattttttgtaatgtgaattgttgctgagttgtcacaaaaaacaatggatggcatctgtattggtatgttgaagtccttgatgatagaatggagccatgtgagttcacaagtggcattttccatggccctgtattatgcttcaactaaagattgagaaatagtgggttgtttcttggatttttttgattgtccaaggaacacacaataacctgaaattgatcttctagtgtctaaacaagctccccaatcaacatcaacaaaggcctggagttgaggagtggggcatgatgcataaaattaagaagatccttggccaggagaggtttttaggttctgtaagatctaagttgtagcatatagatgaggttgtctcagagattggagaaatttgcttaatttattgactgtaaataaagttgatgtcgggtcttgtgatagtgaggtaaagtagtttccttattaagcttctgtattgagttagattttgcaggagttatccatttttattgttgattgttatgttggattccattggtgtagagactgatttagatccgaggtaacctgaatcttgtaacaactgtatgaatggtctttgaatgaatgatatgcctttggagcatcagctatctcaactccaaggaagaagtgtaggctgccaaggtccttgagtttgaattgtgtatcaagtgtagctatgaagttggtcaatgctgcaatattattagtaacaattaccttgggagaatatcagaaatatttataactacttttcaaattaaaattcaaataaatatttatctttttaattaattaattaattaacccaaaaacaatttcaagtgagacaccctacaatactaagggcacctacactgtgtttagacacagtgtaggtggcgcctccctttgtcttagttaagacaagggttgtgtcttttatcctcacaacttttatcttttctcaatttatttaattaattaatttgaaaaataaattatttattacaaaataaataattactattttgaaaaatcaaaataaattttttcgaactttcacatacaacttttatctctccccttgacagtgtttcaaggtggcgatccggggactatggacctagaattctaaactctaataaactaaattatttattgaatctc

SEQ ID NO: 223528 - DNA, 3457 bp, Cannabis indica
aaaaattcagaactttggaggtatcttcaaatgccagaatttacgccaaaaaccagagttgtttggccttggaccgattggtttttggctctacagaagatgataggcactttttacagtaaactttccgttgtgttctgctgtccaagaccagcagtcaggtctagtagtagaacttagtggaatgttgagaattagatcagcttcttggggagaaaacaaatcacgaactactccagcatcccaacataacatgtttggtgtaaatagggaacttgcagtgtgtgtgctaagcccaggatgagtagaagagacatatttgttacttgttgatggtagccaaggagaacccagaattttagtacttgtaccatcaccaataactcgagcaaccccaagccgaaccaaatccttagcaccccaaatactacgccacacaaagcttgggttatgtccgagatcagatgaaatgaaatcagaatttgggaagtactttgctttgtagattctaccagcaagagagtcgggcttacacaataatttccaaccttgtttggcaagcatggcaagattaaagtcgtggagatgcctaaatcccattccaccttcttctttaggagttgctaagcgatcccacgacatccagataatgcctcgccctttactggagtttgtcttccaccagaaactagccatcaatttttctatctcattgcaagtaccaatcggaagaagaaaaacactcatagcatatgttggcaaagattgtatgactgttttgagtaagatttctttcccagcacgagaaagaaacttaccatcccagctattaattcgagcaatgactttatttttaataaagccaagcacaacattcttgttgcggcctataatatttggaaggcctagatagagactgcattcaagagcttcagacatatggagtgtagcacaaaccatattacgactggtagtatcggtattggggctgaagaagatcgaagactttgtgtaattgactttctcgccagatgcattttcaaagatatgcaggagatttgagatactatcagcagcacctcgtgtggcttgacaaattaagtaactgtcatccgcgaaaaacatgtgtgttatagaaggtgcctgttgaggaacacgacatccttgaataagtctattagcttcaaatttctggataagagctgagaggccttcgacacttataatgaaaagataagtagaaagtggatctccctgacggatacctttggatggggagacagagtcaatcacatgcccgttatgaacaactgtgtagtgaactgtagatacacaacccataatgagatcaacccatttgctagcaaagcccatacgagtcataaccgctctaagaaactccattcaacctaatcgtaagctttgctcctgtcaagtttaagagccatgaaaccttttttacctcttgttttccgtttcaatagtgcatgacttcaaaagctaccataacattgtcccagaggagtcgcccgggaataaaagcactttgggtttcagagataacacagtcaattagatccctcatgcagttcgccaaaactttcgagatgaccttataaaggacattacacagagatattggtctgaaatcacccataacagcaaagtgtttcttctttgggatcaacatgagattggtggcattaagtccctcgggcataagttcaatgtcaaaatactccttcacgactttgataacatcagagccaacgatattccaatggtgttggaaaaagccaggtcccataccgtcaggcccaggtgctttgtcagggtgcatagaaaacacggccaacttaacttcttcatcttgtattggttgcaaaagagcttcattgtgtgtagcattgacagaaactttaacattgtcaataacttgagcagaaaatgagtctgtggaatgttaaagctcctcaaagtattgctttataagtgattctaggactgtattccagctctgccaggtgccgttgttgtcttgtagttgctgaatatgatttgatctcttacgagcactacctgtagcatgaaaatatttgttatttttgtctcccgagtgtaaccagtactgccttgaccgttgtttccagtaaagttcttgctgtgctaagatcttgaaatagttatttttttccacaataaagttttcagcatcaaattcattagcagagtttttgaatttagccagcagtttcttacttttagacaactgagacttgaaattcccagtcaaatgacgaccccagtcagccaattggacaccacagagttcaatctttttcattacactttcggaacggtttgagccctagacattggacacaatctgtttgcatagaggctccctatgccaagcattttcatatcgaaatggggcagaagaaattgtaccagtagacatttcagggagtaaaaagattggggaatgatcagaggatgaaaactcaagattagtaagagatacctcattgtaaacatccagccaactttgtgtaaccatagccctgtcaagccgaatttcaactgctcgagatgaacctctacttcgttcccaggtatacggataacccctgagctctaaatcgatgacttgacaatcacgtacagcagcttggaagccagtgattagggatgaggggtaaaggcgacctcccttcttatcttcattactcttaatatggttgaaatcaccaataatacaccagggtaagttagatttggacactatatcacgaagcaaattccatgtacgatacttgaggttgcgatttggctccccatacaatcctgagagtcgccacggatccataccagaaagactaacaaccatgtcaatatgattatgagagtaattaaggagttgggcttcagaggagtcacgccataacatagctaaaccaccttttctaccattaacatcaattgagaaacatccttcaaagcccaatctagttctgactttctcaacaacatcttttgtacacaaagtttcactaaggaaaacaaacttgggtttcttttggacacaaatgtcagctaagaattgttgggcctgtggttcccgagcccactacaattccaactgattgtactcataatgtttggtgggcctggaatctaagaccccccttatcaaattttttgaattaatcacatttgcagagatattttgattattctccacctcagcttcagttccttcttttggagaaacctcggccccacttgaagaaaccatgtccaatctttcctttttaaatcagctatttcaattaattcctcgtttgagtagctggctgtgttgtcattgaccaagataacatggtcattatgtgataagtccatatttatcttataaatatgattaattcatttattaatattcttaaattgattc

SEQ ID NO: 223529 - DNA, 926 bp, Cannabis indica
atcagattgtaatgagttttatttagggcacaaaacccaacaggaaccccataccaccttccagcttgggctttgccattctttctcaagacatctatgtaatgccacgacccttacttgaagtagttttccacaaaaagcttgccataagcttctcaatatcctcacaaacgcctagagaattaagaagacactcatagcgtaagtgggcaaggattgaatcactgttttaagaagactttccttgccagctcgagataaatatttgccatcccaattgttgatccgagccattaccttattatttaagaagccaataatagagggtttgtttcggccaataatgttaggcaaaccaagataaaggctgtcatttgtcgcttcaagcatcccaagcacagaacaaataccagaacgagaatgagcagtagtgttaggactaaaaaagatagatgatttggaaaaatttacttgctgtccagaagcttgttggaaagtatggagaagagtattgacaactcatatcagcttccgatgtggcctgacaaaagagataactgtcatctacaaagagcaaatgagtgatggagggggtaccacgagccaccttacaaccttgaatggctcgacttgcttcaaacttattaatgagcgtcgtaaggccttcagcacacataatgaatagatatgtcgagagcggatcaccttgccgaataccgcgggaaggaataatagggccaacaacatgcccaccgtggatgacattataactgaccgaagtaatacaagacataacaagatcaatccactttgaatgaaatcccatatgagacatgacaacatgaagatagttccattcaacaaggtcgtatgctttactcatatcaagttttagagccacgaaacccttcttgccttttgttttc

SEQ ID NO: 223530 - DNA, 1767 bp, Cannabis indica
agttatgatgtgattatgcttttcttactgagtctgtcgactcacaattattggttacatgtgtaggtaagggcaaggctaagctgagcagaagtgagtgcaagcggatggagattgtacatatcggggtagttagacctggagtgttcgatcttcagggcagcaggcttattttggcagtcgctaggcgaccattttcgtagttaatattttgtaatactgttgtaacttttcaaatacgggatcctggtttatgtaaaatttacttatttgaattaaaggttaattaagtaaagttttaattaaacatgttttccaacaaactccttgattagcaacgaattgcacagttagctttaaatcataataacacacctaatttagtaggatattacaaaaatattgggaagccctgaagtagatcatgatgtacataaaaaggaccctaaacaatggtatagtgttcaacaatgaaagccaatgcaaggaagaggttatttgttatgttgacttggattttgtagtcaacattaacccaagaagaagttgtacaaggtgtctcttcactgtattgggaggctgtgtcagttggaaattgaacctttagaaagtggtggctctgtcatgtatagaagcaggatacatggctacgactgaagccatcaacgaagcattatggctgaaaggtttaccagtaaataagggttcaactcagaagacattattgttcactgtataatcaaagtgtcttgcatctcatgaaaatttcaatgtttcatgggagatctaagcacattgatatcaaactgcacttcatcagggatgttgtgctttcaaaacaagttcaagtcgagaaaatttgcttatatgataacccctgtagatgtatttaccaaaagtgtcaccaagatcaaatttagacactacttgaatttgctgagcattcaagactgttaagtcttccttgcttctacattcttttagacctattgcgatttagtgagctaaatcaagtagaattgttaagaattcagaaacaactaagacatgtcattagagttagttagctatgtcagcacagttcaaccaactcccaatctataattagactctcttgaagctacattactcaattcaacactttccaatactgtccaagaatcgagtgaggagggttgtattagattattcactctagaagtgacttctctcaaagtgaggatctatatactatttctataattaagacgccgaaactcgtgttgtatagtgctatcttaattcaataaagtatcatcattccagccattgaattaagctaagtttcatcttttattcaaacattttggtttattactttgtttattttttagcttctttttgggttcttgatcagtgttattggcataacagttggattaggtgagttgaatcaccgtacaattataaatgataatggatttaattttttagattgaagtcacattgggtgtaggaatgtcagctcatgtgcttggtgtttaatcgactactgaagctaactttgttattttgcttgtttgaaggaattcactttcaaaaaataataaaaatagaatcatttggtttgtgccgtgagggctgctgccaagaaattagagtcgagcaaagatgtaaagctggtcttaaaatttgagaataatatgaatgagattctatctcaaaaatcaattagtaatgaaaggagtaactcattcctcttatgtatactattatctttccacacat

SEQ ID NO: 223531 - DNA, 2247 bp, Cannabis indica
attaataataatataattatgtaaaaatatatatttagtgattcaatgtttagttataaaatttaaaatttaattttctttaaaacaaattgaaactattttaaaaaatttaatttttattattgttgactcagaaattcggactagacttctaagttacacctgctcgctagattggatagaatgaaacagttgttaagtaattataagagagacataataaatttatagtagttcactccttatatcgtgacagtaatgaaactacatctactttgagtttttattctcacaagatggtattacaaaaataggctaagtgtcagaagctccaatttctaaagagaaaaactaaagaaagaaactctgaccttgtggatagttttttgaatgtaaaaaatgagctaagggagctctcatttcataggtaaaggagacccacaaaagtaggagaaaatataaattatatatattttttactgtatatgatgaaccaacagtaaaaattagcttctaatggtgatagtcatttttcgaaacccagaacttatttttgaactcccttgagggtaaaatttgagtttgataactttagaattacaattgatatgtgagacataacttgatagagcattgaaatagcttcaaaatgcaagttgaatcgcatcaatattgagtgagttatgactgttttactaaagacatttcatgacccagtgcccaggttgacatccaacgcccaggttgacattccagcgcgtaggttgacatatgacatatgctgggtaagtgtaaaactatccaaggggtgtgctttaaaatgcttaagtactattttgatatcacttagtctattttttgttttggcgaagctggtcaccaattctcagagatgttattgttctgcgaaaatgagagaatgcgaagttgtgaatttaacttctctgagttcatggatcttagttattgtaaaaaactagatggacggtcaaaatagaatcaaaatcggataagccaacgcactaggtcatttttctacctaggcgttgggtactcattcctgagctctcaggatgttgttttgatacttccaaggttcttgaacttgaggacgagatctcctaccccatttttgaccattgcagattcattggttgaatcaaatttaacatttgagtgatcgaaccagtgtactaggttcattgtcaacctaggaattgggcccaacaccaggtcaacctaggcattgggccttatttccaagggctcgagtttatggttttctccctgagtttacttgaatcttcattatttctgaagacaaaaaaatacccagaacacttttttgagaacttaattagaaacagcccatgttgacatattgttggggctagacccagtgccaggtgtcaacctgggcgttatgtcccagttatggcccattagaattccatttggtcccaaaaatagtttaatattaatattttctaaaaatagagaagatgctcaaaagagttctcgatgaacatcatcggaattggcccaggttgacaaaatatcaacatgggcactgggccttgctttagccacccataaagtgttgtttcttccctaaaagtacttattccttgttttaaatgaagatgaagaagatgcaaaagtcagatcgccaatttgatacttggaaggttccgagattgataaattgtcaattagggtgctaggtgcccaggcaccaagtgctaaaaaataaacttactttgaatctaattttgatacctcaaatatgtccatggtatgtctagttgatgtcccaatgaaaagtttgacccatttgcactaagacggtcctagaaactgaaaccttagttggaaatgtcaacttgggcgttaggtgaaatcctaggtccccaggttggtttctgggatacaagttcatataattccagctcccatggcttggatttgattgctccatgtcttcatggtacagatgactaaagatagtgagttggaattcaagttattgaagtccaaacttccatcctagagctcccgaagtcaacttgggcacagggctagggtcccctgctaggtcaactagtatgaatcaggtctactcaactctgtgacatcatctttcttatcatagtcaaatattgatgtccacgtcaccaaggaatgttgtcgggttaataattatatatatatatatataaaaaaaactatatatacataaatgtatat

SEQ ID NO: 223532 - DNA, 2505 bp, Cannabis indica
tgagagtacacttatcacataataaagtatattcatcattattcataatcaacaatctctgtgtttcatacaacccctaaacattcattattataaatactcattcgttcataaaaatctaattcacacattaccataatcccataacctcaatgcttcataaagcactctaatcttacctctttataaacacgaattcttacatttcgtgagtcactaagattctgtaagaaagaaactaatttcttaagcaatattaaaaaaatccattcattcacattataacaaagatatatatccagctacaactcatcacataataacatgcttaagtcatttcacaacttcgtaatcacacaatcatggtactttataaagtacccttaccactcgttaaccatgagctacttatgttactatcgttgcccgatacagcaaacgataagtaagaaacctatccgcggtttcaggagtaattactcataacggtaatgaccgtatcttttactcgataataatcgagtcacaacgataataatcggttcatatcattactctcgattataatcgagtgtgaacgatgataatcgtttcctatcatttccctcgatcatgatcgagtcacaacgataataattgtttcctattatttccctcgatcataatcgagccacaaccaatacataacgttaacctcgattaagattaaatcacaacaagatataccgagatttcaatcttaatccatactgtagcaatcataatattaaccttatacagtatttaatacttttcttacctcagtctagaagtttagcgtgcatcttgtctaaatggaaacaaagcttgacaatcccgggtcctatgtcacgacaacaacactcaataaatactttaaccaaaatctctggaataaacttaattcctaaaaccggacaatccttatcttcaatagttctaggttacgctttacaacttataaacattccaaattaaacaccaaaaaccaccccgagccctaaaaccagcctggaggaaaaaaatggaaactctcctctaatggtaatcggtcgaccggttctggcagggcagcagcctagagttttctccccaaactcgagccaaatctgaaccacacctgcccaacacctccagatcaaaccaatatcaccaacacaacataatccaaccatcaactcacaacaatttatccatttaacaaaatagcataatcacttaaagtttaagcttaaaatccctaaaattccattaactcaacactaacatctttgattctaacaaaatcaagcataaacaaactccaatctaagcctagaaacttgttctaatctcagtttaataccttaatcctaaaatcaccaaaaccccaactaatatcaagcccaaaacctaagaaatcatcaagaacacatgaagaacacttaccacaacttgattagctcctagggttgaagattttgctagagaattgatgaagtgatctaagcttttccctagtttttctgctgggttcttgagccgaaaagagaagagagagagagagagagagataggttttgatttcattcttttccattctaaacttatttaataaacttactatattagctaaaataaaaattcaacttaggataatgctaaagcattaaataaaacaaagaattaaacttaacaaaattaccattttaccctcaatacacacctaagccaaaacataacatagggttattttggccatttctaactattccacaaaactgacaacttggaattttaaactagtctgatataattcccattctaatccataattcattatcatgacatatccaaccattccgccaaatccccacgatcgccgaacccggagatattatatttcaaaaatggtatccacgatacccacatattctaataaaatctccgtaattaataaattacgctttatttattcatctactcaaattccactaattaactcgtaattagcttaagtaagattataatcttactctaatatccacataattacatatttaataaaatatggccaaataaatatcaataaaatttttgggatattacagatggaaaactagaagcgcgaacttaagtttgcacgtttgttggaaattttaaggagactaggggtggactatttgatagtcataaggatgataaagtattcatttctacaagtgccactttccttgaagatgactatgttaagaacttcaagctgcaaagtaaagtagtattggaggaaatgctttcagaaataactccaactaatgttccacatcttctactcaaattggggataatcgcactccctcagttgaactagtgcatgttgatacaactgaaaaaatctaccattgacgttcctgttcagaaggtcatggttcctcgtcatagtgggagggtttctagaaaatgagctcattatggctccaatggtgaaatcaataaggtcattgctga

SEQ ID NO: 223533 - DNA, 2019 bp, Cannabis indica
atggtcttgttttgaagaactttatctttcctgtctaagatctgaactggttgttcttcgtatgataagtctggttgtagctaaagattttcataacttagcacatgagtaggatctggaacgtatttttgtagcatggaaacatgaaacatgttgttaattgctgagagtgctggaggaaaagctagacgatatgccactagtccaaccttttcgagaatctcgaaaggtcctgtaaacctagggcataacttgtcgtttttcccgaaacgtctaattcccttcatcggagacacccgtaggaacacatgatctcttacctgaaattctacatttctgcgcttcggatctggataactcttttgcctattttgagaggcaagcattctggccttcatcttttctatggcttcattagtccgttgtactaattatggacctaggtattttctttctcccatttcatcccagtgaataggagatttgcatttcttgccacaattttgatgtaaaattcagatctctatccgatataatggactttggaacactatgtagcctcactatttctttcacttacaaatcttcatactgatccgctgtaaaggttgtttttatcggtagaaaatgtgtaaactttgtgaatcgatctaccacaacccaaatcgaatcgtacatccccgtggctctaggtaacccaaccacaaagtctatggtgatatcctcccacttccactcaggaagtgtaagtggttgaagtaaatctggcagtctctgatgtttagccttgatctgctgacaagttaagcaccggaatacaaattccaccacatttttcttcatcttgcaccaccagcaatagggtttaatatcttgatacatcttagtagtgccaggatgcaataaatatggagtggtatgagcttcctcgaggatctcatttctaagttctgtactacttggaacacaaaccctggtcttataacataccgctatctgatattgtaaaattcttagcttgaccagctaaaacatcttctcgaatcttcactaattccagatcaattaactgaacaaccttaatttgttctaacagatcaaattgtaacgtcaaattatgaagtttacctacaacaaaatcgatgcctgatctgatcatgtcatttgctagctgaggtgaaatcttaatcatactgattacttgcctcggacccaaccttctcagggaaacagccactacgttggccttcctaagatggtaaaggatttcacaatcataatccttaaccaactccaaccaatgcctctatctcatattcaaatctttctaagtaaagaagtatttaaggatcggtatgaatctcacttttttctccatagagataatgccgccaaatctctgtagcaaacactaccgcgacaagttctaaatcgtgagttgggtatcgttgttcatattcttttaactgacaggaggcgtatgcgatgacccgatcgacctacatcagtacacactccaaaccctgtctggatgcatcgcagtaactatgaacttttaattatctgatggtagggcgaatatcggagctataatcaatctctgcttcaactcttgaaagcttgcttcacacatgtctgtccataaaaatcacaaattctttttggtgagttcggttaagggcattgagattttagaaaatatctcaacaaaccgacggtaataaccagccagacccaagaaacttctaacttttgtaacggtctttggtctcggtcaatccctgacggattcaaactttcctggatccaccttgattccattcttactgacaatgtgtccaagaaaagacacttgagatagccaaaactcgcacttcttgaatttggcatacagtttatgttctcgtagtcgttgtaaaaccatccaaagatgatggtcgtgctcctcttctgattgagagtacacaaggatatcgtcgataaatacaataacacagatatcgaggaaatccttgaata

SEQ ID NO: 223534 - DNA, 3391 bp, Cannabis indica
tgcacagtacgtttaaaaatcacataatacgcctatgctagttagggtgttacagttcctttcctggctttgaatgatacttgctgaaaattcccactgcatagaagatgtctggtctaatgcataacataacatacattagactcccaactactaaagcataaggaattcttctcatgtcctctatctcttggggatttggaggagactgttccttagatagatgtaaactatgtctagaaggcatatttgcccctttggcattggtcattgagaagcgctcaagcaccttatcaatgtgagctgcttgtgagagagcaagtaatctattcttctagtctctaataattttgatcccaagaacataattagcttcacctaagtccttcatcttgagctgggtgctaagccattcatttacatcaattatcttcttgacattgtttccaatgactaagatgtcattaacataaaggaccaagaaaaccacaacttgattatccttgagttggtaaacacaaggttcatctttatttgggtgaaaattgtaggttttgattatttcatcaaaccttttgttccaagagtgagaagtcttcttaagtccataaatggacctatttagcttgtatactttcccttcttgtcttgtaatcttgtaatcttttggttgctccatttcaagaatttcattaaggaaaattatctttgttgggattttatgtcctaaataaaacccaattttattgtaatcttatttactttcaataaagattagaaatcatatatttaacttgtcatatgatttgttcacatgttttatagattattatatgtttaatatataaattctattaaatctcgaacatataattattcacaaattacagtgatgtcatcacagtggaaagtaattgtgataatttgcttcaaacatttattcttatgatttattagtgtactggatttacactgacatgataatcaataatggggtttgcttatacttagataagtggaatatttttttccaagacattagtaaagtaaactaacatcgaatgtattggctatacattagtctggaccaatattcacagtagaaaatatatcttaaacttactataatatcttttctaagtaaatatcacttaattgatcatagatcaaagatcttaatcctaagatggctaggttctggcttaaacgtattacacgtgttctttgacttgtttgttacaattgaccagtaggattggcccaatacttacatcttggcaacacaatagtgtaattgagggagagcactaataatagaaatagaatctatagcttctataaatactttgaagtgaaatgatgatttctttagagcttagttaacaggcataaatgaaatacattaaagggtaaaacagtaattttagtccctacttgtaacgccctgacccacggggacgccacgtatgtgcttttacaaatttattataatttatctattagtttaggagaagtgcggtttaattgaaaacgctataattaaactaaaatataacttttatacaaaataccaccataatacggggatcccctgtttataaattcctttacaactagtttcaaaactgctattacaaaagtagggttacatttccaaatatagacaaagggttgatcttgatccctagaagccgagacactgcagttgatatgtacatcactgggagacctctgactcatggttgattcactttttccttccctttacctgcaccacgaagcacccatgagtcacaatgacttagcaagaaagcaagtaatcacaaacagtgaataacatgagatagcaatacaatacatggcacttaattccataatacacaaataaacgcttatacaacacataatcaagcgttacatgaaaactatctgcctaataagacaaactgctcttaatgcctcataaagcatccttaccactcgtcatccacgagctacatatgtcactatcgatgcccgatacatcaatcgataagtaagaaacctatttgcagtttcaagcgagtaattactcattcacaataaatggtaatgatcgtatctttatccattttcaataacggttatgaccgtatctttatctcgatcataatcgagccacacacaatagtaattgctacctcgattatagtcgagtcacaaacgataataatcgttccacacttaacatgcttagtagtgcaattagctttcttacctcaatctagtaagcaggcgtgcatgctgacttaaatggaactacacttgacgatcacgggtcttatgtcacgacaacaaagcttgataaataacttagtcaaaaactttggaaacaaaccctaatttctgtaaccggacataactaactcccactgttttataacagctcaaacaccactaaaataccccaatctaaactttgaaaaacacccctagtaaaactggatttgaggctaaaacccagagtttccattgctggcaaaaccgactggttaattggtttccctgtagcagaaaagagaaactcgggtttttacatcaaaacccaaccaaatctccatgatacctattcaaactctccagaacagttcaataacataaaaacaatgtatacaatcaaacaactctaaaaaaattcatgacaatatccaattcaccatgttagaaccaaaaaattgggtttttaaactaaaatttctaattcccaaccaaacagccataaaatttaacaaattagaacctaaacaatccttaaattaaacttagaacaagctctaagcttaaaccaactacaaagccccaaaatcacaaaatttctcacccaaaactcaatttaaaccttgtaaaatcaccataaactagaaaagaaacttacctcaaggttttggacaatatttagtattgatttgtagcaaaatctggactgaaatttgagatgaacagcttgacctccttggttttcttctagggccgaaaagaggagagagagattaattggtttctttcttagtttaagtcttatccttttaatttccaaaaaaaaaagaattcctttattatatcacttaacataatattcagccataattcaaagtccataaaagtcaacattctaacttattaaaagactaaattgcccctctaataaaacacttacataaaaataaggactagggataatttggtaatttccaactaatctgccaaactgacaacttagaattctaaactagttcggtttaattccaattcaattaatcttttattattgtgatatttctgaccactctatcgggtttccactgccgccgaacccgaaaatattttattttgaaaatggtatctacaatac

SEQ ID NO: 223535 - DNA, 2024 bp, Cannabis indica
ctagccttgtgcatctactaacatatggtttctcgttaatgtatgaggcaaccgtttgtatatctttatctcgcataaaactttatagtcaacaagttgtaaatatactctgtcactttcgcatttaatgagttattccattttcaaatataattaccgtttcttgatccatattctccttaatttgacacatgtcctcctttgaaatgatgaccgaatttcacatataacagtaatttctagtaactaaattatatttttttaatatttaattaagtagaaaaatatctttaagttgaaagttaatttgttaattaattttagaccaacttaaattaggatatttttcttagaacttaaattaaaattaattattaagttgattttcttcaagataattaattatttatttctatttcaagaaattaattaaatagaaaatgtatttaagttgaaaattaatttattaattaattttagtccaatttaaattaattattttaatattaaattagaattaataattaagttgatttttattcaagatgcttaaatatttatttctattttaatgaactaggtaactaaactgcgctttgcgcgatcttataatttttttttgtggttgcaaaataattgtagtaaataaattctataatataaaatttctattattttctcaaaatcatgcatttttgtaaaaataaaataaaaaaaaacaaaataaaatacatttaaattattataaatgatacatatataggacataaaggataaaaaagactataaaatttacaataaaatatatgtggacaacaatattgtagcatgataagcaggggcggcccaagtagtttgggggccttggacaaaaaataaaaattgagccttttattaaaaaaaatattaattaatactacataaattcaattttgaacaaaaaaatactttataaattctaaaatagacaaaaaatttagaatcatgtgtattgggactacaatattttaacattttttaaagtgcatatttactgttataaacttttattgtatgtatactatacattattaaaaaaaatatatttattatattatatatataagggatgataacaaaatgggacattttaatataagagaccttgtgcaatggcccaagctgccatatgtttggaccgactctgatgataaggatttgttatcaagctttttaatcctttttataagtatggattatcatttatgacatattctataattagaagtcaaataatagaacttttgattaacacaatttgcctattagaatttcatgttctttgattaagtttggttattagtaagtgttgaatagaaaaaataagggaagactaaaaataaagaaagtagagaatattagaaaaagataccgcatcactttctcaaggctctctcttttatattgatacaagaaaagtttctcattgcatagagaaagtcttgagttcgagtttaaatttttctgttttttataaatgaaaataaaataattaaactaaattaaaaaataaaaaaaaaaattcttttcaggcagcggaacacccgtacgacaccttgatttctctaagccaaggttagccttccaaccatccgagtaacaatgggctcatttttcgcgcgaccgtgtgcctcgtgcatactttcgtctctcgtcgtctctcgaacaactcccgccgagtcatgctcgcaagcatctatgagtgcatccatacattgaggctctcgactaaaaaaataagaaaaattcatacatgactcatgctctttctagagaagagagtaattgtttaagtcataatatgtttaatcatctagagaaatactaaaaacattatgagtgttgcaagtacttccataagatagtgaaatctacaaatacacatatgtaaaaaataataaaaaattatatatataaacatgaattattacagtaatattattcacaattattttactacaactaaaaatgttagtttctttttc

SEQ ID NO: 223536 - DNA, 3029 bp, Cannabis indica
agtgaaaattcataaataagacatatctaatttagaattataatttattaattaaaatcaattaactgagtcttacaagcagtttgctcaactagtatgtggaccatgggcctatataaccgagcttctaataagcagatctagaatttaccaacactactacaaaattggtttttcccaacaattaataagggggtcaattatgaaaaccgttggaaaaagtaagaggagatttttcccaaaaatttataactgttggaattcactgtttttttttaaatatccatttagtattgccttctccaaatgaggagtttggagaaggatggatacctgggcggtgtcgagtattttttcccttctccaaatcaccaggtcactagtccaacatagggatactgtgcctggctgggtgcccataccaagcagggtgcaatgctgcccttgcttccatacttcaagaggattgcagctactaccatctctgcccgacccaattcataccaaaaggcatcaaataattatttgccctgttcattctctatgcttctcaaggatggggtgagtcgtctctgcacaacactaactggctcttcgacctgaagtcaattcctcagcaaagcaggtcggggtacttctacttcttccaattggacgagaaatggatgaagggtactgtgaactctgatgtcagcaaaatagggcattttttggacgagtactactttgtgcagggcatggatactgtccacaatcggttccagaagattccttcatactgtcctcctcctttcacattaagactcaaggagagggcacaaaaaattctccaactgccagaagctgctcgaaatttcactttgttgaccactgaggccaactttgtgaagtacaagctcttcccaaatgattttgtaccgaagcccatgaaggagaagaagaagaaggcgaagccaagccgagctggtgataccgagtaggaaaaaaagctcattcaactcaagcgtgaggcttagttgaagggaggcgacggggccaaacaatatgctcaagaatattcagagcaggagaagccaagcaagaagaagaagaaagctcccttgaccgaccaagcaccagtggaacatgccatcagaagaaggaaaaccaaatttcctgctcgcccatctacccctataaagggaaaaggaaaattcgtcctggttgagcaagaagactcttcagatgatgatgtcccatctatacttattctggaaaatgcccctgcccgtgtgcaggggtactttaacttgtatttacttctcttatattatgcttttcacatatattatggctgcgtctaactatattgttatttgtgtagaaatgtctcaaaagatgctctaggccttaaagaagagagtaggagacagctcgggcctgtctccttcgtctaaggagagggctccagttgatgaggtcattgacctttctgaggagcgacctgttgtggaccttccggctcagaaggtcttgaagtcaaagagttccagaagagggagctcggacgggtctgatcaaggtagaaccccttcaacaatcgtggcactgaccatagaggccaataggggtaaagacatgttctagtattacctgaaccgatcacttcccaaagtgagtgatcatctgaccgggcggacaatgagctatccttgaagctggtcctaggaggagtctagaatgtagctactcgggtaaatatcttcttttttatttcattctcttttatgtagcccaaaccttaacatgtttgctgtgcaggtcaatgtgaagatggcatatgcctattctagagccaaatcagctgctgccaagaaccttgccaccaccaacacactgcagagggaggtggatatggccagaatggaaactgaggacatgaggagccagctcggggaagtaaggaatgaggtttgggaggtgaacaagaggcttcttgctaccaacaccaaggttgaggagctgttcaaagagctgcaagatatgctttaaaacgattagctgaaggctgataatgtttctttgtccaaggaggtcaataatcttaaaaatgagagggagactcttcagactcttctttccaaactggaggaagatgtcaagaataaacaaactagggaggaggagcttgagaaggaaatcaggattaagcagaccatggaggaggagctcaagaaggaggtggagagcctagagacagctgctcttgaggttttctatgatttttggaaggccaatcctgaaggaaactttgattacctttgcgattccaagagcatgtatcttgatttctacgcagctcaggtggccaaagcaaaccccgaggcgactgcttccacagctctagccgaccaaaggaacaaaatccctgctgcctagagtgttgatccttcggcccctcagaccaaggcgctccgtaccaagagccttagactcttgtcgtttgaatatttatttcttccttatatatatatatgtgtgtgtattcggcctataggccttcttttgagaaaaatgatcgaccaatcggtttttaaacatgaaatatgtttttcatttttaagacaactggctgactgggtagcttttaatcccagatttaccgtgctttgttatctttttttcaatgaatatcgtaccttgttatgataattgtttgtgtaaccgtgtttgttttgttttttttgagtttgttatttacttttactaatgctttgtacgagtatggttgccccctaagtgacctagcagacttttgactcttggtcacttgcgtttcacaagtatggtttttgtctatttggttccttgaattcgagcagacttttttacgcatttaatggtaaattcataacttgctaatagaattgacacaatttgaatttaaatagacatctttattcattcattcgtgggaatatttttgctaccgtagcaacttacataaaagttgttatatctaaaccgatctttacctgaatttaaacaaa

SEQ ID NO: 223537 - DNA, 3344 bp, Cannabis indica
aaagaacacaagattttaaagaagtttggtcccattagtttggtaatagcctactccccttgaattgtattaactcaagaacaaagaatacggtgttttctctcttgaagctctcacaatgaaatctttgagttgttttctcttagatctctcagaatttaattcttttcacccctattccagtgaggatggatcactatttatagggctaaatgcataagaaagtttcccttttttcccttttagcttacaatatctataattggtaagaacatacattacatatttagaatacataaattgagagattcagagagcttgtcatatccctttgatacgatccctggattgtagggattgttttcttgcttcgcgatgtaagtcctggaattactaagtgttgatacgctgctcggaccatctacccttaccctgctcggtcaggcagactttatccgtgctggtgtatgctgagctctgtttggaatatctcttcagccaaatgtaggaaataggagccacgtgtcaccagtatatgctgtcacgccatagtgcaaaaaatgggataacaatccaatcaacttttatcttgccataaaggttctagctctcacaagtggattgtatcataaataaagaatacaaattaatgtgagacaataaaattttgtatttttcctattgctataaggtgtaaaaacaattgattataaattaatatttatgatcaagagaatgtaaattacaatgtagagaaatataaggtatgtcttgtatgtaggaaattgctcataaaggagatattcatttttaatagtactttcttttagtttaattgaaagactatttcaggacaaacatggtactaattgcttattatgattttaagttttgtcaaatgtgacaatgaattattaaagtgtcatttataaatggtaatattgatgacaaaagttatatggtgcaatcagaaaattttgtatccaaagatccaaagaatatggtttacaaattaagaaaattcatgtataaactcaagtaagcttctcatcaatgattacataattttcattaagtattctcatttggttttgagatagaagcttttaatgattgtgtatatagcacaggttcagtgaaagtaaacatatgatcctaatattatatattagtgaaaacttgcttaccactaatgatgcactcattttgtattagggattcaaggtatggtgcgattgttcttaggatattcttaaattataacaaaagagatatatcaataaagtattcaaaatgtttggcatgaaagatactatactgggtgataggcttgtagctaaagaaaataagcgtctaagttattaccttgaaagcaaccttagaatttaagaaatataaaaagattcttcatttagaatctaatataagctcaagcatgtatgtgaatgtatttaacatacatatcaagaatgttggacagatatttaagtaatcctataaagaacttttggtatgcagctaaatgggttataagaaattaatggagaacaaaatactatatgttcacttattagaaataagaaaatagaaaatttttggagatcattaggatttttgattctgatcttataaaaattttaattgtgagattttttgtcacatatgacaacaaaattaggaatagtattaaaaactattaaagatataagttgtgacaataaatcaatcaggttgcttttttagtaacaacatgagctttacaaggtctaaggcacattgactttaagctaattgttatgaaaatgaagttcagagtaataaggtatctatagaacatataaggacaaattctatgtttttagatccgaattattaaggatataccacttaagtctttttaagagcttgttgctcatatatggatgttgtattatttaagattgtgatggtttagtgggagtttgaatttgaaatgttctatcaagctaacacatatttatggtttgattttgcagataagtatggacttaagttttgagtactttaaatgtattatttctattgaggtttaagtataaagttataaagaataaataattgatctcaattaaggaggaccagttagaaaaaggcatgataagatcatattcgcatgtaaatttaatgctacacatctatgattgatctatgccatttatttgtattgatatacatgaccattgatgggtttagccacgctaaatgttgcgaaagccgctttgatcctatgttagtataatcaatgaacgagattgttttgaaatacctataattataatagcaaaagttaagcgcttataaggttacacactatccaaaaaatatatgtaacccaagtgggagattattggattaaaattctcaatatggactcatatgtatattagtgtattgctattagaagtttaaccaaaataaaatgatcattttagtaattgtgagtcattcggtattaaagtgtcatgggctaaatgtatagataccttaacagatatttttaatttatttaggggctaaattagaaatactttaaattataacctagctatgaggttatatattggtagtggtccccaagaaacaagagccactctgttctcatcttcccaaaatcacgacaaagatcatctctatgatatagattaagatcatcagtatctatggattaaggtactcttccactatgtacattcttttctttgaatcaacaaaggtattctttagatatatatattttacacttaaaaataatatgtaatatgtttatctatggaattaaatgttattgcatattttatgagtgataaagaattctaaacagcaaacccaacattattaaaaacaataatgaaaaaaataagtaactactgtaattttttttaaaaaataacaaaggagacaaattttatgaaaaccaaataacatcacatcactatatgggatccatgaacattaaatcaataccaacccctagtgtcgcaccaccgacacaccaccatatcctaaagagaagaagccaaaaagggatcctcctagtaacgaacctgaaccaagccaccaccgatctacccaaaccaaccacctccctggcaccagtccagagactccatcattagaccaccccaacagagaagggacccacacccaaagaagacagagaataagagaatagcccagtccacactcgagagcccgtcgacaatgaagacccatgagccagaactagatcccctgtgcaacaccctccctgaaccagatcccatcgatactgattccagtgaacacgaaccaagaacccaaaaata

SEQ ID NO: 223538 - DNA, 1884 bp, Cannabis indica
aaagcaataaataatatcactgtggttgtggtcttttgatgacttaggtggagttacaacaaagagttattataatagttcaagtggattcgggtcacagaatacaaaactcataatccatacattaatatatagtttggatccattgtagaaaattgatattatcaatttgtgaaagttataatcttttgtttaatgtatttgtaacatcttactagataaggcgtgttacattgttttctaaatactgtgcacgtctttgccaattaaatggtctattgaaaacattagtaattaaaactttcttaaataactttactttaataattaaacataataatttacataatttgggatctcgttttaaaaattacaaaatatttaaacttcaaaagttgtcgtctagtgacaaacaaagtgagcctaaactgtccagaagacccttaaccctctagatctaaccattttgatatgtacaatcttcatccttagcttttagactcacattggttcagctgtagctcttaccttcacatacacgtaacaaaatttgagtcgacagactcagtaagaaaagcataatcataacatagatataaaccaagttaaaattaggtgcccatacacccaatcataactatatccctgtgtcgcacgcaatactgggtctagagcattcgtacgatagtactattcaccacaatatcaacctatactcaatacattagtcgtaccgaagtgttagcatcaatgagtacttatgccgaacatacattcatcggtatccaatataactctatgtatactgatactactattctaatgtaatctaataggaaatcataaacatgcatactaaacatgtaaacacatgcataaaattatactaatcttaccttgatcctaaatttaggtttatcagtccacttgagtggaactgctgctcgaagatttacatcccttaagtcacaatatatgtaaaactgataagtgtttactctagaacacttctctaatgtctggaatgaacctagggtttttctaccaaactatgtggtgaagacaccccaaaataaaatacataatttggctataatttatataccatagagtagagctcgtcacaagctttaaaacaatatatagaacgtctaaaatggacatttacgtgaaatgttatggccaaactacaaaaatcaacctttcgcgttgctgtcctactggcatatcggttggaacaaccctgaaccaaccagaattctggttgtctgggcataaattcctcaacaattctcaaacttaaagcccacaagaaacctactcaaatcatccccaatcactacaaaactttctagaacatctaaatgaaccataaagaacatatttcaacaatcaaacacaccaaaaacaatatgaatcgaaatccaccattgttgagcaaagtttgagttcttaaactcaaactagctcaacacttgttacagctaacaaaagccaacaaaaccacctccaacaacctcggctaatcaaactaaactcatataaacgtaccctagaacaacctaattaaaccttgtgtaagaacctaacctcaaagcttaaaattcaaaagaacaaagaggaggaagtttagcttggattaaatcttgacatccctaactaaaatcttacaacaacacctagaaatggtgaatcaaaacttgattctttgctggttctaggaggggccgagagaaagagggtttgaagagagagagagagagagagttgtgatgttaatctaatttatttttaattttaactaacctggtttttttctaattttaataaaagataaactatacaaacttgagcaactaattaatcaaaggaatagcaatttct

SEQ ID NO: 223539 - DNA, 1837 bp, Cannabis indica
cctaggtggtctgggtataggataattggaattaacaaacattgctttcttgataaaatggttgtggagattccctttgaaagataaggctctatggcataaagtgatcaaaagtagacatgggactactgataattaatgggataccaaaagggggggaagattgtcttttaaggagcatggaagggtatagctacatagtatgatgttttcttgagaatggtttggtttagaaatggtgacaaaattcatttttggaaggccattgggtgggagatgaggctctgaagaatttattttcgaatttggtactaatctctaacactcgaaataaaagtcttaagggatggtggtcgagggtgatgccttgtcagcttctaactttggcgggaatctccatttcaaaagaaatttgagagatggggaggtgtcaaatttattatttctaccctagaaactagagcaaaacccaaatttttgtatgttggaggactcaagagttcggattccgaaccctaatggaatttttcttgtaagttcacctttcagtgcttggtatcgaatcagcttgttacaaaagaagggtgggctaaagtggtgcgaaagagttgtgtcccatccaaagttagggtttttgggtggttattagcaatagcattacaaaatttgaaagttaatgagattctaaaaaaagaagaccttactagtcgctatccccggttggtgtaaatgttgcaaaaatagtgaggacactatctcgcatttattacataaatgtccatttagtcaatccctatggagtagtccatatgaagtagaatgctgagagagtttggcattatactacggtgcatgccacagaattgtagacagttgttgtcttgcaagattaaaggtggaaagaggtcttccaagttatggtcagcaacagttttcgccatcttttgggtcgtgtgattagagatgaatggtagaatcttagaaaatacaacaaaaaaaaagtagacgacttgtgggatacgatcaaattttgggtagcttcatgggtgtgtagaacaaaaggctatggtgatctttctttccaagaccttactatagagtggggttgtatctgtaaaatttccaatgttacatttctaattttgctgtgaagttcattaaaatcagagaccaatagttaccttgttttatgagatttgaagcgttcacgaatttgaagccactcaatgacttgtagcactcgtctccaatttccaaactttcccaagatctgaataacccttaagatagaatgatctgtgaatctaatccttgcactacgcatcatcttcgaaaacatccattcgggcatgtcaacgtctgcaccattcagcctgataaaataaaatgctaaaaatgaagagatgataaagataaaagaattaaatcacgacaagaagctagccaagaaatatcttagacaaatcatttatgcaaacaaatattcccaagtagttctaagtgaggaaataccgtataaatttcataacatccttctgcaaccatctttgtagatgcaaaatttattcacaaaataacaaaccgtgtgtttccttctgggtacctattgaatgggttatcattggtgctttcctaggaagagaagggtggctacaaataaacataaaaagaactaatgttctctattagaacactaaaaggatatcctaattttgtaatctcaatgtcactcatttttaatgcagaaattttttctacaaggttggtcttgggattttttctacaagtgaagagtaagaccaaataacctatcaaactgctactgaatccataaaat

SEQ ID NO: 223540 - DNA, 1546 bp, Cannabis indica
tttttataagacaatgtacattgtctatgagatggtgtactgctagtgctattttcatggagtgaccttatagatctgcaagtttgtccaattagctccacagttagttatttcaatttattaagttacctatataagattttgtgcattacttctttaggtgatgatctagagatttagatgataattacatttgtaaggagtaagaatagttgttatgttaaggaggatgtgtgtgtttgatcactactctctcaagtaagtttatttgtaaggtgtaagatatcattgttgaggtaaaagataccaatgttgatgagcttaactcttgtattctctttagtatttctccattattgatgatgatcgaataatgcttcgctaaatgacaattctttcaaccacttgaggctaactcaagtggcaatagaagagtacgtttgtgttggaggtcttgggttcgagtcccaaattatacatgattgtattatataaacgcttaaataaaaaaaaaataacaattcttcccgtgaatgatgaatctcattttgtttgtctagtatttattttttaatttgtgttattgtttgatttaaccattataatttttgtatattcttgttttattttgatttttgataagtgttaattcactatattataatcatttaaaatattttataaatatttaaaaaattataaatttaacaagttaaaaattataaaatttaaatattttattgtacttatatatcttttattttataatcaattttaaataaccaaaaatatataacatcattctagtgctccgtataaataaacatatataccatttctcgggatgctatatatatataaatatatatatattaattaataggtataaagacaaaattagggctgggagaaataaaattgtgtaaattgtttggaatgataaaacccatgctataccaaatcggtcaatatctgtcgacgaaaacaatgacagtaggtcttagtagtgtttatgtgaagaacaataggtttggtcctcaagtaataacgtattatagatttatattgttatattcaccaaaacttttgaccatacatacacataaatattgatacacgcattttcttatctattaatattattataagttaaccactcgaggctagcttaagtggccatatgtgagtgtgtgttggaggtcttatcaatttaactaattattaaattttatatagtttaatgtaataatttttaaaaaatatcgttaattaattacaagaagatatatctaaaaatattaaatattactttgccgaataacaataatcgtatatttatactatcactattgataatttttttaaacatcaacgaaagcatttaggcatcattattgctcaataagcaccgtctaaatgtgatactttttgattaattagtaagattttattaaaaaaaattattatattaaattatactttttttttgatgaaaaattatacataactttaatttttttttgttggagtaaccgataaaggttaa

SEQ ID NO: 223541 - DNA, 1178 bp, Cannabis indica
aattagaaatagccacatggcaatttacttaacaattaacaatcaagtacctacaaaagttttagaattataacttaggtattattaccgccaaaaattaaacttaagtacttatttacaactggaagttaaacttaggtatttgtgccgcaaattactcatttaataaccgtcagatcaaaatgcaaaatatccaatggatagaaatgaaagagaagtggaaaggatggctcattaatgttcatgatgtccctcgaaaccacaaaactgccaaaatcaatggcatgcatattttcaaaatggattatgacgaaaatacccttagtaattatttaaaaagcaccttttattaaaaatggacttcttcagggacaattgttatacccaaaatttggctggtacttcagaaggtggcacgtgtcaatcttagagaatatgaactagcaaatataatggcaattatattaaatggaataactaatttaatacagagtcaatagggtatatttattataactcgcagaccgcacagtctttaccgagacaagaatgtacgaactattgactcacgagaaaccatttcacgtcagaggacataatcgcaaggatgacatcgataatacataacgagacatctatcttgcaatatgtagcgagatgttgacaaggctaattagctgttagaacacttagcgtataccatacattatattaagtgtaatagcttgaaggacatagataacgcatagcgagacacccatctcgctatgtacatgaaggcatactcctgttaagctccagctcactgccagacttattgttgcattaagaatcctaaggacattattgtccagtctgcaaggccttatgatcaaagagtagttcttaaatctgctcagtaaaatggtgctcatgctattgctggaaaacttatggataaatcaagttgttcatgcaccaagcgagatgcctcagcgaggtacgttttgcagcgtgtttgagtccactttagcattgaccctttaaaagcggtttaaatcacaactgtgtgatttttaaataataactgaatttatttacgtggagcataattatagcccataatttcgggaaaatatcgtcttgggattcaaattgaaatgtaattaattgccaacctatgttattataaataaggg

SEQ ID NO: 223542 - DNA, 3109 bp, Cannabis indica
agaaaaccttacattgatgtcagtagaataatatggctcatattccgttcagatctttaacccttgatcctttctgttgcagagtatgatcaagatctgaacctggtttctccttcaagtgaagaatactacacaatcttccacactatcttgagtattgacttaaattgtgcgagcaatcactcatacactacagggttcaaaattttgagaagaagaagaagaattcgaaaatagaagaagctctctttattttctatttgtttgacaaaaaattaattaggttaggaaaataagagctataatattctatttatataatagctattagggttagatttagaataaaatgaattaataaaaaaaagagataaaattggctttatttaaactcttatggctgaattccttagtgggtctattgagtttcaattttgccactttattaaaacttttctttcttttttcaaatgtcatcttttaattctaactctgtaaatgtcaattctatctatttaataattataattaattatcaaataaaattgtcatttaagtcatttatcaattagatctttcaaagtctcttaattaataaacaaactataaattcttttttcttctcaaataagctcttattgagtaaaattcataaataaaacatagtcttatatataattctaattgattaataaaatcaattaattgaatctacaagataatattatctcaactaatgtagaaattatagacctatataatcaagctcccaataagtagttttagaatttaccgagtaaattatctatcttattagttccttctgactccactgaagattcataattgcactcttaattaaatagaacgttctataccaaatacaaatatactataaattatccattgtttcaatccaaataatcagcgatcttctattgatgatctacatcgagtagggacaaatttaccattctactatttaatgtattttatctttaaaacacttaaatacttgtaaatgatattccagtaaacaaattgttcatttacaatttatattttattataaaagaaatgatttatttataataataataataataataataataataataataataataataattataacaacctttttttccgttcaacaaaattgaacacagccggtagcactggatataaaagcaaagttggaaactacaaacaggtcacacgttgaaaaatatttcagatataataatcacagcccactcaacagaaagcactctctcgcctatggtgatagaatatcacatgaaattgtcaaaattagatgaaagaaatgcaaagatgaggtagaaacattatcagttccatttctgatgttacactagagagcatcacatcttccaattccaaggtaaccaagtcttagagacccagaaacacagaatgccctgcagcatctacactcttcaccacagaattgttactctagtttttccagctcccccattctctcaataattgcctgcaacaaacaacatccacagttgacagtcacatttttccagtgtttacatacatgcaaattcaaaaagactgggcaaaaatgcctaagatataaaaatatgcacgtgcactaaaattctgagaattgtaaatgaattctccaagcacaaaacacactcaacgagaaaagaactgagcagagaaaatattgtcactatcctactaaaactatgtgtgcgcacacaaacgaaaggtgggggagatcagaattaaaaaagaccccaaaagcatgcaaatattgattccacaaaaactaaataaatgaagagcaaagacctcaatatatacacaccttcttgctagtttcctggagctctccagcaagaatgaactcatcaagtatgagataaaccttcacaggacaacaaagtatcagtttagataatcagaaaaattatatacatggagaataagttcatgaaatcaactaaccttgtggaagttaaaaaccagatctagctcgcaaacgttgctaaagaaatgatccaaaatctccacaaataaatgaatgcactccagatatgctaactcattatctgtaatatcgacacacaacgagaaaaacagtccagcataacgcctgtagattaccttgtgtgtacgaaactgaaataagtgtcatgacataaggtggtcagacatagtgatatgctaacaatcaccatttacaactcctaaaccaatattatcattcttgctcagtcaaggtaacaaacaccatttacaactcctaaaccaatattgtgtacaaataaaaaggcattgattatagcaaagtaatgaaacagctccaagttatattttttcagaaatcttcctagaaccctatattttattattatttatttattttgagggtttagaaccacaaaccctctccagaactcaaaagcacgaaagtaattatggatcgaaatgattaatcacatgaacaagataaggtgaaataaggagaaaaaagatcacctcaacgaaatttgtgaatttgggatctctgtttaccaccaaacgatgaacctaagcaagcaaacaaaaacggaactcaaaatcctttgagacatatagttttattcgaaacaggaatcatgtgtgaacaagcatcacaaacctcatattcaaccttgtgtttctcagaatcctcgaggggaacgtagtactttgccagacgggtcttgccttgccgattctgtaagagtatgaatcggatctgcaaaaaatcggataatattcaaacacaattgattcaatcaaatagatacattaccacaacatttcattttatcccatttcaaattaagaaatatgagaatggtaccatcgcagaacagacgaagcgatcgagaaaggaaagagaagactggtttgaatttgaataacagaataagccgtcttcggttctgttcagccgttttcgttgaaaacaaaaagaatgttgtcgtttatattaaacgacatgccgttcgttatttcattttataaattacgacatcttccccttcaatgtttgtgcttgtgttagtttcactatttttttaatatttttttt

SEQ ID NO: 223543 - DNA, 1855 bp, Cannabis indica
tggtggtggtctattcatctattgccctcggaatcttgatattttgtgttttatgtttcggaaacatggtcccaatatatatatgtacctaacttatcttatgttaaataagtatgaaaggtttgtttttgttttttggtattttatttgtttacatccactagcatatagaaatatgttcgaatcctatattacaaatacatatgatagagtattgttattgagtagcaggtgtctaacatttttttaaaggtaacatcttacaattagttaacgatattctctaaagttataaccttaaattatatggaatttgatacttaattgtaccaatagagatatgacaccaaagatagcgataagcaccattggtaccttttagcacagaaatgctacaaggcactatcggtgcctagaaccctcctctgtgtcataccgctattagtgtaattaagtatcagatcgcataaaacttaagacaataaattttagggaatatttctaacaaatcatagagcgtcaaccatagaaagtaataggtaccactagttcccaataacaatacttcttttagcagtatgctaacctcgaaactttccctagtgatgtggacatcaatgtttgacatatgataagaaagataatatctcagagttgagtagtccggagtcatagcagtcgacttgagaggggtctctagccctatgcccaagttgactttgggaattctacaataggtgttcggattttgataagtcatttcgaactcactatctttcagtattctgtactatgaagacatgaagcaaccaagtccaggccctgggagcagaaaatacacgatccaagacttcaaaagtcaaccagggcacctagagtttcacccatcgcccaagttgacaaccccaactagggttttagtttccaggaacgtcttagtacaaatgggtcaaactttgcattaagacatgaactagacataccatgaacatatttgaggcatcataatcaaattcgaagaactttcatttttgagcacctggacactcgatgcttaggcacccaagcgcctaggttgacaatctgtcatctaggccacttccaagcatcagatcaaaaattcgactcgtgcatcttcttcgtattcatcaaaaatagggaaacaagtgatttcaaggaagaaacaactcatactggttgccagaacaagggaccagcgccaagggttacacctagtgctagcctagcgcccaggttgatattttgtaacctaagctgattctaaggagttttttaaaaaatgattcagggaatattctccgttttcagcaaagattaagattcaattatttttggggatcaaatggaatttccaggtggcctaaaattagactcagtgcccaggttgacagttggcattaggcccaacgcccaggttgacatattgccaacttgggccattttcaatgattttcttgaaaaattgtttcggacatatttttcgtaatcagaaataacgaagacacaaaaaactcgaggagaaaaccacaattccaaaggcatcaaaattgagctcagtgcccaagttgacaatcaacctggggtgttggtttcgatcactcgaatgccaattctactccgagcattctctccgaaatagttaaaaatgggacaggagacctcgtccttaagttcaagaaccttggaaatgccaaaacaacatcctagaagctccgaaataagcacccatcgctcaagttaacaaatagcctagtgcgttgggttctacttatccgattctaattctgtcgcgaccgatcatttagttttttacaataactaagagccatgaagt

SEQ ID NO: 223544 - DNA, 3374 bp, Cannabis indica
gtggtggaatcatacttatcagtcctaacaattttaaggtacacgctgctttatgttttgaattctctgcatctaacaatgaagtcgagtatgaggctttgatcgtaggattgaagctcgccctcgagatgaaaatagaatacttacaggcttttagtaaatcccaaatcatcgtatgccaggtaaatggagaatatcttgccagaggtgggtgtcatagtatgcgagttgttgcagaaattcaagaaagtagtcgtatcccgagtaccacgtgctcataactcacatgcagacgctttggcccgcttggcctcaactagagaagctgagctgctcgatgtgattcctgttgatgtgttaacacacccgacagtgagtcgagatgatgtgatggagatagatgttgccaaaaaagttacttggatgactccaatagtcacttacatggaaaaggacatcttgcccgatgacaaaaaatagaagcaagaaaactgtaggatcgggctgcccgatatgtcatctatgatggtaaattatatcgcagaagcttcagccagccgctacttaaatgcattgatggagaggaatgcgactatatactccgcgaggtgcatgggggtatctacgggaatcacactggtggtaactctcttgccttgaaaatcatgcggcaaggataaaactggcctaccctgtggcaagacgctttgaacttcgcaaggaaatgcgacaagtgtcaacgaatagccacgtatgtcaaccaacctccgagtcattttcattctatcacgagcccttgaccctttgcggtctggggcatcgacctgataggagagttaccaaaaggaaaaggcggagtcaaatacgctgtagtcgcggtcgactacttcacaaaatgggccgaggcaaaagcactagcaaccatcacagcagctaaactgcgcgagtttgtctataactccataatctatcgatttggcatcccttacaagctcattttagataacggaaagcaattcgactgtaaggaaatacgacagctatgcgatgagttaggaattaaaaaggcgttctcaacaatatcctatccgcagagtaacgggcaaactgaagctgtcaacaaaataatcaagcacaccatcaaaggaaaactcgaagaacgtaagggggtatggccagaagagttttcacaagttttatggtcatacaacacgaccccccgatccacgactagcaagactcctttctcgctctcttatggattcgaggccatgataccagttgaggttggggcaggttccctacgaagagatgttttcaacgttgaacagaacaaaggaaaactcgctttacctcgaccttctagagaaaagcgcgatcaggctcacctaaaaaatgcggcctatcagcaacgaaccgcaaggtatttcaactctaaggtcaaggaaagagttctgcgagtacgagatttggttctccgaaaagtaatgccaaatatgaaaaacccagcgcatggggtctttggagacaattgggaagaaccttatctcatcgcagaaaaaattggtaacgcaacataccgactcgcagaactcgatggtactgtaattcaaagagcctggaatggcgaaagcttaaaattttattatcaatagtactcgcattgtatcgtttgtactcgctgtgtatttatacttagtcaatttatttacataaatattctaagtatagggggtatataacccattcactttgtactattgatcaataaagagtcatgaaattttttgagattttgaaatttttctaccttaatacttattacaccaagctgtaatgaaacgacaatcgagatgttataaacaaaaaaatgcgagtacccgtgtactgcgaagatgttataacataaataaatatcctcgaagggatgtaaatttgttcaaaagaaaaataagcataaatttgtctaagtacaagttgcgagtacccttgtaccgcataaaaaagtctagcaaaagtaaatagtaaagtaaaagttaagcattgggagcaacaggggcagttggggtggtagatccatccgcaactttgcttgcagcctcgtccacaatttcctcagtgtccgcagcatcagcatcctcgggaaaaagatttcctccaccgccttgagtctgcgtgggtgacatggctcaaaaagcctcaaccatctcagccaccttcgccccaaggatcgagaagtcgaagtccaaaatcttggaaagagttgtataaatgtagtcagagaccgcctagtcgtactgcttctttccattctccttctcgacctccaagtcgcggcatctcctcgatcttcatctgagaatttttggcctcaagtttgacttgctccttagacttgcaaagttcctcgagctctttgtccttggtagtcgcatcttgcttcagcttctctatgtcctcttgaagctgaacattctgcctttttaaaagctcaacttccttggaaccagcgacaaaagccctcgaaaacatagcaatgaattgtgaagccaattccgcagaacgaggcattagctcctcagtaggggtcctgtcgacccttgatataaactcatcacccatgaacttctcttgaagagttaggatgttgcgagctcggacggtcggatcaatcacgactttctttcccttgtcctgcgtaggcttagctagcttcttagaggaatccgcagcaggaatagccatgacatcgcttttcctcttctgaggaatgacaggtgatgtcgttgctgttccagtctttggcttacggttgaggaccggtgcggacttcaggaaagtcatctctgcgaggacaagaaaagataagtacaaataataataaattttaatgcactagtttatacatgcgatatgttacctgatgttggtcgagaagtctgcttggaaaggcgtttgtctatccgctctctttgtttctcaaacggctccttgtacactggctctctttgaaggcttgcgttctctagaattagcttgtgttctcgcaactttaaggtcgtgcacagtagtcgccagtcacgatcttgtcacaaggtaacttccgagaatttcagcggtttctctgcgagtcgcgtctagtgtaggtcgagctggtctatctgcgacaataaaaaagaacgggttagctcaaagtcacaaggtaacttgaaaattgactaagtgaagaaatatgcgatgtactatgtcgacgattaaagtcagtcctaattcctagaaccttaaacacataaaaccatttggatttccaatcccccatattggaaaccatgccttccaccccgttcgatttcagaagtggcccacttgctgaa

SEQ ID NO: 223545 - DNA, 4211 bp, Cannabis indica
ctttggatcaaaacatgcaaattaacttagaaagctcatctacatcatgaatacacacaatcaaatggtataagttgactttaatcttgttaaagtaatttgcatattatattagggtttataagttcaaaagtttggctcactaacttgggagtaagttatttcaaaaaaatgatatctaaattttttaaattaatttttaaggtcacatatcatttaactaagggaacaaaactagaatttctgaaataagatatgcgcattttaaagctaaaaaagtggcatttttccattgcctcactttcggtctccgtttttaaaacgacagaccgtttttcatagaaacatgcagtagactggtttaaaaatggcagaccgttttttccagtaaatttttttaaaaagcgtgctaactgctatgaacgactagttttcgttcccacactatataaactcgttgttcactcaaaatttaaggttgattgaacttctattcatcttattatatcattctaagtgttctaagttaaaaaattaccatcttttcataaacacgccaaccacacacacttgagccaaagttattcttattctctagtgtgcttgcaattctctttaggatcacattgtatttcatcttattagggagttttttgtatttcaaaatcaaatatctattttattgagatgtgaggttggcatcagtataaaaataactcgattgtaggtgagattgacaccggttttgtaaacaacaagagaagattgagattttcactacaacaattcgagagtgagattggcacttcaacaatctaaagaggttgatagtccttggcggtggaaaactattgtaaaaggtttggaaataacttggtaaaaattttcggttgtaagggttagtcaagcccgttaacttagcttgatagtggaactcaaagctaggtctatagctttgaagatcaaggatgtaggtgtcttagctctattgaaccttgtaaaaattgagagtttgtaatttcttacccttaaactctttattttacaagcttgattatttactatatattttttcttgccatactatttgtattcacttgattattttgattaattgtataattttgtgtagttttaatttactaaaattagtgtaaatttccaattcacccctcttaaaaatatgtcttaggctaacaattagtatcatagcaatgattattgcttttgggtagatttcacaatctaagagtatgtcgttttcaagcaattcacacaatagcatgttagaaggtttaagcacaagtagagcaccattttttgatggggtagaattttcttattgaaaaattagaatggaaacttatattcatccattgattatgatttgtggcatattgtatgttatgctccttacattcctatgcatgttgtagatggtgtaaaaattgtaaagaaatatgatgcatatgatgaaaataataaaaagataatgtctaagaatgctaaggctaagtatgttttaatatgtggatttgatagagatatatttaaaaatattgagcaagtctccttggctcatgatatgtggaaaatgttagaagtaacacaccaaggaactagtgcaatgaaagaaactaaaatttaacttttatctactcaatataaagatttcaagatgatacaacatgaaaccattgctaacatgtatacttgtttcacaactattactaatagtttgaactctcttggaaaggtatttacacaaaaagatatggtgaccacgattttgagaagtctcaccaaagcctatcaaggcaaagtagttgacatccaagaagctaaggacctctcaactctaccattggaagagctcactagttctctcatgaatcatgaaattttcatgaatgctcaagaagaagataaagtcgataaaaagaagaagaacacaattgtattcaaatctactttaaataatgataatgaacagagtgaggatggtgatagtgaaatggagaatatagacctactctcaaagaaatttaagaaattcttaaagctcaagaagaatgcaaagaaatttgacaaaagggagtaagttaatggagagcacaagaaaaggtgatcaaattatttgctatgaatgcaaaagcctgatcatgtaagaacagattatcctttgagaaagaggaataaaagaagggcaatgatgactacttggagtgaaagcaaggaactaacctctggggatgagcaacatgagatagccaacacttgctttgtaatatctcattaagcctaatggtaataattaggtttatatttatattatgggttaatcaggtgataagtaggattatgatcctactagtctattttaacattataaattataaatttgttataattggataaatacgtgtaattcattaattacagagatttatataacatatgtgaaggtaatatgagctatttgtgtaataaaaatattttcaagtttggcgaccttagagactcgatcgggggccaaaatttcataacaaatttaattaatagatttgacatgaatgttatgataagttgatagtgtaaatattggggtaattaggattatgtggaatttgacttagtaccctaagtagaagtagagatttcttattaactaaaaataaaagaataactattaataaaatgtttttgttaatattaatattattattattactgttattatattatattattattattaataataatatattattattaaagttttattaaaattaatctgaatatatatatgttatgttttaaaacataaatatacgaaatgaaaaccctttcttattctctgtgcgataaaactctcatccccctcttttttttttatttacaacccaaaacttagcgattcaaagtccggtggtagcaggatagtaaatccttaaagagggaaagcctaaggtaaggattggtttcgttttaagctaaaaacgattggttttatatagtggttttgtgatttagaatagttatggagattctaaccttatagaattgtttttgggtagccacgggactagttttgatgtttgcttgttaaattgagatgattttgagttaaaaattgaatttagaacgttttaaagcttaagtttgagctttaatggcattttccgttgaagggctcgattttaatttatgttacgtaaagattgttgcatatatggtatatatgtgtatatatgtgtcttgtgaagtttgaaatgatttggataggtttcggtagtgtttcagtgaatgtaaaattcaggatttttatgcaagaaaacggtcggccgtttttggaaatattagggagatcaaaaatcgtaattttatcataacttttcactcgggtgtccattttaaatgttctatataccatttcaaagcttgcaacaagatctacaatatagtatatgttttagggccaaactataagtttttattttagtgtgtttataccgtggggtttggtaaaaaatcctaaattgacttatgtgaatattaagtggtgttttaggatagacacttattggtttattgttgtcatgacatttggccccggatcattgatcgttctccaagtaggtcacccaacatacctgaactgaatcttgaggtaagaaaagtatattatactgcatagtaagttatattgtaatataattaatattgttgaaaattgattaatattggaattaagatacggttattattgttatgtaatgaaaagattttctgattagggaatgaaaatgtgatgataccatgaatgtgatactggcgcacctaattaggtgatgcgatatacctgttggcgatacctgattaggtacgaacggtagtgacatatgaatgctgggttatggcatagactgaaaccgttgttaggtttcttcctatcagtgatgcctgattaggcacgagcggcagtaacatatgaatgctaatcgttgttaggtttcttcctattagcgatgcctgattaggcacatgctcacttgattaggtgatgcaatatgttggtgccaggatatggctgttgtcctcaaaagtgagtgttttaatatttatactcgcaagtgcacgaatcgtttcggaatatagtgttcatgtaagtgcaaggtcgaacccatgggagttgactaacatcaaaa

SEQ ID NO: 223546 - DNA, 1529 bp, Cannabis indica
cgcctaagatagttagggtgttacagacacggtgggcgtcgactggaccccctgagggtctagtgatggtcaatgaacgatggatatggatcatgatggtccatgagactcaatagctctaattgggtctcatgacccattatgctccaaactggagcaaagctccgttgctcccctccaactgcaggtctggcacttgtgacacgccctcctcctccagcctccgtggcacacgaccacaaccaacggataccaccaaaggccgaccccctatttcatatatatatctaactgtatatatatatgtgtatacatgttaatgcaatttttcgttaacgataataagcctattttgtgataggatcagtacaaaaaatagttgaaatctaagaaaaaataataaagcaagaataacaccaaggttttacgtagttttgcagttaaaattctgcatagtccacgagtcaatcttattcagattattctgatacaaattagggttttttctcttaaattcagtacattctgcccctatttatagtaacatatggtgccagttaattataatcagataaaaatcctacaacaatatttcactaaaattgtgggccttaattacgcaccacgtaaataaatgcggttattttttgaaaatcatacaactgtgatttatccgcatttaatgggtcaatgctgacatggatttagatacgctgcaaagtgtatcttgctggggcatctcactaggagcttgaatagcaacaataatcctggcagcgagctggagcttttcccatgtctctccgaggttgataatgtaaatttcgttgtttctacaatggaagacatgacactccatatgacaatcgctgttccttgcgacaaggtgaacttcagtagctaacatcatttgaatgtcaacttctttctaagagagctgacttgatagagcagtggatctccttaaagatgtttggagcttattagtgaaggtaacaggagtatgccttcctatagcgagatggatgcctcgctatccgtcactcagattcttccaattgttatacttagtgaatataatgtatattatacgctaagtgttctaacagccaacatgtctcgtcatcacctttttataggtagcgaggttgatacctcgctatgccttactgatgtcatccttatgattgtgtcttctaacgcgaaatagtttctcgtcaatacgtgaattaatattcgtacatccttgtctcgctttagactatatagctagcgagttatagatatgatctattaactctgtatttaatgagttattccatttaatattctttaatataattgccattatattcgttgatttgtattcttcaaggttgacagccgtcttcctctgaagttcttgccgaattttgggtataacaattgccccttaaaaagtacttttcagtgaaaagtgctttttaaatgaatactgagggtatttttgtcataatctattttgaaaaaatgcatgtcctctgatttgg

SEQ ID NO: 223547 - DNA, 1753 bp, Cannabis indica
acttctgtttctttattgatgttgaataaaatggattacattgaaatggagttttatttagggcataaaacccaacatcgtttcctttaaatgatcatgcaattcaccaaaagtaaagaaatgttgaactaaccgaatgatatccttgcttacaatatcctagaatttctgataaaaaccaggattatagacatcaagaccaggagatttatcaagatgcatttggaagagagctttccgaaccttcttagcttcaatcggagttgtaagagtctcattcataatggtcgacacccgactatgcacacaagccgtgacccttccccaatcaatttctgaagcaataaacaactctctaaaatattcttctacaacaccaggtaaaccattatcccaatccacccaaatcccacttctattttttagagacaaaaactcattgttttctgccaagtacttgcacaagcatggaagtactcagtgttttgttttagtcacctaattgcagccacatttctttggatcgctgtttccaaaaaaacctcattttgagccaggacttcaaataaacggttttgagcctccttatatctgttaaacgaatcaacatcccttctattcttcaaaagcttcttgactttattacaactgcttattctctgcttgaaattacctgtaatatccttctcccattcggctagagcagtactacaacatttgatttttgagctcaaggaattcaactcatgaacatcccaattatcatgcacaatctgacggcgcataggctcacgcacccaagcattttcaaaccaaaatttcttcatactaaccacctttttaaatagattaagattcaaccaaatgggacaatgatctgaagcagaaatttctaaattttctaaccttgcatccagaaaaagattattccaatcgtgttgataagagctctatccaaccaaacttctaaccatgcctccgtacccctccccttctcccaagtaaaaggatagcccatcaactccgtatcaataagattgcattatgaaaccacatcttgaaaccctgaattaaggagcctggataaggtcgaccgcctcttttgtcactaagatgaaggacattattcatgtctctcattaagcacgaagtaggagtcgattccccagttaattgtctaataagtctccaagaattaccacacaaactcctctgaggttcaccataaaagccagtcgcacgaaataaaggatggccttctatcttcaactcaaaatcaatgtggttattactaaagttgagaatttcgccatcatctttattttccacaacattgcaagtcccccactatgaccacgggcttctacaacaaaactttcatcatagcccaataaagctctaacacattcaactttgtctttcttacaaattatctcacacaaaaaaattaaattgggtctcttttgaaaaactatttttttaaggaattgaacaactcgggggttcccaatcccacaacaattccaacttaacaaactcataactctcgatgggccccaacatgagaacccgccaataacaagttttttgaaaaataccatttttaccatttgatttttccatttctcccacctgattcttttaagcctccacgtgctctccttttgagtccatatccacatctatcttgttacgaaaattctttttattacgcaagtgtacgtatcaagtagtatctcacgcaagtgaggtc

SEQ ID NO: 223548 - DNA, 2380 bp, Cannabis indica
acatgttatacaatagtggaatctaagctatcttaacgattgaatattaatcccttagagtgttaattctaggagtgctaacaattggatccaaatgtataataagttattgattaactgttcacattgatttaatggtacataaggaataaagagataattagaagggtaaaataatattttgaccaactttaattttgaactaataattagatggagaactactaatattgattatatcaataggctacaagtaaaaatttcgtaaatataattctatattgtaaaagagtgtaattctatatttatagtggagtaataatagaattaataaactagattaatctgctgatgagatttgatggtaatcttggatttaatagagctttgaaatgtaggtcaatgatcctcgagtcacctctatacaacattctacatgagtgttttatttgatgaatggattttgagtgagaattaacttctatggaaaataaatttttaagggcaaaatagtaatttgaaaatttattattttgattaattatgacaattatgaattgtacaattaatagtatttaactatttagtataattagataaaacaatattaattagttaaatataatattattgttaaataatattaaagagaaatatattattttagagaaaataatatttattttaatccttgtgaaataagagattattgagaattaatcaattattatttattgtcagaataaataataaatcttatttgtggaaaaattgagaaattaattttgaaccttaaaatatggcccacacatgtaggcccattctacacgtgatgattaagttgatttaattattttattaagttaaaataatttaaattgaattaagattcaatatcttttaattattaattaaataccttattggataattatttaattaaaatgataattattaaaataaaagatctactattgatattttgatattgggttattaggtaatatttgaatttaaattttgaattcaaatcaaatagatatttatcttttattttaaataaataattaatgactttatttataacactatagataaggatatatagcatcataaataataacagtttttacaagccaataaacaaagaaaataaagagaggtaattagagagaaaataggattgatattttttactcctctctccccctctctctctactctcacacgtgtacacactattctaagtgtgtgcgagattaaaccgtaaccgtattagatttccttttttctttaaatattttacgtgagatgatggttctatgaaccgactcaaccttttgctttcaatattttaagggagatgatggttctgtgaaccaactcgaccttttgcacaacttttacttatttccctacacgtgttttaggactaaccttgaggaacatccctctcattattgcaagggctctttcttgtggtactatctttaggctttcactgttttctttgactgttaggggtagtcgatcgctagtttttatcccttaactttggcgatttcaattgataagtataatgagcaagttaatcaggcatgtggagagtgatgaatgccatatgtaaagtgaaaacattccattgataaggcaaatatgtgatcgccttaatacatatgttatgttcagagatcgacctaagtgccttctttaatttagtgtaatgtactaaaggtgaacttgcagtgctaggaacgctttctcgtatggtgaatttaactttgaggagcatcttgaatgtttgatttttacgggtcgttgattggtggcttcacttgaatgtgtcggcttataagtattgggagtatcttctaataaactttgtaaggatctgacaagcttcccgaagaacactcagtggtatcttctctcaagactctgtttccttccttcacacggatgtatttatctgctctttcgtagaaatcgtctaagccatccaactctctttttaatatttttccccacattccacctccacggtgcacctctgcggttatgacaaacttgagctcatctttgaatatttttcatactttggtaactttggtgttgaaatattattataaagttaataataataatagtaataataataataataataataacaataatacatcaaaactataactattcacgcgcatgaagcaactgtagagtgcaggtacaacacaaaatatatattgtgtcgaagatttcttttttaaaaaaaacaattattataaattaaattgagtaattaacaataacagagaaaagagcaaagaaaatttcctctagctaaatacaattaatatccaacactaaaacttgttta

SEQ ID NO: 223549 - DNA, 1981 bp, Cannabis indica
tattaatattgaataatttatatataaatattggaaaattccttattcatacacgaggttgtgaattgtaactgtacgaagaattaagatcacttagccatgaataaaacagtcagcaacatattaaagtttagtaatctttaattaatagttgctagtacggttcactgatgtctgttcttcggtgcaagtaatctcgattcaaattactgatgtagcatgacatctaagtgaaggtgttgtacataataaagagtatatatgacaatgaccgatatgaataaagttatctttatcaaacttgtcgtttactataaagtcctaattcatatcataacaataattaataatagatcgacataaatcctaagtaatcatgaactgtacatattgttagtttctttgattcactcgtcaaagtttcttagagatgatgtttcttacaacttctgttttcgaaatctaataatgtggataactgggaacgtgacctacaattatggaattttgactttcctaacagaacaaatattggttccctttatgtgttaattctagagctggaaagtaatgcgtaaatttagatgagatctaaattatactttcactagtgaattaatagtactaaatgataaagaagtaattagaagggtaaaaaagtaatttaaccaaaattaattatgaaccgacacaaggagggctaattactggaattgattatatcaatggacactatagtaaaactcagtaaatataattttataattaataagagttcaactctatatttatagtggagtaatcatggaattaataaaaaatattatttgattgaagagactcaataaataaatctaatttattcgagcttagaattatatacgtctatagtcccttaatcaccaccttaaaatattgtcaagggtaggaaaaaagagttgaaatgttgttcagaaaaatctattttgaactaataaaatagtaattatttattttttgcaataaataaatattttttaaaattaattaaataggaaaaaagacaaaatttgtcatagacacaagttatcaagatatataaaagacaccgtccttgtcttaattaagagaaggttggcgcctatcctatagtaaggtgtccctattagttttgtctctttgagttaattaattaattaattaaatcaattggataaatatttaaattaaaaagtggttaaaaatatttcaagttggttgagatattttctcaaagttaggtgagatgttctctcaagtagttgagagatttcctcatcaaaaatactagtaaccgaattcagttataaatattcatttaaataattaagtatgattcaattaattaagaaattaactatcataaataaaagcctaatttgagaaattagatgatgcttctacactatagaattcaaaatcaacatgagaaatccctctcaaactattcttgctcatgtattgagaattcaacaagaacaaattatacactctatactattagccgacactattctttgtgtgtagtgaaacaatttagaatactacagtgtgagtttctaatcaacctgaaaggatacaaattacgaaaagaattaaagataccatgatagacttttagaggtatatatatctttcatgtaatttatattttgatttaatgtttatacatctggagatctttgggactatggtataatgataatcaaatataaaaaaattttgccgggtacctgatttagtactataaaattaacaattggtatcaagagtagttccatgaatgtatatacattaaaaattgtgtgagttttatgcatttatatatatatatatatatgtgtgtgatatgtatgtgaataaatggtaatattattgtggatgtatgagaagtgatatgaatcattaattatgtggaaaaatttcgtgtatgcttcgttatattattttttcttaaaaaaat

SEQ ID NO: 223550 - DNA, 1087 bp, Cannabis indica
aaaatggtatttacccttcatttaaatcttatgtaattgttgggaaaattaagtattagattttatataaattagttaaataatttttaaaaaatattgttaaataattgtaaatatagtgcccaatagtaatgttcttttgaatttttatcttagttcttttatttatttacttactcacacttttgtttcttgttaagagtaaaataagcattgtacgttttttttaatcaacaaaaaagaaattatgtggtcaatatcttttcttcatactattggtagcttagacaattctagagaacacgtgtcagttataaggattttatactttatttctctaaattgggtgatcggtatgcactttgagaattcttatcctactaaagatgacaatgccaaaaatgtgttagttttctaaagggccaaacataatccctcttataaagggttgtggtaaaattccaatcctttaagtgaagcaagaaagtatgacaataaagttataagcattatatgttattaaacaaaggtataacacattagacatagactaatagagtgttttttcttggtttggtttggacaagaaagaagaagaagattatgatgatgaaaagtaggactgatttgagtttttgaattttacaagacaaacatgtgattgtaaaatataagtaaactttatttttgtcagagacaagctaagctagtaaagtgagttaatagagattattaactaatataggataaaaccaagagagatgttggaaaatcatgattttgagtagctcaccactgtccccaattatatatataactattaaaaaatgataataatctcgaccaaaattgtcatagttttactctgaaaaatcaacaacatgcatagtttacttactttaataagggtcaaagactaggttcttctagggaaaatacaatattcttttaaaggttgtttgaaaaattctctatctatttcactatttaggagaatttttagtctaattttttttaaaattgtatgcaatgtagctatttagtacaacatgtaattttaaaaaaaaatttcaaataatttataatg

SEQ ID NO: 223551 - DNA, 2620 bp, Cannabis indica
gctccattgtctatcatagtccgggccattattttatttactatctgtacttcaatgactaagggattattgtgcaggaagcgaacatggatagcatcttcttcagtgaaggttatagtgggttcccttacctatggaatttttggcttcatttcttctacgaccaaaactacttccttttgttcgtgttgcaaggttcaggcatacctctcccgagctttgcctgaatctccagcaatgtgtgggcccccaatgatgacttgtaaatgcccatccacagctggtggcattagtaggtcttggttgttgtctgcttgggtggcctgctgattgtgatcggccttgacgtacttttgcacgtgcgggttatttttccttatcaggaattcaatttcccgcttcaggttgttgcactcatttgtgtcatggccataatctccatgaaaatggcaaaatttggacatgtcccgctttcttatgtcctttttcatgggggcaagttttttgtacggaccgcagattgggttgccatgtagattctctctaggtcgtcagttaggatagagaagacagtgaattcaaaagcattttctctaggggtttttttggctttgcctgcgaactttccattctttccattgccttatctgccattattattggatcttttgctgctcggagttgaactgctaggatactgtgggttttgagcagatgctcctgccgaggggacctgtgggttgcccgatctaggttcgatatctgcttgatgaatggcttcttcaagcttgataaacccatctgctcagtctaaaaactctgccatagatcttacagagccactttcttgatgtccttccatagttctccaagtacttcaatgcccccaaatattgcggctagcctcccttcttcaattaacctttctactttcgtagcttctgtcataaatctgcttatataggctctgagaggctctcctggtctctgtttcacttcgaccaagtcttcaaaatgtaacgggagttggcaagaagaagagaactgtgtatggaactccgaggagaaggctttccatgaattaaaccttcctggtggtaacttgaaataccactgtcgtgtagcttttgaaagtgtaccaagaaatactctacaccgcatattgcctcgtacctcttacaaatccatttgcatttcaaaatatttaagatgtgacaagggatcctccttccctgtgtacatcttccaggtcggtattttgaaattgaaaggtagctccaggatattgatctcgggaatgaagggtgatccatgtgctcggtccaactcgagatcagtgagtttttggccggccaggccttggaacatattttttaattcgtccaactgtgcttacacagatgggtgaactagttcagcctcttagctgacctgtgtcacatcaagatatcttagagttgggccctggatgtagataccgagctaagcgggtggttgaacatattgttcgtccagacttctccttctattcaaatcgtcctaagatcatgggctgtacccaatctattgaatgctgagacactaggttgcctcaatgattgattggtttggccggtttgttggccatcagtttggatggacttattaggtataactccacctaaggaattgtcggataaggtctggccgcctaccacttggcccacaggtggaacctctgaccagggattggacggctgaccgttatgagtttgggcggtatgcccagcaagaatttcttctgtgtcgcccagtgggatactggacgtagcagctggttgctgattaacaacttgataggctttttgtattagtacggtggcctgtcttgttcggtcatcgatgtctgcctactgagccttcaatgtttccatttccatatccctccattcaatgaactgacacctctactctccgaacgcaaggttcattgcagcacaaagctcttcctgatcatgatgcaaggtattagtatggccttgcataagcccaagagcattgcggaggttctgagtctcagtatcatctccaattatcgtctgagcattggttgtggacgggattccagtgctgggagtgctctggttaccaaacttgtgttcccagtctcttgtacactgggtgtgatcccagccagaggggatgtcacaccttggctcacagtaggtggctgcgcatttggctgttcagaattggttcctggtgggacccttgtatttctaggagtttgcaaggcaagatctgtcaatagtgagtcaccctggtcaatcacgcctctgcgagtttccaccattctatgtgtctgctaaaacttaaagtaaagagaaaacttggattttttctctcaatgaaagcatcaaaaatgttgacctcacttttagccaacgacaaggttttaaagaggtttggccccttttagtctgttaatagcctactccccttggtttgtattgacttgagacaaagaatcaatgtttcttctcttaaagctcttacaatgaaatctttgagtattttctcttagatctctctcaagcaattctctcgatcccttttacagtgaggatgaatcactatttat

SEQ ID NO: 223552 - DNA, 2936 bp, Cannabis indica
aaaaacataataggtgcagcaaacgtggccaaaaaggtcacaaccgaaaacagggcacaactaagcaattaaatggagacatgacatttatttgaactcttaaaatttctttgtgaactcttacaacataaaaagttactttgggtagattgctattaatactaaaatagtattttaaggttgcattacagttgttaaacagttgtgtaccaagttaaaaatacattattattaaggttcctaacatattggtttcttaaaagttgaataatattttttttaagttgtatgagaaatacaatatatttaaaaaagttcattgtaagttcataatagatttggtgtttagtttaataagctttcgcatacatgtatagtttttttaacattgcataacagttgcctcacaattgtgtgccatgctaaaaatataatcctattaagattcataccctattactttttagaagttgcatagtagattttttttcttaaattgaaagcccaaaaaaatatatttaaaacgtttattataagttcattacactttcggggttaaaattaagaagttttcctatattggaataatttttataacattgcataacaattgctaaaaaaattgggtgccatataaaatatacactgtaattaaaaaacttgaactaacaacaaaaacatcaaatcccaatttacaaaaaacgaacaactattgtctcaaaacaaaaataaaagattaaaatcagtaatacctaaaataaactataacataaaacaagaaataaaacaatagcatccataaaaagtattatcatttaacatttaaaaattaaacaagttcataaatcagttccccatcaaatgatcctacttcttccctttaccagccttcgaagacttattctgcttctcatcctcactgtcaatatttttgtcattttttctttgaccataggcaaacaagagggccataagacgagtgcggtaaatttcaatatcaaagtcattaacaacatcttttccatggatgaaaaactccgcaaaagcaacaacaaatgtgccacaagccttgtttgacaaaaatagaaaaacacaatagttaatcaactattaagcaacataaaaacaaccaaaaaggaacaacacaaaaaacaacaactcactttttctactgacctggaagacttgcaatctccaccactcttagtggagctttcggatcagaacccaaatcaggaatagtagacttattctttcaaaacccaagaagatcaaagaataatgagagcataacagaatgcgccttcattgcatttcttgttgcaacattcatcttggcagtcctcaaggaattataaggaaatataattccctctttcaaattaaaacgaccaaacacccaatgactttttttcctaagatttacaataaacaaaacatggtcaacttcataccaaggcttagaataaggaattctcaaacctttgatataatgggttattgggtgagcaacatgaatacgagacatcttgctttttaatgacttcgccttacagaatttttggtaaagagattgcatagaatcatcaaaaagggagtctgttgtagcaaaattctcaattataatagaagaatacttttctttctttctaaaataatagaaagtagtattcaaatgctgaaacaacacaaaattaaaaaaaaaaatagtgagaacataaacacacattccaagatccttaaaataaatgcaaaactgaaaaacaatcaacaaacaactatttaaaaaataaaaatgtacaaattgatttaaagatattaccgaatcattaataaacatgtcgcaacaagaaagatgataaaaccaagttttatcttcaacgtagtccacacccaatttgaaaccaggagagattttttggacactatcctcttagacattaaagggcctaaaaattaaaaaaaaaatgaatatgaacaaaacttaatttaaataataaacataaataaataaaaaaaaaacaaaacaatgcataaacagaataaataaaacatcacctaggatatttaagcaatcctttgctaatctattcgtcaaagttcgcctcaagctcaggagaaatgggatcagaaaaaaatcatcaaagacccttgaagtatgtaaaaatctcaaaatcacgctcatctcctgcaaattgagaatctcaagacataaactccaattgagaggtcttcgaatcagacgaactaaatcaacaaaaggagatttcaatgttggggcacgctttcacttgttaagaagaggagtacaaggaagagtgtcatcctcttgttctttaaaaatactagcatctattttttcaacttcctcatcaggaagggaagcaagaacctaaagaaaaggaaagataaaaagtttttaatctaacaactttacaacttgaattaaacatataagcaactatgaagcaactactcagacccataatctcaaaaaataaaatttcaatgagaaccatacctttattttttcaacagtctccaagccagctaaaacaacttgatcatcatcaatctcaagttggcctaagcccttgaaaaaattatcaccctttaaatcaacttgtttgcccttaacatcaccaacgtccttggagacagttgtgagataaaaaaaaaaaaaaactgaatgaaaatggagacagttggatgaagaatttagagatggttatttgcttgaaatgggtatgatcgtaggttttgatcatgtggaagaatgatttttttgaacgaaaattaaaaaaaaaaaggaaagagaaactaaaaacttaaacagaaactaaaaataaaaagaaataataagaaaaaaaaaaggaaaaagatgacgcaatttgaggtgacaatatacatagagtgtgtgtaagtgatattttagt

SEQ ID NO: 223553 - DNA, 4118 bp, Cannabis indica
caatcactaaaggctcgaatttatttgtaaagaagactatagaagtcaaattaaaagagccaaaagaagaagaagaagtctcaaactctctagttgtctgacaagatgaaaactaggttttgagtcattagtttgattttgagaccattcttttctttttatactaattcacttagggttaggatataattatatggaataaaaaatgataaaataatagcacaaaagggacttagtggtcggccatgagagggcccatcactagttagatttttgcaatttttcataaccatttatctattatttcacaaatgccatattttccaaatttaatgctataatgccaaaactatttatttataattaaaattaattatcaaataaaattatcatttatattatttattaattagactacacgaagtctcttaattaacaaataaaccttataattctatttcctcataatcaagccatatcttagtgaaaaattcataaactagacatagtctaattttagaaatataattgattaatcaaaatcaattaactaagtcttacatgcagtttgtctcaactagtatggcgaccatgggcctatataaccgagcttcgaataagcagatctagaatttaccaagtaaattcactaacttattaattcctccttgcaccattatagatttggaattgcactctcaattatatagaacgctttatatgttccatgatatagatacgctatgaattatctatttgttataatcctagtaatcaatgatcttttatagatgatctacattgagtacgggtaaatttaccgttacacccttcaatgtactttatccttaaaacacttaactacatgtaaataatatttcagtgtactaatataatcactcaaaataatacaattttctttttatcaatatggacagggacagtcataaagcttttctcgctccttgttttgtgcagctcctttgagctagtgctatggcaaacactagatcacgagtgcaaggaaagctgaaggcatctgcgaggaagaaaaagaagaagtgagtgattacaaatgcggatggggaaaaaatcaaatttgaggaagagatactggcaattaatctgttggaatttactgatgaggaagaagtgcttcaactgggttaaccgtctggtgtgactcaggatctcttgtcgcctagatcttcactttcaagcaacaggagagtatcaaggctgatttcaatttcttcttcgctgctaatcagagttgctctaattctttgtccaaggggcttcgagctactccatccatcctacgatccggaaatgtggtaaggaaccttcaaaactcctttgacaactctaagaaagatgataaggtcaaaattacttttgaggatatagaagtggaagtttcattttggaattcttcattagtgtgctatgtgttaggagcgaatccacctttgaatgtgcttgatggttttgtaagaaggttatggaaggagaaagtagacaaagtcaggatgttatcctatgggattttcttgattcgattcagtagcataaaggatagggatgatatactcaatggttgacacattttcttcaataaaagtttggttataatgaagccttgggcctaataaaaatttcaagaaggaagatacgtgcaatgttcccatctggattcagttggatgatttggaattaatgtactggggatagaaatcactgtttaagataattgggcagctaggagaaccaattatggtggatgaagtgacaaaggaaagggacaagcttaattacccaaggatacttattgatgtttcaattcaacaagaatttccagatgtaatttactttaaagatgagtttggctcaaatgtttctgttgttgtcacttatgaatggaaacccattgtttgcaataattgcaaaggaatgggacattctactagtgattgccgaaggaaagagggcaaacaacaagagtgggtggtggaaaaggatcataggaaactagagaagactcataatgaatcagttgatgggtttcaaatggttacaaagggctagaaggctaagagtaaggaggttaaggctgatactgctgtatccaacacatatcaagtgcttggtgaggcatctgtagaagattttaaggtcaagaaggataaccaggagatagatgatcaattgggggcaatactagatagcaaaggaggaggggaagagcctcctcttgcaaatggataaaatactttgttggaacgttcaagggatcaatagccttgagaagcataatgtagtgaggaactttattgcaaggaaggaagtcagcttaaatggtctcctcgagatgagagtaaaggcttcaaaaattggagccttatacgtaaatatgtttcaaggttggtgtttcacctctaatatagcatggctcaaaggagggaggataatcattgcatggaatcctctaagttttatagtaagtatactaagatgtgcaagccaatatgttcatcttttagtaactacaattgacaataaacatagtttccttgctacgtttgtctatgattttaatggggaagatggtaggaagtgtctatagagagatctttaggagatgtccaggaatgactcgtgggttgtatttggggattttaatgacaccctgagtaaagaagaaagaattggtgatcgggtaatacacaatgggactgatgccttctagaattgtgtgaacaattggcaacttgaagatgtcaaatattgtgggagttttttcacatggagcaataagcaagaaggggttgacagaatatattcaaagattgatcgagttcttggcaacccgagatggctagacaggttccgaactgctgaggtattgtttattaatgaaggtctttttgatcacacccctgcacttctcaagatacatccaaataggccaagtgggtagaaaccctttaagtatttcaagatgtggagttctcatccacaatatcagcaactgttagagaatagatggaaggaaatgtatcatgggactaaaatgttccaagtagttttgaaaatcaaggccttaaacccgatttttagggagcttaataaagggggtttctctaatatacaatcagcaaacattcaagcctgtgcgaagctctttgaatgtaaaactttgttacctgatgatccactaaatgagaaaatttagaggtaggaaagtgcagcaagatccaactatactgctgtacacaatagctactgttctttcttccagtagaaatcaaagctaacttgcctcaaagaaggggataacaacacttctgtttttcactcctatattaggaaaagaatgagtcataataatattctttcgatccaaaatattgatggtgaaagagttcaataaccagctgaaataactgaagctttcttagcttattataagaaactattagggacccgaattgagaataggcaagttgtcaaagcgagggtggttgctcttggacatgttgtaactaactagcaggcaaattttctagaagcagaatttacaaaagaggatgtcaaggaggctatttttagtatctcggggatcaaagctctcggtctagatgggtttagtagctcattttttcaagacaattgggatcttgtaaggcatgacgtaactaaagcaatacattcttctctacattctggatagatactcaaagaagtgaattcgacggtgctcacccttatccccaagatcaaatgccccaacaaagtgagtgaattttgacccattgcttactgtaatgttttgtataaagtagtaaccaaacttatatgcagcaggctcaagcacatagtcccagaattggtagcagagaaccaagggggttcgaagtaggaagatttgttgcgcataatgtaccgccctaatctatagggacgccacgtgtgtgattttataaactagtttaatactagtagactacttcacacaacagataaaactagccaaaaacaactcctggcaactaggcacgcaggccggtgaggtcaatatgtacattgctggagaagactaccacctcatggttgat

SEQ ID NO: 223554 - DNA, 2821 bp, Cannabis indica
atctgaatttgatgtgcaaccatcggctgggtgttgttttggaaccagggctggtgataaaacagctgctggaacatgtgttgttggtaaatctggtgttaaaaaaccagtgggagtgacacggggaagtgtaggtgacatgccaacagtgtggtgttgttgtgaaatggaatttttagtagaaaagggtaacaccacatcagtaggagcatgaatgtgttgagtgattggtttcatggtgggaaggacattatcagaaaggattttgttaacttcagatggggatgtgagtgaaaacaatggaaatattgtttcataaaaaatcacatctcgtgaagtgtagatttgtttactttcaatgtcaagaagggtataggctttcatgccttgagggtagccaatgaaaacggaggctcgacttcttggtgtgaatttatgccttttagagggaagggtagaaccataggctaaacacccaaaacttctaagatggtcatatttgggggttgtaccatgtaagagttgatatgaagtcaatcctttaagcatttttgagggagttctattcatgagataagtggcggtttgaactaggtatggccaatagaccagaggtagattggattggaatcctagtgcccgtgctatgtttaatatgtgttgatgtttcctttcaactacagaattttgttgtggtctctccacacaagaatggtaattgaggatgcctttggaggcaaaaaaagattgtaaatttaattctttagcattgtcagatctaattgctttaatggaagtggagaattgggtacaaatcatatgaaaaaatgagggaataatatgttgaacatcagatttattcttgagcatgtaaagccaagtaaatctagttttgtcatccactatggtgagaaaatacttgtaaccttccacacttagaatgtgaaaagggccccaaatgtccatatgaaccaaatcaaagatatgctttgaaaaattatgattggagataaagggtaagcgtttttgtttagccaaatggcatatatgacaatgtttaatagaatttggatgtgaaatattatgttctttattaaagaaacttgagatacacatcgaaggatgtccaaggcgattatgccattgatttacattggttttattgaaagaaaaagggaaagtagcagctgctgtagcagtggagtcgtcttgttgaatcaagtacaatttcccacatcttttagctgtcccaatcaccacattcagagtaagatcctgaatttcacaagaatttcgatgaaacacaatgtcattaggattattgagtataaaatcggtgagagaaaaaaggttgagagtgaactgtgggatgtataacacattctgtagtgttatatgcgaatttagcttgacagttccaaccttttgaacaggtatattttgtccatttggtaatgtgacaaacttgggaaaggaaacattagtaaaagaggagaaacaattaatgttaaaacacatgtggtgggtagccccactatcaattatccaagaatttgcaaaagaaatggatgttgtacctgctagattcgaagctgcaggggtcggggctggagtttcagcattgctggtttggccaagttgttggctaagtagtgaaattagatgttggcattgagaggtaagatcagtatgcatattgagaccttgaacatcagatttcgagttgtttgtagaggcagtattggccttggcttttcccttgtcttgctttcttttgtcaccatatccaggaggaaacccatgtagaaaatagcacttatcaactaaatggcctggttttccacagttggagcaagatgggcgaggcttcttggatctaggtgggttggtggaagtcgaggcagcagcaaggggaattgtttcagatgaaccgagggatctttgacgctcttcttgagtgatcatagcaaagactcgggacaagttagggattgggtcattgagcaaaatttgggctctaaccgaggcataggattcattcaaaccagtcaagaactgaatgacttggttttgattgtaagaatccaagaaaattttcattgcaccacaagtgcaagttgttattggttgaaactctttcaactcatcccatagggattttagtttggtaaaataggcagaaaccgaagaatcaccctgctgaagccgagtgatttgggtctgcaattgaaaaattctggggccattgccctcgttgaaacgctcagcaagatcgttccacatatcagtagctaaatcaaagtacatgatactttgtgcaatgtcgggtgaaacagaattaactaaccaagacattaccatattgttgcaccttaaccaagaattgagattagaattaccaggttctggccgagggatagagccattgatgaacgaaatcttgttcttggcagtcagggccattgtaattcctcgtttccatggttgataattggggccgttgaggactgtggacacaagcacaaggccggggtgatcaccggtgctgaggaagaaggggctggaatgatcatcagcaactgaacgggaatgaagtgcttgagttgtgttgtcttcaacaatggtggctgaatcttggggaaccggatctgggttttgagattgaaccctaggttgtggattgcgagatggaaaagctgagtgatttgcagcagggagatgatcggaattgatctctgctgtttgggtgtcgaccgtcgatggatgagcaccatcttgagaacgtgtcgaaggtcgggccatggaagctaagggccgaaaa

SEQ ID NO: 223555 - DNA, 1902 bp, Cannabis indica
tcaactattgaaagaaagtattgtttatcggaatgagtaggaaccttgaatggtcccaaagatcagtgtgcacatattcaagtatctgtttagttatgtgccttaccgaagtgaactttagcttatgttatttccctaaaacacaagcttcagaaaatggtaaagcacacgaatttaaattttcaattatacattgtttgtgaagttctttgaggccttgttcattaatatgcccaagtctatgatgccataacttcatatccgattctagtcctttcaccatactagcttcaccagctgggatagtttctccttggaaaacttataaaccattgatcttttcacctttcatcactatcaaagaacctttggtgatcctcaagcttccgtgcatggacttgtatctgtatccttcgtcctcaagtgcaccttgggatatgaggtttcatttaaggtcagggatgtgccttacgtttgtcagcaccttgattccgccatcatactatttgatggccactttcccggttccaatgaccctgcataaatgaccattacccattaaaactttacctccatcaattgacttgtaataaaaaaaatgactctcgattagtacatccagaatcaagaacccataccatgttcattaaagactctgagatagagaacaactctccatccgtggagcagtcatcactattttctgtgattgcagcagaatccttcccgtggtgttggtgccaaaagtccttcctatctccattatgagatttgttgaagccttgttgctccttgtacttcttgcatgatctttgcaagtgtccagaccttccacagaagcaacacttccttgtttccttctttctggacttcgatcttgattgagagtgatggtatttattcttcaaacttattttcttgagtgatcttcctcttgccaaatacacttcttctttcttggattccttctccaactataattcgaaatcttttgacttaagtgcggcaagatatctctaacgcaataacattcctgccatacttcatggatgccttaacttcttgatatgcgattggacgtgatactaaccaaaatgatggccttgacttttctttatctaactttgtgtatttatagttagccaaaaccaaaaataatctaattaaatctcattaaatctattaattattttatactaaagaaaggaaagaaatcaattctaaaatcgtataatctctctatctagaaaattaatcttgctagcaattgatggcttcaagtacaattcttccaatttatcccaaacttctttttgtcgtcttctctgcgatgagttttcttcgaacactatttgaaaatacatgatgatcatatagtatgccatctcctccatttttgttttttcctccggtttcttttctgccaataacttctcgtctctaagaaccttggagactttctagtgccccaggattcctattagactttctctccatagtgcaaagtccccagttccatcgaatttctccaattcgaatctcgtcattgatgacattcaaagtttcttcaagattgtagcacaaataatcttgattctgcgttcttgattaaataccgagctctgatttgtgggaaaattacgtctaaatgtgcagaatcaaatcaactaaactttaaacaatcaaacaattagcaataacaagattatcaaatcgtaaacaacaatcgacaagaaaacagggacaaacagagtacgtaaaaaccaaaaacaacaaaatgcaaattataaggaaatcaacaccaagatatatatatatatattggttcaagttcgatagatcgatgtgatcaatgactctactccatttctggaaaactactgtaatccttctttattgatt

SEQ ID NO: 223556 - DNA, 1850 bp, Cannabis indica
tatagagcgttgggttgtccttgagtgtctattgtttggttttatgaatgttgtcatgcgatggtaaacacattttgcaaaagagtttcatccaggatgacaagaattctgaattggaccaataatgttgtgaccaaaaatccaacttttagagacttgaagggcaagatttttgatttgccgttgaataaggtgattttcggtttctttactgttttattattgttttgtgctgattaattaacatttgtatttttaattgtttttttcttcatgttttgttattttgattatgtttttcagttgaagtttaaaaacattcgtcctactaatgaggagaggcagaagttgcaattgaaaggtttatttttagatgaatctattgatgatcacggtacatctaagcaaatattcgggagtggttcatcttctaaaaagtctaattcagaagacattgaattgctgaaatctatgttggagttggtcatttccaatcaagaatcattggccgaagactttatttctttgaggtgttttgttgaccttaatttcaagtctgtcatgactgtaattaaggatattcaagaaaaagttaatgtcattcatcgtcgaccttctgatgaagtatttatttatactgttcttgtttcatttttttattgatgttattattagttttttttcctgttttattttagttgcaatattgttgtttgatccaggttaagtcatttgatgagttggtaacccaagattctgatgatgatgatgatgatgatgatgatgatgatgattttgttgaggatgatgacaagggattacttgatccagagaatattgattctgactccgatgataatgatgagttgggtaaagatggtgtgctggtggagttgataaggttgttagtgatgttcctgctgctgatgtgaatcaatctgagactgttgtaagcagtgaagaaagggctaaagatgttgagaatattaaggccaaagagtacaatttaaagggagatgatttttttgatggcataagccagcttgaaattaatgatgagcaagttgtgttggctggtttagaggctgttggtaaaatcaatgtaagtgtagtttatattctttgttggtaaaatatgttttattttagttgcttgacagttttatgtttgttttgcaacttttaatttttctaattttccaattttatttttttaggtcccagaatccaatccaagtgttgctattgaaaaggcagatgccattccttctgatgaagaagttcatgatatgttacttatactcctcttttggataagagaaagcgtgcaccagcattgaaactaccttttgttgattttgggtcggctgatgtgagcagcactccaatggaggttgttatcccaatttttgcactctgacgtggcatcgcataatggtgacacatggaatccacttggagtatctgctcagagggaacagtccgagcaggcctcgctggcatgcccagagcaaagcaatcagcaatccgcggagggcaaccaacacgtagcgaatttagctttcgcattatgagtcaccaacgaaatccatataacttgggatcaaattacagggatatggcatacacaagatcccacgatcagtgtattctacatcaatcccaggatctttgtactcagcattaatcccacgatctttctgtttatatccattgtgagaggggaaagacttcctctccacgcatatagccctataaatagtgatgcatgttcactgggcaaaagggtcgcaaacagtttagtcgagactatgccctaaagaaattatctaagaatacatattcagaga

SEQ ID NO: 223557 - DNA, 4142 bp, Cannabis indica
ggccaagggtttccaaaaatacccttggcctaaatggcacatgtttttatctttaagtgttaatgacacttgtcatgtgttggtaaaatttgtgatttaaatctttaattatgtgaaaaaaaaaatggaaatttgtcatccttagacaaattaaatttcttttcacccaataaagtttaaattctgcaagttccgtagaaatcatcaagaagacacactcgactcgcagcaacgacaacttcaattgatattccaagagacaaaaaaataagcaaaagatgtcatgcttattatttcaagttaagaagggtataataacaaaagtctttcccaaagttctcgacaaacacttttagggggcaaatgttatacccaattttcaaaaaaaaaagtcaaccttacgactttgaccaagactcataaatgtcaaataaatcaagacatccttcttgagggccccatggcacttttagagggctcgaaaacgtcaaccaaccatatggcgtcgggactcacacacccaagtgtgcccaaacgagggttcatgggtccacgcgagcattttcatcctagagacctcaatcccccaaggaaaccaataagaacttgacttgtttaagcatgaaaatgacttaagtttatgtataaagtcaaagtagcactaaaaccacaagagaaaaaggataagtgaccactgcaacaaggaaatggtagtgctctccacttttggggacctatgccatatgagaatgacacaggtcactcctcgcgaaccatggaaggaaatgtgttccctcgacatcaaggagcacgagacaagtgagaaaagtcatttccagcctaggagtcgccttaggtgacctgtgccataggagaaatgacagtgctctcttgttttaaagacctatgccataagagaatggcacaagtcactcctcgcaaaccatgaaaggatatttgtttgaacgggttcccttaacatcaaagagcaagaaacaagtgagaaaattcatttccagcctatgagtcgccttaggtgacttgtgccataagagaatggcacaggtcactcctcgcaaactacgagagggaaattttctagatgggttcccacgacaccaaggagtaggaaacaagtgagaaaagtcactttcgtcctaggagtcgccttatgtaacctgtgccataagagaatgacagtgctctccaaaattggtgacctgtgccatggtaaagtggcacaggtaggttactacacaaggaagaggaattgtctgaccaaattatattttcaacatccatgtatcaaatacaagtgagagacaccacctatggtttcccacaagccatgggtgacctgtgtcattattcagccccaactggtggtagtggtcatcttttagggttttgaatgtcaaaatgaggtttttgggtcacgagacctccaacatatgactcgatatcacaaaaaaagtcaaaacacaccccaaggggtccgataacatgcatttccgacctctgccatctggccatggctgcccgcaactggtacaagacaacataaactgccttcagtaaaacaagcataactctctcaatttttatccaaatgacctgattcaatttgtgttggaaagataattttgagacggatcaaagtgtgtctcacagacatgactcaattctgaagttatcgagtctaaaattagcttgcaataaaagctggtgcattttactcgagaattgggaaatgcggctaagcgagggttggtggagcacaccgccacagcctatgtagcgctgtgcgtgagcattgatagtctaaaatgcatgtgttcagcactctttttcaaattggtggatccttaattgaaaataaccaattgtccaatatttgtgggatatttgtctagatataaggagattgttattgatttttatttatgtgtaatattttattcataaaaagaagtggtatacgggatttgttagtgaaatatcccaatgtatgagggatcactaacgaaccctctagcctatatatacatcaagtaggaggctgagaaagggatctgacttctttttggcttcttccttttgagacattttcctcttttctggatcttcctcatcgtgaccttccccttgaagttcacttgacaacttccatgaacactatattattttcatcaccttattcattgagtccaccatactcaggtgacaccagacctcaaaacaccatttaatacacattttttacataaattattggtttattgttcccaagaactttacaacctttaatttagatcagatttataaatatcaagtctcccatgagtcttacattcataaatcttgattaagatttcatctaaaaatcttttgttatacttttatccacacactcttgagaacataactctggtgtgtcgaatctaatcaataaaactacaagtagacatagccccattaccatcgcgacatgagggtgaactactataaattcttggtgtccatttaattttttgcagttttgttagtcagattaattcaccgtggtcctctttattttacgatcttcttatatcagttgatgaaaaaccgcgtcaattattattattattattattattattattattattatattaaatttattttagtttgcgattccattggacatatttaccctatattgaatgattaaatcaactttaaattttgagcaagcaaataagagattaaatgccaaaataaaatatgaagttagaaattggtgtattatgtattcatataaatttatatgttagagattgatttttatagttggtgccgtttttagattatattttttgtattgtatttttcttttcattatgttgttgaaaaaattggttttagtttctgatttcctttgttatctttaccctattttatatgcttaaatcatttctggtttttgagaaagcaaattaaagattgaatgctaaaataaagaatgaagtaagaagtttggttattaggtattcatatagaatttatacattccaaacttgtttttaaagtttgtatcgtttttttattataattttttacattgtattttttcattatgttgttgatgaaactgattttttttatttttaattaaataattagtttattttaatgttgatgaaaccgatttttaaagttggtgacgcttttagattataattttttacattgtactttttcattatgttattaatgaaactagttttttttatgctaattttaataaaataattagtttcttttgatgttgatgaaactagtttttaaacttagtatggtttttagattatatttttttgcattgtttttattttcattgtgttattgatgaaactagttttcttttcttcttataataaaatatttagtttcttttaatatcgatgaactgatttttaaagttgatattatttttcaattataatttttagcattgtattttttttacaattatgtttttgatgatgctagttttattttttattcaatttttattatttaagaatctagaaaatagttttagtttttttagcttgactaattatgttcgttgtcatggttgttatattattttatttttatttttgattttgtatttatctcttactaattctaattggctagagcttaagatttatgtaatataatatatttctggtatgaaatagcaacaaacaactcaaatacaactaaataacaacctcaaaaaacaaacaaacaaagaaataaacttaaatgcaactacaaatcacttgtacattaattcaaaaatatatgtgcacaacaaaaaaaagtatatatattgtactcatctaggataaattaattttatattctactttggtaatatttttattcattaaaatttctttggactttggagtagtaataaatttgttgggagttatataaaaaattaaaaaatgtatacatatataataggaaaatttttaattctatacaagtaaattaaatatattaaaaaatgtgtaaaaaaacataattatacaattctatataattttataaatatttacaaataatcatcatagtcatattatataatagaaataaacata

SEQ ID NO: 223558 - DNA, 1320 bp, Cannabis indica
ctggtagttcctccaaggcagaggaagaggaggaggttgaaccccaaaactacgtggattacaatgaagctggggagccagtcgatgctgacggagatgtcctgatcgagggcgtgaactatgtcagtgaggaacttaatactgcagttcctcacaggaggcaaagtgccttgggggcaaggtgggtgagtcctccgtccagggttactgaggcgcgcctgtggtctctcgactaggatggctacctaggcgagttggactgctacattcccgcccacaacaatcgagcaacaaaccctgaaagggggatgtgcgcttggtcgggcgctcatgctaagcaaggggcgttgatgcctttccatcaatattttaaggatgtggcggacttcttcggcctctgccggcccagttccctcctaagtggggtatgccttctccccacgaggtcagttggttctttgatttgaagtccaccccaaaacaaggcaggtcggggtacttttatttctctcaaccagacttcaagtggttaacaggcaccgatgactcggccatcaataaaatagggcgtttgttgataagtacttcttggtggatggcgcgggcatcactgagagtcggttccagcagattccaacatatcagtgccctcccgtcgctcttgctcttagggatagagctcataagcttgcttgactgccgagggaagaccgaaacatcatccgttgacttccgaggataattttgtgaactacgggatctatccaaaggatttcattcctaagccaatgagggagaggaagaggaaatctggtgctggacgggctgaacgagctcatcaggggaatgaactcattcaacttaagcgcgaagctaagttgaagggaggtgcagatgcaaagcagtatgctcaggagccattgaatcctgaagatgaagctgaggaagagcaggtgactccgctcaaaaggaggaaaaagcttccagcccagcccaggcgtatcgaacatgtaattcgcatcaggcagcccatttctcttgctcggccacctcctcccgtactcggaaaaaggaatgccattatgtccgaaataagaggcatgtcaggtgatgatggacttttgaggcttgttcggacaatcaccttgcacactacttcatcttgtttttgagcttcttgattattatgcctcatgtttctgatgtatgttttctctaaccatgtcgctttttgttccgtgcagacatgtctcaaaagatgctcgatgctctgaggaagaggattggtggaagctccagcgcatctcccccggccaagaa

SEQ ID NO: 223559 - DNA, 831 bp, Cannabis indica
agtcatcagtccatgaagcagccagagtgacgaactcgtgtataagaaccattattgcgtgggtgtaagggcccaatggaggcttaaagcggggacgttacaccaacatacgtttatcagcaatcaatacaactctatctatactattaccgctatcaatgtattcttaacaggcataaacaaaatgtatgctaaacatgtaattacatatgcagaacattatactaatcttaccatgtttctaaattcaggtgtgccggccaacctgagtggaacaactgctcggcgaattacagacccctaaatcacatcaatcataacatggataagtgacacgctaaatcacaactggggacttaggttttaaaccaaaaacctacctgctgtaagttaacatggcaataccctaaactaacatggaattaaccaaccaaagctctgaaactaacacaaatcgacatgacgaactttttggggaacccagcagcaaatctgcttaaccagttttataggtcctgtaaaattggttaatcggtttacaccagaaaaacccaaaaattctaaaacctaaccaaatcgatttcaatccttaccaaaccttcaagatctgcatattataccccaatagacatattctaagcaataaaaacaactacacaagctcaaaaaatgaaaaaaatcaaccacttaaaagaagccaaagcttgagttctaaaactcaaagcttgctcaaacctaataacaacccttaataacaactcaaaacaacataattaaccataatcaagctccagaaacaaccacaaacaacaacattaaccacaaaactct

SEQ ID NO: 223560 - DNA, 2231 bp, Cannabis indica
ctcaagaataaatccgatgtccataatgtgattcctacctttttcaacatggtttgcactcaatattcaaaaatattaaggccatctgttctgataatgccaaagaattcaatttacattctttctttgcctctaaaggcataattcatcaccattcttgtgtggaaagacctcaacaaaattctgttgttgaaaggaaacaccaacacatactaaatgttgctcgtgctctaggtttccaatcaaacttacctttagtttattggccatacctagttcaaacggctacttacctaataaatagaactccttctaaattgttcaagggtatgacttcttatcaagtgctacatggcactaaccccaaatatgatcatttaagaagttttgggtgtcttgcctatggctccactctcaactctaaaagacataagtttacaccaagaagtagagcctcggttttcattgactatccccaaggcaggaaagcctacatacttcttgatattgaaacaaaacaaatttatatctcccaggatgtagtcttctatgaaacaatatttccattgttttctactacattgtaatatcccgaaaaatatattgatattttaattggacatattttattaaatatgtgattatgtgggtattagagtaggattataatcctacttaaattaattatgagttgattagggaaatatgaattaatgaataataaagggtaatttattaattacggagattgtattggaatatgtgggtatcgtagataccataatttgaataaaatattttttgggtctggcaattgtgaaatttgacggggaggtcagaaatgtcacgacaataagagatgaattaaattggaaatataccagactagtttaaaattttaagttgtcggttttgtggaatagttagaaaatgaccaaaatgcccttaggttatgagttaagcttaagagattttggttgagggtaaaatggtcttttcccaagttttatttattttgttttaatggtttctaggctgattggggttatattatgtagatatagtgaatgaggataaaaaaaaatcacacatatacttgcttctccctctccttcccttcgagcaacctaggagctgagcaaaatcaagagtttttcttcaattctctgtggttttagcaggtttctttcattcaagttcaacctaggaggattaaggtaagtccttgccatgtgaactaagaattttcaagttttaagattattttgagttagggtttttgagattttgtggctgtgggattaaactggttagggattgtgttttaaacctaattttgaatgtgttgaagtttgagttgattgatattcatggctgtttgattttgaagttagaattttgttgatttaagagcttagacttggttctaatatggaaaaatgaattggagattgaattgatacgttttagtgctttggttatgttgtattgatgatattgtactgtctggagcttttgggttgttttggtggtgtttggattgattttgtaggaggagaactcgaaaatttgtagccctgccagaaccggtcgaccggttggttctggtgcaacagaaccggtcgaccggtttgcctacagggggatttttttttagtttttcctcagggccggttttagggcttgggatgctttctatgtctggtatagattgtttagaagttataaaacctatgttggaactgatggaagatagggtttaccgattatgggaattacggttattcctggaatgattgatttaagttatttatttgaatgttgttgtcgtgacataggacccgggatcgtccagctttgattccacttaagtcagcatgctcgccaaatttttggattgaggtaagaaaagtattaaatactgtataaggttaatgtaaggtaaatgttatgattgttacattttcgattaaaatcgaaatcttgttatacgttgttaacgatatgtattggatgtgactagattatgatcgagggaaatattatgaaacgattatcatcgtttgactcaattatgatcgagggaaatattatgaaacgattattatcgtttgactcgattatgatcgagggaaatattatgaaacgattatcatcgtttgactcgattatgatcgagggaagtattatgaaacgattatattgttgtggctcgattatgatcgagtaaa

SEQ ID NO: 223561 - DNA, 2907 bp, Cannabis indica
ctagtccagttctgatttcgatttcgtgtttgggtcgggtttcgggcctggtctgggtcgggggtctgagtcctggtccaagtccagcgtcgggtctcggtccaagttcggatcccggatctgggtctgggttttggtctagctccaagtcaaagtcttgggaacaagtccaggtttgggtctaggtttcggtctgaatccaggtcccaagtttcaatcccggtctgggcatgggtttgggttcgagtctaggtcagtatcaacatccatgtctaggtcagagtctgggtctaagatcgtctcccatgttaaagtccgacctgatcccggacccgaaactagaatcagacccgaacatggactagaacccagacatgggaccataacaggacccaaaccaaaaaccaaactaagaccacaaggaccccaacccaaatccgtacccagacctagacctacacccagactgggatccagacgcgatctaagacctagaatcagaatcggaccaggtctgcaactagaacccagacctgagaaaggaataacacccaaacctaaacccaaactcagaccagaagcgataccgggacttcgacccgaacctggacttgtgacttgcgacctaaaccaagaccgggactcggacccagacacagacccaaacccaaaaactggggtcggacctaagacctgagaaccagactcagacctaggacccgaaactaggacccacattgggactaggaccagaactcggaccgaaacctaaactcggagctggactcagaccgggactcaagacctgaacccgaaccaaaacacaaacttggaccaggaccaatacctaggacctgaatatagatgggggacccaaacccgggacttcggcctcagagcttggatcgggatacaggacccgaccccagacccaaacctggacctagaagtcacctcaggacctgagatccaagactcggtgcttggacccaacctcttatcagtgtcttgatttgggacttacaccaaaacccagacccaagctcgaactcaaaccaagactcggacacataccaagacccagacccacactcgggaactaaatcgaaacttgaactagaccggactgggatcttggaacgagaccgagaggtgcaccgggacccgaacccagaaccagaccaaaccttagaccctaaccgagactgaaacctagaactaaacctcggctcggacccaaatcaggacccgaacccaaactcgaccagaacccataccccgggacttgaaactgtaaccgaaactagaagcaaatcgggacccaggagcaggactaggactaggacctgaacccagacccaaaactgtaaccggacgaggacccagacgaggacacagacccaccttgggattgggttcgaaaccttaatccaaacccgaactaggacttgagacccgaacccaaacctgaactcagacccaaacatggaacaagactcggggacacagaattgggatcgagacccagaactacaactaagtctcggtcccagacctagaccaaaactttggacatgaaccgaagccagaccaggatccatgattgggatccagatcttgtatcggcatctgggaaccaggcttagacaagacccatagttaatgtcttaatttgggactgagagaaggactcgaagctggactaggacctggaacaagacccagacctgggacccaaaatggaaacttgaaccaaaacgtgaccaagaccctggaattggaccacgaccgtgaccctgaccaggacctggacctggattgggacctggaactagagaagaacctagccccgacactctagctcagacctagtctcgaacccgatcccaaacccaaactaagactgagactcaaacctaaacccaaacatgaactcgggactcaatctcggacccagaccaagcacctcaccaaactgggatccagacttggacattgacattgacacgaacctagacccgaacctgaatacttacctaggtccaggtcgggatcgaaacacgggacctggacccaaacccaggcgcagaccaagacccaaacttgggacccagacctgagactcgaacctggacccagactcaaacttggaccagaacgggatctaaaaaacgtgtacctagactaggaccccgaccccaaccctaacgtggacccagacctgaacttggaaccaacccatacccagaatcagaactgaaactttgactaggacctggacttgagactagaactgaacccaaacgcagaccagaaccttaacaaggactcgaacttgagacctaggacccgaacctggaccacgaccaggactgggacctggaccaaacctggtcttaaacccttgccgggacctgagacacgcgacctagaccaggatccagaccttgaccaggacccgaacctgaacctagaccaagaaagggaccgagacctagaaccgaacccagactggacctaggaaccggacttggattggggacctagaccagggacctaggccgcggaacctagaaccagatctaaaaccggcactcgaacaaacacctggagcccgatccgaactagaccgcgatccagacccaaacccaaactcggactaggactcaaaccccgacccgaactcgaacccaaactcaaacttggaatcacaactagaactggaaccggactaggactaggactaggatctagacccaaaccctaaacccgaacctagaccgggacccaaacccatgacagaactgggacctgaacccagaatcgggatagggacctaggcaacggaactaagaccgggacccaagaagcaaccctgacccatacttgaacctaggacccaactcg

SEQ ID NO: 223562 - DNA, 4218 bp, Cannabis indica
ctagttgaaacaatataaaatgaacatgatgctctcatctcatccacttgacactttgtcaaactaatgtcaacttcactattcttaaacttagatgagagagtgttcgaaatattttaccaggatctagatttactaacaagtatgttgattaacatcctaaatatgaattctctaaaacaatgaaataaacacataaggtttaacaaaacctactgttatacccaaaatttggtgagcacatcagaggaagacacgtgtcgagctaagaagaacgaagaactcaaacacgcgatcgtaagtacacttggcatggaacaactcgttagaaacacaatttgcagaatatgtttataactcgactggctgaacagtattttgcaacacagaaacgtacgaactgctaacttatgtatcaacgacaaatcatgtgagtgcaagtgtgcatgacgaggcctcaaccttgtcgcgtggaagagaaatgataacaataaaaatacttagcgtatattacacggtataaaaactaagtataaacagtttggtggatcaagatgacagacagtgaggtgtctatctcgcttgaagatggcatgcatgcgagaaagaacatctcgacaccagaaaatgtagttattagaattaaagaaatattgatttcgggaagtcatatgaggatccacacctcgccatcaaagttaactcggctccattcctagcgaggcatccccatgagataaggcttaccgtatatccttaaatatacgttcatctcggcccaataaaagcgggatactcacagctgtgtggattataaataaaaaccgcatttacgtagcctaatttgtaatcaaaacccatgctttgagggaataattgctttaaaaattaatgtcaacttttgtaatttactgcacactatgtaattataaatagtggtagacaagatgaaaaaggggacgaaaaaactcatacaagagaggccctaaaaaacaatcagatatctgaataagattgacccgtggactatgcagaattttaattgcaaaaccacgtaaaaaaccctatgttcatatttttattcctacaacttttattttactatatgaaatcattactgagaggctcaagttttgttaacgaatatctgcattaacagtttggtgctctcattgagagcctctgtgaaaaagctcagaaaaagcctcatgacataaaagtaatggatgatgccaaagataatgatccttaagaagaaatcagtcatcgccctgggaaagaaccatggagtcctcaatgatccattgaattatcgcatgaatagactgcaagcccctagaaaacccggtatcggggtccctgtcttgatggaccttgaacaacaaccggtcacttcctaacaaggttaggaggatgacacctacgagcgaaccaggtacataccaatcgtggaattagaaaattgccatctttggcgtcgattggaggaagcaaacatgcgtaatgccgagttagatcgtgaaatagccgtagtaaaggctgggcataagaatgaaacccaaaagaaacctcaccttgggcgaagatatccacgaggcaaagctcgcggctcgcaaaccaagggccaggagacaacccagagatatactcagaactcttaggagatttaacctaaagaaactgaggaaaatcttggaacacaaccgtctcttcaggttcatcagaaagaaactcgcgcaaacccttatagggagaataaggtaaatcaaaccataagagaaagagcaaagtcggactgcagtcacaataggagtgatctacgagatcatctgaacttgaagaaacctgatcttcgtcaacaactcaatccaaagcgaaaggattcactccatatgcgaattgaagagttggagaataagttcagaaggcattgagtcacgaaacccagaagacaaccggggcatgatactgttggagaatttgattaagaagcctcaggatcaaagagaaaagatgattccaaaaggctgcccaaggataagaaacactaaaaatatacccctctttatgttgaatataccgagctcaatgaaactcgggagaatatttacttcgcgcatgtacaggaagttattttcagcgagccagaacctatgaaacatgcgaggtgtaaaagggatccaactaaacggtgtgaatatcatggaggcattggtcataccacggaagagtgtcgccagctataagatcagatagaaggtctcatatcgcagggacactttcgatgatatataaaggggcagaacgatgtccatgatcagctcgatctgaccaataactcgtgcgaccagggattataaccctcccttgtcggaggaagggacacctcagttatctcgagagggagcgagtgataagaataaaaggggtagttactctgggaaagaaattttgtaaaaaaaaaaaattgcgtcgtgagtggatatcgacccactatggttgccatatcaagctaccacgaggaaagctggtcgtcaaccagtagcagtcaaaaacaaaactaggattacttcacctggaaccccgaattatgtcagggactgaccctggatattgaagcaattgatggagtatgtgagggattgaccctgaacatcaaaactcgttttatcaaaactagatgctcctggaagattgataaaataaataattgaacttgggaagttcttatgagattaatgattgtaaatcacattgctgatgaaatattttgaacttttgttgtgaataaaaaaatcatttctttcaaacaagtaattataaagcgtaaacccttaaaaattacttgaggggcatatatgtatgattaaccgaaattaatttggaaatacttagcacaatgcaaacacatcatttcaaaaaaaataaaaatagaaaagtgaaaactttttaaaaggtccttgacgaaacctttttgacgaaagaggggtcgaatcgttataataccttgatcaaacctgtctgacaggaaagggatcaaacagctgtaatttttggtttaaaacctatctaacgagaaaggaaaattaaaagttacgattagcgcataaagctgaatactaatggcttgcgctaaggaaaagtattaaacgagacgtcgaagtatcttgaaaacatacttaaacctaacatgtcggtagaagaactaactactcttgtaagcaatagaaatatatacaagatgacaagttcattaaatatatatttgagtttgcttaaaacaggatcctttcggatgatcacaaggtgggatcaatgatggctcgcaggttgagggttgggcagttaagctgctcgcccgtaaagtaggaagttaactacgtagcatgagaggaaaatacaagcaatggaaacccttaataaactttatgcatgtgattatttgaattgtgaaagaaacgcaagcaaacatctgcacattaaagtttaaatttaaaggcattaagaaaaaagtagagttggccatccaagcccgatatgtagtgcgaaagccaaccttgtcgcaccgttctacggtctcgacttctttttcagtaagcttcttctcaaactcatcggcttgggctttgacggtcttctccgcctcctctttcgcctcctcgacttcctcctttggcatgtcggcttccttctttgccttctcgcttcctcctttgctttcttggcttcttgcttaaggcaggtatttttctattgggtgtcgtacctgtaaagaccgcttagtttaatttggaaattagcagttaattatgtttaattatggaaaattatttatagatatttgaataattatttatgctgttattgttgatttctgaaatgcattttatgtcatttagtgattttcataattttgcatttccggtgcccggtaatatgaaactcggtgtttggctcagtacaatcacaacttagtatattagtttattgggacggtttattggacattgggaatgtcgggattggccgggaatttagaatttctcataaatacccctttagtgctctttatgctattttagtgtgagggggcaaaatggtcatcatgccccatttacgttttatcctttagtggacttagaaataaaaaattgatattatgctatgtttctttggctgaagtaaatggttattgcatgtatttctctcatttattca

SEQ ID NO: 223563 - DNA, 1958 bp, Cannabis indica
tggtactggtataaggatcgaatggggaattactctgtgaagactgcatatcacctactccagcagcttaaaggcaactctggcactgaccaccaatctgaattttggaaagctttgtggaacttacaactccccctaaagtgaaagacttcttgtggagagtttgctctaattgtcttcccacaaaggtacagctcagaataaagcatgtcaacattgacactacctgccccctttgcaactcttttcccgaaacttcaatccatctcttcaccagttgcagcttcgcacaaagctgctggagaaaagctttcggatcagtaagaggctccattgaaggaactttcaccgcctggtttgattatggtcttacacactggcccaatgatgacataatacaaatctccatgttatgttgggcactatggaaaaccaggaatgatcttatttggaacaaaatttctccttctgtagacaaagtcatctcctctgcaaaactcaaccttgaacaatggaaatctgctcaaaacatgtctctccgcccactatcctttccaaatgatagtgaaggaattgagcaatggaccaaaccaagtcatactcaactcaaggttaatgtagacggtgctacctttgctcaacagaaccacttcggctatggttttatagccagagatcacgatggaatccttattgaagccttccaatcttgcaaaccaggtgctattgatgctgaacttgctgaagcaattggtgtcaaagaagctcttagctggatcaaaagaaaaggctggcaaaatgttattgttgaaactgactgcattaatgttgtccatgctctgcgaagtaaagtccatatgatctctccatatggctccattattaatgagtctaagcttttgttatctgttcttaataatgtttctgttattttcgttaaacgatctgcgaataaggttgcccatttccttgcaagggactcttattctaaagctgattgtattattagtagggattccattcctactatgttaatgtccttgattttgaaggacagttgattaataaagaatcttctttcaaaaaaaaaatacgtttagactccatctaaatttttatcgcaatcctttgtaggtcacttcacaaatttgattttaaaacatcatacttaggcacgaaaattatctttaaggtaaacatcagaagatgataatcaatactgcgaggcgtagaaacttagtcagcacaaccatgtttagataaagacaaatgcagttatagcagtttttttattccatgtgttgtaaatatgaaatatgagcattaatcacgtttcatgaacgattacgaggataagatcccaagaaaataactgtcaatccaaaacacttataaataggggaaaatctcctagaatgaagtacgactaaattgagaatgataaaaaacaagttgaatattgtattctgtattttgtaaacaacttatcaagttctgataataagatgaagttgtggactatgaagaattaactttaaaattacacaaaaaaccttcttgtttatatatattattactattattatttatattattctaaagtttatttattaaattaagactcatttattggttaataaaaatctacgttaatagtttagtgcttttatttagagccttagtaaaaaaaaaactcaagaaaaaacacctctcttaagtaacattcaaactttcattttccctccaaccatgtctgaggatacccctcaaaatgatgacaatcagccgagggaaacaactcagcgtcctgggaaagaacccttaaattccaacaagacaaatgcgactgagatcccacgctcgggaagggaaaaaagtgaaaggggttttgaataaactggtgatgaaattcccgaaacacgtagtcaggatgcgtacgatcctacaagatatgtgcc

SEQ ID NO: 223564 - DNA, 1961 bp, Cannabis indica
gatctaacggtaaaaattagctcttggcggtgatagctattttttggagcccggcgggtcccactacaggtaagcttattttcgtaactcccttagggtaaaatttaatgatgatagattcagaattttgatgaagtgtgagacatgaattaatagagcattgaattagctttgaaatgaaagttgaatcgcgttaatcaaattaatattaagtgagttatagctattttactgaaggcaattcataatccagtgcccaagttgacatctagagcctaggttgatatatagcgtcaatctggacgctgcgtaagtgcaaaaacgtctaaggaatgtactttaagatgcctaagtgatattttgacatcacttagcctatttctataatctgacgaagttgttcacaagttctcgaagatgttgttgttctgctgaaatgagagacgcgaaactcttcaattctgagtgaagtttcccattttggaaatgagaaatacaaagttatgaatttgacttatctgacttcatgtatcttagttattatgaaaaactagatggacggtcgaaatataatcaaaatcggataagcagaacccaatgcatcaggccttttgtcaacctgggtgttaggtactcattcccgagctttgagaatctcgttttgatactttcaaggttcttgaacttgaggatgaggtctcctaccccatttttgaccattcaaaaaaattcccacaacattttttggcaaacttgatcaaaaacaccctaggttgacaatatgtcaacctgggcgctgggtcgcaattatggtcctttggaaattctgtttggtcccgaaaaatagttgaatctcaatattttctaaaaacagggaagctgctaggaatatttcttgaaaaaaaatcattgaaatcggccctgtttgacaaaatgtcaacctgggcactgggccagccctagttgtcaacctaggcacttggcctcgtttctggcacccaggaagtattgtttctcccccggaaggacctttaccctgtttttgataatgatatagaagatgaaaaagtcgtatctcctatttaatacttggaaggtgcccaaattggcaaattaccatcttgggtgctcggggcctggggccctgggtgctcaaaaatgaacttgctctaattctgattctgatgcctcaaatatgtatgcggtatgtctagttgatgtcctaatgcaagttttgacccatttttactaagatggtcttcgaaactgaaaccctagttgacaatgtcaacttgggcgctgggcgaaacactaagtgcccaggttggctttcggtttgcgagtttgtgtaatttcagctcccagagcttggattaggttgctccatgtcttcatggtacataatattgaaagatagtaggttgaattcaagttattgaagtacgaacttccatctcggagatcccgaagtcaacttgggcccagggctagggtctcctcccagatcaattgttatgactaaggtctactcaacttcgtgatgtcatcattcatgacacgtgtcaaacattgatgttctcttcactaggaaaagtttttagattaacatttttccccaagtcaactttacacttgtatgaagttgtcttgatgacgtgaaccgagtctatttcatttgaaaccaccaaatgttaatcaattttgacattctttggcaattgtatatactcttaaagcatttccaattaaattaggactttggaactctttggcttagtccttggaaattttaaaaattaattaacaaagaaaaagaggaaaaacttatcttttacatttttatttaaaattttgaattttcttattttttttcatggcattaggattaattagattagaatcttaatcctagtagtagatgtcattcggaattagaagaaaaaagaagagaaaagactttt

SEQ ID NO: 223565 - DNA, 1156 bp, Cannabis indica
tttttttaaagtacattttttttcaaatattttgaagtacattttaaatgtcattaataacaaaataacattataaataaatttttcataaccgactaaattatattttgattatttacatttttctgtacataatttttaatatttcacattttgagctcaaaaaataacattttttatttctatttttatttttgtccccatcaaatttatatttttcatttttatccttataaaatttataattctcatattatttttaaatattttttattttatcccactaaaatttatacttttctcaattaaaattacatttttcaatattagtattctaatttttttttgcccccactaaaatatgtgactggctctaccattaccactatatatacttgtaatgtacttattattgactatatattattatttaaggagaatttagttgtgaaaatattgttggcataacatacataacataattaatagtgaggaagattaattacctcattgaagaagcaataacagtagacaaaagctaaaaaaatgacatataaattctggtacataatatatgtgcgagttgtatccaattaaactacattatacctcctccaataccttttggaaaaactcgtatgcactaacgaaagaaggctttgcctcatcgagattaggcgtcatgaaagtataagaggtattagcatttcctagtgaccacatagcctcatgcttcaaagggtcaatgagtaaagcctcctcaaacttcaaaattgcatctataatatgattgagattaaaattcaaatagtccctgcttgaataccattaccacctatcaaatggtagtatagtacttttgatatataacataaacaacagttatatttttttaattctcttcacatttagacctaaggcaaatctatttgaacttttttggtagaaagactctaaacatgtcatatattgaaataaaaaaacgattatatttcaagtaatgattcatctctatatatacacaatttgtaactaagacccttttcctcatttttcttcttatgatcacacagtggttaattaatgaggtaaaataaaagggaaaatgcctcctcaatgcaaagaaagaccacacctatcaaactcaatcaatttt

SEQ ID NO: 223566 - DNA, 2008 bp, Cannabis indica
ttttttaattaaagaatgataaatatttttaaaatatgtgtagtaaaattgttttatttttaattaaaatttaaaaactgtcaatattattttaagttttgtgctttataaaaattatcaatcagtttatttaatttgttaaataataattgttgacagagattttcgataactaattaaataaatgaaaatttagagttagaaaagaaaagagaatatggagactatgaattttacgtggttgtgacgttaataaatcttagttcacgaactagagatagagaagatgaaattctctatctaaaaagacagtatttttatataaaaaaaaaaaatagtatatttataaaaagttcagtaaaagtaaagttgtatgattttacctaaaatctagtattttttgtaaaaagtataaaataaaattaccttaaaccgatgaaaactctacacaagacacctcacttctgcattgattcgtgggccccatttattgtgctttgtgtgaataacgctgctctcctcgtctaattgcatacaaaattaaaaaaaaaaattattacatgcatgtactccattgtatatatgatggaattcattttctttatcagataggtgtgatttactaccctatactatactatacggacaaaataggatgtcttactgtagatattccctatatatatacactaagttgaaattaaataccgtgtacacttaattatatttagttatacttaattatatctttattactgcaagttatgttattttcccgaataactaaaattcattaattataagaaattaaaatttctaaattttaaactaaattgaaataattaaaaaaaaatagttttgactaaaatattttattaatactttataaattattaagatatgttctcattaattttaaatcaaatttatagataaattaacaaaaaagcagaatacgaatatcaaacttcaaaaactatttacattatttctcaaataagataacttcattataaagcaatattagtttaagaaaaattaaacttgatattcatattgatccagacaagcttctaaacttgatcacaaacaagttcgaactaatagagataggttaaattgtaatttttgctctacttttttgcaattcttcaagcaatgattctctacggcctttggatatcttgttgttcatattagaaaagataataaataagtatactttgcatatattatattaaaaaagtattaaaccactaaacaaagttatggaaaggcaaaactacctataaaagttttgataataggataagatttagtgacaatccgactggccaaaataaatatgaaccatctaagtctaacaaagtatagtacacactattatagatatgaataattgatatttttgtctcttgaactttcgacactatctaagtttgtcttctaaaataaacggcttgttagaaattcccctaaaatataacagttatataattatattcattttgttatgatagtgtaactaattctattacttagcatgtgttgtgagttgtagttttcagttgtaataacgattcttgttctttattttttctgttattttcaactgtattttctactgcttctttgggttttttccctataaataaaggctcataccaaagactttgtagcttttacaaatctttgtttttcactctcatagattgattactggtaggactttgtatatatgagctcattatggtatcagattgccattgacaagcgtcgaagatggatcctagtcacctagaaaatccaccacgctcctatgttcaacaatccgctgctcccactcccgccctagctccggtcacccaacaatgagatccctttcagaactccctcaactcctccttcactgtgaaattggattctccaatttcctaccatggaaatcgcaggttcttcccacaatgataagtcatggtcttgacgatattctcctgactggaattcc

SEQ ID NO: 223567 - DNA, 1859 bp, Cannabis indica
ggaagaaactatggaacacttattccttaattgtgaggtggctcttcatgcctggagatcgtctccttgggttatttacctggtcagtgatagtggtatttgtatgtgggattgggtaaagtttatttgggatttgagacacaagggggctgcagcggatgaggttttcctctatgcatctctatgcatctctggtggttgataccatttggcgaattcgcaatgagaaggttcataataacattactttagatgtgaaaaagattactgactctgttcgatgttcttttgcagatttacatgctactattttccctccccctgctccttgcctagaagagagctggtcccctccacctcaggactggctcaaactaaactgcaatgttaaagtggggcttgatagcatgtgtatagcagctgtttccaggaaccatctcgacaaagtgattcgggtccaaatatctaaccgaggcttctctgatgcactctctggggaagcggcggcttgctgtttggcgatttccatagctctggtgatggattctaactttgttattgtggagagcgacttgagagtagtcaccaatgcgctcaatgggaaggagatcccttgggttattgaaaactatgtctctttttgtaacagtcgtctttcttctttcggcagttatctgtttttgaatattagtaggtcttgtaatttcgttgcctataacgtggcaaaatgagctttcactcacaaaatatttggggatatttcgatttctaacatcccttcagacattttatgtaatgaccgagaggtgtaaccgtttatcatttatattaatacgcgttttttcaaaaaaaaaaaaagatcatgacaatgctttaaataaaattgtacgactacttagtattttttttttccaacatgtactaaattatactttttgaattttttttgccgttaaaaattccccctaactattgagattgttagatttaaggatcacttttgtctaattttagtaaaaaaaaatttaacatgaatgaaagttcaaggtgcatgatttagtacatattaaagtttgagggacatgatttggtagatatcaaagtctagagaacatgatttaatacataaataatcacagaaatagtaaaattgaataaaattagacaaaagttcttaaatctaacaatgtcaatagttcaggagaaatttttaaaggcccaaaaaatttaaaaagtataatttaatagatgttaaagttagaccgaaaaaatgctaatgagtcaatttctaaaatagttaggagaatagtgtgtatggtacgacaacgaaagggcattgattgcttctgttgacggcgctcatgcatagatccaatataatacataggtagattcttttttgcattattttacccgtattaccctcactcactgggtcctacagattatgtttggttactttcataatgggaatgtgtgcacacaaataatattatacaacaagaccagtacgtcatctgatagggattgtttctatatatcttccgtgtagtggggtaatttgaccttgttgtaattgtaaattcataattaatactatttttttgtcttttgaagctcatgaaactgatctttctccaattatggaacggggacgcaaatgtcactgagactaaactacaaattaaatgccaaagttatggaaagacaaaataagagaagaatccacactactaagcaactttttctttttctcaagagggaaaatttgttttttttttctttatttcttttcacgaattttgttttttttacaagtttcttacttgtatttttttggaaaagaagatattaaaaaa

SEQ ID NO: 223568 - DNA, 7439 bp, Cannabis indica
ttttttttcacaatttcggggccctgagcgttcgggggcccaagtcgcatgcctagctcgcctactctcagggccggtcctgtcaaaatatcaaattctctatttcttgacaaatacattcctctaagtaatagtctagcagagattttttaatatctacatttgaagtgctactaacaaacaaatcaaaaccagccaaaaaatctacaaatttatcaatatccataccagcttcagaattatgcaataaggaatcaaaataaatttctttaccatcacttagtttgtatgctttcaccaaatcctaacacaactttgtaattctctcaatttgattcgaagagtcatcaccataaatttggagaaaataatattcaattaacttcatcttaaaccttggattcaaaataattgctatggataatattccatgtatgacagaccatcaatcttctcaatcatatttatagccatcatcttaatctctacataagaggatttaaggcattccctaagcaacaaatgaattacacaaatttaggggaaaaaaagattaggagtgggatatttggtccctaaaaatatctcagtcacattataaaataacttcaatttgtcacacatcaattttgctaaaatccaatctcgatcactaggtgtttgtttatagtttttctcattgtgtactaagcgattaaagacatccttatacacagtgggactcataagcatcaaatgaataaaattcttcctaattttacaattgagaactaattttctattacttaaaaatgttaatccatccttaacctccttaaatttttccactctcttaggtatagtccaaaatattacactctcaccaatagtttctatcccatcttgaattgcacctaaatcttgttgagcaatcaaattcaatatatgtgcacaacatttcatatgaagcaattttccttgcaacagtaaattattatttcttaatttttctttcatcctatctatcatggaaatattaacactacgattatcttaagtcaaagtagataacttacaatcaatagactatgcaaccaaacactctatcaactcttttgttagtatttttgcattatgtggggcagacacatataaacctataattatgataaaaattgctaattagtaatagtatacaagtaattaattataagtagtcaaaatacaaggtgtaccaataaactaaccttataatttgattgcgcaaaatccataagtgatcgatgtagtgtgcagttaccacaatgtagcctcttttttgattagtggttgtccacatattagttgtgactgcaattctaccttgattgttgctcaatgcttattttattttggtcttctcactcttagatatctttatgataccactcctaatggtaggtcgagatgcatgcttgaataatggttgaattgtgttcacaaaacttatatatccaacatgctccaccatattaagtggatactcatgcaaaatgatcattttggcaagctcttctcttgaaaattcttggacaaatgtgtgagcaccgagtgtagtaggtccatctttctcttattaggattcaagatggtttgctttatgtctcgatgctttcttaaaggacatctcttaaaatgttcatacaaatgtttagttatattttttcttgttcctcctatttcttttcacagtagtttcaaatagtcttttcaattccattgaccttttgtttttttaaagtgatttcaaactataaaagttagctttttatttttttctccccaacctcaccatttataattggtggggatgcagccattggaatagaagaattgagttctgtaaatttattattttctccaattttaagtagaatattttgtgtagcatcttgtggagaacattcagtttcagccattattagacttggactacaaagtacaaggatactggctaagttctacttcgagggaaggttagagatggattgaacatacttggagatgattccacttcaaaacctaaaaaagccttactttgtgaatttttttctgtttttagttctcaaacatccaacaatgatgtaataacacattgtacttcatttgacagtaataaaacatctccaaattctgcttatgtctctagcactacttctctttttcattctgcagttagtaaaaatgttaatacttggcattgtaaacttggtcatcccaatgaacaagtcatgagcaaattattaccacaccttcctcacacaagtcactttaaaatatctccatttttgtaaagcttgtcaacagggaaagaatccttcccttccctttcccttgtccaatactcgtgcatcccaaccacttactttgatccatacttacttgtggggtataagtattatgtctattttttggatgactatagcaagtatacatgtattatcccacttactctcaagggtcaagcctttgaagtaatcattaaatgaaaagctttagttgaaaaacagtttaatcttcccattaaggcaacataggtagattggggtggtgagtataggccatgtaaaagttcttacttgatcaaggtattcattttcaaagtccctgtcctcatactcatgagcaaaatggtcatgctgaacgaaaatatcgccatatcaatgaaactggcctcactctattggctaatgctgatcttgatttatcctattggtggcatgcatttagttgtgtgtcttcactattaacaagcttcctacaagggctttgaatttttccactccatatgaagcattgtttcacagcaggcctgaatacaacatcctcaaaccatttggatgtgcttgcttttcacacctcagaccatacaacaagcacaaattagacttcaaaacatatcaatacatttttctaggctattcttctcatcataaaggatacatatttgaaaattttgaaggtagaatatatattgcatgaaatgtggtgttcaatgaagacttttatcctcataaagttgccacagcctcttcctcagcagcacaaaaacaggtatcattttctgccaatcctttattttcctgttcttcattgttttctactcagcacaacacatttcctaaccataattttacctctggtacttcatgtaatgctaagtcaatacctactgtgtcaagacctgcatctattagaatgcagactgtgattgtagatgctcctgtttttggtgcaaatgttgataaccatgctatgatacaaccaaatactggtactttatatgaacaacaaccaagtgttgtccctttatctgacttagaacatgttgctccattacctgaacaaaacacaactggtaacaagttatctgaaatgcaacaggctgctactttacctgaaccattaatacctactgcacatttgcctgaaccataaaataatccttatctcttacttgatactccacaaattaaaccatccatccatatcacatactacatccatagcaactgcaacattacctatgcttcagtctgatcctcaaattggcccacctactgatactgcagcaccctcaacctccactcaaactaataccacaagactccatcccatgaaaaccaaatcacaaagtggtatacataaaccaaaagcttatatggccaccaaacatccccttcctgagtctctattacccactaagcccaagtcattaaaagctaccctcaacagtcatcaatggtttgcctctatgaacacagagttcattgctctaaagaataaggaactactcttgttccttatgaaccccacatgaatatcattggaaataaatgggtacatagagacaagttaaacatggatgactctcttgataggtttaagtcttgactggttgccaaagggtatcttcaaacaccagtgattgattatgaggacacattcagccctgctgttaaactagtaactgttgaaattgtattaagccttgcagtatctcacaattggttagtcaaacaattatatgtgaataatgcatttcttaatggcaccctccaagagattgtatacatgcaacaacccccagggtttattgattagaataaacacaatcatgtgtgactcctgcataaagtactttattgtcttaagcaagccccaagggcttgtaatgataagctaaaacaaacactatatcactggggttttcatgcatccaagtcagatacatccttgtttattcatggttctcatgacaatctggtttatctctttgtctatgtggacgatattctcatcacaaggccaaattcaaagctaatcaactccattatcactaatctaaatgatgtcttctctctcaaatacttaggtcatattcactactttcttgttgtgaaatatacagagatgatacaacaatgtatttaagccaaagtaaatatattgttgatttgttaaccaagctacacatggagggagctaaatcatgtctaaatctagctagttcaactgccaaactcagtcttcatgatccgtttgaagatattagactctatagaagtacacttggagcacttcaatacctaagtctaaccacgctcggtgttgcctttatactaaataaactaagccaatttattcatgctcttaccaatactcattgggaagcattgtttgcttcgttatctcaaaggcactatctcgaatggattaaagcttcaagcttctgacagcttaactcttcacaggtataatgatgctgattgaacaagttgtgtggatgacaggagatcaacagggggtatgccatgtttttaggcaaaaacttggtgtaatgatctgccaagaaacagcaggtagttgctcgatctaatactgagagcaaatttcgagccttaacaaatgcagcaaccaaagtaaaatggattacttttctcctatcagaacttcaagtttcattgtcacaagcaccagttttatgggtggataatcaaggagcaacaaccttagcagcgaaccccgtgtttcatgcttgatgcaaatacattgagattgacttgtatttcgtacaagaccttatcattgctaagcaacttgttgttcgttatgtaccctctgtggatcaaacagcaaatattcttacaaaatctcttactactgaatgctacaactatcttaaagacaaacttcacatgtcgaaattgtcatttcgtttgaggggagatgtaaaccagtaaatttgtgtttgttacaagttagttggttattatagttagttagttagttgtaatatttctttttcagttaaagattttgtcatttcccttggctttgtattgtgtactctataaagataattaagctaaccattgatggttaagctcttttggctattgttttgtttcttgctctactttcgtttcttctttttttctctgcctttgagcttcttcacagggtatacagtaaacgaggttcagttttgtacctaatttgtaattgaagtttgttgtaatgaaataattcttacttccaaaaaaaaaataaataataataaataataaaaaaatagttggagcaaagcaattaagtacccaaatttatacacaaaacctctcatccatgagttggaatagaggatgacaaaagcatcaaatttttttaatttgctgatcacatacaccaaaataaataaataagaactactctatttgtttaataaccaattttaatgagtgcatgttatgatgatttttgtttaatgagcgcgtgtttaattactattattttaaattaataatgttgatcccccaaacaaaaataaaaaattaacattctcatatatagctctagcatggcccctaactttttctttttctttttctatagctttgtaacacgcatttttgaaagaaaaaacaaaaagataaatatatctaataatttatactggccggcccttctaaatttttaaaagaaatttatacattaattatatattttgtatatatagattattataatttttttttgaccctgtgtatattttagtcccggcatcgtacgttaccgttactgcttggactgattacttcattttctcatcttacaatgttaatatatataatatcacttattattatagggttatatgtttgaaaattaattcttcaatggtaaaactattacagggttatatgttttaataaagttggtgcttcatgaacttgattgcatattaattatagaaaaagaacacgaaggaagaatatttataaaagcatttttttttcactttaaagaatatataatcaaacatattccaaaagtactcgtgatgagctaataatagattaagaggctttttatgaaaaaaaaatatgtagttgataataggtgtgtaaataataatggtttgatgagagtatccaaaggggggaatttcagttagaactttctccatagaatattatgttttccacattttgatactttgattattgatattggattaggggatcaatatttactactctgcattcatccattggtttccaacccaaacgcaaatattaattaattagcaattatgtacatatattgaataaggggatcattatttacttaacagtgtgtgtatatatatatatatatgtatatattgttctcttctatcatggctttattagagattagattcccacaaatgttaattaatcgatggccaagtcttcttaaaaaattgcctttaatgtaataagtgacaccaatgggattcacaaggatcatgtctctgacaaatggcaatgtatgtataaaaaagcaaacgaaaacatatattaaccaaaacaaaaaggaaaagatatatgaacagatgaaaagatccttataattacaaacatttatatataaaataaaataaatatgtgagtgagtgagtgagtgagatctagagagagaaaagagtcacatgactttgtttggtttgagatgcttccctttccttttctcctaaatctgttaagaagcatgcaaaataactggtccccctttgtaataactacttgcattttcctatctctttttcttttgggttcatattattcaacctctctttctctctccttcatcatgttcatgtgtatattattattattattattatatatttcatgaatgtgaatatatatgatgtgtgagagagagagagtaatactaaaggagataaaggtgtaggtgacttttaaaacaggtatatatcactaccatgtctgcatggtgttggcgtgggcatgatatgtattcaatattgtcttatttactttgtattttgggtttggaccactgccatctgtttctttcaaaactttattttcttttttttttaaataaaaaaaatatatattttattttga

SEQ ID NO: 223569 - DNA, 3967 bp, Cannabis indica
ttagcagatcttttaacatgggagactaaaacatcagggaaaaaggacaaaagacactgaacatcgaaaataatatccgaaaagcatgacaagtcaacaagagaagaattaagtgcagtagaaactctcaaagcatcagtttcaatatgtgtgataacaagttgtaattgtgtcgcccaattgagagcatggaaaagagctttagcttccatttcatccgagcggaaagttccttgcacattttttgaaagtgcggctataaccatgccattatgatcccgaagtatggcccctatgccaagaagtttctgatatgtgttcgtggctgcatcaatatttaatttaaacccattgaatctaggtgcagaccagggagcctgctcctgaggccgattgcgaggtggcaaaaaatcagtagaatctgaggtagcagtggtgtggacagagtgttttttttgttttgctgtaatcctggtggaaacctgttgcataagcaacaattaaggaactgagccgtgcctgaccaccatggaagatcttgttacgatcagtccaaacaccccacataatgcaaaccagcagttcaaaatcttccttgttataaacagaagataaatactgaagataatccccattctgcattgttttggccatattgaaatcgatgagaaacttagaatcccgccaaatgtttctagcatgcctacaatcaaagagtgcatgcccaactgattcccaactagaagtgcatagagaacaagctgctgaatcaattattttcctcttgtaaagtgcagtagcagtagggagtatattatgatgaactttccatgcaaatattcttatttttggaggtaagttcaagctccagaagaacttccaccaagcaacattcgaatcagaagcagaacatgtgttttgctcttccaaggatgaggctaaatggaaccccgatttgacattgtatgaaccagaagtagaatgatgccagataagtcgatcattagaagcaaaaaaactcaaaggaatggttaaaatcttctccacatcaattggttgaaagaaactatttaacaactcaagattccaaactctctgatccgtaataagacttgaaaccaacaggttgggtggaccatgatagctaattggcttataattcgtatggcctggaatccaaggatccgtaccacatgttatgtgatgaccattaccaaccttgaatctcatacccttcaccaagagttctcttccccaacaaatgctttgccatgtatacgatggagagtgtccaatatttgcatccaggaaggaagtggtagaaaaatatctatgctttaacaaacggctgagtaaggaatccggcatgttaaaaattctccaagcttgtttggccaaaagtgcttggttgaaatgaataaaagatctaaaacccatacccccttcatgctttgatttgcatagagaattccaccttttccaatggattttggtgccattttgattggtaccccaccaaaagttagccatcatgctctccaattgattgcaaaatttctttgtgagtttaaaacaactcatagcataggtcggaatggattgtaccaccgctttaagcaaaacctccttgcccccagctgagaaaatttgctcattccaagcatgaagaagcttccatactttttccttaatatgactaaaagctcttgtttatctcttcctgaataagaaggagtcccaagtaacattcatgacattctgtgatgggcatattaagtgtttgaagcaaaaaaagagttgaacaaccaattgaagggtgggggagaatgacattactgatttgttgttgttcagtttctggcccgaggctctatgataaatgtcaagagttctgtgaatagcaacagctgattgatcatttgcacgacaaaacaaccaactatcatcagcaaagaggagatgtgacacagcaggggaatttcttgttaaacgtaatccatccaaattcccaatagcttcttcatagtgtaacagccttgagagtccttcagagcatataaggaacaaataaggtgagaggggatcaccttgtcgcaaaccacgatgaggttgaacatgtccaacaacttctccattgagtgagaatgaaaaggaactggtagtaatgcaattcatgataagtgtaacccattgagaagcaaatcccatttacaacattacagcttccaggtacttccattcgactctatcaaaagctttgctcatatccaatttgagagcagcaaaaccaacctttccttgagttttatgccgaagatgatgaacaagctcaaaagcaaccagtatgttatcagtgataagtctattggataaaaaagctgattgcgtctctgatataacaaacggtaatattttttgaaatcggagaacaattgtcttggatattagcttataaatgacattacacaaacttataggtctataatcactcataccagtaggattaggaactttaggattaaagtgattatggacttattaagttgagacatgtcagtacctcattcagaattccaagacaatttctgtaacagaatcaccaactatgctccaataattttgatagaacatcgctgacattccatcacttccagggctcttatctgggctcatggaatgtaatgctgcaactacctcatcacttgtgaaaggtcgggtgagagagagattcattgaaggggtgatggtggcaggaattgcatcgagcacggtgtgaagagcatctaaactgactccatccgaagcaaataaagagtcatagtaattacatataactcgggtcagatctgatttgccactgactgagactccatgattagtaattaatgttttgatagaattttttgccctcctagatgaagcatgagcatgaaaaaattttgtattttgatcaccacattgcaaccaatccactctagacctttgatgccaatattcctcttctttggcaagcaactcatcaagaatcgcctctgaatttttcagctgagagacatgagatggcgatcgaactgctgcattatttagagaagcaacagatttctacatgtgagagatatctctcttcatttggccaaatttctgagagtgccactactgtaaagcttcagtacaggaggataaattgttcaaaaaaccagcaacatttcctgcaatatcagcagaccagttacgccgaataattgtggcagcttcctcatctttcagccacattttttcgaatctgaaccgtgttttccttggagaagtgttctgttttgagccaataacaaggacattgacagcaatggctctgtgatctgaagaataatagtccaaatgagaagtaactaagggttgaaagtgagaattccatgaatcattggtaaaacaccaatccaagcgctcctttatagtgtccacattatgtcttcctttaatccaagtgaaaggatccccatgaaattgttgttcattcaattgacatgaatccaaaaccgaacgaaattcatccatttgattagcacttctcaagtgccccccttgtttgttatgactataaagaatttcattaaaatcccctattaccatccaaggaagtaatggagcaatgtctttcaaacgtttaagtagagtccaagtgtgtcttcggttagcaagagaaggagcaccataaaaagcggtaaagtgccagcaaggtccattgtggaaagccatgtaacaatcaaagacattaacattaaaattgtttaaagatacatccacatcatctttccaaagtaacatcaaaccaccactaagaccaactctaggaacttctaaaccattattgaaatttaaaagactacgaaaacgagcaatagagttacaagctaatttagtttccataataaaaagtatagtggggtttgctctttaacaagcaaac

SEQ ID NO: 223570 - DNA, 1095 bp, Cannabis indica
tatcatgatattaatcattaatagtgagaaaaaatgaaacgtacaaattaagaaataagaacaaataaaaatacctgtaaaagacctttgttgtcttgtttatatagagaaatcataatttttgtcttgcatgttggcttcttgtagaaaacgaaacctataaaaatactttagtgaaatagatatataaaatttgagagtctttttaagaggaatgcataatcttcttcattattaaatattgagataattatgagttacaaaatagaagtctaaaaaatatttggtggaaattaataaattatggggagtggaagagtttttttaattagttaaaaaaataagaaaaatgtataaacattcatcaataattttttaatctttaattagttattaattaatagttaaatgggataattaaatttttaaatattgaaatgaaagaaaaattgggaaaattaaaaattgggaaagaaactcattgaattgccacatcaaactctctaaaacactcatttatatatatactaggtaattaaaccgcgcttcgcgcgatattaagaaattttataacctttttaattaatttatatttttgtactaaatgaaaaatcatataaataaatataaacttaaattattgaaaaattatataaatattagattaatgtaaactatgaattataataatattattaaaatattaaattgaatcaactaatgaaatgaataaaatgctttgctcacaaaagaagtattcggacaacaattctttattatgttcatttttctttaaattttcgtagaacatcctaaaaaaattttttacaatttttttaataattcaaattcttatccctattaatgagaataattataacgaaaaagaaatgtaatgcaaaaatttctattatttttattaattaaattaatcaatagaaataaatagtaattattttctacatatattagaattagttttaattaagttagttgaggtactcttcaagttgttaaaactttagttagttttatcaaactaaccgtgtcttcatttactgcatatattaagccatactaccaaagcatctttag

SEQ ID NO: 223571 - DNA, 2767 bp, Cannabis indica
cttctattgcaattttgttaatagtagtgctcttttagctattgagtgagagctaaattctttaacgcgtgtccacatattattaagtcatatgtttcttcaaaaaaaaaaaagtcatatgctaaatacttattaaagtaatttatagcataaatacataaatttacttctgcttccaaataaatatctaagtttaatttttaacggtaataatacttaagttataattctaaaactttgtaagttactggccgttaaatgtctagtaattatctacatgttattttcttattggtatatttaaattattttttttaaaaaaaaaaattcatgacctggaccaatcagaaattatcacgtggcaatttatttaacacttaacaacaagtaactacagagtttcagaaatataacttaggtattattatcactaaaaataatatttatttgaaaacgggagttaaacttaagctattataccacaaattactctacttattatatttctttattttttaattgaaaaatacttttttaaaaaaatttaattaattaaaaaatgataaattaaatttaaataaaaaactaaataagtttttctttaattaaataaagaaaaaaataaaacaaaaattgcaaaaatttgtttcatcttcgtcacttaatccttagagtagcattcaaaacaaaaactcaaacccagaaatccccttgttatgtctttgttcttcatatgagaagttattgccaccaccaaccacctctccgacaatcatcaactttaacagaccaactcatctgcccatccttgcattcacttcaaaagtccaacacactattttatcctcatcacaaccgaaaaaccctaaacaaaaaatcagtacaaacacaaaaatttcacaattaaccacaaaatcaaatttattattttagggtgggcaaatataatcaatttaacaaaatttaactcacgtaggatttgtatatatcaaatcaaattttataggatcattatgcatctacggtttgatttaacaataaggtttcaaactaatagaagaaattctaaggtttttaagcaatcgcaatcaaaaatctcaaagtaagaagaaaaaaaaagaggtacctacagtgatgtcgtgggtggattgcttttcaagattgacccaccatgaccaacttgaccagagtgagagaggagagagaaagagaggagtaagcgaagacactacacaaagtgagaaaggagagagaaagagagaaataagttgttgatttagatggatgctggagattcattcacaccaaatccctccttcttgacccaacctccatgttcgttggcaagcaggaacatagagaaagagagagagagtagatcgacgaaatctctctctctatttttttttgtgtgtgtgtggtgaatatgtgttagttttaaggtttttgtttttgtttattaaattaacaaacatgttatttagtttttgaatttaatttttttttatcattttttaattaactcattaaatttattttaaaaatatttttaatgaaaaaattaaaattaataatataagtatttaatatatggtccaataatatgttgatatgtttattctatataatacttaacgaatctagttggtacttcaaaaagggcaatgcaacaaaaaatcataacggaagggactatcaccaccacttttttctattatttattttttttttttttttttttggtgaatcagaaaatgtattccacaaaacttcatttacaaactagcagaaccatttataataggcttgtaactctaattcaacatttaaaccaatctctatcttttttagctatattcttaggcattatccctttaattctattatttacatcactctttactctctttacaatggagtcaattgtatatactttgttattccaaaaagcttcatttctacacctccaaacatggtatattccagcagccaaagttgccgaaaaaacctgtttctgaaacttgttgattttggattttgaaatccacttcaatagtccctgaacagtgttgctagccgaatactagttaagccaagattgaatccctgttaaaacatttgcactcaagtgacatttgagaaaaaacatggtcctttgtttccctattcaacccacacattggacaaatttcacccaagcatatgttgaagcggtaaattcgagtcttaaattttaatctgtcaagtaccactaaccagaaaattattctatgttttggaatagatagccggttccacactctcccctgccaatgagttcttggataagaaggacatagaattttgtaaccttttttaatagagtaagctcggtttgcatcaagaggaacaacctgtaaattcttgaacttgttctttactctgactacctgtttccaataccaactacttgtatatatatttgttaaatcagaatattaatttcttcaaaacaccattacaatttttagcaacatagtcaagtatctcttttcaactcatttcttgttaaactttacaatttcaaacattctaatttacttgacttgcattcttaaggcaagtgggaaaatttaactttaacaaattccttaataatgtgtacaattacttttattctcttcaatttatgtaaccaaaatgtctcatatcttaccttccaatattgtaaaccatcgctgccattagttgttgctacaaaaaacaacttcctaaagtgacttatgtg

SEQ ID NO: 223572 - DNA, 1349 bp, Cannabis indica
agcaggtaacttttttcaagacaggtaactattttttttgttataaattgcagccacaacataacaaactcaaccatatttaaatgtaaggtatcaggccatattaaaatgtaaggtatcaggttactttcagaagcaatataaaaccctaagattgaactacaaggtgaaatttttcaagatatgagagttttttgttaaaaattacaatcacagcacaacacattactatgagaaccaaaataaagacctaaaattaaaactccttatcatttttctcaaataacatgttaactaagtcaagaatgtaatcaaaatcaatagtttcttacctttgtctatttgacttcagattttatttattttcttcatcagcattaggaagatgaagaataagatgaagaatgatgatcgcaccagaggagaagaaaagaaagaatcaaagaaatttgaggagaattaaagaaatcgcaaaggagaatcaaagaagcacagaggggattgcattgcacgagagagaatagctgagtttggatattttgggtgtgaaatttataaatagaaatatccttttataggtattctattttttccattttattaagctttttattaatttttccagatttaaaattttttcattaaatgttcatattttttaaaatgcatttaaaaaaaattccatatttataaaaaaaatccttaattaatttttaagagcccaatagcttacaagataaatatcgcacatatacaaaatgtatacaggtggcttatgcatatccatgaaagaagcctaaaagagggagtcaacccaatttatttttggagtttttacaccatgaaatttcaaactttttttttactatagggcagaattttttttaaaaatacgtaaatttcatactgtgtactgtgctaagttttcactgttgttttacgattattttttagttgttctaccgttgtttttagttgttctattttattattttacggttattatataaaaagatagtatttttgtaaaaaattctatatggtagtaaaattataaactttgacccaaaattcagtattttttgtaaaaattcatttatttttggtttttgtgcataagactccaaaatgcgtgtatattggtgaataaactgaacaaatataagtaacttaattttttggagtgtttagacccacttcaatgcaaaaggacatcaatgccatgagttatatatttgatccaatacagttatgcagacagaccaaattttttccattcaaattggaggcccaattctcagagtccagatattcagcgtggcccaaattaaataccaaagtgatctttt

SEQ ID NO: 223573 - DNA, 4071 bp, Cannabis indica
cgagtctcaatcctagtctgggtgcgagaccaggtctaggaccgggtctgagccctagtttcggggctgtgttctggtctagttctaggtcccggtccaggtccaggttggggtcacggtcccaatcctgttctagggtccgtcacgttctgtttcattttttggtttcgggtccttcggtctgggtctaggtcctagtccagcttttggtccttcttcaagttccagatcaagacaccgactatgggtcttgtccaagccccagttctgggatcccgggtctgagtcttgggtccaggtttgagtctcgaatcctggtccttgtctaaggtccgagtctgggtccaagtccttgtttgggtttgggttcgtgtctcgagtcctgatccgagtattgatttgggtccgcatcctagtcctggtctaggtctaggtctgggtctgggtcttagctatattccagttcctagactcaaacccagactcggacttggacccaagtctgggttacgggtctggtcagggtctaggtctgagtctgagtcttggtttgagtgtttaggtatggatcccagatgcaaacactgactacgggtcaggtccaagccccgtgtccagatctggttcacagtctcgggtcccagtctagttgcacttcgggtccgaagacccagtttggatcctaggtcaaggtctgggtcaaggacccggtcggggttcaagttcttgttcgagtttgggtttgggttctgatatcgatctgggtcaagatctgggttcgagtctaggtcgggtccaagtctcgagtttcgattgtctgggttctaaggcccaagtctaggtcccccatctaggtccaagtctatggtcccggtctgggtccatgttcaagtttgggtccaagtcccagttttgattttgattcagtgttggggttcgagtttgggtgtgggtcttggttggggtttgattcctggtctgagtctagattcgggtctgggttcaggtctagatctcggtctgggttttagtttgggtccaggtctcagttcgggtctcgcgtctgggttcgagtcgtagtccgagtttgggttcgagtccagatctcggctaggttcggattaggccccgggtgtgggttagggtcctgggtctagctctaggttcgggtctgagtttgaggttttgatctcgatctgagtccgtgtttagttctgggtctaagtcttgggttccgatcccgatctgggttcgagtttgggtccgggtgcaagtccatgtttgggtttgattctgggtctgggtctgattttgggtcccaggttcgggtttggtcgtgacatgggttcgagtccaggttcctgtcgtggtttgggtccggggcaagttttgggtctgggtttgggtccgacttcgaattcccaggtcaaggtcaggtccaggttcagttttgagtctcggatttagatctaggtctgggtttcagcgcctaggtctttggtctaggtcccccatccaagtttggttcctaggtcttggtttgggtctaggttcgggttcaattcccgagtcttggttttagtctaggtcgaggtccggtatcatgtcggtcctgaacttgggacccaatcccagacccagacttagacttagacatggatctagatacaaacctagactcgaatgcggagccgaagccagaccgagatcgaaacgtgggacctggatctggagcgagacccagacccaaaactggacccgtacccaagacttggactcggacctggacctgaacccagacccagatcgggatctgaacttggacccagacccaacacaaaactcggaccaggactcaaaccccgacctagactcgaacccgtacccgaagccagacacggaatcgaaatgagaattgggactaggacccgaacccaaacatggaccctgactgggactgaggatccgtacctggattgggggaccttgacccgggcctcggaacccggacaaagatcaaaaccttagactaacacccggactaggatctggacacgaaccaagatctggacctgaaccgggatatgaaacccgaacctgaactcggactaggacttgaaccttgaccgggtcctatactcagactgggacttaagacccaaacttggatggggaacctagacccgggactcgggcttcggaactggcactgacaccctggacctaaccccggacccacaccctgaactaggacccagaccagaacctttgactcgaagtggaaatagactaggacccgagaccaggatcatgatttcgacccaaagcttggacctgaccgatagtcgatgtttggatatgggactcaaacccaaacccgaacttggaccctaacccaggcccagacccgaacctgtaccccgtgactcaaaactggaagcgggccgggacttgggaaaaagactagaggactaggacctgatctcggtcccagaactggaatctgtctaggacccagacccaaacacaaaccgggatgtggactcaaatcaaaaatcagatcaggactcaagacacgaacccgaacctacacacggacttggatctagactcggacgcaggacttggattgggattggagactcagacctggacccaggtcccaaacctcgattggggacccaaacaaaaaattagaaccagaatcaggacccaggacatggaatgggacccaagacccgaccccagtttctgtccaaaacctggacccggacatggacagggactgagacccaggatccgaatcggaacgagaccaggacctaagattgggatctggatcttgacccatgacccggtgcttggacccaacccgtagtcggtgtctggatcttagaatcgtaccaagacccaaacctggaaccatttccagactaggacccaaaccaagactcagacccaggacccaaaatcggaacaagaaccggaatcaagaccttggaacaggaattggacttggaccaagaactggatctagacgcagaaccgaacacggacccagaactagattgggatcaatacccgaaccgaaacctaaacctgaacctagacttatgccaggacctgcgacccagaacatggaacccaacacccgtgacccaggacttggataagaacccagacccgtaccagaaccccgacccaaatatagaccctgaccaagacccaaacccatacccgaacaaaaacccagacctagagtcaaactcgtactagaactcaaactcgaactcgggacttgaacctggaccgagatcagcacttggacccagacccagactaggatcgagccttgaacctggactgggactagaacccatattgggactgggacctaggacctgagactcagactttggacctgagaaccgaactgtgacctagatgggggacctgggccccaaacccgaacctggacccagacctggaccaaggatccagacatagattggggacttggacccaaacctgggcccaaaacaaggattcagacccaaaacttgaccccaaactcgagaaacaagagccgactttggacacgaaacccaagaactgactaccgggacacaactccaaacccaaacccaaaccaaaacttaggactcggcctgggactcagtgcccaaattggaaccagaccgagatccaagatcgagattcgaatgtggacctaaggctttatcctgactcgtagtcagtgtttgaatcgaggtgttacgaaaattatgattactacgcaagtatatgcaatcaagtagtatgtcacgcaagtgaggtcgaaccacagagaattggattaagtagtactaaactatacttatgattctatctggtaaaacaatactttttttcaatttaaagaaaataattcagaaaattaaaaagaatatatgaagattaatcaagatgagagattagggaggtgaatcctattgttaagttaccaatgttaatacctaattgctatccttatcttaatgtgaatgatagattattaattaacctaactct

SEQ ID NO: 223574 - DNA, 1571 bp, Cannabis indica
aagattgtggctcgaatacttacggatcgattgaagcacataatggacaaacttgtgtctcctaatcaatcggcattcattcccgagagatggatagctgaatgctcagtccttgcccaggaagtaaaccacgcaatcaagaacaagaaggggaaggaaggagtcatggctgtcaagacggacatgagcaaagcctatgataggctcgaatggaatttcatcaaaagagttttgaaagctaacggtttctcggacaaggctactatgcttttgatggcttgtatctcctccgttagtttctcaattctcctcaatggagcaccacttgctcccttcaatcctaatagagggctaagacagggagaccccctttccccttttttatttatcctctgcagtgaagttctctcaaagctaattggaaaagcggaggctgacaagaaacttaagggtataagagttagcaggaatgccactgcaatctcacatctactttatgcagatgacgccatcttctactgccaagcctctgaagcaaatgctacttgcctgatggaagttttcgagaaatatgaagcctggtatggtcaaagaattaacaagagtaaaagtggaatcctcttctctccaaacacttgtgaacgaaagaaaggagaaattatggcaatcatgtcaatggaaaaacttcgggcgaaggaaaaatacttgggcaacccgttctttttcactggaagaagaacgaaagacttccaattcttaaaacaaaaagttctcaatcgtattgacgggtggaaagctaagtgtctatctcaagcagcgcgaacaaccttggtgagttcggttctacaaagtattcctacttacttcatgtcaacctctctggttccaaaatcaacgtgtgaagaactagataagcatgtggcaagattttggtgggttggtatacatccggacaaggaccgcttctgtgcgttgaaatcttggggggacttatgccaaccgaagaattgtgggggactgggttttaggcgattccaagatatgaatatagctttactctcaaagctctgctggatggtccttcaacagaaagaaaaattatgggtgaatgtacttttgggaaaatattgttcttcagtcaatgcttgggtggtggagaaaaaggatcaagattctatgatctggaaaagcattattcagactagagatgtttgcttgaaaggggctggggtagtcattgctaatggcgatacagatctttggactactccttgggtcccgtggaagtctatacaagaaatcaaagacagcttcagctataatagaattcatgcttttaacaaggtttccaatctttttgtggatggcacgcgtcagtggaatgaaggtctaattcgttcctgctttgaagataatgttgcgaaggccattctcaatatcaagcctctgagagaagggaaagacaagctgttttggaaggctgcgaaatcggggaacgttttcagttaaaagtgcctactggatccatcaacatgaacgatttaatgagtcaaatgctatatggaccaaaa

SEQ ID NO: 223575 - DNA, 9086 bp, Cannabis indica
atctaagtagtggcatgaagaatacccttatatacatgactccttctacgatgatatactgtacaacttttcttctcatattttgagcttcgtttcaatcatttggaagttctccagtattgagataggctgctcttagtgtcatccaattcgaaaatggtcaatcatctcaatttcttcagcacaggtgatgctgggtttttcaaaaaattgaattgggactcaattaaccttattagttatattgttgctcacaagtcgggctaaggcatatatatgaattaggactaaattagtcttattagttatattgttgtctaatataatatttttatcattttagtatatatatatgaaaaaagtccgaattaatatacatgacatgtatagattgtcttctttttcaataaatagtcgaaaaaaatagaaaatgtaaattataaataatatgtatttgttttcaccaaaaacaacaacaacaacaacaataataataataataataataataataataataataataataataataataatgtatatatataattccaaatattattgaaaggattattaagaacacagcttgtaccggccgtatattttaattaatatttttcttttattttgtaaattcctaattatttagctaggtcgattattacttccattatgaatgtattatactttctcaaagtaaacctacaaagtactatatgcataaggtttagatgaacttaccacaaacttgtcgcttcataatgaaattaaggaaagaaaaaagaagttatatccaaatatatatatatatatatatatatatttatatagatgattagatacatgcatggaaatatggaatgggacagctaggctcatatatatacataaatgaaattaaaaaaaatgcagttatttgtttggttgcacgtttggcgtatttggaaaaaaaaaattatataaataaatgaatcatgtagttataattgagttatatattaatgaaattaaacttagctcttttaagtttattttcctttttcttgcgattggcttgactgctcacgtgggtcttgggtgggtagctttgtccctacattcatctctctatagagatttgtgatctaatcactaaaagatgctcaatcataaacttttttactacaaaataaaaatataaggaaagaaataaatcatgccaattttgggaatattatttttttattttataaaagaaagaagaagaagaagaaacatgtcaaactgccaatggcaagtctagctagcctgaactaataatcaatgttttcttctttctttctttcttttctttctctgatctaaagctgcaatgtctattatatcttccacttctttgtatctttgtgtagtactttattactactgccatttctcttctgcttctgcatataaaaaacagtgacaattaattaatatatacccaaattgtattaattttatatatatatgtacataaatatataatatgcttagttgttgttgttatgaccacttctaatcaaaactggtttattaatcaccacacactagttcaacaaaattagtgaccacagattaaaaaagaaatattgcattgcattattatgtttgtttgttttggctactttatgctaatttcttctttgatcttcttttctctcaattattgtagtatatgtaataagaaaggcatattattattattattattatgaaatcaataatatctatgtttgtttcctacttggtagtctgtggttactttgaaaagagagagagaaacatatatattgaagttagttccaatattatagtgattaaacaattcaacaatcaatctaggtaattgtgttatttcaagtaacaaaaatctataaaaatgaattaaaatctagctacgtatttgtggtttattaatgcacctgtattaacatggtcgtctacttgtgtcgacatacgtaccaaaacagatttaattacatatatatatttagtctaatatatatataatatataacactgtgtacttatccagttatatggaccctgacaaacataagagacaatctatgagccccaaagtaaaatttgaccctttaaaaaatgaatacgtacaactaataattcagtaactcacaggcctatatcaatagtattattagtagcatagtagtacaataaatcacttgccaattaattaactcatgcatgttactttcttctatacttacctgatctgcatactctataaatatattaataacttttttttaatttaatcatcttaacttagcatgatgctttaccaatgccaacaataataatattatttagtatatatgtaattttcaagcccaaaaaatattctctaggtattacatatatattatttaaatctcatatatgtactactccaatcgaatattattattaaagactgattatatacatagatgatcatgcatattggaatttattttaaggaatattttttaaaaaaacaataattgaaaaaaaaaaactaaatacctagaatttaagaactgaaaacaaattctccatcttactcataaattaaagtgtttcaatttaagccatatacttttcttttttccttttattcaatggctttcttttttaaaaataaaacatgtttggctttttaatgtcacaatataagtctcactatcattaacagtaaattaatcaaattattgtagtctctttatacacgtattatattgattgtttaattaattacattatatcaacttttttcgcagcacaatatattttatcctccaatttccatacgaaactttttaattagattgagcatattatccagaactagacactaaatacaattaaaggtaaggtataatattattaatttggatataatgaaaagatataaacatggaatattgaatttatagtgttgatatgcacctttttaagttgtaattcctagaatattcttttgtcaggacaaggaaaaaaaggaatatcatttgggtcattaatttacactaattaacctcgtagagaagtatatatagattaaagtaatacaactaaataataaaatagtaattattatataatgacaattaagaaagcatataatggtattttacaatttccatgccaagtcattggagagagaaaagagatgaattattaagtagaaatatttggaggttacagaaaatcttgaaaaaggaagagaaacccgacagtgtatgatgctaaactccatcccttttcggttcagacagatttgtgggtcaaacctttcagcttatgggaattaaaatattcatttttatttttgtctgattgataatttccggtgaaaaagacatgaattcaccttgagagaaaattttattaattaaattaattttaattaataaaagcagattccattttaatccaatagggtagctgtagctttggtaccacacagcataatacactagtttagctaaacacagtatatcatattacatatacagtagtacattctatatttgcataaattatggaaaattaaggacccccttttttttttttaaacttttttataattagtcttttgtcacattttctgatatttatatacatatataaatgtatggtgtttgggatcaacttggtgcaacttcattttatttagcctcacctctatgaacaaaagccagttcaccttattactcccttaatcaaaaaagttttttgttttggatttttgaaaaggagagaaaaaaatggagcttactcaacatggtttcttggaggaattactagctccaagaagagataattggagcagtttctcaagtgttttgaatgatcaattctacccaagtggatggagctttgattcatttgaagagaacccagttttggcaatctcaaatcctcctccatttgttgggttctctaacccaactgaccccaacaacaacaacaacaacaacaactctgaatgcccttttattgaacacaccttatacccttttgttaaccatgaatctgtagtactaatgccagagctcaacaacaatgatacgccgtcgtttccatcacaagatcaagactacccttcaatggtggaagatgaggagtttggctttcttggatgtgaaactcagagctgtttggaagaaaataaagcttgtaaagttgaaatggaacaacaaaatacagagcttcctgtttttaacataggcctttgtggtagtggggcagagaaaaagaccaccactactattactactactactacttctaggcctaaaaagttagaaggccaaccttccaaaaatctcatggctgaaagaagaagaagaaagcgtttgaatgacagactttccatgctcagatcaattgttcctaaaataagcaaggtggtcttttctttttggttgtttttgtacaaaacccatgttttagtttccaattttattcatgaaatttcggtttagattttacttcttcttcttctttttcttcttaacttaataatgtgaatactatactactggtaacagatggacagaacatctatacttggagacaccatagattacatgaaagagcttttggaaagaataagcaaattgcaagaagaaggaatggaagatgggaataatcaaatcaatctattaggcatatccaaagagctaaaacccagtgaagtattagtgagaaactctcccaaggtatatatagttatgtataataaaagatctcagttttgagtctcattttaaataaacataaattggtttgtgttaaatttctgagttttgatttgggcttttgcagtttgatgtggaaaggagagatatggatacgaggattgatatatgttgtgcagccaaaccaggattattgctctcaactgtgaacactcttgaagcactaggacttgagattcaacagtgtgttataagttgcttcaatgatttttcaatgcaagcttcatgttcagaggtatctacttttgctttttctttaatctttgatttattttataaattttgttatcttttattgaaaatagttttcttctttttagggtgctcaacagaggacattgattagttctgaagacataaagcaagccatattcagaaatgcagggtatggagggagatgtttgtagaagagaagaaacaagagaagagttcatgagaaataataatattaatattattaatatttattaataataataataaaaataaaaaaaataaaagaagggttttcttggaaaagtttgaaagagatttatgaatcttttacactcttcaagaaactcatttccaagtcacaagttgtgtgttgacaactttgtgttttcttgaaataatttatgtgcttttatctgatccatttatgtagagcatattatgccatgtaaattatctactcaaattggagtaaatcttttaacacaaaaaagggatcatttagttcatgtctaacacattaatcaatgtaatgttatttaaataactacttttattctctgtttcttcaatctctaatgttttttatgaaaatttgtgttggatttgactatgtattaaatttatttgtttctatatatgagcctaaacaattattgttgatatttttattgttatttgcaaacataatcaaccaaaactaattatgtctacaaattaaggttggttgatgacctcttgttatatagaagaatattagaacattctcaaatattacaaaactagccttcctattcttaataacacataacaaacattctttttttttctttgttaactaattaaaatggaacttctgtaaacttgtccttacaaatccagtggagattttcttttatgtcttttttttatagggtttagtggtggttgaagagctagcataatgactaactttgtaaagatatatgaagatgcaatctggtgaaagattctaatgtgtggagaggcaaacaagttgcagagtggaagcacctcattttacatttgtggtacagacaatcatttctaccatgactataaatatatttatagaatgtatttatttttaagtaaataataacaacaataacagtttagcaaaaaatagaaaaacaataataataatatattgagtatatattaagataccgtgggggtgggtcattctagctacctaggatcacctttgttacaggaagaaataagagaaagattttggcaaaaataaaggacgtgtttgaattacatgtccttagagtgtgatgaagaatgtcttgagcactcctctacatgtaattcaaggatggaaacacagatttttagcaagcatttctttctaataaacgaaaataataataataataataataataatattggtcgtttgttggatttaatcagcaccaaaaacataactaggaacaaactaaatgtgtattttgaagagcaagcaaaaatatagatttgtgctatgtaatgaaaaatgaaatttgagtcgtgttgtgtgtcgtggtaataatttataagataggattgatatgactcgtaggtttggtatttttgtatcttgctcgtatttatgtacctattcaggctaatctattttcttaaataaattaatttgttttctatgtgaacttgaatttttgtccggttttttcacttttttttatttttatttttataatcaatgagccaactactaaattattgtatataaaaaataactatactaatgaacacacaattttaacccatcagttaaaataaactggtttttccttttctaataatttaaattataaaattatattattttgtattatatatatttgagttttattatcattttcatttatatataagggatatataaatatttattatcaaaaattataattttttttaattttttgtgcttctaaattagtctatttttcgtttacatgttgtgtcaagtttaaatttatatttttttttctcatgtaatatcatgtcaatttgtagtattgtgctggcacatgcacaatcctgcaatatttttaatatggggtcgtcttcatgcctcctaagtttttgtcgattttgtatcgtaataaaaagtttaatttgtatttagagcattagttaggagtgctattaactatttgatattggtattgttagaatagccctaacatcttagaagtactaagaaaattcaatttggaagtctcaaaacaaaattaatattaagtgtttcatttatgaaaagtaataaaattatgttttgagatgtacttagttctactcaaaataatgattatattctattttaaaatatataatatgtatctagatgtgaaataatgttatctgtatttttctaaatgacaccccgtacgcacactttctacttaacacatttattaataaaatatttacataatagaccaaaaatttgaaagaaaaaattacaaaaatacgtcaacatgaaaaaaaaaattattttaattattacataattatatttttcttttcagggtgataaaaactctaccaaggaacatgaccctcaaggccagaaaactcatcctcccaaacgcaacaagaatttttacattcactgtaatgtgcttggccatacagtgaaaagatgctacaagatctatgggtaccctcctggatacaaggtaaacaagcccaaggaggtcactgccaactaactccaaggctgcaacgattccaatgtcaatcctgatgagactaacgccttgcttcctcaactcaccgtgttctatcaaaaacttttgaatttacttgccaatcaataatttggtatgaccatcacggatcctaacacttcagaaggtacaacaattatattatcttatctgataattctgtgtcatctataaatgaattttggattatagattgaggtgcaactagacacatatgcaataatattaggttatttcaattcctatgccctttagttaccactcgaattattctacctaataataaatctttacttgtccaccaaagtggttcaattgctatccctaatcaattgttgcttggtgatgtactatttgtgccgaacttcaaatttaatatgtgagttgcttaactgacagtaagcatatctctgtcaaattctttactaatgatttttatattcagggcaaactcaacaaaaaggtgatcagtagaggaaaaattaaggatggactatacatgttgcacctcaatccatttgttgctcatgtgttgatcgtctctcctgaattttggcatacaagattaagacactcatctcagattcatgtagctattcttagtaatagcctccagtgtaatgtagattctttgcacaaacaatctccttgttatatttgtgttatagccaaaacaaaaaaaattatgttttcctaagaacaatacttttgctcaaaataaattttatttgattcattgggatgttggggtccttatcacattccctcacactctaactacaaatattttcttactttagttgaggaccattttcgttttacttggatatacttgctaaaacaaaattctaatgtgataaacataatacttcaatttatttcctatgttcaaacacaattcaattatattttcaaatgtttttagatttgataatgcccctaaattaactttcaaagatatattttctaaacttggaattatgcatgattttacctgttgaaagaaaacaccagcatcttttaaattttgcaagagctctttgttttttttttttttgctcaaaataaaatacataattacaaccccttttatcatcaacagaactcctactcttaatcttgacaacaagacaccctatgaaatgttatttggaacttctcctaactatgaatttaagaaattttggatgtctcatttttgcatccactctaactgctcacaggaccaaattcgaacatagagcttgtgcctgtatttttatggggtatctgttggaatttattttaccaggatcttagatctactcacaagtatgtt

SEQ ID NO: 223576 - DNA, 1058 bp, Cannabis indica
tgtgcgactgaacgagcgaaggttgaaatcagaaacccaaacgtgcgatcgactccagctacgacaatgggtgcgactaaaccgggcaaaggtctatgaacgggctgaaccctcttcgttgctgcgatcgattccaggtattatatatatataatatcaatatacatatgaaagaatgtatatattaccctattttaaaggtgaattaccttttcgatgattgcagtgagactttgcttaaggtaaagcaagctttttgttccacagctgttgatttgcctccagaagaatccactgcaccatatcattacaccatcttgccagagacttttgatcttaatgaaactcgaaaggttttaatcgtttcaacagggttccacattccaatcgtctcccttgtcgactctaccatgccttcaattactactccaagatcacctatctcatccttgccaacaattacattcagtttgtttatatcttctacgatctcattaccacgacctttcttcttcattggtatgatgtcttgtatgtaccactacacttttgtactgcactttgcctgtttgatgttttgccccattaaaaagattaacaacttttaatgttttaatgagtgtacagtggagaagtataagaaatttccatcaaatttgcagagcagcacctttatcaattttgaagctattattaaataaataaatttattatactctttataaaaagcaatgttgaaggagggtgaagtagaacaataatagaagagaaagctcgcgaaagatggaacaaatctcactgagttgtcttccaatttgatctggccatgatgttcagattaattttattgtttacgctgcgagtattgatttcaccgagtattgatcacagtaacaatggtgctcatttctgctgcccgcgattacatcaattggatgcttcaagacatctccggcatgaaagtcctcatcctcgattctcacaccgtaagttccactagcttacatcatttctctaatagattatcatcattcgacttcgtttctgtttgtttccca

SEQ ID NO: 223577 - DNA, 1994 bp, Cannabis indica
ggatttaaatttttatgtaaggaacttaggtggtgtttggttggaggtaatgaaatggaatggaatgaaaataaaacaattttcatttcattcgtttgtttagttgcatttaaaaccattagaatatcattttgatggaatgatctttcgatcattttagtggaatgactattccattttgaaataaaggaaatgccattccaatgcaagatttgaaataatttaataatttttttatcaattttttatacattttaaattattccattccattcttattccaattctcattctcattcctatacttatattttaattcttcacaaccaaacgctaccttaaagtaatagttatttacattttgctaaagttgaactacacatttcttgctaagaattttcgatgttatgttaattgtgaatttggtaggggatgtcacttttgaattgttttttatggttatgagcgatttgctctaattttaataaagctgaggttattaaaaaatcatctctctcccctccatttatcattttctctaccaaatatagtgttaaatttgttttgcttcttacacacgaaacatgtaggttgtgaatgataccaagtttaaggcgttccatctctaatatacggtgtataatttatactaaatttgactcaaaatatgaatcaatactatatttgttataatatttgttataatatttgttattgtgaaataataaagagtatgtggtataatttctccaaatgaaaagatcttcaaaagttgtgctggtcatgaaaagttagatggcatccgggagggcattcccagaagtccaacttgtcaatctggaagaagtctcctggattgatacatccagaagattgtttctggatacctatcatgttcacctggaaggagtcttttagaaaactagtcttcctctggaaatgagtttcggttgggtagttgttccctctaggaagggagttttgaatagtggacttcagctggcatctttcctatacttgggaagttcctttcgcctacgctttggttttttttttcttaggaagtgtacgtcttattcgaaagcacttcctcttgtgctgacgtggagataatgttacgaagagtttgttaagtttgtttcatcgtaactaacttaacaacttaacagatgcactttaagattcatatcgtagaactataaataccaccaacagttatcaatttagagacgatgaaaacacaataggtttagacgagtttcgagaggtgatattgagagagaaagattgagaggtagagagagataagtacagagaaaagagagagattggatttaggttttgtatgaagaatcttctatagataaaggagattttttttttgataaaggagatttttaggtgagtgtgaaagataaacactttgagagagcttaacagagaatcgatcacgaatgtaatgtaccatgttcttgcttaatcaataaagaagatttcggtggtgttccataactggagtagagccataaatcacatcgatctattggacttgaaccaacatatattttagtgttgattttattgctttattactttaatcatttttggttttaatactatgtccatccctatttttaatctcttattataatctgtgaagtgatgaatattgtcattgctaattatttattatttaagttttagttgatttgattctgcacatatagttgtaattttcacacagagtaagataccatgattgattatttgaacaacagtatttgaacaaagaataaaatatcattaatgattattcataaattaaatatttaaaaagttattaatagcaatattatagttaaaatgtattagtaatgattaatgataaaatgtaattaaaaattacatatttattgtgtattaaatttgagacaatactattatgttgtgttaaatttgacacaactcaggtgaaataaatttgacacattatc

SEQ ID NO: 223578 - DNA, 1422 bp, Cannabis indica
atgtgaaaaggaagaagttgagatgattgatgcctctcttacatggatgacgcccatacttaactatctactcaatggacaacttccatcagacacaaaaactcttatattcaatatcttgctacacaatagtagaaggtaaattgtataggaggggttattcaatgcctctcctacggtgtgtgctcccacagaagcaagcgagataataaaaaagattcacgaaggcttttgtggagaccatgcaggttggcaaagcttctcaaagaagataatccgacaaggatactattggccaacaataaataaagacacacatgaatttgtcaaaaggtgcgataaatattagagattttcacatatacctcgcgtaccaccaacagaactaagaattatgacctcgacgtactcatttgcaatatggggaatcgatttgattgaggcattacccatagggcgaggaggagcaaagtacgcagtagtggcagttgacttctttacaaagtggacagaggctgaacctctagtttccataacttgcaagaaatttcttgattttgttgtcaagaacataatttgtagatttggaatacccattaaaatagtatctgacaatagaacccagtttgatggtgaattgttcactgagttctgcgtaagaataaaattattaagagcttctcatcagtttcaaggccctaagtaaatgggcaagtagaaactgttaataaaacctaggatactattaagaagaagttagataccgtaagagggagatgggtagatgaactaccacaagtaccttgggctcacagaatgatagagaaaacagtaatagggcatactccattctcattggcatttagctcgggcaatgctgccagtagaagttaaattacgatccacagatgagatttctataatcaagagaaaaaccaagaactccttaaattgtcctttgatctacttgaagaaaaacaaactgagccgcaaaccactaatgcagcgtatcagcattgaattacgagatactttaataaaagagtgaagaaaaggctctttaatgttcgggatttggtgttaagaagagtattagcaaacacgagagatacatctgttggagtgtttaacccaaactgggagggtccttgtgttatcgaagcaatagttggaaccggggtttataagttggctcaacttaatagctcactaataaagaaccactggaatgttgaacatttgcgaccttattaccaataaacttattaagtaaatgctgtattttctctttgtgatgtaaatttgtgggataggtcttatttggttgtggtgctgctgattcctctagaaatctagattcctaaccctttttaataattttttattcaggatttggttcttccaaagtggtctcttttttgg

SEQ ID NO: 223579 - DNA, 1045 bp, Cannabis indica
ttaaataaaatggtaaaattaaaactagtgggatccacaatgtggctgaccacaatttaagccattattttatcttttttaattctatttaaattctaaacttagcccttagccctagaaagaatcctataaatagaataagatggctcttgttttcttaattcattagatgactctagtttcttttgtctgacagaaaatagaaaaggagactctcttttatctattagaaatcctcaattgagagtatgcccactcatgtcaaagcaatacttagcctagtgagaaagactgtgtccaaccaaattgaaagagagaagattcatgttcagatcttgataataccctgctacagaaagaaatcaaggtttatttcatggttttaggaaattcatatttaggaaatacatgttagtaaatttagatcttgatcttggtaaaacaagatccaacaactggcctcagagccatgataatgatttattttcatgaaatatgaatttaatacgatgtttggttaatttggatgtgtttatattggttcatgtgcttacttgatgattgaatgtgaattacgaaattttttttgaaaaataattttattttcgttttgaaaataatttatttagttttctttatgaaaaattaaacaagtttggtttcaccagaatagagtttgtttgacgagtcttctgaaatcacttatagagacacactaaagagatttctactaaagagctccccattgtaatcactcaaacacattattgagaatataacattgatcaataaaataataagtggactaacccattatcaccatattaaaggaggcgaaccactataaaatattctatgtgcgattctatttctttattaaaccaatttacttttgaaaatcatataatatgtgctaattgctatagttttataaatttttaagatcagttgacaaaataataacttatgttatggatcacttgatgatcgatatacattttccattttaaaataggtacaaatcaacaataataattaattaaat

SEQ ID NO: 223580 - DNA, 2395 bp, Cannabis indica
cacacagcgagaaggcgttgactttgacaaaaccttctctcttgttgtattgcttaaatctattcgaattcttctttccatagctgccacttatgactatgagatatggtaaatggacgtcaagtctgctttttctaaatggtgatcttgatgaaatcatttatatggaacaatcagaagggtatatgttaccagggaaagatcaaaaggtgtgcaagttgcttaaatccattaaagtaagcctctagattttggaatatcacctttaataagactattaaagagtatggcttcgaacaaaatgaatacaaagccggtgtatacaaatacattaaaggtaatgtagtggtattcttaattctttatgttgatgacagtctagttattggaaataatgtagaaaggttattagacataaagaagtggttaggcaataaattccaaacgaaagatttaggagaagcaagctatgttctcgatatcaaaatctatagagatagaaagcggagaatattagcacattttcaagcaacttatgttgataaggtgcctgaaagattctcaatggagaattctaagaaaggacaattaccgtttagacatggaattactctatgtaagattcaatgtccaaatactcctcaagaggaagaggacatgagaaactacccttatgcatcagtagttgggagcttgatgtatgcaatgttgtgtacaaggcctgacatatgttagtcgttatcgatctaatctaggtttggaatactggatagctctaaagcacattctcaagtattttcagagaataagagatctcatgcttgtatattccaatggagagttgaatcctactgaatatactgattttgatttttaattagacaaagatagtcgaaagtcgacatctggttcagtatttactcttgggtgaggagctgtagtctggagaagcattaagcaaaccatattgcagattcaattatggaagccgaatatatatcagcttgtgaagcagctaaggaagcagtttggtttaagaaattttacaccactctggaagtagttcaagaagtagaaaaactcctggtgctatgctgtgacaatagtggagcggtgtccaactccaagaaaccaaggagccacaaaagaggcaagcacattgagagaaagtacaatatactaagagatatagtagagagaggtgatgtgacggccctggagattgcatcagaacataacctgataaatccattcataaagacgctaccagcaaaatcttttatgggtcatatcactacggaagatgtccaatttgcttttagggcaagtgggagattaatagggtttatgtctcaaaaagcttataatatatttttgattatgaataaagagttgaatgttttgatatatgcttgaatgttaaattattaatataatatttattattgaataatttatataaaaatataaaaaaattccttattcatctatgaagttgtgacttgtagctgcacagagaactaagatcacttaggtatgaataaaataattagcgacatattaaatttatggaatctttaatcaatggttcctagtacgattcactaatgcccattctttggtgtaattaatctcagttcggattgctgatgtagtatgacctctaagtgaaggtgttgtatataatagagattatatatgacatggattgttatgaataaagttgtctttagctaacatgttgtttaatataaagacctaattcatatcataacgatgatcaatagtgaatcgactgaaatcttgagtaatcatgaactcatattcatgaaagtttctttgattcacttgttaaagtttctcaaaaaagaagattcttacaatttttattttgtgaatctaataatgtagatggttgggaatctgatctataattatagaatcttaactttcctaatggaaagaatgttggttccctttttgtgttagttctagtactggaaagttgcacacaaatttagatgtgatctgaattatatttccactaataagttaatggtactaaacgataaataagcaattagaaggataaaatagtaattttatcaaaactaatcacgaaccgacacatggagggctagtcattagaattggttatatcaatagacactacagtaaaactcaataaatataattttataattactactacttcaattcaatatttatagtggagttatcatggaattaataaacaaagattatttggttgatgagactcaataaataatctagtttattgtagcttagaattataggtctatggttctcgaattgccaccttgaaacactatcaagggtatggataaaacgttgtataatgttgttcaaaaaa

SEQ ID NO: 223581 - DNA, 1406 bp, Cannabis indica
acataatacctcataaatcggttataattaaaaaaatatgtatcaattccaaaaatactgagacataaatataaactgaaccagttccataacaaaataaataaaaataaagaacacacaataactcaaaatataagataaagaatccgattatatttatcaactagttaataatttgagatgaagaaactagttccgtaaagtaacgaagataaaaacttacacacaaaaatcagttaaataaaataaataaataaaaaaaaaggttctttaaattaactaaattaaaaatcatttcctgaaataactaaattaaaaaccaattccttgaatcaattaaatcaaaaaccaatttctgaaatatataattcaagaaccgttttctaaattacttaaacaaaaaatcagttgagacataaattaaatagaactgatttcacaacaaaatgagttaattacacacaaagtttaatcatcaacacatttgattgaattggataccttaggttgaaaaatcttctaagtatgatcccaaaaaatacacatgttttacccaaatttcggctaataatgagaagctgactgacacatgtactagggaagaaatacgaatcagccaaagcagtgtattgttaaatacacattaaataactcaccttaagaattacatttgatagaaatatttgaactcacaaccacataggcaaaagcgagataagaataataactattaacgaataagatcggcgagacaacaagtccatctcagaatgaataatatacataatgaaagttgttcaagacgagtaaacaaagagcttgtacccacatactcgtgagtaagagcttgtaatttattgacccacatatatgtaaagcttgcagctaattgacccacatactcgcgagtatattcaaagagtgataataatattcctttatctcgctttttatgcattgaagtaaccgcctcgctaatacctaccaaaatggcaaaagagaatcgcgagaagtattgtatctccgcactctgtatttttttttacaaagatggtaaagaaggataatatatacttgacaagaatcatccaatacagtcagcataactgtctatggatgaagacaaaagagcagttgagcggttatttaatattatcccatatgcataataatgaaatgtgggaaatgtctacgtttcatgagcaattatgaatgaataagatcccaagggaataattgtcaccctacacatctataaatagagacagaacctagggtaaaggggacgacaaatctagagagaaaaatcaaggtattattattactgatattattgtatcgtgtattccaaatattatccctaataagatggactcgttgacagtgaagaattaacttcaaaacta

SEQ ID NO: 223582 - DNA, 2287 bp, Cannabis indica
tttaaaaaataatgtcttatgtaactattcctaattataatcttaatattgggatcggacttctataatttttagtgtccttttttattaatttctttgttcttattatttttaattatcaaactgcctgcctttttttttttgaaagaagtgttctttattaatgattcgagcaatcgctcataaggatagacaacaagtccaaaggaacactgttaatggaaaacatacgctcagctaaatacacagagtgccgagcaacataatgcgcagcacaattcgcagaacgcttaacaaaaactaaagaaacattactcatactatggagaagggtcttgcaatcttctaccactaggccgaaagctgaagcaaaaacctcagcactacggacagcttcagcacaaaccaggctatcggtttcaacaattgcgtgggaatgggcgtgatttttcagccaactcagggcctccctaacgcccatgatctcagccagttcgggtgacactctcccaaactttaacccagcaaaggcagcaactaactctcccactgtgttcctcacaacacagtcgaacccatgctttgaagaatgctcaaaaatggcagcatctacattaagcttgatacctgaaaccggtttaacccaaagctccgaaccatctccatctttgagaggagacgataaaggaatgttaccctttccttgagctttcaaccattgatcaagacttgctgtagcaaatgaaaccacatccttcacagtacgaacctgatgcttccaaatgagatcgtttctagcagcccaaatagcccaacacaacataacaactctgcccgtggcctccccagaaaccagctgaaaagtgtccaacaaccacagctgaagtgaggttgcatctctactggtagcagctaaaccagcgtaattccaacaagtccaagcaaaattacaagacacaaaaaggtggcattcagtctcagcaaagatgccacagaatggacaaagattttcagttaacaccttcttgatacacagatttgacttagtagcaagacaatttgaagccgccctccaaacaagatctttggctttgggaggcactttgagagaccacaaaatcttccatagaccattggaaggtgaaaaatctggtgtgaacttcatgctatgcaacatgttgtaagcactacgaacggagtagaaaccattcttctcagcaacccaataccacgagtcatcaatagccgaagcaattagaggtataccaagaatgagagcagcgtcttcaggagagaaaagatcttgcacaacgtcgacatcccagcttctattattagcttggaaaaggctgctaacggtgaagttttccaacccctgaacaatcgagtttggtgttggtctgtcaagaacagggagccacgggtcagaggtaacttgcatcgataagcccgtgccaatccttttcctcaaaccagatttaacaacatccttcgcatggatactactccaaataaaactaggattcgacccaagttcagcggtaagatagtctccttgcgggtagtatctcgctttaaaaactttgccaaccatagaatcatgtctaaacaacaatctccaaccttgtcaaactgccttttttaattttgcatcgttgactaaaaatagtgttaataataataataaatatttatttgtcaattatatataaattaaagtactagtaaatatttaaattcaaataattttaattattattttttaaagataattatctataataattattattagaaagttatataaaagtaatttaaattatatataataaagtatataatttagtagttaactcatttattgtaataaacataaaaaatcataaaatacaaaattgagcccttattaaaaaatgaactaatctacttaaaaaaacagaaagttgcaagtaaatataatacaaatcagagcatagcatgacataaaaacatacgtatcatattgaataccttgtaaaattattgacatgacattgtatgactcatatattttttttgattcgaatcgatacaacatcatattttttattgaaaaattaacataatagattcaaaaattttaaaaaaattacaaaaatacatcagcatgaaaaaaaaaaattatttttacgctttaaattttttatttataaaaacatttttaataaagataataaaattttctttggttgttttacagtttatttatagttgttatgatgttaattttttcagttgttttatagtt

SEQ ID NO: 223583 - DNA, 4008 bp, Cannabis indica
aaaagccatagctactgccctgaacttacctttaacgattctcgctactcaagatagccgccgcttctctccacttccaacttcgataaggttccttgcttctctctctcgtttatagttcgatttatataccatgtacatgggcaaagttgaaagaaaattacttatttgcttttattctatattttctgattcatttacttgtaatagaaatttcttgcaaaatgtttggagttcatcaactaacttgcattgcaggatatcatgaagatttcttttaattagttattttttaaggaataatattattgagccaaaaattgctgacccctgatttgtttatagccaaaactttaatgtacacccacacccactttgtaagttgagaatgtagtacaaaatttttaggctagaattttacttaccgaattttgacatttaccaaattatgcctcctgaacattttaggtcattaaaaattccttcgaactattgtgattgttggatttaaagccttttgtccaattttactaaagaaaatctaacgtgtatataaatttaagggtacatttgctacatattaaaatttaaggacatgatttagtagatatcaaaatttgggagacatgatttagtacatagacaatcgccacattagaaaaattgaatgaaattgaacaaaagtccttaaatctaacaattttaataatttaggtggaattttttacggtttgaaaagttcaaagagtatgatttgatagatgtcaaacttcaagggacaaaaatcctaattagtcaaatttttattgctattacttactttcttagaaaagttcagatgatcatttgcttctaaataatgagataataatcaatattaagtatataaaaaaacgacattagaaaccaaaagttagttttgagactttgagttcatatacagctgttataattgcaaatatgctatcacttagcatttagtttggttacatgatatttcatatatcagcatctcattggaagtattactagtttattgagataagatatagtacacatgaacccaaaatttattgatgtttgaaaacctaatttacatatatatatggcatatcagatactataaaaagacctaaaaatgaaaaaaaatactatataaattggtcaaatttaaatgtgtcatatttatatttatagtataattttttctctaaaaaatttcaatgatatttatcttaaatttgagtaatattttaaagtggttatatctgtaaagatgtttaaaaattgcataagcttgtaaatataacctaaaatactgtgctcatattttctctcactttccctctcctcggtggttcgggctccggtcagtctctctctttagtttgatcttcgctgtcgctgttattgaggttggtagattgaattttgtttgatgatgatgattttaatctattagataataatcatttgaatatgtttgaaagaattgttagaaatttctgatgaaatgattgaatactctgtttggctgtgggatttgtttgataattaatttcatgtttaatgctccatggacattctaagggtgtagccgtgtatgaagctgaggttgatcatcttcaaataatgtgtgggtattgaatttattgcattatcggcttgacttttgaatttgaatgggttcgttcttctttgttgtatcttgttatgatgttaagctcttactattgattgtttaaaatatttataaacttttttgaaagtgtttgggtatgtaagaatgtgagtcattgttgatttttgaaaaattatcttattaaaaaagaaattttttctctaaaattcaaagctctggatgatttttcagaatattctggtggttacttgttgggagaattagcctttgcccccaaagtatgcatgttattgtctcagcacagacggtgttttacaatgaattttcattgcttccagaagagtttctcttttgcctcatcccctttggtgccattacagcttccatctccaatgtaagaaacagtattcatcatgagtcctctgaacaacattgtcaagttctagttttggttgaatgtgtttgagtcttggtgttgtgcagggaaacccatttttggtatgttttacctgatgaagtacggagtcaaagccttatgaataaatacttggagcttttatcaccatgtgagaaagataatgttgtgagtatgagtggggatcaactcaggaaaacggctgtgcttgctcgagctttggttcgcactaccattgctagatatgtaggttttctcatactgctgataactttcttatatgcattgaatggaggttagtgtgtatatctgagaaattttgtttcttcctagatcagaccaatgctcatgttagtccagaatccttgaagttcaggaagaacagttatgggaagcctgaggtgggtttctttttcttgctatcaatgttgtatggtggaaattgttttgctgtcttctcatttatcttactaatcttttcctgttcagtgtatttgttttgtactcttttaatattttcctatagcttgagtaggtagactggcaaattgctgattggcagccaccaccactgcatttcaatatctcgcacacttcttgtttaatagcttgtggtgtatctgcagagatgcctgtaagtgtttttttttatgttattaactgttcgaatttccttttaactttctaaaatttttgtatgttgttattgtgaaagactagctttgagcaatctaatttaatgatctaaatgtagattggtattgatgttgaagagaagaaacggaaattaaagaataatgtcttagcttttgctcggagatacttttcttcccatgaattggaccatttggctgctattacagatcttgaaatccagcgtcaggagtttttaaagctttggactcttaaggttggtaagctggtataataatgcattaaatatattttatttaaatatgttgtctttattctttctgttgacatactttagaagtgctgagattgcattatgagtgttaccaatttgctgtgaaatttattgatattaagctgtaaggtttgtaaaccagtaatgggaataaattattgtagtaatgggaactcaattgtcccttattacaaaaaatgttgttttgtcaagctgtttaaggcattaattttctttttcaggaggcatatgttaaagccttggggaggggtttctcagctgccccatttaacacatttaccattcaatttaggtctcctataactaaagaaaaaagcaaccttttaaaggtttccgataataaggtatgtttgatatgctgtcattactgataaagatcgaaatcatgttatgccttaaaaatacatgacattgtttgattcataagattaggtgattactgattaggatatgatgattccaaatatgccactcagattctttcaagagtttgagcttttttgtgttttgaactactgcatcaggtacctgatattgctgttgagcctgttgataatctcagtactctaacaagcaattgccagtttgcacttctggacttggctaattctcattatgctgcgatttgtatgcaaacagctaaacacattgaaggtagagtttttcattttatcatatgttccgagtatttgacaaagaacattgctagtttgtaggttaaaataacaattttatgtatctctatatgcagggaatccaatgaatgtgatagtaaggagaacaattccacttgtagaagatgaagaaatcactcaattgtaatgattggtgaattgacttgattatttggatgatcatattcattagacacatggtagagcatctcaaataaatatacttattgcaaagttataatatagcttagagcacttcacttctttattctatcctttaaaatatgtcactaaaactttattttttttattattttaaacagcacat

SEQ ID NO: 223584 - DNA, 1116 bp, Cannabis indica
tgtaaagtccttagttggcatatttggtaaagatgacaaaattaattatttttggtatttttgaaattagttgtttattgcattcaatattttttttaaaatactttctcttttcttagtgtgaagtgtctttcaaatcaaattgtggctttattggtaaataaatatgtgattttcttatttagattatttgatatttattttatatatttaaggaaagtcttaatatttatttcattaattcttatatgattttctagtcaagaaaacatgtagagttatgcctttaatgtatattttgtttccttatttatataagaaaactttactgaaaatctgtccaggtacaatgaatctgtttgaacggattgacaatctgtttgaacatattctgacttttttttttgggaatattttccatttattatttgattgtttccttattgtaaaatgtgacctattgtgtatttattgagaatatattgctactctggttgtgggttaatatagaaagaatagaatattttattatgtaataaatattatatctatatatagtattcatttgtaattgatttattttttttttctgaaaaatctctccaactaggttatgtgatgtccaaggaaaattttgtggaatgaacttggctttgatggagtctagattcataatgctgactagacagatcgggatttcatctgctcactttctatatttgtttagataaaattttgtcatttaatgagtttttgtaaggaaactaattaatattttctctttgtattcaaaccttcagagctcggttttaaggatcatttatcactataaatatgacctaaaccaggagcaaaaggttgaactcttctgcttcttaatttcctatatttttagggagagtgtttcttttataaaggattgttgttctgctatttcttggtgagtttgtatgtctttgagattacttttatgtgaagtaaattccaaagtgaagaacataaagaacaacctttgggagaaagttcatcaaagtcttgtttcgggaggaagcaagcaccgctatctttgggagaagatttctaaaagacttccttcaagaggaagtaagcaccgct

SEQ ID NO: 223585 - DNA, 1966 bp, Cannabis indica
aatattttcactttttcaattttaaaaacagaaaactgattaaaaaagtattactaaacactaccttatataattataaattactcaatatttttacaggtaatctatgtgagtattgtccattaatactgtatagtataagtacgtaaatatatatatatactttttttcaatgtcagaaccagatatatatacatttgaaaccttttaaaatctaaaattgtattagtttaattactaattatattagcagcaaatattaaacaattataatagtgtttgtcatggaactagccaacattttctcaactgctttcgggataatatttagtactgaacaatattattttttaattaggagaatttttagtgaacattgttgtacgtgcattctatatatatataaataattaatatatagattattattataaactctacttaattatatataatatcaaagagatagatgataatatataaaggaagcgtgtatctaagcatatagtacttttgtctacacattctaataaaaaatttccttatgttttggagtatgaaaaagtttgggttgagatctatatattctacatgtgaaaactgtactactccacattcagtcacttatgtatattaacagaaagaaactacgaaaaacaaaagctgccaaaattatgtatcatcacgtcataatgtgctagctatcttggctatatatattataaaatattcgtaaaaaattaagctgataattaattagacaacaagatccctaatgatatcatgagtattaatattatatatttatgtgtacacacgtttatattaatttgattgattaattaattaatagattttgtttggaaggaatatatatattgtgttggaaatgtcttgtcacactgcatggaaattatgaagattactgtatatatatatatacgacatatatatagatagtaagaattaatgagacaaaagtgaaaaaaaaaaaaaattaagctagcgaaattgcactcgaaaaccacacatgcataaaaacacagatcatcattaacaacaagaacaaatacatgataataaaaatcagttgtaataacatttaagatgaacattttctttacaatattatcctccttgagcatcattaatattaatacatactaaaataaacaacaacttcaaatacaataaaacccctccccaaccatttccccccaaaaaaaactataattaaaaaccacacaatgggtaacaatactagtaactgattcggctgccgcattggatcgatctctactaagtggtgtagttattatcatcgaagcatacgaagtgattggtctggcattgaagaattataaggctgacaagccttaaagaaaccaggataattcaaattacccaaatgggtccccggaaaaccaactgcgccggcagaggaattattactcctattagtattagtagtagcttgaccgacctgttccaatgtctgaacttgcttcttcaaaaacttaacgtaatgaatggcttcatctaacatcgaagcagtatccatcttagtcccgccgggaacaagcctctgaagaatcctaatcctttcgctaatccgctccctgcggtgcctcgccgccacgctctgaggatccttagatatcttaacgttgcgccttttcggcggtttaatcgattccgggtcgatatggatcggttgcatcgccgctattctaaatatcatctctctcatcgccgccattgagtttctcttctcgtaaggattattaattctaccaccaacgccgctgccggagagtgccgcattgggttgttgatacggcggtggagtaaccggttcttgaatctgatttcctcctcctccgccgaggaatgaaatagcgccgggtgtggttgaagaaggatataacgaatgatgaggcggtggcggtggtgatgaggttgttcc

SEQ ID NO: 223586 - DNA, 1134 bp, Cannabis indica
gatacacacaatatccaccaaccgacttccagtcatcaatgcaacatgctcaatcggcatctgaaaaacaagcaatgtttagcttgtgactatgacagatgtggagaccataatctattggccctttgaggtatctcaagatcctctttgctgttccccaatgaactgttgttggtgccttgagatactgactcagcttatttaccgcgaagcaaatatcaggtctggtattacacaagtattgcagccctccaattaagctatggtagacagtaggattgccaagtttctctccatcattgatagacatagcttttcccgtggcaattggtgtaggacatggcttgaggttggtcatatcatttttctccaagagctcttcaatgtacttcctttgtgtaagatacaatcctgtgtcatcccgtgtaacctcaatgccaagaaagtagtgaagttgtcccaaatccttgagagcaaaaagcttgttgagttgttgtataaagctttggagttttgagttaacattccctgtgccaactatatcatcgacataaataagcacaaagataatcaacttttcatccttatagtaaaacatggaagtgtcggctctggagttcttgaagttccagttcagcaaggtgtttttcagcttgtcaaaccatgctcgaggagcttgtttcaaaccatagaaccctcgggttgatacatataaacatcctcttcaaggtgcctattaaggaaggcattgttgatatccaattgacgaatttcccagttgtttgagacagcaatggtgagtacaattcgaatggtggaggccttgacaactggactgaaagtttcactatagtcaagtcttggcctttgatgaaatcctttggcaacgagtctcgctttgagtctttggagagaaccatctgcatttcttttaattttataaacccacttgcatccaatcacattgtatgcatctgaatatggtaccaaagtgtatgttttctttgctttgagagcaccaacttcattagtcatagctccattccaactagggtgactaagagcttcagttacacttcttggttcctctttttcaggattccattttgttttactgaagtagactttgggctt

SEQ ID NO: 223587 - DNA, 1818 bp, Cannabis indica
aaaaaagttaaaaaaacaagtatatagtagtaattcccttacttattattattattattattattattattattattattattattattattattattattattattattattattattacatgcatctaaaaaaaaagtgcaaaatcttgtaaaattttaaaaaattcagaataatttacaatatagaaagcagtatttgtgaatgttgaataattgtatgtttttcattaagagaaaaaatgcctattaataggttacccgatatttttttctaaaaagaaatacttttacaatatttttcgtttgatcaatgtaatatgtatgtatgtgacttctcttttatatgtagatgattaaaaggatgagtcatagattattaggatttcttaattgcatcttgattggtaaacaaatcatatgtatactgatacaacataagtaaccttcaagcaaataatatttatcaaaagccatactaacagagtcatacaatctgtagtaaaaaagttattattatttaattaattaattgtacaatcacatatatttaaaaccttagttttatatgtccaatgtttataatgttcaatctccaagtttcacaatatataaaacgaaaatattgcaaaagtatttctttaaaaaaaattttccatgacaccttaaatttgctgctagttcaatagattggagagttttattctcaaaatttaaacttagaaaattaaatgcaaatgaaacggtaattgggaagatttcaaaaaactcaaattattatcattctttatttaatttaattttatatttttttaaaaaataagaacatgttgacaattggcagtgctgaaacactgcatgtcaatctgctagatccgtgcatgaaggcaacactctttataaggcttctccctcttataatctaaggaccctatctaatgcctagttgtgggtcttatcactctgacccattaagaggcctatatgaccccaacaccacagcacattaccatgtggaatctacttaccaccattaattggtggcattcaatggctacattttgaatataataataaggaacatgtttttatttaattcaagagttgaaaacagagtagagagtaccaacaatacaagcaagaaaacacataaaaccataaagtggatcaaagaaaaaatcataaataaggttggtggggtagtagaaggtgaaaatgagcaggtatcaaatcaaaacttcttaatgaagtcataaatatgagtggtaacttcctctggcttctcttggttgataaaatgagccactccttccattacaaccacatcttgcaaaaatggaacatctttcttaaacccatctccattaatgtattctttggcaccagggaagtgataagttatgtccaagtctccaactatgaacttggttggtactttcacttgtactccactccatgctgctgtcagctcccaagtccttcaataacaaaaaaaccataatcaaaacaacattttgtattaaaatgatcaattaacaaacaaaatgtgcagagtagagtagagtagaaaattaacttacaagtttaaagctcgataataattcaatcctccagtgaagcccttttgtttgaacttttcaacaaaataatcgaggtcctgttgtgagagccaaaagggtaattctggagctttaaggcctttgaatcctatttctctaggcacacatggtggacttggattcctaccaccataaaatttctttaggatatttgctatgtcatcacctgcaaagtcttcttccgcctcacccggttccta

SEQ ID NO: 223588 - DNA, 1361 bp, Cannabis indica
gaaaaatcaccaggaaaggcagcatcatatttattaagcaagtctccgtttcttgcatttattgcaaacacctcaaaatgggaagagccaacaaaacctatcgtatatattacctcactatccaaaggatggataatctgttggacctcaatactttctgattcaaagctctttttccaaacaatctcgccatctatactagaaacaccatgaaggcacccattaccaaaaacgtggatcaaattatctttgtcgactttcaaatttttgggaatggataataatgacttcgaggactttgaacaaccctgtagagaggactcccaaaccatttgaccatcgggaagattccatgctcttaagatacctccgctagatgagagggttatgacatattttcccagagcaatatctattccatccacaacatcattgttggcaagaacgtgtctccagaaaatctctccatgccgaagatcaagagaagcaacaacattctcctcggtcgatacaacaacacgctttcgcccagctttctgagtgtggaacactgcatctttcaccttccctatgtattgttggtgccagtccgcgagaccaacttcatctccgaaaagcgaaaagcttggcttcgcgtgaaataaaaataggatacaaaacagtagagaaaccctaatcgccatagccatggcaaatctcgcagtgacgattgataacagatctcaataatataactaagtgtaatttaatagagtaatatttgtaaataattattgccatttaaatacactaattcgtaaatatcttaatagtctttttaaattgaataattttaatcattattcttttttaaagtaaaaaaacaattcaaataaaataaacaaacgatagaataattttttcagttagtggaatatctattataattacgacaacaaatgaagctatggaagatcatggcgatgatgggtttatggaaaaaggagtttacataagcttagcacttggaactgtagtttgatttttgggatttcgtgggaatttgatctccaacaagttcttcaacaatgctgaggattaggcttacgtaacagctgtagttagaagaagctgttgcagatgttcagaccctttttttttcttttgaatggaagaagcttcattgatagaaaaagaagtactagaaaaagaagtacaaagcaaacaagtccttaaggaaggtaaagaactattccataataactcctgtctaatcctaaatttaacttagctaaattatgagcatgagtattctcatctctcctaataaacacaactttaggcctaggattgaaggacaaagagttgtaaacatcaattaa

SEQ ID NO: 223589 - DNA, 2378 bp, Cannabis indica
gtgccctccaaattgagtacactaacccagtaacagaggcagcaaggacttgcttcctaaacttgctcattttagccctcccaatccatctgaacaatcggggcagagacacagcagtggcattccactgcagccagtttttcactgcttgtaggcaagaaattgcaactcgacattaaaaaaataagtgagcacaggtttcaatatcttgacagcaaaggatgcatctgtcttcctctgtaattcccatttgacaaagcctatctcttgtcttcaacctgttttgtactgcaatccaggatataaaactatgtttaggtgtattcaggcgctcccaaacttgttgactccaactcactttgtccctttgtgttcgaagagctttgtacccagcagcaacactgtagggagataactcattgacatgtaccagctctttgaattggtctttaagtgtaaccaatctcctccaataccagcttccatggctaggaggctggtattgccaccaattttcatctcggatgtaaacacaatgaatccatttcaaccaaagactatcttctttgtttgaaatagcccatatgtactttccaatggctgccttattccattcatgaaccttcttaaaacttcaaacagtaagttgctttcttctttttcatgcttgttacattgtgtggatttgttacttagtttgttggtatcgttgtcatctcatcttattttggtagttttttagggttaaactacatcaaggtcgatagcagggttcaggaaacatgtaggttgtttaagatctccaactcattaccttcgggtttgataaaattctttctaaggattgtgactactttttgcctgcagcaatgtcccactctggttcaagaatttatcatccagaagttttagagtttgagtttcctacagaatcaaccatcccatataaacccaacccttataaatccacctccaaattatggttgaacgatactagggttagggaacacgtagtgagaacccaccacgaagatattgctagtcgctagaggcgtttcttgcaagaaatctccgaaggcaaatgctgattcttgggagaagcagcctggccagaactttctagcgtgtgctttattcatctggcaaggcctttgtttttacccaatgtcacgattgttttgaaattaggcccaccaagccatgtacatcaaagactccccaagaccccaatgtcacctttgagggtgagttaatagaatcgaaagtgcggtctatctcaggctacacgggcgagatgctgaagacctgcgggatcaaacttggacaatcatgccaagttagatagtataggagagtgagttcagttgttaccccgtgtgcatttttgaagcagtaacctggggaccactggtgagactagtactagtggttcggctggtatgggcgcctcgagccttgagcatatcagtgcaggagccacgcttcctcttagagattacttcaacgactacataaattgcattggagttgccccattcaagttgactttcatctcctacaggattctcggtagtttgaaagtcttatacagaattttgaactaggggtgtcccacaccagtagagattgagtatctttactcagttaaggccgttccgtcaaggaagaacgtcgaaggggaatttttctatctcggtactcattctagcaagcctaaaattatggtatacttgccaaataaagtatccttcaagaacaaattcttctggacatatgatcttttccccatcgacacaaccacgtttcacaaacttcattagtgattgttctcttctttctcatttatatcaatgtttgtttttcaagtttttgaccaatgttttatttttacagctctcttgacgaggcctacttctacccttgagatggtcagtaggcacatgcgccttataacttttccctacggtcttcggtcatgcgttttcctgttgagcgaggccaacctgcgatcggtgggccttgttactgataagaaatatacttgtgattacaagattcctaagtattcttctttgcagcagattactgttccgactgaggacaaggcctgggatcgcttggctcaaggatgataccttcaaaaaacttcccctcaggaatccgatgaaggagcatcccgaggtaatcaatgtggttggtctcccactatacttagggctgaacgtagtacattagtcaccttccaagactcatttcttaatttttatatttggaattcccttcttgtggacacattgctcataagtttgacagctggtatcctagattccatgtccaggttaactgtaacgagtcatattatggtatagctgagcaat

SEQ ID NO: 223590 - DNA, 2043 bp, Cannabis indica
aagggtgtttggcaagttgttaaaggggagggattgccccctgtgaatcccaatcttttctgggtttaatcaatgaactgaggttctttcaaaaaaaaagtatatgattgatttaaacacaattcgcttaataattttgtcaaaaaatgaaatccaaacatgatttttgtaacttatattattttaacacaccatattaatgacttatttaatacgtttataacatatttaacacatttataatttgttaaagtgttaaatagctttaaatgggtcattaatatgttgattttgtataactcgcatcaacccaaacacgacttatttattaaactggttagacactttaattatttaaaaataattcaaactcatgtaaagcgagccttgaatcatgttatcatgtttgacctattttttcgtctctatttaatacttggtagtatgtgtgatgaatagggtgactagtaattttttactttcttgtttggtattgaaacaaaatgaaaaatgatgagtataaagtttatatatataatatgtaattttgttttattctttttgtcctttattcaaatttttatttttatttttatttacacaataattcaaaatataaaaataggaggaagagcttatctttctatctactcccttcattgtattttttttcttaccaaacaatgaagtatttctctcctcaatctcatttccctcctaccctcgtcattcttccaaaatttttttttgctaagcatagtgttagatattattattcgcgtttttaggtaggagatatgtggccctctgctaaggcctaataggtttcaggcccatcacttggcccaaaaaaaataatgagacagtctttcttgttaataaagataaatctggataggtcgtctggaacccatatgaatctctagatacaactattatacctcaaatggttaaacttataagaaacctaaattgtacatgagtaccctcagtctgatagtggaaactgaacagttgttcaggaaagtttatggtcttaaaagttacttatgtggcacatctctgacatgatctcgagaaatctgggatttatcctctctaccaacatttggaaaggcacgtggcaagaaagagattgtctaatagctcaaaataatgcttgaacaatatattttactccatcattgggctgatattacataaaaatcctagtacatcccaaattcatccaacccattaaggaaggttgcctattaataaagcacagtcacctccatgcaaagggttcacaacctaaaaaatactatacatagttgtaaaaaacttcattaataaaagtttataaaactgtactgtggattaaggctcattaatccttgaaccacgttaaacatgtatgcagttttctttcttaattctttttctctagcttaatctctaaaaatatctatttctcaaaaatctcgataaacatatctaaaaggagcaattataacataagtattatttttgctctaattagtatgcatctactattttttttaataacttatgatattaaaaacaagtttaaaatagtccattgtacttgtgtaaataaaagaaatgtaaacgtgcaactaaatatttaaattatatcaaaattatttaatttaaaatatatatgagtgattattcaatagttacattaaaaatatagctatgatggttacatttttatatgacgtgctataatatattactaataggtaaaaattctatttttagattcaaaataatataattaattatatacttgaaataaattattttttaattaaaatatttaataagatatttttttacaactaatatttatatattttattttttatttataaagaaatgaataaaatcaagttagtatcaaattacaggtcctatattaattatttttatttaatttttaaaataatcacgaccatttaacaatgatccaacaactaaaataaatataaccaccataataacatatttaatgtaaggataaataccattttggac

SEQ ID NO: 223591 - DNA, 6213 bp, Cannabis indica
attccctttgtcagaatattccttgtattatttcaaaacgtgtgtaatgtgtacaataattattctagatgattcctgtatgtacctaccagtaaatataaatacaataggccagactcttattcattgagctgagcttttcattttcttgctttgtttcttcatctctctgtttactctgttttcgaacttggtatcagagcatcttttgcaccggtggtgcccttcttgtctcagctccatggcagaacatactccagctcgttcaggtgaacacagtgtctcgagcatcatggctcagtcgtctatcccttcagcaggtgctgcaggatctcaagttgtcacaaccttgaaccaaccctttgccctaaaactcgacagaaacaactatacgttgtggaaaacaatggtttctgccattgttcgcggtcatcgattggatggatacctaaaaggtaccaaagtgaaaccaatcgagtttcttcccacagactcgtcaacaggagaagaaagtgtcacagtaaacccagaatttgaaatctggattgtgaatgatcagttgctgcttggatggctttatggatcaatgacggagagtatcgctactgaagtgatgggttgtgagtcgtcttcaagcttgtggcaagccttggagacactatttggagctcattctcgtgtgaagatggacgactatcgcaccaaaatacaaacagccaggaaaggagcaatgtccatggctgaataccttcgacaaaaacgccaatgggctgatgtattggcgttagcaggtgattccctacccagagaagcagctggtgtcgaatattctctcgggtgtcgatatcgagtatctccctattgttcttcaacgttcttcaagttaaagccagaatttccactacctggcaggagttgcaagacatccttccaagtttcgacagcaaactcgacagattacacacttcaggagccacaaaacttgaatctgctctcccccaaccgctaatgttgctgcaactaagtcttcaagtttttctggaaatgaggcagccacaatggtcaagctgccacaggaagtcgtggcaatccgagtcatcaaagaggaggcaggagtccaggcagattcagaggtagaggaggtggaaggagcaacaactccaaaccaacttgtcaggtctgtggtcgatatgggcattcggctgcctactgctacaaccgttatgatgaaaattacatgggttctgatccatctgctggtggtactggttctggtggaaaaggggctcaaagtgggaacaataatggtgcttctgcttttgtcgctacacctgaaatggtggaggatggagcttggtatgtagactcaggagccagcagccatatcactacagacaccaataacatgactcaaaggactgattacaatggtgaggaaactcttacagttggcaatggtaaccatttaaaaattgctcacattggtactagctctctaatctctcttgataataagtctctggttttgaaaaatgtcttacatgtgcctaacatcactaaaaatttgttgagcatatctcagttgacatctgaaaataatgtgtttgttgaattttttgccaaacaatgttttgtgaaggatctggacacaaagaaggtgcttctccaagggacacttagagatggcttgtaccagattgttggccagcaaggaaactccatcatcaacccacacgagtctttaaatttcctgtctgttaaaccctttactggtgtagtttttaaatcaaaagatcagcaagttgctgaatctcagtctagttccctaaaggataagtggcacaagagattgggtcacccttccagtcgtgtaatgagtcaagtattgagtatactcaatgtaaaaccagctatcaatgaaaaagaaaagttctgtgaagcttgccaatacggcaaatcccatgctcttccatttaatatcaatccaaatcgtgctaagaatcctttagaattaatacacacagacctatggggtccagcaccgattatatcaaacacaaattacaagttttacattcattttgttgatgattatagtcggtatacctggatataccctctcaaaaccaagaataaggctctttcagcttttgttcagtttaaaactcttgttgaaaatcagtttgagagaaagattaaagctctcaaaactgattggggaggtgagtttcaatcctttgctgaatgtgttgtgcaaaatggaatagatttccaacactcatgtccccatacctcagctcaaaatggtcgagctgagagaaaacataggcatattgtcgagatgggtttgactcttcttgctcaagctcacatgcctttgaaattttggtgggattcttttcaaactgctgtgtacctaataaatagactgcctacaacagttttgaaaaaccagtctccttatgaagtagtttatggcaggaaacccgattataaatttcttaaagtctttggagttgcttgttacccctgtattagaccatatcaaacacacaaattccaatttcattctgtgaagtgtgttaatctagggtacagtgacgctcacaaaggctacaagtgccttagctccactggaagactctacatatccagaaatgtcatctttaatgaagatgactttccatttaggactggttttctcaataattatcagccagaaaaatccatctgtgttagtgttccatcttggtcagctttgtttcagtcaaataactcttctggtattcgaaactctgagcaatctgggacacaagcagctgcatctcaagttcctggagaagacaccttgaccatatcagattctagtgatcaaaaccaggtaatgcaaactgatccatctgctatttcctctggttttctcgaaaattcacctactggtattactcacagtccaaacagctccagcagtaactcaagacactcaccaactgatttaaatgatgtttctaatgagcctgcacaagaaacagtacctatagctccattccatcctatggtcacaagatccaaggcgggaattttcaaacctaaagtttatttggggcagtcccaatggaattgtgacaatgaagagcctactaatgttgaagaagctctcagacacaaaggttggaatagggccatgtcgactgagatgatagcactcaagagaaatggcacctggatcttagttccaagatcggaagggatgaacattattggaaacaaatgggtatacaaggtcaaattgaatgctgatagtacttttcagagatataaggcaagactagttgccaaggggtttaatcaaagaccaggaattgattttggtgagacctatagtcctgtggtgaaggcctcaactgttcgaattatactaacgattgctgttgctaaatcttgggatattagacagcttgacataaacaatgcattcctaaatggggagttgcaagaagatgtctacatggagcaacctcaagggtttgtagatgcttcaaaaccagatcatgtgtgtaagcttgttaagtctctctacggtttaaaacaagcaccaagggcttggtatgatagattgaaagcaactctcatcacttggaactttaaaaattccaaggccgattcatccttgttcttctacaaaattccagggttgattatcatggtgctaatctatgtggatgatattattgtgacagggaacaacactatcaaactcaatcagttcattaacaaacttcatgctgagttcgcttttaaaaagacctcgggcccttgcactatttccttgggatcgaggttcatagagatgagacaggtctctatctcaatcaaggaaagtatgttaaagagctcttgactagaactggaatgatgcatctgaagccgtgttcaactcctatgacagtcggcaaaccactgtcaaaagcagatggggaactgcttcacaacccgactgaatacagaagcattattggaggtcttcaatacctcacacacaccagacctgacctatcctttgctgttaataagttaagtcagttcctacaagctcctaccacagcacactggtcagcagcaaagagagttcttagatacctaaagggcacgatacatcatggcattcacatcaagacctctgacagacttgctattacaggttactcggatgccgattgggcatgttgtcctgatgatcgaaggagtgttgctggctattgtgtgtaccttggagacacacttgtatcctggtcatccaagaaacaggctgtagtatcaagatctagtacagagtccgaatatcgtgccctcgctcaagtctcagctgaaattgcttggattcaagccttacttcaagaatttgccttccctttgcactacacacctatcacatggtgtgacaacatgggagcaagtgctttggctgcaaatccagtgtatcacgcgcgcactaaacacgtagagttggatgttcatttagttcgagtacaaagtcctcagcaaatcacttgaaatacgatatgtgccatccagtgatcaaattgccgattgcttgacaaaaagcctcaccaatcacaggtttcatttcttggtggacaactaggagttgttgagacaccacctagcttgagatggggtgttaagaaatgaattctcccactgctgtatatctgctgtatattcttgctgaggtgtcataaccgttttgtaccattccctagactaacaaactttattccctttgtcagaatattccttgtattatttcaaaacgtgtgtaatgtgtacaataattattctagatgattcctgtatgtacctaccagtaaatataaatacaataggccagactcttattcattgagctgagcttttcattttcttgctttgtttcttcatctctctgtttactctgttttcgaactagaggtgtaatccagaaggtgtagacttcacttcaatgcccaaaaaatagtgcaaatctccaagatctttgagagagaacttgctgttaagagaaacaaccagatcatcgatagctttgttgctgctgcctgtgacaagtatgtcatcgacatacactaacactaaggtggtgtgagtggatgtgtgttgtatgaagagagaatgatctgattttgatggaacaaagcctagttggagtagacaatgatgaagtttgtcaaaccaagcacggggtgcttgttttaaaccatataaggctttatgcaacttgcatacaaggttgggaggagaggtaatctcaaaacccagagattggagcatgtagacttcttcattcaatgtgccatttaaaaaggcattattgacgtcaagttgtttgatttgccaaccattggaaatagcaagagacaacacaatccttattgtcacgggtttgacaaccgggctaaaagtttcagtaaaatcaaatcccggttgttgatgaaagcccttggcaacaagacgagctttgtatctattatgagtgccatctgagttctctttttctcgaaaaacccatttgcagcctatgggagttctgtcctcgggtaggggaaccaaagtgtaagtttcatttctagttaaacccaacatctcatctatcatggcttggttccattgttcttgctacatagcttctttgactgttcgaggaattttggaaaccaaataagctttaggcttgtgaatgcctgactttccccttgtttgcatagcatgcttgttggtagttgctgcttgtgatgctactgatttagaagcagtgacagtagtaacatcagtggcaggtgtagttacagcagtggtagtatgtggtgcaactggttcagcagcaacagatggtgttgtctcatgaatatcagcatttggagtgattgaaggaggttgagacctgatattgttgctgtataaagaaggagttcccataatattcgtttcctgttgagtgatagcagcagtggtatccctaacatgtgcaccaggtcttgattcctgtataggacatgaaaagcttgccacagatggcacaacattagtagtaacagcagtaggaacatcaagacaagatgaattaaatgtatgagacaaaggaatttgtgcaggtgtagcaaatacagaatacatgtaagaatcattggccacttggggaatggaagagaagggaaa

SEQ ID NO: 223592 - DNA, 1621 bp, Cannabis indica
cacataggagtaggtgttgaagctgttgcatccatgttagtgcgagccaaaatatctaaagtatatttggcttgtgtaagatagataccagagtggtttctggtgacttcaaatcccaaaaaatatcgtattgggccaaggtttttcagtgcaaattgttgatgtagttgggaaatcagatgatgaataaaggtggaatcttcacctgttagttatatattatcaacatatatcaatagtagagtatgtttgcatttctttcttagaaaaaaataatgaagtgccagccttcgagttgtgaaatccccattgcataagcgagtgtttgagcttatcaaaccaggcccgaggggcctattttaagccataaatggcttttgtgtaacttgcaaacatgattaggataagtagtattttaaaaaccagctggttaggccatataaacacattcttgtaggtccccatttaggaatgcattattgatatctatatgttgaataggctagtgatgtgttgttgcaagggagaaaataatcctgattgtgcatggcttgatgactagactaaatgtctcaaagtagtcaaggccaagggtttgttaaaatcctttggcaacaagcctggatttgtacatgtccacagtgttgtcagggttgtatttgattcgatgaacccatttattattaagaactgtcataccaggttaaaagggaacaagactccatgttttatttttgacaagtgcagtgatttcactttgcattgcactaaaccaaaatgggtcttgaagagctgctttaagtgtcttgggttcaatgttgatattagaggaggttgtgagagctttaggcttatgaataccagctttggcgcttgtaaccatgggatgtctgttgactggttgagaaggttaagaaacaatggaaggttgagtttggattctgtcaacatgatgtagtgttggttctggttcatggtcaacatgtggttgagaagggtactgacaggaggagggtgatttaaggtaggggaaataagagatgctggtgaggtgggaatggttgtggttggggctattggttgttgttgtagtggtggtggagaattaggaggtgaatgatgtggtggagcaagtgggtgtgtagtctgtggagggaggacagttgatggtggtgaaggaataaggaagatacttgtttgggttaaaggtgaaataggtgggacgattgctggtttgggaaatagggtgtggtaggggaaattattctcattgaatttgacagctcgagctatgtaaattctgcctgagagatgcatacagttgtaccctttatggctgggactgtaaccaagaaacaggcaatgagctgttcgaaaggccagtttatggttctggtatggcttgagtaagggataacaagaggaaccaaaagtcttaggaaaattgtaatcatgtttttgatgaaatggtacctcaaaaaggatttatgaattgcaaaactggggttggatgtcgattaatggtatatgcagctgtggtgaaagcatcccacgagtgtgttaatgacatttgtgccagtgccagaaaagaaaggcccatatcgacaacatgtcgatgttt

SEQ ID NO: 223593 - DNA, 3570 bp, Cannabis indica
aggcaacaagaagttcgagtggaaagaagaatgtaagaatgatttccaagaactaaaaagacaacttgcaaaataaataataagaatatataataacatgaataatataccgaatatgaacactctttaaaattaaataaatttaatttctattattctctacagagaatgatgaacaagaaatacatgtctaacgtgtttaaataacattagtcattttcattgtcattcttatactttgatgtttcaatacaattttcttaatattctttttgggtattcaaaacctactataaaattgtatcaataataattattttaatgattctttagttgtattcacataaatacaatattttcgacaaatagaaaatatttacttcaggaaatatttaccaaaatttatatcaatattagactactttttattgtcatcaaagaatacaagaacatatatatgaatatgtatttatctcttttattatatttcagtcatctttatgatgaatattatgtttgcataatctttatgatatatgtaaaattttatcgagtacgcataattttcaagatgtatgcataatttatatatattctctatcatattatagataaataataaaagcatataatatatataagaatttaataataaatatatgagaataaaaatatatacatacatatataatatataaatatataaataaaaaagaaaaaaaattagttctttataacagtcagatgagtatatatataaatttatatttagtgtatctgatcgtaaaacaactaaggaactttaacaaaatatttactttgaggcttgagtggagactcatgctgataaaattaatatagaatagaatagagaaataaataaataagagagagcaaatagaagaatagaatgagagagtaaatgaaaattttctcagttgtttattctaacaggataaacctctatttataactaaaagaataaaaaactaaatttatataataaaaaaaaataaaagtcaagcgtgataatttagacatttatatataatattttataacaatattcccttttttttacgagataagttgatgaatacatctttttcgtatttattaattaaaaatacttttatattaaatttcattaaaatgtaccgcttttatgagtgggttgtccaatatactctcattatccacttaaatctagcacttaatttatattaatctaaggagtataatggggatatcatctataaaaataagtatatcttaaagtataaacataaaattaaaacaaataaaataagggaaatatacatggtatactaacttttatcaattttttacaaaaatactcccaagcggtatttttatttttttactgtattttttttataagtttcatactgcagtatactgtgttaagtttcactggtgttctactggtgttttactagtgttttactgttgttttgagttatattactttgtattttactggtgttttataaaaacacagtatttttgaaaaaatttccgtgtgacagtatttttgtaaaagttaacccaaattttagtatttttataaatttccctaaaataaaatgagtatacaatataatttttttttttttaatacttttgggctgtataaactatgacgggccgagcccagttcattaacttacggactacgtcaacgcggggtggttttgacttaacctggactttatgacatggagttcaaagatgagaagcatcctactcaacgtttcttattgttgacacgtgtcttatatgcttttggaggaaaattcctctaaatgagcccttttgttaacactaggtagccttccattatatctctacatacggcacattgtggacaatattatcctcaagaacttttttttttgcaatgattatcccctcaaggattaaagtcgtccaacaatattaatggctaaacaagagtcgtccttactagaactctcaatttaatttgacttagtcaacagacaagtttttggtggcaaaaacgctacaaatttgcgcatgaatagagttgggttccgagcaagttcctttcattgtagccgtctcaaagtccacccagtagtcagtctcctctgtcacttgctgacttttatggaaccataacgactaaacctatgctaataattattaattttattattttaacaagactaataatatatcaccttcttcccctctctgtctctggtttacgtttagaatggagttttggctcaagatggacaacgttcatcaagcttctcaaatggaatatcttcgttaatggcgcttgttgtctaaatacttcaattattgctttttatttcgtgcgctgttttttttttttttggaggtagtcggcaatggcagccattttcagaaaattgcgtccaacagccacttcttcagttcccgttcacgaggaagaagatacttttaacgttgaatactctatagccttggaatatcatggccctcccgtaacttacaatattccacacgctgcccccgttgactttgaccacatcccaacagccgcagcggccaccgtggtcgcttcggcctctctgctcaacgattcttcagtcccggtaattcaaccaatcatgaaaaggaaggcggagactcgacctgaagcggtgacccaagctgtgattcgttcaaactcaaacaaagacccaaggttaacagagagtagtctcagattttctggcaacctacaaatatccgatgacattctcggcgctggagaggaagctaatgaaggttttgaggattacatgaaccccacgaactgggaatcgacggaatctggtttaagctcgcggagtctctcgtctgaggttttctctcacaaggcggaagacgaagactgcggaggtgagactcctcaccatgtgagaaggatttcagtggtgacgttccgcgatccggactcgaacgacgtcgttgagaatacagagtggagtgagtatggtgaggttcaggctgtggaacagaggcctgtagccgtgagaacagggaaaaaggggtcctgttatagatgccatacagggaatcgattcactgagaaagaggtttgcattgtgtgtggagctaagtactgtgccagttgtgtgctcagagctatggggtcaatgcctgaaggaagaaaatgcgttacctgtattggttataggattgatgaatcaagaagatggacactgggaaagcgttcaaggttgcttaagagattactcactgatttagaggtagagcagataatgaaatcggagttgttgagtaaagccaatcagcttccttcaaatttggtctttgttaatggcgagcctcttagtcaagaagagttggttcggttgcagagttgctcaaacccaccaagaaagttaaaacccggttcttattggtacgataatgtgtcaggcttttggggaaagtgagaaatggaaaaaagaaaggaaaaaattgtttaggtatattgtcctgttttctgagtttttgattgttgtgagtggcgtcacattacgtgtc

SEQ ID NO: 223594 - DNA, 2008 bp, Cannabis indica
  modified_base (1910)..(1910): a, c, t, g, unknown or other
tgcttttcttactgagtctatcgactcacagttattgtttgcatgtgtaggtaagggcaaggctaaggctgagcagccgtgagagcgagtagatgaaaattgtacatgtcaggacggttagacctgcagcatacaatctttgtgacagcttgttgtattttgtattgtcgctaggcaacaacttttgtatcacagttgtaaacattttaaacacgggatttggctatataaaagttattttttatcaaatcaatagtaattaagttattcaaaaaaaaaaaatagtaattaagtaaaattttaattattcatgaatttcaataagcctgttgattagcaacagattgcacaattaatataaaatcacgatagcacgcctaaactagtaaggtattataatttggtatcaaagtcgccaggttgtgttccaaaggtcgtcacgacatgtacaatcatcattagagataagctcgactcatggttcagtaagtctttattgctttagcagtttatcttattactatgttataagaaaagcctgataggaagcatgtagtagccgaatagctgaatatgcgcatgttttaatttttaaaataagcgataattagtaaattattcttgatcgcaatctgaccaggctagctcttagttttgtaggctgttctattagaatggatgccaggcaaaatacaagaagctagggtaactccatcggatctaatggcgatcagagagttcaatttcccctgaatatacgtggccgaggtagaggccctagaggcagggcacacgatcggggagatgttaacctggcgcatgctacctaggattgggaaaataggtttgcaacaatgaaagccagaattattgaacaagacgaagagatcaaacgcttgaggtaggagggtgctcttgcaatgcatgctcctaaaatgcaaatggttcctacccctgctttgtaggcgggaccggttgctgctgtgaaccggatggaatcactgtacgaaaggctccgcaagcaagcacctccagtctttttgggaggtctagatgtgatgaaagtcgaatagtggttgatagttattacacggattttgaattttatatgtgtcaccgataacaacagagtggcttgtgccacattccaattctaggaagatgccctggtttggtgggatatggtggctcttacatgggatgttactaccattacctgagaagagttccaggaattgttcaatgcaaagtattacaacgaggtagttagaagtgcaaaaaggaaagagtttactcagctgactcagaaagagaatatgaccattactgagtatacaacccaattaaatagattggctaggttgacctcgtgaattgtgtcaaccgaatttattaagaaagagaagtatctggatggattgagccctaagattaaacacgacctcatgatcaccacagatgataacaccacctatgctgatatgggtggaaaagcactgtgagctgagggcacagttgagtgcatctaggagtcccgagggactcaggttgttggtggagccactgctcctcctacctcaggttgttggttgagccactgctcctcctacctcgtggcaaccgtcaaggtgcttctaaaacctgatacacttaccttgaatgtcctaactataagaagcaccatctgagtgagtgtaaatggcgagaatgtttccagtgtggtttgcttaggcactacaagagggattacccgcaactcaagaaagaagagtagaagatagcagcaaagcccgccccaacaagggtgtttgctcttacgcaggctgatgcagaggctagcccctcagatgttacagatcaactcttggtcaataactcatatttctccatattgtttgactctgggcccnctcattcatatgtggtagctaaaattttgataaattgggtagaccatttaaaggttatgataagaggtttggaaccctactgcttggtggagattagt

SEQ ID NO: 223595 - DNA, 1088 bp, Cannabis indica
taatttttaaaaattactcttaggggtttgattggaatgggaatactaagtctaacctatgcatggtatgcattttttgtttttttgagtggagtgttgagtttaccgtgggttactcctgcctttataatactgagggaaagttaacatcaagctcgacgctgaggtcagtataattgaatatttgttgtaataattgaatctttcaaattctttcggctaatttctacttgattgcattgcaatcttaagtttttttggtgacttgtgacatgatttattaacagtcttgtctgaaacgcaaaatgcaccattcttggagaaacagcatgttgatgtgtcttacttatgaatgcatgtccgattattaatattgtttgtctaacctggctgcttattgtacttgatttctttcatcagaatatagatagatgtgtatatattcactgatttttgtaagaccagtgtatgtgtatttttgaactctttaaactgactagttgcaaaaggttggggtgtatccctctttgtgcatctgctgttattgcttcagatttgtattaacttgatctttgagtttttagcaatatagaaatggtgcaagaagtgtaatattcgataatagcagatttgtattactaactcgtgtatgtaattatattttatatgttttcaatatatagttattgagaccccttttcaaattgtaagctttagtttagcttaataaactgtacttataagattgtttcatcattttcagtagaatgaactcaagcatcataaaaagtacttttttgaatgagtattgatgaaaattgcctattttgtttagattagagaaagaccccttttgtcttctttctactctgtttataaaacatgtttttactataactaatttaatgatttttggtataaagtaggacaaaccctcagtaaattatgttcactttttttggagtccttgcagtgacggacccaggatttttactttgtggggacttattattagaatttgtgtatatttcagtttaggcagatcagttattttctgttttttccttttactgttgtttccttctttc

SEQ ID NO: 223596 - DNA, 937 bp, Cannabis indica
cttgatcacttggggggcacctataattgtacaaagcatttggtaaagagagttgcacgatgattataaacagagaatgaaattcattaaagataacaaaagcatgtaatatcgggattaaaagctgcccagtcagccagttgtctataaaatgaaaaataattccaagtttaaagactgcttggcctgtcgcgatgtcttaaaaaaaaggtcttatggccggaaagatatataaaagttcttatggccggaaagaaagataaaaagagaagtatttaaatagctggagtcccaggctcttggttcgggtcttcagggccggtaggagctggaggatctgttgtctgagtggggggcacgtcaacgttctgaccagaagtagaagtggtcgccttaggttcaccataggccacttgggaagcacagtactcgagatacatgtctttggcctctcccatgtaatcaaaattggcctgagggttagccttccaaaagtcataaaaaaatctcgagaccagctgtctctaaggcatttactttttctcccagcctcgtcatctctgctctttgttgttcagcttccaatttgtacttctcaaactcacttgtaaggtccccctccttataattcttctctgcttccagccgacggaagacagcccgaagaactcccctttcctcttgaagactattcacttcttttgagaaagtggcgatggtagcttcaagttgatcataagcctcgaggtccatagtcaactcggttactttcctctcagcagtaaagagcttcttgttgacttcacctagctccatacggacagctcttagtttcaccaaagagtcattagcatctttcctggccaagtccacctctacgctcatggtctttgacatggcagcgttcttggagacaacagacttagctcgggaatag

SEQ ID NO: 223597 - DNA, 1496 bp, Cannabis indica
aaatgcacaaccgaacccggtttttgggtgttcggatgtgtcgggtattgggtcaggctcttcgggtttggcatagtcgggttcgggtcctattgggctgagcccaaatgtttaatttctgggttgaaatgaaatttaatttttaaaaatatcatttttttatgagtaatttgcggtataaatacctaagtttatcagtcggttgcagtttaatacctaagttaaaattttggcggtaaaaataccttctgttacagttttagaagttccgtaagtaccttgccgttttctgacacactaagtgactgatggcaagacacgtcatttaaaataatgacacgtcatttaaaataatgacacatcatcaatactaatttgccacatcaattaaatccgaaataaataaaaaaaagttaacaattattttttttctaataagatttaacaaaaattaaaactgaaagaaaaaactaaattatttataaaataaattcccaaatcttgaggcaatagagtcggagagagaaagtaacacaaccttcttctccgaccacgggaacccatcaatcgacaacgaacaccaatacaagttccatcttcgccgaccacgagtatcgttcgaggttccatcttctccgaccatggccatcaattaagggaggaagctgggatttaacagttatgtttgagaaacgaatggggcgatgagtattcgattacaaaccaccatgagaagttgtggttcgcacctcaaagacagtgaagaacccaggtcgaaggttcaagtgttgcagtacattcaaggtttaaattgtgcgctatttggtgtttctttcctttgtctgatctttcctgggtttgagtttttatcattgttattaatccatctttcctattaatacatatatataagtttttattctgggttaaaaaattgcttccctaggttttaatttgatttttgggttttggtttgattttgtaatcttttgaacaagattgtgcaaaaccagaaaaatctccaaaaccaatagcaaacccccctaaaaaatatcaaaatccaaaaaatttcactcgaaatcttagtttgctcctcactcaaagacgttgaagaagatgcaatcaatcgatggagaggtcggagatagagaacctcgaacgatggtcttctttgaagaagatggaattgctagtcttctccccaaagaatttgtccatctccattgtgtttctaagatttttttttttaatgttttttgagttttttgtttgaaagaaacgtctatttagttttcctttgcagtattactagatttaatataaaacatagaatttacatttttgtttttgagtttttgtttccaggttttacaatttagattttaatgttagtttttgtttcaattaatgtattgattttgcaattcagattttaggtacatagatttatattaattgtattaattttttattttcaaatatatttgttagtttaa

SEQ ID NO: 223598 - DNA, 1129 bp, Cannabis indica
acctatattcctataaatagaggtaagaattccacagataaggggacgaaaaaacttagagaaaaagattactaattgtaatattgtatcaaatactcagaaatatcttaaataagatagactcgtggagtatgcatatttaactgtaaaactacataaaattcttggtgttattcttatatttatacattataatctatgttaaatttattacaaaaaaatgctcattattcgttaacgaaagttttcgttaacagtttggtgctttcattgagagcctacgtgataaaactcagaaaaaatccctccttacaaacaaaatctgaccatggctgattataatcaaaatgataatagtcatcttgaagagactacacatcatcttgggaaagaactaatgggttcacagaggccacccactccaataaacaacaagttcaagaaggaatcatggtggtaataatcaaaacccaaaaggaaggaacgaagaaatcaatactaacactggttatgtacccagaagtgaggacgcttatgatcccactaggtatgtaccattagtagaattagaaaacagataacttcggcaacacttacccgagtctaactaacgaaacgctgagttggaaagagaggttgcagcggccagggagactcaaggaaacaatgcacaaaatcaacttgatcctggagtaagaagaccacgaggtaggcctcgggttcaagaaccaggaggcaggtggaaaatcaagaaaattcccaaaacaccaaggatttatgaatcaggggaataaaaacaatgatatgccagagtcttctcgtagaaacgagaacataaggcaacctagaactagggaacaggaaatccatcgtaataacgagagaaatcctaggactcaacctaggataagtgggttaccacagagacaccccaacgtccttctcgaactgatagggaggaggcatacacatacctaaacagagggtgtgtatctaacccttttcgaaggagaaggcctgtacatgacgaggcaagttctagatcgggacattcaaggtctcgggggaaaaattgaccaggaaggcaaacacgagaaagaagcagatcacggcgttatgctgatcaaga

SEQ ID NO: 223599 - DNA, 2492 bp, Cannabis indica
tctaatcgtcaatggtggaatcgcttctggactctaaaactacctaagaaagtcaagatttttgcatggcgtttcattaatgatgctcttccaactgctgccaacttgatgcaccgtaaaattgccacttcctcagcttgttcactctgtttatgtgcttgggaatctgttggccatgcattttttgctgtacgcgtgctaaagctgtgtggaaaatttcaaagtgccaagttcagatgcctaacattggtaaccttaaaggttttgatattttctcctatcttgctaatgtaaataaggacgctgatttggagagaattatatgtattatgtggtgtatttcgactgagcgaaataaggagattcatgggtctaagcctaagattgcagaggtgatttgtagctattcggacacatatcttgctcaatatctttcggctactgctgctgccactcatccgtatgcagctgctgcaacaagttgcagcaacctgtcggttcatacctctcatcaaaagaccattccgaaatggcagccacctgggaaagacatgtataaattgaatattgatgctgctattgattcaaagggtgctattattggagtaggggctcttattcgaacggatgcaggggatgtagttgctggactctccaaagtatgcaaaggctgttgctcaccaagggaaatggaagctttggctatgtttcacggtttgcaaagggcattgatgcataactttccactcaatttcattgacactgattctctcctattgtctaatgctctcaattgtttatcttctactaagtgtataactccttttcatgatttggtagaggatattaattatcttatgtccttttttcctagagtaaaggtatctcatgttaaaagagatgctaaccaagcggctcatggcttagctaagtttgctcttcgattggacaaagatatggtgtggttgggtgaaattccatccccaatcgtttctgttgttgttgctgattattctcattaataataacagatgttttacaaaaaaaaaaaaaaagtgtagagactgtagcaaatatacccattttggcagttgtatattgatcacttcttaaaatgacaatcttgaatgatgaagcacgatatataataccactcttaaatccaactgcccaatgtagtgaaaagtaatttttggagttaaaacacaggagagaaaataaagaggagttaaagaaaaaatttcaaagtgcaatacataacttggtaaaagaaatagaaaaataacattaaataatttagaccacgttatttttcattaatggtcatcaacttttaaaaattaatcattttgaaaatttggttacgagttacttaaaaagtgtaataagtaataactgtaaagagataatttaaaccaaaataaagttgtctttaatgcaaaagttgaaatcccaaacgaccaaacaataaaaaacaaaataagtcttggtacataaaatttgcgaaaagtaatgtaaccaaaaacacaaggtttttttttctattaaaataaaaaacacaagattttttttttttttttttaaagtaaagcgaaaaacataagttcttaaaagaaaataagagactgaaatagtgtgttgttgaaagacatgaacgacttggcaaccgtacaagtcggatttgtcacattatgcataactcggactacgagatcccccatatcagctaccgactccatcctattccttagcttttaatcccatacctacacatacaaaccacaacaacaactcataaattattagagaaacccaataaattaatcacaacaactatgtataactcaacaacctaaaacgtattcatagtcataagtactgttaatgcaattatatgacaccaaatcatcaactataaatgtcatcaggctaagtagaaggtgatcaatcttaagagcagctccaatgatccatttattatcgttgctcaacagagcatgtcagggattgagctacctttgatatggtaactacttcacagaaattgataataacttttatttagaaaaataacattaaataatttagaccacctcaaattactcaagatctaatccatcaaaacctgatttcaatcataaattaaagatccaaaacaactcagaattttgataatcaaaactagatcaaatataaagacataaaactatagatcttgaatctgaaatggtatatgctttcttttcctctttggtttcatactttctacaaacaaagacaatagaatcaccgttcttaatcttaatcaaattcttgaccagaattgtcaagttttcctaagtttttctctcaaagtctctctctgcttactctagctttattcaagttgtaacttctctttttcctttccttcaccattttggctccctattgggtgcacacactagcaaatgtgtcacacttagtcatattttcattcaccaagaaataat

SEQ ID NO: 223600 - DNA, 2080 bp, Cannabis indica
acccttcatatgtctcccaggtgtctcccctctaagtttagttgatttggtcttctctaggtcctggagggatgacagggctttcgggtcccagacgataatctgccttgtggtaaatttttgggccttacccggatctagacctctcccgagtttgtttactctttccgtcactttctgcaattaatgggacttaattggtaattacatagattgtcaccttctaccttttgtcacgtgtccttcatctgaaaatacagataatatttatccccaaaattctgagactcttgagtggtggaagcttgcagcctccttctagattattagggtacacttgggacacgtggacgaatctcaagaatgcagaggcatctcattcatccgacacttataagttgagatatcaaaaaaaattatggtaaacaactggtagtccacgcgtgtcacacatcctttggatctgtgaatagtatgcgcctgtaggaagcacgtttattgcaagaaacctcaaatggtggtagagttatgatgtggtgactctttaatgtgtagggagcccgactcaaatgatgatgattaaatgccttgattctgccaaggagcattaaatacagtcttctcaactcaccaatcgttggatcactttgtgctttttagcttatttcatctaggcctttgattttaaatcacatggacttatttatccattataaataggcacgaaacccccactgtttccctttttttttttatcatttccaagctttttgaatccattcgctttcaaattcaaaccatagctttccttctctgaacttaaggccaaagaaacttcgagcccaagcctcttttttgccagtggatgtagagagttgataccatcataaatcaccttcttcaaaatcgtgcaagaaattttccagacatattacctttagaactcagtgcgaaccacctttaatcagatgaagattttgacatattcgaccgagttattaatcgggcacttgactttcagaccttccacaacaaccatatcctttcttcgaaccataatacaagtaagttttctgaacttgttgaaatttttgatttcaagctagggtagaaatttttgttcaagctataatctgaattgattttgcatgtgactattaagaagaatttctaggagattattaagtatggaaatgtttaggtatgagtttgtcttgccatgagtatgcttgtgtgtttttgttctgggtaaattggtttgagagcttgaatcttgcaggggtaattttcatgaatttaggttgttctctatttaccaattcggagttattagggctttgaatggtgttattttctggcttcttgttgctctatgattttccatgggttcccaacctaatatttagaggcaacatttcacgaggaagatgcttccgagtgatgggtccagaggggacctctctgagcaatttcgggggaggctttccccaatatccttactgtccttaagatatagggtatttattttcttggatttctttttcttttcatttccagtggctggtctcaagaatgagttcaatcttgaggccatggaccttgaggcagtagaggttgaggctcctatggagggaccacaagaagaccctacccttgaagctgctcctaatgggaggcaaaagaaagcgaaggtgaaagcccaagcagagactccacccctaactcccattgtgtacaatacttccatctaggagatggatcagaataccaataaattcagagtgtatggcatgatggagaaactgtctgccaaggggggagtccataatattcccgaactggtgtggaacaagctatcaatcacgggagaatcttcttcctggagcactaacgtgtttggtacttggagcttggcccacagatcaagcggggcacacttacccctaatgacttatttcgtggaactctgtgcgaagattggaatcactcatttctagttgattccattgtcttagaagtttctatccgggtggtacgcactatgtaagatgataaacgttgaagtcccaagtcagagaaa

SEQ ID NO: 223601 - DNA, 2028 bp, Cannabis indica
acataattattaatatttataacaaaaaaaagtttttagttatatataaaaatgtatgagaaaatgataacaagtttttttgaatatattttgtaattaattaaaataatgtatacaaaattgtaaaatgcccaaaaaaaaacatctattaggtatttttcccctatttttttgggtctccttcacctttaaaatgagagctcccttagcttattttttactttcaaaaaactacccacaaggtcagagcttctctctctacaaattggagcttttgaaacttagccttttttataataccatctcatgagaaataaaaacttgaaatagacatagctccatgactgtcacgatagagggagtgaactactataaatttgttgtgtctctcttataattacttaacaactattttattctcgctaacctagcgagcgggtgtggcttagaagtctagtctacaattctgagtcaacattttggtactttcattgagagccataacttaagaaagttactaacaagatggttgcaacaccataattggccaattaaatgggggcacaccaattgatggagttggaactggaactactcctacatcacaggtgtcagagcaggccttagaactagctcctcaactcctaaggccaccaaatgctcttggggctagtacaaatgaccagatcccacctggggagcctcacgtagagattgatgaccctgaggaggtcgatcctcccaactcagccaaattgtggctgacttgcaacaatagctgtgagactctcctaataatcaacatgaacagtttcaacactagttcgtggaaaactagaggaacattgaaagccaacgtgtggagaaggtatagtggagagctaacttgtctcaacagtttagagaagcttattgctctaatcgcggaactactccccatttgggtcttttcgagctgctgagagagactccatgtcaaccaactggtcacgtgggaacttgtgctcaagaggagacccttaatgctcagaatgccactaccacacctggtaaccgagcaggcactaagcaaacaccaggcatggagagtttttagaggggaagtacctttgattaagagcccgaaaggaatcaagcttgtgggcgccaaccaatgggacctccacttgctattgaacaaccttgtaacaccaagagaacaaccagaactccaccaagtccttctcgataatctcatgacaccaagccccgagaccctacaaagggaaagggacctgctaccgaaactaaaagaggtagtatgagacactactttaaaattggaggctacgatatctgacgtgtaaggaccaataaaccacttcatactcgaaaatacttctaagatgaaagggctaattatgctgttactttgcccatggccccaatgagcaacattatgattacttccctaaagtacatggagaggagttgaacttgaacaaccagttcaattctcttcacacttgtgatcctattgaagactactttgagggaagtagccactacaatgctctaaatgaacactcctatagcggatcgtcccgagacaatccagatttcattccggagacttcaccaattttgccttcatgaccctgtggtcaggagacaacaaaaaaacccaagttgaccaaagtgcaagatcgacttggaagaccaagagtcctgcgtgacctcttgaccaagaaaaggacagtggaagtgggaacttctagaagagaccctactcgggtaaaaaaacctccaactaggatgcagaccaccactcatagggtcaaatgggcataatttgatatataccttggcaactttagtgaaggggatcacgactcctaagttatttgaattcaaacttcatagagagtggcgctcaccgctatttgaatgaatcaaagctcttcatatccctttgaagttaaagaacccttcctaacatcaatacaccgagaaagaacatctgttatctcacattcactactttgaagt

SEQ ID NO: 223602 - DNA, 2580 bp, Cannabis indica
tagaagtttaaaaaaaaaaaaaaaagaaagaaagaaagaaaaaagaaagagagatagtgaatcatagtgatttcaaagtgtttttgttggggaactgttaatatttcattattttattttaatagaggtgacaaaatgtatgaaggaatttactctcatagaactattttttttttaataaaaaaaattacagatttgcctttttcatagcattaattttttattgcattatttatttattttatttaaaaaaataatagtgaattacaacaatttttttatctattttttttttctatcaatttgtctaacatttttttttcgagcaaatttggtaatccaaacaaggacttgtagaaatggtaagtatataagaccaactccaatagtatatgtaaatattttatgttatatttgctataaaaaattaatatgagttaatttggcataatatttagctaagcctccaatacaaaatagtagatgttgatgcaatatttaattttttttttattaatgcttaatatttattaaatatataaccaaaaaaaaaaaaattccttgtatttttttattttttacacaatttttccttatattttattggtcatagagtaataaagtaagaaagttaacattttaattatcaaaagaccctaattacctaagaaaaatgtgataactaaagataaataaattaataataatatatggaaattaataataataataaaaaaggtatgaaatatgcactaccaaattaatttaacacaattttgactttaataaaataaagttcttgaatttttaatatttaaatcattaatttttgtatatacaaatatagatatattattgtatttaatttgaaataaattgtactcttaagagaaaaatgatagagaattatacgatagaattgttaaaataatatgaaatactaaattaattcataatacatattgtcagtccaaccacaatcaaggtgatcatgtgaaattatttaagggactgtggcccatatcggtgccattgatactgattgggaatttgggataatatatttcctacctatttatttatagtcacattgcagtcttttcatggttaatttatcttacattaataatattgcaattcgcaaataaatggtaaaaaaaaactgcatttataattttagttgaattgcgcatttgatatttatgtaaaaaaaatcatatcctcataaatccaaacctaattaatatcaagtcaaaagtaaggaaaacaaaatagaaataaaataacaaaatcaagtcacacaaaatactaattgtatatataggcgagagtacccacagcagagaggccagatgaccaaatcttgttaagaatatttttatacatttgtctcgttcatatacatctacatataatgtatatatgccattttgttttattctttttgcaattatatataatattatgatggcacgtttgacaaaatttagaatttaacataattacaaaaaaacttttgaaggtgtgggtaaacaatatataatttttgtataattatgattattaacttattaaaaaattgagataaaagttcttaaaaaatttattctaatgtagataattctctaattttaaaaaatagcagtaatagtcactaagtatgaaatttttgtaagtctattgattcttattttaatagatccatttgttgcttccaaaaatatcatgtgttaatattaaattacaatataaattcttaaaaagttcactttaatgtatataagtctcaaatttcgaaaaattatggtaatagctccaaccttaagattcttttttcgtcaatgaagggtattttcagtgagaacaaattttgccaatggagagtgtttttttcgtcattgatgattatcaatgacaatgtgtcgtcactaaaaggttatcgttgataactcgttgctgaaaataagtatcaataatgacattcaaggtcctcgttgaaaataaatatcagggacaatagtatagtcatttataattttataatatgttttttatatatatttttaaatattgggattgacgacttagtctaagtcatcactaattatactattaatgactactaagtcttttgggatacgtattagttttttaaaaaataaattttgatatatataataattgttgtttgatttttttttttgttggggtaaccgataaaggttaagataacaacggtaacaaaagttacacagaaggaggggggatttcttccatccaagaaagttcattgtctatctaagggcatgcttagccaatctatgagcctcaacattaaagttgcggctaacatgagaaagagatgccccaggaaaactagacaataggactttaatatcagaaaagataacccccagttcatttaaatacacagtctggccctccaaagctgagaccaaagaaagtgaatcagaaaaaactctctccacgggaagtcccacatcttgagcccaacgcaaacctactagtaaagcaactgcttctgcctggaaaactgaaaaggaacctgcaaatgagata

SEQ ID NO: 223603 - DNA, 1370 bp, Cannabis indica
ctaacaagtatgttggattaacaacctaatatgaaaacttaaatttcggaacgagttttctctgtttttctctctctttcggtgactcaccggggctatggcaaaaagggggaaaatggccgggaaaatcaaaaccaaggggaagaaaactggtccatcttcatcggacagagttttaaaactaggtccatggatgcgctgattggaattcaagaattagagattgatgaagatgtagatgagattgaagatctgaaacagagtgatgaggcaatggaacagtgcctggatgatgcgccttcgccggtaagtgaagttcatcccgacttctctgattggctcacgggggcaaaccgtgcttctcaggatgtgagaatggggaagaatccttctcctccaattctcagatctaatgttgcacgtaacctagaatcttgctttgaaatgaatactgggaagaaggctgagacacgaccgagggttgctgatgctggtgcgaaaatgactgggaaggtgaagattgactttgccgatattgctgaggaggtaaactactggcagccgtcgattgtgtgctatgtgattggagctaatcctccaatcaacatactggatggttttgttcgcaggatatggaaggatgcagttgtgaaagttggtttgcttgctagaggcatttttattatccggtttcaaaatttggagaccagggatcgaatattggagcaagggtatgttttctttgataggaagccaatggtaatgaaaccatggaactcggtggatgatttcaccaaggaggaagtcacttcggtacctacctgggtccaattgcaaggattggatatcaaatattggggtgagtcttctttgttcaagatagtggggcagttgggagagccactccaagttgatcaagttacaaagagcagggataggcttcaatatcccagagtgctaattcaggtgagtctatctcaagaatttcctaaacagatttcatttattgatgaatttgaccatgagatagtgttggatgttaagtatgagtggattcctttggtttgttataattgctcgggcataggtcatgatacccaatcgtgtaggaagaaagagagtaaggaggaagctgtgaaacaagtatggatgcctaaaaaatcgaatggaatgatgcagaaccatgtggatgcagagggctttcaaagggtcacaaagggaaagagagtattagaggagagagtagaagtggatactgtgattaataatagatttgggtctttggaagaggtaaatggtgtgatagttggggaagagtgtaacataggaggggggggagatccctctacttctaatggatagactcttat

SEQ ID NO: 223604 - DNA, 6826 bp, Cannabis indica
aaaaaaaatgtgaaatgaagctagatttagtcattttttctttagttctcttgtaagggaattaactttttgtgataataaaagctctaagtagacgtagctctatgaccttcatgtcagggggagtgaactactataattgtggtgttcttttttttactttttgttcatacattcattggctgctatcgcttatcaaaaagtatagagttgatcagtttttagcgtcaatagtactgtagcaaatattctataactattcagtaactacagaccaacaaaccagaaaaaaattgaagttctattaaattaaatcacacaaagtttttatacgtggtatcaaaaatctttgtagattgctactagtccacatggtcacgtcgagagataagattcattagtaagatctcaaaaatataaagtttttgacttatgcataaatatactgcctctaattgtatgccatgagcttgatgtattccacattcatgaatgaacctatctgaaccttcacgaacttgaactccattcaatctgcttgaaaagtgcctgcttccttccaaggtaagacttaaaccaccttctcccaaaggcttgaagaactttctcctgaaggcttttcacttagtaatcttctcttttatttaatttttttgcaaactcaatccaattataaagacataaaaatagcagagatatagcagaacgaactatactctatatcaaagatttttttttttcacaatataagaatgaaatacaaaacaaataattaaccctagcagccaattgttaaagtttatgccctaaaagtaagtatttaatagataatatactagagtatattataaatgaatatgttaattatataatataattaataaatatcaaaaaatttcatattgaattcaattatttagttatttatttcaattcatatttaaatgaataaatatttatttttattttattggattaattaaaaatatatattgtttaccgagatttttgaaaactaattatgaaagtaaataagcgcttaagaaataaataaattaaagatacagagaactagatttttacgtggtttgagtgttaatgaactctagtccaagagtcaaggttattaagctagaaaagctctaaagtatttcttacaaatatttacgccgtagttgaagaatcctaattcttagttcttcttcccataactcaatatctctccattcacatgaagaagtaatgttctatttatagggaagaaccaggtatgagcatacccaaactcggtaggatttaagagtatcaactaggtcctttgatggggtaataatgaaatcatgcatgtgtaagaggtattagtataaataaaataaaatcaaagataaaaatgtaagagtagccttgtaaggatatgggggtaatatttttaagtttttgtatttttcatgtaaataatccttttaattatcatctagcattaagtagatgtttttaaatatagagaaatcaaagcctttgctctaggaaaccccatggcaaaacccacctagaagcttcaacaactttcttttctccaaattttttcctacattcttaaagatccagcttgggaatttagttcttgttgggaagagaagtgattgtggaagcttgtcaagttctttatcaaaggtaagagcttttattttaagagaaaactctatagttaagtttaagttgtaagtgaatttctagttgtatgagattggtgttaatgaataggaataggctcttttttgtttttaagttaagagtatcaagttttaaagagttgtagctagctgaaatatgttttaaagataaagctaaagcttagttttctaatggtagtttgtgagctatggaattaaattatgttttgagttgtgggttatattatattggtgttattgaactattttaaggagtttgggaaggattgattaagaattgagtatgttagagaagatgggaactcgaaattttttcagttgtagattctaggcagaaccgggcacccggttgtagcaactagtactcggttgttctaataggtttgtaataccggttactcggttgtagttctgggtaccctgttgggcaatcttgggggtacctcaattttcatgtttattaggatatttaggatatttctaccctatttattgacagagaaactttagattatgtactttagtagtagaaagtgttttagtgagacactttacagtttaccgttgtcatgatttagggtctccgatcgctgaacaaaattccacttaagtttaccggcacacatgattatggatactagataaaaaaaattattcagatgtacatatgcacatgtttaatacacattgttatacctaaatttcggctagcaataagaagttgacacatgtagcagggctggaatatgaaccaacacaaatcatgcattatttaaatacacattaaataaatcgtcttagaaattacagttaatagaaatattcgaactcgccgacatataggcaatagcatgatgtgagtaataactattgactagtgagactggcgagacaataagtctatctcaggataaatagaatatacaatgaaagatgttctgaacaaataaattcaaagggcttatagctcattaatctacatactcatgagtaagagcttgtaactcattgatccacatactcgtgatagtatgctttgggaatagaaacaacttcaacgtttattcacctcgcttttgacgtatagaagtaactacctcgctaatatctttcaaacgacaaaggagaaccgcgagatgcattgaatcttaacacttaatattttttcctacaaagatggttaaggaagataacatgcaattggcaataatcattcaacacaatcaacataactgtctatggataaagacaaagagcagttgaacggttatttaatattatcccatgtgcgtaaagataaaccatggaaaatattcacgtttcataaacaattatgaatgagcagatcccaagggaataactgtcgccccatacatctataaatagggacataacccagggtaaaagagacgaccgatctagagagaaaagagatattattgctaattatatcatcgtattttgtattcagagatcttcatccttaataagatggattcgtgaaatatgaagatttaacttcaaaactacgttaaaactttcctgttatttactgtttaataaacagattgctatataatcaattctgttgataatttattacaaaaaaactaatatttttagttaacgaaaatctgcattaacacacatatattatattgccatagtgctagcatattggtgatagccgtatgagtgtacatagagttgcactaagatactaatatctagtatgtagggcaatgttaagtagtatggattaatgctatcaatacaagtatgattagagtactgggcttaggttggtattacggttaatcatgctataggtacgaatgttcaattctcagtatacgcattggatgcaattagtagacttatggtaattgagtgtatggacgctcagttacaagtcaactaatttatgattgtattatgcatagttttcttactcagtctatcgactcacaattgcttcactatgtataagttatgagaaagcatatctaattagtggtggtttgaggactccaataaaaattgcacatatatggccgactagatctagagagttgagatttatgagagatcagttggcacatatagtacttttttgttaaacgattcttttaacacaacacaatatgtatatgttttaataaaataaaaaaaagagatccgtgttgtatgcaatctgtgttaagaaaattttaattattacaatttttttatgtaaatcacactttattataaaaaatttgattaccaaaagtttacacagtgattaaaaaacatacataacgtactttttttttgactaaaatatctctgaattcataaagtttagtattaactgaaattttcagcttactaataaattgtcaaaactataaacaagctctaatcaagagacaatagagcacattgaaagtcatgagcaaggattaaaattggtcatacccatacacaaccccaagcaatcttaaaattacccttaccagtttttctagttgtaatctcaatgtcaaatcttcaacgtgctttataagtttatttttggcaacctgaagagtgcagagctccaatttctcttgcactcatatcccgtgtacttgttagggaataacattatattaactccatgatcacagagattctcatcacctcagcctgaccatttagatattagggtgttaccgttttcattatcaatttatttttaattttatttgattgtatgaaatttttcctcagcatttttttttattttagttttggtctaatttagagaagaaaagatgcagtgggctctaccgatcaatatttttcactgcactctctatttttccttcttcccaaatcaacaactcattttccttttttcttcttttcacgtttttttttttttgggtatacaaacataattagttaccccatcccaaaaattacaaaacagtaccacacactactgtacgtacagtactaaattcatgagatagctatatatatataggtatacgattttgtcctattagtgtacttttacggaatgtatattctgtgatgtacgacagccgttagatgggagagttatttcatctgagggctggggttgatctaggagtaattaaggttaaaaaatagtaacataccctgagacccattattacgtacctgagaccctgctgccgtacattacagaatacatatttttgtgaaaatacaataacgggacaaaatcgtgtccctatatatatttatagaattgttaaaagatatcatcttagtactcagtgtcctactattatttgagtaatgaaatatcatgtcaaatataacttaagaaaaaataattttcagtaaatacgtaaattgatctatataattaatatgcatcaacatacccaattataaatgtgtataatacgtatatttatagattatgagtcctgaatatagttaaatttatttaataatttatgtgtgagatcggattttaattattttatatttggcgtaaatcaaattttaaattccgttgatccaacataattaattgataattcatgaagtgccatataatgaagtaatatgtttatatatatttttttatatacaaactaatatttatataaaattccaaaaatttaaattaaatatctacattccacttctccttaaataataatagatattatttttttttttttatttaaggtgagaattttattaattaaaatagagcaatctataaatcaacaacagaacgattcacttacatattacaaacaaaataaaaatttgttgatctcttaatttttctcctatcaataagaagtaatatggctttaagtgctgctctaattaaattattcacataagagatcgtcaatacttttttgctcaaaaatacaagtatttcaatttaaccaaataaagtaataaattgttgccgcataagtagtccaaacacaacattataaagcaggttacgatctcatttaatatattcaactacaccagtaaattcggacaagacttcgaccaaatagcattactaatactaagctaaaacttaattacatgcaaaagttgcttaaaaagtgggcactcagaaaaatgagcatggcagttatcactaacatcacacactcggcgaagagcagaggaaatagatatacctcttatcaataggtgatttcttgtcaacaagttattacgaaagacttatcaaatgataaatttatattttttttagtgtagtataatggtattttataattaattaatagtttaataggttaaatgtatcaaatttgaactcatgaactcttccttttttccatccatcgctcaccactaagctaactttagtgtctccaaattatttacaattatcaacattagataaaagagcaagaaatgagttgtaaattttactaactcaaaatctatatcctttaccaccatcgaggattgtgtccctgtgaaaataaatatttttccctaaaaaattataataataataaatatttgaaaccagcccataaatgcatgcacatgctatgcataagaagataacataataaatatgcaattcaattatttttctttccatgtgatgcatgcatgctctttatcaatcatcgcaaatcccatcatcgttatatgttataaatgaataatatatataaatataaagagcattgttattaggcaccagtagtgtctagcacttttgcaacatttcgcgttgtgattggctagcgatactccttaaaaattattatattaaattatatgggatccgatatttagttagactaatagcgatattgacacataagagaatgctagacaccactaataccctctaacatttctcaaatataaattataggtccctataaatataatcccccaaggaatatggagtcttatatacatattaaattcattaagcatattaatcaatggcattcttattagaattaaaataagttttttttttttttttctttgaaagaagaattaaaattagttagtgctaagtttttgtcatgttgttcctcattcaagtcttaattatcataatcttaggaattcattgttaagtactttttatcttctat

SEQ ID NO: 223605 - DNA, 1786 bp, Cannabis indica
gttgagtgatccaatgttttgccataaaattaaaaagaacataattggtttagcaaacaaaattggtgattatgcttatccaaaacgctcactcaatatacaacatcactaaaatcttaatccaaatcaaatttacataaatgattttgaaacattatatctaatacaatatatatgttttgatctatacatcatatatctaccaagttgtagatctaagaccctgcaacatttttgtgaaagaaaaataacacagtaaatacaacaagtatatatatagatagatagatagatataaagaaagaaaagatttttattatagactaaatctcaaattaacataataagtaaacccaatattcaattagcaattttgggaagagggtaccttgaagaaaagccattattaaggttataaacattgttggtactagccttattaagacacttcaaagaagtaggagagacctgtaagaacatgtagtttccagcaaatagatcactcaaatgagattgactttccttcaatctctttacaacatttgaaattgaaactctaacagaagaaaccaacttagattttcttcttaataaccttctcaagcttgggattttgagcttgaattttcttctaataggtacccttttggaccttctataccaactccttggtcttcccaaacccttgatctgatattcactattatttactatttgttgaatttgataatcttcagaatcataatcatcacctccttgaccttcatttttaagtctctggtaggaaaacttggctgaagaaaaggccatttcaaatcaatggtgaacttgttgaataataataataataataaaaaaaaatggaattgttatttatttatatattataatgaaagatttaaagagatattgatgaatggtctcatttcatagatagaaaggtggttggttttattgttataagaaaaatgaatgagagtcagtttcaaagagctgtcaactgcattaaatgaaacaagtgaagttgggtcatggccattgctaaaaagcaaagtaataataatatataatcaatgttatgtagtactcaagttttttatttatatatttcagaacaaaccctttatgtaatctggtttttgtttttatgtaatttagtttggtttagtgtgcttctaatatccacttattaaaagaagtttatcaatgcatactaacgtaatttttttttatgtgaagtaaattctttgaatcatatttttaacgtgttaatttttcaaaattttataaaatataaacaatcaaaataaatttgattagtttatatttagatttgatgtatatatttgattgatttatggtacacatgttttcaaaaattgccacctaagccttttgcatcaaggagttaattgttattgtggaccttataatttcttattaatgtattgatttgcccaaaaaaaaagacttgtactctaaaaatttactaattaccaattgaagaattgtgatgggtcaaaatctagaacctcataaaataacatgtatataatatagatagagagaattttataaaataagttaattagtagtgttgttgtttggtaaaggagaaagtgatgtgaaaatgagtcaagtgtgaaaagagtgacccgatataatgaacacaaagtagtataaactgtctacgcgtgtggcattgaaaagcctcattcattacccatgtccaagtgtcaactaactactatatctcatcgactcctacaccccacctatcccctta

SEQ ID NO: 223606 - DNA, 1397 bp, Cannabis indica
atgccgctaacaaacttaaaactcttgatacttatgctgctatttaatctttcttaaaagggtatgtatatttatacgtaacgtaacgcgaaaacctttatcaccacatgcaaatgattgatcagagcaaattgagggcggtgagggaagagaaacagaacaagtgggagtcaaataaaaacaatcagccaattataaactagtaacattgcatgcatccaagtggattttgattttcttttcttttatctaagcatcaaaggggaattgatagtagtgtacgtctaaacaaaataatattaatatatattctaaatatattttttttataagagaattgctatttgataatttttttttattattttttgaaagaaagctatttggtatttgaagttggcactatattatagtatatatataattatttagctgtttttctacattaattatttattcaatcaaattatatgagatccaaaattaggctaattacaacaatatttggcacttcataaggtgttgtttaacatttctcttttgactattctttttatttttatttttatatgaaatttctctttttataattagttgggaatatgtatggtggtgactagagtgacagcagattagattaattatattttggggttttgtgtgggttgtttgttatctctctctctatacatatatatatgacataaaatatataataatggagtacttgactatcatatatatgtcccacatccatcccatgctacatatgtatatacagcttctcttgttggttactggttagatagcaattaataattaattgtgaatcatatgaatatcataatatcacagctcacttttaacaaaacaacctccaccacgctttgaattctcactactttttcttcttaatgcgcgcataaatatcgtatacaaaattgttaagacttacttttggaccagtttattcatttattgtatattataattaggctatttagaattttcacttccaaattttaatgttatcgtccatttaaaatttttaggtcattaaaagttttttttttttgaactatttgcattgtcagatgcaaaaacgttatccaattttattaatgaacgtctaccatggatgaaaattcatgaggctcaattttgtacaggttattaaatgttatgagacatgattgatacatatcaaaatttgaaggatatgatttgatatattaacaatcatcacatcacttaataaattaaacaaaaatagataaaaatactaaaatttaacaatctcaataatttgaagaatttttagtaacttcaagaggtaaacatcttaattaatcttataattagaataaacattttgtttattttcaaaaaaaaaaaat

SEQ ID NO: 223607 - DNA, 1850 bp, Cannabis indica
aacattaaatgttatttctgatctatattaataagtaaatctgattacattgaaatgagttttatttagggcataaaacccaacactcttcccaattccggttggtgagaatggcacctatgatccaacaagatacataccaatcgttgagttggaaaaccgccaactcagacgtcgcctagaggaggcaaaccgtcggaatgctgagttcgaatgtgaggcagccgctgccaggacgacacaagagaatgatacccaaaatcaacctgaccctggagagagagcaccacgaggcagacctcgcaactcacaaactagggggcaagagacagctcaagggaacccctagaacgttggaaggacgacctggggaaactaaggaatccctgaaacgagcagccaaatgatcagccagaaccatccctcatggaaacaagataaatcctaggacacaacctggagcacttaggtcatgaacgaggaatcgccaatattcttcccaaaccccatatggaaggggctccgcacaaaccccagtggggggaacaaggacgagccaggcctaagggagaagaatggggcgtgaagaggcgggtgttacctcagggtgcacaagaacccacaactgatcaatgcgaggaggagagagtactcatcgcgacaatgatcgaggaagcataggcatgagtaagactgcaagtcactcaaggacgaggtccataagcaggacacagtctatgagtagaacgaggtccgccagccatcataaccaatcgaatctacgagaacacttgaaccagaaaagacttgatcttcaacaataacttggttcaaaacaaggggattcgatccaattacaaatagattagttggaggatcaagtcggggagcaaggaaaataatcggggtatgattcagatgaagaactcgagcaataccatctacatatcatgaatactccttctccccagggacttaaaaacccccacgtcttgtcatataatgggaccactgatcttttcttgcatttgaataacttcaatattataatgtgagctagcaatgtttcaaacaatatatgttgtattttttttcccacctcactagttggagtagcaagcagctggttcagtagtttactcatcattccatcacttcttgggaacaatatccaaggatttaaaaagcagttcgaggctgcaaggaataggcgacccgatgcatcctcgctcacaaacataaagtaatagcctagtgagatgcttaaggcatacctaagtcgttttagcatggctgctgcgagagtaagaaattttgatgatagtacccagctcactacccttcaggtagggatcactactgatctttccaccattggaggaaactatgggacaatctatatggtcgtctagttagaaacatcactgagtttaatgagagggctcagatatttgttcaaaaggaagaagctcaaaaagaggtgaacttattacaaacaggctttggaagcaaacccaacattgtttcaacaagtattatcttgactaaagatgataacctaggggcctctggctcaaagaggagagatgactctaaggggtcgtccaaagacaagaagaaacaaaagaagcacgacaaatacgtccgagtttacactatctataccgagcttaatgaaactcgagagattatcaacctcgagcatgagcacaaggttccactcagtaaacctgagcccatgaggcatgcgagatgtaaaagggatccaaccaaatactgtaagtaccataaagatattgggcatacaatagaagagtgtcatcagttgaaagatgagatggagagtgaca

SEQ ID NO: 223608 - DNA, 2526 bp, Cannabis indica
ttgaatgttctcttatggcgcaggagatccttcattccttaaaagacaaaaaggggaaaaagggtcttatggcagctaaaattgatatgaataaggcctatgattacatcgaatgggacttcctccatcgagtgctcaaggctaatggttttagtgaaaaggcttcttctctcattatggcatgtgtgacaccagttattttctcggtcctacttaatggcactctgatgactcccttcaatcctaattgtgggctcagacagagggacccactgtctccttttctatttatactatgtagtgaagtcctctccaaactggtgttgagagcagagcagtctagaggtatgtctgtgattagcattttccatggagcttcgcctttatctcatcttttttatgcagatgacacaattttcttctgtcaagcttcttttagtgaggctactgagctcttacagtgtttgcaaaagtatgacagctggtttggctaaaaggttagctacacaaagagcggggtagttttttcaccgaacacttctaaagtagacaaagatcagattaaaatgttcttggtatggggcaaatcagagttaaggagaaatacctaggaaattttttcttttttaccgtgaaaaagaaaggatgattttcatttcttaaaatagaaaattttgaatagacttgaaggttggaaagaaaagtgtctttcatattcgggtcgtactacccttgtgaggtcagttttacaaaatattctgattttttttacgtaaacttcgaaggtccctactaccctctatgatgagcttaatcgtattgttgcgagattttggtgggcgggaaatgcgaagaagatgaagtattgtgctattaagagttggggtgagatatgtcaacctaaaagttgtgggggtttaggcgtgagacgattcaaagatattaataatgctctattttcaaagttgttctggatggttttaaattaggagggtaagttgtggattaaagctcttgtagaaaaaatattgtccaagggtggatgcttggcgagtggaaaaatagggttcagattcgttggtgtggaaaagtctcttagatgttcgggagattcatgttcaggggtgatattaatttgtggacgagaccttggattgtttggaaaacttgtgaagatattaaagtaaattttcactataatcggattcgcgcttttagaaaggtggcagacctctttgtggatggtactagggaatggaataaggatcttatccagagttattttgatgaggatatcgcagaggatattctttaaatcaaaccattgtctactggagatgatattttattatggaaagctactagatctaggggattctcattcaaaagtgcatattagatgagtcaggaattgtgtgcctaatctagtttggaaaggtttgtggaagcagcaactgcattagagataagtttgtcatatgttgaaaatcctttcgaagtctctccctactcaaaatagattgtgtttcatcactccatgtgagctttttggtgtgttttgtaatgctaaagttgaaacagtactgcatctttttagtaagtgtgacattgtctgaggtatctagtttaagagcatatggggtgtgaggattgacgagcttaattaagaatgcccttttaattttggaagacggtggatcaatgtcaaagatgaggaacttaagctttttgcagcatgtgtttgtgaggttgtatggaagtagagaaatgacattatttatgatcgtaaagtgtgtgattttatgggtatttttgaagattgcagtagacgattctcggaattctctagtttgtgtgatctgctgcacgtaagtgactggtctaaggcgttgtctactggtatagatcatatgactgaggttgttgaggatctctccattgatgttaatggcaatgacgtgtggtacttccaagttaatgcatttgtggatgggtcttcggctggttttgcagaagtacaaaaagggtgtaatgctatggaagatgcaattatggctgtggatttcgatactgttgataatgtgcttgaaggggaattgaagaccattggtctagctgtgaaaaatactcagttttatggattctactttggcagttaaaggtttcatggttggaactttgcccttggagtagggctcttatcctacttttatggattgccttagtattagtaagttttttaaggtgtttaaggttatattcaatccttagtcttccaatcgtgtggttgatttcctcactcgttgggctaggttgaaaaagttgtgtcccatggttttttaatagaagtgtcaccctttgtggccactactttattatagctgcgttttgttgtgtttaataaagtttgttactcacaaaaaaaaaaattaatatgcaatatcgcactatgttgtaaaattgtgtatataaaagaatgacattaagtcccattttttaatattattttcatccaaaaataaaaaa

SEQ ID NO: 223609 - DNA, 3003 bp, Cannabis indica
aatttttaaaaattatttaagtttaaattttttttaataatggggtgtatttataagtttaaggggtgcaaatagagctcccctaaataaattaataaatttagaaattaatgacaaccttctaggtaaggtacttaaactgagtgttacaaatcatgtttaaggattgtatttttttttttttttggtattttgttcaggttctatagaagtgtttcttcaaatctgattgattaaccttaccacatgcatggtcatattaaagtgcttaagtttagttaggtagttataattagttggtttagttataactaacttttttctttctaaactatgttctataatagctaattcactttcgggatatatatctatagaaaatgttattaccatctatgaattagagagcttatagtttgttcaagtcattatttgagagtgtttgtgggttgagtgagagagagagagttgttgggtttgagaatcttgggttatcaaagttaatcattgtcaaaagctattgctataaactttgatgatgaggcaaaaatagatgtagcatcaattcaatgtggactagtataattgcattgtgtttttgactcaatattttactatttattttcagtaggaaagtattttttgctcaccaatctcactacaagaaatgtcacttttactagcacagttcgctactgtacttgtaaaagtaacttttactagcacatttcgtaaactgcgctggcaaagaagtcaaagttttaccagtgtacatttgcagtggctaaaatctaacttttaccagcacatttacacgctgggaaaagtcatttttgccagcgcttttcattttatgctggcaaaagttctaataccaacattgatttgccaactcccttttgccaacacattacaagtaaattctattttaccagcgcaataccaatttttgccagcacaaaaatgtacttgagccgtattaaagtaaacatgatcactatctgtatattttacaaaatcaaatagtacatatcatgggtgtcctagccaagaatcttttattgatgataagaaaattagtggaggtgttgcattaatggaaaattatgtttcttgtggatcgagctattggtatatttggaagattacacttaagcaatttaattaatgggactgtcaacatcttgaataatatctagctcgaaaatttctaaaggtgctatgacagcaatcaaggatcaaatggaatatgcattagctagtaagacaacatatcaacaatcttgagctttgacacaaacgaatggggcatgtactgaagatggtctaaggaactcaaagtaatataatcattggagcaaaatgtcttattgtgaaattaacttaagttcaattataaagagtttgagtttgataaatttagaggctatagtattgtatgacacatcacaaaatcatttctagtttaagtgaaagtttttggatggatgataattcaaaaaaaaaaaaatggtttttggatgaggtaattcttttagcctcacccaatataggattattgattgtaaatataaacatctataaaatggatggtaaattattatttgaagcatttaacagtttttggttgcattgcataaattagagccaattagtaaaatgtgttttttaattaggatatcctatatattataataaaactaaaggctaaagattgtgaaattttgaaaacatcaaatataaagtgattatatttagagatgttatttttagtgaagaagaatttcctcacttgatcaaatggaaggtagtggattagttgatataggttaatttgtagaagaaagatgttgatatgattgagtttgaggtggaactactcaaggattcaaattagcagtttctaattcttgagaatcatcatatagatgcctttaaatggatttaagagttagtactcaataagttccaatagattagaaggtgatatcttgtaaatgggtaaacaagataaatgatggtagaatagaacatcgatgaattgcgataggtttcatacaagttgaaggaattgactatatagatgtgttctctccaattgtgaagtataagataattaaacttatgttatctataataattccatatgaccttgaggtggttcaattagaagcaaatataacttttttaaatgattttttcgatgaattcatttacatgaaataaccacttgaatttcccatgcatatagaacaagccaacaagaaattggtttgcaagctaaaaagatcactctatggactaaaatagtttttgaggcaatataccaagaggttcaacttacatttcaaagagatataggaatcttaagatcaaatatgacccatgcatgcttgtaatagggttatcaactatattttaccggtatatgttgatgatatgttcattattgactttgtaaggagtttaattagatgaaggatctccattcaataaagaagatacttggaattgaaggctattaaaaaaagaaggatgggaagatgtacatgaagcaatattcaatttacataaacaaaatattatacaagttcaacatgcaagactcaaatggtatctctgtttcttttgggaggtcatttatataaaactttgatatccttttgttattgatggcgattatctttttttattaagcttgagttgtatggtgtttttgcaacacactaatcttattaattaaacttgtttcatcatccaagataaattatttaatattttgagacattctttgtttctcattcatataggtgtctaaaaccaatcccccccccaacccccctttaattgttaataatttgcttaaaatataccgaagaacactttctttcactatatacaagaaatgttatttttgctaggtgttggcaaaagtttgatattgcgctggttttgccagcacaaaataaaaagcactggcaaaaatgactttttccagcgcgt

SEQ ID NO: 223610 - DNA, 2288 bp, Cannabis indica
atacgcctaagttagttagggtgttacatagctacttacaaatgatatttcagtaaactaatataattaccgaaataagagcgctttcattcatgtcgttttagccaagttttaaggaatccatcgtttcacttctcaataactattgaagttatacatttaatatctatgattaataatcccactcaattgtactaccgaactcccaagatttatgtatgggtttgtcctatgggtaagctggtaagaaacaagttaaaaaacttgtatactacaattaagctacaacttaaatatctcaattaaatatctcaggattgagatcaattgatctaagatcaactaagtgacatcggcttagaaaagacataactgtaagtttataatatctttccactgtcaatatctgtccagtccaatgtatagccaatacatctaatacaagtttacttttctaatgcactgtgaaggacatttcacttatacaagtgtaagcaaactacatcactgattatcacgtcaatttaaatctaatgcactgattaatagtggggctaaatatttgaaacatataatcatgattaattctactatgttgacaacactataatcatgagtaactatatattcgagatttattagaatttatatattaatcatataattattaaagtaatatgggaactaagcaacataaaattatttatgaccttttattaattagtaaataagattatattaaattgggttttaattagggcataaactccaacaaactctcagttgcattaatataaaactaaatgtacattttaattaatctcaacttcttaatgttctaatcaagggtagtatgtaatgttaccttttaataggatctgacaagttgtattcagtgtcaatcttctcaactattacattctctttagttacaaaatccttgatattgttgaaattcctatttatatgtttactcctccgagggttctggattctttattgtttgacaactacatctatgttattgtgaagtaacattagtagttaacccatgattgggataacaccaaccgtagagaaatttctttaggatgaataattgtgtagtagccttcaagactactttaatattcagtttcactggtagagttaaagactccagatagatttttacacttcttccaaaatcactactccaactccagagtaatcaccatcctaaatgtagacgcatttatgcaagtcttgaaatcttagttagtgtagcctaaaaggttgaaagcactacccaaatagactaacttataggtcctcttttattcttaagttttatttaattctcttacaatgttcctatactgattaaattgataccaacttataactccaaaactcaagtgtatactggaacataaatgagacttctcattgttgatgcttaaggaattcttcccttaacttttatcttttctcgaatagttaaaattttaccttagataaataaactctatgtctagaagtctagtgatttcctttaaagttagtcattagatagcgttctagcatcttacaaatgtaagctacttgtgaaggagtaagtaaattaccaggtataccagaaggcatgtgtttagatgttctcatcaaacccatgttactaagaacggaaagtttacttaagtccatttaatagatctattaaagtttcccttcttgtccttataatcaaaacttttggttgctccatgtgattggttgaatcaaaaatcgatgtaagaaaagtgttcaaatgcacatgtgcacatatttagtacatttattatattgccttgtagctagtatattagaagtagcagtatgggtgtacatagagtttctctaagatattgacatctaatatgttagtcaatgttgaatagtatggattaatgctactaacataagtgcgactagagtgctaagattaggatggtattatggttaatcatattataggtacgaatgttcagatctcagtactctcgtttgatgagattagtagacttatgataattgggtgtatgggtgctcattaataggtcaagtaagtatgttgtatgcatgtaaatacttttcttattgagtctgtagactcacacacacacacatatatatatatatatatatatttatgtgtagaaaaagacaaagccaaggttgaatcgcagtgagagatgagcttggtgaagattgtacatatccagtagtctaagcctagagatttgcaaacttcgagacaacactaacat

SEQ ID NO: 223611 - DNA, 2887 bp, Cannabis indica
atattattgtcgcacccttttttgttcattgttatatatttattaattctttatataaatatctatattacattggaaaattaaataaaggttgcaggtgaaaccaggccatgtgccaatattccttattaattgaagtattagtcttcttatatattggaagaagctatagttagcctgataataatagtaatcatatataataatgttatatatatataatatatatatatatacatatattggaaagatcaagctgggtgatatagatatgatatatatcctcccagacagctggccttaaactatacgtaccaaacaaaaactaagtataaacaaaattaattaataattaggattaccactactactcgactctcattattatctcataatctcaatattcatatatcaatattaatatagtaagactagttctatttcaatttgattttatacctaaaagtatatattaaaacagtatcttttgcacataattatgcatggctatattataaatatattgaaacaagtatatataatatatatacgtgcaacaagttgtttaaagatcataattaagttgggtatttattgatattttttagtaatatttgttagaatatttataaaccctaataaattatttataaaatataataattatttgataattattaaaaatattttaattatggtcaccatttaattaaaaaaatattattttagattgattttcttaaattaattgtcaaaatattatgataattaatgtgatactgatgtagtatccactactagaaaattagattttagaagcagtttttaaaggcttaagcaacagtttttacgaaattcgctactaatgttgttttaggcaacactaaaagggtatgaaataaccgtcactataagaatcttatggagtcggttagggaccatatagaaaaaactgactccataggtgtcaagattaggaagttagggtgttggttaattgtttgttaggacagttaatttctgttacaactgactaatcatttttttcttgggataatgtcggttagcttcttattatataaacccttgtaattcatttactttttaattaatgaaagcatataacagagaaataacagagtagtcaaactctgcttctcttttctctttctccttcttcttcttcaatctttatgtatctcatatggtatcagcagaaaccctagccaactcttcaatggcaaagtcctccacacgctcccaagatggcgttcctccacctgcaactgagcacaatcaatcgaaatccattctcgattccacttccccaccagcagccaacattccagttgtttctcgtcgaaatccaagctctagatctaggtctcacaatgaggaagaacctgaaccagtgcaatcatctcctactcctccagctgacaacgcaaatcaacccactcgaaggtcccttcttgatcgactagctcacgaagacataccagcccattctttctcagttcaacagaccacccaggcctcattcttgtttccactgtcctcaatggcacaaattttcagtcatggaaaagaggcataacaatggcgttgacagcaaagaataaatcttccttcatagatggcactcttcctcgacctgcatgtagtaatccccttcttaactcttggaattgttgtaataacatggtgatgtcttgcctcataaactctgtctcttctgaaatagctcagagcatcatgtattttgatcttgctacagatatgtggcaagatcttcaagaaagattcaatgagggtaacggacctcgaatctttcagttgcaaacacaactcacccgtttgcaacaaggtgatcagtccgtcacctcttacttcacaaagctcaaatcaatttgggatgagctaaaagaatttcaacccaatgatacttgttcttgtggtgccatgaaattgtttcttgattattttaatcaaaatcaagtcttgcaatttctaactggtctcaatgaatcttacgcctcggttagagcccaaattctccttaatgaaccaattcctaatctctctcgggtcttctctatgattgttcaaaaagagagacaaagaacacttggttcttcagatttggcctctcttgcatcctcggtccgtccagcttcttccactaccaatcccaaatcaaagaaaccgaggccctcctgcactaattgtggtaaaccagggcattatgtggacaaatgctatttcctccatgggtttccaccaggttatggtgacaaaaagaggtctgaaaaaggcaaggctactgccaacatagccattgccagttccaaactagaaaataccagcagcacctctccagctgacctttcttctcaatgtcagcagctcatctccttacccagccaacaattgagccaaggaccaactagggatgaccccaatactgttcttgcagcttctaacatggctggtaatctctccttacatcaaaatttgtcatggattgttgatagtggagccacacatcacaagtgctccaccaagtcttgtttttctaactttactaatgatgtttttccatttcaacttcctaatggcactaacatccctgtccatggcataggtacggttaaaattaacaaacacttgatcattcacaaagtgttatatgtacctacattccacataaacttgttttccattcctactttccttcataaccccactaacatggtatatttcaaccatgattcttgctttttacaggctcattttccgagtgtggtgattgggacagctagaagacttgggaaactctatgtcattctccaagattcatctccactagctagttctaatagttctt

SEQ ID NO: 223612 - DNA, 1952 bp, Cannabis indica
attaaattttatttaaatgtaaatttaattaatgcatataaggaaaaatattcttcaacttctccccaaaagttacatactaaaggcttactctccaacatgataaagagtagcatatccaatatgttgttgtaaaggacgtgcctatactatgagggcatacctcatactcaatgcctcatggctccactcattaacatggtactcactatgtcttcttcgttgagttacaagtacttagagacatgtacatggaaagcttcatcaaagtcatagcatcaacaagactaacggttatcaccactaagttacaacataacaccagcatgccaagtaccaggccgcaagtactcaagccgcatacccatttcgagtactcagaagtcatgctgagtgctctacgctgtgtacgaaaccagcgatgccttatcaaatttcaaactcatgagtggttaacaacccacaaaaatagcaggattattctcctcaagaattgagcttcaaccaatttcgaggaataagggaaccctacctagtttaaaaataaaaactcaatcccaatctctttctttcagcctgaatcacaatttctaaagaagatactcatataattctatactctacaagctattcatcccgttatcgactaaagatttattattttctttgtgtttcgttctcttcaccaaacaccacttatgattttcatcaacatagaattgggatcatcgtcaccgctctaataattgagatatccaagatctgattaagaagagtcttcaagaggtaagagagttcttccatttattggtgtcaatttttaggttatatcaagagatatcgtttttatttttctaactctcacaatattgatgtgattctagcaatattggtaccgttgcaaagataatttgattctctaatgtttcatgaagaaattgttcacccgttcgacgttattttatgtcaaaaattagtatcttcatactgttattgtaattcattttttttcttcatattcacagttgtttattgagattttcgaaaactgattatgtagagcttaagaaaataaaagatattcaacaacagacaaatatattttttttacgtagttcagacgttaatgatctttagtccatgagacaatagtattagcctctttgggcaaatgtttaggtacgccgccaggaagaaacccaacaacgatttcagtttatgccataacccgacattcacatgttactgctatccatacctaataaggtacgccaccaagaagaaacccaacaacgatttcaatctatgccatagactttcattctcatatcactgctgcccgtacctaataaggtatcgccgacaagtatatcgcatcaccaaaccaggtgagcccgtatattacattcataatatcatcacattatcattgactaatcaggcaatcttttcattacataacaataataaccgtatcttaatcccaatatcaatcaattctcaacaatattatttgtattacaatataatatgctatgcagtacaataaacttttcttacctttaatccaaactcatgcatgtctatcaaccaaagtggaaaaatatccccgatgatctcgaccctatgtcacaaaaacggtaaatcaataagtgtttattccaaaacactacttaatactcgcgtaagataatctaggattttctaccaaatcccgcggtataaatacactaaaataaaacttatattttagctctaaaacatacaccatattgtagagctcgtcacaagattcaaaatggtgtataaaacgtccaaaacggacaccggagggaaaagctatgacaaaaatgtgatttctaatctctcaagaatttccaaaaatggtgaattacgaaaatcccaaattttacacttaccaaaacactcccgaaacatatccaaatcattcc

SEQ ID NO: 223613 - DNA, 1737 bp, Cannabis indica
gcataaaacccaacagttttatctccctgctcacaaaaccaggagcccgacaatacatgttataccagcagtcattcctattctgccataagaaatacactgcatcagccatgacagcgttcatcaacctgtccagtaagtcattcatcgtcttcgaacaccagtccttccaatgattgaagttgctcggccaaatattcaaaccaaaccagctacctatctcagtcatcaccaatttggcaaagtgacactcaaagaaaacatggttgtgtgtcttcgaattcatctcacaaacagggcagttcttataagtgatctccatcactctactaaggtgatccctagtcaaaagttggtcatttatagcttgccaacaaatgaacctatgcttgggcacatacatcttatgccaaatagtagacgcatatttagaaattccagcagagataagagaattataaatatttttgctttaaatttcccattcttaccgcccccaagagagcttctctgttaatgatctccctgagtctcaagattttcttgaaataccagttgctatcctgtttaaaagttagaaaccgtaagtcttaaccctttagatagatggaactaatccacttaacccaaagattatcttgtttctctgaaatagctcaaatgtttttggctatcaaagcaacattctacttctttccctctcggaagccaattcctctacaccttttcgggagacaaattttttcctaagaaggtaaatggaatttacttcgatttccattgacccccagagaaaatccatgtaacttttgtcaatggcagccgtcactttcttgggaagaatgaagagattcatccaaaagttcctaatccccaaaagaaccgaatgaatcaattgcgcacgccccgcaaaagaaaggaatttgctagcccaattatttagcttcaaattcaccttatccagaatgcaaccgcaatccgaagtcttccatttagtaagacgaagcttcactcccagatatctgagagggaaagagccttcttccatattcatcaagttcaaaatggcccttttggtaacttcattgacccctccaaagtagatagcagacttattcatattagcttttagacatgttgtgtcacaaaacaaggtaaaagcttcatgaataaatctcacagatttttcattgcccttacaaaagatcataaggtcatccacaaaacataagttaacaagctttagctgtttgcagagaggatgaaaaccgaagccaacttttccagcatgatagattaggattctggtcaagtaatccataacaagaacaaaaattagaggagagatagggtgtccttggcgcagacctttttcacctttaaaagaaccctggagtcttccattcatcattaggttgtaggaagtaccctttaggcaaactaacacccaattgataaatctagacggaaaacataacccatttagcaaatccgaaacaaaggtctagtcaatagtatcataggcttttcttaagtctatcttcattatgcatctggccgagatgttctttctagtgtatcccttgagaaggtcttgaaaaatcatgatgttgtgagccaaatgtcttttcttaacagaagctccttgattaggatgaattatatttgacaacatctcagaagtctggagcagatcagcttggatatacatttatatagagtattgcagcacgcaat

SEQ ID NO: 223614 - DNA, 1076 bp, Cannabis indica
atcacacccctcaatctagtagcaataatttttgagatgatcttgtaggcgaaattgcacaagctaataggtctaaacttgtccaccgtgcacgcactttcctccttcgggattaagcatatgaaagtgtaattaagttgcttctccaaagtcccagaggagaagaatttctgaaccattttaataacatcattccccactatctcccaatatctcctatagaaaaaacccggcatcccatccggccccggggcttttaagggatgcatagaagctaccgcattccaaatctcttcatgggacggaatccctttcagcattgtgttctcctcaaccgtaaccagaggtgcaaacagatcatggaagtcttcgtctaaggtcgtcccttccgccttgtataactcctcaaaaaaatcattaaaaaccttccccatcctatgagtttttgtttcccagcctccctctctattcttaatcgcagtaataccatttcttcttcttcgaatgactgtggaggcgtgaaaaaactttgagtttctatcacccacttttaaccaaatttcccttgatttctgcctctacatagactcctttctaatccaaagctctgaaattttcgataggagggcagattcctcttgcaaaagattgcttgacaccggttgttgttgtatccatcccaatctagtctctgcttccttaatcaaagactcgcaatccccaaaagctccatttttccatttccgaagggctaatcgagtgtcgtttagtctaccactaagaattccacacggtctgcctttctcaccccacgcccaccgaatcgtttcttcacatgaactctcccttgcccaagcttcaaagaagcgaaaaggcttaaagcccctgtttttcttcccattagagtccattagaataaaaccatgatcagagaccgtgatcggtgcgtttgtcaccattgcttcaggaaacgcagtgatccactcccccgaaactattgctctatcaagcctctctctcgtgaagccacttgagaatcggttgttttgccatgtgaatttgcatccacgatagcc

SEQ ID NO: 223615 - DNA, 1339 bp, Cannabis indica
aaattgtagttttgcttcccatctcacctgacccctctctctctcaaaccctctttgatttctcaaatttgtatggagaattgcttgaattttgtgtggaattgaagctttgtaattgaggaattttgagcttgctttcgggttgagtttaaggtagtttttagagctttaattctagttatattttgctgaattatgttgttatagaagagcatgaaaagggttgtgatgttgtgatgtggcatgtatgtgttcttatgtgagtatgagcatggttatattcaaatcttgtggattattgtatgggtttgtgtttggatgaaccttcgatgaattctagggtatttttcttctgaattcttggctgtaatactatgtatgtttggagctagcttgtaaattctagctcaagagcttgaaattggggtttatgtgatttatatgaaatctgaaattggggactttatgtttgattttgatgcataaatatgtgttttagaccctatattatttgctaatagttgtagttagtaaattgagagattggttttgatattggtgtgatttgggtgtgtttttgttgctgaattcttgtttgaagatggctggtttttgggttttcaatccaggtgtcgcgacatggtctgagcatgccgtggcccgcccctgttggtggaacctaggatttgtcccaggtgtcggggcatggcttgggcatgccgcgacccgccctcgattttctgggcagtttgagtgtaaactttaaaattgcatatcttttgattccgaactccgatttgggagttcgttatatcgttggaaagttcgttccgagctctatgtgattatctgaattataaatgccatgaaaatattttatgagtttgaaatcagggattaaccctagttgtgaaaaatctcgaattgtgtgactaggattaccggcacctgatcaagagtacccagggattcggaatctctgctattccaagacaacaggtaagatagtagttagaatttagagtatgcgcggtggcgcttatgctgagattgatatatgtgaggagtattaaccgggattagggttattatcctaatataagcagttaatagcctagggttattatcctagtgatataagttaagtaaatgctatgtcatgttaagtgtatgattatattgagatttaatggttatgcgttcaaggcataatcaggttggactcggtaatcataaccgagatgaaccattctaaggccttattatatatagacgtgtgagagcaacatgtaggtctacgccacgtagacataaacagacgtgtgagagcagcacgtag

SEQ ID NO: 223616 - DNA, 1468 bp, Cannabis indica
agaggagacaacaagggtaattaccctttccttgagcttttatccaatggtcaagactcaaattagcaaacgccaccacgtcactcacccttctaacccgcttcttccacaccagatcgtttctcgctgcccataaagcccaacatagcattattacacgccccatcatttcgctggaaacagaattggctgtagcttctagccacggcagcaaagaggagaaggagtcccttgctacagcagccaaaccagcaacattgaagcaagaccaggcgaactcgcaggccaccagtacgtgccactcggtttcagcgaaaacatcacacataggacagttgctttctaccaaaaccttcttgatacacaagtttctttttgttgcaagacagtttgaggccgctctccaaacgagatctttggctttgggaggtactttgagagtccacaagattttccagaacttgttactctcattgttggccgaatggtgtttttgatcttgaagaagattatatgcactacgaacagaatagaatccattcttctcagcagcccaataccaggagtcggttgcaccagtttggtcaataggaattccaaggatggtggccgcgtcagagggtgagaaaaaatccttcacaacatcactatcccaacatctgttgtggacttggaacaggctgttgacagtaaaattctcaagtccttgaacaataggaatagggacagagtgatccaaacaagggagccaaggatcgatggtaatttgaactgaagtaccagggccaattctcttccttaggcctagcttgaccgtgtcttttgcagcataaatactgctccaaataaagctcgggttcgaacccaactccgccgagaggtaatcaccatttggaaagtatctagctttgaacactttgctagcaagagagtctatgttgaataaaagtcgccaaccttgttttccaagcatggctagattaaagtccctcaagcttctgaatcccattccaccatcgtgtttatgtttagtcattctatcccaactcatccaagtgattccactgccgttaccattagagttgtttgatttccaccaaaagcttgccatcatccgctctatttcgttgcaagtaccaattgggaaaaggaatacgttcatagcatacgatggaagagattgaaccactgtcttaataaggatttctttcccagcccgagacagaaaccgaccctcccaactattaatccgcttcctcattctttcttttaggaaccccagaacagcgttcttgtttcggcccactatacttgggagccccaggtacatactatcctcacccgcttcctggatatgcatcaagttacaaatgctatttctggtgttggccgaagtattggaactgaaaaaagctgatgatttgtggagatttactttttgaccagatgcgccttcaaacgtttggag

SEQ ID NO: 223617 - DNA, 1277 bp, Cannabis indica
ttatttaaatattatatctttacctatactctatttttttctcagcaacttcattaaattagcattttgaatacaaaatagtctgaagatcagaaggaatagaagtccctagaatgctacgaccagataaagaccaagcgtgcttagcaacaaagtagacagctcgatttgctgatcgtttaacaaagcgtaaactaataatattggaaaaagaggataataattttctacaatcattaacaactagaccaaataccgaagtcattggatgagaatgaattgcttgaactgctaacatactatcgctctctatcataacgcctttccagttgtttgttctaatccaactaagtgcttctttgatgcccattgcttctattatttcagctggaaaatagcctccatgatacatggcttgaatgtggagtggagaagcatgatgatcacgggcttaaaaccaaacccataggaattttcctgctcaaatacagcggcatcaacattaatcttgatggtttatatctttggtttaacccaaagctcattttgatcacctatattgtcaaagaatatagatgaaagtgaaacaatatcttgagcttattttctccaatgatcaagagaagtaaatgtcgataccataatctcattcaaagagggagtttgatttttctacttttttgttacgagctttccataacgcccaacaaaccattactattttgcacatgtctttagtggcagcagaagaaaaaatctgttcgagccatgaagcaaaggtggcagagggatttttacagagcacaccaagctgatgccaacaagcagcaaccaaagagcaatataataagagcatgggaagtgttttcaggttgggaaagacacatagggtagagggtagaaatgtttacatgtttagtgacaaggtttagacgagtaggtagacaatttatcaaggctcgccacaacatagagtagatttacccatactatattaattaaaacaaaatatgggtaaaaaagtggaaaaaaaataaaatattaattaaaataataatacaaaagaaaaaaggtactaaaaaatagaatatttacacaaaatacttaattttctccaaactttacattatactttaaatttaaattgagttttttttcaagttaaccttttttttttttactttttttttttttctttttccagatgcttttcttttcttttcaatcttttccttctctctttttatttccactttttttttattatttttttagta

SEQ ID NO: 223618 - DNA, 1307 bp, Cannabis indica
aatctttggtatgtagctcgagcgtttttgagatcgaacagcatgacgttatagcaatacagacccatatctgttcagaaacttgtatgttcttggtctggtgggtgcatcttaatttgattatacctcaaataagcatccataaaacttaatatttcatgtcttgctgttgcgtccacaagttgatctactcttagaagtgggaaacagtctttggggcacgccttgttgaggttggtgaaatcaatacaaactcgccatttcttgttcggtttgggtaccagtacgggattagcaacccaagccgggtagaagcttcgattatgaaattgttgttgcgtagcttctctacctcttccttcaaggctagggcttgctccttatccaacagtcttcacttttgttgaactgatcggaagattagatcaatatttaggacatgtgaaattatagaacgatcaattccgaccatatcctcatgtgaccaggaaaaaatgtctaggtttactctcagaaattttatcaatgctgattttactttgagcggcaaaccttttccaatcttaagctttttggttggaatattcgagtcgattccaatctcttctagttcttccactggtccaacattgctgcttgggtccccaagtcgaggatccacatcttcatccctgccttgggaggctccctacttagtaatgtttttttccttgtccgaactctggctagaggatacttcctttttagccttggttatggcaaggttataacattcccgagcaacctgttggtttcctcttaggcaccccaccccattctttgttgggaacttaaggcatgaataaaatattgacgtaacagcctttaagtcatataaagatggtcggcctaatatgacattaaatgttgatggaacgtacaatactaagaactgtaccattatagctatgctcttcggagcttgcccagcagtgaggagtagggaaatttgccctagaggtgcaactccttggccagaaaaaccatacacgggctggaggcaagggttaaatctttgagctggagccccatcttttcatacattgtcttgaataagatgttggaagaggctccattgtctatcaaggttcgggccaccatcttgttagctatttggacttccacgaccaacaggtcgttgtgcggaaaactgatattgatagcatctttatcattgaatgttatggtggcctctcttgcccgtggtagtaaatctttgttgttattgcccctttgattttgattggccttgacatacttctgtacgt

SEQ ID NO: 223619 - DNA, 2147 bp, Cannabis indica
tcgatataggttagggaaaagtgaatgaagggaggagcacgttaatcgtaaggaatatttatacaatggttaacgtttgaagtttcacgttaacctttcgtttattttttttattgaaagaaaaagaaaacgttaaataaatagttaaaccaagaattctgttacagccatatagaatagatttgaaatattttaaaagttatttatagaatagatttgaaatattttaaaagtgttaaaaaaatactcaataatttctcataaatcaagaattctgttatataggcacactttatatagaatagatactagtaaaaaggtacgtgcgagacacgtatattaaattttatgctaaacattttttactttatctaaaagtgatacaattaataattgaagaaaaaatattatttgttattagatgagattattattatgtatatctaaataatgtaatttataattaaatgctggatgcaatatattagtgtttaagaaaatttgataatttacacatgttttggagagaagtataaatccctaattatactttatctttatttacatagttctaaaaatatgactccaagctccaataacttcctatatacttagtactagttaaaggacccgtgcgttggacgggcacttataatttaaagtttaagaaagaacatgatagatagtggtatcctttaataaatatttgtcaaataaatattgggtatggccttttattccaccatataattcagaagaataagtttggtatagcctatcaataatattccttccaattcttgcaagattgatttctttaccatcttttcaagtaataaatacctgaaagtagtaatataacataatcaaattaagcacaaaaaaatatgtaattaaaacatacactatattgataaaatattgtgtatggtactttaaggggaacaaaaatgatttgcagcaaaggtgtgcgacgtccaacttgtacacttccttctttgtttgtaatagaatactttggaggggtgcctgccagttctagtcttctagattcacattcttccttagaacccatctgtagagatattcaacaaaagttaccgtagaagtcatcattatattaaacaacaaaaagaaaagtataagcctatagaccttgcttcccacaactaaaagactcttgattttccttgaaagtaaagattaccaaaaaaagaaaaaaatataaaacccttaaacgttttaaaggcacacacagtaccagaaaaacaaactcaacaattgttcatatagaaggaatcttcgaaaacacaatatgtgtacattctcaagcataataatctttttattttctttttatacatcaaaaaatagcataagagaagaaacagaaacccttattataaaaaatataaccaaaagaaaaatacacatgatatacagaaagataaaaaagaaatatatgctcaacatttatacaaatagaagccacacatgaataaagagatagaaaaatgcagcatgggaaataaaagtctgtagagctatatttgcaatgcagcatggcaaaaccaaaaaaaaaagaagaggcaactaatcaatagatgaataaaaaagaccaacaatcttaatattagtcataaagaaaaataaaattagcatgaatatcaagaatggatttgtaaagaccgcttagtttaatttggaaattagcagttaattatgtttaattatggaaaattatttatagatatttaaataattatttatgctgttattgttgaattctgaaatgcattttatgtcatttagtgattttcataattttgcatttccggtgcccggtaacatgaaactcggtgtttggctcagtaaattcacaacgtagtatgttagtattttgggacggtttattagacattgggaatgtcgggattggtcgggaatttagaatttcccaaaatacccctttagtgctctttatgctattttagtgtgaagaggcaaaatggtcattttccccattcatgttttgtcctttagtggacatttttgtgtatgaaattatataattttaaatattatttgttggctgaataaggagtggaattattcatttttatcatttatttcaaaattggaaaaaa

SEQ ID NO: 223620 - DNA, 930 bp, Cannabis indica
tgaacctttattaatcaagacaaatacaagaaattcaggttacaaaggaaggtaaagaaccattccatacacactcactgtctaatcctaaacctgccctagcacacacatgagcagctttattaagctcacgaggaacatggacaatgaccagattaggactgaacaacaatgagttcttaatacaaaggacaatatcattaacaacagaattatgacatttagcattataaattttatctactatgcttttacaatcagtttgcaagacattaacaggaagcttggtggcttgtacccaagaaatagcagccaaaatagctttagcctccgcaacctccggtggaactgaaccaaccataggtataattaggccagccttgacatcatcattttcatctgtaaccaccacacccaaactatgcttcctctcagaactgctaacacccgcatccgtattaactttccatccttcatgctgcaataattgaacctgctcattacatctgacattgatattatctggtttaaaaccaggtagattagcatgctcatactccaacaaataactcacagcctgatcatagagatgccagggtggcagcaacttcttattatgaaaaagattatttctgtgattccaaagtaaccagatgaaacaaaaaaatatagcacaatcatatttgtctaagagatcaacaactagagcaataaaatcataaatacttaatcttttattagtaagataaaagtcaaaatatggagaatgtttccaagctttcttaacattcacacactccaggaaagcatgctccacagtttcccatttcaagttacaaaggggacaaataggaaaaggtataatatgtctaagaaataaaagggaagcaactggaacagaattagataacacacgccacaccagatgtt

SEQ ID NO: 223621 - DNA, 1012 bp, Cannabis indica
ttttatttttttgaaaacataaaatcctcaccttaaataatagtattttatttatttatttacttttgtattaattttaaataattttatattaatatattatcaaattaaataaatatattttctcttttaaaaaaaataaatatatttttttatttatatatatatatttttcaaatatatcaaaataataagaaaaacaaataattaaaaatacttaaataataatattttttttttataaattactgaggtaaattatctttaaaattgatttttaatttatgctccgtggcaaatccataaaattttaccatcgatacaaaatataaataatcaataaatatatgaattctagccacctctcatttttatattttagcatttatagtatatttaaaattctctctaaccattatatgaatccgctggtgtttatactcttttttcttattaataatatatatgaataacacatgacggagctaggattagatttgagggggcccaagctaaactaaaatttaaataacaaagggtaagtctgtagtacactttcttaaagggttatttcggtagacctactatctgctcgacattcagaagagttttcagtccttttttttatgatcgcgtatgttgcagctatgtaggatcacctgtaaatattcaaaaaaaaatcgaataatttacaatgccgaaagtaaggttctcatattttgttgcacgcgtgactaattttctcttatgcgcgtggtaagcaactgtttaaactttattttcggcattgtaaactattcagaattttttgtttacaggtgatcttatagatattttctaaaacagataggggtctaccaaaacaaccttttagatgatatactatagatattaatattttcaataaaaatatttaatatcaagatttttgacacttgttcactactctttgttatagattgctctttaatttattactgcaaactatcattaattaattatatatactatt

SEQ ID NO: 223622 - DNA, 3469 bp, Cannabis indica
gtaaaataatttccaacaggtatcactattcatactcctttaattgacgggaggcataagcgattactcgatcagcttgcatcaaaacacatcccagaccctatctggatgcatcacagtaaactacaaacttttctttatcagatggtaggcccaataccggagctgtaatcaatcagtgttttaattcatgaaagtttgcttcacacttgtttgtccatagaaattgctgattctttttagttagttctgttaagggtgttgaaatcttagaaaatccctcaataaaccaacgataataaccagctaatcctagaaaacttctgacttctataactatcttcagtctcgggcaatccttgacggattcaatcttccttggatcaaccttgatcccatccttactgataatgtatccaagaaaagacacatgggataaccaaaattcacactttttaaacttggcagacaatttatgttttcgtaatcactgctaaaccatttggaggtgttgctcatgcttcggttctgattgagagtacaccaggatgtcgtcgataaatactacaacacatatgtcgaagaaatccttgaataccctattcatcagatccataaaaagctgccagagcgttggtagtccaaaggacataacaaaaaattcatagtgctcatacctagcgcagaaagcaatctttggaatgtcgtcctcttggattctcaactgatgatagcctaattggagatcaatcttagagaatactgtcttcccctgaagctaatcaaacaagtcatcgaacataggtaaaggatatttattcttggtagtttatttagttctcggtagtcaatacacatgcgtagggatctatctttcttcttaacaaacaacactagagctccctagggtaacacgctgggttgagaaaaccctaggtcatgcatcccctgaagctgaagctgaatctttaattctttaagctctattggggtcattctataaggtgctttagaaactggctctgctccaggtgctaaatcgataacgaaatctatttctcgcttcgcgatgtacatctaaaaattcctgaaccactctgatgtcttttggttgaattatttaggtagtgtggtatccaataccactgccaaaaaccctaggcatctatcttgtaacaaatccctagattttaataccgagatcactagaatttgggatccctgaactgatcccacaaatacaaatagttcctcgcccttgagttggaaggtcaccatcttctgcttacagtcaatactagcagaatacttggacaagaaatccattccaagtatgatatcaaaatccaccaagcccaaatcaactaaatttgcactcaactctctatcctcaattctgatcggcaaagacctaatctactttttggagattactaattatctgccaagtagtaggattccaaaaccccttatcataaatatcaaacgatctacccaatttatcaaaaattctggccgcgacatatgaatgagtggcccaaagtcaaacaatacaaagaaataagagttgttgaccgagagctgacctacaacaaatgaggggctagcttctgcatcagcctgagtaagagtaaacacccttgctgaagcgggttttgcttctgtcttttgctcttctttcttgagttgcaggcagtctctcttgtaatgtccagtcataccacactggaaacatccttaccctttacaccaacctaaatgattcttcttacagttgggacatttcgagtaagtgtatcgggtttcagaaccactctgatggttgccacgaccttggttccctcaaaacctcttgttctgactcgagacatcaagtgcaaatggtgcctttcttttctgatcagtggttgagtcactacgacccctaccataactagaggtaggaagagcagtaaccccaccaataatctgagtcccctaggactcctgaatgcactcaactgtgccctcagatcgtagtgcttttcccaccatatcagcataggtggtgttatcatccgttgtaataattaggtcatgtttgattttagggtttagtccatcaagatatttttctttcttactgaagttagttggcacaattcctaaggctaatctggccatcctattaacatggattgtatactctgtaacgatcatattttccttctgagtcagctgagtaacttcttttctttttgtactatggactacctcattgtagtactttacattaaataactcctgaaactcttctcaggtaatggtagtagcataccgagtaagagccaccatatcccaccagaccagggcatcctcctggaatcggatttgggacaagccactttgtcgtttccagtgactcccataaaatttagaattcgtgtaataatagtcagccattgtttggctttcatcacatctggacctcctagaaaaactggaggtgcctgcttacaaaaccttttgtacagtggttccatccgattcacaacaacaactagcccttcctgcacagtaggggcaagagccacttgcatttcaggagcaaccattgcaagagcaccctactgcctcaaatttcttatttcttcgtcttgttcattaattttggcttgcattgatgtaaacctaccttcccaatcccgggcagcatgcggtgggttaacttttccttgactgcatgccctgcctattgggcctctaccttggccacgaatatttaggggaaactgaactgcctaaccgccattggatccaaccgaatttccctggcttctcgtgtttctcctagcatccattctaatagaacagcctacaaaacagtgagctagcctggtcacgttacgattaagaataatttactaattattacttattccaaaaattaaagcatgtgcctattcagctatcaggctactaacatgtttcctatcaggcttttcttcaaacataataataaaataactactaaagcaataaaggcttactaaaccacgagtcaagcttatctctaatgatgattgtacatgtcgtaatgctctttagaagacaacctggtggctctgataccaaattgtaaaaccctactagattaggcgtgttatcgtgatttcaaattaattgtccaatccgttgctaactaacgggtttattgaaaaaatgtgattaattaaaactttactggattactctaaaatttcaaagtaaataacctacatataactgagatcccaaatttaaaatatttacaactaagttacaaaatattcgatacaaaagttggcacctagcgactatacaaaatacagactgttgccccaaatatcgtatgctctaagcctaaccaaccaacatgtacgatattcatccgcttgagctcactactgctcagccttagctttgcccttatgtaaaagcccgcttagtt

SEQ ID NO: 223623 - DNA, 1249 bp, Cannabis indica
ttaaccagtttctactgcagaaaagggtaacccttggttttgcatcaaaaccaaaccaaaacacctcctaacctattgaaactttctagaacattgcaatactataaaatcaacataatcaagcattcaaaacccaaaattacactaaaaatgcaaatccaccatagttgagtgagattagaattcttgaactcgacccaatcaaatcaaaacataacaaccatagaaacatcaaattcatacttaaacaaccttcaattaaacttaaaaatcatgctctaaactcaattaatcctacagccccaaatttaagcaaaatcccaaagaaactcaacttaaaccctagaaatcaagaagaataggtagaggacttacctcaaagcttgaagagctcctagacttgattaattcagctaagaataggtttaattgtgaagaagtttactttgattcttgctggttcttagggctttgaaagggaagaagagagagagagagagagagagagaaagtagtgctatgtaatcttcttaattttttatttatcctcaattacctaaatctattaataaaaaataataataaaaaaatctaataataatcctttattcaacctagaaaaatcataaaggacaaaataatttgaaacctaattaaatgactattttacccttctaataaatactttagttaatttataacctaagggtattttggttattactagctaccccgattaaaccgaaaactcattattctaaactagtctggtataattctaatatatttcattctattgccatcctaacatctttgatcattttatcaagtttccactgtcgccgaactcgaaattattttattttaaaaatggtatataaaatatccacatgttccgataaaatttttgtaattaataaattacgcttaattattcattttctcaaaaattactaattaattcataattggcttaagtaagattataatcgtaccttaatattcatataattacatattgaataaagtatgtccaatttaacataatcataattttcaagatattacattaaaactcactgtagtgcgcctaaactagtaaggtgttacaattttacagaatcatataaaaagtaattacaattattaaaatttaaatatttacttataaaatatcaaatttttatatcacattgtataaattaattaatatagtttagttttacatttttaatagttttaattataa

SEQ ID NO: 223624 - DNA, 1743 bp, Cannabis indica
gaaaaaaaaaaagcttaggaaaaataagaacatttcgaaaatgatggagatgagaagatcagtaagtaatgagtttggggtaacatgtattcaactatttttttataagaaaaaaacaagaaaaaaattgccttaaaagaacaagtcatataacaacaaaacaaccattaaaaaacactaaataaatatgcatagaataagaaacaaaaaatatcaaatacataataacaacaaataaattaaaatgaacagaagatattgataagagaaaaaaaaatcaaaacatttacaagaaaaaaggaaaaaaaatgctaaaataacttaaaaacaacataaatatcttaagcattttaggtatcttaaattcttcatcatcaagttcaaaatcagagtctgcatcttcaatgatcggtttcaaacgtcttcattttctcttttccagagaatgaacaattgattttcttttgggttcaaaactatagaagatgtagggctatgggagttttctttgaaatatttcttacccatttttaatttactaacaaaagcaagagattttttttttaaatttaattcttaataaaaaaaatggtcatatgtgacaaccactttttcaaatcagcatttatcgagtcttatttatcactctttttttaaaaatgattgttattaaagaaaaaaaaagaacgatcacaaatgtgacaaccaacatcacatcaaatttttttactaacttttttaattaaaaaaatagtttaaaaaaaggacagaatataaaacaagtgtcaaaatggggttataccaagtttcatattgttttaaaaagactgtattaatatgaacaataaaaatattaatattaccgtgtcacagttgttgacctcgcttttagccaacgacagtgagtcaattaataagcgataagaaatataacaaaacagggcaaaaatcagtaaacaataaagaacacaagattttgaagaggttcggcccctttagttcggtaatagcctactctccttagattatattgacttgagaacaaagaacacagtgtttcctctctcaatcctctcacaatgaaatctctaagtattttctcttagatctctctctaattcaattctttctatccattttccagtgaagctagatcactatttatcgggctaaatgtatgagaaaaagtttatcttttgcttacaatatctatagttggtaagaacattcattacatatttagaatacatgaaatgagggattaggacagcctgtcgtatcccttgatcaatcccatgattgtagggattgcctttgtgcttgggcttcacgataccaactttgaagtagtcaggtcttgatacacggctcgaagaactaacttcactctttgctcggattatctgccctttactctgctcagtcaagcagactttgtgcatgcagatgttttgcttgcggtctgttcggaacatttgtcaagccaagtgtaaaaaatgacagacacatgtcactagtacatactaccacatcatagtacgaaaaatgggataacatttggcccccaagtttggacgggacttccaaagtcgcgcgtagacatcactcgatttgaagccgtatttgaacgggtggcgtgtctttgacgcgtctgttggtgatccgatgtgattctaactaagagtctattcgatattcggctcattattgctgcttgatccatacctcaaaatcttccaaaaa

SEQ ID NO: 223625 - DNA, 1853 bp, Cannabis indica
tatcatcagcaaatagcatatgagatatcacaggagcaccttgacaaacacggtagccttggagtaatcggtctctttcaaaccgagagattagagcagagaatccttcggcacaaatgataaataagtaggtggagagcaggtcaccttgtcgaataccccttgttggcgaaattggccccatgacatgaccactatggaagatagagtattgcacactagagacacaagccataatcaagttgacccatcgttgatcgaagcccatttgaaccgtaacaacacttaaatatccccattcaaccaagtcgtaagctttactcatatcgagctttagcgccatatagcccttctttccatggactttccttttaagataatgcatcacttcaaaggcaatcacaatgttgtctgaaataagacgcccaggtatgaaagcactttgggtgggtgaaataacctgatcaataataagcttcattcggttagcaagaactttcgcaatcaccttgtaggaaacattacacagtgcaatggggcgaagatcactcatggtagtaggagacttctttttaggaaccaataccaggtttgtatcatttaaattgcaaggaaaagtacctgactcaaagaaattacacgcagaagcaacaagatcagggcctacaatattccaatgtttttgaaaaaaaccaggtcccatcccgtctggccccggagctttgtcggggtgcatctgaaaaagggttgtccgaacctcatcactagaaatcggcttcaaaagatcagcattgtgggcatcagtaatagaacaagaaataccacttacaacctgattccaagcaacatcaccagtagcataaatatgtttgaaataatcaacaattacctcttcaagaacaccattccatgattgccaaacacccgaagcatcttgaagggattgaatattattactgcgcttgcgggcactagccatgcatgaaaaaactttgaatttttatccccactatgaagccaaaattgttttgacctttgcttccaatatagttcttgttgggcaagaatttcaaagtaattgttttgctcatggccgaaactggtaatagataaaggatcggttttacctttcaaagaagagagtttggctttggtctgtcgaattcttttcttgaaatcggtggttaagcttctcccccaatcgccaagatgtttgctgcatatgttgatcttttcttgaagtggcaggtgcatattcgaatcccagcaggattgaacaatttgagcacacatgggttcccttccaggcattttcaaaacgaaagagatgaacaggaacagtcgagatagcaggggcaggttcaagaaatataggtgtgtgatcagaagaagagacatcaccatttgtaagagttgcattcggaaatttgtcaagccagggatgagtgaccagtgccttgtcgagacgaatttcaacccagttctcagatcctttgccgcgttcccaggtataggggtgaccatgaagctccatatccaccaaatcacagctttgtaaaacatgttgaaagccttctatgagcgatgaaggataaggtctgcctccctttttttcattttgattaccaacattattaatatcgcctatgatacaccaaggaagttgagattcagtagagagagtggtaattaattgcaaagatttgaatcgaagacttcggttaggctcgccatagaaaccagttaaacgccatggagtgaggttgagagaggcgacttcaatgtcaatgtggctgttagagaaacccagtaaacgaacaccatcactgtaacgccacaacattgcaatacca

SEQ ID NO: 223626 - DNA, 1478 bp, Cannabis indica
attctaagtatagggggtatataacccactcgcttcgtactattgcttaatctattaaaagagttatgaatttttttgaggttttaaaatttttctaccttagtattttttacaccaagctgtaattaaactgcaatcgagatgataaataaacaaaaaacgcgagtacccgtgtactgcaaagaaatcatataagtaaatatccccgaagggatatatgttgttcaaaaggaaaataaacataaatttctctaagtacaaattgcgagtacccttgtaccgcttaagaaagtttggcaaaagtaatattaaagtaaaagctaagcattgggagcaataggggcagttggagtggtagattcatttgcgactttgctggcagcctcgtccacgacttcttcagtgtccgcaacatcagcatcctcggggaaaagatttctttcacccccttgagtctgcgtgggtgacatggctcgaaaagcctcagccatctcagccgcctctgccccaaggatcgagaagtcgaagtctggaatcttggaaagagttgtgtagatgtagtcagagaccgcctggtcgtactgcttctttccattctccttctcgacctccaagtcgcgagacatctcctcaatcttcgccttagagttcttggcttcaagttcgacttgcttacgaaattcctcgtgctctttgtccttgttagccgcttcctgtttcagctttttgacgctctcctgaagctgggcattcttcctctttaacagttcgacttccttggagccagcaacaaaggccttcgagaatatggtcatgaactgcgaagccatctccgcagagcgaggcataagttcctcagaaggagtcctctctaccttggacatgaactcctcgcccacaaacttttcctgaagaactaggaaatcacgtgctcgaacagctggatcgataacgactttcttccccttgtcctgtgtaggcttagctagcttcttggaagaatccgcagtaggggtagccacgacatcgctttttctcttctggggaacgatgggagacgtcgtcgccgttccagtctttgccttgcgattaagaacgggtgcttgttttagaaagtcatctctgcaaggacaagaaaagataagttaaaataacaataaatttagatgcattagtctatatgtgcgatatgttacctgatgtcggctgagaagtttgcttggaaaggtgtttgtctatctgctccttttgcttttcagacggctccttgtacactggctccctttgaaggctcgcgttctctggaattagcttatgttcccgtagtttcaaggtcgtgcacaataatagccagtcacaatcttgaacagggaggcttacgagaatttcagcggcttctctgcgagttgcatctagcacaggtcgagctggtctatctgcggaaattaaggaaatgcagattagctcaaaatcacaag

SEQ ID NO: 223627 - DNA, 1266 bp, Cannabis indica
aacattagatttttcatgagatgcaaagcactttgattgtcacaaaaaacagtgatgtctttagagtttatctccatttcatttgatactcctttgagccaaatagcttccttaatggcttctgttgcagtcatatattcagctttagtggatgataaagtaaccactttttgtaggttcgatttctagctaacacatcctccatagacataactacataaccagttaaggaccttctggtgtaaatgttacctgcatagtcagaatcaacatatccagttacatctccatccagctggtctttgcaatcaaataccagactagtattgaatgtccctttaatgtatctcattgtccatttgagtacagaccaatgtttttctctaggattggctagatatttgcttgtaacactcacggcatgagcaatatctagtcttgtgcacaccattgagtacattaaacttcctacccaactggcatatggtatctaactcatgtgctttctttcagcgtcggttgttggagcttgtgtaatggatagtttgaaatgttgtgctaatggtgttgatatagctttagagttgatcattccaaacttgtcaagcaccttcttgagataatttctttgagacaaaatgatcttgtgaggcctttctctttggatgtcaatacctagtattctttttgctgtccctagatcattcatttcaaattcattgcataggagttgcttgagcttttcaatctcagttctttcctttccaacaaccagtatgtcatcaacataaaatagtaggtatatcttatttgcaaagtatacacatgggtcatatatgctcttgatgtagccaatcttgttcatatattcatcaaattttaatttccattttcttggagcttgcttaagatcagagggatttcttcaaaagacaaacctggtctttgtctctgttttcaaaaccttcaggtaattgcatgtagatctcttcttctagattaccatgtagaaaggttgttctaacatccatttgatccacctcaagatgaaatttaacagcctttcacaaaatcattcttattgaggcttgcttaaccactggtgaaaatttttaattaaatctacaccctcttgctcagtgaaacccttagctactagtcttgctttaaaccactttgtaccatccttggaatcaccttcctcttctttttgaaaatccaattacagccaacaactcttttgccagcaggcttcttaaccacaat

SEQ ID NO: 223628 - DNA, 1011 bp, Cannabis indica
tgactttatgttcaagttatagcttttttatgcctaaataagtaaagttcttgttggttttcttgtcagattgaggtctctaggatgagaacccttgcgcgggtacataaaccctaagttaggcacacatgggtgcgggtcctggcaccaaatgactggttaagattctcataagtttcctagaggtgccacgggaccctcaaataggatatcttaacttattcgacctttataagtcttgatcaaagtcccaggattggcttgagtgtcttcaaggttaaggtccaggtctagggtctgtgattggggttgagtgtggggccgtgatccgggtccgtaaccccatgccctttgtaattattataatacaagatagcatagatcatttgttatgtattaaataacatattcacattgtattaaaatttgtagtcgtaataattaatacaatacaaaattttattcaaatatagtgctcattgatattaaatataatacgactcttatacggcctaccaaacgaaccctaaaagagaaataggaaatcatgtcgttttttttccttgtaagagtgtcataaaagattgatgaacttgtgtgtgttccacagtaaaaggtatcctcccctatgaagacaaattaatgactggtactggtagaatacatgttctcttcttcataatactcattgaaaccaagtatttccttcatctcttcaaaagatggcatgctttcctgaggaacatgcccacttttaatagaggtaagagcatcctgcagttagcaattttggagtcactttcatggtgtaaaaaatctgaataaatgaactcaatattaggtttctattttcctacacagaagagattaataataccaaaacttcacaacatagaaactgaatatgtatatgtagaaacaaaaagaacaaagcacactcctacaggcttgtgcaatgacttgaaatcactaactagtagtatattttttgcatttccatttaagcataat

SEQ ID NO: 223629 - DNA, 4527 bp, Cannabis indica
gcagcaacatattttttttggtttttcttctcaattctttcaccacttgtcctcaattcttgtaaatactttctttaaacacccgaggacctgacacaaaagaatcaagcgtaaaatagtcctaaaactagaaacaaagagtgaaaactaaccgaaaatacgtcccgaaacttagactaattttagcctaacattaatacacgcagacttaagcgacaaaccccagcaaacccaaccctcgtggtctagcttggcctgaacatgtacaatgcatcgcaaaaaccctcgaccacatcgctactcaactatcgacttaccctttcctccataatagagtacccatgagctaaggccagcaagacagtataaacaataatatgaacaacaattataaccacttaagtgatgatgccactccatccatagtctatttgacatagacctacgtgttacgctcacatgtttatttacaataaggccttaaagtagtttatctcgagtctgagtaccgaatctaacctaattatgccttaactgcataattctttatatcaacgtatatataatatattatggcattcatattcatttaaattctagagtaataatcctataacacataaccgctaaatttagggtaataaccataatctcaatttctcgtattacatacaaaataattattgggatttattttaccaggatttagatttactaacatgtatgtttaattaacaccttaaatatgaattctctaaaacaataaaacaaacacataagagtttagaaaaccttacattgatcgaagcgaaataatataactcctttgggtcaaaattacgaaaatgcccctaatacaccaactgggtcttaaaatgaaataaatcataataatttcacatattaaattatataataatataattcctcattgatacataattaatctagttagggttgctaatccagttattaaaccttagggtattacacaatacttgtcgcaatggttgatttgtaaggactttaatagggtgtgcttgaaaataaggtcacatttttcaggatgcatgtatcaagcaaagtgtgagtgtcttgagtggtgggtatcttgattctgcccccagtaaccttttactcaaatagtaaacaggttgctggttcctgccttcctctcgcacaactgttgctcttataacactttctaagatagccaaataaatgaacaatgtctctctagtgattggtttggccaaaactggtagtgtagaaagatgtttctttatctctcagaacgcttctccacactcttcattcaactcaaattttttattgcctcgcaagatattaaaagttgagaggcatttatcaattgattttgagataaatttgttgagtgtcaccattctttcagttaaagattgaacttcctttggtttagttggcgaatgcatctcgagtagtgcttttattttatcgaggttagcttcaactcctcttgcattcgcaatgaaacctaataatttccccgaggaaaccccaaaagagcacttcttgggatttaattttatatcatatgcttttagtatggcaagcattctgcgagatcctttgtatggttcttatttttgacattctttaccaatatatcattgacatagacctccatattttgccctatctagttttcgaacataccattcacgaggtgttggtatgttgcttcagtattttttaatccttatgacatgactttataacaatatagtcccatattaatcaaaagcttgtatgttcttgatctagtacatgcattttaatctggttataaccagaatatgagtccatgaaagtcattaattcatatcatgtcgttgcatctaccgattggtcaatcctcaacagtgaaaagcaatctttagggcatgctttatttaagtcgaagaaatttatgcatgttctccatgtcccatttggttttgggacaacaactggattggatatccacgaaggataaaatacttatcgtatgaagttattggttaatagtttatcaacctcttcttttagtgcattttgtctcttaaggatctagaggccgtcgtttttgacgttttcaaggatgatttggatcaatgttaaggtgatattatattacattcgggtttatcccgaccatgtctgaataactccaagcaatttgatcttagtttgccttcagaaaggcgattagttgctattttagttcttcctccaaacccttccaatattaacacatttagtgggattatttggatctaaattcacctcctctaactcttcgattggcttgagttggttgttctcatcatggatcctaggacccaaatcttctatctatttctcattttcttctgccaaaatcaccatcaattgatgattggtccttctattttttaattccacgctatagcactacagagctaatagttggttgcctttaatagtacctactccagagtgaatggggaattttagtgacaaatgcttaattgagcctattgcccccattcctattaagatatggcgacctatcagcacgttgcaaacagaagggatgtcaacaactagaaattcttgcatttttgagttgtggataatggtggttcctctagtcctatcttatttaaagtttccttataaagaatattgacaaaactcctattatccacgagaaccctttttaccctcttattagcgagttgcaccattattactagatgatttgtgtgagggtacctacgagtgatgcatcttcatcagtaaagacaatggaagttcaacaaatttaactctttttagaaattctggagcaaaagctaatgtctcgtttttcacttcatttatatacctcttctgtgcgttattgttttttcctgtgaggtgtggccttccagaaataatcaagatattctcgccctcaacagagggaggttgtaaccttgggttattcgagttattagtcaaattatgtttgtttccttgtggcctcacatattacctcaaataatctcgtgagatgagattttcaatttcaactttcagtttacgacattcttcaatggtatgcgtgatatctctatggaaacgaaaatatttattagaatcttgcttgtttcttgcatgtttcattgggttaggtctgcgaaatgtgacctggtttttgttggcaatatagatattttcacgagtttcattcaattcagtatatactgaatcaatgggaacatatttctcatgcttcttttgtttcttttcgtccttggatgaatctctcgactcatccttcctcttggtattcgagctagtaggatttggatttcctactttggtggtaacagtgctcactgttgtggtacttgtgctaggcttatctcccaagctggactttaacaacttaatttcatttcaagcctcttcctctcacactaaattttttgctctttcattgaactcgttgatatttctaacaggacaaccttgcaagtcatcccataattatgcccctacagttgacaaatcaattgttattctagcttgaaagactgtaaactgaatgttgtcatttagattcctgtctttggctgcagccatactaaaatgacttaggtacgccttaaaggattatcctagttgctacttgacattgattaacgaagatgcttttgatctctagtctctcacatcttggaattgctttttgaaatctttcgataattattcccaggaagttatagaatggctggtaaatttgtcaaaccaactacttgttactcctattaatgaagttggaaataatatgcattgcaagttgtttgaaacattacttgctcgcattatggtactgaagttgttcaggtgcgctacaggatcaatggtaccatcatattgtgcgacatttttgaatccttaaggaaattgcaaattcaaaatatcataatggaatagttctgtctcttcatttgagtcatattccagtagtttcccatactctatgtcatggtatttcctgaacttatcttcccactatattactcgcaattgtattagatccatagactgttgctgtatgggttgtatgcaagcattttgatttagttgattacgtaaatctggtgcattaccatttagatgctcacgtaggttaggttgtctttggtttaactatttgcggagatcaggatcacgatgtatttgattataattactctcggatcttgtcctgagtaaattttagattggtaactgcgagagttacttatactttcttggtcattataataacactgtgatccaccttcgtctcgtgtcttcctatcacaggcatgagctctggttaatctactgtgcttgtgggtccttgaccttgatccagttggattcgtacttgagccagtctcatgtgactcttcttgcatcagccttctcttttggaagagatttgacacacaacccctactcaagtaagtgttgttgggttttatgccc

SEQ ID NO: 223630 - DNA, 1982 bp, Cannabis indica
agaacagtgtgcaagaatatgggtatttatttcaacatcatcttatttattaatgtttactcacattaggtgtatctttacaatataatattttatgtgttttaagaaattttaaaacacatgcagataaataatgcaatttgcatattatgatagtgaaatcaaatatagatggagaatactacattaaagtttgtgaggatggatttgttagaaatttattggggtcacaattgtatatataaaatgtgtgttgggtcatcaagtaaataagtcaaatttatgtgatctattttagaataaaatttatgacttaagggcatgattgtcatgattttaatatgtggatacataaggacaatttctattttgatgaggggccaaatagaaatagtcaataaatattaccaatagttttgtatgtttgtaatataaacggtaatggtccacaatttgtatcgtatcttttcactcttagatccccatcactaagagaaaaagtttcagagaaaggttttgatgcaaattgaaagataatacggttaatacctttttcgagcgattcaatagacttcggtacgcttccgctaatctataatgctattgtttaattctcatgaattaattggggctaaattaagttttaaagtgttgataacatgtggtatcaagagcatccctaaattagttcttgagaatttatggtagtattgatcttccatttaatttttttttttttttttttttttttttttccatttggaatatttaattaatcatgcatatcgtatatatatgtttcctactttgaaagtggtggaaatttgtccctaattcaatcgatatatatatatagcatgcgattgtaagttttttttgattttatattaaataaatatatgtgctgtagttgaaacttatggcataggaaaatctgaaattttatatatatatatatattctactagtaaaaaattacgtgcaaggcacgtatattaaattttatgctaggtattttttaaaatattttaaaatgatacaattaataattgaagaaaaaatattattagttattatgtgagattattattatgtatatctaactaatgtaatttataattttggcaattaaaagtaattaaaccttaataatttaactttgatatattcttaaaataatctaaaaataaactaaaaattattttcaaactacatgaaaaaaataaattacttttaaaaattttataatatttttatattttacaatttaaaatcttaatttttatattaaatataataatatttaatatttacaaatattaaatataatattataatataataaatattatatatataatatatgatatcatatacattccaaatcgaaaaatctcctcaggtctctttatttttgaattgtgaatccaaataattacaaacaataagtaccgtacataaactggtaacaataagtaacaataagtaccgtacattataaattgacagtgacacaatagtttggctacttgagtttatgaaatgagtggtctgctcaataaacccatgcttgcaaagttcatggatctatcaatcgcaaaatatacaactgacatagcaaataaaaacgctataatatacatattacacatacatgcatgtacaatagcaacgaaaaccttacaaaccgaggaaaaagagatcatcataggagagtcgatcaatataagttcaataaatgaaaaacgaaccattattcttcaccgcaccgcaccagatcccccctcctccttttcttcaccgccattatctctcgtttccactggaaaatctgaaccaaaatctaaaacaataacaacacagttacgaatcaagagacaagaagataacaatttaaaaaaaaatcagatatgaaattgctcgtagattacaaacctaagaggaattatacaacctgagctcgctcaaactcgagtcgataa

SEQ ID NO: 223631 - DNA, 2205 bp, Cannabis indica
cccacatagctcacaagtaacttaagcctattttacctgagctgtcatcaacttagcagggcctccacttgggctgtcaacttagtgatagcattaacttcgtgcatacctgcaactttcttcaattggcttctctcagttggccattgttggttattcatggccatctcttcaagcaattcataagcctcatttgcactttttctcataaaatccccatcagctgcgacatctataattgttcaggtattaccaactaacccgttacaaaaattatggacaaacatccacttctcaatcccatgatgtggacattttttgatgagatcctttaacctctcccaagcctcatagagatattcgttgtcgagctaacaaaaatgattaatctcccctcgcagcttggtagctttagctggaggaaagaactttgataagatttcattatccagtcggtccatgtatcaatggagttgggtggcaaggacaccaacaaactcttagctcgctccctcagtgagaatgggaacagtctaactccgttcactttgaatgtttgacataactccacgaagttatatagatttaggtttggatcttctcatagcagtccaccaaactggactgaagattgtaccatttggagtatggctagctttatctcaaaattgttggcttctacggcgggtagtcttatacaagactgaacctccatcaatgttgtgagaacatagtccctcatactatggttaggtggattacgaccatttgcctggtcttctatggcacccccattatttttgttattggcaatcacctcttcttggtcaacccttaatgcagatctttctaaccttttgttctttctattctatctacaagtcttctcaatctcaggatcaacatgaactcttgaactagctccttaacgtcgcataaaccaaaggcacctgagatagaataggaaaaaaattaagacaaaatagttactaagaagtaaggaagaaaaaccaaagcagaatttagtctaatttctgtaatatcaatttttaaataattcttcgacaacgacgtcaaaaacttgtcacgaaaattataaatagctacacaagtgcacgtaatcaagtagtactcacacatgtgaggccgattgcacagggaattgaactaaataccactaaattagacttatatttctatttgctaaacaataaatttgatgaaaataaaaataaggaataacaataaagtaaaagtgagcaataaaattgtttaatcatggatgagaaattaagaaagggaatcttgttgcttcaattactcaatttttaattctaattactattcatgtttttttaaagtgaatgacatattataaaaattaacctaactctttttagatcttttatgtcctaaatcacatgttatctaatcatctctgagataaaataacatacaacctacattaaaaaataatctaaatatcacgaaggttatgcaaatacttttgtttcacatcaaaacctagtttatccaatttcatcattcctaaaacttactttttagattttgaattaggatcattgagcatgcaaaaggttatcaatcttaaatatataattaagcacaaatatagataaattcacaaatatgagagaaaaaatagcacataacattaactcatagagtaatcttaatggtaggtgcctatgacttgtcctgtccctatgggatttatctttttgggttaattaattatttaactaattcaattggaaaaatatctaatttaaaaaatagttatagatatttcaaggttatttagacattttctcgagtatttgagaattctctcatacatcagtaaccgaatttagtcatagatatttatttatttaaataattaaataataattttattaaagtaatttaactactataagtatgagcctgatttgacaaatcaaatccactcttttgttgctatttttgaaatagggagagaaaaaaaaataatttttctctcaattgttcttgcacatgtgttgagagctcaacaagaacaactgatgcatgttgtaaggtacaataaatttactaattatttttatttctatattaccaattatttcagtgtaacggtaaatacatattgatcccacgaggactattattaatttattattcaaaaattagtgacaagaa

SEQ ID NO: 223632 - DNA, 3677 bp, Cannabis indica
tatatgtatcttgatatctatcatcagccagcgccacgtaaaaagaaattcgttctatatattattttctcaccaaaagttttcttagacaatgattacagtttatatatgtatacccactcaaggagggacgaatgaaattagttatgatgaattataaggagagattatcatcatatagcttatgctgttgtgtttatcttttaagttctcatactttggccaccctaaataactttttgaaaattttaccaccctcttatgaattgatttggtctaaatttttaattttttttttcgaatcaaactagtgttactgtttttcataaattcaaaaccaaatcaaactagttaattaaatattcaaatcaaaccaaattaattcacttaagaatacattgatttagttcaaaaatatagtttgtattttataattgttttaattttcttttaagtaattgttcattttttcggtaattttttttacttttaataaatttataatacaaataaaaaataaaataaatattctcaaaataatattaagttatgttagaatgcggaagcgtatggttgagaaagtaagaataggtgagtgtatagtaaactgcatgaggtttcatctaaaaaccaattgacaatgagagagtagcccctcaagatggtgactattttcttgctcaccaatcttgcacggctcgatcacaagtgactcttttagctcacaatctttttttggctcccaaaacacaagcggttcttttggctcgtccttttggatcaatttttggatttggatcaattagagttttagtttagttctgataccatgttataatgcgaaagtgtatggttgagaaagtaagaatagatgagtgtacggtgcatgagatttcatctcaaaagcaattgacaataagagaagtaatatatacatcttatgtatggtatttaatttccacatattatcatttgagattctctaacaagttaataacaatattctatctaaaattgttctcaaattttaatattatatccacaaaagtatatatttagtctataaaaataaattatacggattgatttggtttaagttgagaattttaaaattgtgattgaattagggaattataaatggtttggattgaccaaacaattattgctagtcatttaatccaatctcaaatgatttagtttaaattggtagtttgaaactactaattgcagattatataaacaactctaatttcttatttgaattttacgcgtaggtggttttacaaaaatgatcaaaataattatagttattttacagtgtgacattgtaaattaacctatttttatcagttactataattaataagctatcttaattatttgaatataaaaggttggccaatattatgaaatgcaagaggtcaatgtgaatatgctcctgaaactcagctctcggagtaggttttgactcatgggtcactaggtgccttactttgactcaagatcgagtgatccacaaaatgctgccgatactattcttgctatcataatttttaaaaaatgtcgctaagtaattgtagagtgtcaatattactatctctaagactaatactttcttgattatcaacgtaatatatatgtgtgctcccatctctaaggaggccatggaccttgaaatgggggacacacttgatcaactcagaagaatctttggaaaaattttctttcattgaaagaggatcaagcagttacaaaaatttataatagtatatgttcaatcatatatattcatggcacaatattgttatatattataaatggcacgagagaacatacctatgaggattggacggattttgtgtactgttttgtatttacaactatgactaccaatagtgttctcacaaacttgatcatctagacatggtcttggattctcaacgcattcatcaatatctgggtacataaaatttaaaatcaataagaatataataaatagtaatataaattaaacgttttgcttttggaggattatttagtcattaccttgacagcccataaaaagataaggatttccacgatatccctccttgcacatacaacgaagccgatctttggttatagatgacttagctccttccgaatagcaatgggagtactttggttttaaaggtgaactcatattcttgaattcgttaaggtattctaagatgtcccagtctagagtcactggaacgtaatccatgtttcgaacaacactcaaactaacatgagataaccaatcattgtctaccacgaacgcatagctacaattcttattgttcgaattgaatcgattgatctctatttcgtagctttctaggtaagagggaataatggtctggcagcagttccttccataacagccgccaccataggagttattattgctatctgtacttgaggaaatattattcatactagcagcgcactcagctgtacacccaactgcctgaaagatcttgttatcgggtatagaatctatgtaggcaaagacatcgcagcccacggatgtgagtctgttcttgctgtcggagtaggaaaatgggctcagcgtcagatttgctgggggaagcagattgctctcaattgggcttttcttatctgagcaattgaagaaattgatggggttttctgtcagcagcgtggactcgtcaattgaaatcttcagaacctttaagtctgttacctgtttgaggaaaggtgtctgagaaccatagacgtttttgcagacgatttcgaaccatttgttaatagaacaatctgggccgattccgaatggaaatgggatgctaacgttgccgcagttcatggggcagttgggatttggggtgatcgttgctagtgtatttgagatattgatggtcaaacacgttataagggtagcttgaaatagcttcatcacaacttccgatattatcatcttgtggttttcttgaacagcaaagtatatgacttaggcaatttatatatgacttgcttcatagagtacctctgttttattacttcagactgattaactgattgctcgtgtgggacacaaggcatattagtaactaataattgagataaatatcattgttttatagaaaagcattccgttaatcatatttaattcatatattagcaggggagttactattcaggcggctatatacagaaataattgcttgctaagtagtggccccctattttttacgaatatgtcatcagatgtcaagaggctagggaagtggttactttattatgaaaatattttatagaaataaataaatatattggctgtcccaaagctcagtactatttccataaaggcagtgatggattggaaactatagtcgcccatgggctattttttgttttataatttgagcacaccctgtacagataattaattgaaggcttttctatttcaactcaaagtgtcatgtttcctatcgtgtgtgtaaattaagaagaaaataatcttattttgggatctgctacatattagtgagcatgtataattgaactcggagacgaccatggctgctgcagtgtccagagcagcctttactaggaatgtcaatcgcccggcccggcccgatccagcgcaacttctccgtttggcctagcaggttacgcccgacctgagataa

SEQ ID NO: 223633 - DNA, 1179 bp, Cannabis indica
tgaccttccccaggcggtgtgggattgtacagcttacccagtatttccccttacggatcacgggactactgactgtcacaaatttaaaatcacttttagctgtatactcaccataagagtcaaaacccaataccaataattcttagaaaccgaattagaaaggagaataccaagaatattggttgccacttcctcatcaaacaagtctttaaaaacatcaacatcccaagttttctcacaccacaaaaagactactaaccttctcatttgccaaactatgatccaaactagctagactcgaaattgaaccattcaaaagccacaaatcatcaaataaaatagtctcctccccattaccaattccttttctcgcccctttacgaaccaactcattttcctcaacaagtctcctccaaatataacttggattattaccaagttctaccaaaatgaagttcttattcttaaaataccgagttttgtagactttaaaaaccaacgaatcaggcttagtcaaaaaccttcaagcttgtttacctaatataaccaaattgaaatcatgaagagagtgaaaactcaatccatcaacctccttattatgtgccatcctctcccaactcatccacgaaatttcttgacgggaattagcagacgacttccaccaaaaattaaccataagttgttccaaatcatgacacgttctcgcaaggaaaaggagaacgctcatagcataagttggaagacttttaaccacattacgaaccaggacctccttaccaacacgcgacaagagtttaccattctaactttgtatacactttctcatcttttattttcaggaagcccaatacaatagagttgtttcgactgattgtacttgggagacccttgtacatactattcttatcagcttcatttatattcaaaataacacaaataatctcccgaatagcaccattcacaatcctactaaaggaaaagtagatttagtcaaattaatatattgtccatacattctctcaaaactatgtagaatctacattactctttgagctcttcctgtgttagcttggacaaaaagatagcaaatttatttatctatttattttgaatatgcaattttattaataacaatcaactaaaataatactctacaatctaatcgggacatctccttgt

SEQ ID NO: 223634 - DNA, 2386 bp, Cannabis indica
catgctcctgatgctgaagttgaagaaatgggcgaggactgggaggctcttgatcgcgagtcagatgaggaagaggatgctgagggaagcagaactaattcagtagacaatacgcaactgaacgaacccttctcatgcgaggacttggtctcgcgagtcacgaaatctgacctcaccacctttacgagattgaatttgctgtgactttcctccctgtgtcctcgccctacccagagagcacatctttcttttactaaccctgcgattatccccacagaggatgtggttgtgtcaatacccatactttgatgtggagtatcaattactttccatccattcattactgctattctgaagcggtacgatgtatcccccttccaactaaccccaaacaactatcgcatagctcttgggttttacgcgatgtacatggagtacgcgcatagggagccttcaatggaggactttagttatttttatgatataaagagcgtgggccttcataacagtttctattgcttcagcaagctggccacttatgagattaatggggtagaaggcatggtttcaaatatgggagattggaaatctaaatggttctatgtgtttaaagtaccggggattaggaccgattttaatcatcgacccaatgcgtcgcacattttagcacttagttaatatttcatattactttgttcctttgtctaacacattcttccttattgaccgcagacaggctggctcgacctgtactgaccctgctcgcagagaagacactgaagttctcggtagcctccctgctcaagatcacgactggtgactactgtgcatgaccttgaagttacgggaacacaagctaattcttgagaatgctagccttcatcgggagccagtatacaaggagccatttgagaagaaaaaggaaaaaatagacaagcgtctttctaaacagacctcccgatcaacgtcaggtaacacatcttgcacataagctatatatatacaagttatttattttaacttatcttttcttgtcctcgcagagatgactttactgaagcaggatcctgtgctcaatcacaagccgaaggctggaacaacgacgacttctccagttgttccttaaaagaggaagagtgatgtgatcgcgactcccactgctgactcgtccaagaagcaaaccaaaccttctcacgacaaagggaaaaaaaattatgaccgatccagttgttcgagctcgcgacatcttagctcttcaagagaagttcgtggttgaggaatttatgtcaaaggttgaagggactccttcttacgaactaatgcctcgctctgcagaattggtttggcagttcatcactatgttttcgagggcgtttgtcgctggctccaaggaggtcgagcttttgaagaagcagatcgtccagcttcaggagaacaacaagaaactgaagtaagatgcgaataccaaggacaaagaactcgaggacctccggaagtctaaagagcaggtggaacttgaagccaaactttctcaaacaaaggtcgaggagttgtctcgcgatctgaaggctgagaaggagaatggaaaaaagcagtacgaccaagcagtctctgattacatatacacgactctatccaaggtgccagattttgacttcttgatccttggagcagaggcggctgagatggcgaaagcttttcgtgctatgtctcctactcagactcaatggtgtgggggaaatcgttttccaaaggacgctgaggccgcgaatactgaaaaggtcgctgggtgctagcaaggtcgcagatgggtccactactccaaccgctcctactgctccaaatgcttgacttacttaatttttatttctttaactattgaaccttttaagcaatacataggtactcgcattttgtacttggacaaatttttactttactttcttttgtatttcgaacaacacatatccctttgaggatatttatttatgctattttgtatgctttccgcggtacatggtactcgcgtatttcttaatcgcaatttgctttttccaattacagcttggtgtaataaaaaatgctaaggcaaaaaagtttttgaaacgtcgagaaatcaataactcttattataagaaatcgatagtacacaataggccaatcagtagtacaaagtaggccatataccccctatacttagaacatttatacaaataaattgactaagtataaacacacgtcgagtgctattgatacattgcgagtactactgataataaaacttcaaactctcgtcattccaagctcttcggatcgcagtgccatcgagttctgcaagtcgataagttgcatggccaattttttcagcgataaggtatggtccttc

SEQ ID NO: 223635 - DNA, 1381 bp, Cannabis indica
gcttaaagcggggacgttacaaaggtaacgtataaaagaacgtcaggaagagtagtggtatcactaaggtaatgaagattacctaaattacttaaggtgatacgttaatgataaagactgctttataattgactagatagtcaatatggtatataaggagaccattgaaattctgggaaaggattactttattaatcaattatggaaatacatactcacccagaatgggaaagagcttatgaattgagatacaatttaatggacatgtatttgagtgattagtgaatgttggattacaaagtaggttgtttattaaacaacgagttataattttagagtggttaaccaagtatgaaaatagtgatgattgcaaggaattaatggtagcgtattaaccagggagtgaaaccttagtggtaataacgggaaataaatataagtctcttagttgatgaatcaataccatcaacggaagactcactacaaattggagtggtagctcataccaagggattgtcaataaaacagaaaatatacttgaaatatttatatttctagatgtgttaaaaaggggaaactttaggatttttacctaacacagataggaagctttgagatcaaggaatgatctttgatcaattgttattagctaaaaactcaggaaatggatgcaagttaaaatgagcggagatggataagattcaagttgacaataagatgaaaattcctcaagcataagtgaacaaaaccgataaggaatggtaagaggttaatgaagggagtgatagaaattagatttaattaatgaaggaatgaaagcaagaaatacaattagaaatgacaaagaaacatctactttctgatgacccaccattagcttaccttggagttaagcatacttaagtttaggtaatctcaagatgggaaatcttccggggagtcatctcaaaaagcataggagtgaggacaaagtatgcaaagatccatattaggatgtagaatcgatagtcgttctagagattatcaagagaaatgaatgtgttaacaagtaaaaatttacaaggtatcaagatgggttcatgttaatgggtggaaataagaaatgctctaattgaatatctatcataaatgaatacttaacttgtaactaagttaagtcagtagataagtttagaagatcccagagaggaacagaaaaacataattatgaattatgtacagtaggatcttatgattttaactgagtagtaacggttggacataccgagttaatatgttctctattagtgtagacaatttatacaataaatgaggatatagaattcatacgaaggatttgtctaatcttgtgaaatttcaaggttgatatctttggctatga

SEQ ID NO: 223636 - DNA, 1183 bp, Cannabis indica
tattaataagtaaatcttattatattgaaatgagttttatttagggcataaaatccaacactcctttacccctaaagcctcaacaacctcacccgtgtaagtcccatggtaatatctggcaataaagtcaataatttggccattcgaatcacgtgcaaccacaccaaacccataggaaattttccttctcaaatattgcaccgtcgacattgatcttaaccgtattagaagcaggtgtcgtccattgctcaatgttactaccatcatgcaaaagagaggatgataataaacatgttttatcttgagcttttcgccaatgatcaagagtaacccaagctgaagtgagtatttgagtagaagaggaagcttttttatcccaaactaaggtgtttcttgctttccaaagagcccaacaaatcataaccacacggcaaataaatcatcatcatcatatctattaaacacactgtcaagccagtgtccaatagtaccattcgaatcagcgtgagggatcaaatcagctttgtgccaacaacttaaagcaagagggcagctgagaagaatatgagaagctgtctcaacatgttgaaggcaaacaggacaagttggggaaatacttacacacttagtaaccagttggaggcaagttggaagagcatcagatactgctctccacatgaagttcttcactttaggtggtattttaaggtgccaaagtttgtgccagaatcccgaattgttcacaccaggccgagtatttttctaaagttgcagcatggaataagcagattttacggtgtagccgcctgttctatcaccagtccatgaccaacaatcttcgacaccagcagaactaagggggattccaagaattaaatccgcatcccgagtgttaaacatatctttgacaagagagacatcccagcttcgagtagaaacatcaaggagagaactaaccatgtactcatcaaggcccggtcctgtagtagagacataggggttgataggatcaggaagccaaggttgtttgagaatgtgtgttcaaaaccaagtaccgatagttattctagccccaagacgaaccaaatgttgtgcactccaaatactacgccagacaaaactaggattattacccaattcagcatttaggaaatcaatgcgaggatagtattttgctttatag

SEQ ID NO: 223637 - DNA, 2032 bp, Cannabis indica
caagatacgaggcataaaaagtatatatataaataagcaaagttgaccatccaacgatgtaaaagtttttacaaaatgctactaggggcaaccattgtctaggcgaaatggccattttagtaaaaaaagacaggaaacaaaataaagataaaaaccaagtctacatggttggagacttggatggttcttcttcttcttcttcttcttcctcgtcctctacagcctcgtccttcttggtttgctcaaaataggccagaatctctgcaactccttttcccaaaaagcttaaatccatgttgggattgcttaaccaggcgtgatagatagaacgtttagccattgaattaactctggctatagcatcctcttcaaccccatcaaaattcttctggacttcatcaagattttggtttgcctcattgagcttttggttggcctcgctaagttcttcaatggtcttctaatgaggtttgtggagatcctttgcctcttgtttatcaccatcgagctcagtcttatggctcttcttctaatccttagcttccttcaataaacgagtaacttcaccttgggagtcattctattgcttcacaacaacctcatgttgctcaacaattgtacgaagctcgaccccagttgcttgattctctgaaggcctctttggtgagctagctgagaaaagagagaagcctacaagacaaaagtaattcaggaagaggatagataagggagagaaagaaaaattttgaaaaacaaaatggagattaatgcttaccaagaaagagagatttaaactcctttgacattagctctcaaaatccccgtttttgatgaaatctcagtcctcttgttggtaagattagaagttacgccaacaagatgtggcaagttacgaacaagcctatgagcccataatgccggcatgattcaacaaagggcaggtaggctctaagaaaaccatctcgggttgagaacttgagaatttaacttggtgaacagattcaaggactcgttcttccttgtttacaactactgggattggagaaggaacctaaggattgtcaagctcgatgacaatttgtttagaggagcttttcctatttgctatagcctttttggctctcttcactagtttagggttcgctctcgaggaagtttccgagccaacgacgcatttcttcccctttttagaaccagatggtcttgagaaaaggtttgcaaaattcatggctgcgagacaaaaagaaagtatatcaacacttatccaaaataaacaaaaagaaggtggggaattaacttccacttatagaaatttaccataataattagacgaggatgaggaagaactatagtagttactaaattccctagaaccagtaattatatatatgtcataatggtttattggagacatatcccaatcagaatccaaatggctcactctatccaagttagtaccatactgttcgataattctaaagtaggagttattacaacttaattggacatgatattggggataccaactcttaaacctatgagctatatgatctacacagaaacgatcccaaatatagaagttatactagctatccttcaacttaactagcgaggtacacttagccctgagcacaataggagaccatccacaattattatcttgggatgcttcttctttagcttcttgaggggatacattcctcaagaaatggatgcgagccacatagtctctatcttcctcgtcagctggaactgggacttgctgccatttagaatactttggattcttatagtctcaggtggattgtttactgccgagaagattacaagtcttcagattgatcttgttcagtagaaaaatcagttgatcgcagtccaaatggaagacctaagagagctttgtgccgctctaccattttagtagttggaattggccttttcgtgatcgttgtcaacacaataagtaaaataaataaatgccttcaatttataaatgaaaatctcaaaatcaagcttttgagaaaaggtaata

SEQ ID NO: 223638 - DNA, 1376 bp, Cannabis indica
aaaattttttcctatggcccactttgtttcagagccggccttgctaatagtgtttagtactcttgtaaggtataagagcatttctaatgatatactttttattttattttaggtaaaatagctaagaagtttaaatagaaagccatttttattaagctaattaggatttgtttttcgaattttgacatgtaccaaatcatgccctctaaatttttaagatcattaaaaattcctcatatattattgagattgttagatttaaagacttttgtccaattttagtaaataaagtctaacatgaattaattaaagtttaggaatttagtaaatatcaaagtctgaatagcatatgaatgttggacaaaaatccttaaatccaacaatctcaatagttcaaggaaaatttttaatagataaaataatttaggggcatgatttagtacatgtcaaagtttagggggtaaacattctaatttgcctttttattattgttgttctaaccatacattctactatagttagtatttgattattttaataatattttataatttaaatttgtcaatataatttaaaaaagtaatattattttttattaaaatattattaaaaaaagtttagcaaaaaagtaggaagtttcctacatttagagagttctctatccattttgtattatagagtcatttttttgcatggttggagctattttttcaagtttcactccctattttaactaaggagtgtgtttagagagcatggttggagactctaatattgttattagtgcaattcaatatcgggtcccacttatttcatcttaataacgattatatataaaatcgctaaccatttattggacaagacacgatactgatttgcaaattgacatgtcacgtatgatacaaaaaatctgggtttaaacatgacactacaagtctaaaggtacgacacataagcacaaatagaataacctaaaagtataatggaacacaaaagaactcacaagcgcgataagtaaacacgaataaactaactccaaagcatgacaatatattaaaaaagctcgataataataacaatgataataataataataataaatttctcaattatatataaattaaaatgatagtaaatattacttatataattttttaatatgactgtataattattgttgaaaaactacataaaaattattaaaactatatagaaaaaaaacacatatagtatagtaattagctcgttgattgtaataaacatatgaagcacggattattaagttcatataagaaaattaactgattcatttaaaattgaatcaatgtgagtaacattgtaacaccctaactattttaggcgtattacgtgatttt

SEQ ID NO: 223639 - DNA, 1385 bp, Cannabis indica
ttttggtgatgtttttgtagctctgtctctttccagtgactttctagcgatatcatgtactatttcgacaaatggttggcatgggtgcgatttactcgttttgatgtatactatccttatttttgatgatgttttcagtataccaacttttattgccttcgatagttaatgtgcactgcttaggtgaggttttgaagctccaaactttaaatatagtcatattatttgtcgttggacttggttttgaaagtagaatgcaatgataataattatttagccatttgatggtataggtgagagtgatatttaaaattggactaaacaattggagctcgagacttgagagcttaagatcgtcttttggacaaagtttaacgatttgggagagatagggactcaacttgattattagacttgatatttatatgtgttgaataatattagacatattctaatatttatgatttgcaaattgtttaaaaaattaaaaacttaatatgcacggttttttggattgttctggagcactgagtgctaaatgtatttttgtataaataattatgcagtttatgattttttggtttattcaaaatacaaccgttatgctgccgaattttctagaaaataaaaaaagaatatgttcttttgttattcttattatttatcctacttttggttatactgatgagaatcattttgatcatgattaatgcatattgttgttccacgacctagtctctatgtcattataggtaaatcaggtgcgtactcacctgtaggtgaaagatctagaatctgtacaggagtgaattgaatctgagcctcagtattatggtggttatcaagtgcgactattcggttttgaatgttaatttctatgattagtattgagagctacgggtctaataaacgatgtgatacgcatttaatgcttattttgtgattatatgtggtctctctactttgttatacattttgataatggtgatgagatatgttatttttttaaaatacatgcaagaatttttattaaatcaagggttcttcgatattattaaccgcacgtagtagagaaagaaaggaaaacttgtacaagaataaaaaggtataaagaaacagcatttgacacagaaaaaccattaaaaagatactagaaatcacccatacaatggcatagaaattaaaggaaaacatatgtatacataaaaattaaaaagaaggaaggaaatatatacactacaagaaatgtcacttttaccagcacagttcgctactgcgctggtaaaagtaacttttaccagcgcatttcacaaattgcactggcaaagaggtcaaagttttaccagcgtacatttgcagtggcgaaaatctaacttttaccagcg

SEQ ID NO: 223640 - DNA, 1253 bp, Cannabis indica
agtttgaagggttattttatacccaattctcttcagcccgacaggtatcagcagaggtaggtgacttggtcgccatcaagtagaagccttatgaaccactaaaagactacattcaacgctttatgtaggaggaaaccaaggtaaaaaatttaagtgatgatggcaaatgggccgccatcatgggggcattctggagggaagtcagccatggaaggatacaaggcagaaatcaacccatactatgagagatttccttgacagagctaatgagtttattaaattggaagaagccgagcaaaatgctcaaggctttaaccacactaagaataaaaagaacgaaacaagctcaaatagtcaaagctttcaaggggataatggtaagaatggctccaacaattgtaagagggggaataacagtaatggcagtaacaacaatgacaataagcgaccaaaaaatacccccgagccagccaggtgagatccaaccccaaggttcactacctacaacatactcctagacataagagaaaacatctgcaatgcgactcacttggtggtgccataccgtaagccttatcccatgaaaaaggatattagcaaatgagacatgaacaagttttgtcgattccacaatgactacggtcatgacactgacgagtgcaacaatttgacggaggaaatagagttcctcatcaaacaaaacaacccccacttaaaaagatatgtacgtcgtgacaacgatcaacccccacgacaacaacaacaacaagcggtcggggatgaccaacaattgttacctccccccattactgtccgcttggacgttatatctggaggaccttatcttgctagaaactctaggaaatctcaggagaaatatgctcggtctctgcgatatgagtcgggtgatgtgttggctatccaggagcgagctcccaaataacctcggtatgagcatgagtcaatcacattctctaaggatcacaccaaacacgtttgatacccacacaacgaccccttggtggtagaagtacaaatcgccaatatgattgtagtaaggacaatgattgataatgggtcgtcaactaatctcctcttcaagtcttcattagaaaggatgggtttaggagtaaaggaattggaaccctgtgaacatctcatttatggattcacaggaaatgatatagcaccgattggcttattaagttaccattgacggtgggaacaacccccaagagtgtcactatcatggc

SEQ ID NO: 223641 - DNA, 1900 bp, Cannabis indica
aaaataaataaaataaaaaaaacaaatttaaagaaaaaaaaatacagtttaattttcttttaaattgtatgtaaaaaaaattatatataaaaataaaatatattaaaagctaattatgatttttgtctcttgaactttgacatgtaccaaatcatgtctcctgaacttttaaagtcgttgaaaatgccccctaaattattgatatggttcactgatgcatgttctttggtgcaagtaatcttggttcagattagaatgttagtatgacatcaaagtgaaggtattgtatataatagagattatatttgacaaggaccaatatgaatgaaggtgtctttattaacatgtcgtttatcataaagacctaattcatatcctaacgacgatcaatagtagactcgcgtgaatcctaagtaaccatgaattcatgttcatgttattagtttctttgattcactcgttaaaatttctcagagaagataatttttacaacttctattttgggaatctaataatgtggatggctgggaacataatttacaattatagaatcctgactttcctaacggatcgaatgctggttttctttaagaattaattctagaactggaatgttgtgcacaaatttagaggagatctaaattatacttctactagtgaattaatggtactaaaggataaagaaataatcacaagggtaaaacggtaatttggccaaaactaattaagaaccaacacatggagggctaattactggaattgattatatcagtagacactgcagtaaaactcagtaaatatagttctataattactaagagttcaattctatatttatagtggagtaatcataaaattaataaataataattatttggttgatgagactcaataaataatcagagttgtataatgtcgttcgaaaaaatctattttaaattataaaaatagtaattatttattttttacaataaataattttttaaattaattaaatagagaaaagacaaaaattgttaagataaaatttgtcaatacaagatttattgagacaaaagttgtcagaacaaaagacaccaaccttgtcttaaacaagacaaggtggtaggtgtagcctgaatttatctttttgggttaattaattatttaattaattcaattagataaatatttgaatttaaaaagtggtgaagatattttaaagttgttgagagattccctcgtaaatattagtaaccaaattcgattatagatatttatttattaaaataataaaatacaatttaattaaggattttaagagaaatcaaactaacactttgtcgtagtatttttaaaatacagagaaaaagaacacaattattttctctcaactgttcttgctcatgtgttgaaaactcaacaagaacaactctatatactttatcataatagcccacactattctttgtgtggtggaacaattcggaagacactagtgtgagttccaattgcatcattctcatcacctggattaagagacacaacatacaagaagtttcaagtataccctaatagtcacaagaggtatttattctaaacttactatatattattttaatttaatatacacacatctgaagatctgcaaaacctttttgttgtgtatctgatttagtaccacaaaactagcagttttcttatatcgacaatagaaaaataacacttcgtatttttatgaaaaaaaaattaaaatccataaaaatataaatgaaaatgtagatttgtaaaaatataaattgttatcatttttgagtatttatgaaataattccaaatgttttaagggacattaaaaaaataaaaaaattacaaaaattttaaacattttcacacttcataagtttttatttacaaaaaat

SEQ ID NO: 223642 - DNA, 2065 bp, Cannabis indica
gttaatccacttcatgtttgcaatgctctactattgattttttgaaaaggtaaatttaggtactcctactatggtcaccatataattcattctcttttttcatttcttatttttgtgtttgcctttaccacgggtacagaggcattgttgcacgagaaaaaagagctgagtagtcttctttttgagactaaaaatggtgctttgtctttcactgttcctagaaaattatgccttcgcagcattctatctcactatattttatgtcatcttcatcgtttgtcgccgcaagaaattaatttgtttttaataatttgtattttattaatttatcaatataaatatctcacactcaaatgaagaataatccacaagattgactcaataatatagtggattttatcattgcaaacttgactttgactttttggagtttgtttgttagtgtaatacagttagtttggattagttaaaacatgttgtatttgtcctaatccataacagaattctgttattctattttccttgtatgccagctgaattcttgcatatataaaagaaagtctcaggacattttgagagtttgagcaatttattacactttcaattgcaatctctcttttctttttctttgtttttctttgtaaagtcaaaggttttcatagcttcaacttggtttcagagccgatggcgatgaacatcggaccaccagacgctccatctacccaaaatgtggtcgtcgtagctgtgatttttttgtttttttaaagcttatattttatatatatctataatatcaatagaagaattgatcttcacaaacaactcaaccatacaagcaagataagttgatatgtacatttatgagagaaaactattgtctcatggttgttctagtttttacttacccatacctgcaccacaaagcattcgagagtcgcgagactcgataaaaaaataattaataacataaattaaatagataatcaatcaaagttaaagcacgaataatgcccatatcataaatataacaacaatccataataaataagaaattacctcattagacaaaccatcaacatcactatataggatttaaatattctagttgcaatcttgtaaaatattcctgatacctaagccgatattcatatatcattgtcgttgtaaaactagacaacccgtataccttgctactagtatccctaatatgtcactgtcgttatctgatgagataaccagcaagtcgaaaacctaaaaatagtttcagtttagattcatgactattcttttataacggtcatgatcgcttcttcactttcataacagtaatgactgtctcgttggtttcataacggtaacgtacgtctctttagtatcataagggtaatgaccatctcgttgctttcataacggtaatgaccattgtggtgaatcttcaccctcaaaacaggttgttacagtagtaacaatgttcaagaatgcacaaacaaaactaaaaccaatcacaacattaaaactagaacttaattgaaattagataaagaaaacttagttcaataatgaatgcatgatggatcttactgaataaaaatagtcagtagtacaatgaactcaaacaactcaacatagtaattaaaaaaaatcacttcaagagtaatactctctttacattactcaacacacacttattatgattttggacactttctctctaaacttaaatctaaatttaaagtatgagtttgaagattagagaacagaaaaacacctaactatttatagttattggtatggtgcttgatattagaactcatgcattaaacctaacacttccaaatctaattaataagattcttttcttctgattaaaaaaatgtattatgaaaacatactgtaaattctaatatacacgacaaagagttcatgaaaaatgaattcggtcaagaaaaagtaaaataaacaaagttggacgacctcgatatatgcaaaagaaaatcagactagaattaaaaaaataataaaaagaagatcagttaattaattgttacatttaatactaaaaaaa

SEQ ID NO: 223643 - DNA, 2472 bp, Cannabis indica
tctctctctctcttctcaaatatcactaaattcactcatggaaacccatttctttttcttttattattttacttagaatacaatgagttttcatttttgctttaaaacatggatggtactttttaagcaaaaattaaaagaaattacattttatatctaatttactttatttatttgttttaatttattagatttcttatattagtgtaaattatatgctagacttaagtagggagtaaaagtatattagatcacccacttataaaagtatattttaataaaatataatataagagtattattgattaataaatacaaaaaaaaaattaataaataacaaaaaaaaaatatatatatatatatatatatatatttctcaacttatactgtaaaaattaaggatataaacagggcagagcagaggtggggattgttttcccaccccatatccgctttctcaattcactttatactcgctttaatatttgtttaaattaaagcaaggacatattacatatatattttttttttcaaaaaaatgatgtctcaaataaaattgacaaaaattattataaaaacttactaaaacaacaaacataagtggaatagtgtgtataatagatgaagttagtaaaataaaattggtaatcgaaaataagtggttaagtgttatttttatttatcaattaagtgtggttattaatataaatcgatgcagacattttcataactaaaatgtctcattaatgtaatcaataaaaaacctaaagcatgaagttattttaattgtaataattatgattttaaaacctaaatatatacatatatcatatcgggtgggtatctattcccatgcccttgctccaaactcgactcgggtataaacatttaaactcatactcgcccctgccctcgcccccatttggggcaggtactcgcgggtaaccttttagttaaattttgtgttcaaaatcaaatgtcagaatattttttttttcaaaaataaagtttgtaatattctaatttaccataggtgttcaaaaaaattcaaacatatttttgacactataaacaattcaaaaatttatagagatgatgttgtaactatatcaaacactgttatgaattttatttttttgaaaaaaaatattccagaatatgtatttgagtacggagattaatgttggtagcatttctcttttaaagtaacatttggagcattgccatattttttagcattactattatgtttagggttaatactattttagatcttgatatgttgggtagactaatacaagcactagaatacctggttaggggaaactcaggaaggttaatggccaagtgcaagggcatagcaatgtcatgcatcacaaggaggaagctacccatacaatggctaatgaaggttttaaggcacaaaggtgagatttccaagtttggatagagaaaaatgcacgggagatgagggttcaacatgaagaaatggaccgccgaacccaagagattacaaagctgatgaaaaggttcatgcaatataatcaaggaataggggaatagggcctcaggcccacacaacccaaactaatcaaattcctgtcaaaggtaaacagtttatgccctagaccgtggtccagtgtatggacccaaagagcgtccccaacactagaggaatggtccaagcagaggtaaatacccaaatggaagatctcaagtgaatataatggaggacatataacagatgaacaagtcctcacaggacactactttgggtagaacaacatagagaattgttggcccaggtcttttaggccgagagaatagatgaaccccctgcgtagaggaggtggttcaagagataatgttgtcccgtacaaaaacaatcagggagtgcaaatttagcccaataatcggtgaaatgggctacaaaatcaaaaatattaaccacgaccaaggagggataacccaaaagttagtagtcaatacgtacccaatcatcttgattagtgatgatgaagttgaaagcaaaggtaatgggcaatgttgccgttgtcataatggtaatattcatgttggactggatgtgcatttaaggcaaaataaccaaaatgataatgcacaccaccaagatcccgaaagggaagataaccaaaatattgtggacaaacccaaaataaactcaattttttagcgatttagggtttttttttttgtactcatttttggtttattttagagttgttagtgggaggttggaagcatttgagtggattttgataaagaaaagagcctaatagttgaagtgttagttttgctgaagttttgtgtagattttactgcagcaaaagtagcagtggccaagagtttaatatagtgcagaaaatatgaggtgggactttatcaattgaggtggtaattttatggttgaggtggcaaaataggattggtcttagggctcggtgttgagag

SEQ ID NO: 223644 - DNA, 1285 bp, Cannabis indica
ataggcgatgtaggtcaaactagaaaatcttgcattaatgttatggatataggtggctcgcctacagttaatcggagttcaataaatccttgactagagacattatctctggtaaatccgcagaaattcaccatataaggttttaaccttacattttgcaattccattttcttcagtgtatccttgtataggatattcactgagctcccattatccaccaacaccctttttattcttctgttggtgagatgaattgtaatgacgagatggttgacgtgtggatacctcacatgctttgtgtcttcctccaaaaatacaattggaggttcttcaatcttgactttcttagatgattccgaagcaaaaactgattgttcattttttatttccttgacatatattttttgggcattactgctttctccagcaagatgaagccctcttgagatgaccaaaatgtcatctccttctacaggatgacgttgtaatctttggttgcctgggttattgggtagattttgctagttttgtccattaccctatcgtcttacatattgttggaaataaccgtgtgagataaggctctctatctcgtctttcaactgacgacactctaccgttgtatgccttatgtccttgtgaaatctacagaattttattttgtctcgtttgtgtcttgcatgtctcatgggctcaggcttgcaaattgcaaccatgtgctcaagtgtgaggaaaatgttttcccgagattcattaagctcggtataaatagtataaattggcatgtacttatcgtgcttcttctatttttttcttatctttggctgattccatagagtcatcttttctcttcgtgttagagccacctggattgtcagcctttatcgagatggtacttgctgagatagtgctggtttatttcctaagccagtctttaacaatttcatctcgttcctcccttcctcttttcgtacgaacacttaagctctttcgtttaacccattgatgttcctcaccgggagaccttgtaaatgatcccacagctcccctccagttgttgagaggtcagtcgtaatccctgcttgaagagtagtaagttgaatactatcgttcaagtttctaactttaacagcagcagtattgaaacgacttaggtaggccttaagcgactcccctggttgttgcttcatgttagtaagggaggatgcttcaggttgcctatctcttgctgcctgaaactgtttcttgaaatccttaagcagtttttcccaagaagtaattgact

SEQ ID NO: 223645 - DNA, 2717 bp, Cannabis indica
aactgacatttgcaaaaacaccgtttttcagactcttttcggaacgaacttgatccggctctgataccacttgttggacactacaacacgtgaaaacgtaattactttattattgtaaaaataattacaccaaaacttgaatactttttactagaccacaatacaccaaacactcgcactcttttattttatcactagacacatttactacacacttgtatataactcacacttttgggacactttgtctttagacacttactaagaactcacacactttagactctttttctcacacttgaactctcttactcaaacttgcttcttaagcacatacctcacttctatttataggctacaaatgatgtatctagatatttttagatttttctaatttactaactatttaattacttcttactattttctaaacaactctagaactatctaatcttagttctagtgattctaagttttctctaaaactttctagagtgttcttggtttctcttacaaatttcttagaacattttaaaatattttaacatattctagatttgataatgacttttaacatgtatatatatttgtgagattagaaatagttactactacaaaaaggggtgttcacgacggttctaaacacttttttttgggaaattgtctctaaaaaaattaagcgagtgtttaaaatcgtcgggaaaaataacagttttaaactttcaggaggtataggcgacggtttttaaacataccttaagaaattttatgtatttgtaatagggaattgttgatggtttaaaaccgttggctatactattgacaacgattttaaaccatcgcttataataaagtcgacagtttcaaaccgtcgcctatagtatagccgacagtttttaaccgttggcaattcttgtgcttcaattttacacgttatagatctgaaattttatttctcgcatcttaaatttcaaatttttattttttccatctgaaattttatttccatcctcttaagatataaacccccacaaaaatcttatctcatttttttaaagtcatttataaatttcattttatttcccggctctctctcctccgcaaccacgagtcgcgtcgtccctgtcctccactctctcttgttatgtccctctccactgctctctcgtggcaggcaaaggtaagcaaaatattttcatatttgttgtttaaatttctattagccatgatttagtttgttgatcttgatctgtgtgtgttcaaaataaaatacaaagcttgcaaatcgaagaaagtttcaaggatcatcaagtgaaaagcaatccgaaacttgtaaaagaaaatttcgaggaggatgaagacgagcacaacgacagtggaggaggatgaagcttgtaaaggttctggagtggctgcaatatatgcgagaggtggtttcgaggaagatgaagacgataattttttgggggacaatccactatagcgacgatttaaaatcgttggctatcctataggccaggatttaaaatcgtcatctatagtataggtcacagtttaaagactatagccggagattttaaaccgtttgaaattcttttgtaccaatacttttccaccgtcgcctattctaccaagtattcgcgacggttttatagagcgtcaagaattctttatccaacggtgtaaaactgttgggaattttgagtttttttagctttgagtaattttttatataacatgcatatataatatatattgtgtgcatatgatatatattgtgtatatgtagattaatatgattatatattatatatacacataaaatatataatatatattcattttgtgaaattaataattagtttgtgtatgtcatatacaatagtatattaacatacatataattaacataaaattgaatgttataattttatgagagttatatattaattttgtgtattaatatatgatatttattacatgtatatatgttgtagatattataataattataaaataaaagttatatctttttattattgctatatgtgagtagcaatttattttgcgaaaatgaattacttgaaaataaagttatactttagtgataattatcttattttaagagataaaaatggtgaaatatgagagttaaactttatgagatttatctttttatagtaagaatatagtgattaaagtaaatttaaaattgtaagattaactataaaattggaggtgcaattttaaactcaaataagtggatcatgctggattaaaaaaatataaaaaaagatttcaaaattagaaaagtaattttgaatctcaaaagcaaagtggtaaacaaaagttgattggtagtattgtttgaaataatctcaataaggagataacataaaattgaataagcaattttatagtcactactacaaaaagcactatttctgtcagtctcaaaattaatttttttaaaggatcgtcgctaataaaagtaagtaactctttaaaaacgtcagcaatagtggagtattcccgataattttaaacatatgtttactattccgaatagttttataacaatcacgagatcaaaatttaaaaaccatcgcctatagtatatgcactattttaaactgtcagggattctcatgtaaatacaaaagccccaatttcatatcccgtttcatatatacaatctcaaatctctctctctctct

SEQ ID NO: 223646 - DNA, 2655 bp, Cannabis indica
ctaaggcaaaaggcagctgatcacgaggctgaactgcatgcgcaaaaggaccaaaataggaggatgcaagagataatggtcgccatgcagaaggctatggaaatggctggaatccacgtgcatcctaaggtcgtgcctccaggaccatgagaaagagaggaagagtcctcaccaagtacccaaaagcataaaaatagggaaccaagccctttacgatatccctctgaagaaaaccatgtgagaaatcctacgtaattccctaaaaagaacaaaaatgcttaggatccgcgaaagagtctgctctgatttcccaaaaagggaagggtccgccgaggggcaggctccatagagagagcactagccctcaggaccgagaggactaaaaaagcatatcagtgcatcaagaacctggggaaagaggcaggaaaattcacaagcatccccctaccgacttaagagagaagcttaacaataagcatcgtgaccttaggaaacacttagagaaaaagaagcaagcaatatcggtgttggagggtgccttaaatgaaggaatcttggtagaattggcaatcctctgcaaagacatcgctagggtctcgcaaaggcaaaatgcagatgacttgaagtctgactgtgaggatcggaagccctgcgcaaggaatatcctggaggcaaaactcccccaaaaaatttcaaaatgctcaaaatggcagtatacacaggagatacggaccccgatgaccatctgtctcgattcaacagagtaatgactatcatgagagtcagtaatgacgcaaagtgcttatgtttcccattaacgttgggtggatccgctgaggaatggttcaataagttagaactcagatctgtagactgttggaacaagctacaagttagcttttgacgacggtttgtggcagcaaggaagatttaccttgaagtaggcatcctgaccaacaaaaaacaactttcagcggagaccctgaaggatttcataaaaaggttcaaagaggaagcttcaaaaactaaaaaggtcgatgatggacaatagttggctttaatccaagccagaattcagatcgggactcctttttggaatgagctacagtaggaggagctgctagcctctaagactttcagaggagggtccaaaagtatattaaattggaagaggcacaaatagtggcttatggcaggtattacccaatgagagtgtcaggatatacaacaggaacgcaacttcttggagctgtgctccctactgtcccacaaacaagcaaaatacaattttctaccattatgggatatgctaagaatcttgcccttgctccagcgctgtcacacttgggggccctagtaggcaatcccctcgggatgaacgtgtaactcccaactcagtccgcgccagccacaagcatggcaggggcgcccaaagttcccggagtaaaaggtcttctaaaggtagtgcacgatctgaggacaagaggcaaaagagagggtatacgccccagtatacacagtacacagagcttacgaacacttaagaacaagtatactttgcgactcagcaaaatatgcattactagaaacctcctcctttgtatcgagacaattcccggagagatcccagcaaaaagtgcgactatcacaacaacatcagtcacaccactaataaatgcaaaaatttgaaggattaaattgaaagtttaattcaattgggccacttgtacaaatggatcaaaaacatattgccacatctgaacccgactcagaccagagtccctgtgcctcaaggataacccatgacagcactagaggggtaagtacctcctggagggatgccccaccagcacgcacccagactacctccctaaacaaatggaagggtcgctaaatctctggaggtcctcataatgggggaaccactagaaatgagctgaagcgttacgcttgggccctaaaacatgatagtgagatatgggaagtcactcaacttctggctcagaggcctagactcatggatcaacccattactttcactaaggaagatgtaaaaccaatacactttccgcatcatgagcccttgatcattgagactccaattgcaaacagggtcgtggcaagaatattggtagacaatggaagcttagtaaacctgttgttcaaggatgctttcacaaccattggacaagatttacttcatgaacttgacatagctcggcatttgttctagggcttctacgaatgggatgttaatgtgaagcttcttgaatacttatataaatttttaaaacttcttgtccatgttagacttgcggagcctttgcggataaggaattttcacatggtgctctatgctgatagatggtggtgtaagcttcttttgatgtaagaccctcaatagtcttcttctcttttggtgctggtgtcctgttgatcttgaaccacttcttccacttgttgtttctcactacgcccctcatacttcttcccgtttctcaaagtaattcccttacatttcctccatctgagtctataaggtctttaatggatgatctagtctctatcatgaattgaagtagcaaatctgtttgaagacttcgaccctccactagaatcttattgttatggctgttgttgatttcgttggggcta

SEQ ID NO: 223647 - DNA, 2312 bp, Cannabis indica
gacgacactataatcatgaacaaatatatatatatatttatatatgttatggacttaatagaatttatacattaaacataatcataaaataaatcatgtgaaccatgcaacatagaatgatttctaatctgttattaattaaaatctgattatattgaaatgcgttttatttagggcacaaaacataccagaactatctttcccccacatcagatcatcattacaattattgtcagcaatagggacatctagaatgctatcaataaggttatcatcaaagaaataccacaacttattgagatcccaagaactagaaggggaaataaagagagacaaattaggggaaggaagaggatgaaataaggaattataattcaggccaaaatcaagttgttagcgatcctccataatattattattatattattaatattattataatattatttttatatatatataaaaacttatcagtatcgtttatattatatgttataagtttataaacaataaatgaaacgaaaggaaaccctcattttttcccttcgacaaaactttttcttcctatatcaattttttttttattttcaatccaaaacctagcaatctaagctctaccaatagcaggatagcaaattcttgaagaggaaaagcttaaggtatggtttaattatgttttaagctaaaaataatgggttttatatagtggctatgcgatttagagtggttatggagattctgaattcgtaaaattgttctttggtagctatggactagtttcgatatttacttgttgaatttgaggtgatttttagttagaaatcgagtttagaactttttaaagtttagtctgaatgttaatagcatttttcatttaagggctcgattttaatttctattacgtaaggatggtaatatttatggtatatatgtgccctgtgaagtttggagtgatttggaaaaattttagtagtgtttcagtgagtgtgaaatttgggattttcgagtttctccattttcagaaattcctatgagatcagaaattatatttttgttataacttttcactcgagtgtccgttttggacgttgtatatactattttgaagcttgtgacaagatcaactatatggtgtatgttttagagccaaaacatgagttttattttagtgtatttatattgtggggtttggtagaaaatcctagattgtcttatgtgaatattaagtagtattttgggataaacacttattggtttacctttgttgtgacatagagccgagatcatcggggatagttctccacttgggttagccgacatgtagaacttggattaaaggtaaaaaaaaatatattgtattgcatagtacattgtattgtgatacaattagtattattgtgaattgattaatatggagatatggtgattattatataatgaaaagattgattgattaagcaatgataatgtgatgataccatgcgtgggatatgcaggctcacctgattaggtgatgcgatatacatggcgacgtaccaggcataggtacgggcgtcagtgacatatgagtatcgagagtaggtatgggctcacctaattaagtgatgtgatattcatggtgacgtatcgagtgtaggtacatgcatcaatgatataaaaattccatgttatggcatagatcgaatccattgttaagtttcttcctagcaacgtatcgggcgttggtacgggcatcagtgatatatgagtatcgggcgttggtacgagcatcagtgatatatgagtatcgggcgttggtacgggcatcagtgatatatgagtatcgggcgttggtacgggcatcagtgatatatgagtatcgggcgtaggtacgggcttgtctgattagatgatgtgatatattggtgctaggttgtagcactggctcacctgattaggtgatctaactatgtaccgggtgtaggtacggactcgtctgattaggcgatgcaatatatttgagccaggttgtggcacgggcttacctaatttggtgatgcaattatgtgatatatgggtgcaggtttttgacacgggatcacctaattaggtgatatagttatgcgatatatgggtgtcaagctatgtcacgagcttgcctaattaggcagtgcaatacatgattatcagattaaagcatcgacttacctaattaggcaacgtgatgtaatgtagatagttactttatgaggtaacatatatataatttatatgattaaatgaatatgaattctattattggtataatagttttgtattaccaaatatctgta

SEQ ID NO: 223648 - DNA, 1314 bp, Cannabis indica
agttcgagtcacagatactgtcacaaatgggaaaaattccatcagccataaattcaaactgagacatgaatattaaatgagggcaaaggaaaatggttcttacctagaattttgatgtccaaggagagatttggctaccctcttcacgtgtaaaacttgctaagaaaaacagtactcatggaggttaggagagtgtgaagttgtgctcacagggcaacaaatgtctgggtatttctcaagtttgtaaagcccaatcttgcgcttgttggtgcgcatgggttgacgcttcacgacataatagaacaaaatttcttctgacttggaacttcaacgtttatcatcttacatagtgcgtaccacccggatagaaacttctaagacaatggaatcaactggaaatgagtgattccaatcttcgcacagagttccacgaaataagtcgttaggggtaagtgtgccccgcttgatatgtgggcctagctccaagtaccaaacacgtaagtgctccaggaagaagaatctcccgtgattgataacttgttccacaccagttcgggaatattatggactccccccttggcagacagtttctccatcatgccatacactctgaatttattggtattctaatccatctcctagatggaagtattgtacacaatgagagttaggggtggagcctctgcttgggctttcaccttcgctttcttttgcttcccattaggagcagcttcaagggtagggtcttcttgaggtccctccataggagcctcaacctctactgactcaaggtccatggcctcaagattgaactcattcttgagaccagccacttgaaatgaaaacaaaaagatatccaagaaaataaataccctatgtcctaaggacagtaaggatattggggaaagcctcccccaaaattgctcagagaggtcccctctggacccatcacccagaagcatcttcctcgtgaaatgttgcctctaaataataggttgggaacccatggaaaatcatagaacaacaagaagccataaaataacaccattcaaagccctaataactccaaatgggtaaatagagaacaacctaaattcatgaaaattatccctgcaagattcgagctctcgaaccaatttacggaaaaaaaaatacacaagcatactcatggcaagacaaactcatacctaaacgtttccatacttaataatctcctagaaattcttcttaatagtcacatgcaaaatcaattcagattatagcttagacaaaaatttctaccctagcatgaaatcaaaagttcaacgagttaag

SEQ ID NO: 223649 - DNA, 1714 bp, Cannabis indica
tttttaattatattttcttttattttaattttatttttcgataaataattgtttatacttgttactggtatacttttaatgtgtttaatgtcatcaaaaatgtgcttaatgctatgtcgatatagtaccatttttttcgtatatttttaaaattattttaattctattttttagtatatggttttttttacttactattggtactcttaatgtactaaatgtcatatcggtatgatactcgataattaattagtttatatttttgtcttttgtgttttttcttttgtatgaataatttttttactatttactattattttttgtaaataattactaattagttagtaatgttttataatatttaattactatttatatttttttaatcttttatgttttttttaattttatttttttacaatgcttttttgtacttgctattggtactcttaatgtactgctatatgagtgtggtacccaataattgattagtaatttttttaattattttttatgaataatttttgttttatttttttggtaaatgatttttttgtctatcatagctatgtgaaattttaagatgctcaataccatactgacgtggtaaccaataattagttagcatttttctaaattatttactaaattaaaatttgtgaccaataacgatatgctatcttaatatttttattattaatatgtacatatttttagtaattgtaattagaatttttaattttttttttacattttaatttgctaatttaattagatattttatttatctttatttaaatataattgataaaaataaaatgatgttatcggatgcctacactcttgtaatatgcaatattgctacatatttttttattattaaattagatatttttagtgctttaataattgataacatcaaattaatataaaatgatggtattttttgtagtgcttcgtaccttaatgtatctttaatatttttgttattattatatacatatttttattaatttcgattagaattcaattttttgttagtattatatgaaagttggaagaacatctttaatgggatatgtaaaaattgtattgcatttggcaaaaaaaatgacttgtgatacatttgcatcaacttttagcattatgctccaatatataattacaaaacttggtgtaaattttttttacatatataacaaatcacatgggcttacatttatacaagaatgatgatattagcttcaataaatgaacttatactacactatatttttatttaaacattatttttttaagaggagtgttaattacaacctccttagtcaacctctacgttcgaaatcacatgtcggaatatttttttcatagcaatattcgtaatagttacagtatcatccttataaatttttgaaattttttgaatagtttacagtgccgaaaacagagttcctaatattccagtttacgactcgtgttcaaaaaacttcaaacgtatttttaacactgtaaactattcgaaatttttcaacaatttacaaggatgatgttgtaagcataacgaacaccatcgtgaaaaaaatattccagcatgtgcctttaagcgtggaggttgacttagggctggctctgagaatatatgggcctgaggtaaatttgattttggggccctccaaaatatatatataaaaaaaatattgaaaaagagtattat

SEQ ID NO: 223650 - DNA, 2454 bp, Cannabis indica
ttggtccttgacgtcgcataaactagttgttcctgagaaaagagaaaaagaattgatacaaatagaattagtaaaaaaaattaaaaagaaaaccaaattagaacaaaatttaatttttattaatattaactaaataatctacagtaacggcgccaaaaactagttgttgatttttctctacgcaagtgtatgtatcgatttcaagcatatactcacacgagtgaggtcgcacctacatggattatagttaagtattaaaacattaaattttagttctattaggtgataacaaatttagaagagagaattaaaattgaaagtaataaaaaaacaattagattagaataaaaattgacaatgattagagtttaaggttattgattttaattgtatctatcttatatgtcataatataatttaatttataattgccaatttctatgtaatagcaggtttactcaagtaatttatagtcggctaagatatataaatctaacttacatgcaattcttttactctcgcgataaatttaaacatgtaaaaggcatcaagcatagaaaccctaattgttatctaaaccacataggtactctcgtcctttgtcaaaatttattcttatttcactatagcatagtcgacactagcttctcagattttgtatcgaaatcataaaaaattaattgatggtcaggcaattaaaagaaagaacgaatgaaatagaacacataaaaaattggaagaagaatcaaatcatattaaaactataaaaagatgtcaaacaatctccatcaatactctaataatagtttagctactcatgttcatagtaacaatttgacacaaattaattaagaacataagaagaaaatggaagagaagaaattgttgaaaaagtctgttgaaaagcctctcggccacttcttttctctaatttttgtactctctaatttcttgcttaaaagtgtgaaatccactcttttaaatagccgaaaaaatataaaaaagatagaaaaaaaatgtgattttcgaatttcccttgggagagccgcgacactacaggcctagtgtcgcggcccgtgtcttgtacacaagattccctagatatttttcagcacacggacctcgacactaccccttagtgtcgcaaccctcaaacggtgagttttggcagcaagctttcctcgtttctttgcctcaacactaaaccccagtgttgaggcgtgcccatgtattggtcaaaagcgaccctctttgccaaattctggtcattttgcgccctgacatggaattgtaatgttgaggcactactctattattttcaatttcttcgccttcagagctccaaacgcactgaaacgtttggattttttttcttggatgaatttcctggttctctagcattgagagtttatttatttgaccttttttcatatttttccaaaatttctttatttttcttcaacactaaacctgcaaaatcacaaacataaaattacacacaaaaaaaaaactatttaaaaacactttaaaattgacctgaaaataatactaatgaaaatctaatacacactcaattaaattctcaccaatagggccaatattgaaatccccacactagacttatcctatatatatttgagaattgttaaaaggcaccactggtacctagcaccctcctcggtgtcatacagttattggtgtaattaagtatcaagtcccatataacttaagaaaaataacttttagggaatatcgctaaccaatcatggggcgccacctatagaaggtgttgggcactactggtgcccaatatcaatgatctatatatgttttaccaaaaattgtaggggaccaaagcccttgcagaacacaatatagtttcgccaatagaaaggacattctatttttcaatttattattgttagttgaaatgaaaattttgattttctatgcatctattagattaaattattttcctaaacttaagtcaacacatattagtagaatagactaacattacagaaaaatccaattctacccctcccatttcgaacacttgaccctctctcttcctcccttctctccctcgctctctgaactcaccccaaggactcgacctacaacctcagtcctttctcttcatgaccattgcgaccacagacccaacgatccatgaacccaacgacttgtctatcgataatggcttatccatcaacaatgttgcaaaggtaagtattatttttttgcatgatttagggttaaaatatatgaaattattgatatatttatttagatttagggttaatggtctgcaattttgagtttgggttagatttagagttggaatggtcggatatgtgttttgggaaaaatttggttttaggcctgatctgatgcaagcccaatataggctcgatgtatttttattgttggaaagggataaaggttgaagat

SEQ ID NO: 223651 - DNA, 1385 bp, Cannabis indica
caaaataggagaagaactccaaatatcataatggactaattctaaatgaacactaactcgtttattgactctaggacttgaataaagactgtgatgtttagcaaactggtatgattcacaatctaactaagacacttactttattgtggacaaaactttttaagcagaggaagaaatgtgtgatgacccaacctacaatgtgtcgcgaagggggcttatacaccagaacaagcaactgatttaggtattggtgtatcaagaatgtagaggcctccagattcatgtcctctactaataatttgcttcgtcataagatcctgaaataagcaatgatcaagaaaaaaaaaagggaaatacaacagttaagatcgagtaagttgaccgacagagatcaaattaaaaaaaaaattaggtaaatgtcagacagacgacagaggaaacattggagtaggataattgtaccagactcaagaacacgagatggtgacccatcggctaaggtaacaatagaagtgaaagtgtgaggttaaatattaaaaaagaatgtagaattatctatcatatggtctgtagcaccaaaatcaatgacccgtttggaaatagagcaaagaagacatgaatttggtttagttgaatcaacaatagtagtgatagaagaagatgaatacttaagagactcttgataatgtaagaattcagcatattcatctgcagaaacaagaactggtcttccagaagccattataaatatgtttgtcgcagcaaactaactcaaacaacaaaccagccaacaaattcgataaaggagcaaacaaattgaaacaaaaagttgggaacaaaatgagataatgagctagcaatccaaatctcacaacccgaatccaataggagaacaaaaaggagagaaggataacaaaaagatcaaaggcccaaaataggagaactaaaccttgcgaatcacaaatctcaaaaagagattgaaaacccataagtgaaaaactgaacttcttatgacacgagtaccgaatgaccgaactaaaaaacgaccactgaagacgccaggatgccctctcacgtgccgacacgtgggagttgtcgcagcggaggacggtggtgtgtggggcacactcacagggcttctgggcaccaaatttcggtgacaagtagatcggcaggtgggcttcttctcttgacatgcctttttctctagacatgtggtggtttacaaggtcgatgtcaatattacaaagttacggacatttattggcaattggtattgggttcttcatcacttgtctttactgataaaaaaaaaggatctgttatatatatatatatatatatatactagtgaatgtacgtgccgagccacgtattgctaattt

SEQ ID NO: 223652 - DNA, 1689 bp, Cannabis indica
gaatgatagaacaaatttgaggtcagggatgaagtttagtgatgatctgtgatatttagcgattatatttgcgatgtgtttcgtgatgttgtgaattggagacattaagagatattttttcacgattttacgatgtttcgcgacatcgtcaaaaaccaaaaaaaaaaatacagaaaaacaagcgttgttgtgaatttgagacatttagagatgtttcatgatttcgcgatgttctgtgacatcgtcaaaaataaaaaaaaaatacagaaaataagcgagtggattttgctagaagtggtgtggtggtcgtgggttgtcttgggtgcttctcgtaggtcgtcgcgagtcgttatgggtcttctcagttgtgggtcgtcttggtcgtgggttgtcttggtcagtcggaacttgtgaacagccgagactttaaaggtttggggttaggaataacagagaggggggggggggggggggagaagttagatagagagagtgggagaagagagtttttgaattgtaagtgtaattttagattttagggtatttggagaatatttagagtatttgtttaaatgtggtatattgaaagaataatttaaaattttaggtatattttaacaaattttgctttgtaaaaggaaagtatttaattcatttaaatttcaatactaatataaataatattttgtgtctaatttatgtaattcttttaaaattattgtatttgtatgctaataaaaaatgcctttttttactatttagtactaagtaggtatagagattgaagatgcattgattgagagattatgttgtgacatggagaaacgtgtcttattgccatcctcagccatttcatttccctacaagtatcaatgtaggtattatatatgtagtttcttcaacacttgcccataatactctcaataaatggggtgcaaggatgtatatcttatatgtttaggcatctatttttttttttttggtaaatatcattttgaaatatgtgtttttgtaaaaattattaattgaactctctcttttgttaaatgacaaattgaactctgtatttttcaaaattatacaaataagatcctgaactgattttatgtcaaaataaaacttaataataatttgatctagagttgttatgataaaactagttacattttctgtatttgttcttgttagaaattatcttaaatttgattatattaaaaattaaattgttaaaaattgagcataaggtcttatttttaccatttaacaaaacagagggttcattttaacatttaacaaaatagagaatccaattggtatttttgcaaaatacaggatctaacatagtatttatcattttttttaattatgaaaataaaatttaaagagtttgttgtatacataattatttcattttatactttagtaaaatagattagttgaatattgatttttagattgtaaattattttaaaaattttaaaattttacagtcttaaataattacaacatacatcactacaaataaaattaactaaaaaaaaatttctaaatgctaaaacaataaggaaacatcatctactaatttttgtggtatagtgtaaaagtactttttaatatataaatttaatatatattgatcattgatgtatttctatatgtctttgtattttaaaaaaaaaattaacttaa

SEQ ID NO: 223653 - DNA, 1729 bp, Cannabis indica
taagggtgaaattctcccaagtataatctctgtattaaatacatccataaataacaaagactcgtggactaaggctcattaacgccccaaccacgtaaaaatctttctctcactttcttacagctccataattttataatattttattagttgccgaaaatctcggtcaaaaaatgtgttatttggatcatgtgatcatttatttgatttataaattcatccaaatccttttcacattgatattcttgtttattgtgttgtcaattcagtaaaaagtaatcaagattgtgtgattaaatgtattcttataatttatcagtacacagggtttaactgataggataatctacaatgtagtttacttgcaccttggataagtgttctgtcctttccagggcattggttaaagtaagcatgggttggatgtatggagtatgcatcgaaagggaccgataattaacttcgataagatataataaacttactgtaatatctatctgattcaatatcacctaattaatcttagatcaaatgatctcaatcctatgatggttagattctagttcagttgtattatttatgttcttcaatctgttcattaaagtccatcaatagatcttctcgtgacatatagattacaagcatggtagttcaattgagtgtgagcgttaatcatagatacaaaatagcttctatctggacatagaagtgaactcatgatttccttcgagcttgacttaatagagataaatggttgagtacacatttcagtaattatattagtttactaaaatatcatttataggtagctaagtgttttaaggataaaatacatggaacggtgtaacggtaaattcatttatactcaatgtagatcatctatagaggatcattgattattaggattataacaatggataattatatagcatatctatatcgtggaacatatagagcgctttatatagttaagagtacaattctaaatctatagtggtgcaaggaagaactaataagttagagaatttacttggtaaattctagagccacttattggaagctttattttataagcccatggtccccacactagttgagacaatactgcttgtaagactcagttaattgattttaattaatcaactataattttaaaattagtctatgtcttatttatgaatttttattaagttatggcttaattgtgaagaaaagagattttaaggtttatttgttaattaagagactttctagagtctaattaataaataatataaataattttatttgataattaattataattattaaacaaatagttttgacatttatagtattaaaattagaaaatatggcatttgtgaaataacagaaaaatagttgaaaaatggcaaaaatataattagtggggcccatctatgtggcgagccactaagtcctatttttggctattattttatcatatttttattttatataaatcagtcttaaccctaagtgaaatagtataaaaagagtaagatggtctcattatccaataacctaatgtaacctagtttacattctgtcagacacctagttttgagacttccttcttcctttttcttcttctagttttgaaatctcatatagtgttcttcataaatttttgagccattactgagtgagtgcatgcccacccatagcaagtctagtactcaatcttagtgtgtaagactgtgaagaatcc

SEQ ID NO: 223654 - DNA, 1569 bp, Cannabis indica
ttttgacatcacttagtctgtttttgtgctttggcaaagttggtcactaattcttagagatgttgttctgtgaaaatgagggactcgaaactctttatttccaagtgagtttcccatgttgaaaatgagaaatgtgaagttgtgaatttgacttctctgacattataaatcttagttattgtgaaaaactagacgaacgcttgaaatagaatcaaaatcgaataaacagaacttagcgcactagaccatttgtcaacctcagcactgggtacccatttcatgagctttcagaatcttgttttgatacttccaagacttctgaacttgaggacaaggtctcctatcccaatttgaccattctggattcaatggttgcatcaaatttggaatttgagcaattgaaggcagcgtcccagattgatggtcaacttgggcgctgggcccaacaccaggtcaacttgggggttgggccctatttctaggggctcaggtttgtggttttcttcccgagttttcttgaatcttcattattttttatacgaaaaaaatgctcataatactttttggtgaacttgatcgataacaacctagttatggcccttcaaaagctcaatttcgtccccaaaaatagttgaatctcaatctttgctgaaaatagagaagatggtcagaagagttctcgaaaaacatcattggaatcagcttaggttaacaaaatgtcaacctgcacgctgggctaggcctaggtgtcaacctgggcgttgggccttgcttctggcacacaagaagtattgtttcttctccgaaaagatctatttcctcatttttgatgaagacaaagaagatgcaaaagtcgaatcgtcgatctaatacttggaaggcacctagattgatgaattgttaacttgggcattgggtgctcggggctcgggggctaaaaaatgaacttactctaaatctgatttcgatgcctcaaatatgtctgtggtatatctagttgatgttccaatacaagttttgacccatttgcactaagacggttccaaaaactgaaactctagttcgggatgtcaacgtgggcgttgggtgaaaccttaggtgcccaggttggcttctgggctgcagattcgtgtaatttcagctctcgggggtttggattaagttgctccatgtcttcatggtgcaaaatactaaaagatagtgagttggattcaagttattaaagtccgaacttccatcccaaaaatcccgaagtcaacttgagcgcaaggctaaggactcctcccgaggtcgattgctatgactcggttctactcaactttgtgacttcatccttcttgccacgtgttaaatattgatgtctacgttattagagaagtttttgggtgaatatcgtgcagttgatttctaattatttttaagttgttttcttacttttattgaaaaatagtattttataatttaaaactttaaaaacgtattttataaataaaactttacatcgcaaaattataaataaaatataagaaaaatattttcaaaatttccttaagacattttagtagagat

SEQ ID NO: 223655 - DNA, 4773 bp, Cannabis indica
tctaccaatccgcaatccagaagcacattccgttccaggagggctcaacctaagggtgtccccaatgcgcgtaccacacgttcccggagaactcgacccgatgttggtcctagtacgcaaacaacacgctcgaggagaactcagcatgggaatggtcagaaccccgagacgagggatgaagacctctatcgtggaggtgcccagtctgtgggaggaggagcttatgaaacaaaaaaccgtcgcctgagaagttgtttgaaagagacgcagcgtcgaaatgctgagttagagcataatgcagcctgggccagggcggcacaggggacgaatgctcaaaataaacctgaacctagagtaagaagaccacgaggcagacctcgtggctcacgaaccaagagacaagaaaaggccggggaagaaaaacccagggaaaatgggacaccccctgaaaatctgaacgaccagccagatgggagacaacaggaaattgatgaacgagaaatcactcatgggaatgagaaggatcttgggactcaaccggggaaacggaggtcacttgctagaaatcaccaacgttcttcccaaacccatagcgcgaggactcgtacagaccctgatgggggaaatacgaaaaaccgctctcgggaggaaagaacagagagtgaagaagaaagtgtgacttcgaggcggtcaagaacccatagtcgatcaactcaaagaggagaaagtactcaacaagctaatcatcgagaaagtatggaaactagtaagtccacgagccactaaaagacaaagtctatgagtaggacgcaatcgatgagtaagacaagattttccagtaattactcccaaccggatctgtgagaacacttgaattggaagaaacttgaccttcgccaacagcttggtccaaagcaagaggatccaatccaattacggataaacgagctggaggacaagttcaggacatatcaagtgggggaattagagaaattatttggacacaattctgacgaggagcttgagctgtatcatccagacataatgaataccccttttccttcgagattcaagaacccgtatgtctcgttatatgacggaaccactgatctggtctcgcatttgaataactttaacacaataatgcgagcgagtaatttgacaaataatctacgttgtattttgttccccacctcacttgttaaagtagcaagtagctggtttaacaagtttactcatcattcaataacttcctgggagcagctgtctagggatttcaagaaacaatttcaggttgctagagataggcgacccgaagcagcctcgctaaccaatataaagcagcagcccggcaaaacacttaaggcgtacttaagtcattttagcatggctgcggctagggttaggaatttagctgcagggatctctactgatccattgaccgcaaggggcgagttgcgggatgacttacaaggatgcccagtgagaagcatcacttagttcaacgaaatggctcagtgttcgttcggaaggaagaagcccaaaaggaaatgaatctgttgaaaacaagcttgggagggaaacccaacaatgtttcaacaggaactgtttccacgagtattgataactcgggggcttctggttcgaagagaaaggacggagttaaggaatcgtcgaaggatcaaaagaaatagaagaaacatgataagtacatgccagtgtatactatttataccgagcttaatgaaactcgagagaatatttacctcgctaatgagcagaaggtggccttcgggaagcccgagcccatgagggattcgaggagtaagagggatcctaacaagtattgtaaattccataaggatattaggcatacaactgacggatgtcgccaattgaaagatgagatagaaaatctcatcgctcgaggccattttaagcagtacgtgaagagatagggccatggatacacccagcccggtctgcccaataacccaaataactaagggttacaacctcttcccgttgagggagaggacatcttggttattttgggagggccacataatttggaagaaagcaataatgcctagaaaagatatgtgaaagaaataacgaacaagtagtcggcctttgccccaaaaccttcgaagaagctgaaaaccgaggagcctcccattacattcacgaaggaagatgagaaaaacgtgagatatcgtcacgtcaatccattggtaataaccattcaactcgctaataaaaggatcaagagagtattaatagacaatgggaggtcgataaatatcttttataaatagactctaaagaaaatggggctcgaaaaagccaaattaaggccttgtatggtgaacctttatggattcactggagatagcatcgctagccttggcgtaatcaaactcgtattaactttaagcaaggcacctttatctgctactattatgcaagacttcttagttgtcgacctgccctcggcttacaacatattgttgggtcgttcaacactgatcagactaggggcagtcagttcgatcaagcacctatccttaaaattcaaaacaccatatggcgtgggagtggtgtgtggcgacgagatgttggctcgcgattgctatcacatagagctgcagcatagaaaagtcgatcatcaattgatggcaatcttggcagaagaaactgaacagaaagacgaagatctttacctcgagttcaagatgagaaaaacctgctaaaacgaatcgaggaattggaagaggtcattctcgacccaggaaatcccagaaagtgtgtatacattgggaagaacctggacgagcagctcaaatagcagctaataagctttttgaaagtgaaccaggatcagttcacctggagccatggagatatgatagagatcgaccctaatattgtctgccatcatttaaatgttgatccaactttcccagtgaggagacagaaaaggagacccttagatttcgagaggcaaggggcactgaaacaagaagtggacaagttgttagtcgacgactttatacgcgaggtgttttatccctcgtggatagccaatcctgttctcgtcctgaaacccaacagaacttggagaacttgtattgacttctccgatctaaataaggcgtgcccaaaagactgtttcccacttcccaggatcgaccagttagtggatgcaattgttgggcacgaacttatgtcatttatggatgcatattctagatataacctgataaaaatgtatgtcccagatcaggaacatacaagcttcgtaaccaacatgggactctattgttataaagtcatgtcatttggactaaagaacgttggggcaatgtatcaacgattggtaaacgaaatgtttacagaccaaatagggtggaatatggaagtttatgtccatgatatgttgttaaaatcaataaaacctacgaatcatacctcagacctcgcagaatactttaagatattaaagaagtataacatgaagctaaacacgaaaaaatgctcctttggagtttcctcatgaaattttttgggattcatagttaacgtgaggggtattgaagcaaatcctgaaaaaatcatggcactaatagacatgtcgccaccgacgaagcctaaggaagtataagcactgacaggaagaatggctacacttaacagattcatttcgaagtcaactgataagtgtgtgccgttcttcaacatattgcgaagcaacaaaaagttcgagtggacaaaagagtgcgaagaggcctttcagaacataaaaaggcatctagcaatgcctccagttttggcgaagccaataactagagagacgttgtttctctatttagccatctcggaagatgcaattagtgcaactatagtgcgagaagagggcaagcatcaacaacctatttacaatgtaagtaagaggttactaggggaagaatctagttatccccctctagaaaaactcacgttgtgcctagtccatgcgtctcgtaaactacggccatacttctaggctcaccccataaaagttttaaccgatcagcccttgagacaagttttgttaaaaccagatgcttctggaagatggataaaatggtcgattgaactggggcagtttgacataacatacaatcctcgaacatccatcaagggccaacctttggctgacttcttgatagaaggtataactccagaagaaattccaactaatcagtgagacgcagaaacctggaagttatatgtggatggtgcatccaatgaacagggttggggtgcaggggtaatattaatatcgccagaaggctttaagtttcactatgctctgaggttccaatttgacgcatccaataacgaggctgaatatgaagccttgatcgccggcttaaagatagcagaggcattgaaagtcaaaaatctcatttatcatagtgattcacagctgattgtgaaccaggtcctcaaggataaccaggctaaaggtttaaaaatgggaaagtatttagagaatgttcggaagaacttggaaagatccgattactttaaaattgaacaaattctgagagaacaaaactccaacgccgatgccttagcaaaactggccacatagaatgacttggatgaattgaacttagttccggtagagatgctaagcgagctaagtatatgtgaaactgaagacattgagatgatagatgttgggttttgttccctaaataaaacccatttcaatataatcggatt

SEQ ID NO: 223656 - DNA, 1534 bp, Cannabis indica
aagagatcaagaattcaagacctccaaaagaggattcaaaaactcaaagtcaaaagtcaatctgaaagtcaaagtctaagtcaactttggatcaaaatatgcaaatcaagctaggaagctcatctacatcaagactccacacaatcaaatggtatacgtttactttagccttgttaaagtgatttgcatagtatattagaattataagtttaaagtttggctcactaatttatgcgacaagttacttttccaaaatgacatataaattttttaaattagattttaagattattcatcttttaattaagagaatgcaactggaatttttgaaatccgataaacgaggtaagagttatgcgcgttttatgtcaaaaaaaaaattatattttgccattgtgccttaaatggtttaccgttcgacaagcaatgaactatttggctcaggtaacagttacccattcgtgaaattgtgaactgtttaagcccaattttgtcttgaatttcgtgctaatagctataaacaagtagtttcttcatatgctctatataaacagatttttctcacaaaaactaagaattgttgagattctattcgtcttattatatcattctaagtgttctagctaaacaattatcatcttttcgtaaacacactaaccacacacacttgagccaaactcgttcttatcttctctattatgctttcaattctctctaggatttcacattgtatttcatcttataagagggagaattttctttgtatttcaaaattacatattcattgtattgagaggtgatgttggcaccaatagaaaaataactcgattataggtgaggttgacaccggttttgtaaacaactaaagtagagtgagattgtcactacaacaatccgagagtggaattgtcactacaacaattcgagagtgaaattgtcacaacaacaatctgagagtgagattgatacttcaacaatctaaagaggttaatagtcttttagaaaactattggttgaggtgaagttgacaccagtgaaaaaataacccggttgacgagattggcacttcaacaatccaatgaggttatgtggctcaattctactaaaccttgtaaaaattgagagtttgtaatttctatcccaaaactctttccatctcaactttgttatttatttatacttgtgtttatttgtgtaattgcattaaattaaaatatttgcataaattatcttttggtgtttttaaatttctaattcactcctgaaaaacttattgtaggttaacaaaattgtcaccgctaatttaaaatattgcctttaaaagtgtgaattgtagaacaacccaatttttttaggaaaatttgcgtcaaaagtccccaaaaaggttactttgatgcagattagtccccaacctctaaaaatagcagcaatagtcctcaagatcacactttttatttgtccgttagtcctaattttaactgagtcgttttttttttaaattgccacgtgtcaaaatattattggtctaaattat

SEQ ID NO: 223657 - DNA, 3332 bp, Cannabis indica
taccacactatgcgtaagcattttttatagttaaccatgtaccagatataggtttttcaagacattgagcaacgcataaacactttagaacttgaaaataaatttttaatattgtaaaatctatttaagtgagtgtgttttatgcttactagtccatgtatgtgtgtggttgcccccaagtgactaagtaggttcacctcttgatcacttgttaagtaatcagggctttcacataggaactgtcattgtcacgagtttgccactataatttcatacactcttgaccttagttaggcttgcaatttgattcaataaaaatcatacaagctacgtcgttatataaaaaataacttgcaattttttcttgatgaatataatgggcaaacatgcctttttacatcaaaagtgggaaacttgtgcctttacattatcaaactttgttggtgggaatgaagaccagctatgaaaatacactttgtgggtacactaaccagcctaattcattgttgaaaaacaacttatattggtagtacttttgtaggtgctctccgtttcaatggcaagacactagtactaactttgtgttggcacgtaacgtgctaacttgtatattctaggtgggatgacctcaactattctgtactcagtggtaagtcatcatttggtaggatgatgggttatcatacccataggcaaggacaaggggaatgtcacgcgtggctaaagattgtatcaattaggaggacatagtcattaatgaggattctttgtttggctttttgttgttaataaagttatttccaccattattattgttggccctctttccattgttaaagccacttttattgttgctcccctaaccctaggagccttggccactagtgtttgctccgttcttgtttcccttagctgggttgaggcctttggcattccgctcagcctcttccagtttaataaattcatcagctctgttaaggaagccttttatagaatgagttggcttcctccttgtatctttccatagttgacctcccaccatgatgccccccattatggcagctcgcttgccgtcgtcacttaggttctttaccttgtaggcttcacgcataaagtgctagatgtagtcttttagcggctcatcaggcttttgcttgatggaaactaagtcacccaattctgccagtatctgccaggctgaagaaaaatgggtatagaattaccttcgaactcgtctcaagaagtgatcctccctagggtagtttggtaaaccactattgtgccgtgtctatgagggttgcaaggaagattcaacatcaaaggtcatccctgatcccttgagggtccatttggattttgaagttttcaacatgagtcaatggatcttcactacccgtgtacttgcaagtaggcattttgaattttgctggaatagggaggtcattgatcgtttgggagaaagcaaaccctttcctcatttcttgttctaagtcaatgagtttcggtgtagtaagatccttgacaaatcgggttaactcatccaaccgagcctggatcaccagatttatgactgcttggggttaagcaacattaacaccaacatttgtttggtttctttgaatcgactcaggtagatttactatgttggaactgtgattatccctatttctattgagggcatcctaaaggtctctaccccctcgagggcctacatgttcaaaaactgacttggttcttggccttcctcctgcattttgaatgtcatcccttccatcgatcgggggtggtacttggtcatctctacccctttgaggggattctcaggttgttgttgcctattaggggcatacggccctccggcttgataaccccccagcttaggatttagttggttgttggcccgaatttcagcttcatcatcgccatgaccgtcagggtagtttggacaataatcactattgactttagggtcttcccttctccccttggacttactatttctcgggcgatcattaccctttcttggttggtcgcggggttgccactccctatgttggggtgtctttccaccatttgtaccacgctcaccattgttgttcctagagttgcctccactactccaccttatacggatattatgggagtcatcacgtcccatataatgaccgggtaggacttgttcatcgacagggagtggtcgattattgttgcgggcaaccctgttggaggggtgactcctagccctttcttggttccttgggtgctctttaggtccatagaccaccctctcccgctggtttctcgaggcagggacttcctatggataggtttgaggtatctattgaatgtgggcgtcagtacccaaaccttaagtgttttggttaaagtagctttgtattaaatcggcagcctcttgggtgcgacggtcttggtcgtcttggcgtctcctcacttcacgagcatgatcttccagtcaagattggaattctctcctttgcttagcaagactttcggtcaaggccgctcgagcttgagtttgttcttggtgcacagtctggaactggccttgcattcggcctattgcatcttgtaactaatccatctcggggttaattccctcaatatcaatatggggttcatttcgtagcctaaagacgccaaggcctcgactagtttgagcttggcctgtgccatcaataggtggggaaaaatttccagtattaccccttttggtggcaccgtcagtagcactgcctactgcggtagtggcgttggtggtacgcccagcaattgtctaccttgtggcaacagtttggccagttttcccatgactggcagcagtctgagcagtggtgtgggtggtggctgcaccaccgttccccggacgcgagggtcgttctctattgttttcagcgagattgcttgatgatggaaattgttaggcattgttcgtctcctcatcaagtcattcttgagatcttcaggttaacaccattttttttggtaaaaaacttccagattttggtttaagctctcaatgaaagcaccaaaatattgactgtatttttagccaaccgacgcggtgtcataataaatgagatttaaaccaaaatttcagtaataaatgcaattaatgacaccagaatttacaataaatataaagataagagaccaaaatttaaagaggttcagctccagatatcggtaatagcctactctttttgtgttttattaagctgagttgcaaaagtcaagaacaaactcatgattgcaaagaatgaagaagtgtttattttttaagtgctcaaaattgcggatccctttcccaggtc

SEQ ID NO: 223658 - DNA, 1707 bp, Cannabis indica
ctttgtcagatgaaaacaaagcctctttctatttaccctagccgccacttcttcttctcttttcttctcttcaatttcgaaccttgagtgaatgagtgagtgcccacacacatcaaatggtatctcaatcatagtgtggaagattgtgaagaatccaatcaacaagaaggagaatcagcatcaaggaaggagaaagagagattcaagttcagatcttggtgatgctctgctacagaaaagaatcaagggctagagatctgaacggaaggagtcattatattccgctgcacccaatctagggtttcctaaactttatatgtgtttatttcattgttttagaattcatattaggatgttaatgaaacatacatggtagtaaatctagatcctggtaaaatatttccaacagaagttgcaagagttcttgaaatgtcaggatacttcagaactaacctcccttttaagtctcttggcgtatcgatttgctcaaaaagcatgtctgtagtagaatataatagcatttaaagaagatgactaccaaaataaaggtatggagttcaatgaacttattttatatggggagagttactctcataaacttagttatgattacttgacacttttattgggctcaaataataattttttaccaagaaactcttgaaacatgtggaagctatttgtagggcctttttttggaaaggcttagcacatgatagtggtccaagtttagtagcttggcaaaatgtgtgtttgccgaagaaagtgggcggttgggctttcgaagagtgcttgataagaatatggtcgccatggaaaaatatgttagggcaattaaaaccatgaagaataatctatttgttaagtagattaacagcatctacttaatggatagaaattggtaagattgccaagctcccaccgattgtagttggtactggaaaaaacttgttgctgtcaatgatgctttaaatgctaaaactgatctagtatcctttacagcttcaaagtacgacattaaataagggcatcaactgctctttgagcaacctcaagtggtgacttggagccaaattatttgggataggctgagcattttgaaacatagaatagtgctttggcttgttttgttatagaggattcggacaaaagatactatgttgcaaatggatttggtggctgatcaaaattgtctattgtgcggggctgctaaggaaaatacgcatcatctgttcttccattgtagctatagtagcacctgccttaaggagattaagcatttgttaaggttgaaatgcggtgccatggatttagctagtctactttgttagatcaataaagcgaaaaaggttagtaatgcttagagaaatattatgtatgcgattcttgctcatcttgtctattatatttggagagtaagaaatgatgttctttagtcacacaaactttgacttatcaaacatattgtacaaagagtagaaaatgaaattaatttagaattagtcttgtaataccaagaaaggctagtgatagagaatgttttgcttcaatttctaaaaattagaagagattttgcatttattgttgtaaagggattgtaagtgggaggttgtaacaagttttggttgagcaagatcttattcataaaataaataaatgaattattgtatgcttatgaaaaattcctatattaatataaaatatttt

SEQ ID NO: 223659 - DNA, 1317 bp, Cannabis indica
aatgttcttctcctggattattccaacaatttaccaatcctggttctaacttttttaaccactcctctgcagatcctcctaatgttaatgggaaacacatgtatttaacgtctttgttgaacctcatgaccatcatggctctattaaatctggactagtgatcacttggatccgtgtcatcagtatacacagtcatttcaggcatttcgaagttctttgggagctcaacctctagtatatttcttgcatagggcttctgatcctcacaatccaactcaaagtcatctcccttctgtctctgggagacccttgctatatccttccggagaattgcaagttcggccagattccttcattaaggatgccatcagaaactggtgtagctttctttctttaatcaagtggtgcccttaggtccccgtgtttgtatcttagattgacatggggatcgttcctagcggggcctttttgttttcctggctcttgatggacagatatgctccttcgatctccccgatcttgggggctagttttccctttgggaaatctacccccatgcggacctttcccttttaggagattagaacgaactttctgtggatcttgggactaggctccttattcttttatttttgacttcctttaggctgagaaggctctccctcagtcccttcttgcattaacgggaatgtaactagatccacttggatgcccgcattttctattgcctttttcatggcaatcaatatcttttgcatccttttattttgctccttttgctcagccaactcagcttcagggtcagcagtcttttgcctttagctcaaccaattttgtatagttgtctttatcgtagtttttgtactcttcttggtttaaagattttggatcattagtgtctccttctccttcaacgtccaccccagatgccacctcttcctcctttagattctttgggtcatctggttgttgtggacgtgaggtatttctagtttttaccattatactatgaggatgtctatgacttcctttttttttttggcaaacttcctacactctcaatgaaatcactaaaatattgaccgaggttctcgacaaccaataattaaagctgtatgaagtatttaatggaagttagaagaggaaattttacgtgattgaggcattaatgagccttagtctgcgagtcattgtatttatgaaagtatttattacagaactttttcttggatgtaccccatttctatttatcattagggtatttatagacgcataatggtggtaaaaggccacaattatcgtgtttgtttacaccat

SEQ ID NO: 223660 - DNA, 1341 bp, Cannabis indica
ttgtggattcgccggatcaaccatctacgagtctgtaccaccattgtgtttgtgactagatttgagaaaaagagcgatccttgatttagctctcaatgaaagcaccaaaatgtttgcctcccttttagccaatgacagtgagtctaaattgtaagcaataagtagtataatttatatgtaatataataaagacacgagaattttgtagaggttcagccccgagcaattcggtaatagcctaatcgtcttggtttttattgacttaagaacaaggagtataatcccttttcttagagcttttacaatagtttctatgaatatgaattcttagataagtttttcgaccctttttcccagtgagtatgaatcactagttatagagctataagcttgggagggaagaatttccattctgattacaattgatataagtggaaagattgcatattaaatacagaatacactaatcaagggattcagacagcttgccatatctcttggatctgatcccaaaattatagggatttctttggtgactcatgatgcgaaagctgaaattgcttagtgttggcatgcggtgcagatcgctcactgccaggctaagagggcttcgtccgagcgaatgtatgttgtgccctttttggcatatctcttgcgagcaggtacataaagttgattccacgtgtcaccattgtgtgatgccacgtcagagtgcaaaaaatggaaaaaaaaaattcaagggctaaagaaataataaatggcagaaaataagaaaggaagattatttgcgtggttttggtgttcacaaatcctagtccacgagttagtatattagcctcgttggacgatattaatgaatttaaaatgttacatgggaaaccctaactctgtttccttaatttcttttctaagaataagaaaaagatcaaggataatttttctagagtttttcctatgtgttttgctggctttcccctttgcatgaaaatagagggggtatttataggcttaagtgatggatgttggtcgccccacaaaccacctagagtatctgcttaaatctcactattggggtaaattacatacactgtatgactgtggttgataccgtcggtagcatcatgcctgtgcgtctagcaacaacataatggggacaaccttgtactgcttggacacatgtctctcaaaggtctaacccttaaaagcaaagaacacatttcatttaaagctggttcctttttgggtagaagtctgtattgttctgcttgtaacaagatggtggcgatgtgcgcaataccatgctctatcgtggggaacaagatcagattctgtcaggaaaaa

SEQ ID NO: 223661 - DNA, 1269 bp, Cannabis indica
ctaaactttcaaaaacttacaaatcctttattcttgctgttacagccgaattcgaaccacaaaattacaagcaagcaattcaattcaaacgttggttacaagctatggataatgaactcttggctcttatcaccaacaacacatggaccgtggtacctcttccaccaaacaaacgtgctatagggtgtcgttgggtttacaagatcaaatataacagtgatggaagtgtagaacgtctcaaagcccgtttggttgcccaaggttacacacaacaagaaggtttggatttttttgacacattctcccccgtagccaagatggttactttcaagctccttcttgcaattgtcaccattaaacaatggcacactctccaactcgacatcaacaacgcctttttaaatggagacttagacgaggaggtctatatgcaaattccccaaggcttcacaatcccatctacaatcactgggaacaaccttgtttgcaaactccacaaatccatttacggccttcgacaatcctcacggcagtggtataaaaagcttactgatgcacttttacaagaagggtttactcagtcccaagccgattacaccctcttcacacgaggctctaatgacacatttatagttctactcgtctatgtcgacgacattatcattgctggccccaaccttcccacattacaacatttacaagactctcttcaagcaagattcaaactcaaaaccttaggacccctcaagtatttccttggttttgaaattgctagagctgcaaccggtctctttctctcacaacgtaaatacactttacaacttcttcatgataccgggtacaccagtagcaaaccggctaaggcccccatggatccaagacaaagacttgatgacaaagaaggcgaccctctcgacaacccatctcactatcgtcaacttattggacgccttctctacttgacactctctcgtcccgacataacttttactgtgaacaccctcagccagtttatgtcctgccctcggacaccccatttatctgctctccatcacctgctgcgatatttgaaaggatcccctggccaaggcattctttactctccaacatcgtctctacatctccgcggtttttcagattctgactgggctacttgcccaatcactagacgatctactaccgggttctgcatcttcataggcgactgcctcattcatggaaaacaaagaaacaacccactgtttctaaaagttttgctgaggccgaata

SEQ ID NO: 223662 - DNA, 1518 bp, Cannabis indica
gaaagaaaagtctatttttttgataaaatatactcttttttcttaattgtataaatgtcttcattagtcattactatattattatgttaagaaaaaaatgtatctacattattattgatgcacagagttcggtacatagtgtgaacatattaattaggtgggttctcttttgtaggaaaacgatggtgacatataaaagagcatagtgctgtaattaatgtaaggtaccctatttgccaaacattgaagaatgagaaatgctattggatacccatgaggccatgagtgattactaccacctaaaatattatatccatctttatgtaattaagtatctagtgtgtgttcaaaattacaaaaataaataaataaataaataacgagtcttacataattttagtctcataattatttagatatgtctttttgaacaaaaacaaattaattaaaaaattataataaaaaattaataataatattctttttattataaaatgtggttaattatttataaaaaatcacatcaataaagtaataaatattatttttttaaaacttagaaattctattaaaatggatcaagctaaaagatcgggatacaaaagatagacaaactaaacagttaaatcagcgggtaagcttggccacaacacccgagtctcatctaaatctaatgctcgttttgctaaagaatgagcaacatagttttttgaccaattacagtgcgacagagatataatactgaaagaattcctaatatgattaatatcattgagaaccataccaaactcattgcgacaagggaccttgctattgacagcaagaacaacccgctgacaatcagagaagacagtaatcaccgtataccacatctgcatgcagcaagaaatcccatagagtagagctttggcttcgaccacgtgaggttccaacaatcccgcgtaaggagccgcactcgagaataggacatgcctcgtacgattggaaatcaaagcccccatccctatttttcggtcctcaacagacaccccaacatccacaaagaaattgaactcaccaagaaccagattagtctcagttgatgccagtcgattacttgtattgctagagaccggacccatagaagctagctcaacattattagcatcttgatatttccataaataatccatggcccaggcactaaccatattatcagataggagcttgtgatcatgcagaaaggtatttctcttattccaaatacgccagccaagttataaactgctcaagttcctttcttttcaagatatccatacaccccagtaacaactcataatagcaagaagtgcccttcaaggagtcaaggccactcaacaaccatttcaaacgaatagacttaagagaagggtagagccacaaagtatgaatagtagtcttgttattccgagagtaaattggatatattgtcgaaaccttcataccatagcgagataagttggcataagccgggatgaaattcagacatgccttccacac

SEQ ID NO: 223663 - DNA, 2398 bp, Cannabis indica
aaaaaaaaaacaccaaataaataattagtgaaaatatatattttgtaatgaatacttccaacaccttgtggtttagcttggacaatgtccgatcaaaaaagttaattagcaatttgtataacattagtttgcaaaatacctcagtactttaaaataagaagatgtaatagtagtgacaaaactctaaatagttcattttgtaatactaaactccctatgtaaaatatttagtcaaattcatagcattatactctttgcaattatatttgtattgatttatcttaattttaattttaagaatgggaattatactcctttaaaaaattagaaaatatagatttatttctgttaagtttaataatttttaactatatcttaattaatttgtgttataattatatactaaaaattataattgtgatcctagacataatttagtcgtttgacacacttatttttacaaaatgaggtcccaagtttgaattcaccttccaatgttaaaaaaaaaaatatattatctcaaatttattaaatatatatatcttgactaatatgatatacaagtgtcattttagtcaaatttaactcttgactaaacctcaagagtaaattgcaacaaattttcaaaaatatgaaattttaccaccaaatattttatatagagagttaagtgtttaaaattaaactacataataaatttcaccgccattatcccaaataagaataatatttaggtaacatgagataaaatttaatgatttttttatcaatttttttttataaaatttaaattttatttcattccattcttatttatattgtcattatcattcatattattatgttttcattcctcctaatcaaacgccatcttagtttacaaaattacttaataaatgaaaataagaataacatttagtttacaagattccttaatacttcaaaataacatttttaacttttgacaaatgttcagtatataaaagagttgagaaatggtagaagagctaaaaacttagtacatattataactaaaaaattattttttattttcgaaaacaaaaagttattttttaaaaatagttaagaatgtttgacgttattatttgagaacaacagatttcaaaaaataagaattttgagaacaaaatattgttttttattttaaaaaataattcactttttgtcaatttttttttttttcattttatctcacatcattatatttattatttttattttttctctcatcactttctctttcctcattgtctctctcatcaaggtccagggtccggggctcgtgtctgagtttgtgtccaagtatgggtctgaggccggctccaaggtctatatctaaaatctagttgggtcttattcatattgatatctcaaagtattaaaatattttttaaagattgaaaaaataataaaaattattttaaaaaacattaatcaaatcaaacacgacttgtatattaaaaacttcaaaaattattttttatttttatagaaacaataccaaatatattcttaattttacggagaaagaaatattatcatctggattgaaacaagaaattactaagttatgtctaaaaatacaaaaataaatttataattgttttacatctcctaaaatactacatttgagtatttcttcaaaagaaataataaataattccaaacaaaagaaaataaaattttaagattcaaccatataaaattttgttttctaaaataaaatcatataaggttttgtaaaacttgtaatagttatgaaattgaaagaactattccaagtaattttatttgttttctctttctttgtgtattggctttctgaagaggagttttagttttttaagttgaataatgtttctcagcaaccaaacaacagattattttaaaacaaaacatttatccaaacaagtcaaactgtaaatttgctggcattgtacgaaactgtaccttgaaaagttctaaaactccataaaattgccttgtctttgaagaaagaatattttactagttttaacgagtcagcaaaagctcaataatccattcacagacaggaataaactttctgttataatccacctctccttaaaccaccaccttttttttttcttttaatttaaagaacaaaaaatattacaaacagaaatttcaaattcaaaaaaaaaaaaaaaaccctaattcaatcagatacataagtttttttctacatttttgacaccaaatctatagtaatctaaatttaataaaataatacagtaacaatattaccaccatattaccaattaatccaaaatcaaaaccacaaaagaagacacagcaaaatgtcaatcaaaggtaggttggttccatcccattaatacttttttttttttgaaaa

SEQ ID NO: 223664 - DNA, 1606 bp, Cannabis indica
acacattaatttatagaggttcgacccccttgattagaggataataacctactccttttttagttgtattgattcgagagataataccacatagattacaggattttaccttgtaatttctagtgtggctctctatgaatattacaatagtgaaaagaatatgagtgggtgagaaataaaattggtgtcttgtatggtgtaggtggcgtgtgggtgagagggagctagggtttcaagagttagaactcaaaacttaggacttggaacctagattttttgtctggtctaatgctccttatataggtttgagcttacaaaagatctagtttaaaataaactaatatcccttaaaatgtggagatattatccctttttcagatatttaattatacaaaatgaccccttaattactcttaaagaataggtagatatttggagttgaacccatatttttgtgggttgttagagtggcttcgcagctgagaatgagttgtggtccgtctagggtgaaggctataaaaacatcgatcatttaagctttgttctggctgttactgcagaggttggttggcctaccccttgtctaaggctagttggcacatgcttttccttggccggtcaggggtggtccgaccagaccctctgggtttgccagtttattgtatcttcatccttgttcaagcattctgtcacttcatcaaatggtaagttatgcatgatgacttggttcacctattgacaggttgtactccacgtggcatcaatcttgcctatgtgggcatgccacgtcatgtgggtaaaaattaggataacagaacataataacatgaacaggaattcatgattacttaagatttagaccgatatactattcatcatttttataatatgaattaggtctttatagtaaacgacatgtttgataaagacaacttaattacatatccgtccatgttatatataatatttattatatacaacatcttcacatagatgccatactacaccagtaatctgaatcgagattacttgcactgaataataggcatcaatgaaccacactaacaattattgattaaagataccaaaattttaatatgttgctgattgttttattcatggctaagtgattttaattctgcatacaatataagtcacaacctcatgtatgaataaggaattttctgatctttatatatattattcaatattaaatattaataatttaacaatcaagtatatatgaaaatattcaactattatttataaagagaactgtatttacaggctttttagagcataaaccctaacatgagggtattggtgttgttttggacttgccctaaaacttctctaagattttttatctcggagttatctcccaggttgacacgaggttctccttcagatggttggcacatcccagccacaatctctccagtatactatttgttggtatttcccatttcctagacaccgagagtgaacctaggaagttcggtagtaactccaatcgtgttcctagtctctgttcctaaaggaactagatctccacccttttctcccaccggaagcactactatggagcgatagacgcgcgttgggg

SEQ ID NO: 223665 - DNA, 2960 bp, Cannabis indica
aaagggttttatttagggcacaaaacccaacagcatgcaacgtgaacacagccattaccgccttccgtaaaggcctacaggtagaatttgacctttacaaagaactgacaaaatatgcatgtaggacaatggaggacgtgcttgccaaagcttggccgcaaatcaagtgggaggaagacaaatccaatggacaatcgacaacttcctactcttactctcgcgacagtagaggaccgaagagggtagagcaacggaattcctaccattattcagaaccttatccaaccaacagatcatggtcatacagagataacgagaactccacccaaccacacagaccaagggattacattgtcaagtcaacactaccttgaaggatgagggaattagacaagggaccgattcccgaatacagcctgaacattagccttgtcaaagtagttgcagtaatgaagggaatgggaaactaggtcaagtggcctgaaaagattaagaaaccagcagcaatgtgagacacaacaaagtggtgtgaatttcacaaagaccgcggacataccactccagagtgcatagcattaaggtatgaagtggttggactcttgcgcaaaggtcaattgtgagatttttcatcagacaagggaaagacaatcgtgacaaaagcaaaaaaaaaaaggctgataacaccaccagagccacctcatcacactcgaacacgtaatgtcatctctagagggtcagaggtcgggggcgtaacatactcagccgctaaggggcatgcacgtgaaatagccaggatagagggtagaccaaagaaacaaccaacagccgtacaacggccaaaccatcagcttcgtggacgaaaaagcttcagatttgcttaatcctcaccatgatgctttagtcatttctttatttatttcgaattgttttactaaacatatattgattgataacggtagctctgctaacattttatttttgaatgctcttagggagatggggatcgatgaggccaccatcatccgcaagtccacagtattggttggattctgtggaaagcagaaacactcactcggcgaggtcgaactccatgtttatgtagaaggagtcaacctacagacgaagttccttatagttgactctccatcagcttatacaatgcaatcttgggccgaccgtggatccattccatgaaagttgtgccatccacataccaccaagtgattaggttccccaccaagtgcggagtgaaagaaatatggggagcccaaaaaaaatgcgtgtgattgttatcaaaactcactaaaagagaaatcggcaacattatagcaactagagcagtctagtccaaccttagcaccagatgaacccagtatggaagacctaaaggacgtgtccataagtctagattggaacaaagcttacacctgagtttcgagctaggctgatcaagttcttaattaaacgccatcattgctttgtgtggtcccatgaggacatgacagatattgattctaacattattgttcacaagttgtaggttgaccctaattacccactagtcaggcaaaaaagacgtaaattcgcacctgatcgtaacaaggtgataactgaagagatacaaaaactaatcgatgtaggatcagtcagataggttgactatcctgattggttagcaaacgtagtagttgtcaagaagaataatggaaaatggacggtatgtatcaactttactgatctcaacaagccttgtccaaaagactcattttcacttcctcacatcgatatgatggtggacgcaacagctggacacgaattattgagtttcatggatgccttctccggctatagccaaatcttaatgcatcccaaagatcaagagaagacatcgttcatagcagagcgagggacttcttgctcttttggtctctttaggaaaattcttatgaaaaatacttaggtaacctcgtcacaaaaagagggatcgaagcaaatcaagaccggataagattaatccaaaatatacaatctccaaagtcaattaaagacattcaacgtctcaacgaaaggatagtagtgctcagccgttttgtctcaaaatcttcataccgttgccacttattcttttcaactctcagaaagaccaaagacttcgtgtgaacgaaggaatgtggcgaagaggcactaagacaactcaagagctatctcacttctcccccactcctagcaaaaccaaaggatggagaaacattgtacatgtatctggcaatttcagaagcagtgaccaacactgcactaatcctagcagatgaaggaaagcaacaactgatttactatgtttcgaagacattgctagatgtttaaacaagatacactcagctagaaaaattggccttagcgcttgtcatagcagggcacaagcataggccctattttcagtgtcatcctatagtggtgctaacccaatacccactccgtagcattctacacaaaccaaaactttttggatgcatgaccaagtgggctgttgagcttagtgaatacaacataacatatcaaccgaggatagccatcaagtcacaggcattggcatattttattgctgacttttcttgtgttggacaggtacaagaagaaaaagaattattatatttgaacgagcaaacaagctcgacatggatgttaggagtagatggattaagcaacagtaagcagagtgccctaggaatagtccttacctcccctcaaggggacgttatctagtgggcaattagatgtgacttcaaacttaccaacaacgaggctgaatacgaggcattgatcgctgggctagacctatccattaagttgaataccaaaaccattgaagtcctatcagattctcaacttagcgtaaaccaactcagcgggtcataccaggccaaagattcaaaatggcatcctacctccagattgttcaa

SEQ ID NO: 223666 - DNA, 6050 bp, Cannabis indica
gagagtgattttagaccatttgatctccaagagtgctagcaggcacaaggtgatggtgatagcaagcaagaacactaggaaagttatgtcgagagatttaactatgaactcccctgtgaagagagaaaccgctggtaagaagcaatagactatgaggaatatagacgtaaaagggtacatccccacgttgaaataggccactctttgcaagaatttcattcggggactggcaaacaaagcgttgtttcttgagaagaaaatctcaacagaaccagttgcccatctcaacacttggtggagcctatcagtcagattgattggagctgtccccctaaaggcatctcttttagtgacacagtaaactgatctccaccctctgttatgcatacggtaaccagtaacaacatcttctgtcacagagccataaatccagccaacccttttgccccactcggttttatcctcgtaaaagcatgagataacacttattgcctcagcaacagttgcagcatctaatggctcacgcggaacagaaagagcaccggctggtcttccttggttacctttgccttgaacatcttgaagcaatctcccttggtattcagcaactgggattgaagcaacaagagtagtagagttcccaaaccttttgggaaacaacaaggattcaatatcaccatcctcatcttcatcactaggatggattggtaaagctacttcatcttcattcttctttgttatctttggttttcttaaaagcatcttgattttcttccttccaaaccatccatggtgttctgtggctcgaggaggactaaacccgtaaagagcagttcttctgaaaatgcagccagttccaacatataccgggccttgtaaaccatctagtgctcgcatactaacatcaaagaacactgtgttgtgatttgcataccgatcattcggatcaattccctcaaatctttgtgggaactgaacataacagattctatcacctcccctatcaagcatgaaacacattccttcccttagggccaaagagttgtaaatatagtgatcacagtcgaggttgaggatgaatggaccattagacatgattgcactggttcggacaagagcattcatggcaccagctttcttattatgatcataacccggcctcttctctctagacacataaaccagcattggtaatctgatatctacttctgttgtgtcaatcaagttctcattatctgcttctgctccataaacaggttctgaattgggtggagctaacatggcctgaaacaagattccaaagttgtcagttctaatgctgagattgcgcaaggaataacaaacaagctctaaatctcagaacaaactaaacaatcaaaagtaatagcaagaagaagatcatcttcctagttaatccaacaagctctaaatctaataacaaaataaaataacgaacataatagcaagaagaagatcatttcttcctagtcaatccaacaagcaatagcaagacgttacagcaagacaacagagagaaacacttggtatcctctagtttcccaagaaaccctgaaactagctctcttaggtggcttttggtttgagtaatgaaatagaatagaatgaaaatgaaacaatttttattccattcctttgtttagttttattgtcattcctattctagctatgttttcattcattctaaccaaacccccctaatgggtgcttgtaatgtgagtttgaattggagagaatgtcaaacccaagtattaaagtggattaaacattaccacaattttagttaaaaagtgagacccacttggaaacataatttaagtttgacattcccattcccatctctccagttgaaaaagaaataaaattgcattaaactttatcgacagctttaggatgacctgagtcgcaatttgtccaatcacttattagacattcatgtaaacataattagggagtgcagaattacctggattataccagcatggtcacctctcgagtgttcttcctcagctgaagcccatgttccaggccaatgagacccatcagacatccaagtaccctttacaatcttcagggggtcagaaggattgcctcccatttccatctgtttcttctttgcacgtagctcttcatgggcattgtacgcatcagatcttctccttatggactccggtaatgagttgatcctcactttaaactcatcatactctctcttcactcttctcctttccctaacaaaatcaaggcgtactttgctcttaagaaaatcacgcttctgcccaaaataggcctctggattccttggctcaattttatgcttgcggcaaaagggaacccagattctagcaaagctagctgtctcggcaagggcttcaaatgtgagtaaagcaccaccatcatcagataagtagcaggcaagcttttccaccggataatcaacggccaggattgaaagaattgtgtttgcagtgacaagaggaggttctttctcagggtctgcagtggaaacgaaaacatcaatgcccggaaggtctgatcttcctttcggatttcgcaggtttggtgactcaaaccgctcttttagtacagagaggtcagttactctgtttactggacagagcttaggcagctgatcaagaagccatgaaaatgcaaaccagagttcacaagtcgttgacaatccccataaccacattgcatcatgattgggatgtctaattctccatgtcaggaaaaatccaagcgccacaagacgtataacaattagtaatctgcaaaaataacaagcaagtgttcatatttacacataatgcatgaaattactagcaagaccattagattaaaagcaagcaagtttgaagacaaatgttgttacctataaggactcagaatagctgcagaaattccaactttcctagtcaatggtctcctagtcctctcaccaaaatctggaggatgttcgaagccattagtccctgaaccagtgccataaccatcttttggccacacagcatttccatacccgtaagttcctttggtctcgaaaagccaccgggtgtgatcgaaatccgggggatggttctgggccttaaacgatttcacaagcgaaagccttttgtcaagcttaacatcagccatggaaggcaatggcatagtttgatcctctgcttctgagcaagtctcatctccatcaccactattgtcatcgtcatcactcgcatctttataaggctctttacaaccaggacaacgcgctcttccagtcccaaaacaatccaaataacagtctctgcaaatcttaaatccacactcacatggagcacttttacctttaatggctgtctcatcacaacctttcattccacaaaccaacccaattttcccaggcggtggacactccattgagatagactcaattacatgcccacgagtcaccgaattgaatcctccggtgaagatggtgcccgagatgtaactcctctccggaagcatcgttgacttgcgtccctcttcggtcaaactagtctgagaagctgacatgggctggtgatctggtgttggagggatatgaactgtgtagctaacgtattcggaattaatctcttccgtcgtcgtatcatctttcgtcatcgagctatattttacaccgccagtggaggaccgccggtttgctctgccactcagaggagaatttgggttgttcgatatcgaagctcgggacacggggctcgttagacccatgtttctactccctcctccttttcctcccgaagataccgtgatcgtcaccggagaagaagacggagatgtaactgttttcgccattttcaaaacaaaaaaaaattactaattcccacccaaaaatagaaactttcccagaaatatatctctatacaatgagcttactcaagaaaatatagtgatcactagattgagtagagagaacgataatggggtttagatttggaatccatagatagaaaacgaaagaagtagaagaattaaggtagcatattcggcaacggtcgagtatttgaatttttgagctcttgggtgtttgtaatctgtaaagagaagagaaaggattgaatcacaacggtcaagtgatctgggccgtgtatttgagaagatctaagggatgagattcaactaaaacggtgtgtagtttagtgaaaagataaagcaggtggggcccacttagagagtaagagacgaaagtcaaagaagttaattaaaggatgctttagaaatttcaacggtcgaataaactaaacaaaacacttctctttaatactaataagtaaagccgttgagcacttttgctgtctactccctctttatattttttattttttactttttcttttttctactacaaagtatctgatttttgtagtaacttcatgcaaataacttctattttgacgttaagcataaaaagcttcaaattttcagcttttctttcctttttctatattataattattattccttttctaatgatacaaataaattaatttttttaggggacaactcgtcggatttataaagggcttattttaatcaaaagcatttatttttaatgggtaggtgtatgtgattagtgaatgactaaattctttcatcccgaggtaacaaatgatgtttattagggacatggtttcaagttaaaatgagtgaaataacaactcaataagaaaaacagaactttatttatttttcatacatctttcaaaaataacagaggcaaaggggttgtaaaaatcactctttttgcaatttgcaatgttttttgcggctaaatcctctccattattatttcacttgcacttaaattctcaagttcaaattttagcgataaaacttttcaaagtactgaattgttagcaaatttaaagtgtcacctagttaactgtcggcatgaactatttatatgtacactattgtacacttagtacacctaatattattatttcaaaattaaatagaattataaaaataaaaataaaagattttaaaaaaataaaaatattataaattttgaaatattttgtataatttttaaataataatgctaggtgtactaatataaaggtgtcacctatacaagagtatacacataaacaatctatattggcaattaactgtgaaaaatagctaataccttaaatttaataacagttcagaaatttaaagaattctgctattaaaattttaatttaaaaaattaaatgcaattgacacgataattaagatgatttagtcgtcaaatactctacttttgatttcattaagtttaatagtgctatctaaatagttaaccaagtagcccttccatgaaaacttttgctttctccattgaaagtgagcatactcatcataatttgaaaattttctcattatatgtgcatgactcgttgtatcccaaaacttaaaggtagaataataatgattttatagagggaaaaatattttgtaggtctgctggatttcagtttcacatatacattatttgttttgataagcagtacttgtaaaagcatgatgattaatcagtatatagtcatatgcaccatacatttcatttccaataatgaagtagcagttgcataaggctgctgatcattccctcaacattgtggagacaaaaacatgttaaaatccaaatgtgggttccttatgtaatcattcatatacaatcttaattatgaatattttctgatgagattgtacatgtactaactctattagagagttttccttatcactatctatactgacacagtgttgaatcattgaggttggtatttcaaagctcgactccaaagtatgatggccaagtttgtgctccatttctattaaagcattcagcttggtatttcgtcaaagcaaaagtactctaaaaggattatgatttatgagtaatttttctattgtactgatgatcatgagggctcttgttcctcctcatctgcaaagtgacacatattaaaaaaaaattatttaatgttaaaatatttctagtattaata

SEQ ID NO: 223667 - DNA, 1997 bp, Cannabis indica
ttacatcttgggaacatggagttcaattgagtgagagtgctaatcatagatatggaatctataacttctattagtaattagaagttaaacaatgatttccttgagcttggcttaatagaaataaattattgagatctcatttcagtaattatattagtttactgaaatatcatttataagtagctcagtgttttaaggataaaatacattaaagggtagaacggtaaatttgtccatattcgatgtagatcatctatagaggatctttgactattagaattgaaacaatgagtaattcaaattgcatctatttttggtaatagtgtgttttatgtaattaagagttcaattctaaatctatagtggagtcaggaggaattaataagttaagaattttagttggtaaattttggatctactaattgtaagcttgattacatagggccatggtccccacactagttaaaataatactgcttatagactcaattgattagttttaattaatcaattataattctaaaattagactgtgtcttatttatgaattttcactaaataggggcttaattgtgaagaaatgaagttttggaatttatttgttaattgagagactttgtaaggtctaattaataaataagttaatagaaaattttatttgataattaattataattattaaataaatagttttgacatttataggattgaaattggaaaatatgacattattgaaagaaaagataaatgattgaataaaatggtaaaattgtaactagtgaggcccactactatggccggccacttaagcatgtttttaatccatataattaagtcataaacactagttgaaatactataaaaggaataagatgctctcattctaatccacctatcataaacctattttcattctctgtcatacagctagtaaatgacagcctccttcatagtaatttcgaaataaccttcttattgttcttcatcaattcaagcctttagtgatagagtaccatgccaaatcatagcaagtcaagtacacaatgatagtgtggaacactatggttaaccaaattgaaggagagaagatcaggttcagatcttaataatgctttgctacagaaaggaatcaagggctagagatttaaacggaatgagtcatattattccgctgccatcaatgcaaggatttcttaatctcttatgtgttcatttcatcgtattaggaaattcatatttagggtgttagatcatagattataatcaacatacatgttagtacatctagatcttggtaaaataaattccaacacaaaccccaacacatttaggcgtggacatagaaaggaaaagcaagtgtactcagtggattcaagctctcgggctcactactatgaagcggaaataagtgacctctgccagaaaaataaaaggctagaaactaatatggctggtatacaaaaagtgttgaatggaatactgaaaggcaaaacccaagcctcacattttcatcgagaaagccaccaagtggggaacgagatctcaactgcatatgctaacaaaggtgattccctgtcatccactaatagcaccccaagagatgagcacggaaggaacctattgcaagacaagagcccaacaggtcggtcgagacaaagaaagagacttcacctaagaggtctcatactagggggcacctcacatgtggctccccctaagagcaaggcccaatgcaaaccacacacaagacccaagttcctctcactaacccccgagggaagaggagcgagaggatgaaggagttggaggcagaaatggaagacctacaccataggatagccattgccacgcggagagacttgaccgatgatgaggagtttgatgaagaatcccctctctcgagcaaggttcaaattgagccactagaaccaaacttcaaggagccgcagatcacacaatatgatggtaccacaaacccaaagtaccatcttggcgca

SEQ ID NO: 223668 - DNA, 1095 bp, Cannabis indica
tggtgccaatatagttcctagaggaacccaacattaccatcccaaaagaagtcaacatgtttgatgatactccaacatggatgtcactaaggctaaagatgagcaactaatgatcgaagtgcatgaaggcttctgcggaaaccatgtcgaggggaaaagcctctctaagaagatactccaataggggtacttctggccaacaaagatcaaagactggatggactatgtcaaaatatgtgacaagtgccagagattctcaaaaattctaagagctccacccaatgagctcacaatgatgcagtctccttggtcctttgaagtatgggagattgacctaattagtccacacccaaagagaaaaggaggggtattgtttactatagttgtaatagagtacttcactaaatgggccgaagttgaacccctggtaacaatcacctccaaaaaggtcattgactttgttgtcaagaatatcatatgtcgattcagacttcctcaaaagattgtgtcagataatggaaagcagtttgacaatgacatgttcactgatttctacaacaagcatggcatcatcaaaagcttctctgttgtggcccatcctcaagcaaattttatgttatatatcagcacgcttttcttcaaaaaaaaagtaaaaccataacagcccaaaagagccccaatctcgatcagatgtttgactcaatttgagacgtacacgttctcatccaacggctcatcttggagcgtgtacttcacctgagacagccgagagtgagctctaacttcttctgtcgcatgccagcatcagtgggacctgcctgaagcctctccttccgccacgcgtcatcgccaagcggtcaaccttcctccaatctcaatctgccaagtgtcctgcagaagaaagagaagaaggaaaaaatggttgattaaatgtgatacataacaaccaaaaattacaataaaaaaaaagccaaaaatccacatttaactctcacagattacttatctcaaaaaaaaaaaaacaactctcacatacataaatatcctattttatcttcctaatgtatttcatctaaataaacattcccaatttat

SEQ ID NO: 223669 - DNA, 1233 bp, Cannabis indica
aatcaatttatgccttcatgttttttcactggttttgactacttttgttacttagtaaaaataccattttcttataagattttaacaagtttcttattggtccaaggaataaatcatgtacataataaattctaacctttagattataaatttttattgccctttttataatatgctattttttcttatatttactaaatattttatactaatcccatccttattactttgtagaagtttttatggtagaatggaaagttaggggttgtcattttttatattaaaagttttattatttaattttttttttttggagatattcctttcttatgtcaaagtaacaacaatgttgtgagtaagggtgttttccatgggagcggtgtgatttttacttatttttttaaaattaatttgtatatgtaatttttgtaatttttcaaactgcaaccacacagtaaaatttcaaaactataaattcacattacaaaaaaggtatggtacggtatgaaaagtttacactattgcctaataatttaatcattaaacatttaaaactttatctttttgtttcattgttttgccttagcttgttgcatttgcttattttgttaaattgggtctaacttatttagctttaatttatttgtttttttgttgttaaagtgttaggcttctattgttaagtttttttttaataataacggtaatttcattaatttaaatcatccaaaattaaggatgcaattacattaagtaaaggaaagctactaaagacatgatttgcctcaataagagagagaatcgcgccaaacaatgcgcaaccctattaacaggcttaataaaacttaaagagaaattaataccaacttcagcaatcaatgtcttacactctaaaataatatagagataagggaaagtcatatttttattaatttgtagataagttcttaagtttttgtttcttcttaattagcttattttagttaatgtatttgcgcggtgctttaaacaaatccaccacaacacgccgaagacaatttatgcatgttatatctattaagcctaataaatatatatccacaataaataattcaacaaatatttatatttatataatatcttaattatatattcatttatatacctgagcactaagtctaaatttcacataaatgttgagcaacacttattcataatattattttactatctaagtaatttaataaattttaa

SEQ ID NO: 223670 - DNA, 2275 bp, Cannabis indica
gttttcaaccttatcacaactcaaaatatatttgagaaataactttggttaaaacacgatcttatatgtacactcccatggaacagtatcaaccaacaaagattagaaaagtttgaagtttgttgtaaagaccgctgagctttaatttagaaattagcagataattataacttaattatgaaaattatttattaatattgaattattaatttatgatgatttatttgaattcagaatgcattttatatatcatatatagaattatataattttgcatgttttgtgctcggcaacattgaaatgcggtgtttggctattagaatcacattttagtattttagtatagcggggcaatttaattagaaattgggaatgtcaggaatagttgagattttagagttgaccaaatttcccttaggtggtttagtgaatttttggcttaagtgggggcaaaatggtcttttgtcttctagtgacttatatatgtgctaaataatcagatttttattaagtttaatattagataaaattttgagtctatcttttatttaaaaaattagaaattaagacaaaaagaagcatttgctctctccaagctctctctctttccctcgatctccttagaaccatttagggttgggggtttttctgctgaattcaaggatttctaactcaaggtaaggttctagctcatcctttgttgttcttcttaagtttcaagttatatgctttatgattttgctaagggttaggttctgtggtaattcttgttgttgggattttattctgacgttgagattagattatttgagctgtttggaagctagttggtggcttgatttggttgttagacaaattttgagttttagaactcaaactttggtctttaatggtgtttttagtttcagaggttatttctagtttttattgcttgaattctctttattatgatattattaggtgttttggaagtttttgtggagtttggagttgaattgaggttgtagtggaattttggtgattcttgcactaagccgaaattccggttcagtgggacatgtaggaaccaaaatttcggttggtccccaggaaagcactcagaaccggaattctggttggggaaccggtctaccggttggggcagttttgggaaccctagttcttcccatttttgtgatatttaggttatttccatgttatttatcgataggaaaacttttagtttcaagtttaagtcctcgaaaagtgatttagcatgtcacttacctttgttgtaatcgatgtgatttaggagcctataattcgccgagcagttgttccactcaggttggctggcacacctgaattaaaatccaaggtaagattagtataacggtatgcatatgtatatgcatgtttagtgtgcatgttagttagggctgctagattacattagatatgtatgttggcttttgtactatccgacagtatcacatcggtacgtctagagtatgactagcgtaccgagtataggctgatattatggtcgatagtaccgtactacttgtaagtatgacatcggtagggctagagtatgactagcgtaccaagtataggctgatattatggtcaataatactatcgtaagaacgttctagactcagtatcgtgcgtgtcacagggatagggttatgattgggggtatgggcgtccgatcataattcgggttattgctatattattgtttatgcttttcttactgagtctgtcgacttacagtgctatttccatgtgtaggtaagggcaagtctaaagctgaggagtcgtgagagcgagcaggtgaagattgtacatgtcggggcgattaggcttggagcgtacgatctttgggacatcagggcttttgctctatagttgtttggcgacaaaacttttgtatatgaatagcaaacctttataaatgtattttctaaacgggatcccgagattttataaatgtattactttatatttttaattaaataagaaaattttaattattcacgattttcaataacctcgttgattagtaacgagctgaacagtccgttaaaaattacgctaacacgcctatattagttagggtgttataatttggtatcagagccgccaggttgtctttcgaagatcgtcactgttgggttttatgccctaaataaaactcatttcaatataatcagatttacttattaatacatttaatgtttcatggttcacatgatttatttcatgattatatatatataatgtatgaatt

SEQ ID NO: 223671 - DNA, 2148 bp, Cannabis indica
aatccctataaataaacattaagggttttgattcaaaagacgactctagactctctcttatgtgacaaactgaatcaaaagcaaacctattactttctattattcttttcgaattcctcttgagatttcttcatagaatttcatggtgcatggtgaattgagagtatgcccactcatgtcaaagcaatacctagcatagttaggaagactgtttttaaccatattgaaggagagaagaccctggttcagatcttgataatactctgctacagacaagaatcaagggctagagatctgaatggaaggagtcattaaattccactaccatcaatgtatggatttcttaatctcttatatgtttattcattgttttaagaaattcaaatttgggatgttagattatagattataatcaaacatacatgttagtaaatctagatcctagtaaaataagttcaaccaagcgtaaggtgaagctagtaggaccatgttttctcagtacttctccagcttgtaaactcggtcttcttgcaattggtgcgcatgggttgaggcttcattccataaaattaaataggcacctcaattttttttgatcttgctaaaaatatatccaactaggagcttgtaagctagagatatcagttgaaagggggataccacgattcgtgcaataaattttgcaaagtaagtcctcaaggggtgatgtgcctcgcttacaatgtgggcacaactctaagcactgaacccatttgtgctcacaaaagttgactcttctgcagtagatagtctatgccacatcagacctagaatgttctgcactccagattcggtggcataaaactccatcatgccatatgatctgaagctgttaattctttggtcaatctcccagatggaatcattgtacacaggtgtgggaggcggagccttggctttcccttttcccttgaattttttataggtacctagatggattagcctttggattagtctctagggtaaggtcctattaaagttccccaactggagcctttgttaaaacttcttcattagccacctcctttgtgagagcgaccgttggattttcttcaatattcactacctcaaggtagaattcttcattcaaatcaatcattggaaaaatgacatgaaaagaaaaattaagaaattgcatgcaacatccaaatgattatatggacatcggagaagacatcccctaaaatttcttggagaggtccatgccagacctttcacttccagaagctagtcctcgctagacgacgactcgaagtaacagattgggaatctaggggaaaattaccaaaacaaattcaaacaacttcctaaaatcaaacccattcagagtcctagtaacttcaaataggcacacaaatgataaatagtcctaacattcactcaaaagttcattctacctggtccaaaccctaatttcaaaatcttgagaacatgcaaaggtctactaaatttagattgcataccctaactgtctaggcagtaccagccctcccttagcagaaaagtttcaagataaccctgtcctagaaatgtaaccctatgggtatcatttttccattcaaatgtatcagatatcgtagacctagcttgaactaatcatttctatccaagatacgagacagcaagatttagcaagcatcgagatacttacttgatgtatgagtggaaagggaaaggtttttttggaaatctgcccaggagttgtgtacccagtcaatcacgtgaccgaacccgacttggacgtaaaaatcctcatcgggcttgggttggaaaagttcaagatttagtgacactgcatttggaaaataggttaaacaaaattctaagaagtactagattaggcagtcaaaaacttcttgcatttatagatgggaacaattgtaaggtcgaagtttttctaggaataagggactctgatttgaagtttgaaagtagagattttgagaagtctggagtgtaaaaaaagagaaaataggtttgatggatcgtacttatatttcagtccaaatccatgcaatttaaaatcaatggtccagatccgccctccaaaaagtacgatttgatctaatggatgggaagttgaaaaaaatggcatttaaaacttgcgca

SEQ ID NO: 223672 - DNA, 1641 bp, Cannabis indica
atactgtggaggagggatctttataggtttacactgatgctgctatatatcctcacagtaagaagcacatctacggtattgttcttattgatgagtttgatcaagtgaaagccggcatagccaagccttgtgtttggagtgctcctgctgtcattgctgaagccaaggcaattcatcttgctatccaatagattcaattgcttcatcttccaatggatatattaaagatagattgtaaaaccatagttgataaacttaagtcttgtaaatggaatgctagtccactggatgacatattaattagcattaaaaacttgttatctttcagtcctaatcttaagattgttcgtgtgtatagggattttaatcaaatggcccataaggttgccagggtgggattatgattagataatgagttggtttggaattgtcctttaccttctatgtaacttgtttgctttgtactttctttgcctattctaatgaagcacaagtttatttcaaaaaaaataaataaataaataaaaaaaaaacaaaccaccatctcttcatggcctcctctgcaacactaccataatctcctcattgtttcgtcgctcctctactcctcttttcatgaacgctagctgccaatttttctttctttcacccactctactctccatgtgtctctgcttcttcccctctctccctgtctggtcctcttcatcttctttagtatttgtatcttacacaaaattggtaatccatataaatatgtattcccaaatctgattcactaattttggtatggttattatttttcaactcttttgatttcttcttcttattctaattgtatctaagttcttcttcttcttcttttaaaaaaacaaacttcatcttcttgacttaaccattttagtcttttattgatttcttcttagaatctaactttatttgtttatttattttgtttgatttgttttattacaagggttatatatggtcataatttggatctctttttaatgtttacagattggagaaagcctaaaccaactattcatacatgaggtatcaatatattcaatattcgagagtttttaggagttaatatagcagcctaattatcattattttctaatctctcatctcctaattttttaatttattcttattttttctaatttatttaaattttgattctagttcagtgttttaaattgtaattactattgtttaaactcattaattgattttaatcagtagaagacgaagaagatatcttagaataatttgagagcttagaaattagatgttaccataattttctctcttgaatttgcattttaactataattttatttttattttctatgttgatgtgtgggggttactttcaattatattcaccaaaatcgtcatctataatttcaatgcagactataaaaatactgaacgatgaaatgcagttggatattatcaagattagaaatttggttccgatcaagtgtgcaatgtgtatgattagaatagtttttaaaagatgactttatttgaaatcctaaagaaacaattgatgcaatgtaagttgttcaaacttggaacgaaagtgttactcctcttaaagatatctttaaaagatcctttttgggttct

SEQ ID NO: 223673 - DNA, 3076 bp, Cannabis indica
caatgtgtatttatcgatagaatgtcgatgcattgtcaataggttgtcgataatacgtgaataaaagaaatttaggctaaacattatcgatttcatgtcgatagtctcaacggatagaatagaaattggaaaggtgagaaaaattaatcagcattaaatgtctaattggaactcgatagttgagtgggagtgttaatcataggtgtggacatttataacttttatgttaaagtgatggtttcctttgagcttggataaaggcgttaaatgaatgagatctcatttaactaattatattagtttactaaaatatcaaggataaaatacattgagagataaaatggtaatatttttttttgatgaataaggaaatttgtattgctcacaacaaaatttttacaaacaatagcaccctaaacagggcctaaataataaaatatgtacatagttttctatttcttgatccacactttaaccaactacatattttccctctttttacagcctgtggaaccatacagtatcctcagtagaaactttctttagccagattgtattaattctatatatcacttattgtttcacccttgttgtcatcttctctgcaaccggttttgtgccttcccacacagacagattgcgagctctccagagtgtgtataccaggcaacttatggcagcagccaatacattcctcttgaatttgctgagtttcgatcttccaatccacctagtcaatgcatttagtgaaccggctgctatgttccaagacagccaggtttttatttcctgtaaacatgttgcagcaaaactgcaagtgaaaaagagatgttctgcattctcacagtgattatcgcagagttcacattgttctcctattgccattcccatagctttcaacctgtcttttgttctaagccttttttgtattgccaaccacataataaaacagtgtttaggagtgtttagccttccccatacctgctgagcccaagtgactttgttttgggttggacaaagcaccttgtagccttcctcaatctggtattgttgagagaaaagttgatgtccagctgcttctttaaagtgatctttcaaattgactagacttctccaataccagctactgtgatctgatgctttgtaactccaccaatctctatccttgatatagacactatgtatccatctcatccataagctatcttgtttttgagcaactgcccagatatacttccccattgcagctcggttccattcatgtattttcctaaatccaatgccaccagcacttttttgattgacacactgcttcccatgctactaaaccaggtcctgttgattgagattggcctttccacaggaatgccctacaaattgattcaagttgtctcaccaccttcttgggtaaaatcattacttggcaccaatatgtgtgaatagccatcaacacagagttaactagaaccacccttgcggcaaaggataggtttcttgaactccaagttcttattcttccagtcattttctcagccaatgcaatgcactcattcccagatatccttttagcacatattggcacccccaaatatgtaaaaggcatatcttttagagtaaaaccagcagccctttgtattctgttcacctcctcctgagacatattgctacaatacattgccgatttctggggactaggttgcaaaccagatgtcataatgaaaagcttcaatccctgcaacatgtaatggatacttttgaactctcctttgcaaaataacaaaacatcatctgcaaaggccagatgatttagtttcatgggtgagcatctttcgtgaaacttgaaatccttcttatcccccactttctttaggattctggtcaaatattccattttaatgacaaagagcagtagagaaattgggtctccttgtcttagacctcgttttgattcaaagaatccatgagtacatccattgaacatgatagaaaatctcagtgttctgacacaattcattacagtctgaataaactgagatggaaagtgtaatcctgcaagcatctcctcaatgaagtcccactcaatggtatcatatgctttctagaggtcaagcttgatcatgcaattagccttgtttgtcttccttccatagtgtctcactaaatcctggcaaatcataatgttatgtccaatgaatcttccctgaatgaagcccccttgtgattgggaaaccaattcagggaggatgcatttgattctagaacacaatagcttagttgcaatcttgtaaatgacattgcaacaggcaattagcctaaaatccttgacggtgtttggacatttcatctttggtaccattatgagaactgtcgtattaatctcttttagtattctgccagagctgaggaaagaggtaactgctttgaatacatcctcaccaaccaaatcccaattatcctgaaaaaagaagctggagaaaccatctggcccaggagctttgtttccaggaatttcaaataccactttcttaacatcttctttagtgaaaggcctattgagcatttctacttgttcagtagtgaccaaaggccctctctgcaatatctgttgtgagactttccttctatctgtcaaactcgatccaagaagcaatttgtaataagagatgaaagcagttgtgacctattctggttcaaatactcgaatgccatcttcattctcaattgagtacacctggttttgtttattcctatgtttgatgctcgcatgaaacaaggaagtattgctgtccccatctctaatccagctaattttcgctttttgcagcaggaaagagctgtaatgttgctgagccgttacaaatgcaatcctagcagcaagctcctgatcatgtagtgttgtgtttaggggatcctcttgtagcttggattgaacttcatccagtgctttcttagtttgtatcgatgtggcatgtaaatcagagaaacccaattgattgatctcttttagaaccggtttcagtgcctttagtttagacacgacctgatacattaaagtaccatgaatcactttcctcca

SEQ ID NO: 223674 - DNA, 2738 bp, Cannabis indica
ttttttttttttttgtttatgctcgtatctctctctctctggtgcttctttcgtataatgacagattttgttgtatgatttttgaaagaaattaaatgtgtcgattctcaacaaagctgtgattttatttaattattttaatattgatttgattaaattatgaacaaaagttatcttatattgtgagcaatgttattttgcaccagtatcactttctaaatgtatagttttgtgattagttagtgatattttttaaaaattattatattaattaaattatatagaattcgatacttaattacactaatagtaatatgggtgaatactattttgaaccttgtattttgtaaaaattacagatttgaccatctgttttgttaaataataaaatggaccctgtattttttaaaatggtaaaaataggacccctgagcttaattttcataactattttttttaatataaccaactcgaagacaatttctaacacgaaaagatatagaaaatgtaaacagttttgtcataaacacatttagattggattattattaaattttattttcacagaaaattagttcaggatcctatttgtactattttgaaaaatacatggtccattttgtcatttaacaaaacagggggtctaattggtaacttttacaaaacacagagttcaaaatagtgtttaccctaataatattgacaatatcttttacatttttctaaattttatgtccctaaatataaaaactaatttatttgttttcttattattattattattattattattattattattatttaagaatatatcctaaatcattcatgtcttaggttgtagagaggaaaggcctaggccttggggcctaatatatttaaaatgacattatttatgtagctttaggaaaaataacatttttatatttacaaacatataaaatgttacgaacattggattggatgccccataattttactttatgttgagcctctaatatgtacacgttcggcccaattcttcttgttcttcctaaacgtttcattttattttttattttgggatttttacaaaattactagattttgaacaaaactttataattttactgtcacaaggaatttattacaaaaatactatcttttttataaaacaacaaaatacaataattaaaacaacagtagaacaactaaaaaacaaccgtggaacaaccgtgaaaacttaacatagcacacagtataaaacttacacaatattcttttttttaaaaaaaatctgccccataataaaaaaataaaaaattaaaagtatttcagtatgtggtataaaaattcctttattttttctcttttcatcaatgaataagtttgatgaatactataaattccattggctagaacaccttcccaaatgtatgtttattatatatattaactaaaagaataagatgtgaactattgaggttttttttatatcgagggaggaggatttgaatttggaacctcctctttatgagaagaagtgtagaatgattaggctatttttataatcactataaaatattgagttatatatattgttgatttgattaaaaagaaaaagaaaaaacaaattgtggaaattgttagaattggtaaaatgctctttggacaacaacggctacctgggactcataaataacaaaatttattgtaaatataccagagagagaaatagagagagcctagagagaactatgtccactgttgagagttgattctcagagcaagactccattgttgtacatatttgaaactgatgagaatcatgagattccatctcaaaccaattggtgatgagtggagtagcacaagctcttatatatagctcaatacttttacatttaatccatgtgggacaatattctctaatagaaactcttgttaataaagagattacaaggccctagtggctggttttcgtcgtggagtaaagtggtgtctagccaacattgacttgaaccacatatgtgattgggctccctatttttcatttttgttttagttttggcttgattgaatcaattttgattttatgattgattattaattattactttctggtttgtgatgtgtgtttgttcttgtttgagattatggttacaacaagtgcctttagagtttaggttcgagagtcatcgggacatgatctcatcaaatggcttcagcaaggtttgaagtgaataaattcataaaagttaatgactttagcttatgagaatcaaaatgatgaagacattatttgatcatcaaggaatttctgaagctatagacaaagaagagcttgagagtcttgggatatgacaagaagaaggtggaggagataaggcacatagggcaatacttcttagtcttggagatagggtttgagggaagtgtcgagtgaagacactattgttggtctagctatgggagaaattcgcaacaatctatatgaagaaatcacttaccaataagctttatctcaagaagaaattctacactcttaacatggatgaaaacaaggaactcgaaaagcatttagaagaatttaacaagatcatcttggatctcaacaacatagagtcaagattgaaaatgaggatcaaggttacttagtttcaggggcagacccacatagaagcgagagggggcagttgcccccctagaaaaaaaaaatcgaaaaaaaatgtataaatattttagttagttacgacata

SEQ ID NO: 223675 - DNA, 1858 bp, Cannabis indica
tggcaactgtctactccccggatggaataaccattggcttatctttattgattcacacttggtgttacaatggtgataaacaccaacaactatgaactcacaaaaggatcgagttctatagctttattctgtacggagagaatttagaagaggaggaagaagaagttcagataaaagaggttatctctgactatagaaaatgttggtatttaaaggcaatatccaagagtgttggagagacagtattatcccaaactaattacttaattgtcgagattgaagctttgagaaatttactagttttaactaaatactagcggcataactaacttttaactaacaccacaaaactatatcatggtatcaaatagtattagagaacatataattaattaaacaagatgattcttaatttgaaaatgataaaatgagagcatgaaatcaaggttgttgtgttgtatttgtaactgcacgaagtgtaatgttgcgtgtgttcttatttttaacttttaaaagttaattaaaattgagagaatccaaagtgggtaaaaatttatgaaccagagctgtgaaaacttaaataggcatatgccattttactttgtcccaaagctaatccctaaacatgaatatgcctactacttgctcaccaaaggggctccatttcattaatgtggtttctgtaaaataataataaaaaaacactgccataaatataatttgatcgtataccaaggactatgtttatgatatacccctactaactcaccagaaaagtaaaagagatgaatatgaatttgatgaatcatatatatatatatagaagaaaaataatattattacatgcaagcgtatacttaagcaaaatacaaaggtagatattatacaattaagacaatccaagatgatttttcaactaaatatataattaaattgccaattataataaattggaattaagataatgtatacataatcaattaataatacactattgatctttcactagcatgataaaatgtgggaattaaggaatatccacaagccagagttggatcatattggccaaactcttggatttgtaggggctaaatgaaagcaataacattaacttgttctacaaataaaaaatgagaaagtacgtacgaagcaagcaacctaacatgtcctaatatatacccctagctatatatatatattataccaaaatacatggtgatcagttgaactaataattagttaagaagcttattgcatgttccaacaccaacagctgccgcaagatgccagccagcatggagatatggggttgtggggaacacatcatcagcaatgaaaagcactcctccaagtagtgatgacatcttatgaacattatgggccattcttaaatctggatctttcaatgctcttttagcaaatgctacctgaataatatataaaattaatgatcaaaccccaaattcatttttatttaatctttctgaggattaattaaattaatacgttacgtacaaacagcttcaacatcaaagattagttggacatatattagcaagcaatagaggcacccctacgaaatgaaataatatatatctgaaaaagtacagctcataatatgcaaactaatataattttataacgaagtaaatttaatagtcacaaattaaaagagtatgaacccaaagagttacatttgagttgctattaagatggtgaaaaaatgatatataatttaaaagacgtcgatagtagtgaaacttgtagttgtggggtctcccgtgttcattatttgggaaatttttttatttgcttatatatttatttaacataaatttagtttcatttcaataatact

SEQ ID NO: 223676 - DNA, 1192 bp, Cannabis indica
atgacagctccatttgggtcccaataaaaccagtcccgtaggaattgttggcttcaaacgttgcaccatcgacattaatcttggtcgttccttctataggttttgtccaataatcgctgctgctactaatgttagagctgagatgcagcggctcaaagcgacaactttgagcatgtttccattgaccaagaacttgatgtgccgtagtaacaacttcagcagccgtggtaattttattgttccaaacaatgttgttgcgggctttccaaatagaccaacttaccattaaaacttcttcaattgcatctcccttatgtcgatcccaaactgcagtaaaccagtcaagaaagctggtagcagtcgtagggggaatagtcacagctgatatgttccaacaagattttgagaagggacaatcaatgaacaagtgaagggaagtctcagctgcagagttgcaaaataagcagtgactttggactggtacccgcttgatttgaagctgtacacgggttgccaaacaatcagttaagacacgccaagcaaagtgtagaactttaggagggactttaatcttccaaaaattcttccaaagagccgagttattatccattgacaaattacccttcattacttgcaggtgcatataagcactcttcactgagtagaacccagttggttctttattccaataccatacatcttcaaaagaattgctactaagagggatctgtagaatgatttgtgcttctgtaaggctgaaaagatcaagcagcacttcagagtcccactctttaacatcggtcttcataagctggtagactttgcatgagtgcaaagaaggatggtctgatgtaacaatgggagatgtatctgatgggagccaaggagagttgagaacattagtatcaagacccgcaccaatacggattctagcgccagatttaacaatatctttagactcaaagatgctcttccaaatgaagcttgggttgcttccaagtgaagaagtaaggaagcttccttgaggataatacctcgctttaaacacacgtcccacgagagtagtttcatgaagaagaaggcgccatccttgtttgcagagtaatgagagattataatcatgaagactacgaaattccatacctccatcatttttacttttcgtaagcctcttccaactcatccaggtgat

SEQ ID NO: 223677 - DNA, 3230 bp, Cannabis indica
agggtagtaggatgctgttgctgagtattacgagatatggtggcagcctcagaatccagctgatctccttgatagttgcgctgagcagcaatatattcctgtaggtaattaataacaaactcttccacattgttaggaataccagatttattaaatataattgagtttcgagtattccaaatatgccagacaaaagcaatgaaaattggaaaatcctgtttaggtatattatgcagtgcctgaagaaaaaattcctttatatcatttcgatgataatctatgtaaaattgtttaaaccttgaatacttccagatggtctttgctctaggacaaccgataagggcatgggtaacagactcagtgttgttgccacaaatagagcagtttggatggggaagaatccttttcagaaataaatttaaggcacaaggtaaaatatggtgaaaggctttccaaatgaaatgtttaattttgggagggacagagagagaccaaagctttttccaccaatgttgataagggttggggctggaagaggagggaacatccgttgatgcaagggaagaggcaagatggtaagcagatttgacagtgataatgccagaggggtgagatccccaaatgagagagtcagacaaagttggatccaggggaatttggagaatactttcgacttgataagaaggaaagtaatgcttaagtttaggtacattccaagtggaatcctggtcgataaagaaagaaacaaaagcctgggactggtcagtaggatgtaagagagtgggactatgaatactagggatccaatttggtgctgataaagggacattaataccagcaccaatcttccaaaccagacccttcttaagtaattgacggccccaaaggagactcctccaggtgaaagaagaattatgaccaacaagagcattcaaaaaatcagaatgtttaaagtatcgagctttgagaatagaatgaagaagagaatccttatcattccatactcctcaagcttgcttcgctaaaagagcttggttatgagaagacaaaatacgaaaccccaaacacccaaaaaacttagagacagagatgtcattccaatttttccaatggacctttttggcgccctgagaaccccaccaaaatctggctatagagctttgaattttcagacagatcgatttaggcactttaaaacaggacatagcaaaagaaggaatagcttggaccacagccttaattaaagtttccttgctagcacgagagaagaacttatcattccaagtatttaatctggaagaaaccttttggaggagataatggaaaatggaattggtgaccctaccaacacaatgaggaacaccgcggtatttgctaataaagccctccccatgaagctgcaaagactgacgaaactgaaactgggaatcaatagaggtgttaggggagaaaagaattgaggatttatctctattaaccaattggcccgttgctctgtagtaaagattgagaatggcattgagggcatcgctagatcgagaataacacctcttttttcatcatcaagtttattataaaataaccaagtaaaatatccacttgaaaaattggaataacatctctctccgagctccttaaatctctccaacaaaatagaatgactcattgtgttgttgggcaaaattcacaaggtactgatcttgatgtagcatttttttcttatataccttggaagacaaactcataaaataaaaatattagcaaaataaaaggataatcaaattagaaataaaattaattaaattaatattgattattttcaattcccggcaacggcgtaaaaaacttatttggtaaaattgatatgcaatcgaatcaagtaatatatataataataaatagagtattgttcccacgaggattaattatcaattaccaatcaattaattttttagttctatttgattaatgaaaattgttggagaaaaagtaagtaaatcaagacaataattaaaatttagaaaaataataataataaagataaggaatattatgatatccaacaatcttttattttacttcctaatgtaattacctaatgtctcttctttctattcaattgataatttgaattaagaagtttataatttgattaagacttattaactcaatctatataaaaacttcatatattcttatagtaagtttaatcacaaagagagcattaagtataataactaataaaatcatacagataatctaggtactttcgtcctaaaccaatttgtatccataacaatcatagcatattcaaatcttaccttttagaattttgatctgaatttatagataaaaattatagatgaccagtaaataattacaaaattataacaaattgtatagaatttaataaagagaagaagaagaaattgaacaatcacatcaatccataaaattaatttaagtagttcacataataatcattaaaagaaattagctactagaagatattgtaaaacaatagaaatttaactaaagacataaaaaattgagatgaagagataaaacactattggagtcttccactagtgccttctgcttcttgctcttcttctacactcagaatttctctcaatttttgaatgatattagatctaagctttcagtccctttaaatacacaattagaaaggttgcccaaaatcctccaatgcccaaaatttgtttccaagtttgaatgataaaggaaatctagctccaactcgttttatagaaaaaattaggaaagtttcccattttttttgcaagagctgggactctctcgttttctgatttcctactgcgatcactgatagtattttggccataactctattaatatagtttggaattggacgattcaagatgttttagaaatctgaaagagagatctagatcatttattcagaaagtatttcctagaagtgaatgaataatagtgaaaaaatagcttgaagcttttgattttattttccatcacaaacggagaatgttgagcatccaaaacttagaatttttcaatttacttttgggaagtgatcactcttgactctagaccacagattttggagctaaaaaatataaactttgaccaaattgagtaggggtgttcatccgatccaatccgtactttttggtcaaacaacatccaatccgcactaagtgtgggtttcatattttggatctaatccg

SEQ ID NO: 223678 - DNA, 4895 bp, Cannabis indica
attcgatgtagatcatctatagaagatctttgactatttagattgtaacaatggataattcacaacgtatctatatcttggtacatatagagcgttctatataattaagagtgcaattctgaatctatagtggcgcaagaaggaattaataagttagagatttttcttggtaaattctaaatctacttattggaagcttgattatataggcctatggtccctacactagttgagataatactgtttgcagactcagttaattggttttgattaatcaattataattctaaaattagactatgtcttatttatgaactaagcaagggcttaattgtgaagaaaagaggttttggagtttatttgttaattaagagactttgttaagtctacttaataaataatataaatagcaattttattttataattaattataattattaaatcaatagttttgacatttataagattgaaattggaaaatatggcattattgaaagaaggaaatggttgaaataaagtggcaaaattgtaactagtgaggcccattagtgtggccggccacttagtgtattttttccattttattcttttttaattcatataattaaatcttaaaccatagttgaaataatataaaaggaacatgattctctcattctcatacaactcactttcaaccaaactaaacctagttttcattctctgacaactagtagatgagagactcctttctatagtgatttcgcaccttattcattgttcttcaccaattcgagaaaagtgatataggaccatgcccgcacataataagtcaagtactcaatcatagtacgaaagacggtggttaaccaaacccgaagggaaaaaggaggtccaagcttagatcttgttattactctgcgacagaaaggaacaagggttagagatctgagcgaaatgagtcattattattttgctgccatcaatgtaaggttttctaaactcttatgtatttaatttcattattttgagaactcatatttagggtgttaatgaaacatacatgttattaaatctagatcctggtaaaataaatccaacaagggatgctgagtgtcatgattacataacgctaatctcatttaatcgggttcaataagccaagtgattaaaacaaaataacttgtagtaataaaatttatcattaacttaaattcaaaataatataaatacatatttgggatcccgtaaaatcttttgcaaaatataagtcatttacatacaagccgacctaagcggcaaaataggatttttatacaatccccctgttggacccaaccctcgtggtctagcttggttgcaatatgtacaattcatttttaaagctctcgaactcatggttgtcctagcacttctttacccttgccaacacaatagagcacccatgagccaaggcccaacaagaaagcataatcaatcaaatataatatataacatacatatcacacataatacgtcactgcataaaatcgtgccaccacacaaagataacatgctactgtgcttataatgatgccaccgcatcttaagtctatattatatagacactacatgttacactcacacgcctatttattacataaggccttatcagggttcctctcagttttggtcaccaagtctaaaatagttatgccttgtcgcataaatcttgacatatactcaattaattcatttaatgtatgcatagacataggaagcttagggtaacaaccctaactcacgtttctatcaaattgttcatataatttataaatgcgccattacgctatactctatgtgcaaggatttctttcttacttaaaatctaatgtaagaggaaaatttccaatccataggtaatctcaagtaagtgtcgttgttcctagtcacaaatcttgggtttatagacaataaggttaatctcaaaatcacatttaataatattcacatataggaccttaactatggaccaagtaatagagctcgaaacaagcttttcaatgataaaagaacgtctgaaatagagttttgagtcaaaagttatgacaaaaacaaaatgggaaaaaattaaattgtcacctcagggtcattgcgaccaaccacgtggttgccgtgaccaaattgggtatgggctatcccctattttgggtaaagcctcgccgtgaccaccataaatctagctgcggcgactaggcctgaaaccccagaaaacctagattgtacaactccaaacatacacaaactcaaaccaaacttcaaacatgacatgctattggtttctaacaccaattaagattgtatgcaagttcaaaacaaaaataacacatgtgtaatacacacacacacattcaagctcaaaaattcacaaaattcacataatcaaagcttagaaaactaagcacagcctaacctcaaaagatgctcaaaattcaaacacttcttagcaaaataaattgacctaaaaatctaggttctacaaacctcaaacagcacaaaaactcaagcctatcattcatgaatttatcaccataaattcatgtcaaaagcaccttagaaacctgttggattttatgccctaaataaactcattataatataatcttatttagtatcaataaaggattagaaatcatttaggtttacatataattttcatgattatggttttattatacaaactctattaaatctcgaacatattatcgttcatgattatagtgttgtctacacagtagaaaataatcatgattatatgcttcaaactatttagtcctatgatttattagtacattggatttaactggcctgataatcaatgataaaatttacttacacactgatatgtggatgttctttccagggtattaacaaagtatagtagtattggatatattggctatacatcggactggaccgatattgatagtagaaaatatatcataaacttaccgtaatatcttttctaagtcaatgtcgtttagttgatcttagatcaaaagatcttaatcttgagatgatcaggttctggcttacatgtattatatatgttctctgacttgttcattaaagctgaccacttagatcggcccaatacttatatcttgagaacacagtagtgcagttgagtaggaaatcatagatataaaatatatagcttctatagctaattagaagtgaaacgataattttcttagagctttgcctaatagacataaatggaagagctcttatttcaataattatattagtttactgaaatatcatttataagaagctaagtattttaaggataaaatacattgaagggtggaatagtaaatttttccctacttaatgtaaatcatgtatagaggatctttaattatttggattaaaataataaaaaattcatagtgtatctattctcggtgaatagagcgttctatgtaatcaagagtgcaattttgaatctataatagagtcaggagaaattaataagatagagaatttactcggtaaattctacaactacttattgggagcttaattatattggctcatggtccccacactacttgagataatattatcttgtagacttaattaattgatttatttaaccaattaggattctaaataatgactatgtcttacttatgagtttcactaatttaaggtttgtttattaattaagagataataaacagtctaattaataaataagcttaatagaaatatcattttataactaattataattattaaatagataaaattgatatttataaagttagaataaaaaatggtaatttagaaaggaaagataagtttcaataaaatgccaaaattgaaactaatgggcccatataaggatttcagccaacaaggggtttaataaagccattttttatcttttttttttattatatttgacttttaaatctaaccctaaagttacaatataaatagaatatgaaagctcttattttcataacacaatggactcactttgtcacacaaaatagaagaataaacagagctctcatattttctaaatctcttcttcttattgtaatttttgaacattgagtaattgcccacacatttcaaggccatactcaagatagtgtggaagactatgtagtctttttattacctgaaggagaatccaaattcagatcttgatcatactctgcaacagaaaggatcaagggttagagatctgaacgaaaggagtcatattattttgctaccatcaatgtaagattttctatcacctttatgtgtttgtttcattgtgtttaggaaattcatatttaggatgttagattatagaattataatccaacgtacatgttagtaaatttagatctcggtaaaatatttctaacaactggcctcagagccatggtaatgatttattttcatgaaatatgggcttaaaacaattttttgattactttggatgtttcatgttgtgtttatgtgattttgatgattgattgtgttattacaaaattttctatgtaaaataatctgatttttgatctaaaattattttatttgaaagtttggttaaaaattaagcaaattagtcttttacggaactaaatttggatttaaattgaaaaatatatgattttttgaagattggaattatagttgccacacatgctagggttgataccgtggcatgcgtgtgtggatgggacatcaggctgcttttcgtggggttgatgctccaacaaacatgccattcagacaaggcgtatttgagaaaccccagtcatgcaccctgccaggtgcctctcgcgcacccagaagaccttgcaagcagtctctagcctcagtctaggtcctcccatgtgcgcgcgtagacagtatgcaatgcat

SEQ ID NO: 223679 - DNA, 1267 bp, Cannabis indica
gtgaggtttcaaggtactgcatttattcataacattctataatatatttgctcattcaaaatggtggcattgctttaatatgtttgtttattaatacaattacaattactcttggaagttaatacaattacaaattatagttccacatttcaaatcaaggtaaactatacaccggaagctgtagtttgattaggacccacacttttacttgtttgtaattagtcctgcaactttcaagcgtaaattctctgacagccacccaacccagccccttttatttgtttctgctagagaaacagttaacttatgatatgtaatgttgtaggttctgctattgggtttcgacttgatgactctgatgcattatctttgtaaggtaaatgcctcttttaagcttatattgggacttcttttcattaattttgtgattgaactgagaagagataatacgaaattataaacattaatctagttgggtctcaaattgatttcttgtattggtgtattgatttgagcttctttcatacttatctttatagttcatctatatctatgatatgattattttcatgtttttggcaggctgtagttctagctaaaaagcaaccagatctacttgatttccccaaagaccttgttagtttggaaagttcaacaaaagtattattgtattatttcgacattcggtatatggatatttttattgtctatttatttatagcggtcttatcattgaatcctaaaatctttagaatgtaggaaactctagcatattttcatgtaggtcctcggaatcaaatcctaaatccttaccctgatggtagcaagctttggatctgatcaatgaacttattggtaaaatatctgatcaatgaaatattttcatttgttgaattattttaaattagtctctttaccaatagtgactaattgtttatattttgtgcagtgattgctaggagcttgggtctctgaaagattgatgagttagttttaggagatacacgctgtatcaattactgttagtttcttttacattttgttttcttatgctactatggttgtataaactttaccaagggtaccctgttatttgattgatgtctgattctcttctagctatatttttgaattataaggttctagctatttcagaattataaggttgagttttatatgcccatgtgctactattctcgtgtaacgcccttacttacgtaaaataagatgccataaataaactggcgttaagatactaatgttgcct

SEQ ID NO: 223680 - DNA, 2170 bp, Cannabis indica
cttattgatccatgattggttggacataattctatctatctatgaaaagattctatcttctccatgttgcttatttgaccaagtaaagaaattcccacttgctttgacatcttccatttgacaagcattgacacattgcaagaactctgtgtccggatgagttttaacctgatgccctattctctcctctttggcaagaatgtcattaaaatcccccattaacaaccaatgctcatttgttttcagctcacataaatccttccataggactcttctttcaaatctattgtttgatacataaaccacaatcaaaagaatattaaatccttcagttgttgtcaaccttaaatgcattagttgactagtgcatttaaggatgtcaacagtaaatctatcaggatttcaagcgataacaatcataccacctgcatgccatgctatgctggatgaaaaataccaatttacaaacacatttaagtataaggctccaagcttcgaagccttaactcttgtttcaaggagaccaacaaaatcaactttttgagaattgataaattgctttatcatttgttgcttatgttgactgttggctccccgaacattccaggctaataatttatccattagacagggagggatctccccccccccctcctgtcttgcacaaagtatcagcctgctcaaggtcattagcaccagcaaccaattcctcttcctcaagcacctggaacatgtttcccacttcagtgttaatagtttaaccagcaccagcaactttattccctgtattatctcaattaacactactcttcttgctttgaactttagtaaaaccttcctcatctgcttgaggttgttgtcttttgtcactcttaacaatccacttctgcttcccattgctgttctttttacactctgcagcatgcccaacccctgaacaatgtgtacaagagataggcttccattcgtatttaatccctaccgaagtgttcatgccaaactcattctcaaactccagcagatctggcagcttttgatccatttgaaccttaactaaaattctagggtaactcagtctctctctttctcttgttacactatccaccataattgggtttccaacttgagctacaatcttgaagagtgatttctgaccccaatacttcaattccagttcttccagcagcacccaaactggtaccttttgcacatcttctttcttatagttttcacttgggtcccaaggtttcataatcaccggccttctattaaaaaatatgtacccaccatttaatacctgatccctgtcctcaagagagtgaaatcgaatgataaaaatgccataagacagcattttcactcgatctactttcccctgccgaatcctgtgcacaaatccatcctaaacatggagtgggggattcactcctaacacatagcatactatggatggtttccaaaaatgaatttcatcttcaatgtaatccatagtaatcctcactttgttcacattctgattaacatgcttaaaagaattctcaaggttccgaactacagaattagacctcaaaataggaggtatcgatttcttaccagctgcaatatcacggttgcattggttgtttgcttaaatgaagtgtgcaaagtcattacgaacatcttcctgcctcttaatcgcatccagagacgattttggtgaaagaggttggaatacatcgtttggagcagggtcatcatctctcgctgcatcctcatcagaaagctccaaggcttcaatttcagcaattctttccatcgatccagcctgtaccgcctcagttacctccttccttcctgctttctttgagagtttcgttgcagatttaggttttccaagattcatggatcttgttttagccatggcattagctatatcagctgcaagagcaggaaccgggaaaaccttactatcaatttagtgaaatttcatcttctaatcttataatttaataaaattaaaataataaaataaaccaattttaaaatagatgtgtttagataattattattttaagaataaaataataaataaataaataattaattatcctaattgtatgtcatatctcaaattaagcataattcaaatttccacaaaaatatctaagatatttaaatatttaaaatataa

SEQ ID NO: 223681 - DNA, 1511 bp, Cannabis indica
taaactaagcataaaaatttaaaatttcttttaatattcgttattagatccaaatttgatgatttaatatttttaaaattaatatttataattaaatttgtttagtaaccattcatgggtaatacccattaagaaatgatccatacggttacatatatatataaatgtatatgttacagtaatgactttagcagtgtcttttttcaatcaatcaaagataatatggtgtgtgatgaggtttagtgccaaaatattattcgaatttgtgcatagattttttttaggctcattccaattttttaaatttgttttatggttgtgttcactgttcatacccattttctgggtttttattgactgttcaagagagagagaaagaaaaatagagcaaaaaaaaaagaaaaaacaggttggtaggatgaggatttgatctgtttaatgattttggattcttgtattatgatttggttattaatggaatggggattgaaggagatgaagtcgagaggaaagacagagatagtagaagagaaaagggaaaatatatgtttattttttaatgatttaatttttaaaattttaaataatttttttaattttttaaattgttagaaaaaaaattaaaaattaaatgacatggacctattaaggactgccacgtaagtactgatttgacagttaacggagaggtacttacggaagttccaagagtgtaacggaaggtatttttaccgccaaaaatacgacttaggtatttatctgctacacgacataaaacttatgtatttatgccgcaaattactctttatttaatgacaaaacgaaccctgtattttcaaaaatggtacaaatataacttttagcttaatttttgataattttttaatataaccaacttgaagataattcttaacacgaacatatgtagaaaatttaaccataattttatcataacagctctaagttggattattagtaagttttatttggacaaaaaattaatttaggatcctatttgtaccattatgaaaaatacagggtccattttatcagttaacaaaacagagggtctaatctgtaacttttacaaaacacatgatctaaaatggtatttaccctaaatttattgtggagatctttttgaaaaacaaataaattatttgtggggaacgaatttgtattttaaaaaataacccattgagcgtgaaattaaagttgtaaatacgagtcacgttttttaacatagcactagcacgacctgacaagaaaaaatatgggcttaaacatgaagttacatgatgttgcaaattggcacaataaaaaatatggggaaatttggattactatgcttaaatgtgtagcatggtccctaagtagatcacccttaaaaaattaggcaaaatatacttctaaaaccaataaacccaaaaatacctttaccatttcaaaaaaaaaaaaaatactctctctaactcccacacactctctctctaactctcaaacactataaa

SEQ ID NO: 223682 - DNA, 1623 bp, Cannabis indica
atggaatgtagggaattgagtgctgatttagttaagctggaattagtagaatttgatatcataattaggacgaatttcctgtccaagtatttgatcaacattgattgtaggtggaaaattgtaacttttcaaccaaagggcaaggatccatttgtttatgtgggatctgtgcagaggtctcggatcacgatgatttcagttttaagggctaaagatttactacacagtggatgtgtaggatttttagtggttgtaattgactccagcagacctgaaacatttgggcatgaggtagtcagagttgtaaaagaatttctcgacgtatttctcgaggagttgtcaggtttaacgcctcaacaagaaatagattttgaatttaatttggcacttagtgtgggacttgtttcaaaagcgctatacaggatggtttcagtagaactcaaggagctaaatcataccttcaagggatgctcgatttagggtttacccgatccagtgtgtcgccttgggcagctccgattttgttgtgaaagagaaggatggtttccttcagatgtgtatggacaaatgagaactaaacaagttaacaattaagaatatgtattttttgccaggatggatgatttgatcaattcgcttcatggaaagtctgtattttcaaagatcgacttgcgattttgttatcatcagctaagaatttgattagaagatattccgaaaaaaattgcattttggaccaagtatagtcattatgagtttttggaaatgtcatttggtttgataaatgctctagcagcctctacgaatctcatgaatagcatattcatggatttcctcgataaccgtgttataagggttatcaataacatccttgtgtactcttagatagaagaggagcaggagcaacatttctaaatggtattacaacgactcaggaatcacaagctgtatacaaaatttttaaaactgtgaattctagctatgggaggtgtcttctctaggacacattgtcgagaacgatggaattattgttaacgcaggggaaaatcaaattagtgaaaagttggccgaggtcacaacagtgacggaagtggaaaattttgtcactgtaacagggtattatcagcgttttgttgaaggattttctaatatctctaaactattaacagagttaactaagaagaaacaatggtttgtatggtttgatatgtgtgaagcgagtgttcaagacttgaagaagcaattattaacaaaactgatgttagcttggccatcaaatcaagaaaagttcatcgtttagtgtgatgtatccagataggctccgggatgtattctgacgcaagctgattgggttatagcttatgcctcccgtcaactgacagaatatgaacaacgttacccaacacatgatttagagcttgcttctttagtccttgctctaaaaatatggtgacattatttgggggaaaatgtgagatttacacagatcacaagaaccttaaggatttcttcactcagaaagatttaatatgaggcagagccgatggctgaaattagtcaaggattatgattgtgagactccgtatcatatcaggaaagttaatgtagtggcaaatactttga

SEQ ID NO: 223683 - DNA, 2482 bp, Cannabis indica
gtttttgaaagttagttgttttattttgactctccaatttgatctagttctttcaaagtacttagaattttttcattatttatttattaatgaactttgttattttgtccgaatagttggaaatctacagaagttgagaccccatggcagaatttacgttctagcagcagaaccatgcgaagcaggttgaatgtcaacttagtcgcaaactcaacttcagtgtcaacctgagcgctaggtccttgttctggcccccaaataatcttgtttgcttcccaagaacactggtatctttgttattgatgaatacgaaaaaaaatatttgagagatttttcgggaaaaatgcttacaagtgggttatattgacaaatatcaacttgggtactggattttctttttagccactagatgactctgtttatttccttaaagcaccagtatcttaattgtagatgaaaacaaagaacctggaagacttcgtcagaattgtcattagaaatggtccaagttgacaaatgtcaatctaggtactaggtgtgcttttcgacctctaaattgattcttttgttttccgaaagcacttgttttctcattttggatgaagacgaagaaaattttcgaaaaatatcttcaaaaacgtggttggaaacttgtcaacttgggagctaggagtccaggtgtctcaaacgagaagtgtttcgattctgattctggtgcctctctttaggatgtttgtgacatgtcttattcatgtctaagtacagatttataaatcttcaataagttagattatattgatttgtatttatttacttgttagaaaattttatcttttttacttagtgagatcactttgagatttaacctaattttcctatgaaacaaaatagtaagaagttaaatttgaattatgttattcattgtcacgaatgaacactctagatggtataatattacagccattaaatattaatagtcaatatatatagaaaaaatgtggtacttgtagtagtgaaaatggataacatttgagagcataaactataaaagcatgtctctctttattgttatctctattcttctgaaacatttgttgttgagtatgagagagagacctatcaaatcaaaccccaagacaaactttttttgtttacttttttaaaaaagaattaacaaaagtttgaacccttctataattcacatgttttttcacaagagtgcattgccacgtgtcccaaaagggcattttggtatatgggtcacatctactttctggttacttgtggcaggtagctgtttgttttgggtaaacttgtgctgcaaaaaggaacaaaaacatcaaaagaaaaaaaacattattacatgtacacttgtgtatgcagttagtcataagatatatatgttgcatatttgtctctctatggttataagtctatgactttgaacattgtgatgtgataagctttttgcccctaaaccaataataataataataataaaagaccaattggttttcttgtttgaacaaagtattctttattcttaaatctttattattattttctaagagacttttagaggagagatttgccactattcattatgaatattttttttatgttaagaagagtacttgcattgcatgagagtttttttacttaatttttcataatgtattgtcaaaattttactctctcttttcattctcaccatcaactaaattttgtttgctccttattttaatattataatgtttaagaaatatattttggagatgtaaataagttatttaaagctaaaatataaggtacttaacacaaaaataagttccaataacatgttaagaaataatgtaaatttgagacataataaatatgtaatatttaagttttggtaattaaaattaattctatcaatttgattaaaatttataaattatataatattcgaattgcaaaaattgcatacttttctatttacttctgtgatatttttattattttattagtagattttgttgtaacatttttttttccagtaagcaagtaaaaaatttaaagctcacgaaaccaactacaaacaccaataaaagtttctaaaatacaggaacatgtacaagatagtatcaagcaataaacatcctatacatgtaaggtttgcacccaatttttatatatacaagatttatctgtcaaaaaaagattacaatgagctaagacatccctcttaatttggatcacttatacactcaactcttggaaatttacgttccaaaaaggccacatttcgggacctccaaagatgatacaccagcgatgcctcaacagcaaccgaatgttcatggcgtaatcatttaagcaatctatatgagcattccctttacaattttttcaccccaaccatactttaatcggccttaggcatagacagattagacccgcgcttaggatctacttattttagggacccaaataaaaaaaa

SEQ ID NO: 223684 - DNA, 917 bp, Cannabis indica
tagggtggctaattgcttggattatcttctttttgtatagaaattatgtctaagcatccccgttaaaaataggttgacttagaggaggaggcaatagagcatcgagaggctcccaagttggtccttaatgatattccatggaaattggaccagcatgccaatatgtttaggaactacaataatctgaggaagtatgagaccctgcacggactcaaaaatgttccaggactattctagaataggctatccgtcctaggggagaggcccaacaattgcgcagaaggaggcttcagcctctggagctaggctcacatcgaaatgggggcacatctacccttaaggtgttatttctcttagttctgtgctatagctggaatacaaccttcccagcttattccacaggcatactgcttgttatctggttggtacgtcttctgtgttaagcatggtaaatctgtgctgacgctaaaggaaatcttgtatttataaaagatcaactcccaacctatgagaggtcacaaggagaaggtgggcttctacaggttagaacggtacaacaggagtattccttgccccactagttacacgaagcacatgcatgccttcaaggattactatttcttcacctttggcttcccactgaggagggttcctaccccctgtttgaattttaatcttgcatgtaagtctcattccctcttttggattttaagattctgctttttaaattgtttgttatattttgatcttttacttttggtatctcctaaactaccttccccagtcccttttactctagagctagaagagagtgtgaatttttacaagtccttctcaccgatggtgtttcaagtggaaaaccttgtgaccaaaaaggaactctgggaagtggggctcatcgccccacattaggatgt

SEQ ID NO: 223685 - DNA, 3079 bp, Cannabis indica
gtttgattaattccgcacttaatacttaaacatatacatttcagtttatatatataaatgtctaacaaagtagggttacataattcgcaaatgattacaaaaaaagagctgtcaaaatagtaaagataaaatctgcacaagggtaactaattagtcactggtaactatatcattttctaccaaaaaaaaaacatatatatttgacatttatcttacgttggttgttttaaatataatattgacgagatattaatagaattccaatacctcaataataacatcagctaaaataatggtttaaatctagctagtatagggagttaattatatagaatatatagaattaaatttctcattttttattcttagcttaggttgacaaaagagctaaattagataaatatttatttatatttaaatggtattgacaaattttctaaaagctgaaaaccaatatattttgtatttttttaatgaaggtcatcaattctttcaaaatatattaattagtaacttaaaagaagtgtaattatttatgtgagtgtgacaatatgattattaaaaaaacatagtttaatttaattatttatgtgggtgtgtcaatagatacatataattataatttttatctatatatatatatataagtgcatacatggccataaaatgtataaaatatttattactgagtagtagcaaaatgatgctaacataattttgacaaaacaaaaaaagacaaaaagaaaataatttgactacgtacccccaaccaaattattattgaaagaaacaaaatcaattataattttcttctcataattatcaagaaacactcttaattatttttacatatattcttctatgtccacgaaatcataaatgattttatttttgtataagaaatataaatattgcatttctttaatctttgataatcgagaattataagtggtatagtatagctaattaatgggacttaaagcatatacaatgtagtaggatattaattaatttacatttacttgtgtaacccgaatatgcatgattcccagtccacacaacataaatgtaacaccacttgcactttcgaatattctactttaccaaaacaaaacattaatcctcatgctagatattgcacaaggggcatttgtcccttcaactttatattttacaaaataaaaataattatccttcaaatttatatatggcaattgtgtgtattattaataaatgaataattttaaaaaattaaaaaaaaaaagaaagtatatttatatgtcggacgtggctggagccctttaattgccttcttctgttcaaagggtatcaaatgtttattgtttcatgcaccctcatacataaattataaattttctacttataaaaatcaggaaatatcaagttggtgatattaatcaattactttttttttctaataatttgaataattcatattatatgatcgaataatataatttagcgcatgggatcatttgttatagtataattcaaacatttcaaaatgcatatgtttctcaatatatgtttatatataagttataatatactgtgtgctcatttattgttataattattattttgctatttaaagtatttgaaaaattaatgataccatattttttgtcctattttattgaagtgtataatatttcaattgttacaacactatatcatgtaatgtaatgatcaattcaaaatcaagaatgctactcaggttaattgacccttaaaaaataaattcaaaaacgtgttgatgctttttttttaagcaaacaactgtgttgacttaattttctaactttattatttttttattaaaaaataagtataaatataatataattaatgattctgcttgtggaaaaccacacgctcacacgacatgctgcgtgtcaaaaaaacgtacgcgctaactgtaatttttatccctttttatcaacagcaacaaatagtaattaaagggatacaaaattatattatacactaaacactaaattctcttctctctcatatctaattaataatgtatttaactattaatccagtcctatatataaagaccagactcttacatattattcagcaaaaaagagtgagctgacatagtacaatatactagtatcagcctctggatatacacataacttgaacttaatttgtttacaactttcaaggagtactgaattaagtaactacttagctatattatcaaaaatgagtcccaaatgtagtattctgattatttcaccatcgtccccatgactactattactattataagtattaaagaagcagggtgacggagatgatgatggtccagattacgattatgcccccgaccgcatgccttcccggcctcctccctgtccccctcgacggagacgatgacgactacgacgatgatgcccccgactatgattatgcaccggccgcatgattaattgcatccaccacaccaccaccctccgccaaattcatgctttttgatattatttatatcgaccctaattaaattgtgtgacatgaaaaagttttactttttttattttattttattatattattgttttatttactaaagatacttcattccctccctactaataaattcgttttctttcttataataaaaatatataaatatatgaaagatgacctttttttattatttaacctatactgtactacgtactgtattataattaattacttgttcatgtaatatgttctttaattataattttgtttaattaataattttctgtgtcaatttcttgatcatctaactgttataataagtttcattaattattattagagggtattatttgactctaattttatatatttataatataatgtacgtacgtatagttaaaccgcaatctcagacgttgtcaaccattaattactactcagaaacacaaacactacagtgatcagtgtgtaactagaaaaatctacatatatccaggcatgtccacatcagattaactggtatggatgaatatagatagatatttatacgagtatcactacaacaaatatagttatt

SEQ ID NO: 223686 - DNA, 3277 bp, Cannabis indica
aataggctaagtgttaaagctccgatttcttgagagagaagctcttaccttgtgggtaatattcaaaatgtgaaaaacgagctaagggagatctccttttataggtgaaggagggccacaaaaataagagaaaaataaaattagacatttttcaccgtagatgataatctaacagtgaaaatcaacttttgaaggtgatagccattttttggagcatagcgggtcccgccgtgggtaatccaaatcttattttcataactctcttgggggtaaaatttgagggcaataacttcagaattatgattcatatgtgataaatcacttgatataccattgaaatatcttcgaaacgcaagttgaatcacgccaatcagatcaatattgagtgagttatggccgttttactgaaggtagttcacaaccaagagccaaggtttacatatgacatcaacgtggacgttgggtaagtgaaaaagtgtccaagggatgtactttaagatacctaagtgatatttcaaatcacttaatctattttggtgttttggcaaagccggtcacccgttctcggtgatgttgttttataaaaatgacagactcaaaactgttcatttccgagtgagtttcccatgttggaaatgataaatgtgaagttgcaaatttgacttctctgacttcatggatcttagttattgtgaaaaactagatggatggttgaaacaaaatcaaaatcgaataagcagaacccagcgcaccatgttatttgtcaacttgggcgttgggcactcacttccaagctcctgtgatgtcattttgatacttccaaagttcttgaacttgaggacaaggtctcctacccaggttttaaccattccaaattcaatggttgaatcaaatttggcatttgagtgattgaaaccaatgcactaggttgattgtcaacttgggtgatggcctaagcaccaggtgaatctcagtgctgagctctacttccgaggcctcgggttcgtggttttcttcttaagttttcctgaatcttcattatctttgactacggaaaaaattcctgaaatacttttttgagaaattgattgaaaatagcccacgttgaaaatatgtcaacctaggcgttgggcctactgctaggtgtcaaccttggcagtgggcctagtgctaggtgtcaatttgggtgttgggtccccattttggcccttcaaaagttctctttggtcctcaaaaatagttgaatcttaatctttgcagaaaaaggagaagacggatggaagatttcttagaacacatcatcagaattggtcccatgttaacaaaatctcaacctgggcgttgggccttgcttttggcacccaggaagtgttgtttcttccgcaaaagtacatgtttcccctttttcatgaaaacaaagaagatgcaaaatttggatcgtcaatttgatacttggaagacacccaaattggcaaattgtcaacttgggcattgggtgccagggcaacgtacactgggtgctacaagtgctcaaaaatgaacttgctccaaatctaattctaatgcctcaaatatttgtatggtatgtctagttgatgtaccaatacaaaggttgacccatttgcactaagacagtccctaaaactgaaaccctagttaggaatgccaacctaggcgctaggtgaaacactaggtgccgagattggcttctagggtgcaagctcatgtaatttccaccctcagtgcttggatttcattgctccatgtcttcatggtacaaaatactcaatggtattgagttggattcatgttattgaagtcccaacttccatctcaaagcttccaaaatcaacctaggtggagggctagagtcccctcctaagtggactgatgtgacttggatctactcaactcctcatccttcttgtcacatgtcaaacattgatgttcatgtcaccaaggaaagttttttggtcaacatggttagatctctctatcggagagccgctggattggaaaatgatctgaagaagtgattgtgaacggagtagtatatatatatacataatgaaaaaaatatcaagggtgtaataagagcatgtttatgagaggaaactcaccaaaaatgttgcccactcccttcacaactaagaactttatcttcacaaagttacaagcggtaagcataacaaagctatggtgtgacaccaaaatgttgaggtaataaaagcctatgctcctaggaaccaacaccttattgaacatgaagtgaacttcagctggaattgggggtgactatgtgtttggtggaataggatgtatagatagctcaggatcatccaaccattaggatccgactagaacgggaaaagttcagagtagtttaagacttcaacaaaataaggattcaaaggggggacactacggtacttcatgatatgaaggttgtaggccacaaatccagaaggaggacattgatcattcgtagggaaatgacatttaatccccctccctaggcaatacatgtccataatacgaacaagctctgccttagtcacctccaaaatgattgagtcagctacaatgactacttcttcctcatctcatcgtggatccatcctagtaaagcattacaagagcaagaatacaggattgtgttgatatactcgtaagtctacataaaaaataaaaacaaaaaaagagagatgaaaggaaaaatacacttgagaatggccctgccaagaatcaaactcaccaactcatctagtgaaagccttgaagatttaatattttactactaggccaaatgatgaaatgtgtttgaaaattttaataccatggggtcctatttatagggataaatttctcaaagtacgagcttgtgttacacaaaaaatgctcgtaagtccctacactcaccaaaagtcaataaaacattttccctaagaagtgaagctacttgtcatcgacgatatcaaaatagaatatatatctcaagaccacttctaaagaagtgctctttaactaggtggcaatgttgatattagaaattaacaccacgaacgactatgaaccaaaaatggtttagagccaataagataaacaagaaatgtcaaagataagactgccatgctcacaccaacacagggataaaagactgacacccttattcacttgtgagggctccccctccctcgacctccctctcgccctgtgagggaaaccctctcgcttcctccatctcacttgctagggctccccactcgttgcccctcca

SEQ ID NO: 223687 - DNA, 2001 bp, Cannabis indica
aagacactcttgattatcaattggtaagaacagaaaaagaagagcagtaaaaccccctgaactatgcagatgttgtgcctttttctctcagcatagatggcattgaaggtgaagaacttgcttcttatgaagaagctattcaatttgaagataagaaagagtgggataattctgtggaccaggaaatggattccttgagcaagaataaaacctggattatgatttaaagacatgttggacaaagagccataggctggaagtgggtttacaaacataaggaggggattccaagtattgaaagagcaaggttcaaggcaagattagttgccaaaggtttttcacaaagaaaggggatagactacaatgaaattttctcccctgttgtgaatcacactttaatcaggttgcttttgagcattgtggcaactgaagatcttgaactggaacagttagatgtaaaaacaaccttcttacatggacaattggatgaatagattctcatgaagcagcctagaggatatgaaatcaaaggaaaggaagaccatgtttgcctgctcaagagatccctatatggactaaaataaagcccgaggcaatggtacaagaggtttgatgactttgtactaagagcagggtttaagagaagtgcctatgacaattgtgtatatgtcaaaagcacaaaaggaattgtttatcttctcctatatgttgatgacatgatcattgccagcaagagcattggagaaataaacaaatttaagaagatgttgaaccaagaattcgaaatgaaagactttgggccagcaagaaagattctaggaatgaaaatcactagggacagatcagtaaggaggctaatgctgacacaaagtggttacatttctaagatcttaagtagatttggttttcaagatttcaaaccagtctgcaacccctatacacaacaatatatgctgtccaaatctcaagctccagcaatagatgaagatcacacatacatggagaacataccatacaccagtgtagtaggaagtatcatgtatttaatgttctacaccagaccagacctttgctactctgttagtatagtaagaaaatttatgggacagccagggaaggatcactggaaagtgctgaagtggatcataagatatctaaaaggtaccccaactacagggctcatctatggtgccaactgtaatggaaaagaagtaaggggctttgtagattctgactatgctagagatatcgacactaggagatcccaatctggatatgtttttcaactgaatggatgtacaatcagttggaaatacaatctacaatctatagtggaattatctacaaccgaggtagagtatatagcttgcacagaagtgttaaagaagcactttggcttaaaggaattacagtagaacttggcatcaatcaaagagagatacaagttctatgtgatagccaaagtgctctccatctcagtagaaatcaagtgctccatgagagaacaaagcatattgatgtaaggatgcatcttattcgagatataatctcaggtggaaagatcaaactactaaaagtccccactgaaaacaatgcaacatatgcttacaaaatctctgcctactactaagttcactaagtgtctcaaaattctgaatgtttcgagctacaacaagggctaaaaatctcaggattcttccctaggtatattacaggtcaaggtggagaattgttgtatttgttgtatccttgtaatatacagttaaagtagttaggtcataactgtcttgacagttatgacagctagtttcctgtccactttggacacctataaatacattgtatagtttgtaattcaagttagttattgagtagacattgtaaacttcctattcaaaagcaataaagaataaacattttgtctctctaattttagtctctctctctaagtttgtgacagtgtgagtgcaatgtgtttgaatggttaattggaattctagt

SEQ ID NO: 223688 - DNA, 4018 bp, Cannabis indica
acaggttaaagaaaaatgtaaccatatggttacaataaaaatgtaaccattgaatagtcacccatagatatatatatttagaagaaatatatatatatatataggtctaatcaaaattgtatattacttttcaggttttggtcattcttttggacttcccgaggatttaataaccagtttgatcacattgcaattgtagtgcttgtttgagaaagtatttactatatggtaaaaattgatcgcattaaaattttggcagcatcacattttttgttaatttattttaagatttaatatattctctatgactatatctcacttttaaagactttttatgctaaaaagtttagattaaaatggaccataaaaaatacataaatcttgaattaatttaaacagcataacagtattaattttttttttttaagattttatatatttttcatggctatatctcacttttgcataccttttgtggctaaaacaaagcttagatcaaagtggaccatgaaaaatataagaaaaatattagatttattttagcatataatggtatgtaaaagtggaattttcccctatatctcttggttatatctcacttttggagaccttttatggcctagaaagcctaggtcaaagtggaccatagataaagggagaaatccattagaacaaaagaaaagattgagagtggagagcataaaaaatagagatttttacctatcacttactgtgtagaaattcttgaagatgacaattttgtgtacaaagccttctctctttcttgttttctctcatgtttcactcttacgtttaattctaaaattactaaaaaaatcctctattatattgcttctcttcctttgttataggaactctttttatttttattttttttattattttaatttttcactaaccacccatttaacgtagaagtggtgagagtagagagaatatctcctaactttactctcatcttgactgatcctctttttttttttttgttattattattattattattattattattattattattattattattattattttaatcaaacaaattattcatttacattttaaatggcttataaaagagataatttatttataataataataagaataataaacctttgttttcattcaacaccaagagatctcaagattcaagtaatgaataattaagcaataaaatagaaaagaataacactaggttgaacgagttcgagccatgtgcaatgctctacatcttggttagaacaataggagccataactttttttatattagtaattacaaggttacaagaatcctcacaaaatcttagagattacgagaagaagattctgtctctagtttagactctttctcttaaccttacactattacaatttacattcaaggaaatctggtatgattctcacacaggttacgaagacttatacaactatttatagatttttattgttgccaaaattatcttctaaatcatcctgacacatttacaccgccttaaatgatctagctcatcacccgtaacaataatccacgtcatcttgaaaaacatgctttcagtacggagaatccgaaatctttataaacacacaagccttccagatacgtacaaaacttccttcctgaatggacctttaagactgacagtaagctatccgggagtgtacctctggattgataacaagctattcggaagagacattccatacgcagtacaagtttatctggaagtactttctagattctaccagaccttccgcacagggcttttcgaatccacactaagctttcgggatcgctcactacaaaaaattgttacttttagtgacaatttttttagtcacaacataaattttttgtgactatatttgacttttagtcacaacaaaaagttacttgtgactaaaacatagtatttagttataaactgtcaataatttagttttagtcacaataaaaattgtgattaaaaatgcatttagtcacaacaaattgtaatttttttgtgactaatacttttagccacgaactttttagccacaatacaataatgataatttataattagccacaacttttttatcttttagtcacaaattttgctgtgactaaaagtaagattttttgtagtggctctctgaatcaacagcttccatcccagatgataaaacgtgtaaccataaccaacatactataactaattgtaagagcaaacaaatggaccctagtaataatagttttatttaactctcttaattctataaattgatcaacacacattttacttgtatgatgagattagtagaacaatagatagagaaatacagactgtcttatgggggttgtgactcggatcaaatatttttctgatcttgatccctcattggcgcgatattgtgtaattcagaagctaattaatcttctcgagtggatctctcttggactcatttcaattattaataaaggtctcatagcttttcaatgttatttttcattatctgaaaaattccaatcttgtttttcaattcaattgttaatttgcttaaattaaattttgattaattttctgtctattaattgttgtccagtactctttgttttgttcttgagattgatatggaatcactacagcttgattaataataagtttgttgaatttgaggatcacaaagagggtggaaggtccctttattagaccgtatttttgcttaatttatttcgaaaatgataaatcaactgattttataatttgtagtgagaaagtgagttcaacaatccaaaattagatgtgtcattctatacgtaatttttcgtacatatttaagttttgggtgaattttcattcaataaaattgtcggtagacattgttaaaaaaaaagtgtcggtagacaaaaccagtacaattcatagtttgacacagcaaaaagaaaaagaaaaaggcaaaagaaaaaagtgaaaaggaaaaatataagctatatatatttagaaacgcacgacctaagtgtacgtagtgttgaaaaattatgcggtattttaatttgtttagaagaaataataaaattttgtatcattataaatcatataattatgattttgatgaaagctaattaatgaagtaggtaggtataaatatataataattatagggtgttcaagagaaaatgatgggacaccctacatgcatgggcattggttaatatgcttctcacataaggcaaagcatatatagctcttttgtttttgtcttgttaactttggttcttgttagcttgccatggttgacacgcaattcttattatatacaaatatttcagtttggtgtagctatagccactccaagccaagtaagctacatttggtcttagttagttgggcttctaaaattctaaaaatactttaaaccgaggagcttaatcagttgagaagctaaaaaataaaacctacatatataactttgcttacagttgcaaatatcatcaaccaaatttattgttctaccgtcaaattcaaacaaaaccatatttcactttttccctttttgaataatgtatatagtactactgccaattttggttaaaacgttttagaaaaggaaaagagtctatgcaggtggtaatgtcagtggaaaagacacaattgtgtttggtggtggtatatgaattggtctggtgtctctattataaagagaaaaaatataatatatatttgggtaaattgcggcaaaatatctaaaatttttattttggttttacttaattttcaaaattcaaatttgggcggtaaaattctcaatacttctattctgttaacaatttaacatttcggtccattgccatgttggattggacactgtacacgtgacacaattttatcgatccacgtaaaattatttaaaaatattaaaaattaatttaaaattaaaaagaattataaataaaaaaatatttttttctttccttttcttcttcagtacgattctctctctctctc

SEQ ID NO: 223689 - DNA, 3050 bp, Cannabis indica
tgggtctgggactgggttcaagtatgggtctgggttcgtgtccttgtctgggttcaggtccgaggttggtcaccagatgcagacaacggctatgagttcagtccaagcattgggtccagatccgaatcacgatcttgggtcccagtttggttccatttcgggttccgcgtcacgagctgggtcctaggttcaagtctgagtcgggggtcgtgtactaggtcccggtccttgtccctattctagtttgggtttttgtcctagtctaggttcaggtttgagtccttgtcttggttcaggtttggatctcggtctgggtttttatctgggttcgggttcgggtttaggtcatggtcttggtccgagtcctagtccgattctagttctagttgtgattcggagtttgagtttggattcgagttcgggtcggggttcaatccctggtctgagtttgggttcgggtccagattttggtctaggtcaggatcaggtttcaggtgtgggtccaggtccaggttcaagtccctagttttgaactcgatctgtgtgtgggttcaatttttaggtgtaagtcctgggttccgatctctgtctgtgttcgagttcaggtttaggtccaggtctatgtttgggtcttattctaggtcttggtctgagttcgggtcccgagttcaggtccgattttgggttcaagtctaggttcaagttttgtcctggtctgtgtctaggttcgtgtcctggtttttgttcggggcaggttttaggtccgggtctaggtctgactttggattcccgggtcctgctcagggtttgggtccctggtcaaggtcccccatctaagtccggttcctaagtctggtctggtctaggttttggtttgggtcccgagtcttagtttgattccagttcccgacccaagtttgggtccaggtctcggtcacagtcttggtctaggttcgggttctggtccctatcagggtccagaacctggtctacgtcccggtgagtgtataggaccagttcaggtccaggtcgcggtacaagtttaggtcccaggtctcaggtcccagtcctagtcaaggtctcggtctaggtctcgtcttggtttggattatggtttgggttcggttctggtctcaggtccgggtcctagtcacagtttcagttcaaattctcggaccgggtttggtttcgagtcagggtctaggttcaggttggggtcggggtctgagtgttaatgtgagttttggtacgggtttttcgaatcccgagctgggtccaggtttgagtttggttcccaagttcgagtctgggtctacattcgggttctagtccaggccccgtgttttgatcctagtctgggtcaaggtcagtatttggttctaggtctaagtttatgtccatgtctaggtccaaatcccagtctctatcatgggcttggtctgggttcgagccaagtcccgagttcaagtttgcattcgggttcgagtctcagtcctagtctgcgttcgggaccaggtccgggattgcgtctaagatcgagctttcgggcttggttatggtatagtttggatccgagtcctgagttccgatctaggtctgggttccaagtcccccatccaggtccgggtcctaggtcccggtctgggtccatgtttgggtttgggtcatagtcccagttttgattttgattcagtgtctcggttcgggttcgggttcgggtctgggtttggttcggggtctaagtcctagtccgagtctgagattgggtttgggtccaggttcagatcccggtctgggtgtggggtcatttcaggtccgagtttgggtcccgggtggggtccaggtctgggtctgggtcaaggttcatatcaggatccctatctacgtctgagttagggtctgggattgggtcctaggtctaggttcgggtctaggttcaggttcgggtctcggtccagttctgggtacacgagtgtgtctaggcccaagtttctgtctcagttaaggtttggggctatgtttgagttaggacctagatctgggtctgggcgcgagttccaaatcccgatctcgggtcttagtctggttcaagtctaggtcttgggtcgggtcttgggtcccagtccttgtttcgttgccctggtccctatctcgattatgggtctaggtcctagttttggtctaggtttgggtcctggtctaggttcaagtttgggtcctagtcgtggtttgggtttgggtctcggtctgggtttttatttgggtttgggttcgtgtctcagtcctggtccttgtcctgcctggtcgtagtcctagtctgctccagttccacttgtgattctgagctcaagtttgggttcgagtttggatcggggttcgtgttcgtgtcggcgtttgagtcctggtctgagtttgggtttcgatatggatcttgttctaggtctggatcgggctccgggtgtgggttagggtcttgggtcttggtctaggttcgggttcgagtccaagtttttgatctcgatatgagtctgggattagttctgcgtctaagtcttgggtttcgatcccggtttgggtttaagttcagatccgggagcaggtcccaagttcgggtccaattttgggtatgagtccaggttcgggtttggtcgtggtatgggttcgtgtctaagttcctatccttgtttgggtttagggcaggtttcggctccaggtctaggtctgacttcagattcccaagtctacgtcaagtccttggctgggttcgagtcttggatttagatttgggtctgggttccagggcttaggtccctgttctaggtcccctatccaagtctggttcttaggttctagtccagttccaagttcgggtttgggtcctgagtcttggttttagtgtaagtctcagtctggattcgggtctagctctcggtctcagtcgtggtccgggttcatgtttaggtccttgtcagggtctggatactagtctgggttgcgggtctcaggtcctgacaagggtttaggaccaggtcaggtctaggtcccagtct

SEQ ID NO: 223690 - DNA, 1341 bp, Cannabis indica
ttcctcactccttaacagtctacttacccaaatctattcaccagcgacacatccagcgaccggcggcggcgacccatacattcggcgaccgacgactcaaatggaccctaaatatgagatctccaccaacaaaaccccaaagactcgaacagattccatggccgttggagatctagatctgcgccgtaattggagctccaccgcttggtcccgaactcttacatattctgaggtgagcttcatctttcttttcaaattgattttgtagattccatgctcattttgtacacttcatcccctagttgtgttgtttgaatggcagatttttatttttctttctttttaaagaaatgaaagatctatatatgggtattgctttaatttttgtgctttaaaaattgcaatatcagttggtgaatgacatatctttttctttctttcgtttaaaaaatagaagatctatatggatattattttataatttttgtgagagtcaagatctatatgagtgtttggtaatttttgtgaaaatcaagatgagcttccatgttgagaagaaacaatcttcacttgtcttatgttggcagcagaaggaactaatcttattctcaactattttttattttaagtttatcatattttttttatatgatggaaactgattttacagatttagcaatcagaatagttagaaggcaaacattactctctacttcttttatttttacgaagtgtttcatcttttaaattaaatttggattatatacatatgtgttgttgtacttgatcaaatttactatacggtttgattatatttgtagtcatgctttgttacatttacatctatctttatataatgggaaagtattgtcgtttgatcttatttggttctgttgattaggagagctaatgatgacgttagcttcttatatgtttttgtgcaaactggttttaatatttttatttttggtgagttatgttaatggtgtttcttaaaaattagtttcaatcttttttttaatcagatttgtcaatgtattatatttttctttcaaaattaaggtggtatcatgatatacaactttactataaatttttgttatgcttgttgatttttataaattttatcaatgttatatgtaactatttgttgtaaaaattgattttattattgttctctgtttggtttgtcaaataatctgatgaagtgaggaaagaaaaaaggggtaatttgtattcaaataacttcattatgatgtgagacttttggtacttttaataattgttagttgatgatttgggatttttttttcatttcatttttgttatggttttgtatga

SEQ ID NO: 223691 - DNA, 935 bp, Cannabis indica
atcttgattttagaaaaaataagattagtagagatacttgaatgatgcaagattatcaccttaaaaatgtgtgatttgtagatggtataggaatatgctatttaccttgtatgacccatgggaaattggtgctaaatttgtattttctaggtctagatttgcataggaatatgtgaatttaatcttgagagcccataacatataggtttagaaaaatcatatgttcatttatatttccgattgacaaaatttaattactaatgcattcctctatgacatttgcattgaatttacattctaagtggatttgattattctagctcatcactttgctcattttacttactttcttgtttagtttttagcctagttcaaatcatcattacttcttgtttattttacccaaattgtttagtattgacttttgcataattaatttctaatcaatccctgtggagacgatactcttttacttatcattgtattacttgtttgtgactacgttcactcgcgtatatctaattttagcacaacaagtttttgggacagcaggctgagcagcagtgagtgcgggtagatgaagattatacatgtcgggacagttaggcctagagcgtacgatctttgggacaacaggctgtattttgtataatttctaggcgacaacttttgtatcaattattttgtaactcagttgtaaatattttaaatacgggatcccggttatatataagttacttacttttaattttaaagagtatttaaataaagttttgaattatcacgattttcaataaacccgttgaatagcaacggattggataattaatgttaaatcacgataacacgcctaaattagtagggtgttacaattaatatctttttgattaaatgattacaaaaatatagttgataagttaattaaaaatatttaa

SEQ ID NO: 223692 - DNA, 1915 bp, Cannabis indica
ttctaattgtgtaacacgtgacatgcattaatgttaaatttgactccgttgtcggttggccaaatctgtggtacaacaaaaactatattaattagttaaatataatattactcttaaataattatttaagagagaaatatattattttaatgaaaataatatgtattttaattcttgtgaaataagatattaatgagaaataataaattattatttattgacggaatgaataataaatcttatttgtggtaaaattgagaaatcaattattgatcttaaaatatggtccacacgtgtgagtctatctcacaagtgtagggtgacatataaaggtccatgttaattttatttgattattttattggttaaaataattcaaattaaattaatcaattatcttttaattattgaattaaatatagtattggataatctatttaattaaaaaaataataataaaataaaaggatttaactaatttttgttaatctgttatatgatattcatatttgaatttgaatcaaattagatattatcttttattttaaagaactaaataaagatttgtttctaacattacatatatgatatatatcagtataaactaacaaaaaccctagaaaaaagtagagaaaaataagtgtcaggtttgagagaaaataggattgatttttcactctcaaactctctttatctcctcatcttgcacgcaccacacacatcagtatggtgtgagttttgtgattaaccctatctcatcacactatctcatgtgttaagaatatattatgattgcataattatactcgtcctatagaatctaatagcccactctattcttgagtgttgaggctggcttggaagattgtagtgtgaactcttcatcaagttcttggattaaatgtttgataataatacaaaaagatagcaagaatctcctgataggctataagaggtattgtctctctattcattagtctagatttaatctatatatattttatgctgagatccttgggctaatggttcatattagataaaaaaaaaagtttatcaaattcgcttttgcttttctaactctaatatggactatcaaaaccatcaggaggtcctattaaatggggataaaataatccaaaaaatatggaaaaatatatttagactattttttaccgtagttgatgatctaacggtgagaatttacttttaaggttgattgtcattttttggagttctagtcgcaacggtaggacccgatctgggtatgttgtagcttaaattcgtaactcctttgggggtgaaatttggagtcaaatagctttagaattgtgattgaattgtgagacatcacttaatagagcattaaaatagcttcaaagtcaaattgaatcgtgtcaatcgaatcaatattgagtgagttatgactgttttactgaaggttgttttgggcctaacgcccaggttgacattccagtgcctaggttgacatcaagtgctcaggttgacatgtgatgtcaacctagatgctatgtgagtgagaaaattttgacatcacttagtccatttttatgttttggcaaagctagtcaccagctctcagagatgttgctgttttgcagacataggagacttgaaactcctggtttccgagtaaatcaccttgtcagaaaagtaaaaatatgaagttatgaatttgatttcatgactctctattattgtgaaaaactatacgaacggtcgagacggaaccagatcggataagcagaaaccagcgcaccaggccatttgttaacctggtgctgggtgcttattccagagcttccaagatgtcattttggcacttacaaggttcttgaacttgaggaagaggtctcttaccctgttttttgttggtttttatgccctaataaaactc

SEQ ID NO: 223693 - DNA, 1946 bp, Cannabis indica
tcacatctaattgaacaaagacaagattactcaatcattgcaaaatcaaagcactagtccatacaagagttcataaccacccaaatctcaaagattttagttcatagctgaaatttaaaactcaaaacgagaaaatgacatgttcatggggtttaagagaatactaaagagtagaagatgatacaaaatggaagaggagagcaagagaaattagtttgtgtgctcaaatcttttctttggaggttgccttcttctcctttttcttcatcttcttcttctattctttgtgctctcttccttttctctttttctgtacttagatcttaaaaatgtactcccttcttctaaaatgcagccaccattttctaatgtccttctttctcttttgcccccaaattagggtaccgaagtttaccctaattggaaatccaaggcatggtccacttgccctttattttccacataatagttgagtcattgtccacattttcgccacctcaacacctttttttcttcattaatgccagctggacttctgtcaaaatacactaactgggttgacaaattactacgcgatgattgctatagcaatgccagtcagcaataagcctttttctactcattttccttcttgtcccgaacatttccatatacttattttcgcatttttttctgcttaatacacataaaaacaacaacataagtctatttaacacttactaacacagacacacttccatttattacaaagacacaacaaactaaacacaattacataatataaacactaattactctattatttagcttaaaatccaagtttaaagatatcaaaaataactctaaatcttagagttatcagtatgtcactatcgttgcccggtcaatcaaacgataagtaagaaacctatcaacggttttaagagtaattactcataacggtaatgaccgtatcttaattcattcacaacaacggtgataaccgtgttcttccctcattcatgaaaaactcacaaacgacaatatttgtttctcatcattacctcgattaccatcgagtcacaacaaatacatattattaatctcaatcaagctcgagtcacaacaaatacatatcgcgatctcaatcataatcgagaccataacaatcttatcattaaccataaacagtgcttaatacttttcttacctcaaagccaaagtcaagtatgtgggccgacctgagtagaatgatgctcgacaatttcgagtcctcaaaaacttagacaaccgtaagctcttgcaaacagatgcaatagaatgaattgaaggagaaaattccctggtttgttggtccttagggttcgaagaaaggagaagaagaagaagaaaagtgttatttcttgatttttttcctttttccctaaaccttttaagttatccgtctatcctttcacaatataatcagcatattcactcaaatattccaaaatctcagccaatataaaacactagaagacaaaaatcaatcttgtaaaatgaccatgctatccttctcctcaaaacataaactataacataacttaagggcgtttgggtaatttttaactaatgcgccaaaccgacatcttaaaaaaaatctaaactagtctggtatatttcaaatacaaatccatcatttattgtcgtgacatttctaaccactctgtccaattttttacgatcacggggcccaaaaatattttatttgaattatggtatttacgacacccacatattccaatatagtttctataattaataaattacgctttatttattcacatttccctaataaactcgtaattagtttaagtaggattataatcctactctaatgcccacttaatcacatatttaataaaatatgtccaataaaaatatctatatattttatgggatattacataaataatttttcaaaattt

SEQ ID NO: 223694 - DNA, 4374 bp, Cannabis indica
ctgttagagctcagattttactcattgatccattccctactctgtccaaagttttctctatggtcatccatgaagaacgacagagaaaactcaaaaccccacagatcccatctcttgttgcatctactcaagattctactaccacttcagctcttgcacaaactccatctgcatctgctgctaatgtgaatcaaaatcgcaacaagagaatgcgaccttactgtacaaactgccataaacctggccatttgaaagaaaagtgcttctttcttatcggattcccaccaggttatggtgacaagaagaaagaaacaacagcagtagcaaatcaagcatctacttctactgatcctctctcttttgtatccaatttaaccaaaccagaagacattcagaatctcatttcccttctatctcagaagctacagccaaccacttcagatgttcaacctttttcctcacacatttctggtaatacagaacataactctaactctttatggattgtcgacagtggttctactcaccacatttgttgtaatatttctctattctctcaattacatgacattccagttcccacatccatcaaattaccaaatggttcgagtattaaggttcaaaaatcaggcactataaaatttttccataatctatatctgtctaatgttttttatgtacctgattttcaattcaacctttttagtgtcccttctttcctcgacaatctttctaacagcatcttttttacaaaaacctgctgcattttacagggttccctgaacaggaagattgggattgctaaacgtgtaggccatctctatttcttgatgcatgatttccctactggtttccatcctactgtttgtaatatttcctgtaacaatttctcatggcatgcccgttttggacatccatccatgtacactaccaacataatcaataaaatgttgcattctaaacatactactgtttcttctccttgttcaatttgtcatcttgcaaagcaaaaaagattgcctttcatttcaaataataatattgctgcctctaactttgatcttatacatatggacatttggggtcctttccatgtccaaagtactgaaggctttcgatatttccttaccattgtagatgatcacagtcgtttcacttgggtatatatgttaaaaacaaaggctgaggcacaactctatatccctcagttttacactttcattcacacacaatatgctacaaacattaaagctattcgttgtgataatgctaaagaactaaatatgacatccttctatgctcaaaagggtatccaaatcaataattcttgtgttgaaacacctcaacaaaactctgtagttaagcaaaaacaccaacatattttgaatgttgctcgagctttggcttttcagtcctctctaacattagcatactggccatattttattaacactgctgtttatctaattaataggactcctatccccctattacaacacaaaacagcataccaactcttgcataataaacaacctacatacagccacttaagagctttcggttgcctcgcatatgcatcctctttaccaagcaagagacacaagttttctcctcgtgctcgtgcttgcatgttcattggttatcccaatggcatgaaagcatacacgcttattgatctagccagtaatgccattttttattctcgagatgtggttttttatgaaacaatttttccactaacaggttctttcaaacctgatcttgatactttttttgccaaacctgctgcaacaattccctctgcattatttcatccaatctcttctcagcatactgagacaagttctcatgatgaacctccaacagatattcctccagttgcatctaatgacacaaccaaaataacaaaatctggcagaattacctccaaacctgcccatttaaacgatttcatatgcacctcttccactgcatatccacttgacagatatctcaaatatgataggcttcacaaatcttttcgaaatgctatactccaagcatacctcgaacttgagccaacctcatatagtcaagcttccaaatttgctcattggctcaaagccattgaccatgaattatttgctctaaaacaaaataacacctggactatcatctctctccctcctggttgtcacgttattggcaataaatgggtcttcaagatcaagtataattctaaaggtgaagttgtacgatataaagcacgccttgttgcaaaggatacaatcaacaacatggtattgactatgttgaaacctttgccccagttgctaaattcaatacacttaaacttttccttgctcttgctgccctcaacaactggtcccttcatcaaatggacattaacaacgctttcttacatggtgaccttgaagaaaatgtctacatgacaatacctaaaggttatatacatgagggggagcttccccccaatgctgtctgtaaactaaataagagtttatatggcttaaaacaatcttctaggcaatggtttgctaagttaagttctacattacttagcactggtttcactcaatcaccaaatgaccattccctctttatcagatcttccaataattctttccttgcacttctggtctatgtcgatgacatagtcatcgcaagtaacaatgattcggatgcatctgcttttaaagccttcctaaactccaaattccaactaaaagatctcggacctttacgtttcttccttggattagaaatagctcgatccaaagcaggcatcgccgtctctcaacgacctttcatcctgcaaatcctcacagaaacaggatctcttggagtcaaaaccgtatctactcccatggaggctaacctatcacttagcaaagatgttggcccccctgtttctcaccctacttcataccggagtctcattggcaaactcctatacttaaccttaactcgaccagacatcacttacgctgttaatcgcctcagccaatttctcaatgaccctcgacaaccacacatgaaagttgctacacgaatcctacagtatttaaaagctgccccaggccaaggcctcttcttcagctcctctgcatcaacaacgaatccatttcaattacacgcattctctgatgctgactggggtacttgtcccgacaccagaagatcgataaccggtttctgcatattccttggtccttcttttttcctggaaatcaaaaaagcaaactacagtgttcaaatcatctgcagaagccgaatataggtccatggccagcaccacatgtgaactcctttcgttgtttagcatcctcaaagattttggcataacacactccactcctgcaacactctattgtgacaaccaggctgcattgcacatctctgaaaatgctgtgtttcacgaacgtactaaacatatagacattgattgccatattgttcgtgatcaagttaaccaaaaacgcatcaacctagttcatgtaccttcgaagcacaacacagcagatatcatgacaaaggcactgtttccagcccaatttagttttttgttgtccaagctgagtgtcattaacctgtacactgcaccttgagggggagtattacaggcctaaatatcaaacagttattttctgttttaaacagtattaggaagtttgttaggttctgttatttctgtttttctttcccttattttctggataatattgttgtataaataccctggttttgggtcaatcaatacattcaattcattctttcctaatataataatctccttaaaccagtaaggcagtgacaatgcaatgcaatgcaattacaaccaccctacttctttcaagagtaggtataaatacagtccaaaaatacttctcacaaccaatggtttatcacatcaatgtggtgcctacacatatatattttgagtgggtataaaacaataaataaaagtatcatattattctaatgtatcagaaataaaatattaaagaataaactcaaactatctaacattcacctttttttggagtatgcttgtgatattaacttgagtcttgacatgtccaacaatttgaatatataaacctgcaaaattaaatagttagaaaaaaaaaattagagatagaattttattgtacacttattttggattggaccagtaattttaataaattataataatcttaaatttgtaccataaagtgtgaaaaggaaagtcatgatcagttaaactattttttcataataaactgttttctttctagactcgcctttatcttctcatatctgccataaaaaaaatcagaatacacattttaactaactattatctcaattttggcactctgacgtggcatc

SEQ ID NO: 223695 - DNA, 1111 bp, Cannabis indica
tttaaacaaaatctatttgtaaatggattatacgggtcgtgtcgtgtcaacctgcttataaatgggtcgtgtttggatttcatattttgacatgattattaaatgggtcgtgttcgggtcaagcataaacttgtaaatacataatgttatctatatttttggaaggaagacatgtggcattccatatacaaaggcttgctcagaagttcaaagagataataggccaagattatatagagaaatcgagctcacaaccattcgagatccaataaatttacattcgagactgtgcctctccaaatccagtagggcttctcgtctgaatacgaaggagcagctgagacccttcgaatgcgcatatgggatacaactagaagggcattccaagaggcgctctggaagcttctactgatgcagcgatcctctgacgtcgaatcccaccaaatcaaagccttatcccatgttagtgatgtatattagttgtaaaattggctaaatagtttcctttattctttagtttcttaatttaacttcataggttgtgtataaatactaatatattttctcaatgaaacacaagtaaattattctcttcactattgtttacatgatgtcagagccactttagaataggaattcaaaattcaaaattcaaaatttgggttgtcacaaaattagagtttatagttggagtttctcttttcttaaggagttcttttttggaaaacccttttagagtacttttctattctcatcgtccacttagacaacttatcgagtcgtcgatctcaaaatccttaaagtccggtcactaaaatctctgcacgtaaggctcacgcactgcctgaagcttttgcgcacatccccacgcatcgacacgtggaggcgcgtgtgacgacattatttttctagttattttcttgattcttctaagcctactcgcatctgtctcaggtttgaatttggtatttcttctttctttgtatttgggtgttcgttttcttccttttctccatcaattatattttgctctcaagattatggcaaagcaaaaatcagacctaaaatcaatagtgttttctgatgtggttcatgtgatgtctaaaatcac

SEQ ID NO: 223696 - DNA, 3064 bp, Cannabis indica
tcaagaacattatttgtaggtttgggattcccacgaagatagtatcccataatggaacccaatttaatgtggacttgttcactaaattctgcgacaggaataaaattatcaaaagtttctcgtcagtatccatgcctcagacaaatggacaagtggaagttgttaataaaaccttaaaggatgctatcaagaagaagctagatgctgccaaaaacagatgggttgacaagctacctcaggtactctgggcccacagaactactgagaagacagctacgagacacactccttttgtcgctagcatttggctcgaaagcaatgcttcctattgaagtgaacatatcgactcacaacagagagttttataattaagaagagaaccaggaacttttaaaattacccttggatctacttgaggaaaaacgaattgagtcgaaaatcaccaacgcagcataccaacaccgagttacaagatacttcagcgaaaaattcaagaaaagactattcaatgttggagactttgtgttaagacgagtctttgcaaatacgagagatgcatctgtaagagtgttcaacctgaattgggagggtccataggtcatcgaagcagtagttggaattggagtttataaattggctcgactcgatggctctctagtaaagaactattggaacgtagaatatttgtgaccctactaccaataaatggtgtaacttgcattactgatgtaaactttaacttcagttatgaataaagagaatcatttatattaagtaattacaaagttttattccttaaaaattactttagggacatttatgtatgattaaccagaattcatctggaaatacatggaataatgcaaacctgccattttaatttttctttttaaattcaaaggctctcgactaaacctctttaacgaaagtggagtctgttatagtgagatttctctcacctagaaactcgagaccaaactcctgtttggaggacacgtgtattcagttttccaagaaaagttgagatatccatgagacactcctcgagtttaaacctcgcctgagctagaatcagcgagatgatgcaaatatgaccaaagtctaatcgcattcgtgtgactcacattatgtggaaccaaagaacggatctaactcgcatgtacaaggatatgtgcgggtatcctttccatcctcgtgcgagaacatagagatcgactctctataatgcgagctggtcacgatgacccaacagcctcgataaaccaatatagactcgtgcgtctaggttttatcagctcgttatacgatgtccgtaaatgcgactatctaagaacgcaggcatcctaaacttaactaattgttaggtatatcctaagcccgagagcttacaccagaatatgaacagccaactcgaacattagaagtcgcatacgttgctgtatttagtaaatagaaactgttattcgtttattaatgttttacgttttaacttaattactgtaaatcaatgtataaacggattgacaatgaatgcaatccttgtgtaattaactagacacttgctttgtatataaaggagtgatccaccatgaaatgagaccctacgaaactcttgcaagagtggactaagaacaccgtgatttgactgaaccactatacacctttgtcttcttgatatttccagtttttactaagtacttacgtttccagttcgagtactcgccgttttagtttgaatactcgcattggttcttcatataatttcttcttattattagtattattattcatttttggtgttgcaaattttgctcgacaacatttggcgccgtctatgggagcggagaagtacattcttactacatacaagaaggaaatcttcatagctggaaaacaagcaaacggaggtgttaacaacgaatccatcaacaccgaaatgatcaatattccattgtctggggttaggacaccacctgtagatgtcatcaatggcggagtaggtcgaggtaatgtcagaccacttaatctattccctgaaactgctggcccacaaatcggagaaacatccacgccagcagcaactatggggcactttccacccatcactccggcggcagtgtccgagggtatcgtccagctaaccattgaccagtgtaccgcgatcaaggaccagctgcgtgccctgcaggccgaggtaaatggacagaacatggccgacaccctcctcgagcccccactactcgcacaaaaaaccctcaggtaacccactctagacgtcgtaataaccgtgctcgcagggaacgaaggaccaaccccgaaggactcgacctgaatcaaccaaccttgagagaccaatctgcgaggtatcccaaccaggagacacagatcgacgaagaccccaaataatgtaaccctcgcaggagaccttcgcgagacaacgacgtagaatctgcctcctcgtcctcgcatggtcgcacacctagcaggtacacgaggtctggttctgtggagacgcagcagggaggacgatatcaggttcacaggggtgatctgcgtgatcaccttaatgttgttttcagagcacgctcccacgcccctcgtgatgaggaagggccccgtgatctccaaatgggcgatctaggtgtaaacactcacccaaacccgcctaatgcaccagcagcgactaccggggttaatgacccagcaaacctcgctgcagtagccacagcccctgcagccgtagcagtcacggctcctttagtcgaaggtattgatcaaagcatgctcttgcaggctttgaaaatactcgagcaacagagaaagcccatatacaagctgcatgggacctctcctttcactacggaagtgcgacaagctcagctccccaaggggttccgattatccgaatccctaaattacaaaggtacctctaatcccattgattatttagaaaaattcaatactattatggaagtggatcaggtacctcaactcacaaaatgtcgcattcttgcggccatgttggaagaaaacgcccacgattggttcagccaattgcctgagg

SEQ ID NO: 223697 - DNA, 2566 bp, Cannabis indica
tgcccatttctaacaatggggaccacatataattaaattcataaataattattaaaatatcaaaaattagtgctaattgcctttactaagccaaattactaaagcagttattacattacttctcttccaaaaatgacagtctcttttgaaatgccccggtttaccacagtgatatcacccttggaagaatctttgctgttactccttcccctattgttccaaggcttcctttcatgaggccttcctctactcaagttcagctcaccattagagctccccaacttgtcattcttcatctctaagtccatagactttagtgcagagatgacttcatctagggtaatcgaagttcttccatactttattgctatctttacatccttataggattccggtaatgagttgagaatgatgattgcttggttttcatcactcaatgcttctccttctcccgagttagccaactctatatgcatcttcagaaattcatctaagttgtcttcaagacttttagatctattcatcttgtagccaaagatcctttctttgagaaagatcttgtttgttagtgacttttgttggaattgcacttccaacttcctccatatctttgctggagtttcttccttatcaaccaacctaatgattgcatcacttaggttgaatatgataatcccagtagctgtttcaagatactcttcttgctgtatcttagttgttccttcaggccattcaatgggttcttcaaggaccctcaacagcttctgttgtgccagtagagatcttattttcctcctccatattctgtagtcacctgatccatcaaacttatcaatatcaactttaaaactactcatattgtatttgttaaaaaatcaaattagataaaagtttagaatgtcctccaaatctccaatatctaattcctcctcttgatttccatccttgtgttcttgaagatcaaattctttctgttcttgatttttgatatctttcagacttgcttcttgaatgtattaatttgaatctttctttgcggaaattaattagttctgataccactgttggaatttttaaaccaaaatctccagcttttatttttgtccaacacacttcaaaaaaacaaaattaatacaaaatacaaaaatggtatttttctaattttatcgttctattatgcatccataataaaatatggtaattttataactaacacaatttgcaaatgtttgtttcatcccaatatgaagagcccaatacaaagtctacaatcaaaactctatatcacactcaagagaaccacttaatggttcggtcagcaagagtcaaacaatgactcacccactcaagccaaatgccaagcccaataagagatcgagtcaaactctctccctcaacactaggtttggtcaaagcaagaaaagtcacaataactctttatttccttcacgcttcttcttttcttatatctgaaaacaaactaggatttttggttttactaatgtttcttttctattctaatggcagcaagatttttctagggttttcttaaatttcctctacagcttcttctctctagttctacccgaaactaaactcaaaatccactcactcatggctccaaccactcaaaaccgaacccagaaaagtttcacaacctcacggccaaaaactaaaccggaaaaacaccaagaacaccaaacacacacaaatacaaatattctgtaaaatatagagatttaagatgagaaatacaaacagaaatggtaaagatggatacaccatatttgatctcggagttcacccaaaattaccgcctacgtctccgtcaagccctcaaagcttgaatccattcatcaacaacaggttacaatctttgatttacaactttatgatttctcactgattttctctcttttaatactaacaaatttctctcggtttttctattacatgaacacaccaataacactcttttaggagctctctcaaactggatctcttgtgttctctgttgttgtctctgttaaataagatatttctggacttagggcagagccctagagatattttatgtaactgtttttatcttctttagtcttgatctttgttttgttgtaagttgtaagtgtgggtaaatctatcattttggaaccctgtgaatagtattatgaaacttagggtatataagggaatctgtaccaacatttttcatatttctttttagtttttaaatattcatctatcaaaaacaagacttttcccagtgtatatttttgctataaaagttaagatttttcccagtgctggtaaaagtaaaacttttcccagcgtatatttttgctgccaagttagactttttccagcgtgttaattaatatgctgggaaaagttagacttttgccaacgcacatttataatggcaaaagtataacttttaccagtgtatttacgcattgggaaaaattatttttgctaacgttttcattttatgctggcaaaagttttgataccaatgcaaagagtcaagtcatcaaccatatagtaaaatattttagtgagtcaa

SEQ ID NO: 223698 - DNA, 1704 bp, Cannabis indica
aagctgtgtcaaaatggcggcaatatctcttggctcgacactttattatccaaactgaccataagagtctccgtgagttactttcacaggttatacaaactccggagaaacaacaattcatccgcaagcttgttggttttcagtttaccattgaatataaagctggtcgcacaaatttagtggccgacgctctctctcgccagccagaaattgcagaatactcgcaccatttatctttgacaacctgccattttgatttcctggacgaacttcgccaagaaaataccacttgccctgatgttcgattgctccttgatcaatttcgactgggccaactcaataataatgagtattccgtcagagatggcctcctttactttcgaaataggctctttatcggtcaacattctgcactcaaacagccattgattacagaatttcactcaactcctaccgggggtcacgcaggggctgatagaacattcatcagattggcagcaattttttttttgggttggaatgcgcaaagaggtacgccagttcgtttctgcttgcttggtatgccaaacagtaaagtatttgccgaccgcaccttatggtttgctccaaccactcgagataccggaacgtgtatgggaggatttggccatggactttattgttgggctgccgaattcatggggtgtcactaatattctggttgtcattgatcgctttaccaagtacgcacactttggggctctaccaacacactattcagcaactaaagtagcagatttatttgcgcacatggtgattcgcctacatggtatgcctcgctccattgtttcagatcgagaccctattttactagtgctttctggcagaaattgtttgagttcatgggcacgaaactgaagatgagctccgcttaccatccgcaaacagacggacagaccgaagtcaccaatcgttacttggagcagtacctcagggcattcacagccgagtatcccaaaaagtggagtaagttcctaacttgggccgagtaccattacaacaccagcttccactccgccatcggaatgactccgtttcaagcggtctatggcaaaactccacccaccattccatcttatacaagaggcgcgacttcaatccaagcagtggaagatgatttgttatctagggatgagatcttatagaaactcaagtccaacttacagcaagctcagaataggatgcgccagcaagctaataagaaacacagagatatcgagtttcagattggggatttagtgttggtgaagctccaaccgtatcgacagtctatagtcgccaagcggttgaatgcaaaactcagtcgacgttactttggacctttcgaaatcctggctcgcgtgggtcaagttgcgtacactgaagttgcctcaaggaagtcgagtgcacccaacgttccatgtctcactgttgaagccttatatcagaacacccctacctgcttgcttcccacttccggagattcgtattgcaaacaaaccggtcatgttcccagtggcaataattgcagctcgagttcatcagattaacaatgttcctacaaaacaagtgttggttcaatggtctctaagcagtcctgaagatgcgacttgggaagtctgatgattttctgcgtatgtatggattggaagaccttaaggacaaggtcgatttcaatggggggag

SEQ ID NO: 223699 - DNA, 2207 bp, Cannabis indica
gcataaaacccaacaaagagaccccctccaatcaagaaagatatgagcaagagggatatcattaaatacttgtaatttcacaaaaggttttgtccatgatacccatgattccaacaacctgtaggaggaaattgaattcctcatcaagaaaaataatccacacatacatctatttattaagaccgaccaaacctaacaagccacccatcaatacaataatcaaaattacctaatgcctccaccagttgacgaaaacttgtaagtgattatttggggcctacacattgttagagatatgagcaaggtgttgtggtatttttcaatgcaagtatatgtatcgttaacaagtaatagactcacaagagtgaggtcgatcccccaagaattgtagttaagtacgttaaaattaaacttttgtttctatttggctatatcaaatattttagagaaaattaaaactagaaaaacaaaccaatacaaacaaaaagcaagaaaagtaatgtgtgaattaacaatgattagaatttagggttattaatttcaattgtatcaatctattatggcctaatataattcaattcttagtaccaatttctatgcaatatgaggtttactcaagtagtttatagtcttctcagatatataaacctcgataacatgcaaattttctactttcatgataaattaaaacatgtaaaaggcaattaaacacaaaaactatataagctatccaaagcacatattatatcaaaatttatccttatttcactatagcataattgacactcacatcttagatctcgtatcgaaataaaaaacaattaattgatggtcaggaaattaaaagaattaagaacgaatgaaatagaacacatagaaaattgggagaagaatcaaatcatattaaaaccataaaaagatgtcaaataatatccatcaatacccaaataattgtctagctactcataatcattgtaaacaattgaaatacattaaataagagattaagaagaaaatagaagagaagaaattggtcaaagactccattgaaaagccttctaggtcacttgttttctctaatttttgtactccataattgcttgctaaaaagtgttgaaaagaggcatttatatagatgaaaaaaggatgagagaaaacctactttttgtagtttaaaaagaggcgggtcgtgacactatcttgtactgtcgcgacccttgaagctcgattttttgtagtgagcttcttgttgtgttgactgataatattttggctactacaactatattaaatttgctaggaatgggacgattcaagatgttttggaaagataaaagagagatctaaaacttttattcaaaatattttttctcaaagtgaacgcatcatagtcaaacgagtgtttaaagatttagacttgattttcgatcacaaacagagcgtaataagtatccaaaacataaaatttttcaccaattatattccaaaactccaaattccttgataattcattatattcatctcaattaacatattcattctcattttaaattcacattatgaatttttctattaaaacctgaaacaagtagaaaataagcaaaattctgcagaaaatgaatataataagtttcaatacacctctgaaatactttataaaatgtacataaaactagtatatcaaattacccaaaacataacctttattttccctcgagtaaagcactaagacctaaaaaaaacacaacataaataaaagaagtcaaacaactgaaacatgagcaatttataagtaagccaaacaagtcaaaccatttgttgaactccatatcttgaaatatttaaaaagtttcttcccatgctacagattcgggtaaattgttaacaaagccgaacaatgatgaaatatactctcattcaaaaaggttactttgacagtaaagaaaaaattcagcaactattgattaccattatttaatcaattttttttaataaattcgattttgttcttgttgcttgttgtttcaagtgtaaaaattcccattatattttacatccttaagagcacacatctcaacacacctttgaaatgccaatgagttgccataacgaacttttgtgccaattctttcactgctacaatttgcctttttcgtgacactatatagtgacacgcagaaaagtgcatgtcactaaagagtcaagag

SEQ ID NO: 223700 - DNA, 1524 bp, Cannabis indica
cacatgcttcatgggaaaacttcacaagatcaagttacccatcctaaaattaccccaagtcaagcacacttaattgtagagttctttcgggatgggctaccataaaacaagatgcacttgttgatataggtagtaccaatcaatctagttaagccctcttactgtgtagtgccatacctacacaatctcagaatcatcacacttgacattcccaaagttatgtgggattgcacagtttacacagtatttctccttatggatcacgggactactgactatcacaatcaccccccttacggggtctgacgtcctcgtcgactacacttccagctaggtcaaaactcttataccatttgtgaagcccctgcttcaagcctccattaggcccacagaccaacacgagtgtttccagcttgctttgtcctcacttgcacgctttctaggaaaacttctcaggaggtcacccatcttgaaattaccccaggtcaagcacgctttaaagtagagttcttttgtgattggctaacataaaataagatgaaccttactaatataggcagtacaaatcaattcatttaagccctcttcaactgtgtagtcccatacctacacagtctcagaatcatcacacttgaccttccccaaacgatgagagattccacaactcatcaggtactttcccttacgaatcatgaaactactgactgtcacaaaaattgatgaagacatgcctcgtagtaataccgaaggagaaattcactacaaaaaaaagtcacaacataattttttttgtgaataattgtgacttttagtcacatcaaaaagttacttgggactaaaacataatatgtaaatataagttgtcaataatttaattttagtcacaacaaatattatgactaaaaacacatttggtcacaacaaattgtaatttttgtgactaatacttttagccaaggatcttttcacatgcatacgaatgataatttataattagtcacaacttttttacttttagtcacaagctttgttgtgactaaaaataagattttttgtagtgacaattgagaaaataactacctaagcccagtaggaaccaaattcgagcggcgaaagccaaatataatgaagacattattaaaaaaaaatcttcttcggtttttttgttggttcctcttcaattttttcgatactcagagctagaaactttccagacaaagaaaaaatatttataataactaaagttcaaaaggggagttttctcttcgattattacaaatttaactgaagagaaagggtttggactttggatccttgcatttggtgaagggaggcgaacacccttgatctcttaatttgattgcacacctgtaaattttcgacactgtaaaatattattcaacattataaattattttgaaatttctaaaaatttaaaaataatcctaaataactacaacatacgtaaccataaattttttctttaaaaaaaaatatctcttgtcgaaatagataaaaaatata

SEQ ID NO: 223701 - DNA, 3279 bp, Cannabis indica
tctatggcgatgtctccagccggcttgttgcaaccgctacctttgcccgcccaagtgtgggatgatatcaccatggatttcattgaaggcttgcctcggtctgaaggggtggatactatactggtagtggttgatcgtttgagcaagtatagccactttatttccctccgccacccatttactgccaaaacagtggcggaagcattcattgacaatgctgtcaagctccatggtattccaagctctattgtctctgaccgagatcgtgtgttccttagtcacttttgggctgaattgttcaagcagcaaggtacgcttttgaagcatagtacggcataccatccgcaaaccgatggtcaaacggaggtagttaaccgttgccttgagacctatttgcgttgttttgcttcggagaaacctcgggtgtgggccaaatggttgtcgtgggcggaatattggtataacactagttttcattcatcattgggatgtacacctttcaaggtgctctatggccgcgatcctccccccttggttcgatatcccttgggcggttcggcggtcatgactgtggaccaaatgttggaggatagggactccttcctggatgatcttaagatgcatctccttcgtgctcaacatcgcatgaagaccacagctgattcccaccgtcgtgaggtacgttttgaggttggtgacttggtgtttgtcaaactccgtccctaccgacagaagacattggctgtccgtcgtaatgagaagttggcagcccgctactatgggccctttcgcgtcttgagccgagttggtgaagtggcctacaagcttgaccttcctcctagtgcagcggtacaccccgtcttccatgtctctcagctccgagccgtcattggggcagcctcctcttcctccacctttcctccacaacttactcctgagttggaactgcaagtggagcccgaggaagtgctgaatgtgcgccatggcaccaacggtcccggtgatgaggttgatgttttgatccgttggaagaatttgcctttgtttgaagcctcgtgggagaagtttgagaccatccgccaccaatttcctgctttcaaccttgaggacaaggttcgagatatggggggggtaatgttaggaccaaagtgcgtttcacctatgctaggagaggtaagaatgctattgcttaagggtagtttggtcttttacggttaaagggtatgattgtaattgtgagtgagaatggtagtttgttaaagtactgtttgggaggtttatgaggtttatgctggtattgagattactctctctgcagcaagagtcttataggctcaatcttgtaatctcttttgcttgaattcaataatactcacagtgatgtttctttctactttccattgttaatctgttactgagaattgaggcagcaggttatatcagactgttttttaagttattgtttgaaacttatttttggcactaaaagctcttctggatgccaaaaaatgtacttaaacacccttttcaaggagtctactatagactatacatacaaagtagaaaagctaaaaaacaaaaatgtgataagtttcctgagctacctcatgcaacagctttacagcatagaaagcagaaagtggagtttgtctgctgttttcaaaacaacagtgtttccacaagctaatgcaggccccagcttccaagcaagcatgagaagtggaaagttccatggaataatctgaccacaaacaccaattggttcatgcaaagtttgcaaatgatactgtccatctgctggagctgtcaaaccatgaatcttatccacccaacctaaggcattataagcatgttaagattttataggaatatcactacaaataatggagtttttaagccatgtttaacaggggtacctgcatagtagcggataagacgtaccaccataggtacctcaattttagcagcctgttcatatggcttcccattgtcccaagtctcaagctttgcaagttcatcattgtgcttttcaagcaagtcagcaaaacgtaagagtatgcaggacctttcctgtggatggtataaatttgtatgttgttagaaacttgatacaaccaatctcatactgggatcttagctatacacccccttttggaggggatgtccacggcggccccacttgagggtgcatgactctgataccacttgatacaactactggagtagaactcactcctaagaggtagcctaaaaaaggagggtgcccaagtaattatatactactaactagtctcatagttggtcaatgtagggatcctaacaaactccattgaagtatttagttagtaacatagagcaaatgaaataagcaaacagttaatagttacatacataagcagtcatctttggccatgggccttcatcaaaggcatttcgagcagcagaaactgcacggtttatatcttctgcgtcgccttcagcaacgtttgcaatcaaatctccagtcctgggatcaaatgttggaaaggttttccctgagaccataagagaaacagtaaatgttacattgctacattaagaaaatattatggtacaattttaagcccttttgttttacaaatcagaacaacaacaacaacaaggtagaaaatctcacctgaagctgaatccacaaattttccattaatcaaaagcttagtataatcaacaccaatagatggttggatgagctcctcagtaacagcagcagtgctatagttaccaatagctttaactgcaacaggaattcttcctggtaataataaaattccaacaaattaaaacctttagattttagtgagaaataggtaaaaaattaatacagataacagtcaaaaggatataaaaagatcatagatgggaaagtaggtgatgagatgtaataaatataagccaaaaagtgaagaaaaggcagaagagtgagacacagccaaccatgtcccaggtaggtaagatataaatgtggggtagtgaaatcatctgatttgcatctccagatacaaaaatctctgaactgttatatcaactgccatgttccatattaggatttatatggggctgtattgaaagtcaaatacaaaaaaagaagaaaacaaaaaataaaaaattgttcatgaaagatcataactattttcttggacccttttggtcaacttttgacaaaactttggaactgtgttgaaaaactcagtagaaattataactgatttaaagtgtatatttttacacaacttaacttaa

SEQ ID NO: 223702 - DNA, 1483 bp, Cannabis indica
taatttcgggatgaatatttggtatttgttttttttttttggtttttttgttgtgtcggtacaaaattgacgggaatgttgtaaaaaaatttctttacactattagcgattgttttcaactgtcgctatttttggtaccgactgtagaaaactgacgcaaaataatgtagtttttgtgtctatgatatataggtcggttttaacaaccgacacgaaaagaatatatgtcagttgcaaatcgacgaaaaatactatatttgtagtagtgtgacattgaaattaagtcatttttaggagtagatgtatccatttgttttattagttagttgtattttcgactagtacatatgtctcttgagagaaagagtttatattatatatataaacgtgttaaaagaaaaatctcccttggcctttatgttgtacaataattaatattttaaattatattgatcttttaaaataaatcatttgtattgtattgtgcatatattattactcaaataaattatattgatagcttgtgctggtgaaagtaaagatgaaactcaagagcttcataaagttttaattttcaaatggcaaaattgcagtaaaagtcctcaagctcgagatttttgtaaatttgttggtcctttttttttaacagatctgttaatttctccctaaaatatcacatgttgatattaaattgaggcataagtccctaaaaaatttacgttgatgcaaataagttcccaaaaagtttactttgatgcagataagtcgtaatctcaaaaaattgtggatatagtctgtaggtacccaatttaacaacttttttgtagttcttaaaacttctacgtgtcaaaaatttattgtttcacaacataaaaattatttaaaaataatttaaacatataataaaaaattattaaaaactttaatattatttttcattatcttttattaaagattaaaaaatattatatatataaaaaaccttctacgattcgccacccacccttctcgatggtggaggctttcgccgacaagtgtcatcttttcatcttcactttcttcctcatcccatcccacgatcccatgcaaaaaactcgaaaaaataattaagcaaaaaaaaaaccctaaatagttgcaccttactccaaccctctccctgaatctattctgtctgtccccatctacaatgggtggtgggttttgagggttgttttgtgatattagcttctctagttcaaactttacttagatcttttttagagcgaccactcttgctaatataaattggagagtcttagtaaagcataccagagctatgatgttgggctgggagtgaacttgtgacagtcagtagtctcatgatccgtaggggaaacactaggtaagctgtgtaatcccacatttcctggggaaggtaagtgtcatgattctgagactgtgtaggtatgtgactacacagttgaagagggcttaaatggattga

SEQ ID NO: 223703 - DNA, 2104 bp, Cannabis indica
aaattgagttgtctttccttttcttgcgagagtcatgatattctttgcaactgggtccttctccaggttctccttgatgcgctccttgattggtgtacccacttggctagctgacatgcccgctaacacctttagtgctgtcaactctgctttacgactaagggcatcaactgcctgattagagtctgcgtgaggaaatggctaacaacagtattgtccgtcttcaccacaaactttgaccccaacaagtaatgcctccacgtctgtaaacaatgaataactgccaggagctctttttcttgcgcagtgtaccgcctttctgcttcggaaagcttgcggctctcaaatgccacggggtggccctcctgcacgagtacccctcctaaggcataatctgacgcattagtctgtacttcaaagggcttgtatacatcaggcagggctaatacagaatcttcgatcatggcttcttttagacttcggaaagcttcttcgcacttctcagaccacgtccatgtaacacccttcttcaacaactttgttaagggtgctgctcttctcgaatagccctccacaaatcttctgtagtaattggctagaccgagaaacgagcgtaattgtttcacattggctggggtcgtccactcttggattgcccgcaccttttccatatctatacggatcttcccgtgttctacaacatgacccatgaacttgatacttttctgagcgaaagagcacttctcccgctttacatacaactgttctttcctcaacttccgaaacaccgttgtcaagtgttcctgatgctcttctaaagtggcgctgtagaccacgatatcatccaggtacaccaccacgaacttgtctaaggcatcatggaggacttcgttcatgagtgtacaaattgtggctggtgcatttggcaacccaaacggcatgacgcgaaactcgaatgccccataccgagtaacacaagtagtctttggttcatccccttctgcgatctgaacctgatagtaccctgatctcaagtccaattttgtgaagtattttgctccactttgttggtcaaacagatcagcgatcaaggaaatggggtatctgttgcgcacagtcaccttgttgagggcgcagtagtctatgcacagtctcaaggtcccgccctcttcttttggaacaacacgggggcaccaaaaggtgcctttgatggtttgatgaattctgcctccaacatcttcgttagttgactcttcaactccttaagttccaggggagacattcggtatgctgctttagctggggcctttgcacccggcaccagctctatttggtgatcaactcccctcctgggaggcagtctctttgggagctcatccggcatcacatctttgaattcatctaacaccttctcaattataggtggagtggactcctccactttttcatcgtacacggcgggagcaatgacaaatgttggcctcttcttcttcaggcccctcttcagttgcagggctgatagtagcttgacttctgggggctgtctcactttagcgggaaccatagaaggattctcacccatgatcagtagattccctgttgctggaattggaatggcccccttctcagctagaaactccattcccaataccacatcaaagtcatccatgcgaacagctacaaggtcaagttgcccttcccaatcgtcgatcttgacattcacttttctggccactccaatcgtggccatggccttcgaattgaccgctttcatgcggcccgcatctttctccagttttaggcccaccctcttggcttcaatttcagaaatgaagttgtgtgttgcgccggtgtcaatcaacacgctcttggcatgcttaccatttaaagtggcctccacaaacatcaatccctctcaagggctttctttcttccgacgctatgcttcttaagagcagccatcaatcgaacggcgcccatgtgcgcgcagtcttcatcctcatcatcttccccacatccttgctcctcttgagcaatggatgcctttatggcactcaacttggactggtgggggcaagcagccgctctatgtgggccttggcaa

SEQ ID NO: 223704 - DNA, 3259 bp, Cannabis indica
tgttgaataaaatggattacattgaatttgagttttatttagggcataaaacccaacaatcctcaccaattggctcaattcattttgcctacactaaaatcatataatttttttttattggctcaattcattttgcctacactaaaatcatgtaatttttttaaaaaaaaaattattttcttgcaaaaaattatttaacaaatatctcactactaatatgtacatacaatattttattttatttatattatcattttatttgtattatatttatagtatacaatttatccatattatatttatagtatattaatattttactgatatcatatttacaatataccatttacttgtagatgtaagtgtggtaatagtataattagaggtatttattggaccacatgatcaaatatttttagacatattcagattttatccaattatatattgaatgataaattttactatccgatctgatctaactaattttagttttccaatcgattcaatatctattggatgttgtattggatcaattatatatgtattgacacctataattggatcagatctggaaccaaagttacaattatacaaagttgcactcattacacttttattttgttcctcaagatgaaaccaactttttttttttttagaaaaaaaaaaactaccattttagagcataagaactcttataaaactcagtgttgtatgaaagtcaatatccatcaaagaaggagtaataagtgaaaaatttatttctcttttcattattattttaaagtgacactcttttgataatttttgcaaagtaataataattttaattttaaattactttgaaaaaaaattattttagaaacacgtcatttttttaactttgcttaagattacgattttgcttcaaatttttaatgaccaaagtccatagggaatattataacatgaatgattaatttatatttcatccgctaatgttaagctttagaatgtgattgtataagaaaaaataaatatgtttcaaaatttgacataacgaagagtttattactctaattttttttcatgagcatttacgtcgtacttaattaggactaattgtaaatttaataaaattctgaatagtttacaatttcaaaaataagttttaaatattttttgcgcacgtgactgttttttcttacacgtgtggtaagcaactgtatgaaccttatgcaaataattaagaattttttgaaaaatttacaggtggggtcctaaataactgcaacatatacgatcatgaaaaaatagactaaaaaagtctcatggacaagaacatctctttagggaggtgtactaatgattttccctaagttatttttttttaaaaaaaaattaaatgattattggttgaaaatttaaaagtattttatattgtagaggcatctatggtgcaccttctactatttcggcattcaggagaatattttagttatttttttttcatgtcgtgtatgttgtagtcatttaagacattttataaaattttaaaatttttaaataatttacagtcactacaaaaaatcttacttttagtcaggccaaaacttataagtaaaaaagttgtgactaattataaattattattcctatgttgtgactaaaaagtctgtggcttaaaggtattagttacaaaaatcacaatttgttgtgactaaatatattttcagtcactatacttattgtggctaaaactaaattaatgataacttgtatctaaatactatgatttaatcataagaaattttttattgtgactaaaagtcacatttagtcacaaaaagtttgtgttgtaactaaaaagttatcactaaaagtagctatattttgtagtgggtataaaaaatagtattcaaataatctataatgccctctttcgaaatctatccttactcttgaatttccaatataataaaaaatatatatatattttttaatatacactttaattaagaaattttttatgaaataaaacttgaaccaaaaaaataataaataaaatggaacaagaagatctaggcttcttcttaggcatgtccattgcacatactagcctcacttagtatatataaaaattattatctcaaacaatagtatagatattataattttgtctaatattcattttgtattacttaactaagtaatgatttgaatacataaaaatatatacattttttatagagtggtctataattatattaattttaattataggtaccagacataaaaaaaaaataattataaattgaaattatattattgttagttgtatggttgaaatatatatatttgagcttttatatatatatcttatagggaaaatagaaaaatttagtaaattggacaaactccattacatgtatatatagtttaaagagcaaaattaataataataggtcaactaagtcgtttacaataaattagaaaaaaaaaaaaaaaactccaataacaatttcaactaaaaatccaataagccatggtcaatcatcaaagaagtatgaaaatatactaggtttcttaatcaaatgagcatctgacagagtccacctattaataattatcggtcaatgatcttccaattaaacttgaggacataacaatcctactatttcaatcataaataaagaaaataacacgaacaacaatgttgcaatgcttaatcattaaagattgaaggtcataacaaagggtatgtaatgatcaggagatccccaaatctgatgatcaaaaagagagaccaagacgtctttgctaaagggatgtagatccattgatgagataccaacaaaagaaaaggaaaaggtcaccaatggtaacatcaagatgaaccatgttccatctaaaaccaacttggcatacatcctaacaaaatctctctttctaactcaatttcatgacattgtatctaagatgagtgtaaaaaaatttctacactgcatcttgagggtgcgtgttaaaattgttagtagttaggttcgttagttaatgagcccaagttagttaattatgtgatttttcctttcttgtttctggttttatgtcttatgcctatgtaaggctaagcattgtaacaaatattttttttttcattcaaattcagattcagtaatacttttttctctctactattttctattctaataaaaataaagacatctctatcgatagaggtatcaatgatatgtacttcacaatcaaatttatatatata

SEQ ID NO: 223705 - DNA, 4107 bp, Cannabis indica
attattttgtttatattttagatctatattttgtgtgagtattgtttagttttcaatagtttgtcactataatatatatttgaatatattttttatgtgttttattttgtatatgagaaattttatgaagaatttttgaaattttttatagagttctttatataaatttattttttaaataaatatatacttttatattatttataaatataatttaaaatttctataaatagccgcacgcgaagcgcggcctggttgactagtatataatataatataatcatttagacatcccaacattacataaaatgtcactcttttataatattgttataggacactaaagtattaagcacaaacgttctataattggttaataattttctataatcttaattaaactaaaataaatgagatctaatattaaattacataataataataataataataataataataataataataataataatattacaccttaaaaaaaaaactagagtgagatggcattttaacaattctcttttatttatggcaaaacatgaaaagactcacatacattcattttagattgttatattactattgttattattattattcatcatttgatgtacaattttagttaagaaattgatatgaatttttttttttttgaatgagtaaagatatgatacatttttttccccaaactaacatatttttcaaatttctaatccaaaccattttaaatatattccaactctgtctaaataaataaactaactaaaattagcaactacttatatttttgggtttccctaaaatattaatacaatgcaagaaaattgtcgaaaagaataatatgatagggattaggaaatggcagcataaactatgagggagcaagtggtcagattatttgcacacaccaataccagcttctctcaaaaccactagatttagttaatgttttgtgaaaatggtaaaatatcagaatcaacaataaaaagcagatttttttggctaagaaaattgaaaatcaaattattaacataagttgcaaataaccatgtataataagtttatgataaaacttacaaaaaaaatggaatttgatctttatgaattcactcaaccaaaaaccttaaataataattgagaaaacgcatcattaactccttgataagcttaaaaccctttcaagctagaccagtcagcatgtattagtaaaactcatttatctacaagattgtgtgtgcatctgtgattttcttacccccaacccatataaaccctcctaccaatataagaagacgatccttgtgattttgatataaatattccccaaaaatgtaagtttcctctacatatcttcttccaatccatccccactcaacgaatagatgtcaaccggtgaaattgtggagccggcagtatgctgtttaaacctttggtctgcggagctatcatggcgatcaagaaaaactacaaccactgtaatgtcatcgtggaaatgacgccttatacctttgtcaattttcttaatgtcatcatatctcatctctcttttcttagcagcctcttgaagagcagctcttaccaatctctttgcaattccctgcaaatcaatatccaagttaactccggtaaaccagtagagttgtaaaactaacttgcactgttatggccatatgaacacaattaagaattggtataacaaatgtgtaaaaaagcttacagctctggggtgcttgaaaacaatctctacagctgtctgatcgcttaattgttcccagagaccatctgatgcaaatattaggaataagtcctgaggtctaagctgtcttacaagtacagaaggttcagctgtcattacaggtcgcttcaaaggaatagtgctccctaactgctggaaaatggggtctctataaaagtcaggcttcttcaagtacacatcaccaatagaccttgacacctaaggaaacaacaccatcagattaaataacatgaaaaaagatcaatcagttacatttacattgaatcaataagcataattgaaagtattgaatttacataataatagtcatctgatcagaaaagtttggcattcatacaaaacctttactttttcaaataataatgtcactttttaagctcttatggtaaactaccaaaagcaaaatgaagacccacaatacctgaataatgccctttattctccaaactccacgggtatataccacaatatgagaatcatccggatgaagagcttcaacctccttcctcacttcctcaacccctacattatgatcagtagacaaacgctctgcaactacatgagttttcttgctgttggaatcttttcggccgaggacagctctggaatccccaagattggccacgtacagaacaccatttgaaatagcaccaacaagacagcatgaaccaactgatgcaatttgaggtctagccggaaatgatcgcttcaccaagcgtaagaattcctcttcagtggcactaaatgccttctttatgacatcagtagacagtcctccttgttccttagaaaactctataaaaattgaacaagacaaacaccattaaacacaacccaattcacaatgaaaccaaagctttctctatttacgctacaaactctgtaatcaaaacctaatccagtgactcaaacaccaaaaacccttcctaatcacaaatttcaggtaaactaaagaagcataaccgaaatgaatttaaagatttgcaaataaagaaatttactctgtaaataaggaaacaaatgtttgttgacgaatctagaagcttcaggtccaccatggccgtcatacacacccacatagataccagatggagaagtaaagacctgactctgatcctcgaggctagaattagcttgaacaacggcgatcgagtaatcaccggcggcatgggacttcaagtctgtatgccaaagaagggcatcgctaccgccgccggtacaccatcggccgaaacagcgctctaaagggcggtaacaggatcggagcataatcttgttggaccgataatcggaatgtggaaatgggtttgagaattgagagaagaatgtgatatagatttttgattgggttaatcccttaatggggtttggtatttggtagtgagaaagaaaaagagaaagaaagagagagaaagcgtgtgtatgtatagtgtgaagagaaagaaaagtcgccgcgttcagtggaaaagaaggaacactaacacaacacaacttatataaatatatagaagagtgttaccgtgaacttcctgttataactttgtaatcaaattttatattcgaaaatacatatcgaaatattttttttaaatttttgttacattagtgttcgttatacttataacattattcatgtaaattcgaatagtttatagtgctgaaaatacgtttaaagttttttgaatacacgtgtaaaaataatactgcaactctaacgaatactgctatcaaaaaaattaaaaaaaattcagcatgtgatttcaaacataaagattaaataagagattgtaataagcactcctatatatatatacactcctatatatatatacacattcgcgtataaaacactaatagctctttcaagaaagaaaaactttcctaattttctctaaattgaaaagcttaaattctaatgtgtaaatataaatggcaattctaatttctaattgcttatattttagttataagaatacttacgtgtagcttactcatgtttattgttattaattagtagtaggaattaatagttttaatctattagttaattgcatatatatgtttagtttttacgagttggcttttttgacacgacatgaaatcgatatgaagtactagcacgattaggcacaaaaaaaatacaagcttgagcacgacacggcacgatactataaattagcacgacacgatacaaaaaatatatcctaaagcacgacacgacataagaagtacgaaaaacatgacacataaatacgaatagactagcccaaaaaacacgacacacgacaaaatctgaaaaaatacagatattaaaagtactataattattattaataataata

SEQ ID NO: 223706 - DNA, 1075 bp, Cannabis indica
gggggtgagatacgtaactaccctaatgtgggttagacagtcacccctcaaaggtgggtcatccactcgagggtggtgggttagtccaagtaattaacttttcaccccttacactcttatggtcccatagtatcacacccaacctacatataaatatggataatgtaatatttgttctaagtatcaaagatatatactgttatgtttttattagtattatttttaggtcacttttagagtatttttaaatagttttattcgtatttagtgtaattttatgtttttggtagttaatatattacaggtttagtcttgaagaaaaatagaagaaatcttagaaaaaaatatgaagaaaaaaaagtcaaaataaattaactctcgcgatgctagagcaccagggaattcatccaagaaaaaatccaaaaagttctgatgcgttctcctaaaggcgaagaaaattggaaaataatagagtagcgcctcaacattaaaattccatgtcagggcgctaaaaggccaaaatttggcagaaatggttacttttgctaaattcatgggtgtgccttaacactgaggtttagtattgaggcagagaagcaaggagagatcactgccaaaatttgtcatttgttggccgtgacacaaaaggatagtgtcgaggcatgtgtgaagaaaaaaatcaaggatatatcatgtacaagacatgggtcgcaacactaggcatgtagtgtcatgacttgcttaggtggaattcaaaaaattggtatatttgatatcttttttatcatttttacggctatttaaaggcgtaggtatttcaaactttttggaggcaattttttagagtatgaaaattatagaaaagaagtgaccgagaaagcttttcaacggagtttttcaacaatttattctcttttatttttttcttgtgttcttatttgaattgtgtcaaattgttacaatgaacatgagtagctaaattgttattaggatattgatggagattgtttgacatcttttcatggttttatatgatttgattcttcccctaactttttatgtggttcaatttcat

SEQ ID NO: 223707 - DNA, 1900 bp, Cannabis indica
taccaagctcatcaaatgtaagatcaatggaagtacgaccactgtaccattgcactagagtatctactccgtacttgtgttggtagggccattactgtacttttgaaagttactgagtgttgtaccacatgcacgacgtaccccttggtactcttgttggtaaaactgtaactaccctaacatcctacactgtactaacacccttaactaaacatttagtagttctagtagtgtaaacagataataacatacattcattcacatatatgtactttatgctatcttagctcgttcctgtgctcatgttgccattcagcttaagtggaattacagctcgacgtttcacagggccctaaatcacaacatttgtaactgtggtgagagatatgctaaaatacttttcggggacttaaagtcaaaactagaaatatccctatcgatgaataacacgttaataccccaaataacacaaaataaggaaaactagggttctaaaaaatggcccaactggtagaccggttcccaaccagaagtccagttccctagggacaaatcagtcgatcggttggtacaggtccccctgaactggaatttcagttcagagcttggaacctgaaaaatgctccccacataaaaatcaaccccaaactctctaaaaacctctagaatacttgcttgaactccaacgaacacaatccaagcaacagaacacaataaacaactcaataatcaaaagcaccattagagaaccaagttaagttctctaagctctgacttgaacaactctcactacaagcaactatctcagctcaaatcaactaaaataaacctatcttaaccccagaattcaaacccaaactagctgcacaactacagaacctcaaatcacacaaatcacgcaataaacctatcttgagctaaagaaaaccatagagaagaaggctaagtcttataccttgaattagaactcctaaccctggttcaaatctcttgaatttcagctgaaagctctttcccccttgctagttctaggtgcttcgagagagagagggatggtagagagtgagatgtgcaaagtttactctaatttccttcaaggataagcatccctaatattcatataatctaatgttcaaattattggtgctcataaaagacaaaataataacctagtaaaagatctttttgcccttaagtaatattaaaatgcttaaaactatccaaggtagtttgatcattttcaaatcccggaaaattcctgacacttccaatgcctaacaatgatgccgcactattaataaaattctataccatacaaaatgtgattctctaatagcccaacatcgctttccactactaccgaacacaatcacagaaaacgagaaattcacatatagcataattaatacatgttgaaattaaataaatttccataatatgtaaatcataaataaataattaattctcataaagaaaccctaattatttgataacccaacatatcaaattaggcggtctttacatttctagttcaattatgttatgtgaagttggtataggtgttctggaagtttttgagcaatttgggatcaaattgaggtggtagtggtgtttttggtgttttctgcactgaatcgattgaccggttcagtgggacatataggaatcaaaattccagttggtccccaggaaaccccacaaaactggtcttctgattggggaaccactctgccggttggggaagttttgggaaccctagtttttctcgtttctctggtatttagggtatcattttcatggatacaaatagctaaatccttagtggtgagtttgagttttttagattagggttttagtgtgttaattacccatttcagtatatgtgattagggcatccatc

SEQ ID NO: 223708 - DNA, 1744 bp, Cannabis indica
attcttgataggaaggaaaaggttctttgaactaaaaccgtatcattggttgaagtactctggaggaatagtaaagtggaagaagccacttgggagtgggaggctgatatgagggcttagcatcctgagtagcttaggtagattttggggacaaaatccttttaacggggggataattgtaaagaccgcatctgattagtactttaaattattaaataattagggtttatgtatgagattttattattatttataaaaatacatattctgggaatttatttgagttcgtatatgtttattatgctatttatgtaaatttctcaattttgtgattgtgttcggaagctgtggaaagtgacgttgggcctttagagagttgtatcttataagatttagaatgctatcggggtatcgttgttagatattagtgttgttggttttctgggggtccacaaatgacttaattacccttgtgggttattagctacttggtaaatagctagaagggtatagtagtcttttggacttaatctctattttgtcttttatgaaaatatatgctgaatatataacttagtaattttaaaagaaaaagaaaaaaaaaggaaaccattttcttgaatagaaaaattgagagaaacctagatttttcgtaagtctttcttccctttcctttttaaccttaaagcatagcaaaggaagagggatttcattgctgtgattctctaagttccagcaaggatttaaacttcaatcaaggtaagaatccctaggttttactaattgagctttagttaaaagttaggttgcatatagcttgagttttgatatttaagttgctgtaggatctaagagaggtttgatttgataatctggagattatttgatattgtttaagtttatttgaactgaatttatttgctaatttgagatttgagctaagttagagtttgagaactcaaacctagctctttaatggtgaattggaaatttgtggggattgttgaattctaatgcttgggattggtttaatatagtatatacaggtattctaggagattttagaaagtttgggtttaaattgaggtgtggaggttggatttttggttcccagtccggaaccggaattccggttcctgggagcctgtggcaaccggtcgaccggttggtccctggaaccggacttccggttgggaaccggcctgccggttgaggctttttcccgagccttagtttttctcgtttttgcgtaatatagggtattggcatcctatttatcgatagggttaatcttagtttggttttagcatccccgataagtgttttagcgtgtctctcatcgagttctcaatattatggtttagggccctgtaaagcgttgagctgcattttccactcaggctgaccggcacacttgagcacggaacgaggtaagatagcgtaagaatttatatatgaatgtatatgcttgtgttagtatagtgttgcatattgaggtggttaggtgttaccagcacgagtacctagggtacgtcgtgttcgtggtataacacttagtaattcccgggagtacagttagggctctaccaacacgagtacagaattggtactttagtgcatttggtacagtagtcgtactacccttaagaacgttcttaaccatttggtgagcttgattattgagctcagggcggcttaaccataaagccgacatcgcattatttttatatatttcttgcatatc

SEQ ID NO: 223709 - DNA, 1804 bp, Cannabis indica
agtatttactcagcaaacatttgacccatggtcgttggatgtttgatgccagattccaagctagcttagaaatcaataccttgttcatatcttcacaccttcgaagtcctaatcctcccgaggcctttggagtacagatctgatcccatgctttaagggccatgaacctatccttttcaacattaccaagccaccaatatttcctcatcaaggcatcaagttgacggcagcaagataagggaattttgttagtggacatagcataaaccggcatagacgaggccactgattttagtaaggttaaacgcccagcatatgagagaagtttcatcttccagccctccaatttcttattcatactctctttcaacctcctatagtcttcttttttccttctcttaaaaatgaaggggttgcccaaatgcttctcatcaccccgaacttgatcaattctgagaatattaagtagatggttcttcctgtcatgattcaaattcctagaaaaaagcacccccgacttggtcttgctgcaagattggcccgaccaatcctcatacttcgaaagacactttaataaggtccttgcatcattttcattagcccgagcaaaaagaatggtatcatctgcgaacatgaggtgagaaatgggaagagccgattgagagatcttgataccatggaccattctttgtgcttcagccttcaaaattagtttggataacacctcttgacaaagaaggaaaaggaacggggataaaaggtccccttgccttaaccctcttttaggattaaacttcttcaaaggatagccatttaagaggacagaataagagacactggtaacacaagccatcaggaggcgtctactactttcattgaacccacttgcattgagaactctgtctaggaaactccactccatcttgtcataggccttatgcatatctaatttgatagccataagccctccccttcctcttttttgacgtattttatgaactaattcttgggtgagaatggaggattccgcaatccatctaccaggaataaaagctgattgaaaaggagataccaagtcctccataagcggatgcaatctgtttgaaagaatttttgcaatgaccttgtaagcaaaattgcataagcttatggggcgaaattgatctaccttcaaaggaaattccactttatggatgaggcaaatgaaagttgagttgagttttgggtcaatgtatcctttgtggaagacttccttgacagtagaacagaggcaagaacccactatatcccaatattttctaaagaaacagcctgagaacccgtctggtcccggggctttcaagggatgtaaattaaacacgactccctttatctccttgtctgacggaattctcactaattcctcattagattgtgcagaaatacgatactcaaagagatccaaaaaatcctcatcaattatcggctgtgaagaagagaataactccatgaagtgggaattaatgatccttgcaatgttgctcttatccttccaaaccttatcttccttatccttgatagcccaaatattgttacgtcttcttctaataaccgtggacgagtgaaagaatctagtgttgcgatctcctaaggcaagccaagtctctctagatttttgcctccacatgctttctaatttcgaccaagagactagcagatcagcttgaattttagactcttcctccttaagagctgtcgaaataggttgcatttgaatccactctaatctactctccagggacttaatatcattaccattgtcctt

SEQ ID NO: 223710 - DNA, 884 bp, Cannabis indica
tattttcactttttaattttaaacatgactatcaaattttggatttttttttttaaaaaaaatttactttcaaaaaaattaaatattttttcttaattatagtctatttatatatttttttattaatattttagacccggacctcgacccaactcgaatctcagatcaagacttgggcccgaaccttgaactgagacccaaaactagacatcgaaccccagacctacatcctggctcgggacctagagctggaccctaactcgaaaccaggacttagatgaccatggtcctggacctagacccggccttgtacaccaagactcggaccacagattcaaccccagactcggacctagacaatagactcagcctaaaacccagaccacgaccccgaccctcgaattgagaccctgaattgggactcaaacctaaacaccaaactaggacctggacccgaatctcgaacaaagaacaacacttgtacctcgaatccctgattcgaaccctgctcccgaagttgggccctagagtcggagcttggaccccgaccctaacccaaatccaaacccggacatcagtccacagacccgacatcgaacccgaaccacggacctagtcctagacccaagagcttggacccttgatcagactcagatccctgacccaaactcgaatcgggtcgggacccaggctcgggcccttgcccaagacccagactcgggccctgccccaagacttagacccagaattggcctaagacaaactcggacccccgcctcaaaactcgaacctagaccccgaccccgatcttggacaggggcccggacccccatcccagtcccaaaccaacctagacctagacatgacttaactaaaaataaaat

SEQ ID NO: 223711 - DNA, 1329 bp, Cannabis indica
tttttaattcatgtaatttttttttcttattttacgaagaaatctcattttatttgttttgtaatctaaatttaaataatacactactatattaatatcacattattttatgaattaacgattaaaattaaagattatattgtgttttcttcggcaagagtgatgttttctcatttttgcaccatttagcttttatgcatatttacttataattagcattttcaggttgtgcaattgctcaattacccaagccaacatactatattttggtaatttaatggcacgaagcaaaatatcaagtattatagatctaaaataaccaatgaaacgacagttgattttgaacgaaccaactcctcccgcatgcacaacaacaactcaaacaaataatgaggtaaatgggtagaacttcaccaaatatgtttgagacttccaaagtctatatgatatattatatagcttgattagtgttagtagagctcgaacataaatggtcgagattacaatctcgactacttttagtagagctcgatcaatgtagtctcaaaagtcttgaaatattaatgtatagctcgactatacggagtagagctcgaccattcatggtcgagatgtagtctccaaattcttgtaatgttagtataaagctcaagtatcttgagttgagctcaatcgtttatggataaagcttgactattatgtttgtactctattgatataatattacatccttttatttaaattagtcaattggaagttttgaagaacaatcagtgacaaatggagaagaaaaatcaaaatcaagttgacaagaagaaacataatcagatggagaagaacaaatagaatcgcatggagaagaacaagtagaattagatggagaagaacaagcagaatctaatggagatgaacaagtagaatccaatggagaagagcaagaagaatctaatggagaagaaaaattagagtcttcatcagtgtcacgagacaaacaatattttttgaatttgtttactttattttattattatttttcttatgttattcagatagtagaaagattatgtttaatttattgcaggtggaaaagatttctcgattggtgcctatattaaaggaaaatgaacattttgagtgcaaaataagtataaaaagtcggatggacgagatcacaaggcacattaatgatgtactaaagaatgacccgactcacataaaatttttcaaagaatctccgttcggccactttctcgatatttcttactactataaacattttagccaagtgatatggctattacttgcgtgaaatcgaagaaaaacttattt

SEQ ID NO: 223712 - DNA, 1259 bp, Cannabis indica
tttgtttagtgtgctaatcaattttctactttgtgtatttattttataggttttcttaaattgtttatttaggctatgtgccttttttgagatggcctcaaatggttttgtctaaattttcggggtatatatatcttttggctcgacaattagcatgttggctgaatgtccatttacatcgacgtttgtctttgtgattcaaatcactctatcaaaatatatacggtaatcatttagcactgtagtctgtactcattaatgagcaaccattaggggtggtaaaatgtatcattgtgtagtgttcgtgttatatttatttgactcgcttctacattttattttaggcgtgtctacccatttttgactattgtctaattttctcaacactaacttaatctgcaagaaatcgtgtcgtgttcgtattgatccactttaacctatttgctattaattaagttggagttgtataaaaatgataaatttcaaattctattaaaaaatttatgtacatttatttatataatttttttatatataataaaaattttaaaatttaaactatttttaatttctttttaaagaaaattaaaattaatttttttaactctaacataaaatcactaaatatatatttttacatagttatattattattaataattttttattttattttattttaaaaaaaatctatcaaattcatattaagcgaattttgtttgacctattataattttttgcgactcattttcaattcccgtctaatttttacaatcctaaccaataaaattcgtataaagttgacatgttatatccaccagcaatcatttctcaagggaatataacaaattaaaaaatatggtgaaaatttcatataaaatttgcagcattagtactaattaaattattacttatgtagttttcttttttttttttgagtaaatattacttatgtagtttaattagttacactttaatacttatgtaataccgatcattatttatttggtgcaaacgtgaccaatgacctatgtggcggacagttataaggcttggctcaaattagagagacattgaccaaagtctagatgtcgtgatcaagacctttgccatgagtggagtacaaattagaatgaaaagaaataaaaatataacaaagtagaatgaaaagaaagaaagaagaaagaaagaaataaaagtccaacatagaatcatcccagatcgatttatttagttaagaatttcattatcttatatta

SEQ ID NO: 223713 - DNA, 2549 bp, Cannabis indica
tatttgtttattctttgtgctgaaggttccccaagttgttgcgtagttatgaacaaagtggcttactcacgcgggtgtaaaattgctcgaggtgcgccggtaatctctcatatgctctttgctgatgatagctacatttactgtaaggtcactgaggaagaagcatacaatgtgaaggagttgttgcatacttatgaggtggcttcggggcaaagaatcaatttttctaagtcatttgtgtttttcagcaataatactggaattgaggtacaagattctatttctgctatgttggaaatttatgaggctggtaaaaatggctattatctaggtctgccgtgttcagttgggagcaataagaatgttatccttggttttcttaaggacaagcttcggaagagaattcaagggtgggaaagggcatcttatctcgtggggagaaaggaggtattgctgaaatctattgctgaagctttatcgagttatgctatgaatgtctttcttttgccttcagatacttgcaaggagttagagcggcttatggctaagttttggtggcactcagattcgagtagaggtaaaggtattaattggatgagctgggagcggttgtgtcgccataaacatgtagaaggattgggattctaaagtttgaaagactttaatttggcatttttggggaagcaatattggagattgttggttaatgttgattctttggttagtaggctttataaggctaaatattatgctagtggtaatctattttctgctgaattgggagacaatcctagtttcatttggcatagtattcttgaagcaaaagatcttgtccatgcctgtgctcaaataatagtttctaatggggaaaatgtctccattcttaatgatccttggcttccacataattctaacagctatattgtctcatggcaccctgctcttgtaaataagtcggtcaactgcctctttcaagttggtactcgcgcgtgggaggaggatgttgtgagggacctgtttgtttcctgtgatcaggttcttatttttttccattcaacttagtgattcagccgctaatgatggttggagttggcgactagagacttgtgggagttatttggttaaaagtacctatatatttttgcaggaatctaaggttgcttggtgccgagatgctaatactgagttttggaagcggttgtggtcattaaaaattcctaagatcagtaattttttatggcggctgcttcgggcgtgcttccaacttgtttttaactccaaaagcgtcatgttcccgtcaatactaattatcctttgtgcaactctagtattgaaactattcaatatgcattggtggaattctcgtttgcaaaggttgcttggcatcgcatcatggtggacgttggggctggggctgcaacattcagtagctggttcttggggattttcactagggggcacgaagttgaaatggagaaagtagtggtgttgagttgggctatttggcgtgcgcggaatgaatttgtttggcaaaagaagagttggcttgcttcaaatattgtaacatcaactagacacatgcttgatcaatacaaattcgctcaaggaaggaagggtctttcgttgtctctgttgaatgaaggggcagaactgtgagcgttggattgcacctgtgttaaacaagattaaaggtaatgttgatggggctttatttgaacaagaggggcgatttggagtgggctgtgtagctcgagatcatcatggtacaatagtagaagctttcaagaagggaaaggttgggtgtgtccaacccgaaattgatgagatcatcgacatcaaattaagaagctttgagttagattgcaactcattcttgggacaatgttgtgttggagaaggatagcttggtgtgtgtccaaactgttcaaagcaatgtttttatgtcctcacagtttggtcttattgttcaagatattagaaatttacttttggctttatctttggttgagttgtgttttgttaaacgatctgcaaacaagttggctcattgcttggcaagagactcgtgtttctctgtaggttgtgtgcttcagttggaggattgttcctctaaagtgtgttctattattttgaacgagtttattaactaataaatctcctgattttattctaaaaaaaatagtgtacttggcttcgggtcgggttatacaaattactcatgggttaatttgggtatgactacttttatttgctttattgggccttattagtctttttgactatctcagtgggctttatattctgtttaatagttgtaagtactctttttgttaatggtttttacagaaaatactgaatttggggagcacttttatatttatacaggcacacaaattttcttacaaaaatactgtcctcgccttattttttttttttttatactgtacacaccttaaaacgcataagaagcctccattttcaacatttacagttcgaaccaccagaacagctggaaaacaaaactataaaataaaataaccaaataaaat

SEQ ID NO: 223714 - DNA, 1309 bp, Cannabis indica
ttaattcaaaaatttcatagaatctcaattctcaagtaattaagaaattgtaaagaagagtataaaaagtttactcaaagtgaatgtgcaatctacaaagcttccaagagttgatataagcttcaaaaacgccacaaatgatcctctttcatcatataatttatattttgcttgtaattaaagggaacattatgattaggatatgttgtaaaatacgaaaaatattttttgatttaagcatttatatattataatgtataacttgggactcgaacccaagatctctaatacatacgcaccctcctatgaccacttgagctagcctcaagtggttgaaatatgaaaagtgcaatgattggaaaaaatatttttttagattttgaagtgtaattctagtataagcatgtcattctcggcactgtaccaccaagttctcaacaaccaaagtgaagtgcaaactacacaagaaagtttctaccgtatagtcataccgctaaaaactcgaggggcaaatgtttatctaaatttttgacgacgatggtgtgacaagaataacgacacgtgacacgaagataccaagactgaattgataaagaatatgtaaagtcatgaccgttaatgtggacctttagtcgtaatctgttgtcatgattgttgaaaaaaagtctgacggtcacctttcttcctaatttgagcaaggtggttgcttctaggaggacggtgaactaacaccctcacagatgggataaacgatcaccgcacaacttagtctaggggtagatgccactacccctaccttaaatgtaatgacatcctcaaagattgatgagtacacccttatgacaacaaggctacccacaacatcgaaggtcaattggaaggggtctcgggggtatcaccccgagatggcaactaacattcccttcacgtggggtcttaggggtttcacccctaagtattaacttctatcccgagaggaaattaacggtcataccacactccgagggagaccctcatcgccagtgactagttcaaatattcaaaccctacaagaagctcaaaggtggttacgaattatccacaaaaatagcgggatattaccatgaaaatcatatttcaaccacctccgaaaaaccaagaagatagttgagataaccccgcattggtcgcgtctcctgaagcaagaagcaccgatttttttctctatataagaagtcagccatgacatgggaaagggatccaaaaattggagtacttagagaaaaaagaactctgcaattgttatttttcgcattcaagagtttgtttt

SEQ ID NO: 223715 - DNA, 2208 bp, Cannabis indica
tttaatttaaaaaaaaaaaagcacacacatttactttttagaaaaaataactaaacacacacattccatacaattttttctaatatatacatttttcactctttcttcataaaattaacaaacaggcatccatatcaaaaaaatgatactctaaaatttattcgttacgaatgatattaaatgaacaggatcagcaaaagtaaaaagcttacccaagaacgattacttagaacatattcaagcaaatcaagattgcatgacatatgcaatgtcttccaaacccttttgttggtggtcaaattccccaggaaaacaacaaacaatgatgtcttcatatgcatatctagttcaaattcctttgaagacttggctttgaaattagtagtacaattagagttactataattcccattcccgtcctctgtggtagaactactatcatctatcttctcattctctgtgatactagagactgataaaaaggaccatgatctgcctgtcctctctaagtcagaaaaagtttctggtttagcattaaccaaaatcatgatgtctccaggcaaagttttgtaaggctctttgctcttatcattgaatctgttcctccagtaatcaacttgaacttgataaactttttctccatgtggcttagtttcatcaaaagcaactaccttggcataaggtaatctatacagcatgtccatacttgagtataactgcgctcgagtttcttccaacaaagggtagacaaaagatcccaaataatgctgaaccgattcaaatgattcaggaatcttttccacctagaaagaaacaaagtaagtttattagttaagtaaagaagcttgcaacttctactcaaaaacaaaatgaatggtaaaagcccaacaagcttatttttaagagttttatagtcaaaattcagttgcaacaaacacagtgcatctcacaaatcatatcaagtgagatttggaagcataaaaaaaatggggataggaaagcttgaaatgcaccaaaacaatacacctctatcaactaaaaaatcctcagtatcattcatttaaatatacacataaaaaatgatttgcttacatcaaattaaaacatgatatgaagatcccaaatggcattcacatgatcagaagttatcccaaaatgaaaatagcaggaaaaaaggggactaaattcaaactacaaaaatcatacagagaggccgacagcttaggacacgcatatacaaactaaacaaattagtttagttatataaacgacatttgtatctattaatctcagaatctcatacttgcatcaaaagtaagcaattactaaaaatgggttttcccctatttcataatctaatccatgcatcaagaattttgtcatcacaatttaagagcaatatgtcaacatatacctccaagaatccagaaattacaattctagaaaatttaaaattcaaaaacaaacaaaatgaaggattgtccgtaaagttctctattatagagttaaatgttactaaaaggccaaacaataaagcttcaagtatccaaaaagctgaacaataattctgtgaaaccccaaccaattatagagcagagaaaagagcaacatgcatattaaacaaaaaccctaagagaaataattatgaagatgtaagaacaatgttacatatataaaagtcagagtcagagtgagagtaaagaaccttataaagattttcattagaaatgtcttcaagagtccaagaaagcacaatctgagtcatggcacaatctgaagtttgcccaccttccatcatcatctcctcacagctcgttttcactgcattgaaaaacctcacaacatttattcttgaagaaaaataggtttcttggcaccgaagcttcatgaaaacagtgaacaaaaatatgggtatattattattataaaaaacagagacagagacagtagtatcataatcatttccatggaaagaaaacgaaaattgaaggagacaaagctattacatacattcatattcatcttcatagattttgtaatgtctccattttcgaatcgattgttcacatatttattacagtgattacattccctttttcactgttaaacccacggaaagatttatagccatgtgctagttgtcatattttttctcctaataaatcctattttatatataatattgttataaatagtattaattatgtg

SEQ ID NO: 223716 - DNA, 1814 bp, Cannabis indica
tcgtgactatgggctgaagacgggatttttcggcagttttgtaatttcaccattcgaagatatctacattattttctatataagggttttgtgttttagaagtaaaatactcagaaattaaaccctagagctgaagaaggaggcaaaggaagcaattgtggcgacccagagcaagatcaccaactagttctttcttctcccttttatgtttatatattaatttctgtttcaatttttatggatgtgaacatgagttttttttgaactaaattcccaatttagggatgtgatgaatgttagatgatatttcttcgattcagttaatgtgattgttagtttttcttccctatattgtgtaatttgttcttatttgttttaattatatattttagactgaccatcttaaatgtgatttatgatcctaatataaaatcatagaagtgaatattaggaatgctctaataggacaaatataagtttggatataaaacgagagtatttacgtagcttaagtgatttttagattatgaatttaatgcaagttatatgttaatttacttaagagatgcaagtagataatatatgatttaggaccttaatgatctgaaaagagttagggttaatttgataatctctcatcaccgagagagagaactaataaataacactaataattggaaaactgaactaacaggattcatattcctaaatattcatccataattcattacactttttattattattttcctacttttcaatatttagttatttatttattcaaccttattatcgattctgccaaatagaatcaagaatttagttgattggtacttagctacagtccacgtgggagcgatctcacttatccgagtattacttgttaaaacgatacatatacttgcgtgttggatgtatcacaacaagtttttggcgccgttgtcggggactgttttagttgatatcaatatagttgaattttattttaatttggtttttttatttaattttgctgatgttttacttaatgtgtttgacctgcaaggtaaatctcaatgatataccttgtgaattttgttcaataacacaatgagccattctattctgcttgggggagatttaaggagctcggtgagagatgttatcccaatttgtcaagtgggtattttactatattcttctataatggacttgatgatgaaacaagaagttgggtggataatggagcagaggaaactggagagtctttgttaaggagaggccatgaagatgttgaatgacatggcagattttgactacgattggcattgggatccatcacttccagattggactcaccaataccctccttattgtccaaactcaccccaaccaattgaagaagaggagaatatactatcacttccagaagaaattaaccacttgccaaacatggtaagatctctatgtgataatctaaaggtgcataattcagagtgttttaaagacaataactcaaagaaagaaagttatgagagttgtttgaatagtgtagaagcaccattagatgaaaacgtagaagaggctgagcctagaattgaagagaaagaatcccttgaagtggctgaaaatttgggtacattggatgcttgctcaacaaatgatgatctcaatttagtgaatgaagaaaggtccatcctcaatgatgaaattattgaagatcaaatcacagtcaaagatgtggctggtcatgaggaaactaaacaaccaattgagaggttatttgagaaaaacaagaaagatgtgtcattagtagtagaagaatcacttgtagt

SEQ ID NO: 223717 - DNA, 1474 bp, Cannabis indica
taattaatttcttatcataataagtaaccaaaaaagttacttatacttttgaatcttgtgctttttgtatctctttttctttggtcggcatgctagtattttgaattttggtgggagtacaataatatttttgatctcatatcaagtatattcattacaagaaaaaaaaaagggtattagcacgactaaattagtgccaacaaactcattttttagtacccttcgttttattggaacgacttgtcgtgcccttttattcgtgccaaaatgtagcaacatcacaaataactttgtgccagttgcctgaacaaatagcacgacaagtgtagtgcccacttaaaattcttaaaattgtcagccatagcagtaggcaccacaagagtcgcgcccattatttattattttaaaaaataattttttaatttaaataaatttatatttatatttaaaatatatattaaaactaataaaaattacaatataaaaaaatattttctactatataaattaagaatcaaaataataataataacattcaaacaattaaatacaactactaaaataagtgctcaaataaaaatacttatattgtcacattcaaacaactaaaagaagtgttcaaatataaaatacttatattgtcacactcatacaacaactaaaataaatatttaaataaataatacttatattgtcacaaataacaatactataatcccaattgtgtggactcctcatcatcatcatcactattctcttcagactgttgttgtagaatatgcgatatttgtggatagtaaggctgctgcaatacttctggcatttacgggtagaacgactgttgtatgtgtggtatttgttgcattgatgtcatcggtgatgactgatgcatttgagacatcggtggcatatgttgcatcgatcgcatgaaggcatctgctgcatatgtggtgtttgctacatagaaggcatgtggtgcaaatttgacacatactaaatatgtgcaatctgctacatcgaatgcatctagtgcatctgtggtgtctgttgctgcatttgtggcatctattgcatggatggttgttgttgcatctgtatatgtggtgtctgctacatctatctctggtacattgaaggttgttgctgcatctgcgatgattgttattgcagatgattgttattgcatctgttgagtctgtttcatttgcgatgtttgttgttacttgcagctgcaacatcgacgaggacaaccaaggaaaagaggacattagttgaggtgatgacaaaggatgcataaatagaataggactttgctgcgcttggtgatattgggaagtcctgggctgtgaagatgaagcagacccacctccatacatttgaggttggaatgtctatgttggcggtatattggcattctgaacaactcctctttaataggtagacgaacatcaggtcccaacctttgagacatcca

SEQ ID NO: 223718 - DNA, 1784 bp, Cannabis indica
aaaaataataataataaaaatcatgtagtgtttttgtcctacattactcatatgtgagtaatttgtagtgtttttgtattatttttttttaaacagtatttaaatattatatttagtagctatggagtcttaacataaaattttatcaaaaaaaaaaaattaaattacaaatttaaattatattatataactttttaattaaatataagtttaaagtattaaatatgtataattaataaaaaataaaataccaaataattattattgaaaacataatattcccaatttaatttgttcatttgttcgtttttgattttttattttttttttgttttagaggatctgttttgctctaattagcgccattttttaattttgaatagataaattacaacttattttttgagagataattatatatgaggcaccattttttttttttgtaaaacaattatatttttacgtttaattttttttgtttacatttttacggttttctatagaaacaacagaatacaacaagaaaattatataaaagtaacataaaaataacatcaaaacgataacaaaaataacatacagataacaaaaaagcaacaacacattaacaagagtacaatataaaaaggccgcattttctataaataaaattgaaaaatcgtaaaaatatttaaaatttcgtgaaattgtatttttgtaatttttttattatttttttgtatttgtgaactaatcccctttttatatatataattgtaaaaatcataattatactaaacattgtacctaaggatgaaaatagaatttaaacattttacatgtgcttgttttattttacacatgcaacatacatactattttaacttcaacaaattttgaaaagggacaacatgactattataactaaaatatacaataaatatcatataaaaaaatttaaatagaaacactcatatcgtaagtccaaataactatattattatcaaaatatcctcttaattaataagaacaaaaacaattttatcttataacgttattatataattaccatagagacactactataaaatacacttttagtgtcagttcgaaaatcactaaattttaaaaactgacactatagaacaccctatgttttaagtatcagttttaaactgacacttataaatcatcaatagtgtcggttagtagtgagtcactaaaaaaataaccgatatttaaaagagaaatactagcttaaatgtaatctcttaagtctccgttcataatcgtgacttcagagaaaattttgaaaagaaaacaacgagatcttaaccactttcatctctctcgtctctctcattttctttctcagaccaaaccaaaatccctagcccctctcttgtttctctcgtcctagcgcaaaccccaaaaattagatttttgtgactgtagaataggtgtcggttttataaaccgacactaaaagtataggtgtcagtttaaaactgacaccaaaagtagattttgtagtagtctagacgtacaactttattatatttttattcattttgcatgtatattaatagctatagttatattgttcaaaaaaaaaaatagttatagttattagttttgggatattgattgatatagtaaatttgttttgttttttgtgtggactagataatagagaagacactattgagtacataccgggaatcaaagccattgagccgaaagatttggtatctgaaaaaccgagtttttgcaaatgtcagttgtatataagaaaatataaaaac

SEQ ID NO: 223719 - DNA, 3527 bp, Cannabis indica
aattagtttagggcgttaacaaaaacacattttaaaatagtgagtgggagagggttgtcatctgttttgaaacacatggtctccattattagtccaacgccgagggtatgggaagggcctcgagacgtcttcatatttgctcccctagggaaggtgttgaaccatacattgtcaagattggcttcctctatggatatgacaaattgatgtattttagtgcgatattgacccttaaggtggcaccactaagttaagtcatggaatttgaaataataggttacactcacaaagtcatgtccttgcctttgacactaggggacataacttgaccaaataaacaatactttattttgtaaggaaaataagatttattttagttacaattaataaagacaagaataagtctggtagattattcgatattaacttgactgactctaagatggaactttaatctttgaataatcttatcgtggaatttctaaattattttatgtgtttttctaagtgtgctcatgcatcatatttaaattctaaacttgatatttattttttatttatggtacttatgttgtatttatatcatattgcttattccacgttatttatcttttattccagtctaataacaaataaaaatggaacaacaattcaatattgacacatatcatattgctatgtaaataagtttgatggtaacttctaattcgaatggagaattgaaatagaacttctcttgcaaagagaaaatctatttcaccttgtcattgttgaaacacactagaaagaaatgtgtgaacattcgagttacgtagtcgggagagcttataacctatggcaaaatgataataatcgtgctaggtttatcttgttgacttcatttaatgaagacataagagatcggtatgagtgcttagtctatttctgtgacatttggaaggcagtacgcaataagtacgttgtcgctcatgaccaattgacctatgagagaaatgctcatcctaataagatgaacattttgtcagagttacgaagctagagaggaaggtaaatatgatttatttttcttcctatgttattaaataatggtgtattgaattattctaaactactgatattgttttctctctttcttgtagatttgtgaacagacgacgaagatgattcaaaaagtgggacttctataaagttcgtgatggaagatgattttgaaagaacaatgaagaagtcaactttagtttaaaattttgaagaaaatttgtttagttttattgttctaaattttagttgcacatttaaagtttgttttatttaaataattttatttcgaacactttatgtttttttcaataaaatttatttaatgttcaatcttaagtgtgaaaagtcagctaaacacttcaatgcttgtagtataattctaaaatcaaattttaatatattaattatttattttgactaaataataaataataaataactatttttaatagttacttatcaatgtttttttacagttaaatttaagatgagttaaaaaataattttaattctatatgaataaacttaaagattaaatgagatttaattgaaagtgttaaattactattcaaacataaacatggatatagaatttcattccaatcatgtataatcaatgattcattaaggaatcattaatagaaacatattcattcaattaggttgtctaattgaaatgaactcatatttaaacattcaataattgaatctattaagtgtaatagtttgtaactaactatttaaatcgatatgagttatgatttaaataaattaaaagagttttaatggatgtggttggactacatcgagattgagaataattgattgaaagagttcatacagataaatctcaataaagatgacaatttaaatgaggataattttgaagagtcaaaattaaattttaatagtcaaaaccatcaattaaattcagaagtaataaaatatttagtgagagtatactactcattaaaatagaagatgatttcgagaaaactagattgtttttcttagcaacaattactgtttctatatcaaatcatgatttccaataaaactaaacccttttcaatgaatgagatttaatgaaatacatggtataccaaggaaaagtttgaatatccaactaatttaaattagtaaatgttttgacatatggaacatcatggtctaataagaaataaattaatgagaaagttaacactttctaatttcaaacagccgaactatgattattcaataatcatgcattaatagtcttattgaattattcaatacataaaaatgatattgaatattaaattttaataagtgagaaactttaaccttattaaaatgctattgattagagtaatcaataaaatagtacatgataaagttcaattaaacgtccataaagagaaggatgacttggtcattgacttcataagatggatatttaagttattatatttagattttgaatttcgatgagattgaattcaataataaaaattagtaattattagatatcagatattcttagaaaataaagtgatagatatctataattaataattactaattggaaattaggggatgttattaagtattggataaataatttaaaataaatattcaaaatatgagatacaaattttgaatgtcataattgtttcactattgaaatttatggatacttgtataataagattaaacaagtaataatttttaaatcataaattaagaacattcttaattaaaatgatcaaagacggtggataaataaggaactatctaattaagtaagagtattatatatgctgggagtgtatctaaaataccattcaaaaggtgaatatatttgaaagagttattagaatttaagattatgagaaataattaatttgaaggatatattatagtatcgtttgagaaatgagaaataaatattcttattaattataaatcttaaataagagaatcgcttagttatgacaagtgataaagacggataaggatgtgaaatgaaaacattcattgtaagtatctgacttgattagttatgggatcttttgagtttattaattttcttaattaatagaataaatagatatgactaatagaggattctagattaatcagtttcaaaacttaattttgaacactagaatttaattctatatattaatttaatgataatgtggtggtcctcgagatttggtgctacattatgtcgatggtctcgttcatatgacttaaccagaatagtcaaatgcgatagagcatctataagagttatagaatgagttgcacttacttttagtgcaagtgggagattgttgagatttataccctaaaagcaagtaattaatggataatttattagatattataagaaatataattataagatatatgatatattaattataagagtataattattaaatacctaaaaatttcttattcatatggagaggtataatcttgtaagaatgtacaag

SEQ ID NO: 223720 - DNA, 2917 bp, Cannabis indica
taattagggtcaaaaaatggtaaagtacactaagaactattgttacgtaccttgagagtcatctaatgtatttcgtacatcacggaatatattctgtgaaagtacaacaacgggacaaaatcgtatccctatatatataactgtttatcttagttatttaaattattctataaatttttaaaataatttaatgtgttgtaaaaaagaaaataaaaactcattttgcacttttacacctttttaagctttctaagtactagagaacaccacattcctttcgattttcaagaatacatttggagacttcaagcattcaatcttcgattttggctttggacatttcaatcagcaactctaatagtgagtaagtatcttaatttatgtacattttacctcattttcttgcatttaacattacatatttttacgcaaaaaaattgggtttatgccataaatgttcttcattattcaagtttaaacttgaatttatcctaattattgttgctaaatatgcttgctcagggatttaattgctgaattatcgatcatatacatattttctttgagaaaacttgatgaacttaggctcgtacggtactttggcaatttctaggtttttctcaatctttgtcaagttcttcgtcatttggatggagttctttccattgatctagggatttgtctggtcaaaataaaaaaaattgtttcaatttgaactcttcacttttgttcgatacatacctatttcttcttttgttgatgaatccaaacgactataggggaggtaataatcatattgaggaagaccttttacaattactctttgaggaccaaccaaaggcccgtgcaaaatctcctctttcaaatgataattcttcctctagctttaaagagagagaagtatcaagcgacaattttaagcctacgataccactcatttagcatcacttttatccagactggattggaggcagcgtgtacgggaggtttgtttgggagtaaaatagaggcttaaggtgatttttaccctctaactggacgtatgttgttcgcacaggtgtcccaaacacttttccagaagcggatcccaaaccttcactttgacctagggtcaaggtagaaatcatcattgctgtcgaagaccaccctttatcaagttattcattccgtttaagaaaagtagctcgtactaaacaaacaatccggaagatttgcctgagagactgggagttcatctagctgatggccaagcaacacgaatagggcagggaaaactccaaaggagaagacgccttgcccgtaggggacccaaaagtccaagaagtcgaagagaaagtcaagaatgataggtataccatcaagcgttttgaaggtgccagttggtggtcagagaacgagtgaccttttgatttttggggccatcttttagtcatatgcatcaatacacagatgaagaattcgacgaggttgaaccattcgagcatcaggagccagaaggcctattgtgggtctccctgccatcgagctgacaaagaggtgccttcaaaacttggataggaagggccttcttggggatgtacatgtatttattccctttgagggacaactcaccaacgatctaggcgagggagtgtgtgtgtggtccagcccgtatgctgagcatggggccctcctatcacttcactcactttttaaagttggtcggctactacaaaatttccctgacatagttcacgccgaatgtaaatatctacgaatgtttgttctctacgcgtagcaaggatgggggagccttctgagcatgacataaattagttctaactgaagtcttccctgcatcacgagagctcaggatacttctactttttgcagttggagtgttcgtggctgatcgagacaaatgagaagcatgtcaataagatcagtggtatcctccacgactactatatggtcaaaaagatgatgaccaaattctaagttttccaacgtgccaaaacatacatctagcctactttcacacttggccttagggatagggccttggccattttaagcttgtctagttctgcttggcaattatcttgttgacatccttcgagaatttaaccaagtatggactctattcgagcctagacagtctgttccccaaaaagccctctgcatcggtaaagacattctctcgtaagaagaaaaagaccaagaccaacgagattaaggcttcgcatgtggaagcacccattcgtctcagggttctcaaggaagacctgttcatagggtcgtgcatcatattaaagggaaaggaaaggccatctttgaagaaattgaagaagaatcctaagatgatgatgctccttcaattcttatttgggagtgtgctcctccgtaggttcagggtagatattattaacagattatgtaattttattaccccaaccattattatgatagtttttcctcttttttatgcaaaaatgtagagcaaacagaagtcctcatacaaaagaaagttgggtggcaccttaggcaaggaaagcccaagaaaagtgcaaaaattgatcccaatgtctcttctagagatggggtggtcatcattaacattgaacaagagacggccagaaccaaatcctttacgaccaagaacttaaagggtctgcccctagctcctgccttgctgactcaataaccaaaggacaaagctgaagccacggtgcctgtaaagctaaagcgtgcaaggaaatttgcaacaattaccatgaaaggttccgtgcggaggctggggagctattgggaggagcagacactcttttgactgacttcttgatggggaattcgcttaaggactgcaacaaggttttccttctatttttctaattttatatttgtccaatccatttcgtgtcttctaacttggctttat

SEQ ID NO: 223721 - DNA, 1796 bp, Cannabis indica
agaacataaaccaagcaacaaaacatctccacatacagagaatcaaaaattaccattaaagaccaaagtttgagttctaaaactcaaacattttctaacaaccaaatcaagccacaaactaacatcaattcaactcaattcacctaattttaagcttagaatatagtctcaaacaacatgaatcactacagaacctaactaataaaaaaacataacacacctaacttgaaacttaagaaaaacaataagagatgagcaagaacattaccttgagtttgaaatcactaaaagcttgctagaaatccttgaattaagcataaaagttcccaaccctagctggttctaggtacctcgagagaaagagagagagtttagcttttcttgatttttcttacttttggacaaaatgaataaatctaatggttttctaatttaattaaaacaatattcagattattaaaacataagtaaagatcactaaaggacacgaattaaatggccgaaaagatcattttaccccttattaaatcaaaaaaacttctaagtcttttaggagtattttggtcaataataaaatctcaactaatttcaacattcccaatgcctaactatactgccccgctactactacataccaaaatttgattctattggacaaatgccgcgttctaatattgtcaggcacaaaacatgcaacaacataaaattttatgtatgacataaacaatacatctcgaattcaaatcaatctccagaaaatgataaataataattcttattctagtttcataattaaaccctaattatctactaatttctaagtgaaaactaagcggtctttacactattggtgtcagttgtgtgctgaagcaaataacttttcttcaaactgtaatcagtgttaatttgtttattgcattagttatagttcgacgcatatgtgtacgcaatttagatttacttttagtgtcggttataaaacgacgaatagttgtaggtaagggtaaattgcaaataaatctacaattttccccacctgcattttcagattttacaattggtttgttaacaatattttcatgcactaacaataacatttataatataataaagataatatttttcatgtaacaaataattaatataaaaataaaatatatctaatctaaccaaaaggaacaaccataaaagttttattctatacatcataacaaaaaattgatataactataatgtatatcaataatacaatgtataaccaaaataatatttatataaaaatattgtaacatattacgtttatcagagttacttacacttaaaaattgcaattgatgattttctcatcaaacccaacaatgatggttagcattaggacaaaaataccaccaccaccaaccccttcaacactccaatgatgccccaagaaatccagttatacctcccaccacaattcgccaaccaaatttcatgtcttgaacaaaatttcaaccttattttcttagaagaaaaacattgaaaacacaagaataattcaaagcaaaataccaaataccaacatatttatatatttgtagaacttacttgccaaacatgactacatcctgatcgagtgactagatgtgaagaattattcttggagagtcttgtaatataattgggatcaataatatattttttattcaatactacataattgtgttagaagagaggattttagagagagaaaaagtttattttattgatttgtatcttatgaatattacaagagaaagaatacaattatttataggcaa

SEQ ID NO: 223722 - DNA, 798 bp, Cannabis indica
tatatatatatatataaggaaaagctccacagtgtatttatatactgccctcctaagggtttgcatggttttgttcaactttaatttcacataatcatccaatccaaagggtttgcatggttttgttttgtctcattcccacagttggatgatctgatcatctcaatcatcatttttaccattcttactcaacactagttgagtattgtattttaccaaggttgagtcagtctctctgatcaataatgatttgaagttgcaaaagaaaaatcactgttctttccacttggtaaaacaatcaaaacacttggagtgcatcgcatcattcccctttaatatagaacattattattgatcatcactttctatttctagcaccatcttataattaattagcaacatgtcctaaaaattattactttaaattatgtaagacctaatagtaagcatttaatttattggattgcttgagaatttttgttcatttggttataaatgtaagataatatataatctcatttctagtcaatgtggaattaataaaataataatgtaggtatttaatcaataataaatattataaaaattataaacgtcgatacacgaaatttatagaggttcagctccttttaacggtaatagtctatccctatttttgttgtattacttttacaaaaatatatcaagatcacaaggtctgacaaggtgagtttctcaatatctctcgaaaaaaattataaatattttaaagtgctttctgtcatagtgtgtatgttatactcaattttttgcaaaaaa

SEQ ID NO: 223723 - DNA, 1204 bp, Cannabis indica
attggattggatctggataggcctaaaaatattagatgtgatccaatgaacacccctaatcactaggtggcccaggcaccgagtgcctaggtgctccacacgggaagtgtaccaattctggttatgatgcctctaacatgttcgtgacatgtcttattcatgtataagtaaaaatattgagccatttgcactaaggtagacccaaaagcttaaacccttaggtgggaatgtcaaccttggcgctgggtgaaaaccctaggttcctgggttgactttcaggttgttgttttatcttttttcagtttccaagccttagacgtggattcttcttgtctacttggtttaaaatactaaaaaatggtgagttggaaacaatttggcggggtccaaacaaccattctagagttcccagaatcaacttgagcgtagggttagggacacctaatatgtcgactgttatgactcgggactactcaactctgaaatattttctttcttgtcacatgtcaaaaattgtcgtctacgtcaccagggtcaatttgtgggtaaacacttaggtatttatcttcaactaataattaaacttaaatatttatatcgcaaattaattacttttaaatcattacgcttaagtaactaatcagtattaattttgacaccaaagatcacatttttcactaactgatcattatattgtggtcgttaggatcaccttctattaaatttaacgaactcttcattaacttttattgcactaaattaactaatgcaaaatagtcttttatattaaaagagcttttgcttgctaacttattattgcaaaatttccatcataatatgatcatgaccgtccaaacagatcatatcagaggaaaatgtgcaccatttagtgttggccctacgaaacagcaaacgacccaattcaaatttaacttgtaagaatagagtggtcacggatctttcttgagatttggagcaattaagatataatataatagcaatgttcataataataataataataataataataataataatagtaggtaaacattattttagaccatgtgttttgtaaaagttattaattggattttctgttttgttaaataacaaaatagaccatgtattttctaaaattatacaaataggacattgagctcaatttttaacaattttatttttaatgtaaccaactttaaga

SEQ ID NO: 223724 - DNA, 1728 bp, Cannabis indica
agctaaccagtcttcgagaagtgcctagtggtgccaaagctaaggagaacaacttgaagaagagtttggcagttgctcagaagaagacttcagatgtttaagagtcttctcctcttgcacttgatgagaaaaccttagcgactactcagcttagagatcatgtcaagttcttgaaagagcaagtgactaaactcgaagagcaagctgctattgacgtcaccttctatgatagcttatgctttgatgccatctacaatgcttggtcatctaatggaggagcttcgtcatttgattggtcaggtttccccgatactaaagttccgaagttcataaggaattgttagcaacgtttcagtgaagaggctctccagagagtagtttttaccttgaacggtggtgagctagttgctaaagaagctagaagagttgaaggctacagccacgagcatcccgatttcccctttttgcagttgaagtgccaattgtagagagtgaggataaggatgaagctaccattgatataataggcttctaggacattgtctgagtatgttcttcttttatttttggcttttagctttagtgtgttagttggtcgtctcgggcaatttttcgatgtggataagccttagtaaaatgttatcaaaattatttgaattaaattagaaattactctagcttaataaaaaatttattctcacattgctcttttattttactttatagttaacgcttgaccatttaacacttacacatttaccatgtcttaagaaactcgatcattgggagtatgtcactgctacataaagttgtctttaccatgagattacttacaaatatgtgaatttttttttgaatgatcgtgtaacaaatggctctcgtatacgataacataacctatgtgcccccaagtgatcaaggaagtgccttcattggtcacttgccataccgaatccccctaggccttcttgatcattgctcttgggttgtgtaacatgtgtgagcactctccacttatccacgaatttgtggggtggaaagaaacaaccaaagttatctcaagaccaaccctataagatttactcagcgcttgagagtgtcatcaggtctatgagctataattgattaattttaatgtattaccaacaaaatcttgttcaatgttttcactcatcaagttaaatacaattacattactgtgaactaagttgaaagaaaaaagaatatttaaaataatagttgcagatttccttcttcatccaagcttagctgtttgactttttaatttaggagtcataccttagcaattgacctcttaactcagagacaaatttatcgcattccgtcattttaaggggcaatcgattcacttacactaggtaaagtgaatcttactatgaggtgagctattttgagggcagctgcttttattggtagtaccatcatagatgcaccccattccaataccttggtactggtactggattcaagttgtagtcatagtgtgccaacttgtatgtcttgggttcaagtgcttcagtgacggcatatggtccttccccattcagcccaagtgctcttactgatgcatatttcgtgtttaggaatacttgttgtaacaccatatctccaggctttaattttttatctttaaccttagagttgtagagttttccgactctttgttgatacactgcctttctatgcttagacctttctctgatctct

SEQ ID NO: 223725 - DNA, 1513 bp, Cannabis indica
atggaaataattagtcatatgaaaaatcatgactttccttttcattcaaagtagaaatttaacatccatataatttattaaaattaatccgtttattatacatttcctaaaaagatattatcgctaatatttttatataaaaccctcatttttcaattttcaaaaacatataatgttatgacgagccattttacagttgtcatcatacattcacttttgtggagaaaaacattccactaataccacaaaataaaatatgaaaactttcatgaatagtatgctcaattgttttttttttctatcaaagaaaaaaaggtctaaaaaatattttaaaaataactatatcatcagtaacaagcccagtattaaattcagaaactgttatctttttcctttattttattataaaaacacaatgcaatttttttgttaattccatcatttactatttgtcaaaaaattgttatcattctatgtattttaaaattatgtttttaatttcaatattataactttgtttataatacacacatttaaatgttatattttagattatattactcaataagtacaatatatacatatatttatataatttacaaatgttaaacaacactgcgcgaagcgcggcttagttccctagtttaaaaataacccatgttgaagaccataggaaattagtgcttattttttccttaatccagaaacatccttgtcatttgaaaagtccccttttttctctctttccatttacctttcccacctggttcccccttgccacctgaggtatattttcgggagttgggtgagaaacactattttcgtcacatttcgattcattagtgggtaagtgaatttatttaaatattggtgttattagtcatcatattgatgatttaaaatgttgtttagatgtttgatttgtcatttctttgtattttttgtttttggtgaaatctacgttttttggattttttgtgattttttttgtgaatatgcagatagggtacgttgttgggtacaataatagtgtaatttaaattaaggataaaggttcgatacagtacgatagttgataaaggtggataatacgataatgtttaagttgttacttaaaatttatgtcatgataaaatggtgacatgataaaatttgctgaagtttttgtgaatactcgatagggtacaatggtgtgtaggataatagtgtaatctactggttagagataaatattttatagggtacaatagtggtatgatagttgataaatgtataataggaggatactagtacaatagtagtaccatagttgctttaaatttatgctatgataaaatttatataaattttaagtaattgttccactattatactttgtcgtacgctattgaacctttatttctaacttccatattaaactactattatacccaacattgtactctacggggcattcacaaaaaaaattacagagaacccaaaaaatatagatttcaccaaaactctattttta

SEQ ID NO: 223726 - DNA, 1513 bp, Cannabis indica
caaaaaatcaaacaacaaattaacaatattataacataaaaagaccgtattttatgtaaataaaatcaaaaaaatcgtaaaaatatttaaaattccgtgaaaccgtattttgtaattatttttttgttgttttatatttttgttaaataatccctaaactcaattttaaaaaactatttttaaaaatttttaccaaacggcctctattagtttttaaaaactgttttcagttttaaaaaacagaaaaaaatattttttaagctatgaagccaaacaacctctgagatttggctattaccttagtcatactaatatgctaagaaccttgtgaaattcgtataatcattctctttatttttatttagtttttttttttttttgttttttttttctttctttttcttataattaaagtataaagatatgcatttatttttgttatagtttactaaagtgtaccaaatataatatactaaactattttatttaaacggataaaaatatttgtctaattgattattattgttatttttaagaaatctatattgattatttatgagaataaataggtgccattttttttttttaacatctttttattttatttttcattgtttcatttcatactatatgaaaagagcctatataccccttttaattaaaaaattagtaaaattattttatttatttatacttggtatgattttttagaaataaaactatgttttacaataaaaaataattaattacaaatataacaatgaatgatttttaaaacatgtagaagttttctatcaacatttattttgtatttttgtaaataaaatttatatttttataatacaccatatttttattcttttagtaatttttaaaactttctaattaagtgcgaggttaagtcaaatattgaaagagtgagtttgaaaataaataaatatatgttcatcattatactacaagtatttataggtcagttgattgtgttaaaaaaatttaatttttaccaattcaatcataatatcgttttggcaaatacttaccttaaacttgtataattgaacaaaacttagtataaccaacctatttgatgtttgtgcagcttaattaaggttgcgtttagtaatacttttttaatcagtttttaaaattagaaaaagaaaagtattttccaaaatcatattctataaaactgtttttactttttaattttttaattaagaatctaaatttcaaaaaacaaaaaaaatcatttttaaatttttttaaacattttttttaattgatattttgaactccgaacctaacttagaccttagaaattgaacccgacctcagacaaaatgttaccaaacgcacctaatttaataatctatttaacatccttaaaaacaaaaatcccacttaacatttttttcttcccttattatataattttaaataacagtatacatagtgtaaagttagtataaaattaaaactaactaattataccttttaaccaaaaatttaa

SEQ ID NO: 223727 - DNA, 1664 bp, Cannabis indica
atttttacaggtacaaattagcaacttgaatcatgaaaatctagaaagaatgaatagaaaactcaatcattactacttgtattttacacacatgtaaatcaccacataaataaatatttttctaaccattttagccacaacttaattaaaacaaaattgtatcaccacagtcaaaaaagtttaggttgcgtaatattataaataaaaataataatgatatatattagaaaaaaaaatgatagaaaacttccttgatatgttcttgagagattgattgaggtggttttggaaaaaaaaaaaaaaaagagaaactgagaatagaaaagagggatgcagtgattgagattgttttaggaaaaaaaattgagaatagagaagagggatgcggctgtgaaggttaaaaaaatgaattattagggttttgggtagatgttttatatgatggcaatattgtcttttaatttttaataataaaaaataaaataaattttgaaaattctcattacccgtaatggtatacctgaacaaaataagaggaaaagtattcccttaactttctcctaaatttatgttaaccataaagcattcctattattaaataaaagtaaacaaaagaaaaggaatgattaccctatatcacattcccaatcctgataagtaaacatgccataaatgaaacaaaatggcaaaaattaaaacattaaggcccacatggtgatttcgcccaaggctttggttttgggtctattatctttttctaaagctcacttaattctaaaccctaaacctatagagactctataaaatgaatattaaggctttgattctcataacatgttttgtgtaccaaaaacttagaaaattgaataagagaaaagccttccttttccttctagtaatttctagttctctctttctctctctctcaatttcaagtcttataatattaagaaattgcccacacaattcaaagtaatactcagatttgtgtggaagactgtgtagaagaaattttttgtcctattaaggaagcaatctaggttcaatactcggtgatatcctgctataaaaaagaattgagggttagggtattgaatgaaaatttcgctgccatttttgtaagtaatcttaaactctaaggtgtttaactatcgttttatgaatttcatattttaggatgttagattatatactgtacaatcaaacataaatgttggtaaattaagatcttggtaaaatatgttccaacagctggcctcagagccatgataattatttactttcatgaaaacatggattcaaaatgatttggattgttttttatgtgatttggatggttcatgttgagtttatggtaaagccctaaataaaactctatttcaatataatctctatcatttaaatatcaataaagagacaaaagtattttcatcacttatttaatgtgtcatttggttcatgctatcatttatatgtttatttgatttataaattcatccaaacccttatcacatttatgttcttgtttattgtgtcgtcatcacagtggaaagtaatcaagattgtgtgattaaatatttattcctatatttatcagtacacagggtttaactgatatgataatctacaacatagtttacttgtaccttggataagtgttatgt

SEQ ID NO: 223728 - DNA, 1388 bp, Cannabis indica
taattgaacgttttctaaacatttaacgctattaataataacaaaacacaatctaaaacaatataaaataatcacaaacaataaaaaaatttaccacccatccgaccgcagtatatgtattcgtagaacttacttcattcatattggttcttgttatatataatttctattatatacagtaccttcactttaatgtctcactacatccgtaattcaaatcgagaattgcatcaaagaacgggcatcagtgaaccgtattagcaccattgattaaaaattctataactttaatatgttgttgactgttttattcatagctgagtggtcttagttctctgtacaactacatgccaaaacctcatatatataaataaataattttctgatcattaatataaattattcaattctaaatattaataatttaatgttcaagcttatatcaaatattcaactctttatttaatcatcataaatgtctttatagtctctttagggcataaaccacatcatgaatgacattagacatatttcatttattatgatttgtaaaatatttaaaaagtctaacttaatcttcatatttttctaaactgttgggacactaagtgccaaaaatatttttgtacatttatttatgttagttataatttttggatttattcaaaatacaaccattatgcggtcagattttaaaaaataaaaagggaatatgctcttttgttattcttgtttggctgcttttggttatacttactattgatgagagccatgtgataattatttgtccatattttttttgggacctagtctctgtttcattatagatcagatgtgcactatcctgtaagtaaaagacctagaatcatgtacaggaagtgaacatggatttgatccctagtattattgtggttatcaagcttgactacccggtttaggatgtcattttcattgcttggtattgagatttaggggtctagttgatcgtgttaaatgcactggtagattttctcttttgattatttatggtcttttatattttgtttatacatgatggtgatgatgagtattttctatttttaagagctcactatgcaattattttcattaacctactagtatttaatattaatttttttcctactaagttttataaactcactccaatattctctcttcctggaattcagtttgatacttgtaaataaaagagaatcgttgatcaagaacaatatgattaatccagtcataattattaataaactattcttttatagattgttttgtatctaaatataaatggatggtctttatcatttaactagctatgagaagttaagaatgaggaatatgatagctagatggaaagtattgttggaaattatttt

SEQ ID NO: 223729 - DNA, 2388 bp, Cannabis indica
gccatccataacaaaatcaatttttctcttttaaattcataatctttaggaaatatggaacaataggcaaagcactgcttgagatgtgtaggtaagtgacgatagctcaaccataaagctggaagaatggaaccctccttcttgtacaactcctcccatgtgtcgctatagagtatgtcctcccatttttcagcatttcgttcaccacgtaaaaatccaccaagacattttattgccaacggaagacctttgcacttgcccactatttttttgccaaccgcttgcaactcttcaaagttgttctcatcaaaattattaccaaatgcatgtttgacaaataatttccaacaatcatcatccaacaaagtttgtagatgatgaacacgtccagtggccatagtggaggcgacaattgtgcttcgggtagtcacaataattttacttccatttgctccagactcgaaacaactcttcaaactgtcccacaaagaataagactcgttccacacatcgtcgtgaacaaacaaaaacttcttccccttcaatgcttccttcagtctccttctgattagttcatcagagctctgagtatcgcatttgtggccagtgactccttcatagagctcttttgttatctttgaaatgttaaactcatctgacacagtaacccatacttttagctcaaaatgactttgaactctttcatcatcataaacaagttgtgcaagagtggtttttcccacaccacccatcccgacaatcgggatcacagaaatcttgttactaccatcaacaccatccgttagcaacagatcaacaatgagttgtttttcagcatccctcccataaacatcagattcctccaccagaggagcaagcggccttggtgaaggtttgttgagtgcacctaattctcttagtccaagagcatccttttgatcaaccagaatcttcagcttacgaaggatctccatggaatcaagctgaacagatttatcaaattcagacatgaaaaatgacaaagatttcagctggctaaataccttgctggcactactgcttccagactgatcatcatcttcaagcttggatcttagtgcttcatagtcaatcctatcgagcaagtcatcagcttgatagatgacatcttgaagcttgaacagccacttcctaacctcatcgttttgaagttgcttctcctcagcatcattgagcagtacattagctgataacaacacagtgttcagctcatctagctgatccaagatcactttctttccctggaacagccggggtatgtccacagaggccaatcgttcaaacaagacctgaagtgaagcagaaagtagagcacaggtaaaagatcagcagccaattttcattgttgagaaaaagtagtaattaaggaacaaaagctaatatatttacctgaagtgaagaagatagcaaagcaccagcaactagttcaacagccatgtttggtaaccaatggagacacttagagagagcaaattatattcaagctaagaatttagtttgatgaacaagagtgaagggaagccgtttgaaattaattcagatatgtatattatatgattattagtaggacaatagtttgtttattatatgattatatatagaaagctgtgttagtgagtttcactattgtaaaaacccaagttgagcacacagtgatcaatctggtattgatagttttttgttgctttttaatataataattagggggctgtgactgtgttagtggactaggcttcaatggtccttttttgttcttgtatctttttcttttgtttattattatagtgatgactgtgccccaaataagttgagagtttctatggtgaatcacgtgtatagtgtaatggttgttttataatatttaatatataattgtttatataatataatcacttaaattgtttagcttttaagtaagcttatgattttaaattagttagagaaaagagttgtactttacttgtattattattccttctaacacaatagcaaaaacacatattaccaaatgtggccttttatacagctcaaacttgttatcaatataattagttcatgtacagaaatacaccactatttaacctcttcaaaacattatttggtcacataaggccataaagatccaactaagctccacaatacaagatgaaattatccaaagctggatgaaggaggtcgataccagatcaacggtcttacttaggcgccaaccgattcggatctgaattaaactctctttctaccatatcttgtattccgaatctatcatgtctctttgatattccagcattcatgaaagatagtcggcttgttttttcgtttgtagaggtaaaaactcgtgctatgtct

SEQ ID NO: 223730 - DNA, 615 bp, Cannabis indica
acattaaataagtgatgaaaatacttctgtatctttattgatatttaaatgatagagattacattgaaatagagttttatttagttgaatgggagacttcaagggagcttcaagggtgagaaggggcttagacaaggtgaccctctctcaccattgttgtttgtgttagtgatggaatatctcattcgatgtttacaagtggccgcaactaggaacactaattataggtttcatcctatgtgcaaaagctcaaagcttaacaaactctgctttgccaacgacatgatattattcaacaaagggtcgaaacaatctattcttgttttgaaaaaggttcttgaaaaattcagcagtgcttcaggtctaaacgtaaacactaccaaatcttagatttattttggcggtattgatcatgctgaaaaaaaacctaatttgtgcaacactatccagctaagtgaaggcaaatatcctcttacctacctggggatccctttaagaccaacaaagtggaaggctgaggataatgggattgttctcaagaaaatcaaacaacaaatttaaccttggattagtagacacctatcatttgttgggagagttcatttgatacactcg

SEQ ID NO: 223731 - DNA, 1080 bp, Cannabis indica
aaaccaagatccagaccctaacatggacccgaacccgaacctggaccaagattgggaccgagaccttgactcgaacccggattgggacttggattcaaaccaagacacaggacccaaacttgaacctagacccataccatgacctaggaaatgcacttggatgggggacctaggccccaaaacccagacccaaataggaatccgggactcaaaccaaaataatgacctaacctggacccaggaatccgaagtcagaccgagacccagacccaaaaccagccccgaacctaaacgaggataggaacgtaaacacaaaccaggaacaaccctaaacctggacccgaaccaaaaatcagacctgaatccgggacccaaactcagacccaaacctagaatcagacccaaacctagacctggactcggaccctaactcgaacctagaccgagatcgaaacccaagacatagaccccgaactaaacccgaactcaagtcgagatcggaaatttggactcagacccaaacctagacccagacccaggatttcgaaccaacacctagagcctgatcttgacctagactgaattcagaccttaacccaaactcagacccgaacttgaaaccctacgtaaacttgaacccaaactcgaactcaaaatcgcaacaggaactagaaccagactaggactagtttcaagaatacgacctaaacctgaacccagataaaaacccacatcgagactaggactcaaacccaaacctagaccgacacccaaagctagaccacaactgggacttggaccaaaaatcgaaatatggacctaggcaacggaactgggaccaggacctagtacccgaccccaaaccaagacttgaacctaggacctaactcatgcactagcacttgaaatggaaccacaccaggacccgagatcaggatccggatctagacctagggcttggatcgaacccatagtcgatgtttggatctgggacccagccccatacctaaacctagaccaggccccgaaaccacactcggacctgaacccagtccaccatcttgttggaaattattttac

SEQ ID NO: 223732 - DNA, 2973 bp, Cannabis indica
aatagaggcagaggaggaaggtcaagtggctctagaccaacttgccaagtctgtggcaagtatagtcactcggcggctcattgttacaaccgttatgacgagacgtatatgggttcagctcctgctggtgcaccaagttccaacaaaaataatcagcaacaacctgcttctgcttttgtggcgacaccagagatggtggaaaacgattcctagtatgctgatataggagctagtaatcacactactgctgacgtcaacaacctgaaccaaaagatgaaatacatgggtaaggagtctctaacagtaggtgatggaacaaaactaaaaatagctcatgttggaacaggttcaattcgcaccactgatgaatcattgctggttttaaaggaaatgttacatgttcctaatataacaaaaaatctggttagcatttcaaagttaactagagataatgatgttagtgttgaatttacccctaatttttgttttgtgaaggacaaggaaaccaagaaggtggttcttcgggagaggcttaaagatggtcttatcacttctgcattccaaatactgattctgtcataaaaccaagctacagcaacttctcttcgtctcaactctcacccgttactggtgtttttactctgtctaagtctaatgtaactcagcacactactgctgcttctttcaattcaatcaaggacaaatggcataggagattaggccatccgtccaatagagtgttaaaccttgtgcttactcaaattaatgaaaagtctctaattagtaatgttgaacatttttgtgaagcatgtcaactaggcaaatctcactccctgcctttcaaagcaaatagttttcatgctaaacatcctcttgaacttgtgcataccgacatatggggcccttccccagttatgtcaaacactaattataattttatatacacttcatcgatgatttcagtaggcacacttggatatatcctctaaaagccaaatctgatgctctccaagctttcactcactttaaaacattagctgagaatttacttgagaggaagataaaattaatatctccaaacagatggtggaggcgaataccaagcttttaatgatcatgttgttcaaaatggtattagtttccatcattcttgtcctcatacttctgcccaaaatggaagagcagagaggaaacatagacacattgtggaaatgggtctaactctccttgctcaagctggcataccccaaaatattggtgggatgctttccaaacttctgtctatctcataaactgactacctacacctgtctcaagacaaatctcccatagagttttgtacaacaaaccagactataaattcttaaaaagctttggctgtagctgctacccgtgcctaaaaccaaaccaaactcacaaatttcaatatcattcaacaaaatgtgtcaacttagggtatagtgagagctacaaaggttacaaatgcttgagtagcacagggagactctacatctccaggaatgtaatcttcaatgaagatgaattccctttcaaaaccggttttctcaacactcatcaatctgaacaacctgttcaagtctcagttcctagctggagtacagttctcccactggccattaattctcaagaaaaatcctccaacacctcagaccatcttgaagcaactgctggagaaccaccatctgctcattttcctttacctgacagcaatcaggatgtaaactcaccaaactctctggtttattatgatactgctcatatgcaaggggacacacatgaagctgagactccagaacctgccattacaacaccagaaatacatgttgctgtcattgatgttcctgtcaacccgattatgcctacacatcctatgacaacaagaaggaaggcaagaatttttaaaccgaaagtgtacttaggtgctgctaaacaggtttattcttttgcagaaccaactagtgtctctgaagctctcgctcatccagggtggaaaaatgctatggatgaagaaattatagcactggttaagaataaaacctggaaagtcgtcccttatcttgctggtatgaacgtaatcgacaacaaatgggtgtataaagaaaagagaaatgccgatggaagttttcaaaaattcaaagctcgtcttgtggcaaaaggtttcacccaaagaccgggcatcgactttggggaaaccttcagccctgttgtcaaagcatccacggctcgaatcattctcactatagcagtatccaagggatggaataacaggcaactcgatataaataacgcctttttgaatggacaattagaagagcaagtttttatgaaacaaccagagagttttgtcgatccatccaagccaaatcatgtctgtttactcactaaatctctctatgggctgaggcaagcgcctcgtgcatggtttgagaagttgaaaacaacacttgtcagctggaaattcatgaattctcgagcagattcttccctattttggtattcaaatgttgttgatatcatcctcgtcctaatctatgtcaatgatattatcatcacagggaacaactctgccaaactcgagcagtttgctaccaaacttaatcaaagatttgccctgaaagatcttggagagttgaactatttccttggaattgaagtatatcgagacgacacaggtatttatctcagccagtcaaagtatattcgtgagctactggagaaaactaatatgctgcatctaaaaccttgttcaactcccatgactgtgggaaaaaccttgtctatttctgatggtgaatttcttgataatccaaccgagtatagaagccttattgaagccttacaatatctaacaaacactagacctgatctgagttttgctgttaataaactcagtcaatttctcgaggcacttacaactgtacattggtgtgctgcaaaaaggatacttaggta

SEQ ID NO: 223733 - DNA, 1303 bp, Cannabis indica
gtttgtaacacttaaccacaaaaactgaatttttggcgactaaactacctaaaccctggtttcgttttgctctgcacacctctgtccaaaaatcacagttaagtgccacagtggactgtccacgtgtacacacttgtacacgtgacaaatttttagtggtccacgtaattttaattttaaaaaaataattataaaatatttaattataaatatttgaaaaaatttaatttttttttttaattttttttctttttcttcttctttcttcttaggaaaatcccagccctctttctctctctcgtctcctcccttaaccatcgagcagaacaccatcaaaacccctctttaaggaagcgaaataacaccattaaatcactcacaaactcagcaggtattactcacagctctaaagaggaaatgacaataattatcacttcctattttcaagaactctttactgcttccacaatcgacacaagctctctcaaccacaccattgacaccattccaacaactattactgctgccatgaattttcagcttacaaagccatttacaccagatgagatatatcaagctttaaaagcaatgagttcggataaaagtccaggtagtgatggaatgtcagccatgttttatcaacaatattgggagatagttgggccttctgttacggatgtgattctgggagttcttaacaatggacaagatatggatttaattaataagtccatcatcactttaattcctaaaatcaataatcttgctggtatgggtgactgtaggccaataagtctttgcaacgttatctacaaactcatctccaaagtgttggtactcaggttcaaagatgttcttccttccgttatttccgaaactcaaagtgctttcctttgtcctttgtaaccgtctcatcacaaataacatcttgatggcttttgagttagtccatcatctcaaacataaaactcggggaaggaaaggttattcagctctcaagttagatatgagcaatgcatttgatcatgtcgaattgagctatattgaagcggtgatggccaagatgggatttgatggtcgctggatttctctcatcatgaaatgtctctcttcaacaagtttttctttctccttaaacggtgaaattattgggaatgttattccaagtagaggtcttcgacagggagatcccttatctccctatttatttctaatatgttcggaaggtctatctcgcttgctgaatcacgaagaatctttaggtaatcttcatggatttcgactcacacggcaagccccacca

SEQ ID NO: 223734 - DNA, 1346 bp, Cannabis indica
gtatttaacaataatacaaaattgaaatggatatataattataatttaatattaaaattcttaaaaaaaatagtcgagtcggatcagatctgatttgaataagttgagtcgaatttaatccaatccgagtatctgatctagcggggtagggcagggcagatccttacatgatctggatcagttcggatcatagccggatcagatccgacctgacccattgacactcctaggccttgttcaccgatatgcccaagtatgtgatgccacaactacatatccgatttttgcccctttaccaaactagcttctgcggatggaacggtttcttcttggagaatatacaaaccattgatcttttcacctttcatcaatatcaaagaacctttggtgatcctcaagcttccattcatgtactttcatccataacccttatcttcaagtgcacccagggatatgagattttgtcttaactctaaaatattttttcttacgtttgtcagcactttgattccaccatcatactatttaatggtaatcttttcgattctaatgaccctgcatgaatagtcatttcccattagaaccttacctccaccaactgatttatagtcaaacaataattctcgactcagaaacatgtgataagtacattcggagtcaagaatccactcccttgaggattttgagatggaaataattctccatctgttgagcagtcatcattatcctccacgaatgcagctgagtctttcttgtggtgatgatgtatattgcccttcctatctccattatgagatttgttgaagccttgttactccttgtacttcttgtaaaatctttgcaagtgtcgggatcttccataaaggtaatacttttgagtctcttttttcttggattttgatcttgattgagagtgatggtgtttactcgttgaacttttttttcttgggtgatctccttctttctaaatatacttcttccttcttggatttcttttttttaattgtaattcaaaatccttagatatgagtgcggcaagaacatcctctaaagcaattacatctctaccatatttgatgggaaccttgacttcttgatatgcaattaggagagatctcaacaaaatgatggcttggttttcttcatcaactttatgatttatatatgccaatcctataataatctcattaaacctatcaatattatcatctaaagagagaaacattatcctaaaactatataacattttagcaaattaatcttgctagcaattgatggcttcatgtataattcttcaagcttgttccaaattttttttagccatcttttctgtgacaagctttctc

SEQ ID NO: 223735 - DNA, 1357 bp, Cannabis indica
cataatcatttctctcaattttttcttttttcttttcaattttacattaatttttttttctattttctttcagttgaaaatcgtagagagaataataataataatcaagaagagtatgtagaaagagatgatttcagctttggaaatcaaggagagattaacactaataataataataataatgataatgagaaaggtgttgatggaaatggaaaagggaaaataatgccaccaacaagtgtaatgactaggcttattcttatcatggtttggagaaagcttataagaaacccaaatacttattcaagcttaattggtcttatttggtcactagtttcattcaggtacacatacactaaatcttatataatatatattatatataattttttttttcaattttataatatatggataaaccccatttaataattttcaataaatatttatttatatatatatttgcaggtggaatgtaaaaatgccagccattgtagctcagtctatttccatattgtcagatgcaggacttggcatggctatgttcagtcttggtcagtatatatatatttgtgaataaaattactaattttaaatatttatattgaaaaataaaaaattaggtctcccgaatcgtgatttcggaccgattaagatatttcttaatagtccgaatgtaccacatgattcggaagctcgagatgaataataacaatactcaaaagctttcgagcaggttcgacctaataaaatttgagtgtgccacgtagttcggaaactcgaataaatagtaaaactaaaaaagagtaaaaggagaagtttagtgtttacttgaattttgtcctaagtttagtgtttgatttgatgtaatgggttgttggtggtagtgatgatgatgatgatgatcactatcacaatatgatgatgaaacgtctatcaaataatatgacttgactgacacagatgatgcagtagtgtagtattattattattattatcatggctctgtttatgggcatgcttttattattattattattattattattattagaaaaatattaaaagatattattagtatttagtatttttctttatgttatattgttattgatgtaattaagtatcggtttatataattttaaagaatattgctaatcaatttaaaagtgatgggagcatcttttataggcggcgttttacgattagttaacaatattctctaaaaactatatggaactcgatacttaattacactaatatcgatatgacattaagaagagtattaaactctaatagtatcttttagtctaatagtaatgagaaatgttaaaaaggcaccagtagtgtctagcac

SEQ ID NO: 223736 - DNA, 3528 bp, Cannabis indica
cacatcccctttcttatcaattagccaaaaaatttagtttttgaagtagatgacattgatccatttaacctaaagaacatcttgcttcgtagaaagaacccaaatgtatcgagcaaacaaagttttgttccacttgggcttgctaacaagatcccacgaggctaggtgcatcttactagtattgcctttcgcaccccacaaaaagttcctatggagtttatcaacatcctagacaactttctatgggagcataaagatattcatccaataacaataaataccaaataatatcgagtgaatcaattgttctctccctgcaaacgagaggtgctgacttttccaactatataaaacttcaaatgaattttttaagaaaataaatacaatatccactacttacattttttttggtctcattgttacaccgatatactatagaggaaaatgacccttttcaaaaggaaccagatcccgaatggccagtttaatcgtctcatcaaccccgccaaagtaaataagatacttgttgggttagcatggaggcctgatcaactaataaaagtagcaaaaaagtttcttgaattacatgaacaacttttgtcgtccctttacaaaataaaatcaaatcatcaataaaaaagagactgactatctttaaatatttacacattagatgacacctgaagttcaaactgtgggtagcaacgagtagtaaccgagcaagatattccattacaagtacaaaaaataatggagagatgagatcaccttgccttaacctttttttccccgaaaaatttcccctggacataaccatttaggactaatgagtaagtagacccccttaagcacttcatgatcaaattaatgaatcaggcagggaagaggtaatactttagaagctcttctaaaaatttatagtctacagtgtcataagtcttgcttaaatcaatattcatgagacatcttggagaattcctttcctattgtaccaacaaagaaagtcttatagaatgagcacgttgtgagcaagggaactattcttgatgaaagcaccttgattcatatttatgagagaaggtaaaacatcagccaatctgctacacattgtagaagcttaaacaatggcaaatggtacaaaccagctgagtggtacaaaccaaaaagaaaagaaagaagaagaacaattgaaatgtcaaagaagcttatcatgaatgataacttcggtcctttatttatataattcaaaactaaagattacaattagctaaattcagaaagtttgttgtaaaatttaactaactgtttacaactaagctaactgtttaactaacgtaacattcagttagttattttggttaacatctcctcaaacaaaaaggggaagaggccatttgaagttttacttaccttttagtagacaaagactttgtaaaaacattatcaatctggtccaaatatggcacatatcgaactgagagttgtttgctagaatttgatctctcacaaaatgaagatcaatttctatgtgtttatttttatcatgaaaataaggtcggctgccaatgctaaaacaccttgattgtcaacccagataataggaggcttaggcagcacaacttccagcttagacaatagagaaaatatccacttgattttgaagcagcatttgcaagagcatgaaactcactttctgtgcgtgatctggcaaccacttgttgcttctttgcagaccatgagaccagatttcacccaaaaacatcacatattcacaagttgagtgcatatcatgatctatgcaattggccgagtcaacatcactataatcttgtagagataaaatttaatatggtttaagacatagaccatctgagatagaccctttgagatacctcattaaccttgttcacgcttcccagtgagaggttgttgggcatgaatgaacaaaccaagcttgttgatagtgtaagctacaacaggacatgtaagggtcaaatattgtagagcccccaatgtacttctgtaaagtgttatatctacaaaaagttctccatcaagaagtctgagttttgcaactaaactactaggattaggacaaatcttagctccctccatatgtaatttaataagtctgtaatgtacttagtttaacttaagtacgtgacactttgatctctaaaaatttctacaccaagaaaatagtgtactagtctcttgtctttaagagagaaacattgttcagatcagtgataagcttagagataagattctgattaggtactgtgataagaatgtcatcaacatagaccaataagtacactagagtagatttagagccataaacaaataacgctgtatctaattttgatggttgtaatccccaactataaagagagtgattcagcttatcattccaggctcttggtgcttatttcaacccatacagagccttctataagagacaaacatgagtaggttgtctattctgatcaacaaactcttgaggttgttgcatatatattgtttcttataatgtaccattaaggaatgaatcactaacatcaagttgccttacttgccaattaaaaaaaaactgttagggagagaacaactccaactgtatccagtatgacaacaagactaaatgtgtcctcataatcaatccctggagtttgaagatatcctcttgcaaccaaccttgacttaattttttccaaggtgccatcaaaattgagcttcactctatggacccatttgttaataataacatgaatatttggttgataaggtataaaagtccatgtttcttatctttcaagagcagtaaattcatgttgcatagtagcatactactttggatcctgaagagtagccttaagaaactaggaggcaataaggattcagacaatggatgcttggtagctagatatgcctttggcttagttatcccatgttgagacctagttttcatatgatgaacccttggtggttgaggaggagctataggtgtattaggagcaagagaagactgtccaaatggaactggttgatgtagcatcactgtagcatcccctgcaacatttgtgtgaataggttctaatacagcatgtaatgcgttttctagagtgagaataggtgatggtgcttgtatttgtaataatgtagggtgatgggaaactgaatcatggtgacttgaagataggtcattagtgttttgttgttgagcagtgtaagaaggagagttttatgggcagtgtgtataaatggttcatgtattggagatggtgcagagtgttaatgtggtgcatggtgaatggatggtttaggtattggaaatggtgcagagtgttgaggtggggtagggctgtgaggtgtgtcagtgtatggataaggtggtgttgttgttgaaggcttaattggtggaggaatgacactagaaatagagtttgtagaggtaacaggtacttgtgtaggatgaaaaatagtagttgaaaaaggaaaagagtgttgtactagtaccagagatga

SEQ ID NO: 223737 - DNA, 1763 bp, Cannabis indica
ttgacaactaaaaaaaagaaaaaaagaaaaattacactttggtgacaacatagattttttgtgattccatgtcacttttagtcataccaaaaaccttttccactaaaaagtagtattcagatacaaactgtcactaatttaatttttattgtgattaaatgtatttttaatcacgacaaattataagttttccaatatataataaagaaataagtgaacaaagatacatacctcagggaacaaaggaacaccattaagtaggcaaagtgaaggaacaacggtataaaaaatcgttggcaatgagagaggagcccataaaagatatatacagtatcccatttgggcgccgagtttaatcttcccatgaccatatatgaatgggcaatactttgataaaaatatctgagacaacccttcacaccaccttttatgctgaacaagagcaacctctaaggtcgtcggggcaacaccgacaaaggcgtatctcttcggattgtagtaaatagatttccaacccctgcattggattgccaagccagtaacattgtcttcaacaggacagccatatatcaatcctatctgtgaattcatttatagacatcataacaaaaaaacaaatcattattaggacaaaaaagaatcttaaataccattttggttcgtatattttaaaaaagttatcaattggactcaattcaaatccaaatcctgtatttttaaaattcaacataataataagctaagatgttatgaatgagttttggttacattttttcaattttagtcatattaaaaaaatattattatgtactattttaaaatataccattgtttaacaaaataaaaaatcttatctgtaactcttgcaaaatacagagtaaatgagataaaatactaacctcttttccccattcagtacccttctcatagttacaactagcaacaatatttgctgatcgttccaaatcatcaatactcttatgagcatttttttcgctttgaacattccaatcgaatttttcaccctcgaaatactttcttccacagatactttctcttctatgaaaacatccagtaccacagtaaaaagctgcaccatatccacctactccagcaaattcaaccttgacacattatgaagaatcaaaacatgtatcagtactcattcgaacgatcatcacgaacgaaatagaccgagcaagagctatgactattttccttacatcattaacagaaggggaactatgtgcatacatatcattcttagtaagattgttatagttttgtggaaattggacaaatgcaagttcatctcctctggtttcatccatgaaaaagcatagtatttctcgaattgtgtctgcattgttcgaatacatatcgcagtctaagctgagaatcaagggtgcatttgttatctctgaagatacccttaactgcatattggaaaaatatcatgaattcaatgcataaattgttgaaaaaattatccaaaaaaaggaaagaggttttgttatgtgaagaatttacaagagcattcaatgctccagctttgaagttgtgatgccattgtggtctcttttctcttgacatgtataccaatgttggtaattgattcccatcattgtccacactacttgggtctcttccatctatcaaaatctgagggaaaaaaaaaatagagaaccaaatgaatacatatattctctctcaactttgaatgttgttagcgaaatgtgaaaagtctcgttaaataattagca

SEQ ID NO: 223738 - DNA, 1620 bp, Cannabis indica
cctgatgaagcaaaacgataagtaagaaacctatccgcgatttcagcagtaattactcgtaatggtaataatcgtttccaatcctaggtcatacccgaggcttaataaatatttaatcagaatcttgataataattaagactataaccactcaaccgctaagatttagccacatacggtgtttaccacttttcttaccttagttcagaactcaagcgtgcgggcagacccgagtaaaaaataagttgggcgatcccggtcctatgtcacgacaattgagacttaataaataccttaatctagaattctgaaacaaaacttgaattcaaaaccaaacacaacttaactcccaacaactccaaaataggtcaaacaactcataagcaacctaaaacaggtaccacgcaacaccccgagccaaaatagaaccgggagaaaaaattgggaattccccttacaaggcaaccgatcgaccagttctggtacaccagaaccaaccggtcgactggttctggcagactaagaattttgcgttctcttccccaaattcgaaccaaaaccaatctatacctgtctaaacattctagaacagtataataccacaaatttaactcatctcaagcatcaattaatcacaattcatccaattcataacttcaccaagtttgaaccaaaacttgattctaaaactcaattatttatttcaaaccaaaccagccacacaatacatcaattaaaatctaaacatttttaaattaaacttaagaataagctcaaggtccaagctatcccaaccagccatgaaagcccaaaagatttaaccaaaactcaaccttaactaaagtaattcaaaggaaaacaagcaagatcataccttgatgcctaagaaacttctaccccttgcaaatacaatccaatttctgagaattaagcaaaagaaatcccttggttgaagcttcttaggggttcgggtaggaggaagaaggatagagggtgatatgtgacttaagtgttttcatttctaaccttaattataatatatatttatatataatataaccttaattaaatttcagccaccattcataataaaataaaataaactaaaataagataaaataatacccactccacccaaaaagaccaaactaccccattttagacccttagataaaataaacaaaccctaggggcattatagtaattttactaatccatcatattgacattctaaaattctaaactagtccgaaatatcctcaaaataatccatccactaatttcgtgacatttctgaccacatcgtcaagtttccacagtcatcgaacctaaaaaatattttttttatttcaaaaatggtatcctcgatacccacatatctcaatataatctccgtaattaataaattacgctttatataatcatgtaataaatcctcactaattaccctaagtaagatcgtaatcttacttcattacacaaataaatatttaataaaatatgaccaattaaagactatattaattttcgggatattagatgtattttcatttttaataaaaaaaaattatttctgataaggatgactaaataaaactacaaccttagagcatactttaaa

SEQ ID NO: 223739 - DNA, 1211 bp, Cannabis indica
agaaaagaaaggattctccaataatataagttatatatgttggaaaaatgagctatgagtatattatgtgtttttttttttttgaaaaaatgagtatattatgttagtcccacattatgtatacattttgttgttcacctagtaaaatagttatataaccacaatacagtttattattttccaaccttttttaatttgatcattacaaacaacttaatattttcatagaaattttttttgattgaacgtgaaaaaaataaatgagaaaaaaaaaccctcaaattgagatttatatatataaatatagaatatttctcaatgattattacccataaagcaaataaattgattttgagtgattagagaataccaagttttacaaacgatggttcattgaatcagagatgaaagatcaagaacacgtatgaatattttgaggagtaattcttctagaacataatcacttgcttttttttcttcgtctttaatatctaagttttccattgttattatttctcttagattagtcatcgtatgtataaattcaacaattagattataaaaatatctatatgtatagatgaatctgtttttttttattattattattactcttttacttttcattcaagtatatataaataaaatctcaattatatctctatataagaagaaaaagataaataattttttaaaacgagtattcaccgcccaataaaatttagtttttccattagtcttgtcttttgacatggttctttagtcttttccttttagtttttttttggtttgagtcttgtcttttggcataggttgtgtaactcaaaattatcatggtgttatggtagaagcattcaaaaaggagaagattggatgtgttcaacccgaaattgctgagataataggtattaaagaaacattgaattggattgcaactcattcgtgggatagagtcatgttaaaaacagatagcttaatgtgtgtctaagcgattcagagcggtattttatgccttcacaatttgtgctttgtaaaacaatctgcaaataagttggctcattgcttggcaaaagactcttgtttctttacaggtcgtgtacttcagttggaggattgttcctctgaaatgcgttctattattttgaactaatttattaatttatagatcttactatacatgcacaaaacctagtcctcatttggcagcagac

SEQ ID NO: 223740 - DNA, 3100 bp, Cannabis indica
agagaaaaaaccctagttttgtatcaaaaatctaataagatagactcgtggactatgcagaattttaaatgtaaaaccacgtaaaaaaactttgtgttatttcttttccttttatagcaattatttttgtgtcaatccatcacgaaataggctttaatttagttaacaaaaatatgtgttaacagtttggtgctttcattgagagccttcgtgaaaaaagctaaaaaaaaaacccctcctgatcaaaagagaaaaaaaaactttctccatggctgacaacggagaaaatgtggatactcatcttgaagagaccacccaatgtcgtgccggaaaagagccaatgggctcccagaggcctcccaactcgcgatctacgcagaccactcgttctaggaggactcaacctaaaggtggcccaattacgcggtccactcgtttcatgaggacccgacctgaaggtggccccaatacacggtccacacgttcgaggaggactcaacatgaaaatggctagaactcaggagtagaggatgaagaacccgatcttggaggccctaaacctactgaacatgataatgatggcgcttatgatcctacaagatacatgccaattgttgagttggagaaccgtcgtctcaggcaccacctggaggaggcgaaccgacgaaatgctgagttagaacgggaggcagctgcagccaggggagcacaggagaacaacacacaaaatcaaactaaccctggagtgataagaccacgaggcagacctcatgacacacgaaccaggaggcaagagacggctcaggagaatcctcaaaatgctcaggaagaacaacctgggaaaactgagggtccccctgagaacgaacaaccagatgatcaaccagaaccttctcacataaatgagaacagaaggcaaccaataactagggaacaagaaatccctcgtgggaacgagggaaatcctgggactcaacctgggacacgtgggtcaccaacgaggcatcgccaacgtccttctcgaaccaacagggaaggagagcgtacaaaccccaacagggggcatacaacgaaccatacccaaaggagaaggacgggacgtgaagaggcgagcgttacctcagggtgcacaagaaccatagtcgatcaacacgaggaggagaaagtacttgtcgcaataatgatcgagaaagcacaagcacaagtaaaactgagagttactcaaggatgaggtccataagcttgacgaggtccataagcaagacgaggtccatgagtaggacaaggttcactagcatctataaccaactggatcttcgcgatcacttgaactagaaaaaacctgatcttcgccaacaactcggtccaaagcaagaggatcatatccaattgcgaatagatgagttggaggataagtttaggaggtatcaagttggggagcaaggaaagcagtttggatatgactcgaatgaggaactcgagccattccatccagacatcatgaatactcctttctcctagggattcaaaaaccctcacgtctcgtcatatcatgggaccacagatccggtctcgcatttgaataatttcaatactatcatgcaagccagaaatgtcacgaacaatctatgttgtagtttgttctccacattgctagttggagcagcgagcaccgtgttcaataaatttactcatcattcaataacttcttgggaacaattgtctaaggacttcaaaaaacagttccaggctgcaagggatagacgacccgaagcatcctcactcaccaacataaagcaacagtcgggcgagacgcttaagggctacttaagtcgttttagcacacttgctgcgagggtgaggaacctagatgatagcacccagcttatgctcttcaggcacggatcactactgatctctccactgctggaggcgagctatggaatgatctatagggttgcccaataaatacattactgagttcaatgaaaggactcaataatttgttcggaaagaggaagctagaaaggagatgaagttgttgcagactggctcaggaaataaacccaacaaatgtctcaacaagtaccgtctcgaccaaggctgataatccaggagcctctagtttaaagaggaaggataactctaaggagtcatacaaggataagaaaatgcaaaagaagcacgacaagtacgtgccgatctacaccatttacaccgagcttaatgaaactcgagaaaacatttatctcgtgcatgagcacagggtggcattttgtaaacttgagctaggaggcacgggagacataagagagatgcaaccaaattttgcaagtaccacaaagacattgggcatatgacagatgagtgtcgtcaactgaaggatgagatagagagtctcatcgcgcgaggacacttcaaacaatatgtgaaaaggcagagaaatggacacaaccagcccaatccgcccaataacccaggaaatcaaggattacaacctcctcctcttgaaggagaggatatcctggttatctcaggagggccacatattgcaggagagagcaataatgcccaaaagaggtatgttaaggaagtaaaaaacgagcgatccgcctttgctccagaaccttccaagaaggcaaagactgaagaacatcctattatattctcggaggaagatgaaaaagacgtgagggatgaaaaagacgtgaggtaccctcacggtacctcacgtcgacccactggtaatcaccttccagctcgccaataagaggataaaaagggtgctagtggataacggaagttcagtgaacatcctttctagggaaacactgaagaagatggggcttgaaaaacctaaattaagaccttgtatggtaaatctttgcggatttacaggcgaccgtgtcgccagtcaaggaataatcgagctcccaataactttgggcgaagcacctttatccactacaataatacaagatttttagttgttgacctgccatcagcatacaacatacggctaggtcgaccagcattaattggactagggggagttagttgaattaagcacttatccatgaagtttcaaacaccaatgggc

SEQ ID NO: 223741 - DNA, 1377 bp, Cannabis indica
taacgggatcctgaaattttatatatataatacttaagtttctaattaaataagcaaatattaattattcatgatttttaataaccttgttgattagcaatgagctgcacagtacgtttaaaatcacgctgacacgcctatgctagttagggtgttacaatttggtatcagagctgcgaggttgtctttcgaagatcgtcacgacatatacaatcatcatcagtagtcagctcatttcaccgtttagtaagcttttacttctttagtagtttcttttctatcatatgatttaagaaaagcctgataggaagcatgttagtagcctgatcgtataataggcgcatgtttttaatttctaaataagcggcattagaaagttttcctggatcatggtttgaccaaactagctcttggttgcgcaggctgttctaaattagtatggataccaggcgaaataccatgagctagggtaatttggttgcatccagtggtggtcagagagctcaggttcccctcaatatccgtggccaaggtagaggtcctaggggcagggcacgtggccgggtgatgttaacccgccacaagctgcccgagctgctcaggatgcccgaaattgggacaataggtttgcagcgatgcaagccaggattaatgaacaagataatgagattcaacggttgagacaccagggtgctcttgcaattcctgctccagaaatctaggttgcacctgcccctgctgtccaggtcgaaccagtggtggcagtgaatcggatggaacccctatatgaattgtttcgcaagcaaacacaaccagttttctgggaggtcctgatgtcatgaaagtcgagcgatggctaacagtgattactagaatcttgaattttattggcgtcactgttaatgatagggtggcctgtgccactttttagtttcaagaagacgctctggtttggtgggacatggtgtccatgattcatgatgtgacaactatgacctaggaaaagttccaggaagtgttcaatgctaagtattgtaatgaatcagtcagaagtgttaagagaaaagaatgtcacccaactgactcagaaagaaaacatgagtgttatggagtatacaactcaatttgaccgtttggcaaggttggcctcgagaattgtgccaatcgacttcagtaagaaagagaagtatctggatgggttgaatgtgaagagcagacatgacttgatgatcactactgactacagaaccacctatgctgaaatggttgataaggcactgcgagttgaggacgcagtgggatgtatagttgagtctcgtgggactccgattgttggcggggctcctacccctcttgcatcaggttttagtaggggag

SEQ ID NO: 223742 - DNA, 1161 bp, Cannabis indica
tttcccttctcgattggttgctttgaagttataagctcgagcataacaacaccaaaactatacacatcactcttctccgttaattgttgagtcatgtagtactccggatcaagatatccctgcaaatcgacgaaaaagaaaattagcataatactttcttatttggtgttgatcatgccattggatcagatctttagaaagaataaacaaacctacttataattatcattttcttctatatttttatcacaatataaaattaatattaattccactcatatatttgcttaatgatgcgcagacaacaagttcctcgaccacttaaagagtacagctaatgttctcagcgttctagctcatttgaaagtaccataattaagtttgatattttactaagtaatgtagcttaatactcaccagagtgcctttgacttgagttgaaacatgtccttttccagtgtctgagaccagcttagacaagccaaaatctgcaacctttgctcctaaagtttcatcgagtagaatattggttgttttgacatccctgtgaattattggaggatttgctagctcatgtaggtaagcaagtcctcttgctgagccaagagctatgcgaagtctcctcttccaatcgagatgaataccagatttacctacagttcacatgacacagaatgcattgtgatcagttcaacaatgtttgtgttaaaggaagtgtagattgtaagtatgtgatatgcctttttttttttctcggataagaaatgcaatgaatttatataaaaatgaaatttcttctttcatgttccataatatgttgttaatagcaatatatggcaatttctaacacaactaaaagaatgaaaccatatttaatgttattcaaattacttgtatattaagaacttgtctcaactttcaattgggctattcaaagttggaagatagaaaatttacctgacaagctttcccttaacgttccatttggcatatactcatagaccaacatttgctctccttgctcaaaacagaagccaagaagaccgacaagatttttgtgatgaactcgagagagcagctcaatttcagtcttgaattcaagtccaccctgcattgatccctgctgtgctcgtttgatagccactacttgtccatcaggaa

SEQ ID NO: 223743 - DNA, 1240 bp, Cannabis indica
gtcttaattattacgacattaagataaaataattaaccatttaattaataagtacgttcacattaagaatgcaaacccttttactaataaaattgaaaaatagataattaattacgtataaattagcggtagaatcatcatatcccgaagcagctgaagcaaaatttgctccaaataaaagttcattgctacttccatgtgtgcttagataagcttgtggataggactcgaagttgagagcatcaactgccatattatatacaaaaattaaaatataattagttaattaatgactagtgaaaatataaatatatttcaataaaattataagatataattacatacctaaataatcaatggccaattttccattagaaaatcggccagttgagttgtgatttgcaaaatcccttccgtacggtgggaaatttgattttatgagagtcggtaaattgttgttgttaccaacatctacaatcgagtctccgaatacgaagactgcaggtacaatcctttgtgttttaacgtaagtattttctagcatgatcaaaataagtatcatcatgatcatcataattttggtgtaggaaagagttgtgaaagccattaatgatgagtagttaattaagtagagagaaaactaggaaactttaattagctgagaaaatctgcaaagagtaagattaatttggattgatgtaaatgttaaccaggaagtcatctatatatatacacacaaagttcccttataattaatttctaggattaatggggttcatcatctttgaatttggttagatataatttaactagtagtaatctttaacttcgttttgtttattagtttaacatttaatgcatgattacaattaattatacaagtaaagttataataatttttagtgaaacatcttttcttgcatgcatgcatagatgaatcaaataattcatcacgtgaacaatcctgtttgcctatttatatatttataataaaatattattattggagagattatacatatgcaggcccatatagacggactgggctatccctgtgcttgttaagggggtaagttgaaaaatatcacttttattaatctattaatcaaatttacctttaattttatatttaattgaaatatacttctttttatatgtattgtactcaaaataccctgacataacagagtcacatggagagtatcttgaagtaataggggcaaaattggtacaatgttta

SEQ ID NO: 223744 - DNA, 1085 bp, Cannabis indica
aacctctggacaagaagaacttgggatgtacctggctatcgaagagcatgctataagtgccgtgttgatcagagaggaaaacaacattcaacatccgatctattacatcagtaaaagactcattgaggctgaaggccgatatccattgatagagaaactcacttactgcctgattctagcaacaagaaagctaagaccctactttcaagctcaccctattcgggtatacactgaccaaccgttacgccaaatattgaaaaaaccagatgcctctggatggtcactcaaatgggcattggagttgggccaatatgagattgtcttccaacatcgaacaacaatcaagggccaggccttagcagactttgtagtagaatgcacgggaaaggaagaaagcgtatcagaaaataaccccaagccagaacaaatacctcaaccaagtaacagtgaagacaagccgacttggaaactacatgtggacggtcgtctacaaatttactatccggtgcaggaatcgcccttgtcacacctggggggcaacacctgcacgctgtagtcaaatttggatttaaggcatccaataatgaggctgaatatgaagctttgattgccggtctaaaactagcccgggagatgaaggtcgaacatattgagatttacaaaaatcatgtatttggggaatacgatgctcggggggaaaagatgatagcatatctgagccatatacacaatctgctcgcacagttcaaaagcccctcaggtgaattctaagggaagaaaacaccactggtgacgcattggctcagcttgcgagtaataatgtaaatgatagagcaaatctgattcctattcaatttctcgaagaacctaacatcactggcacagaagagattgaaatgattgatacatccccaaattggatgatgccaataacaacctacctcaacactggggaactcccatataatcgaaataaagctcgaaagatgagaatgaaggttgcacagtacatcatagtagagggaattatgtatagacgaggatttttcatgccatcgctcaggtttgttgcccaagaagaagct

SEQ ID NO: 223745 - DNA, 2328 bp, Cannabis indica
ctaagtttgggtatggtggactccttgaagaggtagggatctttcttcacttggtcaaataatcaagggagtaaggatagaatccattcgaggatagatcatgcttttaagaacgaggattggttggatctgtttcctaattcatcagcctctttcagttgggaaaaggtctcaaatcactgtgctatagtcatatcttcggctgtaatggtggagataggagtgaagccgtttagattctttaactattggacagagcatcgagagttcaaaaatctggttttggagagctggcaaaaaccggttttctcatctggcttactggggatctggtctaaattggctcgactgaaccatgttttaaagtcatttaatcatgccaggttgggcaatgtggagttggattttcagaaggcaaaagataagtttcttgaagccaaattacaagctcaaagcaatccgggagttgaaagatttatcaaggaggaaaaagatgctgctgatagttttcatcttcgagaaaaaatgctgaaaagttttcttgtccaaaggagtaaggtaacttggctaaaccaaggagatggtaataatgcctatttttatgcgtgtattaagaaaagaagagaagagaataggatagctagctttgttgatattcagggaaatattgttgacaactatcctaacgtagtgaggcattatattgatcattttaaaagctatatgggcagctgtagtttggtttctagaaagcttgataatgagtgtctggagcttggcaaccgattgacattaaaccaacagttgagattaattcaatcattttctaataaggagatcaaggaagctttgttcagcatccccagttcgaagagtccaggacccgatggctacaactctgaattttttaaggccatgtggaaagaaataggaggtgaagtgtgtctagcgatcaaagatttctttaatacgggtaagattccagttcagttcaatgaaacggtaatctcactcattcctaaggtggaaaaccccatgagagccatacactatcgccctatagcttgttgctctactttatacaaatgcatcacaaagctcatgagtaaaagacttgctgaagttctcccgtggctagttcatcaaaaacagggttcttttataaagaagagatctatagcgcataatattttgatttttcaggatttgataaagaactatgggaggaagaatgtctctccaaggtgtgctattaaaattgacctcaataaagcctatgatactgtggattggggctttgttgaggatttacttgttggcttaaactttccttccaagtttgttggttggattatgaagtgtctgaggggtacttcctattcgatcatgatgaatggaagattgcatggtaactttcaagggaaaaaagggcttcgacaaggggatccgatgtcacctcttttatttgtgcttataatagaatatctctcaaaaggaagcttcggagaagactttcagatttcatcatatgtgcaaaagccttaagttgattagcttatgctttgaagatgatcttattctgttcagcaaaggcacttttttggcggctcaccatctgaagattgctttgggaagcttctctgaagttacaggattatttcccaacaaggataaatctctagtgtacttttggggtgttaatttgtctgaaaaagaggtgatcctggaagacttacaatttagagagggctcatttcctctcaagtatcttggggtgcctcttagacctacaaagtggagacgagaggattgcgatgctatcataaagaagataaaaatgtggctggttacttgggcaactaggcatttatcttatgcgggtcgtattcaactcattcgttcggtgttgtttggtcttcgtaactattggatgagcattttcatcctaccgcaaagtgttattaaggaggtagagaggctctgcagaggtttcctttggggagttaagggagaccgaagtaaaattcatttggcctcttgggataaggtttgtcttcccaaaccttttggtggtcttgggttcaagaatggtgcttcttggaatcgttctattctagggaagtttgtttgggcaatcatggacaagcatgacattctatgggtcaaatgggtcaacaacatctatatgaaaggtgttgagttttgggaatatgagttgaagggggatgttagttggtattggaggaagatctgtcatttgagaagccatttcagtaagcctatggtgacagcagcagtaaggaagggtaagtttattgctgccagatt

SEQ ID NO: 223746 - DNA, 1040 bp, Cannabis indica
aatagcttgaacaacaatcaaggcatcagtttcgactaccacattagaccattcttttctttttatctaacttaacgcttctttgatcccaattatctcagctacttcaggttggaccgaaccaaaacagctcacagaaatagcttcgataagatgaccattagaatctcgggctacacatccaaatccaaacttgttctccgcttgaaaaatggcaccgtcaacatttaccttaactgtatgcaacattggtttctgccagtgctcactaacattgttaatatcatcaactaacaatgcacccattttttgtgattgagcactaatccattggtcaagaactattctagtcaaccgcaccacgtctatagttgaacacgttttatctttccacacgatatcattccaaactgcccaaattttccaacttatcatggctgcttctcgcacaatatgtgaagcaagtagcttgaaaaaccacaagctgtactcatggccattcaaaccagccatattcacacaagataaattccaacaagagcggctataaccacatccaagaagaatatgggatatggtttcctcagctaagttacaaaaagggcacaaaaaatcaacattcacatgcttagtatttaattgtacctttgttgggagacaccccaagattgcacaccctaaaaaatgttgaacttttggagggatatctagcttccagagttttttgtacccttccctgtcatgatcaagatccacgacatcaataggttgttgtaagaatttgtatgcacttttaaccgagtaaaaactcgatgcctccttgttccaataccatgaatcattgtccaccgtaccactcagccggataaagatcaataattctctgtccttgtctttaaaaagatcattaacaacttctaaatctcaacgtttcaaccccaccgagaatagactggacaccatttgtccttccaaagcaggatggttcgagctaacatatgggttctacaaatcgggcagccaaatatactgactgaatt

SEQ ID NO: 223747 - DNA, 3608 bp, Cannabis indica
tcacaatcacacccccttacaggatctgacgtcctcgtcgactacaattctggctgggtcaaggctctcatacaaaattgtaacacactactagtttaggcgtgttaacgtgatttttaacttaactgtgcagctcgttactaatcaacgatgaaaatcgtgaataattaaaactttaattaactaataaaaataccaaaataatatacttgtattaaaccgggatcccattttacaaataattacaaatgtttcctagtacatgttctaaaagtttgtcgcctagcgactatacaaaatagaccttgttgtcccaaagatcgtccgctccaagcctaaccgccccaacatctacaatctccatctgctcgctctcacagctgctcaatcttagccttgcccttacctgcacatgcaaacaatatatgtgattcgacagactcagtaagaaaagcataaatgttaacataacaataacccagattataatcaggcgcccatacacccaaccataaccctatcctcgtgtcaaacacggtagcgagtcaagacaatcgtacgacagtactactgaccatgatatcagcctatactcggtacgctactcttactctagtcgcacgagtgttattttgtcaagtagtatagtactatcaaccataatatcagtcaatacttggtacgctagttgtactctaggcgtaccgatgtgatattgtcgaatagtacttaaggcaacatacatttctaatgtaatctaacaggcttaaataacatgcacgttaaacatgtaaatacatatgcatatcattatactaatcttacctcgtttctgaattcaggtgtggcggccaacctaagtggaacagctgcttgacgaactacagggccctaaatcacattatttgtaaaactggtgagtgacacgctaaattactttttggggacttaaacttgaaacttaaagtttccctatcgatgaataacatggaaataacctacatattacaaaaacaagaaaaagtagggttgccaaaattgccctaatcggaagatcggttctccaatcggaagttcagttctgtggggtttcctggggaccaaccggtagaccggttcctacaagtccccctgaaccggtcgactggttcagtgcagcaaaaacacaaaagtccactacaccctcaaatcaatctcaaatagcacaaaaacttccagacctgcttaatataccctaaagaacataaaccaagcaacaaaaaaacctaacatgctcagaatcaaaaattgtcattaaagagtaaagcttgagttcttaaactcaaagcttgctcaaaaaccacaacaaacccaaacctagctcaattacaacataaataactttaattcaactacagaaaacacaatcaacatcatagaaccctaacacataattcatgcaaaatttcattacttaaaacttaagaaaactaagaggaaaaggtgctaaagagattaccttcaatggaattaccaaaaattaactacaatccacaaaaaccaaatgaagaactcccaattgttgctggttcttcaagggttcgagaaagagagggggagtgaagagagagaagagagctttttcttatttttttttctaattttggtaaaagtaaaataaatgtaattatccaactaacaagcatatacattcagctatcaaacttaatgaaatcccacaaaagacaaaggactaaatggtgaaaagactattttaccccttacaaaaaccaaaaagcttctaaatcacttaggggtattttggtaatttctaaacctcaaatatctcccgcatttgcaatgtctaactaattttatccgtaactataaaatactaaaatataattctaatggccaaacgtcgcgttctaatgttttcggacacaaaatatgcaaaaacataaaagttcatatatggtataaatagtgcatgctgaattcaaataaatctccaaaaaatgataaatcataattgttattcaagtttcataaataaaccctaattatctggtcattttcaagttaaaattaagtggtctttacagaaagcgtatgaccactactaaaaaaatggtttttcttaatggtttttaactgttagataaaatattctcgtcgattgctataaccgtcgcatattcgaccgtcataaaatgggaaaaattggcgctggcgacagcttgaaaccgtcaccattttctcattcccgacggtttaaaatcgttgcctatgatagggtataggcgatggtttataactgtacctaatactataggcgaaaatataaaatcgtcgcctatagcctatcataggctacaattttaaactttcacctatagtataataatctattttttataattttaaaattttaataatcttaaatttttattatatattcgtttatatcataattataattgtcaaatatatcgagcataaataaaaatttattaataacacaaatataattacaatatatagtgtattagtttaggctacaaaattatatactcagttccaattctatcatcagcaactataaagcaaaaaaatatttataaaataaagtacactctttgaatcctaagttctcaacttcaaataccttcgaatattgctctaaagaaaaacttaacgatatacctaaacttcttaaaaacaaccattgatgaataagcacatcaaacttgtaaagaataacttaccatattgcaaacacatcaacacaaataaaaaaaaaaaatcaaagtttttaattattctaattttaaataaactttgtaaaattaaaatttaaagttaaatattacctaaattatactaaagttataataaaatattaaacttacactaatttttttttttttacttaaataacattacatattttttttagtaagtgataacattcatattaaaattaaaattctataaaaaaatgcttatacatttttaccccaatctaatattttttctcttatatttatgtagttttagtggaatttattctaattctatcgaaattttggcagcataagaactgtaatcggatgttctcaaaaaatttgaaacatggaaaaaataagaaacaaaacgtacacgaagcaatacaaaacaaacaaaatgacattaacaatacaaaaattatccacttatctgaccgtagtataattaattgcagaactttcttcactacggatgaatatctaagatatttaaactccattaaataaaaaattttaatatttgagtaattatacctttctccaataaagctagctacttttacactctacaatgaacaccaagaatctgataccttaaaaataataaaaatattaatattgttttaattttaaattttacaattactatcaacttatatatatatatataaataagtatgaactaaaaatacatatatattaccaataataaggagcctctctcgtaagactgccaaaaagggaggaggagcttagcaaagtttggcaacgactgaaaaattcattaatatatataacataaagtttcaataacaatttaaataaaaataaataatctaa

SEQ ID NO: 223748 - DNA, 2263 bp, Cannabis indica
ttcagaaaatttattagttgctagtttagtttttcatccaaatttctcccaataaacacacatttagtgggatttcttggatctaaaacaacttcttgtagttcctggattggtttcaattggttatttttgtcttgaattcgaggatctagatctttttcttgcttctcgccttcctctgttatgactaccattgactaatggttggcccttccattctatagttttacacgatagcattcacgaggcaatagttggtcacctcgcactacacctacacctgccggtgtttgaaactttaaggataggtgtttgattaagctaactgcccctagtccattcagtgcagggtgacccatcagtatgttataaacttattgtaggtcaacaactagaaaatatttcatcaatgatgtggataatggtggctcacctacggttaatgggagttcgataatgccttgactggcaaaactatctccagtaaatccgcataaattcaccatacaaggttttaattttacattttgcaataccattttcctcagtgtatccttgtaaaggatatttactgagctttcgttgtcaaccaacaccctatttactcttttgttggcaagctgaattgtaatgacaagaggatcgacgtgcggataactcacgtgctttgtgtattcctctgaaaatacaattggaggttcttcagtcttgactttcttagatgattctagagcaaaaattgatcgctcattttttatttcattgacatatctcttgtaggtattactgctttctttagcgagatacgaccctcccgagatgaccagtatgtcctctccttctacaagaggaggttgtaatctttggttgcctgggttattgggcggatttgtcttgttttgtctattaccatgtcgtcttacatactgtttaaaataatcgcgcgagataaggctctctatcttgtctttcaactgacaacattcttccgttgtatgccctatgtccttatgaaattggtagaattttgttggatcctttttgtttctcgcatgtctcatgggctcaagtttgcgaaatgcaaccctgtgctcatttgtgagaaagatgttttcatgagtttcattaagctcggtataaacaatgtaaatcggcacatacttatcgtgcttttcctatttcctcttatctttggttgcttctctagagtcatcttttctcttggtgttagagccacctggattgtcaaccttgtcaaacggtgcttgccgagcagtgctgggttactcctaagctatctttaataatttcatctcgttcatcgcttcctctttccgtacaaacacttgagctctttcattgaactcactgatgttccttaccgggcgaccttataaaccttcccacaactcgcctccaactattgcgaggtcagtcgtaatcccagattgaagagcagtaagttgaatacttgttgttcaagtttttaactttagcagcagtagtactgaaaatacttaggtaagccttaagcaactcccctggttactgctttacgttagtaagggaggatgcttcaggtcatctatctcttactgcctgaaattgtttcttgaaatccttagacagttgttcataagaagtaattgaatgatgggtaaacttattaaaatagctactcactaccccagtcaaggaggtggggaataaaatacagcgtaagttattcaagatatttttgggtcgcataatggtattgaaattattgaggtgagcgactgggtccgaagtcccatcgtacaacgagacgtgagggtttttaaatccatggggaaatttagagttcacaatgtctggatggaaaggcttgggttcgttgtccgagtcataaccaagcagtttcccgtattgcccatcttggtatctcctgaatttatcttccaagtcaatgattcacaattggattggatcctcttgcttccaattagtattgagttgttggcgtaaattaggggcattctgatttaagcgcttgcgtaaatcaggttgtctttgattctgatgttcacgaagaattggctgtcttcattcatggttactcacagaccttgttcagagtaactctcagattgacagctcctcgtattactcctactctctcactcattattacgacgaggtctatctcctcctcgcatatgcctttctcatcgactgtgctctcgggatcttgaatatcccgagctagaacttgcctcgtcct

SEQ ID NO: 223749 - DNA, 2363 bp, Cannabis indica
ttatctaaacctatggcttgtggtatacctaataatttacttactctagtgcaagcaacttactttagtaaaatgtttgagcatttttctaattgctaattctaaaggaagtcttttggctctagatatagatttcatttatcaatgagtagtttgaactattttagaaaagataaaagtcatgaaaagaattacttaagaatcaacagtgagaggtctcatgtatgcgttagactagacacatactattgagtgggagttatgagtaggtatcagttttgtttaccaagttttttggaaaccaagtatttagagagaataaaggaaatagaaaacagtaaatgataaaaacagtagatttttatgtggttcaagcgttaatgatccttagtctatgagtctatattattggcctcttagggtggatgttttatgattacaatatattataatataaaagccttatgtaggagaagctaagtattttttgtagtgtgacggccgacctagggtcctctcccctttttgagagaaaatgaagatatttataggcacacatggggtaaagggcctacctacggtttcatcctccacgtgttattgaggcctgcgcttgcaaaaaggacgatctgaccatccactggggggaaccttcttcatcgtgcggtgtagagtggctaataaggacatttatacaaccttggacacatggcacacaaaggtctctcctttacaaaatactctctacccatgccatttaggaaaaaaaaagtgctcgagggtgcgtatgtgcaccaccatgggctggcacaggggacaagatctgatcatgtgtcagaaaaaggtataaccatctttagagtgccattttgttaggagctgacgtgtctaaggtctctggaacctatattgctatccgggttcctcatcaagggtcgctactcccataagccattacgtcttgccaccttctaggtctaggagtcacttctttcaattttccaggatgccttacgtggaaactgttcctttactccgatcgtgccacatgttcgattaaggaaaatttggatgacaagtttaatccaggaaatgaacattggaagataattaagtaaattttaagatcaaaaagaagaactatatgttagttgataaaggtggtattttaatactcttagactacatcaaattaggtttttagacttgcgttaaggctagaaagtctacttgtgagatggtgattactctaggattagagtagtgatttttggagaagtgtaaaaacctatctgaaatctcaaactcgaccagtgaatggaatgttaaagcggccaagaaggctacttgataattattattcagcctatggaaagttctatatagtttttggcattatttcaatcatggattaactgctagtgttactttctgactaacacagatatagttgccaaataaagaatccagtatctcaagaggagcagacataaagaaaagaatttcacaatattaaggattaggtgactaaggagatgtaatggtggagaaattatgtattgaatacaacctgtcaaatcctattacaaagataatactacatgctacacttgatctggatataggtgttgagattaattaaaatgcccttttagttttatataagtgcaagtgggagtttgttcggattttatgccctaaataaaacccatttcaatataatcaaatttactaattaataaaagatcataaattattttatgttgcatagttcacatgatttcttccatgattatatatttaatgtataaattctattaaacccagaacatatagttattcatgattatagtgttgtcaacacagtagaatataaacgtgattatattttttaaagtttacgtcctatgatttgacactacacaagatttagactgacatgataattagtgataaagtatacttacaccttcgataagtctcaagtcctttctaagatattggtaaagtatgctaggatcggatgtatggcgtatacatagaactggaccgatattgaacttggataagatatcataaacttaccattatatctatctaagtcaatatcagcttagttgatcttaggtcaatagatcttaatcctgatatggttaagttcgagctcaattatattatttatgttcttgcagttgttcattaaagctaaccaatggattggcccaatacttacttcttgagaacatggtagtataattgagtgggagcgctaatcatagatatggaattaatagcttctataaatgcataaaagtaaaatgttgattttctttgagcttggcttaatagatataaatgattga

SEQ ID NO: 223750 - DNA, 1269 bp, Cannabis indica
tatatacatgtatttgtattcctatgttcgcatatgcctttgagtttttcatattttttttcttgtaatcaatgtgagttaagtgataatcctttagatgaattgaagttcaccaggaagcgataaacattcaccggagagagattactttaactttttttttatgatgtttataagaaagatgcaaagaaggtatttatctgttttttaagtttgtgaatgtttatataaagaacttatataaataaagaatatcgtgtgtaatttttaatgaacccaacccataaattttatattttctttgtccgagaataaaaatatatgagatttcatactgaactttatttgaattttttgcttcaaagttccaccactattaatacctcctcaacctccacaaggaggtccttgtcagagaatgcttccgacttctcattgtataaatatgataatttggagccttgacaattagtttttttattgcacctataataggtaagttgttgattgtattattattattattgttatagttgttgttaattggcttcatgcttgtggatttatttttatcatctatttggattttattttctaaatagactcctctatttatatttatacataaaatatatatttatttacacaatattatattttctttgattcagattgcagagcttatagtatattctttaactggtcatagtgaatttgtatatcatttctcgcacaattttttatttatatctgctccatttttctttttcttttaaatgcttaaaataaaatttattatttagcaaaaatagtaaaagattgaacctttaaaactttttatattgtgtcatgagaaaattcttctaggtatgtccaaaaatattttggttctgctctaaacaaatcaactaacacatagtcatatatttcttcatacgaacttttttctttgtttgaacaaagaaattttatataaagaaatttaaatttaaaatattataaatatttttaaccatatttttaactttattattatttattttacatcttaaattaaaatagttgtaatgaggaattgattgcttttcattttagttatggtaaagcgattttcacacatcataatatttgttgtaaagtttgagaataaaaaacctttatatcaaatttacgaatccagcctatatatatagacacactcaaatttgattagggaaatttaaaaaaatatgcatgaaataccttaaaaatttttccctaatctaatac

SEQ ID NO: 223751 - DNA, 2573 bp, Cannabis indica
gttgtatcactcccccctcaagcgaaagggtgttggacacactttgaagcttgtgctttgagataatgaaatcgatcagttgatagtggcttcgttagaatatctgcaatttggtcacaggaaggcacatatcgaacttcgacttgttttgctagaatttggtctcgaatgaagtgtaggtcgatttcgatgtgctttgatcgagcgtgaaagactggattggcagctagtgaagctacacctaagttgtcaacccaaattattggtgttttgggcagaggaactttgagttcactgagaacagagcagagccaccttaattctgctgctgtgtttgcgagggctctaaattcgctttccgtactcgatctagccacgacaggttgtttttttgcagaccaagacaccaggtttcctccaaagaaaattgcatatccacccgtggatcgtcggtcatctgggcaacttgcccaatcgacatcggagtatgcttgaagaaagaattgtggtgctggtctgatgaggagtccttcatgaattgtccctttaaggtatctgaataaccgtttacatgcttcccaatggactgttgttggagcgtgaataaattgacttaacttgttgataatgaatgcaacgtccggcctagttaaagtcaggtattgtaaggcccctaatgtgcttctgtagagtgtttggtccataaatggttctccctcggatagtgaaagcttgtgtgtagagcttgtgggatttggagaaggcttagcaccatccatgtgaagtttaaccagtaaatcagagatatatattgtcagggatagatacattccagtggcatttcgagcaatttcaacccccgaaaagtagtgtaatggcccaagattaattatagaaaacacttgattcaattcctttataagactgttgatgattgtgttgtttggccctgtgatgattatatcatcaacatacaccagaagcacaactaaatcctttgcagagcctcggataagcaaggatgtgtctgattgagaagcagaaaaaccttttcaaaataaggtttgtttcggtgtatcgttccaagcacgtggtgcttgctttagaccatataatgctttgtgaagcttgcatacatgagttggtttctcagcatcaacaaatccaggggcctggggcatgtacacggtttcttggagtgagccatttaagaatgcattcgaaacatccagctggtttattggccaattgtttgttacagcaatggtgaggagcaatcaaattgttgctggtttgacaaccggactgaatgtgtctgtgaaatcgatccttggagtttggaggtagccctttgctacaagccttgacttgagcttattgactgaaccatctgaattgagctttacccgatgcacccatttgttgtcaaccaaagtcattgatgaatcataaggaaccagggtccatgttccattattttagagctatgtattcaccgtgcatggctttaaaccatttaggattggctaaggcttgcttaagtgttttaggttcagtgagggttagagattcaggtaaagggtgattggtggcaaggtatgctttcggtttagtgactccatttttggatcttgttgtcataggatgagaatttgtgggtggtggaggggctagtaactgtgtaggggttggaatgatggtagtttggttgatgtgtgatgatggtactggtgcatgagatataggattggtggggggcatctggtgcattgggctcatttggctcattgatggttgcagctggtgcaggtgcagggtgcagggtgctgggattgcttgcaataacatcaccagcagtaggtgtaacaacaacaggagtacttgagttagataaaatattttccataggagtagtaaagaaggaagttgttggaaataatatggagggtgatggttgtacttgttggtgtgttgatgtagattttgctggaaattcttgctcattaaagattacatttcgagtaatatatgttctccctgtttgacttctgcagaagtatcctttgtgctgcatagaatagcccacaaatgtacatttttctgattgaatctcgagtttgtgagattgatatggtcgtaaatgaaggtagcaagagcatccaaaaggcttaaaaaagctgtagtcaggctccttgtgaaagagacattcatagggtgatagatcatcaataacaggtgtaggaagcctgttgatgacatatacagtatgttgaaaagctagccaccagtgtgttaagtcaaggccagatttagcaagcaaagtgagcccaatttctgtgatatgtcgatgctttctcttaaccctaccattttgctcatggtcatggggacaagggtgttgaaaagagatgccatgttgagtaagaaacttagcaaaaaccctgtactcacctccccagttcgattggacatttttatggggagttcaaactgtttctcaacaagctttttaaactctaggaatagagaaaagggttgcgatttgactgttaggggaaaaatccaggtaaacc

SEQ ID NO: 223752 - DNA, 1143 bp, Cannabis indica
agctcatactttctagcaggtgacaatatataaccaacataatcataacacataattggatatcaggttattattatattctattttaccaaacagtttgattttgtactattttaaaaatataagatataaattaattattatttaaccaactaaaaaatgtaataggtaatttttgctaagcacatgtatatagtccaaaatattttttaccattatatataaatatatatatatttcttcaaaaaaatatagatgtttatttttatatgataatgtacaaggtatataataattgaatagtttaggatgccctctcagaaattactacaaaaaatagtgacaatcttttagttacaacatatattttttgtgactaaatgtgatttttagtcacaacaaaaacttacttgtgactaaaatatagtatttggatacaagttgtcactaatttacttttagtcacaataacaagtattgtgacttaaaagcacatttagtcacaacaaattgtgatttttgtgactaatacttttagttacggaccttttagtcagaatataggaatgatacatgatttataattaatcacaatttttttacttttaatcacaaattttattgtgactaaaagtaagattttttgtagtgaatgtgtgtatcaatacacccttttttgtcttctacatttggatagctatgattataattctatttttatatgacatgtatattgtatatatgtatgacatgctgcagaattttaaaatttttaaaacagtttaccagcatgcccaaaattaacttcaaacattctatagcatttatttttattttattttatatacgtgtgtgacacacataattggaactcttatcatttttttgtactttaaatttttcggaagttttcgaattgtaggatgtaaatttgtactataactatataatatatacagtcacataaaaaaattgttgagttttaaattttaatttctccaactgctaaaaatagaggtttcctagggatatagagacagaaactttgtccttatttgtgtgtaaaaaaaaacattttaaggagatagagataaaaatgatatccctgcaaattaattataagtaaaaataatgaaataaaga

SEQ ID NO: 223753 - DNA, 1244 bp, Cannabis indica
tttacttattaacacatcctttcctcttggtaatttttagaacaactatttattcaacgtcctaaaatgaatctttctagcgtacttggtcctcactcgtatgcttttcgagatgactccccgaaagatttctcatcttgagaataccccaagttaagtatgcttgactctaaggtaagcgcatggtgggttatacaaaaattagatgcttctttgtcgttcctacttgaatttcttattttggtccgtccgttatttaaatccaacttccatcttcattatcctcttacaattcctcatcaattttgttcacttatggttgaagaattttcatcttattgtcaacttgaatcttatccatctccataaattttaacttgcatccattttctgagttcttagctaataacaattgatcaaagaacattccttgatctcaaagctctgtattagtgttaggtaaaaatcctaaaattcccttattaacacacccaaaagtatacatatttcaagtatattctttattttattgacaatcccttggtgtgaactaccactccaacttgtagcgagtcccacgttgatggtgttgattcattaacatctaagactcttatattcttttgccgttattaccactaaggttttactccatgattcgtatgctactattgcttccttgcaatcatcactatctttatacttggttaatcactcgaatacatgtccattaaattgcacctcaatttattagcttttccccatcctgggtgaatatgtccttccatcattgcttaataagaataaaattttcctagaatttcaatggtctccttatatgccatattgattatccagtcaattataaaagcactttccattattaccgcatcattataagtaatccaagtaatctctttaccttagtaatctctttacctacttcaagccgacccttatagtcaaagaataatggcccctatacacgagtgcatcactctatctaattactggaaagatgattggccctagagaccaatctaagtatttctaacgtgctttgttctggtttgcacgcttcatgggaaaatttcctaaattaaatcaccccaggtcaaggactcttaaccatgtagttccatcatggtgggctaccaaaacaagatgcttcttgcgaacataggtagtcccaagcaatccattcaagtcctcaaccactatgtagtcccacacctacataatct

SEQ ID NO: 223754 - DNA, 1892 bp, Cannabis indica
  modified_base (1883)..(1883): a, c, t, g, unknown or other
tttttgcatctggattgcttggctgttgattttcagatgaaaggggaatttataatgattcaatggtcctttgtgaaggctcaagcttctcagtcataattttaatttgaatccaaaacttaaatttgcatatattggaacctcaataaatgagactttaaaaactgtaactgttataaatgtctaatttaactgtggaccttattgtctcctgctgtgtaaccaataaaaatgggagaggtaaagtgctgctataatcacttaatttggcagtgctaactcttatacggccaagtgcttagtttgtgcaaatgtggataatatgtacatttaatgtattacagtttgaaaattgtttataactacttcgtacattcatttaactagcttcaagtttggtttctaatgcgagttttgaaaattttcttctatagaggtttcgatgatgaaatgagggcagcagttgcaagaaatctagaatctaggggagttaatttacatccaaggacaaatttgacagaggtacaacttttatgttctgtatggtttgtgcagagctgtcttgaatttgattgtttcttattttcatgtgtattgacttttcattactttctgataaacgcttacctccgtgaacacttctctttgtaaattcaggtgataaaaacagaggacggtataaaagctattactgaccatggtgaagagttgatagctgatgctgtattgtttgccactggtatttaacgaatctgtcctatgtatgatggttttatattagcttttgggttagttgtaactatgctggattagtcagagaaattggtgattcttggtttgttaaacataactgtgtgtgcacatttgttaattatatttggtcttcattttgttttttgtgaagtatgatccttttcactttgaaattcttcttcacaacttccccattattccttctcgtaattttcacatcagttgctctctctttatgtctctctcttacacacaaaaacaccgagacataaagttaaggtgggagttaataattaattaagtcaccttagttttaacatagtgcaaattgtccattgttctcaaaacaaggagctactacttgcaaacatgaggccgatacttgtgatatttgtcgttattcatgacagtattattttgttgactataggtcgggctcccaacacaaagaggctgaatttgggttccgttggcgtcgaaattgataaagttggagctataaaggtgacaaggaaatgttcacaatcatatactcgactagatgttgtcttgaaaacgataatgtattaacattgatctctgtttcttttttttctcttctaggtggatgagttctcacagacaaatattcctagcatatgggctattggtgatgttacaaaccgagtaaatcttacccctgtcgccttaatggaggggacatgttttgctgtatgtgttccctttccaccttttcttattccttttcctctaaattatcttcatcatgtgtgtctttcttattatatttctcttctttttctttgataacctattatattcttttcttgatgtgtacagaaaactgtttttggtggggaacctaccaaagcagattaccgagatatcccttgtgcagtgtttaggtaattattttgtccttttttgtttttttaacacagatcactagttatttgttacatttgtgattcacagttagctgattctgttaaatatttaccttggtaccaaagcactagatgataaattattttctttttatgaaaaacataattaagttagattggtggttataacttataacctattattaagtagtagcctttgttatttaggaccccccccccccncctctctct

SEQ ID NO: 223755 - DNA, 1230 bp, Cannabis indica
ttctccttgttatgtttgccctttggcaaagcaaaagaagttaccttttcctaataaaaactcttttgctcataacaaatttgatcttgtgcactgtgatacttggggaccatatcatattccatcccattccaactacaaatattttcttacattggtagatgaccacactcgtttcacatgggtttatctgttgcaacataaatcagatgctgtcactatagttcctcaatttatttcatatgttcaaacacaatttcaatgcactatcaaacgttttcgatctgataatgcacctgagttagtgttcaaggatctcttttctcaacttggtatattacatgactttacttgcattgaaacgcccgagcaaaacgctatagctgaaagaaaacaccagcaccttttaaatgttgcccgtgctttattttttcaagctaagctgcctataaagttctggtctgaatgcataatgactgccatatttttaataaatcgcactcctactcctcttctacaaaacaaaacaccatatgaacttctttttggaactacaccagattactcaaacttgaggaattttggttgccttgtttttgcatcaaccctcacggcccatagaaccaaatttgctccaagagcaaaaccttgtgttttcttaagctacccccaaggagtaaagggatataaactttatgatctgaatagcaaacaaattttcatctctagaaatgttattttccatgaacacatttatccttttaaaactctcaatactgatcataatgttattgacccgttttctaatatggtgtttccctctcctattatttctaacactcctataagtgattttcctacagatatacatttaaatgacaacacagatgacaacatgcaggaacctatcacagaaaccatcgatacttcagcatctgtacctgttgatcacaataccgatcctccaacaactgaagtacccttaagaagaacatccaggcagagcaaaccaccagcatacttaaaggactatgaatgccattctatcctacaggatcaaaaatccacacctcatcctctaagtaagtttatttcctatgataaactttcagatactcatagagcctttattcttgctgtcacagctctctttgaaccaagaaactacaaacaagctcggcaacataaaatctggaatcaagccatgcaaactgaattgtacgcactttt

SEQ ID NO: 223756 - DNA, 1243 bp, Cannabis indica
ggaagcatagcatttatggatgaaaaagagatagtagaaacggcatggggtttagccaacagcaagcgacctttcttgtgggtagttcgaactgactcgggcattggcggagatgtgattaaaaacctgcctgaaagttttgacgaagcggtaagagaaaggggctgcgctgtgaattgggcaccccaaaaagaagtcttggcacacaaagcagtaggaggattttggagccactgtggttggaattcaaaatagcaaggggaaagtagtggctggttgtttctctttctgttagaaaaaataattacaatacaataataaaatgataacacctgagtcgtgcaaacaagacactgttcttaaggatttacaaagtaatctcccaagattcaataggtcttctgattacaatgaaagaaccaggaaaacagaaacagtaaaaaaaaaaaaataacccagccaagaataattatatatatataaataatatataatgtatatatatgttgtatatatgcgatactgtataggtatgaaaactcttttacgatatatatcttattgttctcttaagtgcctatatatacgtatagagcactaacgttcataaagaacgttgctctcaatttggagataaaactggatcaggtggcatattaataggaatgatatatctcaaatatatggccaagtcaacaaataaaatctgccagatctattcttttgaaatatatataatatataataatataaatatacacatatatctatatcttacaacaatcccccacatatttcaaaagaaaatttataaaaaattaattttgctgggtaaaatatatgagtgtaaaatgctttgaatctggtgtcttttggactatgaaccagttctagaaagataagacacaataaatagaatattggtgaaacatttagtttctatgaaccaatactctttaatataaattataatcttatcaatcacattacacccccactatttttgctgtttggcgcggtgttgcgcaaataggccgtgcgcgtgcctggtaattcatgagtgctctagaaattatgccacaatttcataggagcggccccactccacactcatataggtgatttcatcaagtatatactgcatttaatacaccacccataatggatatgaaattcattaagagcacagtagctcatcctcacaattatgcagtctagcacttctcacacataggaagggaca

SEQ ID NO: 223757 - DNA, 2012 bp, Cannabis indica
atatgaacatagggtttttttacgtggttttgcagttaaaattttgcatagtccaagagtcaatcttattcaggcttctgagtattttttttcagggcctctttcgtaagagttttttcgtccccaccttttgatcttgtctgctactatttataattgtatagtgacagttaattacaaagctgaccaaagtatgtttacagccattatccctaaaatcatgggatctgattacaaatcaagtcatataaatgaggttttacacagctacgagtatcccgcttttattgggccgagataaacacgtaatcaaatatatacgataagccttatctcataaggatgcctcgctgagaatggagccaagataactttgatagcgagcagttgcttgtcattttggcttctcgagactaatattattttaactctgattactataccttctggagtcgagatgatctttctcacatgtgtaccatcttctagcgagataaacgcctcactgtctcttatcttgactctgcacccacatggtttctcgtcaatacaagttagcagttcgtacgtttttatctcgcagaaggctattcagccagccgagttataaacataccctgcgaattatatttccaacgagttgttccatgctaagtatacttttcgtttgcgggtttgagttcttcgttcttcccagctcgatacgtgtcttcctctgatgtgcttaccaaatctcgggtataacaccttgctcgggtaagtagacgttgtgcgtgcatatgtgctacttgaagtctattcgggatattcatctctgcccaggtgcaaggaatgttggacacgtgtcactcgtatgtgttaccacgtcgtagtgcaaaaaataggataatacacatgactcattacaaaaactactacttttagtgataattttttagtcacaatactattttttggtgacaaaatgtgatttttagtcacaacaaaatgttacttgtgactaaaatataatctttagttacaagttgtcactaatttagttttagttacaacaagtattgtgacaaaaaatacatttagtcacaacaagctgtaatttttgtgactaatacctttagccacggactttttagtcacaatataggaattaataaataatcacaatttttttacttttagtcacaaattttattgtgactgaatgtaagttttttgtagtgactataagtgtcactctatgtaataagattgtgatttgagtgtagaacaaaattagtcttaaacaagtacaatttctcaactacaggtgcaattaaatggacacaggaaacaaaagagattattctctttaacaaaccatatatatgcaagatattttgacccaaataagaaaattaaattcaaaacagttgtaggttgttgactgttgactgtgtaaatataaatacatttattcacttcacaccagaataatacaatcaatcattacatcaacaaatatatatataggtattattcaaaaaaatatatataggtaaatttataataatagatgaacatgaaggtagcatatgaatgacaaccagtttattagaggagtaatgtgattagtcaataattccaaaaattgaagacaaacccagtactgtgctaattaaaaagaaacagtcagccttatttattttttttattacaaatatatacagatctgtctaaagtattattgatattattattttgggatataataagtaagctaactcgtatatagtttccactacacagaccaagcagaatgtcaaacccaaaaagttaaattattatatatgctattatgctttaatgcttaatcataacctcattattatgagaagtccttaattgatttgtccccatacacattaaattatatattattaaataaaggagagaggactttttcatgtgacctttaagtgggaaaaggggtcatgtagaaaataaaagaataaataattataatatttgttagg

SEQ ID NO: 223758 - DNA, 5257 bp, Cannabis indica
ttctttaatatttgctgaaaaaaagtgcctctacaggcttggtttgtagtagtgtggtttgaaacaatccccaaggcaatggaataaattctttgatacctatatgcaacaaattgggtttaaacaatcagcatatgatcaccgcttgtatttcaagaatctaaagcaatctacagttgtcatcttattgttatatgtggatgatatgatcatcatgagcaaggatagatctatgattaaaagtatcaaagccaagcttcaaagaaaatttgagatgaaggagcttgggccagttcaaaagatactttgtatcgaggtttcaaggaactggaaggaagggaccattagcttgaagcggtctaggttcatcaagaaagttatccaaaagttcaacatggaagatgcaaagagtacatccgttccattagggggatagttcattttatcgaaggaacaatgtcctaacaattcaaaggagaaagaggagatgaaggatgtaccatatgctatggtcttatgatgtttaatgtatgtgatggtgagcaccagaccaaatatagctcatgctctaagcattgtaagtcaattcatgtccgatctgagcagtgaacatttgaaggcccttaaatagttattgagatacttgaagggcacttggaattatggtctaacctacgagaaagcaaaatgaggattagagttaaaaggatttgtggatgctgactgaacagagatactagaaatcaaccacttcctatattttcttgataaaccaaaactatataagctggaaggcccaattacagtccgtagttgctgtttccaccacgaaagtagagtttatggggactacggaagcattcaaggaacattatggcttcggcgaattctattcaaattgaaacaaatcaaagggggagagaatgtgaattcagatagtcagtcatccatccatctttgtaagaacccagtttatcataaaagtgcaaacatacagacataagactctactggattatagttatgatatatatccttaatgatcatattctctcatatgttttttctctaataattataagctatatttctctttttattttcttaaataattaagagtcaaaataaattaagtagtaagtacgtatatttttttattataaatattgtatattgtgttttcatgttaatttctgaatttgatatatagtaaatttgatatataattagataataaagaacataaatttaaggaaaaaaataagaaattctgttaaattaagatattttcccattctataaatttatttatttataagaagataataagcttacctacataaatatctgtcaatgaacatgtagctgagatatatgaaagaccctttgaagataaaattagacacctgcaaaaatataattaaaaatattcaagaataatcagaaaaaacaactgcagaaattaagttaattaattgagattaaagctcttatatttactttcttacaaattaagtttctgataatatacttcaacgagttgatgaatatggagaagctctgagattattaaattctcaaaaaacgaatacagcaataataaaatatttataatttgtaagaaaattgtgaagaaacaagtctatattatatgtatatttataattaatatataaagagagatattttaattatatataaagagagagagagagagagagagagagagagtattttataatatgtggaggacaatgtaagtcgccaagactgaccaattagaagcattacatataattatttatcacacttttgtgacatatattaatttgacttttctgcagctccaaaataatgtgaggggtaatgtagtaattatatagatacactaaattgatacatagttatatagcttattttgttttattattaatctaattaatgttttttcataaaaataattgtaattttttatttgtcatgtagtgatgagtacctaacttaaaaaataaaaaatggaaaaaagaatatagtataaattatatgtattgtgggaaaaattaaagggtttacttttttaatataattaaataaggctgttttataaaaatattaaattttggggtaaggtttatatttatactgccacacgataaaattttcgaaaatattgccctggctctctttttttttttttttcttttattactgtacatactgtaaatcacaaatgagatctctattttccacacctacggacaaaactatcataacaatatcaaaacagccggaaaacaaccactaattctggcgacatacaatagaaacattaaaatcaacatcaaatcaacacccaaaagcttcgtgaataacaaaaatcaacagatcaaaaaggttagaagcttataaatccactcaaattcttttaaatccgaaattacaaatgatgctcaaacatagatctcaaaattcttttaacctgttgtttgagcactttaaattcttaaacatatataataatacgagggttgtcatgatttttctaatattatttttgggttattccagtgatgtttcgtatgttaacaaatgctgatttcaaattacacaggttaaatgaaccattgaatatgtatttcaggcaaccagaataaaataattatagacaataaagctcaaatagagaacatgcacatgtaacaggttactacacaagctttgtttaaattactacaccaagaaaaactggctagcaagttatgaaggaacagtgtacacaatgggataccaaagtgatttaaatgtaccataaaatgtgaaagacgtaatagtcttgcctcctattgaaagggtgaaagctggaagaccaaaaaaatagaggatggaagctgactgaaaaaagaaacaacataataaatgtagcaaatgtgagggttggggcacaacaagagaacatgcagggcaagactacatcaaaaataaaaagaaccagaacgactaaaaaataacactggaacaacagaggaaaactgaacatatatattagagcataggatactgaagaaaagaacaaccatacccacaaaatccacccccttaaccaacatatgggcttaatcctagacactattatgaagctcaaagaccaccaattctcaacaaacaccaccaccttctcaagtgaccaaaaatgaactatcttctgacacaattaaccaatttatgagtgaaacaagatcatccattagtaacttagagattcaaatgggtcaaattataaaattgttgtctaaacgcaatcaagggactttgcctagcactattgaagtaaatcctagagaacgatgtaatgtaatcactctaagaagtggtaaagagttagacgagccagttaatccaaagtcaaaggttaaagtggaagacaaggaaaagaagatagatgatcaacatgtcactattccaacaaaagaaaaggataccgaagacattttcaagaaggagaaacctaaatatgaagagcctacaccaaagattctatatccttaaaggcttcataaaaataatcttgataagtagtttttcaagttcttagaagtattcaagaagttgcatatcaatatcccatttgctgaggcacttgagaaaataccaacttatcaaaaatttttgaagaaaattctatcaaagaaaaaaattggaagaatatgaaacagtagaaattgctaaggagtgcaacctaatcttgtaaaagaaactacgtcccaagctcaaagatccaggtagtttcaatatgaagaggtgacatttaatgcctttgaagcaatagatattccaactttttgtagaattgaggtggtgaatgagtgtcaaataataaatggtcgaaagaagaagaagaccaaagaacaatttcgtcctactcgacatcgaatgaaaagcttgttttgtgggaagtttgaaggttttgatgatattgtggatatataattgtaatattctcaacaataaaacaaggttttccctatttgatacattaacactcaaggatgatcagggtagacttgatctaagttgagtttttttaaaaaaagtgagtgtcaagttggatatgttaaataaagcgttcttgggaggcaatccaattttatttttagtttaaaaaagtactcctattacattttttagagccacctcgtatgaaatctatgtctactttaaatatggtctagtttgaatttctttccaaaatttcacatcgacgcgccgccaccaccaccattttgatatacttggcaggggtgtcaggtaagttttctttccttttagtttatttgcacattgagaacaatgtgtttaataagctttggggggatctttcttatttttttatttatatttagttttctttttgttcgtgatatttgtcatgtatttagttgtatttgtgtttttatgtctggtaaatagtatgttagttggtttttatgagtcaagttgtcactttatgagccaataatatattaatactaggagtatgtaacatgattgtaagaaattttttgcaattgttggatatctaattaattggtaagattgcattgtgatttaaatttaaatcctccataaaaatgaatacgataccatacttggtaaattttgattatttgagtgttgtttatacatgctaaatagaaaagtggaatgatggagaaattcattcgagaaattgtttacttgctatttaaggtggaatcatatatgatgcatgtttttgaagatagtctagtaaattttttttagaccgattaatccttttaagccaaccttgtaattattttatccctagttccctatttgagcctattgcaaaactctaggaattgaagcaaagcattgatgatcccatcatatgactagctaattacaagctaatattatatgtagttgttttatgttttacaatttgggatgacttatgcttacctattaataggaattagttaacaaaccttagtgcaactgattagctagggagataattaattgagagataagaaaatatggatagagacaagtcatgtgccttatcacaaaatgttacaacatgaaagaacaataagtgatctgaattaatccatgcattcataatatatgatcttcattacgattgtgtttgagaatgatatgtgtggtgaatagcttttttaagttttaaacttaattaatgtgacaactcaattcacaacctatatatgaa

SEQ ID NO: 223759 - DNA, 1688 bp, Cannabis indica
gcttgatcctcctcatctaccttttacaccatattgttcagatcaagaacatcttgttaaaatcatctaggtgtcttctaagttctttgccatctttaccatcctcaaggtgtacagcttcttcttcaagtacaacttatttgcaagggacttattcatgtagattgtagcaagcttttcccataatccaagggctttctcttcatcagcaacttctcttagcacttcatctcctagactgagcagaatgacagaatgtgcttttgtctcgatttcttgtttcttctttgcatcttcaattgccttcaatgcatctacattaatggcttcagcaatgccttgatgcaccagcaaggccctcatcttgattctccaaaggttgaagtcattagctcctgtaaacttgtcaacctcatacttggttgttgccatttcttgatttcaatcttgctgctatgaaactttaattatcaaacacttcttgatctccttgaattgaacctcggctctgatatcatttgatgtgatccaacctgatcacagtaaccaagatcaagaacaaaaactcataattgatcaaagtttaaaagtaaaacaaataacagcagtaggaaatgagattgaaaaacaaatacagaaatgaaaaacaaaattcagccattgaggcaattcccattaaacaattatataaggagagattacacatgaataggtagtcccaatcaagaactagagagcaataatacaccaaaaaaatcagcaccaagagttgatggtttttcacaccagaactcaatctctctcacaaattctctcagctcttaatctttattacaggtaagagacacaccaaaaagaaccaccttatcctatagttagttatgtctatttataggcataactaacttaatcgacatacctaacaaacaggtattacagttgctaacagaaatggaaaagtacctaagagcagttatctaagacttagtttctaggccacattacaacaataaacaatataaaaaacttagcacattaaaatgtaatattaatatacaggggtggactcacatggaggcgagagggtactacaaaaaactgctacttttagtgacaattttttagtcacaatataattttttgtgacgaaatgtgctttttagtcacaacaaaatgttaattgtgactaaaatatagtttttcgatataagtttgtaattttagttttagtcacaacaagtattgtgacattaatttagttttagtcacaacaagtattgtgactaaaaatatatttagtcacaataaattataatttttgagattaatactttttgtcacggacattttagtcacaacataggaataataatttataattagtcataactttttcacttttagttacaagttttattgtgactaattgtaagattttttgtagtggagcactcgtccactttgaaaaaaaaaaaaaataaaaaatatatatattatttagttaaatatatatataattagtcataacattttcacttttagttacattaaatattactcatgttaacaagccaataaactcaccattattattaaatacttaaatgaaataagactatataataaataattatttaaacctaatagaatagtcataaaataattttaaatttatcaaatatatcata

SEQ ID NO: 223760 - DNA, 1271 bp, Cannabis indica
cccaatttaaccaagctttgtgcactccagatgctacgccaaacgaaacttggattgttgccaagctctgcagtaagaaaatcagagttgggataatacttggcttggaacacacggctggcaagggatgttggggagacaagaaaccgcacccttgtttggccaacatcgcaagattaaagtcatgtaagtgacgaaaacccataccacctgaatgtttgggagttgccatgcgatcccaagacatccaaatgattccttgacctttagcacttgaagttttccaccaaaagttagccataatcttctcaatttcttgacaggtttccaagggaagaaggaagacgctcatagcgtaagttggaagagattgaataacagatttaaggagaacttccttgcctgcacgagataaaaacttgccattccaactattgagccgatttatgatcttgtttttgaggaagccgagtatcacagtcttctttctacctataatgttaggtagtcctaatagtttttaaaaactcaatttttaaaattttttgccaaacgactccaaatagttcttaaaaacggttttcatttttaaaaaatagaaaacaatttttaaactgtaaagccaaacaacccctatattttaaacaaaattcagccgaatacgaagcacacagtttattttcaaagtttatgaataacattgtgtgcatagtagaatctccaaaagataaataaataaaaggtaaagaaaaaaagtaggatgttaaaatataaagatggaaagaaggaccaccccggtgaatgcaacgggtaaatgagaatcacactttatgggcactcaacactaaaaaataatataaaagtgagtgagtgcgtagaggaggcggataatagatatatgaagactgtagttgggatttgaccccgctttgttgactcacctaataaactaaccaactcacgttattcgtattggctgggcggccaaactggaccaccctccctcactcatccaacaaaaataacaaaccttctatcacctttcgtaaagttccacctggcagtaatagacattaattgcatattctacttttttatactttgcttacgacaataaggttttgtttgcttacatcttcatcactcttgtatggatggaaggatgatgcaatactcatgcaacaaagattgatgtggttgagcaatccaaagtttagtggaggggttaaaaaatctataggatttgtcatatctaatttagtaaaaaaaaa

SEQ ID NO: 223761 - DNA, 1444 bp, Cannabis indica
atttcagaatgtttgatgaagctattagaattctaaagaatgtcaagtatgtacctaacctaactaaaaacttaatttttctgttggtacacttgatgatgtagggattcaaacaagattgagaatagagctatgaagattaccaaaggttcaatggtgatgataaaaggagagaaaagaaatggtctgcactatttgattggagagactgtgacaggtgaagtctctctagcatcaaatagtgaagatgcaaatgcaatattgtggcataggaggatgggacacatcagtagcataggacttaataggtaattcatgatcaatgattacttgaaaaggacaaaatcagcaaagtggaattttgggaaagctgtattttgggaaaacaacacaaattgagcttgagtgttggaaagcattgttcaaagggaatcctagactacttacatgctgacgtatgaagaccagaaaaaatacctacacatggaggtaaatcataccttctctcaattgttgatgatttttctagaaaagtttaagtatttttattaaaaactaaaaattaagctttagaaaaattcaaacaatgaaaactgttaatagaaaacttaacagaaagaaaaattaaaaacagactacctaaagtatgttcatttctcctatttctcacatactacctaaagtatactcgtgaaatgagacttccaatctcatatttgagttgtcgacactccttagttatgtggtcaatatctttgtgaaagcgacaatatctattgtgatcccgtttattcctcgcatttctcataggttctattttgcaaaaagtgaccctattctcatttgcaaggaattttttaataacatgtctgattcaactctatgtgaattgtaatatcttgaaaaatataactatatttaattagacatattctattaaatatgtagtgatatgaatatttagagtaagattataatcttacacaagctaattatgaaataattagtgaattttgagaaaataattaaataagtgtaatttattaattatgaaaattttattagaatatataggtattatatatgtcatttttgaaataaaatattttcagattcggcgaccgtggaagcacgattatctagccaaggatatcacgatggtaatagattgagttttggttgtacttaaatattttagtagatatttttattgataggatatttcgggatagttaattttgaccaaaatacccctaaattagaaatttgcataagtggttagttaagggtaaaatagtaactttactaaattttttatttgttttatatgggattctagtatgtcctgtaatatagtattttaagttagtttattttgataagtctaattaagagataaatcaaataggaatatcacaaaaaaaaaaaaattctctctctctct

SEQ ID NO: 223762 - DNA, 1210 bp, Cannabis indica
gtttttctagtcatctcgttttgattgctctttctcttctcgccattgttttcacaccctttccttgtccggtttcttgaggcatgtttgttcttttctagtttgagtgttggttgtctagattctgtctttggtctcttctctcttgtgttttctcctggtcttttctttccgagtgtttctccaatagatgtgagtttttggtctgttatggaggctgatttggccagcttttggggctcttggttggggtcgacgtcgtctttatcggactgcttctttggcagtggtttccttgctaaccgtggttctacgcgaggggttcaacgatcatcttctccgaccgaggctcaggcggagggagagattgttattgtgtgtgcttcgattcacggtcaagccggtttcgttccgggtaaagctccgtttgttttgaatagagtgatgttgacaagtcgaggtaggatgttgacaagtcgtggtgagccgatctctggtaagggccagcgtgctgcgtggatcatcaaaccaaaaccagctggtaagggcacgccggttgccaatttgggtttgcagaccggtcttgaagatggagcaagtggaaaggtttctgctggtttgcctgaaatagtcacgcctatgtctgtaccttcaagtgaccgtttgatgataaatgtgcctcatttgaataaggcttttgacgaaggaagcaatatgggccgaactcaagttgtgtcattgcaaaaaggtgggccggtctctcctagtgggccagatgcaatgggatataataataatgggccacttaatttaaatgtgaaggccaaaggttgtttatctcttggtgttgacgtggagcgtggaatgagtggggctttaatggatgggccgattgttgttaatggtccagttggggaaaagattagtgaaattggtgatgggccgaatgactctaatggaccaattaattatcatgagcctattgtttctaatgggctggttcttaatgaggcacatttaattgaatgtgggaaggatactaataccatgtttaatggaaaggaggcagagaagaatattgaggaaaaaaaggccttgtctcatttttttaaagcacaagaagagttacttcatgacttgaaacattttggtaagttggacttgtatgagatcaaaagtgtgggtggtgacattggagtaccgccttcct

SEQ ID NO: 223763 - DNA, 930 bp, Cannabis indica
ttttttttatttattattaatttatagcaacgttagcaacttctccaaaactaacaaaatttttatgaattgtttgcttgggtttctcatttttaaattcttagtcattagaggttgtcggttttgtctgactaggcccgccggctctccttaggcttaagtgtggcttggtcaggatttgtggtaacgtgattaaatttttactactgcgattaattagtcttgtatttgtgacatagttttgagtgtcttttgtttatgtgactgcgattatagtcttttctatgtgatacgaatttatttcgttttgtttcattgatggtttatcttctttgtttttcaatgactcaccttcaaatcactgttaatggttgagaataacaagttctttaaggctgatgatgttgtatttgcacaatagttgagtgctcaaattaaaaggttgaatgaacttgctgcaacattttttaatgttgtgtcttttgaacagtagagaaaattgaataaggtgttcttaaagttaactgtgatactacaatctttttaatttgattttattattttagttttttttgtcaaataatccatgaatcgtgcagctgattggctagttctttattctaattctagtcatgtttccaataaaaaaaatattacgattaagttggaggttattattataattaaatactattaataaaattgtatcatttaattaaaaataaaatagaaagaaactactaattaacgattatatacttattatataaaataattccattaaatgtatataatataattataaaaaaagtagggaaaagatgtatattaatgtgtcttatgactcttatctatatatatatatatataccaaggtgattgttacgtgccaagccacgtagtgttagttttatttaatattttagtttt

SEQ ID NO: 223764 - DNA, 1865 bp, Cannabis indica
cttcctaaatctctcatacaaagtctccatacggttaccagtaataagttgttctgctggcaccgcaggaatcacaacagcaggagtttgcaggggaggctgaacaagagcatcccgttgcctaagccttcgaatctcatcttcttgttgagtaattctggcttgcatcttagcaaacctctactcccaatcaaatggagcttaaggaggattctcttgaccacccctaagagcacaaccgtagcctataccacgtccacaggggttttggggatttttacctccccgaccacctacggtttcaaccatttcaccctgttgtctaacgtttcgctgggcgtccattgcttaggacttagcctgcaaacctactaggcatacaggttagacagtggtcaaaatactttcaagaaagcatttagggttaaacaacaatgtacacatatatgcaatatatcttaatcagtttgcaaaaagtaaagcttatggaaccgtgagttgagctcaacactgcccttgattgtacatatttggactgtcttcagtgaacaacctggtggctttaatacaattgtaacgcccgtatttaaaacttataaatctttgaagctaattttattatattataatcatatagccatataggtcgggatcatgagttataaaatacagttaaaaatcatatttactattacaaaaccccttgataatttttttttacaatcgacatgcatctataaaatataattcaaaatattgaaaggtcgaaaccctccaggttgcactaccacaatatatacaatcactgccaagccccaactcactgctcgtcccacttaccttttcctttccctactcaaggtagcaaactgatgagtcgacagactcagtaacatatgcataacatatgtgaaagcaatgctctaccgactttatgcttaagctgacctgagctcatcaaccgagctcaccaaatggttaagaacgttcttaatggaagtacgaccactgtaccatatgcataaaagtaccaactctgtactcgtgtcggtagggtcttcactgtacttccagaagttactgagtgttgtaccatatgcatgacataccccctggtactcgtgtcggttacaccgtaactattctaaaatcctacactgtactaacacccttataattacatttccattagtgttagtagtgtaaacaactaatacaataatacattcagatatttatattatttatgctatagtatctcattccagattcaagcgtgccggtcgacttgaatagaaaatcctcgagctgaacggaggtcctaagtcagagtacacaattaggtaaattactcgaataactattccaaaaccctagctcaaaaccaagggtaatcttaacaacgcattcaatgtactattaccctaaatgctaagggaaaccaaactatgctcggaaaaataacacacattcgaaaaagttgcaatttcgaggtcctggcatgtaaagcggttaaccagttttacagaccctgtaaaactggtcgaccaatttgcaccagcaaaccctaaaaattgcacaaacaaccttagattatcatttaagacctaaagaagctagccctaatcgaatttcacaaacacataaccaaaatcatcaaagttaaccctaaacctaacaaaacttcctatgaacatgtataaatccatagttgagcaagcttagggttttaccttagattaagtcttcaaattaacacctactagcctatgaaattgaaagaaaactccaccctaggttggtggttcttgctggccgaacaaggaagaagaagaagagagaactagtccttttttttttttttt

SEQ ID NO: 223765 - DNA, 1243 bp, Cannabis indica
aaacttttgagttttaacttttcactgaatattcatattctttaatccaatgagtactcctggtcggcatagttgcctgatttaatgttcgatatcccgaccaaacactcatcttgtgtgttgtcttttgtagatgaaccaaggtgagtattgggaaagcgaacaccaaatcgaccaggatctgcttcaactcttgcacgaggatcatcctcatcttcgttgtagtccaacctcttcgagtgacagacattttagcttaagtcctccgtccagtcataggatgatggctcgtacaaaaaagataatgcatacaatcgatgcatctgcccctcaagtggcctggcatgccaccttacccagtgccgaacaagatccgtccatcaaggaggaggagggtcatgaaggggacccagagatccaggagattgaggaacaggacgatgttcatcctaccagtccttccaaggtggaggaagaggaggaggttgcaccaccaaactttgggggatacaatgaggctggggagccagtcgatgcggatggcgatgttctggttgagggcgtggactatgccagtgaggaacttactaccgcggctcctcatggaagacaagttgccttgggtgccaggtgggtgagccctccgtccaaggttaccaaggcacgcttacgggatctcaaccaggacggctacctgggggagttagacttctatattcccgctcacaataatcgaggcacaaaccctgaaagggagatgtgtgcctggtcgggtgctcatgccaagcaaggggcattgttgcctttgcacccatactttaggaatgtggcagacttcttcctcctttgtccgacccaattccctactaagggcattcagtatcaatctgccctgttcattctctatgcctcccagaagtggaatatgccttatcctcatgtggttagctggtttttagatttgaagtccacccctaagaaaggaagatcggggtacttctatttttctcagccagacgtcaaggggttgataggcactaggataaggtcgttagcaaaattgggaattttgttgacgattactttatggtggaaggaatgggcaccacctacagccggtttcagcagattcccacatatcaccaccctcctttcacacttgcccttcgggaaagagcttagaagcttgccctgctgccaggtgctgcccagaatatcactctttttgttgggttttgtgccc

SEQ ID NO: 223766 - DNA, 1259 bp, Cannabis indica
acacgtgtcacttgtgtattctatcacgtcgttatgcaaaaaaatgggataacacaaaggctagctattctggtgttcactttctttttggagaaaacttatttattaaattattactttatttaataataagatgtactaagcaaggtttaattaagtgcacgatttagaaaaatgactttctttctgttagaacttattttgaacaggatcttaatttactaagcatgtatgtttaattatcacataataatctaacatcctaaaatataaaatacttaaaatgatcaaataacacataagatattagaaatcttaatatttattgcagtggaattaaatgtctattctgttcaattatctaacccttgattcttgttttgtagcaaggtattgcctagatcaacgtcggtagtgaattttaccaaaaacgacgctaaaaggctttaaaaactgtttctaaagctcaaatttgtagttgtgaatagagggttcaagattaatcattttcaaaattttaaacttttgaaaatgaaatttaatatttaatattcctacaatattaaataattaatcaagagaagtgaacttgaaggaaataaaagaataaataagtaaaatatacaaaattaatttttgtatatttgtcaattgataatatagtggcctccgaaatctgtaactgcattatgcaaaaaaccttaagactcaacctgaatagtcgaataaggaataacatctataagatttatgaaggttgttgcacttacttttagtgcaagtgaaagattactagggtttatatcctaaaagcaagtattaatagataatatattagagaatatataaaatacaagtatagataaattaatatgttaattatagaactataaaataaatatctaaaaattccatactcatatagagtaggtatgatcttgtaaagcagtataagagaactaagatcatacagtatgaataaaataagtcggtagtgtattaatgtatgaaatctttaatatgaaattcccaaatacgattatctaagaactatacattagtgccagtgattttgattcggatcacatatgtggatagacatttagtaaatgtactatgtataattatttgattatgcatgattggagcaatatgagctaacttcttttatcaacataccattcctcataaaagagttagttatcatatcagaatgatgatgatcactagtagaccagtataaatcttaaatattcatg

SEQ ID NO: 223767 - DNA, 1523 bp, Cannabis indica
tcatgattacatgaagcaaatcaatagaaacatcaatgctcctaagagtacgatcagcgacaaaataggatgcttgagccaaagagtgagcaattctatttgcagtccttctaacaaaattaacagaaacatcacgcaattgttttaaaaacattttacaatcagaaataatactcccaaaatatgataacaaaggaagtccggattgcttgtactatagatagacaatcagtttcaacgatcgttccacaccaatccatctatttaaatacttaatgttagtaaaacaataattaatgttagtaagtggcataaatttaataattttattaatagcataagtacttaatgttagtaaaataataattaattagtgttcacttttgtttttataaactccgttttaaatttattaaaaataaatttaaaaataattgataccacatatttcttttcaaactcaaagatttagaatatggcccttacacgtcttttgtttaacacattaattgggtttgtattgacaaaattggatgaaaaatacagttttactaacattaaatgcttactgctaaaaaaaattattaaatttataccgcttatgatattaaaatttaggtacttatactaaaatttaccctatttataaaaatgtactaggaacaaaattttatatcgcaacccatctatatatttatgtaatattgttgtattgtttgagaaaaatacaacccataatgcaccatatgtagtatgggttaaaattaaaattgcatggagcgtgggacaatttaagtaggttagtattttccttcacaacaattatagtgagtgaaaaatgaaaagataagaaaaatatgaattgtagtttactgtatttaaagaaaaaaagaataaaaggtgggaagagcatcctagttgggagataaacttttaaataaccattttctgatgattcttatttaaatggctccatttgcgatacatttgatgagtatgcatggctgccatgcttgacacaattggacagtttatctcctccgtacaagcaacaacaaattttctataaaccaaaataaatgtagaattgtgtatcaaaataagtaaaatagagttagttaggatggtgagctgcattagttagttagagtttgttatgtacagttttcatgtaattatttttttgttattacatcttatcaactcagttgatgtataaagtataattcttttagttttgaattgtgtattttctattcttttttcctaatatggtatcagagccactgtagttgtgtgttgttcttctctttgtctctatctcgattgttttgtgttcatagccaagaaaggtattagtacgtactcaaagtcaaacaactcgagatagatacagtgagaatgcgaatccattctatgttcttgatatgatcttggttcttgacatttttgatcaaagcagagatccttattacattgcaaatggagatcatacaaaaacaagcttggttcctaagatttcg

SEQ ID NO: 223768 - DNA, 1382 bp, Cannabis indica
caattggttacttttgataaaataatcaattttaaaataaaaagataatgattagaccaattatcctataatgagatatgtctatactcatatatgtcaaataaacttattagtttattttggcatattgtttactattgcatattgaaataaatttttattctttgtttacattttttgtatagcctaccaccatatatgttaataaatctattggtttattttgacatattgaaacaaattttcatttttatttttgtatatttgaacaataattcatttcatttcatataacctaccattatatatgtcaataaacttactaaaatctgtttgttggaacaatattttattttttttcaatacaaattaaactataatcaaacataatgatatacgccaataaacgtattagtctattttccgtatattggaacaacaatttattataatttgtttcaaacacaatgtgtgcctataaaataacaaactaattagttttttttttccaggatgagacatcaaatttggttgtatacaaagtacatgactgtaagatgtcttatagacttacatagtaaacctggatttcattcattgtttacttggtagcgtttttgtgtagcctatactatcgtatatgttaataaatctattggtttactttcgcatattgaaataaatttccatttttttttcgtacattagaacaataattcattttatttcatatagcctgccattatatatgtcaataaacctactattgattgttggaacattattttatatttttcaatacagagtaaactatgatcaaatataatgatatacaccaataaacttattaatctacttttcgtatattagaataacaattcattttttcaaacacatatcatcatgtatgtctacaaaataacaaactaattagtctattttcaaaatatcaactgattaactatatctagtaaaaaaaagttaaaagtgaaaaacattaaagagatgaaaattattaattcatactcataatatgaaacatataaaagacaaaaataaaaaaagagatatcagtaataaagagaaaaataaactctcactctagacctttatttattatgtagtgatgctcaacttgattgacgtgatggatttcgaaaaaacaaaagaaaaaacctgattgacgtgatagacctagacaaatgacattagcttgcatttcatatttattttcaagacttatgatatttttgacaagcgttgctcaagctttgttgtatttgtgatagtttaattatttggtgttagtccaaactgcagattccgcataaaccgtaccacaccgcaccattttttactgtgcggtttttgcagttttttag

SEQ ID NO: 223769 - DNA, 3137 bp, Cannabis indica
cataaaacccaacaattttatcaaagctgatcttacttcaagcagcaaacctttgccaattttgagttttctagtcgggacatttgggtcgaaatctatctcttccaattcttccactcgcccaacatttctatgtgattccccaagtcagggatccacatcctcatccccgccttggccagttccctatttggcaatgattttccccctattcgaactctggccagaggaatcttcctttttggccttagtcagggcaaggttatagcattcccgtgcaacttgctgatttccctttaggcacccttccccattctttattgggaacttgatggacaaatggaaaattgatgtgacagccttcaagtcgtataaggctggtcgacctaacataacattaaaggctgatgggacatcaattataaaaaattatgccatcatagttatgctccttggagcttgtccaacagtgagaggtaggccaattttccccaaatgtgcaacgctctggccggagaaaccatgtactagttgggtacaagggatcaaatctttgagttggagtcccatcttttcatatggtgttttgaacagaatattcgtagaaactccattggctatcatattccggaccactgtcttatttgctatctgtatttccacgactaagggatcgttgtgcgggaagcaaatgtggatagcatcttcttcagtgaattttatagtgggttcccctacccgtggcatttttgtcatcctttcttctacggccaaaactacttccttttgttcatgctgtaaagttagaacatacctctcccgagctttgtctgaatctccagcaatgtgcaggcccccaatgatgacttgtaaatgcccctcccctggtggaggcattaataagtcttggttgttgtctacttgggcggcctattgattttgatcggccttgacgtacttttgcacgtgcgggttatttttccttatcaggaattcaatttcccgctttaggttgttgcactcatttgtgtcatggccatagtctccatgaaaacggtagaatttagacatgtcccttttacttatgtcctttttcattagagcatgttttttgtacgggaccactgactggcttaccatgtagattgtctctaggtcatcagttatggcagagaaggcagtaaattttgaggcattttctctaggggtttgttcagctttgcctacaaactttaccttcttcctgttgccttgcctgttgttgttattggatcttttgccgctcgaagtcgagcccctaggatattgcaagttttgagcaggtgctcctcccgagggggcttgtggttgggtcggcctaggttcgacatctgcccgttgcatggattctttaagcttgataaatccatctgctcagtctagaaactctgccatagatctgacagggcctctttttttaatttatttccacagttctcctagtacttcaattcccctcagtatggtggccaacctcccttcttcagttaaccttgctactttcgtagcttctggcatgaatctgcttatataggctctgagaggctgtcctggtctttgtatcacttcgaccaggtcttctaaatgtaacgggagtgggcgagaagaagagaattatgcatggaactctgaggagaaggctttccatgaattaaaccttcatggtggtaacttaaaataccactgctgtgtagcttctgaaagtgtagcagggaatactctacactgcacatcacctcgtaccccttgtaaatccatttgtatttcaaaatatttaagatgtgacaagggatcctccttccctgtgtacatcttctaggtcggcattttgaacctgaggggtagctccaagacgttgatcttgggagtgaagggcgatccgcgtgctcggtctaactcgagataagtgagtttttggctggccaggccttggaacatattttttaattcatctaactgtgcctacatagatgggtgaactacttcagcctcttagtcgacctgtttcacatcaggatctcttagagttgggtcctggatgcggatactgggctgaacagctggttgaacatattgttcatccagaccctccttatattcaaatcatccctgagatcatgggttgtacccagtctgtcgaatactgagacaccagattgcctcagtgattggttggtttggttgttctgttggccagaactgtcagtttggacagagttattaggtatcactccacctaaagaattgtcagataaggtctggccgcctaccacttggcccacacatggaacctgtgacaagggattggacggctgaccattacgggtatgggcggtatgcccaacaggaatctcttctgtcccgcccagtgggatactggatgtagcaaatagttgctgattaacaacttattaggttttccgtatcagtatggtggcctgtcttgttcatgttggaattatattttaccaggaacttagatctactaacaagtatgttgatttaacaacctaaacatgaacttctaaaacaatgaactaaacacataaaagttaagaataacttacagtgatggcagcagaattaagtgtctccttccactcagatctctaacccttgattcctgtctgtagcagagtataatcaagatctgagcccgaatgtccttcagttggatgtgatccttcacagtcttccaaactatgattgaggtactgagtgatgtgtgtgggcacttctctctcacaaggatttttgaaattctctcttattttctctcttgatttcgtgtatagtaatgcaaaacaaagacattcccacaagagaagagaggagcggctataaataggagaagggaagagcacaactttcctaataagcagtttcctcttttactgtgtaattgattaactgccttatttagtgtgatccaccactttcctattttttctaggctttgattagcaattacatggaaatttaaattgaaaataataattgggaaacatgcaaagggtggccggccatggtgtgatatgggcctcacttggattttgcagtttcctcaattttatttcaatttctccaaaaatgccatt

SEQ ID NO: 223770 - DNA, 2378 bp, Cannabis indica
actccaataagcaatattttctttcaatagttgataattatagtcggtgggtttggacctacttgttaactaccaaaaatgagtgcctagaacagtttagaatttagaaaactcaggtagaaaaccaaaccgatcttaaaattaagaaccttagaacagataatgggatagagcttgttaactccaaatttgacaagatatgtcaagagactgggatcactaggcataaaaccatattgaagaccctcgagaaaaatggtgttgctaaaagtatgaactgagccttattgaacaaagttagatatttactgttcaattttgggttagaaaaaccattctggggggaactttagcaacgacaacctactttataaatagaagcctgaataaagttatagacttaaaaataccttatgaaatatggtacaacagaatccctaacctagcgcatataagaaaattcgggtgtacaacatatgtacaccaatccattgacaagttgaaacctagattcatgaagggaactttcttaggttatgccttgggaaccaagggttatagaatctacatttataggaagtgtaaaccaaaggttgtgattgctagaaatgttgtttttaatgagttagaatatcctcacttaacctccaagaaaggtagtgtgtctgcgtgtaatgtaagaaaaataagaaacaaagacactacaagtatggaaatggagtatggaacaaagctcatgaaaaaaaggtccataggcggaagatagtgtggaaccagaagacaatgcacgaatagaagctattatggagctagaagaaccagataacagagaccaaacagaggtgtcggaagggtttggacagacaagtttggatggttatcagttggctcgtgaaagaacccagagagagattcaaccttcgataaggtttgtggaagcagacataatagcatttaaactggcggtacttcaacacactaaaattgaagaaccatgaagctatgaagacgcaattttaggtggaaacaagtctaaatggctttcaactatggatgaggagatggattcactccgaaagaataagactttggtagttgtgccgaagttagagaacaagaagattgtagagtgcaaatggattctcaaggtgaaagagggaattaatgaaaacaaactagtgaggttcaaagccaagttagtggctaaagattttactcaggtggaagagactatactaaaatcttctcacttgtgctaaaatacaagacaataaggttgatgttgtctttagctgctcacatggagttcgatgttgaacagcttgatgttaagactgctattctgaatggattcttggatgaagagatatacatgaagcaaccacttgggttttaggtggaaaggaaaggagttgaattggtgtgcaaatttaccatgtccttatatggtttgaaacagtccccaagacaatgtaataagagattcgatacatatatgcatcaaatcgggttcaaacgatccgcatacaatcattgcttatatttaagaatctggagcaatctaaaaccgtgttcttattactatatgtggaagatatgctcatcatgagcaaagataaatatgtgatcaaaagtatcaaagccaagctaaagagaaaatttgagatgaaagagcttggacatgttcaaaagatacttggtatcgaagtctcacggaaccagaaggaagggatctttaccctaaatcagtctgcctacattaataagattattcaaaagttaaacatggaagatgcaaagagtacatccattccgttaggggtcagtttgttttgtcaaaggaacaatgtccaaacaatacgaaagagaaagaagagatgaaggatgtaccttatgcagtgattctaggatgcttaatgtacgtgacggtgagcacgagatcgaacatagctcgtgccttaagaatcctaagtcggttcatgtccaatccgggcatggaacatttaaaatcccttaaatgattattaagatatttgaatggcatttgggattatggtctgaactataaaaaagcaaaaggagaaatagaattgaaagggttcgtggacgtgaactatgccttgaatagagataccaaaaaattaaccacttcttaagttttcttgaaaaactagaactgtatatgttggaaggctcagttacagtccgtggttgctctttccaccacggaagcagaattcatggtgactacggaagaattcaaggacgctttatggcttcgatgagttccttatgagttaaaacaaataaaaggaggagtgactgtgcatgcagatacccaatcttccatccacttttataaaaatccagtttatcat

SEQ ID NO: 223771 - DNA, 1717 bp, Cannabis indica
aaaaaaaataattgtgttattattagaaagtgtaaatattagaatactaattacacaacatagcaattatactaattttaaaataagcatgtttagataagatggtaattacttatgaatttttaatatcttgtttcacaaaatagttaataattacacatgaaaataataatttttattctttaatatttaaaatggaaagatttgagtaattacattaaattcttatagagagcacctattaattacttctaattacgtagttatagtataattatgcggtcaaacaaacatataaattaattgtgtaatacatacattcaattgcactcaatttcaattgtctcttggctttcaaaatgtgcctcggaaaactaattaaaaaaaccaaacaatgtggtggttgatttgtctattaagccttcacattgaacaatgaacataacaaaattattcatcttgctcttgtttaagtgcattgtgtaagtttctccttttttaaaggtcaatacaaatttaactataaattttccagataactaagttgaccaagtcaactcttccattcatttaattaaagagttatttttggctaatatagttatagtgggcactaaataaatattactatataagaaacctttctaattaaaaggctataaaaataagagtgccaatctttgcttaaagaaaagaagtgcccatatggtgctgaattctgccctagacaatttatcgtgcaacttcaagaagaatcagtgcccaagaaaggtgaaaactgaaaaaagaaaaaagaaaaacaaaagttcgatagaaaaaaataagggagaaacaatgaaaaaaaatgaaaaaataaaagaggtttaggaaaaatatacattgattacttatttgcaataatgtgaagtggctctcaccttttgccacgttgcttaaagattttatggttagttggttgattattgctccgagcgagaatggggtcaagagaccaaagttattattagccgtagaaagcgcaatacaacttagactttagggacattaaaaacaagtaaagaaaaatgacaattttgtttttgtggtgcttagaaaaaatgtgaccaaaaaaaaattttaaaaaaggtcttgtgctatgaggatgagccacctggcagcacatacgggttgggaactgctgttcagcagctttgcactaaccctatcaatttcgtactaccacgtagtttaggatgagactcatcacgaaaagattggtttagtaattatattgtatagtaatatataaattttttatttatatcaaaattgtaggtatatgtatatacaaatcaatatatcaaatatagtactaaataaaaacaaaattaacctgatatgattaagaaacacttaaactaaaatattgtaggtattggatagccgtgcttgggacgaggagattattagagatctcttcaacgttcgagatcaggagctgattctatctattcaacaaagtgcaactgctacaaataactgctggagttggaaatatgaaagcctcggacagtacttagccaagagtgcttataaatatttacaataaatgaaaggggtctggcctaatgatggtggttcgaatttttggaaggagccgtggaatctgaaggttccaccaaaagtcagtaattttctatggagggcagctttgagttcgcttcctacttgttttcag

SEQ ID NO: 223772 - DNA, 1527 bp, Cannabis indica
tatatggggtaattccccaaaattaaaataggttgaatgtatttttcaaaaaaaaaaaaaaagaggctaaactcctccatttttttataaggagacatttactcaaaaaactaaaccagtgtcaaaaaataaaatcaagctctcccaaaaaatgaaacaatcacaaactcaaatagaaaaacgcacacttagtttttctagttgtaaaaaaataatttaatatcatttaaaaataattaattatttaaaaatttattatacataaagaaaattctaatctgtgtaaaaagaaatctaatttttgtaaaaataaaaataaaatttcattgtaaatattataattaaatggtttaactgttaaaataattatagtagggatttatatcactacaagaaactgggtctctaacgaggacatctataccgaggacttgtcatcgttattggtattttcgcactagcgggaaacattcgcgattttttttggtgttaagtttctgtaccgaggacatgtcctcgatattagttttaccgaggacatttttatttcctattattttgtagctgctttgtcttctccaaacttacataacctgaaatcgccatttcagaccagaaaaccctcgccagaaaatccaaaattggagatcgtccacctccctccccgacgttttcttctttataaatattaattgctaaaagaagtcttgttaaatatttattaattctaaaaaaagaatttttacctattggtaacttgctattacaggttaaaaaaatgtaaccgttacaaaataaaaatgtaaccattgaatagtcacactaaatggataatatataaaatcaaccaaaaacaaaggaataaagacaaatcaaagcattctaaaatataattttatttcagtgtgaacatttgttttttcctaaaattatcagaaaatataattaagctgagaatacaaagatgttgtttaggttagcattttacattcatgacaaagatcatttagagagagatttagaaactcagaagtgaaggtgtactcgggtgtggttttgctggaaaatagtttgacgagaatagttgactaatcaagtaaaggtttcgaattttgatcaattttaagttaagttgttcaattggacattgactctctttgagttagattctataagctttttttaactttcataaatattaagaaagtccttacaggggttgtattggattaaaaataaaagtcattttttttttaatttagaagtcattttgagtgaagcgaaatattttagcaaataaattgacttttgaaaaaactatttataaaattataataataatttacataatttttaatttactaacattttttttttaataatattcgaacacttggaaaaaagtttgaaaatagacatttatataataattatcaattaggggtttggttttctgatatattttcagtttatccagatttgtttgcatcttccttttgttttggtggagagtaattcagagattgt

SEQ ID NO: 223773 - DNA, 2629 bp, Cannabis indica
gatcgtcgaagggtcatggaaggccagccatggcactttgatcgatccctcatgatatttgctattcctgatggcttcgacactatccttccctctcaacttcgctacattcctctctgggtccaggttcattttatcccatttggttctcgatcctatggtctggcacagtttgttgctgatactattggtgatctcattgaggtccatctcatttttctgtatgattctgttaccccctttatgcgtgttcgtgtccttcttgacactaccaaacccctccaccgtggaatgaatgtccatttcaggaaactatccctcactaagtgactcaagttcctttatgagggtattcaaaattattgctatcattgtggtaagcttgaccacaccttcaacaagtgtgataagtttctccatcactgtgatcatcatccttttcctcccagtttaagctacaaagatgtcctccgtgcccctgccaactccatttataagaagagtatctttgaactatccacctccattcctttcgaggaacaaccctccatttccaaccttggtcaccatagccttcaagaccacacaaaccatttcattgtgtctaccatggctgtcccctcccctactactgtcacttcctctccatcctctaactttctccaactcaccactgctactacttccaacattaccagttccactcagtctcaaactgtgcactccaccctccactgccctctcccaactcaccccattatgacttccaccacccatcctaccacttccaaaggcaaagcacccatgtacccgcagccatctctggtttccctgagcagtcctcctttatccagcctccatatcaatgactctcctgctatcccttcccccaccaggaagaggtcttttgctaggcagtcctgtcaacttggctcttcggttcgcagcatgctgaaaagagctcgggcctctcactctgactttgctgttgttccatctatgtctaacaacgaggaaacggcgggtgttgctctgcaaccccgccgagaaaaatgagtcttctcagttggaatgctcgcggattagggagttcccgagcattccaaaatttctccctcttcacgaagcagcatcgacctcagctcttttttgttatggaaaccaagctttctgtatcttctacttttgttgctagggctaatatgtattttgctaatgtttttcaagttcctagaagtggattagggggggtttgcttttgttttggaaggaggatgttattgttaatattttgtctcattcccttcaccatttcgactgtatgcttactataaataatattaattttcacttgtcttgctattacggatctccatatgttgctgataaacacaattcttggaccttattgcatcgtctttttgatgctgcccctctctcaccgtggctcattgttggggattttaatgattaccttggctttaacgatcgtaatactcacggtttaccacctccccatgccatgcattcttttcaaagctttattggtaaatactctctatcaccgctccttttctctggaagccgcttcacttggaagcatggtaccactctagagcgtttggattgggccattgttaataaaaaatgggctgatttatttcccacggcctctctccaccacttaggtttctttgactctgaccacagagctctaaaagtgttgctggagggcaatcctacatgtttgctcgtaatcctacttttcgtttttgataatcattggttactcgaacctgatttccccgagcttcttagagatagctggagtacggattctaattcttccacccctaataaccccatcctcactttcctatccaaacagcaaaattgttctgtttctttgtcctcctggggtcgtaataaaaatcaattctcacaccgcatccaacgtatctaatcggatattgagcgcctcctggcgggtcctattgtttctcattctgatgccaagaaagccaatgatctccaacgtaatctggataacatcttggtcaaggaggaaattttttggaagcagcgctccagagtaaattggcttaaagctggtgacaagaacactaaatatttccataaccgagcttcagcgaggaaacgtaccaatttcattaagtctctcactttggacgacaattctaaaatcaccactctaaatgatattaccacctcttttgttcagttctacacagatctctttgcttcccaaggaactaaccctgatgctatgacttttgctacgaaaggtctctctaagcacctcactcctaatcaatcatcgttccttacttctcctttcacttttgatgaagtgaaagtggctcttttccagcttcctggcgacaaagcccctggtcccgatggatttaatcctagtttctttcaaaaaaattgggactctgctggtagagatctctgccgcgcggctttatacgctctcaccaccaatgctgatcttagcccggtcaatgaaactattttgttctcattcccaaagttaaaaactgcttctcgggttaaggacttccgtcccatcagtctctgttccactctatacaaggtcgtctct

SEQ ID NO: 223774 - DNA, 2169 bp, Cannabis indica
aacatgaacccataccaaggctaggaccgagacctggacccgaacccggactaggacctgactaaaaccaagactcgggacctgaactcgaacctggacctaaaccagaagctaggaactggacttggatgggggacccagatctaaaccgagattcaaacctgaagtaggacctgacctagacctgggaatctgaagtcggacctagacttagacccgaaaccttccccggacccaaaccaggaaaggaacctggacacaaacccataccctgcaaaacccgaacttggactcgaattaaaaatcgaacctgaactcgagacccgaactcaaacccagacccagaatcagacccaaacctagacctgcacctggacccaaacatggaccgggacacggacttgaataaaaactcagatcgggactcgggacacaaacacgaacccagacacggacttggacccagacctggacccaagacccggactgggattggagactcagacctggacccagtaccaagacctagattgggggcccaaactctaaattagaaccaaaatcaagaaccaggactggcactgggatccaagattagaccccggtctttgtcccaggcccggacccagacgcagacatgggcagggacctaggattcggatcttgacccatgaccgaacgcttcaaacaaactcatagtcggtgtctagatcttggaatcgtaccaagacccgaacctggaaccatttccaagacccagacccgaacctgtacccagacttgtgctaggacctgcgacctaggacccgtgacttaggaccttgaccagaacctagacccgtaccagaacccagacctagacccagaacacacattgcaacctagaccaagacccaaacccaaacccagacccggacccgaactcgtaacataactcaaactcgaacccaggactcagacctggatcgagatcaagactgggacccagacccagactagcaccgagacctgaacctaaactgggacaagtactcgaaatgggacccgagactaggatcgggtgcaggacctgagaaccgaaccctgacctataccccgacaaggtcaagacccgagacaaggactagtacggaacatggaccgggacctgcattcggactgggaacgtaacccagatcgggacctaggaccctgacctgaatcggggacatggaccaatgactgaggacccaagacccaaacctagacccaaaccttgacttgagacccgaaccaggacacaagacatgagctacaactggactaagatcttgatttagacccgagacccaggacccaagacccgaggcctggacccgacccacagtcggtgtctaaatcttggaattggacttggacccggacccagacccggaccagaactagaacacgtaccagaactcaatctagactcgacatgtggttggtgtttggatttgggaccaagactcgaacctaagccaaaacacgaacctagacccagaccaggactcggacctagacccacacccgaaccttaaatcgtaccctatgaccaaaaatgtgaactggaactagaagcagacccttaaacgctaaacccttatccttaagacctaaatcctaaactctgtacacttacccctaaaccctaaacattaaatctctaaacactaaacccaaaaccataaacccaaaaccctaacctggacatgggcctagacccatacccataccgagatcggaacccaggacccagacccgaacctgaatctagagccgaacctagacccagactgatgacctgaacccggatccaaacacggaccagaacttggttcgaacctagaccttgactgggacccagatcgagaccccgacccggacccaaactgaaacctaaactcgtactgggacctacactcagacccaaacttgggatccaaacccgaacctaaacttggacctacaccgagacctagatggggaacctaggctcgaaacccaaacctaaacccaaacctggacaaaggattcagacctagataggagacttagacccgaaactaggccttggagcagggactaagacccaaaactcgaccttagactcgagacacaggacccgactgtaggaaattattttaccag

SEQ ID NO: 223775 - DNA, 1581 bp, Cannabis indica
aaagttacatcgtatatttgaaaaataaaatagataactaataatccctaaagaatagggttattatttgttgatgaagaatccctaaaatcatggacattttgaattgttctgaagttgtaggagtgctgaggatgatttggaagccattgtgggaaaaaacacaagtgttggaatgtgacttgtatggtttgtcagccagctgtattgggaggctgcctggtacatggaggatgtcacccatggtcggccagctaaaggtccgaccaggaccctgctattgactgtatatcttgtttgagtccacattgccatcttggaatcttgaaggatagatagttgtccggcactaacctaaacggttagtgttgacatgtctccttgtgatcttgatatctttatggttgaggacctcaggtaaaccctgtttagatattgatgacacgtgtcttctgcttttagctacgtggaggtgccacgacaagtaggctaaaattgggataacaataagggaactaatatttgatactttcaaaaatcttagattctattattgtatatcatgttcccatccattcattttattaagtttccaaaatagaagttgtaagaatcatcttctttgagaaaatttaatgatctactaaagaacctaatgaatacaaacaacagtttatgaatactcaaaatttagactaatctacttgtgatcatcattgtgatataaataaatgttatatgataaagggcacgttaataaaagacattagttggttcagtcatgcataatcaaattatacacagtacatttactaattgtctatccacatatgtgatatggataaaacttatatgtcactaatttataatgcttagtaaatcataattggtaattcaatattaaaggttccatattttagtacactaccgacttattctacttatatagtatgatcctaattctcttatagttcttcacaagatcatactttctctatataaatatggaacttttttatattattaattatattttcataataaacatattcatttataatatatttatatttcatactatatgctcaaccaaacaaaactgatccaataaatcattagattggattggattggactggttccactcaatggatgaatccctgtattgaattaaattcatctaatatttttcattcaatatttattagatcagatcggatccatctaatattaattagattggttatagccatcaaatccaatccttcaaagagtaaaacttgatttttcatctaaacctatatgtcttctcttctatatatatttataattatttccctctcattcttttatatggcatatatatgtaatcaattctctttttatttacctaacttctatcaactgttaattcttactcaaatatatatatatatgtactaggttgatgttacgtgcaacgcatgtataattagttgtctttttaattaggttcaattaggtaatgttaaagtacaatacatgtatgtttaattttttttaattagttaatgtattttttttaatttttaaaatagagtt

SEQ ID NO: 223776 - DNA, 2544 bp, Cannabis indica
aagctcttagagatgaagttgaaaggttgagtgcccatgactatatcaccgaagcattccatccactttgggtatccaaccccgtgttggtgccaaaaccaaacaacaagtggaagggtgtggcatagatttcaccaaccgaaataaagcatgtccaaaggacactttttgcttccaaggatcgaccaactggtagacgctacaactaaacatgagatcttaagcttcatggatgcttacttgggttacaaccaaatcaaaatgcacccaccaaatcaagagcacataagcttcatgacagacctaagcctatactgctacaaagtcatgccctttgggctgaaaaatgtaaggaccacctattagaggcttgtgaagaaaatgtttaaagatcccattggctgcaatatagaggtgtatgtggtcaacattctgttcaagtccaaaaaggctgggggcatgtagaggatctagttgaatgcttccaaatcctccaaaagtataacatgaagctcaaccccctcaaatgttctttattagtaagcttaggcaaattccttggttcatattcaatgcaagggatataagcaaacccagaaaagatccaagcccttttggacatgaagtcccccacagcagtcaaagaagtacaaatcttgatgaaatgtattgctgtactaagcagatttgtgtccaaatccacggacaagtgcatacccttctccaatattctcagaggaaacaaaaaatttgagtggacaggggagtgtaagaaagcattccaagagcattaacctaaccctaattcttctaagtcttaagctccctaaagctctgaagctctatgcctgaaactctagctctacctctctatctcttacacacccaaggtttctatctcacatgagatttcccaacttgattctcatattataatcctaagagagccacttcagaatccacaacccttgtggtcagagtggtattatctctggtattaatacaaccaaaaggggagtaggtcgttactcgctaattaaggggatcaaacctctataaatatattgtgcctttttactttcctattctcattgtgtacatgtggtaagcattagtaataaatatgactatgttgtcggttggccaaatctgagatcaacaacctctattgtttttcctaatagatctacggacatcatgctaataagtagttgatatgtggcacatgcgtttatcaagccaaaaggcattactttgtaatagtacaaacctctgtctatgatgaaggaggtatgttactgattgggctcatacattaggatctggttgtaccccgagtacgcatccatgaagttgagaagttcatgacctgcggttgcatcgacaagttggccaatattcggtaatggaaaactatcttttggacaatctttatttaaatccatataatcaacccatgtgcaccataaaccattaggttttggaactaagatgggattggctaaccagtttgggtaaaatgactccttatgaagccacataagagtaggtagtcgacttattcttttagcgcttggtacctcacatggtcaatttttacggtgcttttatcgtactccttacacgtcaggattaatgtttagttggtgatacatgatcttgggtggaattctgatcatgtctgaatgtttccacgcaaaacatctaggttttgtttgaggaaggtgagtagcctttctcgttgttgtacaattagtttagaaccaactttttaaattttagaaatatcaaggggatcaatagtacctcaatggtttctttaggtccctatgccgtgtttatgtagtcgaggatcctgggatcaagattgggtttttccacatggggaacttcttcattccagaatgattcatgtcgaggcgggggagcctcgagcatataaatcatattacaagacttctttttctctgtaattttgactgcagtgttataacattcatgtgagtcgaaccggatccctcggaccgaacctacacctacggatgtgtgaaagttcatggtaagatgatggatcgatgttaccatcttcatctccttctttcagaattgatcttcctataatcgcgttgtaagtggaatattggtcaatcactacaaagtctaccatagactttgccactatcggtgttgttcccaaggtgatgggtaactttaccatgccttttagttgtatggtatctccagtgaatccatagatgctcggggttacaggtttgagatctttcttgtgcaatcccatttgcttaaatgcctggaagtttagtacatttacagtgctaccattatcaactaaaacacaatggacattataacctccaatattcacgactgaaagtcttaccttactcttgtttgatgttggatagtctgccttacatgagacagtttatatgccattgttgcctaaaagtgtgttagaaacaggtctacaaatgtctcccacatcaggatcgatgcctctggcaattggctgaaccaatcgtg

SEQ ID NO: 223777 - DNA, 1000 bp, Cannabis indica
aatctgcagaaaggtaatttgtctacttcgattatgttgacaagatcaaatccgtgtgtgattctttggttatcgctggacatcatgtaaatgattttgatctcattttacacctaattaatggacttggtcccgagtttgactctgttgtgtccaatattacctctcgaagtgaaactctttcacttgaagaagttcaagctctcttgatgtctcgcgagtcaagattggaaagacactccactgtcttggatctttcaacaaaaaaggcatccaatcttaccctgggatcaagaagtggtacatacagaccttttaatggctctagaagaggtcaaggttctgaaaatgtgccaagattcctaaattgaggaaatggatctcgacctaccaacaataacagacctctttgtcaagtgtgcatgagatttgcgcatgatgttgtcacttgccactacaggtttgatcgaaattgggatactccaaaaacttctactactcagccacaagccaatctcacagagcagtctcttgactacgatcctcaagcctttgttgctcaaattgtgctagatttttgtgatgatgttgggtggtatgtggattcaggtgcaaccaatcatattgcacactccatggacaatcttgagtatgtcactccctacactggtcaagaaacagttgttgttgctaatggtaagaaatttgtcatttctaacattggtacagctactctttcctcaaattctcattctttacatttgaattcagttttgtaaattccttccataactaaaaagcttgattagtgtatccaaacttagtaatgacaatgatgttttcttagaatttcataaagtgtgttaaggacaagaaaaagggtgcagtcttgcttaaaaggaaaatcaaagatggtctctatcacctaggagatgatagctcgagtctttccaataaagctctgcaggtgcatcttacaacttcagacattcaatccaag

SEQ ID NO: 223778 - DNA, 1819 bp, Cannabis indica
ttttctctggattggcttcaattcctcaggcattaactataaagcctagaaacttacccgagcttactccataggagcactttaggggattgagtttcatgttgtatttcttgaggactttgaagcattcgtccaggtcatctatatgcccccagccttcttggatttgacgagcatgtcatacacgtatacttccatatttcgttcgatctggtctttgaacattttatttaccaatctttggcatgtagctccagtattcttgagaccaaatggcatactttataacagtatagacccatatctgttcggaaagttttatgttcttggtccgatggctgcatcttgatttgattgtaccccgaataggcatccacgaagtttaatatctcgtgtcatgttgttccatccacgagttgatctagtcttcaaaatggaaagcagtcctttgggcatgccttactgagattggtgaagtcgatacatactcaccattttttgttcagcttgggcactagtacgggattaccaacccaggtcatgtagaaagcttcaattatgaagttgttgttacacagcttttttacctcttcttttaaggctagggcccgttctttatctaacagtcttcttttttgttgaacgggccagaaattaggatcaatattcaaggtgtgtgaaattatagaaggatcgattccaaccatgtcctcatgtgaccatgcaaaaatgtccagatttgctcttagaaattttatcaaatgctgattttacttcgaggagaaaaccttttctagttttgagtttcctggtcagaacgtttgggtcgattccaatctcctctagttcttccactgacccaacctttctatttggttccccaagttggggatccacatcttcgtcccacccttgggcggttccctatttggcaatgtcttttcccttgttcgaactctgactagaggatacttcctttttagctttggttaaagtaaggttgtaacattcccgtgcaacttgttgatttcctctcaggggcctaaccccattcttcgtttgaaacttaaggcacgaatgaaatatcaatataacagcttttaggtcatataacgttggtcggcccaatatgacattaaaggttgatgcaacatccaataccaaaaattgtgccattacagttatgctcttcgaagcttgcctaatagtgaggggtaggagaattttccctaaaggtgcgacactctagccagagaaaccgtatacgggctgaagacaggtggttaattcttgagttggagccccattttttcatacggtgtttttgaataagatatttgcggaggctccattatctatcatatttcaggccactgttttgttggctatctgtacatccatgaccaacggatcgttatgcgggaagttaaccttgacagcatcctcttcattgaacgttatggtgggttcccctacccgtggtatttttgatttcctttcttcgacggccaggaccacttctttttgctcgtgctgtaaggtttgggcatacctttcccgggctttgcctgaatctccagctatgtgttggcccccaatgataatttgtaaatgcccatctacttgtggtggcagtaaatcttggttattgtcttcctgggcggccctctaattttaatcggtcttgacatatttttgcacgtgcgggttattctttcttttcaaaaattcaatttctcgcttcaaattgttgcattcatttgtgtcatggccataatctccctgaaaaacgacaaaactttgacatgtccctcttact

SEQ ID NO: 223779 - DNA, 1433 bp, Cannabis indica
gtacatacttgtatccaccatattaatattaatattaggctaattacgatttttgtccccgttccctgaacttttaatgtcgttaaacatgccccctgaactattgagattgttggatttaaagactcttttccaattttattaaaaaagtctaacatgaatgaaagttcaagaccataatttagtacatgtcaaagttcgagagacatgatttggtagatatcaaagtctgggaaacatggtttagtacataaataatcactgaaatagtaaaattgaatgaaattaaacaaaagtccttaaatccaacaatctcaatagttcaaggagtattattaacgaccttaaaagtttagggggcatgatttgatacttgtcaaagttcagaggcaaaaatcctaattagctttaatattatctcctcatcttcggatcatcttccaacaaatttgtcttttctgatacatgtgttttgaccttttctggttggttagaccagactcatcttgattgatgtgcaatgttatctgcatttttcttttctttttgtttttttcctttttggccaaggccttctttatcccataaacaaatgaaaattttgaaattacccttttacttaaattaccccatttatctatgatgattgttagttttgctcatgttcactaatctgtaatgaacataagagaagttcttacataggattaagatattaaagcacagccttcctaaacaacataggattgattacattataagattaaggagttacttcccttactgcaatatggttttgaggtggaacatttttagtctaatctctctttctatgcattgtccttaaaattggttcatgtttgaatttcaaacagggttgtgtcttcacaaaggatatcaacaaagcaatcctaattggagatgcaatggagactggaaccgttcagataaactctgcaccggctcgcggaccagatcatttcccatttcaggtaaacacacacacaaacacacttcatatgatcatatttgagatcaacattttctttgaatccaaacaagttcttttcttggttgcagggtataaaagacagtggtattgggtcacaagggatcacaaacagcattaacatgatgaccaaagtgaagaccactgtcataaacttgccaactccttcttacaccatgggttagtagtaatacccttttaaggaattggatattcacattcaataataatacttagtagtgttgtagtagaagacttataatataataaattgtattataactattattatttagtatttgagtattattagaaagggtgacaataatgtagagactcttgcttgctacaataatattctactttgtagtgttatgatgttaaatgcaacaaagaaaacaagaaaaaaataataagaaaaaga

SEQ ID NO: 223780 - DNA, 1893 bp, Cannabis indica
ctattgcataagcaatacacaaactcgaatctttaaagtgcatcagtatcactttaacagtactctaataactgtcattacatgaaaactcatttagaatcttccactcagtatccttattggactgatacaacaatctggtttatacataaaatttcctttaaacaaaatcaaaagtcctttgtcaagccggtaccaaacttcttctcgtgcttctaaagttcgtaattactccactgagccattgtatttctttccaacaaattgaactacaatgtaatattaacaagttctccaatcgcgatctcaattcctattctggttacatccccaacaactgatggtaagatctttttgctttacaaacttgtcctagagctctttgatttacaacacctactaccaatttacttcccaaagcagtaaagaaacatatcgttataatcttcaatgaactctaactatcgtttttgcctcctaattaaatttttccaaaagaagaagtgtttgaaacttttgtgatccgtgtagacttcatattttcaccatacagataatatgcccaactttcagtacaaatcatacgcgcaattaaatatcatgactgaaataccactgctcatactccctcaatggtcaaggtagttaggcaacaattctcctaaattgtgtaagaatacaatctaatccttgttcagaagtgtcacataatatcataatttctccttactgactggtaatgttaacattggtgcaatggttaacctctatttcaattcttccgactaaattccactaaaggcatagacaaccctcaacaattattccgtagcatcctgttagttccagaaaacctctaaccttcattgcaaatttagggtcagcaaaactcgtgtttctatttagcataaaactaatgcttctagagacattacaacatcatccaaagatatctctcatatgcattccttgaatcagaagaaatcacgataccattaatgaagacaactacgaagtcatcggcacgaaaaactattttaggaatatcctcatttcgagtcttcagctggtaataaccagatcgaagaccaaacctagagaagatgatccttccctaaaattattcaacataacatctatccttatcaaaggatacttattcttcacaaataaaactggtgtactccagaatgaaatacttagactagtaatttcaagcccaacctttcctacaactgaatcttcactcctttcaattctacagttaccatccaattcagaattttagatacaggttttactcccattaccacttcaattcagaatcaatttcccgcttaaccaataaccctagtggctcctctaaaagcatctagaaaccttgagccacaagattgtatccccacttttactaatgttccctttatagtattggccacactaactgaaaagttgatacatccatcccataataatcccttcagccttaaacgccgggatcaatggattttgggacctttgaaccttgctcaagaacacaaatgggtcctcactttttgattcaagagttgccacctttcttttcaatcgatagttgcattataccttgcaaattagttcaaccctagtataatattagatttctctaaattcagcacaactgaaacaaccaactatttccttgccctcacaatctgggaagggtttagaccacatactggaaaataaccagttctccagtagactaaaaggtaccaaaactactcagtaacacatcattaaattttaacacatacttccaatcatccttccactctcgctactataaccagggacagtttcttttccaatggtctactaccccacactggatgcaagctctcgtatagcttt

SEQ ID NO: 223781 - DNA, 1736 bp, Cannabis indica
tttttttacactacatcaaaaatatgtttatatagaaaatatttaagtcaaactccactcatttaaaaaaaaggtcaaactcaacttttttttgtcctttttttttacccaaaaactttttttcttatatttttttttctagctgatggaacaacctcaatccatataacgtaaaaataaggtatttttttttaattagataaattaagcataaaaactcaaatttttctaatactacccattcatgggtaatacccatatatatattttatatagagtaatttttagtgtaaatacctaagtttaacttggagttataaataaatatgttaacacataattttgttaacaataatgagacattttgaataaaattaaaagtaactattaataatagagataaataagacacaagaatttttacgtggttttgtagttaaatctacgtagtccaagagtccgtattatttttgagtttttgttttgtttaagattacaagatatttgatacaaaataataatctctgggttttatacacttaatttctcaaggtcttttttcccaaaaattgtctgtctcttacattgtaggttctgtcctatttatagaatttttaggaatgacaattattccatttcgttcttatctagagagccatttccgaaacgagaaaaatcctcacgttttatttttacaacatgtgagataaataaattaaccactggtaaccgctcttgtgcttatcttgaaagcattttctttcccaagatagcatacccaaaatatgcctcacattctttagtaatgctgggaatgactaggcgtatgttgcgagacgataattgagctattgtttacaccaaaagtagtcttgatgatatgtacatcaatgtttgacatgtgacaagaaatgacatcttaaagttgagtatcctgaggcatagcaagtcagtttgggagaggtccctagccctgcgcccaggttgacttcgagaactctaggataaaagtttagaatttaataactcgttttcaacttactatatttcaatattatgtaccatgaagacatgaagtaataaatacaagccttaggagctgaaattacatgaacttgcaccctagaagccaacctggcacctaggatttcacccaaagcccaagttgacattcccaactaggattttagtttctaggaccgtcttagtgaaaatatatcaaactttgcattgggacatgaactagacataccacgaatgtatttgaggcatcagaatcagattcggagtaagttcatttttcaaaaatttgttaatctatgcgccttccaagtattagatcgacgatccaaattttgcatcatcttcatcaaaaacagtcaaataggtacttttagggaagatataacacttcctgggtgctagagacaacacttttggggctggcccaacgtgtaggatgacattttttcaacatgggccaattttgatgatattttctaagaactcttctgagaattatctctgtttttagaaaagattagatttaactatttttagagaccaaatagaactgctaaaactgggacgtagcgcccatggcccaacttgacatattgtcaacctagactgtttccaatcaagttcttaaaaaagtgttccaagcatttttttttatcatcaaaaataaagaatattcaagaaaattaaggagaaaactacaatctcgatacctt

SEQ ID NO: 223782 - DNA, 1525 bp, Cannabis indica
cagcaaatttctaatattatcttatttatccttgaactattgaaattgtggaatttaaagactgttttctaattttatttaattttactaattcgataattgcccatgtactaaatcttgttttccaaattttgatatctaccgaagcatgctcatcaaactttgacaggtgccaaatcatactcctgaactttcatctatgttaaatttttcttactaaaattaaacaaaaattcttaaatctaacaatgtcaatagttcaagaaatttttttaacggtcttcaaagttcagagaacataatttggtacgtatcaaaattatataagaatatgagtatgcatgatttcaagaataacttatatacaaagacaacaaaattattatatatgtgagtcattaaaaacttttcattagaacactatgagtatagaaatacaaagagttttcaccatcaaatggtcatttaacaagttaatttcttctgcatttgttttattttcagagcttagtaataatagcctgcctacttacatgattgagctcgttactaaaataaaatgtggaatagaatagtgtacaaagcaagtgataatatgtgtgctaactgctgcaccagcaaacaagacacctcttggggttgcattgcaccagttatagcccatatcagtggctagctccttagaaaatgtaatagatataatagatatatagatgagatatcaagcacaggagagtggaggaaaatcatcttcatctttcagatgatatgtctgccctctaacactgaaacaaaacagaaaagaaaaaaggaatataataacacatcaatgaagttgcattgcaccaattgagaagtgaattatcttaatacttattaccttgaccgatagcttgttgagggcaaatattttccttcaagcctattcaaagtgttacaaaaataattttgcagctcttcagtcattctatccccagagagtgaaagaatccagctgagcttgcgagccccgaacttcaaagcactgcatatcctatacaaattgcctgaaaaataaacagtcacaataattcttcagtaggaaaacacatgaatctaaaaaggaaaaccaacaaagagagcctgcaccgaacctctactgacacttcggccaaggttgttattttcttttaagggatcaattatatcaaggtgtttcatacgaaagaaaaccaagtctgtctcaagcccatcaaatggaattttatacaatttcctacaattgatgagaaattctttgcttagtagtagaccactgttatcatttactggaaactcaactaaagagtgagtgtgtttgcatattggtccttttaaactcagacaatggttttcccaatcaaacttgctgaagtaatccaaaaatctatacaaaacctacacacaaaggaaacacaattacatattgctgaaccaataatatgattttgtacaagtaatagagttttaaattgaaatagaacaacatacagataaagggtctttc

SEQ ID NO: 223783 - DNA, 1910 bp, Cannabis indica
ttctgtatgaccaaagtacctctcgtagttcctccagccaattacccttggcttctctgagccattttttcatggtgtctttcaatgtcttgttcactgctttgcttgtccatttgtttgtgggtgtgcaactgccgaaaaacttttgatgatttcatgtgtgtacagaagtttgtgaacatttggctattgaattgtttcctattatctgaaacaatatttgtggaagttcgtaccgacatataatatttttttaccacaaagtccaaagcattcttggatgttattattgacaatagttcggcttccgtccactcggtgaaataatccacaaccacaactttgtattgtactccaccttttcttttgggcaattgttcgatcaggtctattccccatatagcaaagggccacagactttgcatctgtattaactcattttgaggtgcttggaggattttggaaaatctttagcatttgtcacattttttacacgggcctttgaatccgcaatcattgttggcttgaagtaacattgccttaatattttttttagataaaattttcccccagtatgattgctaaaagccttcatgaatttcagacaagagtcgtgcaacttcttcatttgtcacgcacctccataatggcatggagaaacctcttctatacattacaccatccactattatgtatcgtgcaacctttctcatcattttttgagcttcatttctattgcttggaagctctccagtgttaagataggctgctatgggagtcatctagtttggtgtgaaatctatcatctcgattttctctgtgcatgtgatgatgggctctttcagaagctgtattgggaataagttggctttgtcatttactatgttgctcgccagctgtgccaatgcatcaactattacattttcttctcttaaaatctgcttgagggtataccccttaaattgtgcgagtaggttgtggaccttactaagataggccaccattatttctccacgagccatatattctctcagaatatgatttaccaccaactatgagtcaatatagatttctagatattccgcgtgaacctcccgagcaagttttaatccggtgatgagtgcttcatattctgcctcattgttggatgctttgaatccaaacttgattgctccgtgcaaggatttcctccaggtgtgatgagagcaatcctagcttcggaaaatttgtctgtgacggatccatacacatgcaactttcagattggcttgtctgcacagttttcttctgcgtggggttttttttcttgctctctttttggctcgggattatcttttgagctgcttgcctccttgcatgtgcattcaactataaaatctaccaaaacttgttcttttactattgtgtgaggttggtaagttatttcatattgccccaacttaatcacccatttgagtagctgtccagatgcatcggcctttagcataacttggcataaaggttcgtcaatatacacctgaactggatgagcttagaagtagggccttagcttccttgtggctaagatcaaacagtaagttaatttctcaatcagggggtattgaccttcagctaggggtgttcataaaaactgaaaaactaaaaattgaccatcaaactgaccagaccgtaaccgaatttttggttccacatcatcaccaaatttggcatttagttttgattacggtttttttgatatggtggtcagtttcgatttttgaaataaaaaaatggttaaagcaaaaaactaccaaaaccgccataaactacccaaaactgcccaaaaccacctaaaactgacaaaaaaatatccaaaattgccaaactgaaaaaccactaaacggtcgattttatacaattataatttctaa

SEQ ID NO: 223784 - DNA, 2210 bp, Cannabis indica
aaataatttataaataagttgaatagtaaacattatatgagttatattaaaaaaaaaaaagtaacatcaaggtatcttaaacaataaaataacataatataccctaaaaatattaaaaagaaacaaaaaaagtttttttaaatattagtcctccttttttggagacagaaaaataaatgtttttcacattttaaaatggtaattttattatttatatatgtgtaaaattctgaaataaattttttaatggaaaagtaactaattgatatcttattcacggcaaaagcaactaaatggttgcttttttcaaatctcccaaaaagcgaaaatttctgaaaataagatttttcgaattttttctattttcggtaattgttttgaatttcggtatgtatgctgacgtgtcacaacgatatttgtgtaaataatttttttctaaagtatttttgtaaatgaaattaattttagttataatattgaaaaaaccctcaaagtaaaaagtgagaaaattgataacaaaacaaagataaaatagcattttaactaccaaagcttaaaagttcaccaaccaagcccagcctacaagtccacatgtctcagccaacccctcttccacgtgggagtgatgcaaaatatattcttataaacaaagttgggaaatatattaaataatattataaataatatctcatacaatcattctactgtaactacagtgaaattaatttcttgagcttatgattggacaaatttcctaccctatactatacggaagaaattataagtcctactgtagatattccctataattaattatatacatcaaatattataatgcaaaatcaaccctaccaaagtagaaattcttaaattcgatatgtaaatatttatatacaagtatatatatataggaaaagagatttactttgtttttagttagagaaattcgaatttatattgacattatacatataaaatatatattaattattattattggcaaaatatatatgaaagcaacgttacagtttgtagtaaaaactaaaacgtacgataatagctttcaaaacaaaaaaaaatagaataataaattacataattattacatgaattacttaataaattacatataattataattatattaagcatgaggaggccggcctatgtattaggacctaaataaaaaaaatctttttaaaaatatatatatattttaatattttttaaaatttctatttattcttatataataagggcttaattttttttttctcgagactcatccctcttaatttaaagacataattaattttatatatataatttaatttctttttttttaaatatccaccgtgaaatacgagttgtttagtaagtatttacaaagactggacttgaaaagtgggactacacttaaaatagtttcaaccctaattatgcatataaacatgagaaaacgacatcttaattataagagatcaaattcaaatcttatatttggataatatgagattcgatcatataaatataaataacatgagtggaaaagcttgtactaaatttatagatgcatgattcgatcattccactactaattaattaatttaattagttgttataattaattaataagtacttgttctatatatatactaataatgagatttaaggctttaagattagccacaaacaactttagttaattaaacaactttagtttcattagttctcttgcaatctaattttgtggccaagatatatcgaaacatatatatatatataattaaaaagttctaggaatctctagtaatgagattaatttgttaattacttacaagtaatgattaattaataaaacaataattaccattatagttcatttatccattcacaaattgttaaagtggagctaattattatataatataattatgtgatgacatatatgtacatattttacaaaacattaaagattttcccactaactaagatttgtatattatatagtagtaattaactatcactaactataatattaaggattcccactatatattatatataaataaatatattgtacacagtaatagacctgaaaaatctgctcattgtagagcaaagtaaagttaagaaaaaatatttagaaatacataaatcaaaaaataatttatattaaaatggagaggtacaaataaacttgtataatt

SEQ ID NO: 223785 - DNA, 1990 bp, Cannabis indica
catcatcacactttgggaatcccataaacaacccatcggggatgagtggtcaagctccgtctcactccgcacctaccataagtcttataggacctcctcagagctcttaaagtaagaggtcctcaaaaggtagcaatcagacggaagataaacgacaacgaaggggatacacccctcagtatactcaatacacggagctcacggacacataggaatgggtatattttgccagaaggcaaaatacacattaccggaagcctctccctgtatagggacagttcccgaagagatcccagcaagagatgcgaataccacaatgacactgaccacaataccaatgaatgcaaaaacttgaaggatgagatcgaaaacttaatccagttgggtcatttgtatgaatggattaagaatcggctaccctatctcaacccatttccaatagaaggcccgttgcctcaaggggcaccagggggtgcacccggagcacaagcacccgttgtaccctccgggggcaatccctcaacaggtccctgggctcccaccgagacccaatgggagagtagccatgatctcttgtgggccccatattgggggaatcaccaggaaagaattaaagcgctatgatggggccataaagcatgatgacgtgtgcgaagtcacccagcttccagcacaaaagcctcgactcatggatcaacccattactttcacggaagaagatgcaaaactggtgtgtttccctcaccatgaccacctggtcacagccataggcctcacgaacagggatttgtggcccagcggctccaaactcagaggattcaatgggaccacacttatcccaatgggaaaagtgagactgtcagtcaccctgtgcctagataccccttagagtacttttaagtactgcacctttgtagtggtagattgcccaactgcatacaacgccattcttggtcgactggccttggttgattttggcgcaatcacatccatccggcacttgtgcttgaaattcccacccaggaggccgaagtagggaccgtgaggggaaatcaaggagaggccaggcagtgctataatgttgcttgcctgtgctgatggtccgtgagtgggttgaccaagagttgggggaagaagatgagttggatccccgcgtgggatctgaaaaaagcgtagaacctatggaggacatcgaagaagtacgagtgtgcgacctcgaccctaccaagatcctccgcctggggaaaaacctagagccgatggagaaaaacaagattattaaaacattaagggcgaccacaaatgttttcgcgtagtgccaaggagacatgaccgacataagcccgcatctgattacccatgtcctaaatgttagcctagatatgccgccaatacagcagaagcggcgcccccttgacccagtaaaagtggacgccctagaaaaagaagtagacaagctgctaaccaatggcctaatccgagatgtgtactacccggaatggctggccaatcttgtactggtgccaaagctgaatgggacatggcgggtatgtatagacttcactgacctcaacaaggcctgcccgaaagactgcttccctttacctcggattgaccagatggtagatgccatctctgggttcaagctactgtctttcatggatgcctactccggctacaaccagattaagatgcatattgcagatcaagagtgcactagcttcatgaccgataagggggtatactgctacctggttatacctttcagattaaaaaatgctggtgcaacatatcagagaatggtgaattggatgttacaaggcctcctaggaagaaatatggaagtgtatgtggacaatatgctagtcaagtccaaagcatgcatgagccatgcgaacgacctagcagaatgcttcgaagtagtccggaggtatggaatgaaacttaacccaaagaagtgcacttttggggtcaagtcagggaaattttt

SEQ ID NO: 223786 - DNA, 1574 bp, Cannabis indica
tatatgaattatgctgttcttttacactactaacactaatggtttatgtgattttaagggtgtaagtatagtgtaggatatcagtgtggttacggtattaccaacacgagtaccagggggtacgtcgtgcatatggtacaacacttagtgattttcggggtacaataatggctctaccaacacgagtacagagttggtactttagtgcatttggtacagtggtcgtagttcccttaagaacgttcttaaccatttggtgagctctgtttttgagcccagggctgcttaagtataaacccggtctagcattacttttatatatgttatgcatatcttactgagtctgttgactcatcagtttgctaccttgtgtaggcaaaggaaaagctaagctggaggaatagtgaaatggagctcggaaaggcatttgtctatccgctcttgttgcttctcagacggctccttgtacactggctccctttgaagtcttgcgttctctggaatcagcttgtgttctcgcagctctgaagtcgtacacagtaatcgcccgtcacgatcttgtacaggaaggcttccaagaacttcggcagtttctctgcgcgtcgcgtcaagtgtaggtcgagccggtctatctgcgataataaaaagggcgagttagcttaaagtcacaagataactcaaaaaattgactaagtaaagaaatacgcgacatactaggtcgacggttaaagttagtcctaatccctggaaccttaaacacataaaaccacttcgatttacaatctcccatgttggaaaccatgccttcgaccccattgacctcagaagtggcccacttgctgaagcaatagaagcttttgaggagacctacattctttatgtcctagaaaaagctaactcttctatcgagggtgccctatgcacgtactccatatacatcgcgtaaaagcctaaggctatgcgatagctattaggggttaattggaaaggggacacatcgtactgtttgaggatagtggagatgaatggatggaaggggattgacactctgcatcggagaatggggatagacactatgacatcttctgagggtatgatcgcagggttggtaaaagggaggtgtggcctttgagtaggatgaggacgcatggtgctaagatgcagtaggtttaacctcgaaaaggtggtcaggtcagatttggtaacccgcgagactaagtcttcataggagaatggctcattcaactgcgtgttgtccaacgagtcggactcgctcccttcggcatctccaccttcgtcagactcacgactaggaacttcccaatcttcacccatctcctcgacttcgacttcaggagcatgcctggaatgaataagatgatcgcgtaccgacactgtagactcgctgtctcgaatctcgatggttcctcgttcggcgagctcctacaccatcctctcgatgtctacagaagacagcggaccgaactctgtgtctccagcagtagggacctcctcttatgagatcgatgtcggaatgaagctgtcttcctaatcgccatcaaacacattacctc

SEQ ID NO: 223787 - DNA, 1024 bp, Cannabis indica
ccatcttccatgtacataatatacgtattaaatattatttatatcattttgatttcctaatatatatatatacacacatatacacaacaagatacaaatcctttatttataatatttgttattacaattaataacgaatctgaaacacgtacgtagggtggattggaggagcacgataaacttgttatggctcttaaacaagtggatgttgttatatctacgttgcctgttcctcaacatcttgatcaactcaagatactcaaagccataaaagaagctggtaacatcaaggttattatatttatatttacagaagagtaatgatatgtgtataattaatattattgtgttaaatattaatggttattgatatattatatggggaaaacagagatttgttccatcagagtatgggaatgaagtggatagagtgagtggattgccaccatttgaggctttactagaaaataaaagaaagatcagaagagccacagaggcagcagggatttcgtacacctacgtctctgcaaatgcatttgcagcctatttcattgagtacctgcttcatccacacgatcaaagtgctccaaacgaacaccaagtcaaagtttatggcagcggccataccaagggtaaatattttattcaatactattactttttttttttggggtaaatcagcaccaataatattaggcctgtattattacatattctcaaaccactccctgtccatcaagttcaccttttttagcatcacacctctattttattttttacatattgctgtattttttttaaacaactatagcacttaataacttttgattccacacaacaatttcgacatgcccagaagtggtataccaccgctgtcaatgtcaccactaaaccacctgttctctaaatatagttagatacatttactaattaatatcacaatcaaaaaattttcccgttcaatactattcaagctaggcttaggtttggaaagctatagactttggtgtaattagagataatt

SEQ ID NO: 223788 - DNA, 2409 bp, Cannabis indica
gtggaaaagaaaaagttgatagaagatcctttagaacttagcttaattgaggatgatttgactgagcaagaaggagtggaggtaagggagtatgctaaatggcttgattcttatggaccactgaatacgaagtattatgaagagttgggggttataccgagggagcttctgccatctacagaaaaaccttcagagctagagttgaaggtgcttcctaatcatctacgatatgagttcttgggagaagataagaagctttcagtgatagtgtcagcttcactttctgatgtggagactgataggttgcttagagtactttgggcgcacaataaagctattgcatggacattgggtgatgttaagggaattagtccctcaacagtgatgcatcgaattttgatggaagaagacgctaaaccaacaattgatgcacaacaaagacttaatccacctatgaaagaagttgtcagaaaggaggtggtcaagtggttagatgctggagtggcctacccaatttcagatagtaaatgggttagtccggtgcaagtagtaccaaagaaggggggatgacagtaatcaaaaatgagaagaaaattgattcccacaagaacagttactggtcggaggatctgtattaactacaggaagctcaacaaggcaacaaggaaggacccttttcttgccttttattgatcagatgttagaccggttggctgggcaagagtactaatgcttcttagatggctattctgggtaccatcaaatagccatagcacctgaggatcaagagaagactacttttacatgtccttgtggtacttttgcttttaggagaatggcctttggactatgtaacgcacctgcaacatttcagaggtttatgatggctatctttttagacctaatagaatcctccataaagatctttatggatgatttctcagtctttggttcttcattcgatcattgcctagagaatttggagaaggtgttaatcagatgtgaagagtcgaacttggtcctaaactgggagaagtgtcactttatggtaacagaagagatagttttggggcacaagatctcaaaggcaggtattgaggtggataaagccaaggtgtcaaaatagagaatttaccccctccagtgtctgtgaagggagtaaggagtttcttgggtcatgctggtttctaccgaagatttattaaggacttttcaaagatctcaaaaccgttgtccaatctacttgttagtggggtttcctttgagtttggggaagaatgtttgaaggcattccaaattctgaaggagaaattgattttagcaccaatagtcacttcactaaattgggagtttcccttcgagttgatgtgtgctgcaagtgactaggcaatcggagtggtcttaggtcaacgggttgacagggtgttccatacaatctactacgctagtagaaccctgaatgatgctcaactaaattatgccacgatggaaaaagagatgctggcaattgtgtttgcatgtgataagttccggtcctatctaattggaaataaggtgatagtttacacagtccactcagcaatcaactaccttatgaccaagaaggatgcaaaacccaggctgattcggtgggtacttctactccaagaatttgacatagagataaaggataagaaggggattgaaaatctagtagcagatcatctgtcaagactggaattagaagaaacccagaatgcaaaagaggtacaaataaatgaagaatttcttgatgaacaactctttagtttgagggaaaacttgatggtaccatggtatgctgactatgtcaacttcttggctgccaatataactgctcttgagttgtctcatcaacaattgaagaaattcttttctgaggtaaagcattgctattgggaagagccaattctctacaaacactatgctgatgagataattaggagacgtgtgcctgaggaggagatgtatattctattctaaaccactgccatgctttaccatgagggggacatttcagtggctcaagaactgctgcaaaggtgctgcaaagcggattcttttggcctactcttttcaaggatgcttgtgattttgtaaaggcatgtgatcgttgtcagcgaacaggaaatatctctatgagaaatgaaatacctttaacacgaatcctggaagtggaattgtttgatgtttgggggatagatttaatgggtccttttccttcttcttttagcaatttatacatctcattggctatggattatgtttcgaaatgggttgaagctgcggctactccagccaatgatggtaaaacagttcttaccttccttcaaaagaatatatttactcggttcggtactccccgaccaatcataagcgatgaaggagtca

SEQ ID NO: 223789 - DNA, 2598 bp, Cannabis indica
aaaaatgacttgtattaataagttgtgtaaaataatattatctttaccataattctcgggtcgaacctaaaccccgacccagacccggaccccatccaagactcgaaccccagacattggaccggggtttgaagtgcaagtcatggtctggggtcgggttcagggtctagatttgagtctaggtctgggtgcagggtcgggtcagaagtcgggataaggggtcgaggtctaggtccccatcctcggaccctttctagatattataatacaggctaatacaaataatttgttatgtatcaaataatatgattcacattttattaaaatttatggtcgtaataattaatacaatacaaaaatttatccaaacacggtgtttcttgttatttcattcaataagaccctcatatggcctaccgaacgagccctaaaagatttataatttaatacaataactaaatttagtactaaaatactaaaatgacaaatatatatatatataaacaatgcattattgtgatgcaattatgatctaaatttggatcaacttgtacctggatcaattgacgagaaatgctaaaaggcattaatggtgcctagcacccttctcggtattatatcgctattagtgtaattaaatatcgtgtcttatataacttaagacaataacttttagataacatcgtaaccaattataagggcccacctataaaaagtgctagacattatggtgccaataacaatactcatcaattgacatacaattatatagcaaactttttataaaataaactatatttttagcaatagatcacaaatttacatctccatcagagatattttaatagtgtgtttcaaaataattgtatatagtaattacactattttaatatacaaggtgtttgaatattaaatgataattacatataaattggttatgaaaattgtatagtataattgaggtctcttaattacctttaaggttactatctatttacttggaagtattgttattgagtattagtggtgtccaatattttttataggtgaaattttatgattagttagctatattctataaaaattactttttaaaattatatagaactcaatacttaattatactaataacagtattataccaaaaaaaaatatatatatatattactaaacaacaatgttaccttttaacatttctcatttacttggctcaacttgaaacttctgaattactccgagttatacttaagttgaattaaatggttacttgtgaatcccaccctaaatgtaagaatcaatttattccttttgggaattgtgtatatttactctagtctctcgaatgttgttgaataaatgcaactatatatcataatttaagcggcacatctaacttcattaattgcaaatctcaaaccacaatatcatctagaaaacgtgaagaagatatttcatttaattatatgtataatatttatgtcaaacatagctgaaaaccagccacactaatccaaagcttttgactcatatttataacctcatcctttttacgttcttaagaaccactaactctttcattccttcttttctttctcaattgagaaatacataaaacgacattgtttattaatattccagtgtcgttttaaccacttcactacagttcatcctcattacataaaaattaggataaagtctgaaaatttgaatacaaatatataattttgtgccgccatggctgcggctctagcgggagacgatttggccagatcttcaacgagtagcttagcttcaagatcatcaagaagtttgagagagatatggacattgccggcgccgttggacatgttcagccgtagtaatcatcatgatgaaaacgaggacgaggaagagctgcgttgggccgccattgaaaggcttccgacttatgaccgtcttcgtaaagggatgtttaagcatgttctcgacaatggtagagttgttcatgatgagattgatgttaccaagcttggaattcaagagaagaaggttttaatggagaatctacttagtgttgttgaagaagataacgaaaagtttcttcgaagacttcgtgagagaattgataggtatttaatttaattgaataaattaaagtttctattataatgttattatgatttttttgattattcagtaattttgttgttaatttgggttttttgaagagtgggaattgaaattccaaagattgaagttcgatatgagagattatgtattgaaggagatgtgtatgttggtagcagagctcttcctactctgcttaatgttactttgaacactgtagaggtactcaattccaatttcaatttcaatttcaatttcattttcattttcattttcattttctttgttttaggataaggcaattggatttgtgtatatagttatatactgtatatagtctatagatttaacatatatatttatggagaaatttataatacaccctatcattatattatagggtaaattgcggcataaatacttaatgtttctgattttatacatttaaatatctaatgtctaattttggtggcaaaaatacctaatgttaca

SEQ ID NO: 223790 - DNA, 2716 bp, Cannabis indica
cttctcgcactgagagggaaggggcacatacaaatcccaagcgaaggcatgtatcaacctgttcctaaaggagaaggccggtccatgatgaggcaagttctagctcgggatgtacaagaactcatagtcgatctagacgaggaggggatagaactcatcgcattactgatcgagagagtacgggcacaactagagctgaaagttactcaaggatgaggtttgtaagtaactatgatccacaacagtcggatcttcgtaatcagctaaatcaaaagaaacctgacttacgctaacaactcgatcaaaagcaagaggatcctatccaattgcgaatcattgagttggaggacaagttcaggagataccaagatggggaattcgggaaactgcctggttacgactcaaacaaggagcccgagcctttccacccagacattctgagcgctgaattcccccaaggatttaaaaacccccatgtctcgtcatacgatgagactacagatctagtcgctcatctcaataattttaatactatcatgcgagccagcaatgtaatgattaacttatagtgtattttattccctacctcgctagttgggacagcgagcaactggttcaataaatttacccatcattcaatcacctctaaggaacagttgtctaaggacttcaagaaatagttccaggcagcaggagataggcaacctgaaacgtcttcttttactaacataaagaaacagtcgggcgagacacttaaggcctacttcagtcgttttagtacagctgctgcaagggttagaaatttaaacgacagtctccagcttaatgctttccaagcagagatcacgactgatctctcaactgctggaggcgagctgtgggatgacttgcacggtcgcccagtgaaaaatatcagtgagttcaatgagagagctcaggtgtttgttcgaaaataggaagcaagaaaagagatgaagttgttaaagactggcttgggaagtaaacccaacactgtctcgacaagtaccttctcaacgaaagctaacaatccaagaggctctaagaggaaagatgactctaaagaatcagctaaggacaaaaaaaaaaatagaagaagcacgacaagtacatgccaatctacactatttataccgagcttaatgaaattcgggaaaatatctatctcgcacatgagcacagggtcacattccgtaaacctgaacccatgaggcatgcgagacataaaagagatgcaaaatttttttataagtatcataaggacattgggcatgtgacagaagaatgccgttagccgaaagacgagatagaaagtcttatctcgcgaggttacttccagcaatatgtgaattgacaaggcgatggaaaaaaccagccaaattcgcccaataagccaaccaaagattacaacctcctcttcttgaaggagaggacattctggttatctcgggagggccacatctcgctggagaaagtaacaatgcccaaaagagatatgtaaaggaagttaagaatgaacagtctatttttgctccaaaatcttctaagaaagctaagattgaggaaccttcgattgtgttctcggaggaggatgcaaagaacgtgaggtatcctcacgtcgacccactggtgattaccatctagctcaccaacaaaaggataaaaagggtgctggtggacaatgaaagttcagtcaatatttttttaaaaggatacactgaagaaaatgggtctggaaaaagcaaagttaagaccttgtatggtaaatctatgtggatttacaggccaaaatgtcgccaatcaaggaataatcgagctcccattaactgtgggtgaaacacttttatccactactataatgcaagactttctaattgtcgacctgccatcagcctacaatatactgctgggtcgaccagcgttaattggactaggggcaattactttaattaagcacatatccctaaagtttcaaacaccgacaggtgtaggagtggtgcgaggtgaccaactactggctcatgaatgctaccgcatagagatgcaaaatagaaaagctggtcatcagctaatggcagtcatgactgaagaaggcgagagacgggatgaggatcttgatcctcggattcaagatgaacggaattaattgaaaccaattgaggaattagaagaagttatttaaattcaaaaaatcccacaaagtgtgtattcattgggaaaaacttggatgaaaaacaaaatagcaactaataagttttttgatggcaaaccaagatcaattcgcttggagccactcagatatgataaagattgacactaaaattatatgtcaccacttgaatgtcgactcaaattacccagccaagtgataaaagagacgacccttagattctgagagacaaggggcactcaagcaggaagtggataagttgttagttagcaaatttatacgcgaggcgttttatccctcgtggatatccaaccctgttcctgtcccaaaaccaaatggaacttggagaacttgtatcgactttttagatttaaataaggcgtgcccaaaggattgctttccattaccaatgatcgaccagttagtggatgcgactgctggacacgagcttatgtcattcatggatgcatattctggatagaaccagattaaaatgcatgtacctgatcaggaacatacaaacttcgt

SEQ ID NO: 223791 - DNA, 1727 bp, Cannabis indica
tactctatttgtgacttaggttagctttaggggcgacatttgttgcccttaatagtactaaaaaatcattcctagctgacacaagtcacctctaaaagaatttttaagactgacaatagttacagtgcctaatagttacccttaatattaatattcaatttaacttttaatttttaataattttaatattaaaaatattgaaaatatcaaatttaatttttatttttacaataataataaaactaaaatcacaatatgacacactaatcattttgttttggtattatatatgcagctgattgtttgtatgactataaaatataaattttagtaggagtagacatgatttatctaatttaattataaaaaatttgatagttggattctaattaaattgaattggttattagatgtcaatctaaaaattcaattaaaactcaatctaattcaattacatttaatatatattaaatgattatttatatttatttgtatctatactaacggtttatttttttattattttattttaaatttgtaatatttagttgtttcacatatttattttcataatattttattttgttttattattttgtagtgttgatttacttatttcaaatttttagttgcattgaaatttttagttgcattaaaattaaaattcgatttaatttattaataattcttttgaaaattaattatatatattatattaaaaatttcgaaataaacaatatacattacattattctcaaataatttttatactattatttaattatattttataaaagtaattaaattatacatacacaacttgccaaatcattgcaacaattttcacattttctctcatcttccacctaatttctcaaatttccaattgatttcctaaagttaataacaattttaatctcagacaattgatcgacgattactgtggagacattcgatgaggtgcgctatttaaaataactttttgtttccattaataccttggccaccaccaatggtggaactattggattgacaagcttgaatgaatttgttttcaaattttggtacataaattcagatgctttattattctcattgactctgcatgtttgaattttatctttattttggtacatgcgcacataatgtttgataaaatttctcagtgatctgttacacttatttttcctaataatgtcatcttttaaataattgcaatctctgagtatagttattatactaataaaatgactcaaagggaacaattgaggagaagcagagaaatggttttgagctctgagtaagtaagttgttgaaactatacattaaggtttgtgaatttacaaactgatgattactactaatttgataaatggttccctaattttgtacctaattttgttaattaaataattatgatacatttatggtttttagtttttacttcagatgatcatataaattaattatcaaatgaattgagctaaatgattggtagatagacacatattagaacattagagagaattttactggaagaacatgacataatccaatatgataggaacaaagtaagtacttgccttcaacttttccttaatctttagctaatttctctatcgaattacataccattttcaacatagtttcttatcttccaagcatatattgatatttttgtataaaaaatatttcaaaaaaaaaatatatcttgcttttccaatgaa

SEQ ID NO: 223792 - DNA, 4048 bp, Cannabis indica
attccaaccaatatttcacagaaaaacttagtgtaaacaaatatgccattaatgacctaaatttgagtttcaaagttcaaacttgctcaactccacctccatagctcaaattcaataaccagaacttcgtatcaacttaaaattaacataaaatcagaaccctaagaatttctaaccctaacaacccctacttagcaaaatcactactcaactaaaactaaaattcaagaagtagatgataaggatgctagggcttaccttgggctgatttcccttgaaactctttgttgaaaacaccaagaatcagcaaccaattccttggtttagggctggttcgaaagagagaagaaggaagagaggttatgttgatttttgacttaattttcttagtttacttaatttctttctaaatgaaataagatggatttcccgcataaatccttggcagccacctaactctacccttttggcttaaaactagggtatttttaaaggtaggggtaaaatggtcaagttccataaccctgcttaatctcggtattttattttctcaaaaataattcctaataagaaataaggttctaaacttacccatgtgatcaaactagccatccatcgcattttctgttgtcgcctagcaaaaattacaaaaattacataattaacatataggagaaataatggccttagatttcaataaaatctccggaattgtgaaattataactctaatactcattaataataatggggtctacaaataaataaattcataaataataaataacagaaattagtgctaattgcctttagtaatccaaattactaaagcgctcattacaattcaggtatgccagccaaactgagtggaacagctactcgacgatttacagaccattaaatcacataattcgtaaaactaatgagggacacgctaaaacactattcggggacttaaacatgaaagtaaaagtttccatatcaatggataacatggaaataccctaaatattataaaaatagaaaaaactagggttccctaaaatgcctcaaccggtagaccggttccccaactagagttccggttctaaggggtttcctggggaccaaccagaattccagttcctacaggtccccttgaactggaatttggattcaatgcaggaaacaaacaaaacatcataaccaattcaattcaactccaattcacaccaaagcttccatgatacctaattacatcataatgaagagaattcaagcaacaaaaacaagaaacaacccctgaaactcatttcaccattaaaggccaaagtttgagctcgaaagctcaaacattattcaaaaactaaaccaagccttcaaactactccaaaacaatcaaaataaccatagttctactacacaacacgaatgcaaatatcaaattaaacacagaaccctaacctttataaaaaccatgccaaactcaaccttgagcttaagaaaacataaaaagagagactagaacatttaccttggattaggatcactctaatattgctaaattgtttagaatccagttgaaaaattctgaacactagtaggttcttgggtgcgcaagcaaggaagagggagagaagttattgttttatttttctaactttgaataatagaaaattaaactaaattttattttattaaatcaagtgtaagtatcagagcgctaaaccacttccaacatcttgcactaagggacaaattaacaaaatggcaaaagactattttcccctcgcctaaaatgaaaggccacttacacctaggggtattttggtcatttctaaaccacgaataattcctgacgttcccaatgtctaactaagttgccctgctactactaaaatactgaaatgtgattccattggctaattgttgcgttctaatgctactgggaaaaaatatgcaaaaacataaaattttatacatagcataaataatacaccctgaattcaaataaatccccataaaataataaatcataattaataatattattcataattaagacctaatttttgctaattccaaattaaaactaagcagtctttacaattatcccctcgttaaaaggatttcatcttctagatctaacctaaacaactctggatattgagccttcatgtcaaactctaactccctggtggcttcccccaccttactatttcttcagagcaccttggccaatgctatggtcttgttccgaaggactttatcttttctgtctgaaacctgagcttgttgttctatgtgcgatagatctggatcaagttccaggttctcataactcagcacatgggtgggatatgaaacgtatttccgtagcatagagacgtggaatatgttgtaaactgttggaagtactggaagcaagggtagacgacatgctaccaatccaatcttgtcgagaatctcgaaagaccctgtaaacctagggcataacttgccccttttttcgaaacttctgatccccttcatggaagacacccgtaggaatacatgatctcctacctaaaattatacatttctatgcttcagatctgcataactctttttcttactctaagaggcaagcattatggccttgatcttttctatggcttcattagtccgttgcactgattccggacaaaggtattttctttctcccatttcatccaagtgaataggagatttgtatttctccatacaacatctcgtagggagccatccatatagtactttgataactgttagtgtatgaaatctctatcagtgacaggtacttgctctaggagccttggaaatccattacaaaggctcgtaacatatctttttgtatctgaattatcctttcagagtgccatgtaacctcactatctttttcttgtataactctacatactgatccactgtaaagaatgttttcaccggtagaaaatgtgcagacttcgtaaatcgatctatcacaacccaaatagaatcgtacattcccgtggtcctaggtaacccaagtacaaaatccattatgatatccttccacttcaactcaagaagtgttagtggctgcaataatcctgcctgtctctgatattcagccttgatctgctgacaacttaagcaccgagataccaattaaaccacacctctcttcatctcacaccaccaatagtaatgttttagatcttattacaacttggtagtgccaggatgtaatgaatatggagtggtatgagcttcctgaataacctcatttctatgtttcacagtatctggaacacaaaccctggtcttatacaacaacatcccgttatctaataccttaaaatctttagcttgaccagctaacctctcttctaagatcttcaccatttctaggtcaatttactgagcggctttaattatgtctaacaaatcagattgcaatgtcaaattataaagttttcctacagcaaactcaatgcctcatttgaccatgtcatctgcaagctgaggtgaaatcttagtcatactagttacctgcccgggacctttcctcctcagggcatcggccactacttggccttcctaggatcgtaaaggatttaacagtcataatccttaataaactctaaccaatgcctctgtctcatattcaaatctttcagggcaaagaagtatttaaggctcttacggtcggtataaatctcacacttttttcgtagagataatgccaccaaatctttaaagcaaacactatcgcgacaagttctaaatcgagagttgggtattgtgctggaatatattataacaggatctagatttactaccatgtatgttatttaacatcctaaatatgaatttctataacaatgtaatttaaacacataaagtttgagaaaccttacagtggttccagcggaattaaatgactccttctgctcagatctctaacccttgtatcctttctgtagcagagtatcaccgagatctgagcccaattgtccctcacttgaatttggattcttcacagtcttacacactatgattgagtacca

SEQ ID NO: 223793 - DNA, 1711 bp, Cannabis indica
atggtcttatttcgaagaaccttatcttctgtctaagatctaaactggctgttcttcgtaagataagtctgattgcatgctcaagattttcataacttagcacatgagcaggatctgaaatgtacattcgcaacatggaaacatggaatacgttgtgaactgctgaaagagctagaggcaaagctaaattatatgccacttttccaaccttcttgagaatctcgaaaggtcctgtaaacctaggtcataatttgcctcttttcccgaaaggtttgatccccttcatcgcagacccccgtaggaacacatgacctcctacctgaaactctatatttctgcatttcaaatctgcataactcttttgccttcactgagaggcaagcatttagctttaatcttctctattgcttcattagtccgttgcactgattccagacctaagtatttcttctctcctgtctcatcccaatgaatgggagatctacattttctgccatataattaacaattcatagagagccatccctattgtactctgataattgttattgtacgagaactctatcagtggtacatatttactccaggagcccttgaaatatacaacacaggctcgtaacatatcttccagtatctgaattgtcctttcaaactgtccatcagtctgaggatgaaaagttgtactgaatttcagtttggtacccatagcccgctgaagactctgccagaatttagaagcaaattttcggatccctatccaaaattatagacattggaacaccatgtaatcttactatctccttgacatacaattctatatattgatcaactgtaaaggttgtttttaccggtagaaagcgtgcagatttcgtgaatcgatctaccacaacccaaattgaatcatacaaactcgtggttctaggtaataccacaaagtcccacttccactcaagaagtgtcaaaggctgtaacaaacctgccggcctctagtgttcagccttgacctactgattaacttctagttagatttatgaacttgttaatacttggactaattttacaatatttgtgtaatatttaattgtaatttatttaattacttctatgaaatgaaattaggtatataggccaatcataaaattaatttgaataatatttaatttaccttttaaaaaacaaatatctaatttaaatttaaattaaataatatataaattaaataaattgaaaaaaaaaataatcattacagatttggcgtcaattgttaagaggcaaatggcgtcagttttgggtttatatggcgtcggttatttactatgaatcgatgccatagggcacatatggcatcacttcttagcaaataaacgaagtcatgaggcacatatggcgtcggttgttttagaccctacaacgtcacctggatcagcgtcggtagccaactttgccaaaatcgacgctgaaaggccttaaaaactgcctctaaaaggcatttttgtagtagtgtttaaaccgaaaaattggtatatataaatttcaaataattaacaatttttttctcaattaaaaagttttcaattttaattttaattaagcaacatttgcataaaaagtgttgctataggcatatttttatatataaaattgttgtcttaaaactttacttttattaacaggcaacgcttatataaaagtgttgcctttaaatattttt

SEQ ID NO: 223794 - DNA, 3152 bp, Cannabis indica
aaaaaaatgaagatattgcaagcattttgaattttatgaaacttgtaaaaattggaatttgtatattggttctttttattttttgtattgtttaagttatcataaaatcaagacaagtatgattatgactataagttatttctaatgtattttagttttattttaatgataaacatgagttgtgagtttattgatgtcctctaatattttgagtcatattcaattatgattttgatatagaagtgctcataaacaaaagattatggtagctgaaatatcataatgagaaactggtttgatatactgtaatatgagtaattctcaaaaaatacatagcagcaagctaacttaacaacaaccaagttccataaaaccattctaataaaaatcagaaggctacaaaataccaaatcatgtactagataaatgtctaccataaagtaagttcatatggtcatataagtttatcataaaccaacaaattttgtattacaaaaaaagttttaaaatagcttcaaaatgagaatcatcattcaatcctatttctttgtcaatttgggaagagatcttgctgcaatccttctcattggtgatgctgagaaattgatgagctttgtctgttgacttcttgacctagctgcccaagttgtgatgtcacaatttttttctttccagttttctgtttatatcttggtgcaacctataaaaaaaaccaggtagtgaaatagaaaattcatataaaaaaccaatcatatgattaacataccaaagtaatctaataattagaaagtgcacaaagacatacattattgatttcttgtgtaaaatctgatagattaacgtcctgtaaaagccaaaaactagcaaatcacaaactagtaaagtaaaaaaccagctattaatacatggaacacttcattaaagaatgtcttgtatccttggagcaatgttcgactcccacatcaatgtcgaatgcctattcttggtaagtcttttgagtagataaattctaatcctttccaacatggacaatatcggtctctctcttgctgctaatactgctgagatcccattgaatgtctcgcacaagttgttcaaaagaatgtcacacttcggatgagtcctaaaatgtgacctgctctaatgttggggtcctgcttccattaaccaatcataggcaaccttatcgagctgctttatctcttccaatacaacctgaaacctaggaatagtaacctctctcgcagccttccacaaaaggtcctttaattttttatctctaaacactttgataaaattcttctccaaatttcttgcacaatgtctatgctcggcttcaggtaccccctccttccacatatcctttaatgattgttgcaatcctttttgttatctgtaatgaaagtccaatgatttgaattctctattttcaagtctactcttaaacattgtaagaaccagttccatgtctccttattatcaatctcgacaacaacaaatgcaacatgataaataccgttgtctgcatctatcccaattgcagttagcaattgccctttatgtggtccttttatgtgacaaccatctaagccaatcaatggtctgcatccagcattgaatccatctctcaaaccaacaaagcaaatgtacattctcttaaaccgtggattcccattatctccaacttctgtcacgaactcaatagtggagcccttattagtgtacttaatttcctcagcatagtcccataaggtagcatattgttcgtcataactcccttcaatcttttttgttgcaagcttacgagctttgtaagccttgtctctagaaatgtcaattacatgatctttgctcactttctgcatgaaggaagaaatttcccaattttcattgcttttgaattcagtttagtacttattgctaaaccatttggcagtggcaaatctattatgctttttcctcgaacatttgtgaacatcaatataactttttatggcaaatgttgaactatcactattgatctttgaggcaaaacacatccaaggacattggatgcctctacatttggcccgaaccctatgagaatcattcactttgaagaatatttcctttccgttcataattgcatattccctcacagcatccttgaattctttccctgaagaaaacactaatcatacctcaaatgaagggttcttcatatcaacatcaacattgaattctggcaacttaggcaacttagctttcatggagcttcttttacacttgtgtaaatttttgagttcatcatcaatgtcctcctcagaactagaactattttgttgaatgtactcattgtcaaagtcatccaactgtgcatcctccaaatcaatgtccattggccttttccctatcccgttgagatgaatttctgctgtctcatcaacaatcaagtcatcatgacaatgctcatactcaggatcaccttcatattcataagcagcctcatcatcaaaactatcctctatgtcattagtaatattaggcctagaataaccagctccatcaccaccacataaactaggctcagaacaaccagccccatcaacaagcccaacagtaggctcaacaacaagcccaagatcactcactgcctcagataacattgaaccttgactttcaaacaccttggaatgccctacaaacacttccaatactctacactttttgacaaattcttttatatttttctgtagatatgtgtcagtttcaacatattcttccaatacattacttacagcccacttaatgtagtaaataaatggcactgtaagtttcaaatcttgtactaatataccatctaactcaaataaagttaaccattcaacatcacagaagtggacatcttgtacatacccaccacaataaataggattctcacctatatttataaattttccactatgatgcactttgagtgtgaatagagaagagttagcatcttcacataagacaaaataaagtgaattagtggttcaagacttattaaataataaccaatatatttttaacttcaaaagcataaaacaaactactcttttttcttaataaaaaataataactatacatacactgtaatttattttttttaacagaaagagccttaacttgtt

SEQ ID NO: 223795 - DNA, 3030 bp, Cannabis indica
gttatttattgatggagagtccctatctttgtgggcagtttgaactgatccaaagttgtgggaatgctgaaggcgagttggaaggcttgtgagaaaaacacaagtgctggtgtgtttctgcaccttcggccagccaaccttattgaaggatgcctagtgcttggaagctgacactcttggtcggctagctataagttcggctaggaccttgctggcaagttcatagatcctatttggcttgtgtgtaccgtgcaacatagaatctcaaaggttgaggggctgcttgatactaatcttggcaggttagtgctgacctatcttcaatgtgttttctactttttaccatgtggaagagccacatcaggtggaaaaaatttaggattatatttgccccctaagttcctttccgaacgtctagttgagtagggactttttgctttgtcttgtattgcaactccctttgccgtgcagatatgcatggccaggtatcggacttttcgacttacgtgatttgatggcagttattaattttacgtcgatcaatgtggaaaggcgtgcaatagttacacattttcccttgttgcaactcttggccttctctttcccatgcatgcctatttttgtggcattaactccccactaagtttttgggggaaaatttccagaaattatatataggcctcattcttcttttcattcaatactttcacttctgaacaacaaaacctttctcaaagactccttagagccaaattcttgtgagcttgagttcttcgtggatttatgagtttctaacatacacacttgtcgtgcatactagctcaagcctccttatgtcttctagtgggtaagtttgaagctttccctctcttttgttctttaaagttccgccattgttgagttttaagcttttatgaacttcttgaatcccatgccttaggacagtttttatgcattataatccgttcaatagctttagggtgcataatgtataactcattgatgcaaaagataaaaaaaatcttgagctttcttttgacattttggttttcggggttcaaagaacacaaagaatgtagtttgaatctttaaaaatatgatttttgatttgtttaggggtctggccagcaattcaagtctgctagggaccatggctggttcttggtcctgcctcaagttccttggccgatacttggtacctttctaggaaccctatctggctcttctatggaaaaacatgttctggtcaattcatgatgagctgaacatgacttggccagttcatgatgaatttccctgaagctggccggttcatgatgaaataaccatgagctggctagtacatggtttgagacttcatgggtgggctggttagtacccacatgtattatcctgttagcgcatgtttttatccttatcttatttgtgatctctaattgttcacctccctttgtctttttgcatagatgaacctgcacgattattaaggaggtgacaactagatcgatgaggacttactttgtcttctatacgaagactatcacccatctagctcttcctttgagagctcgttaggcagctctttgagtgacttcaaagcgagcagtggttctccaaaacttgaagtttaacataaacaatattctgagcgaataggtggtgagatctacagaagattcatctgggaactgaatcaagggtggagatagttcctacctaagtcgtggacttacattgtccgctagggtattcctgacattgtggctgttggataagcatcttctgcatttatagatgttcttgcagcagcagctgttgtgactgttgcacaatactctaagcaacattcaaaattggaaaggacaaagtagacttattgcaaggcacctctgactaatccctacattgccaaactcatggcaagggggagagtttgccagatcgaggaggctaaacaacttgaggctagccaagtacaggaggctatggtcaaccaagaggaggagcaggatgtagatcagcctaagcctgagattgaggctagggtagctcgaaagtgccctaaggattgtgatgtgatctagggtaatcctttgggctcctacgacaaggctggagtgcctttgaatagcagaggccaaccctcgtagattggggttgaccatattgaggataaagctgctaagccatggattctttagataagggaaggagatagggggtatcccctcgttctacactatcgagtgccaatcttgaaggcatcatttatagaggacttgttgggcaggtttgatgaattaggcctggtagagaccacttggctcaccatctacaaccaaacttgatagcatggtctggcccccatgcagagaaaggtgcggtgcttcctctgcaactgtattttagggacatagctaacttcttcaagatgtgtccaacttagattgcactaaagagtatcaagtacctgtcagcacttttttcctctatgtctgagttaggttagtcgcaaccttccccttttgaggtgaattacttctttgagttgaaatccagtctaagccaaaatgagaccgggtacttctactttagccaatagggctatcagtggcttggcggcactaatgacgcagccatgtcaaaggttggaggctatgctataagttactttattgcatgcaacataaagggcatctgttagctttttcactgtgttccaacctacagtcagccactccccacattgagactgagtgacatttttatattttactaggatctagattttctaacaagtatgttataatctaatatcctaaacgtgaattcctaaaacagcaaaaataaatacatataaagtttagaaaaccttacattggtggcagcagaatgttatggctcctttagttcaaatctctaacccttgaacctagatctccttcaagtgttgaaattattcacaattttccacactaggattgagtatttgacttgatatgagtgagcgtgtactcttcactaggattc

SEQ ID NO: 223796 - DNA, 2764 bp, Cannabis indica
acaataaattttttaacagcactcataattaggaatgcattttatatatattttatttaaattaatcagcattctactaataattagtatatatataataagataaatactattttagatcctgtcttttacaaaaatgatcaattacaccatttgtgtttagttattaaatgataaaataaacatatgtgttttctaaaattatacaaataggaccctaaactaattatttgtcaaaataaaacttaataataatcctatccagatgttatgacaaaattatattttctgtatcaattcgtgttaaaaattatcttaaaattggtcacattaaaaataaaattattgaaaattgaactcagtgtctcatttttactattttagaaaagaaaaatgctaagaggcactagtagtgcctaccctcttatgtgtcagtattgctattggttcaactaagtatcgaatttcacatagtttaatataatagtttttaggaagtatcgctagtcaatcgtaacgtgatatgtcgagaaggtgcgcataagcgccactggtacctaatagcaatactctttgaaaaaatatagaatctattttgtcatttaatttcctcttaataataattactataaattaaattggaaaaaacaaacaaattcatgaaaatggtttatacaactgccaaagtaacttttttttatgatcatatttttagaaattaaaaaaaaaattagaaataaaaaatggcattctttggaatcattaccacgtataatacttgtaaaaagaactaattaataaaacaaagattaagcatagaagaaaataaatcttgttatgcctataaaagttacacatgttgataatgattgatttaataatctttaaagtggttgtatagtaaaaaaaaatttactaattaaatcctaaaattacatgattgaaaaaacatatgtttcatttaaaatattttataaaaatattatttttacaaattcgaaactatatttaaagttagtctatgtaataaataattttaataattactctataagataaatataattatttttgtgaaaaaatacagatatatttactcctattcattgttgtaaataaaataaaataaaataaagaattggtaggtaactagtttccaaaagaggtaggtgttttgttttctataatcttcttcttcacgtggtatattaaatttgtagatgaagaccttattatccacgtgtagtaattcttactggtttggtttctgttgtttgtttcacacgtaccatattacgaaacctttttaagcttatgaataagaaaaaaaaaatatactaaagaatacttaattttgtttaacctttttaagattattaaatatcgatttttgtgtaatttaatatcaagttttcacttttactactcaatcgatagggttcattctcagccttcacaaactcacttgctatctgaaaagatgtcaaaatttaattcagtacaacttagcaatatacaatcgaaaattcattgaaaaattatcgaaggaaaattttcaaactattcaaataaaaaaatcatcgaaaaactgtcaaaaaaataatcgaaactagtcatcttaaaccatgagacaccaataatcaaaaacttatcgacactacagatctaaaagttatcaaaagtaaacacgagcaatgaaaacatgcacaaaaattaaatcttaaaattttaatttttattatgggtggaataattttataattagggccacatttaagtatatttagttagatttccaatttaatatataatgctatttaatataattaaaaaaatatattgtcaaattggataaagctttatacttataattacgaagtgttactttgactatatttttgttttgaacattatttgacatcaagtgaaacatggaataaattaatgtaaaataataagatcaattcttcctactctcaaaatctacgtttctgatctttgttttaaataataataaatagaatttattcccctaaattatgacatttgtagagtttttcttacatttctttatttcaaaaattccccttaaattatataaaaatgttgaaaacatcccttacatttgcattttgctaatcttttaaaataaattgttaacatacaaacatgacattaatctatctcagttctaaaattaaaacaaaaagtaaatacataaattacaatctaaaaatgaattacatataaaaatatgtatgtactctgagctaatatttatatattaacttaaatcgaatttcaaatagcttaaaattattaaatgtatacttaataataaatgtaatttataataaccaataaatatttaaaacactttgtttagttttggaagactttttcacgcaaaaaaaaaaaaaatagaaagcataactgaacaaaagtcatacttaattaatttatattattatgtttgtgaatagaataattaaactcatggtacatccctatatattcttcaaacatatatttatatataaaaaacttttaatgacacatatatataaattaatatgtatataaatatatatatatatatatatatatatagtagttagagaaagcttccaaacgagttaggtagaccttataaatcgacctattatattttaaaacatatttattaattgtacttttccaacattttatccatgtctaagttaaaataatttattcatatctgcatatctttcttcctttctaa

SEQ ID NO: 223797 - DNA, 1251 bp, Cannabis indica
aagaagtatgccgtgtgaacagtgcaccgcatatatgccgtgcactggagcacacacggcaatttaatgtaatatttgcagctacgttggaggattaattgcacagcctcaccaaatttgaagcctcgttggtgatgctctaagagaattatctaacagctaactaattctaattggcctctcaagatagagtgtacagattggtttggatttgatctctgtaaatgatgaaggaaacagtgctttagtgaagacattagcgatgttgttttttgaagagacatggatcaatttgaggatgctttgagtgactttctctcgaacaaattggcagtcaattaatttctcgtgctttgttcactcatgatatactagattctcactgatgtggatggaagtagcgttgccacagtagaggtaagcaaatggtgtatgattgatggcaaaatctttgagaagagcaaagatccaagttactttacatgttgcatttgccatcgccctatattcaacttcagcggatgatgataggttgattttttgatttttaagagatgagtgaggagccaaggaacacacatatagattggcatgtgtcttgacagccaccctagtcagcatctgcaaaaaaaagaaattggtttgttgttgggggataaattggtttatgcatatggagagatattgaggaaagtctcaaatgaaaaaatagaccttgaccaagagtggctttaagatattggaagattcgttgagtagtctgtagatgaggtacttaaggagatgctaagaactgactaaaccgattggtggcgtatgatatgtcaggtcgtgtgattatgaggtaaattaatttaccaataaggtttctattctaaataagactatgtcttgtttgtgaattttcactaagcaatggcttatttgagaagaaatagtgtatttagggtttgtttattaattaagatactttgtacagtctaattaataaataagttaaatataattttatttgataattaattataattattaaatagatagatttgatatttatagagttagaattgaaagattgcctttgtgataagaaagatgagtttaaataaaatagcaaaattgaaattctaaaggcccattaagggttcgaccaaggaggttaaataaagccattattttatattttttaattctattttaattctaaacataaccataaaagctaccctataaatagaataagatggtttt

SEQ ID NO: 223798 - DNA, 2107 bp, Cannabis indica
tgttaaaccaagaaatgccgttagataggcacttttaatatataaagatatatgtaatgtccacacttcaagctttcattggggcccttacacccacgtaataatgactcttatatacgagtacttcatagattgatgacagactctacaaaccaacacgagtatttctagtgtgttttgtcctcactcgtacgcttcttgagaaaactttccaagaggtcacccatcctgaaattactccaggttaagcacgcttaacagtagagttctttcatgatgggctaccgaaaacaagatgcaccttggtgatataggtagtaccaatcaatccatttaagccatcttcaactatgtagtcccttacctacacagttttagaatcatcatacttgaccttccccaggtgatgcgggattgcacaatttacctagtatttccccttacggatcacgggactactgactgtcacaatcacccccctaacaggatccgacatcctcgtcgaccacacttccggttgggtcaagactctaatatcatttgtaacgtctccgcttcaagcctccattgggcccttacacactctatcctttgatacttaaaaaaagtgcactgatgcatttttattgttttagtatccaagaaattttttgaggaaattactttgtatacctactttactttgtatacctaatttttaccttcgtttctatattatttaagatatactcacttttatagatgatgtctccattataccccttaggctaatgtaaattatgtactagacttaagtagagggtgaaggtatattagacaactcactcacaaaagtgggaaaattttaaaaaaatataaattgaaggtatttttgattaatggatacaaaaaagaggtaattattaacttatctcaaattttttttgtcatggtcatgtacattgtaattatttaaaatattttatgaaattttgaaaaattcaaaaaaaatttaacattctgaaaatgagattttaacaatctgttacatgtttgatttcttttattttataagtgtgtgaaatagattatttgaatattatttttttatattataagttattttaaatttctttaaattttgttaaatatcttaaataattataatgtataatattataaaaaaaattgattaaaaaattttatgaaagtaaaaataaatagatgatgcatgagttttttaatgtggtgcattataatgatgatgattgtgattatgttccaatcaaaatttgtagctttgaatttaggcatgtatttgcataatatgtaaagattaccattttagccgcaataaattaatcattttggctataattttgaccaacaaaaagtactgtacaatatatacaaatccaagtactccaagcaaacttgtgagttgataatattacatatatatttattatgtataaaatatagttatataatgaaatttttagtttatgattgttttttttaatttatatgttaacttagttatgtaataaaatttttaatttaaaagtatttttttgattttctaagttaaatttgatagaatatactaatttttttttttagaaaatcagttcctttgtatttcaattttcaaatctgttttacaatctatcctcatttgtatgaatagaatactattactattatttattattaattttatattattattatatatatttaaaaataaaaattatgtagatattttacataaataaatttatatttaaatttaaaaaacttaaaatattgtagatatatttaattttattagtctaattttgaattaaaataaaaaaaaataatatagacattttatataaaaaaattttaattttaatttaaaatacttaaaatattgtagatacttttaactatatttttaattttaattattacatataaaatatatatatatatatatatatatataatcacattactaaaattttaaattaatagcacattgtagccgcaataggttagaaaatcctacaaagattaaaatctcaaatcttatttctaatttttttttaaaaaaatataggctaattaggatcttttctcc

SEQ ID NO: 223799 - DNA, 3538 bp, Cannabis indica
tcccgtacagacttggggggcaaatgttatccaaatgtttgcactctggtgtggcatcgcacgatggtgacacgtggaatcaactctatgtacatgctcgcaagaagtgtgccgaatagcacaccacatacattcgctcggacgaagtcctcttactcgggcagtgagaaatcaatgcagcacactaacacttagcaaattaaacttttgcatcgtgactcaccgaagaaatccctataactttgggatcagatcacagagatatggcaagctatcctaatcccacgatttgtgtattctgtatttactatgtaatctttctacttatatcaactgcaaccagaagggaaatacttccctcccaagcttatagccctataaatagtgattcatattcactgggaaaagggtcgaaaaacttgtctaagaattcacattcagagatactattgttagagctctaagaaaagggaaacatttaccttattcttaagttaatacaagctacaaggattaggctattacagaactgctcggggctgaacctctaaaaaatacttctgtctttatttcctttgttattgttgacctcgctttagccaacgacagtgagtctaattttataagcgacaagtagttcaatacgattgaaatatttaaagtaaataaagacacaagaattttatgtattgacttaagaacaaggagcaaggttccttttcttagagcttttacaacagtatctgtgaatattaattcttagataaaatctttcgaccaaaatgtcctcgaccctttgcctagtgaatatgcatcactatttatagggctacgagcttggagaggaagtatttccctgctcgttacaattgatataagtagagagattgcataataaatacagaataaattgatcgtgggatttggagagcttgccatatctttgtaatctgatacccaagttatagggatttccttgatgactcacgagttgattccatatgtcaccatcgagtgatgccacatcagagtgtagaattttagataacaattatattaccctcgtattaaactacttgtcacatacaaattagactcattgtcattggctaaaagcgaggtcaacactagtaattaaggattttggatgttatgccatgctaaatatgttggaataaagaattatgcactcaaggcataattaaattagaatctctaaattagtaccctaagtttaatagaaatgcagtctagggttattaccctagaatttacacgatggtaagaaagcaacagtgtatagtaacattgctaatcaagagaaagcaagttagggttattatcaataggtgttattttgaacattctataatatgttatatgagtaattatttagtatgaaagttagggttattaccctaagattttttatattatagtatataatgtacgcatatatgtcaagagttatgtgtataagacataactgggttagacctgacatttatcatcaggataaaccactgaaagaacgtaatgtatgaattatgtatatatgaatagggttatgcaggcaaggaaaaatcaagttagactcggtaactataaccgaacctgaactcgaacccagacccgaatccatacccagaccacgatcgaaacttggcacctggatccggacagagacccatacctaaacctagacctgtacacaagacttggactcggacctagacccaaaccctgatccagacagggatccagacttggacccagacccaaccctggacttggaccatcagaccaggactcagacccagacccagacccgaactcgaacccaaacttgaacacggaatcaaaatcagaactaggactaggacccgaacccaaacatggacccgaagtaggacctaggtcccgtacctagatggtggacctggacccgagcctcgaaaacctagacccggatcaaaactcgagactcagacctgaacctagttctaaactcaaacccgggactcaaacccagatttggacccagacatggatcgaaaacccgaacccaacccaacccaaacttagactaggacttgaaccccgaccgtgtcctagactcagagcgagacctaggactcagacctggattagggacctagaccaagacctgaggctttaacctgatcccgcagtcagtgtttgaattcaggacatggacctagatccgtaccatgacccaaacccgaaccaggatccagacccgatcttggaccaagaattggaattggaccaggactgggacaagaacctagacctggcactgtaataggacccaaacctaaacccaaaatcagacttgcactgggactcgaactcggacccgaacccaaactgggacctggactcggattgggacctgagacttgaaccaaaatcggaacacaaacttggaaccagactgggacctaggactcgaacatagatacgggacccagaccctggaattgggcccccagaccgggaccaaatcttgggcctcaaaacttggatcgggatttgggacccgacctcagacctaaacatagacctaggacccacctcgggtcttgggatataagactcgatgcttggactcaacccgtaccctgtgatttgaaattggaaccgaaactagaaaggtgatcaggacccaggaacaagactaggaccaagacctggaccagaccgaaaactataaccgaacaaggacttggactttaaaacaaacccacactcggattctgtgaataggttcaggtttgggtccagatccaggtcggggtctgagtcctggttcaggtttgggtccaggtttggatcccgatctgcgtctaggtttgggtcaaggtctgagttcaggtcccgagtgtgggtccaagtttgagtttgggttaggatctcggtttgtatctaggtctcgtgttttgatcacggtctaggtttgggtccaagtctaggtttgtatatggatccctatctaggtccgagtctgtgtctatgatcggttcccaaatttggttttgggtctgggtctcggtcccgatctgggtacacgaccgtgttcaggcctgagtttcaatctcagtttaggtttggggataggtcagagttcgattctaggtctgggtttgggtcttggtcacggtccaagtcttgttccagtgtcctggtctgactattcttgtttaggttccagtttcagggcccaggtctatgtctgggttcgggtccttgtttgggtttgtatcctagtttgagtcccagatccaaacatcaactatgggtttgttccaagccccgtttcccggatcgcgagtctagatctggatccctatcacgggtccccatctagttcttgtttatgtctcgggtcccacgtttgagtttgggtttaggatcaagacttgttacgattctaggtctcggccccgattctgtgtcttgagtctagttccatgtttgggtctgagttcgggtctgggttcgagtcctgcgtcca

SEQ ID NO: 223800 - DNA, 1599 bp, Cannabis indica
tatcttgtgaggcttttgaattgatgatgacaaccctttggtggttgtggtatgataagaacttagtattatttggcaacaagcaatcaagatcggatgttattccaaacatagccaataaccatctggcagagttttaggagtatgattggcaagaccttcatttgggcttaggccttgcgaacctagttgtaaaccgagctacgtgatggatgcctcctcctcctgagatctttgctctagcgacagatgcttcggtgattttggggagatgctttgttggatcgaggggagtgatatgggatgtagagggtgtggtttggttggcatggtcatcaggtgtgttaggtgatttctctgttaatgtggcggagctgcttgccattcgtctaggtttggttcttgtgcatcagtttggttgcaatatctttattattaatattgattccactgtggcaattggttggattaataaattttacattaattttagttttctatctattttattagatatttattttttattagttgttggtggtggttcttataatgccattctgcgatctacaaatggtattgcacatacactggcaacctttgttattagtttaggagattgtgtttggacaaatgcttgtcttcgatttttaagttcttctgtaacaacgaatttttcttaatgaattttgcattttgttcaaaaaaaattcatttttctgaattttagaaaaataatcttttagttgcttttgatgaaaataaggtattaattatttattttttcaaatgaaataaaaaatattttaataacactttattttaatatatttaattacttatttcatttaaaatatatatatatatatatatattaattttaaacataattaagaaacaaaaaagttataataaatttcaaaaattattatcaagtttagtagcaaaattagtacagttgttgtatttttcaaaccatatgataccatctaatttcatacaatatattttaaaattctatcaaattattttatatatatatttaaaaaaaaaatacaatcttgtgactttaatataagatatgaaaaaaaaaaatacttcgtataaaatatgcaattttttgatatattgaaatttttttaagtttaataattgattaatcattggaattaaatataaaagaaactagatcaaatttggaatcttatcaggtctattgctaccaatttgcctctttcatggtgtattataagagacttcaacaatatcgcgtctcaagaaaaaaagaaaggaggtcatccctacccttcatctctcatcaatggcttccaaactgtgcttcgagaatgccatctctacgatgtggagcttcgtggctaccctttcacttgggagcgtgggaaaggtacaaatcatcatgttgaaataaagttagataaaactctagttactcaattgtggctggtcaaactgtgatttctcatcttttgaccacaccaatttttcttgaacctgagattggtacccactgtaattctgttcgtttcttttgttatgaaaatgcaaggtctcatgaacctcttgttggaaattatttta

SEQ ID NO: 223801 - DNA, 1449 bp, Cannabis indica
ttttttatttacaatatatatacacacaatacatatttaatacaacacaaaatacatacatatatactcttctatatcacatttatcattcacaatatatatacacacaatacatattcaatacaacataatacatatttaataatatagaaaaaccctaaaaaagattataatacatatatatatacccacttacgactttgagtgtagattagtggggaccaccataacttgaacaaggtattagacctttgtccaaaagcttatttctcctatctttaaacactagaggaactttcatggaaatagctttgtgaattatcaaaccttataggattttctagcaatgtgctttttttgatagaagcatggttgtcacaatataagcatcatagacctctttatatagtgtaggatatcaccatttaaaattttaactcataacatcccatggagattatggactcaataaatgagtataaaactcattctccaacaactataactcctatagcttttaaaaatttcaaattaagatgtgtaataccttttaacactctgaatattggtgataatagtagaagctactcatagtaacaagtaactctcccaaatattacaaaatgatgacaactaatatctattattatatgttacatattagtagtttattacacatatttaatctatatattatattatttataaataatataatagttggggtcgaatttaataaaaatatattataactttacacaacatattaatacaagtcaataccaaatatagtattgtattaaataatactaatacaatacaatacaatataatacaatctactccaatacaatacaatacaatacaatagaacgtcccaaaggagcccttattgagttcttaaagttctacatttcattttcaaggaagaaacacgatttttttttattaattaaagatgagtgttcattataacatcttagttaacttttacgcttgaaatcatatgtcggaatatcttttatcaaatttcttttatagagatgatcgttttatttataatatcatccttgtaaaattttaaaaaaattctgaatagttaacaataccgaaaacgatagttccaaatattcaagtctactacgcgtgttcaaaaaacttcaaacctatctttggtactgtaaactattataatttttttttaaaaaaatttatagtgatgatattataactataacgaatactgtcataaataaattaaaagaaattctgacatatacttttaagcacgaaaattgactaaaagattgtaatgaaatattgaccataacactccacttaattaaatatctctaataccaaccattaggggtggacatccgatccaatccaacttttttttcttcatcagattcaatccaattaggaattgaatttggaaaatcatca

SEQ ID NO: 223802 - DNA, 1735 bp, Cannabis indica
tttaagtctagcacataatttacttaacttaaagagtataatgaggactggtatacatcttctataaaaatatttatatcttaaagaatataaaaatgaatttaaaaaattaaaacagtagtgggtatatacaatgcaattttctctattttgactataacaaacgcttcgataggccttaggaaaatatatattttaggccctgaattgggtgggttgtaaggcgtactccgttttagcttaggccctacatctttgttttaaaaaatagtatcatatcgtattgtggatattgtctcacatagaataaatatagtagagtattgagtcatatagactactccacttatctgtaattaattttaagatagaacctcatgattctaaacacatcgttctatgtatattttgagtgaaatattataactgtttataaaatggtatattttttagttagcttattacctctgtggtagagaaaatacaaggttgaacgagctttatgtcaaaagctggtacaacgatagtggttagggtttggctgagagtgagatcaccaagtagactgttaagaagggaatgaagatactttccatcatacttaggacctgttaagctctccatccaacttgctaacgatccaaacaatgaatccccactgtcacaaaaacattagaatattaatatttgtactatataccatgtaaatgaaagaatttaccaaaacaaaaaatgatctatagaactattggaaattatgcatatttttttaataattttttaaaataccaaattaggtatacctttgagggaagatgttaggcgtatgttgtaagtaaaaatcgttaatatctttagcagcgaacatgggtcgattgtgtttgttgggggcagcaagcatggtggtgactaagccaccagtgcttgttcctgaaattacatcgaaataatctgcaatccttacatctgctccatccaattcctgaagctttgattcaagaaaagccagaatagtgcctgggataatgcctctaatcccacctccatcaatacttagaactgtgaacacttttttctcactagtactccccattaaaacaaaacttgagatagataataaagcaagaaaataactatgaagagatcgaaatatatgaaactcaatgaaaagtgatatattttgattggttgatgctttgtatactcctaaaacatctatgttacttatatatatgagtaaaaagtcagaaaatagataccgttgttgtaataattaatgttaatttatcctaagtaggacgccatggttgattcattaattcggtcaaaagtaataatatttcatatatagacaaccctacacgcttttattcaatgaatgtgtgaccactacaaaaagtgtcaataaatttgttcatgtttttgggtccccaactaaccaacctctagtatccacttgtatttgttgataacaatacattataagggttttgttattggtactactgcttgcccaacattttttagagatagcactatattaagagcatataatcttcaatgaaagtgtaaataagagatgaaaagctaaaatataacttatttaataaaaagtgtgttccaattgtatgtcaaaaagttatgtaaatttggcatttagtaaactttatgccaaatttggaaaacatttactataatatgtaaaatttacaccgcaataaatgcattacttttt

SEQ ID NO: 223803 - DNA, 1892 bp, Cannabis indica
aataaaccgacaaaaaatacaactcgaaatagtacaatgaaaattcaaactgcccaatgaatatattgggtggtttataaaatattttaaaccgctcaattaacccgaataaactaaattaaaccgatttatatattttttaataaagttgtatatactatattacataaattacatttataagtcaaattattttgtatttaaagtttggacagtgtgtaacataaaatctagactttataattaataatttttattttatttggatattgaagttgaagtttataatctgtacattattagtactttttttattattttgttcaattatttcatgtttactcaattatatttatcttatattaaagttcttaaaattaatttagactatattattttttagcttgaaagataaataatatatttttatttttttagatctaattttatgaattagaaactaacaataataattatataaaaaaagtgaagaacggtttggacgggttaacctgaccaaaatgacaaaatcattgggcgggttaaacttttactaatttttaattgggcgggttacaagtaaatatttgcaacccaatatttatattgggtttgtaaaaatatgctataacccgaccaaaccgaccgacatacactcctagggcaaactagaggtggtggctctataaacgaagtgttttattttgaagggaggtttagaagccaatatattttccaaaaaggagagggagaagaagatgtgagaatgctattatcggaactggtggagtagctcaaatgatatccaaatttgacagaataggtgccaaattttgtaggactccagataagggtgtcctctgtgggtgtgaagggcaaagggatagctagaatttcgtgaacaatgtgaggagggtaaaactgcagtaggcaggtggtatcccaagtcatgttatctgaaataaagaaagcaatatggtttgtgtaacgccctaatctatagggacgccacacgtgtgattttataaactagtttaatactaaagattaattaattattaaaacccgtgataatattaaaaacttgactaaaataaaacactaaaaatagacattgtaatggcataaaatgtgtattccggggatccctgttataaaagttttacaaaagaactatatacgacgatgcctcaaaacatataaatcaaaatacacaatagatacagtccaaaacaaatcctggcagcccagcacgcaagctagcgaggtcaatatgtacattgttggagaaggtagtcacctcatggcagctctaacttttctttgcccttacttgcaccacatagcacccgtgagtcacaaagactcagcaagaatattaataataatcatatagtttattattcaaatattgtcatttatacacaatcaaaatcaaaccattacgcattattcataaaatgaaatccaaaatcactactggcttctaccatgaataagtatcagtatacagatatctggtaatacaaaattattataccaataataggaatcattttcatttaaaaatgtatattttatatatgttatttcataaagtaaccatcttcattacatcacattgcctaattaggcaagtcgatgctttaatctaatgatcttgtattacgttgcctaattcgaatcctatagtgttcttcaccattaaaattcaagccttagtgattgagtataggtccacttatagcaagttactttcatgaaatatggaattaaaatgatgtttgtgttgatttggatgtgttcatgttggtttatgtgcatatttgatgattgtatagaaatcgcaatttacgatgataaatatttttatttcgttctgaaaatatttt

SEQ ID NO: 223804 - DNA, 2577 bp, Cannabis indica
ttcaattttttttttaatatattattgcacataaaaacaatatactattgtgcaaaataactataccaaacacttaattatttaaggttataattgtcattttatcatcaaatttttaactaaaaggacattttgttaatttttttgaaaaagggacatttattaacttaattgttagatttaaggccattttgtatcttggcctttatttttttttttttataatcgtatatgttatagctttttaggaccacttgtagatttttggaaaattataagtaatttataatgttaaaaaaaaatttacatatttttttgtacgtgtgattactttttttttatacgctaacggtttaaattttatttttgatattgtaaattatttaaaaaaaattaaaatttataagtaatcctaattatggtgtagtacacaatcatacaaaaattaaaataatttttttaatacaaaaaatgtgtctattgcataaatttcccttttttttttgaaaagaagataaacttcattaaaataagtcatccaaaattaaggatgagatatcagttggcagggtagccatactgaaactacaatcagccataagaacagagttgcgtgccaatgcatacacaactttgttcgcggatcgcttaacaaaaacaattgaaacattaacaagttgtactaaaagtgccttacaatctttaataacaaaaccatatggagagaccattagtttattagaattaatatcatgaaccacattaaggcaatcggtttcaagcactaagtcactccagcttttattttttatctagctaatgcttccttgattcccactgcttcagccaacaaaggagaaaccacaccagaatgtaaggcctgccgagtctctaccacagcaccagctgctgtccgagccaccatacctactccaaacttgtgttcatgttgaaaaatagcaccatcaacgttaacctttagctgtggaaaaacagggggagaccaatgctcattcttttcttcactcacatgattgagtggagaaatttggtaccggttttaagcatctaaccagttagctaaggtgagttttgctgaagtgacaatttcatcaaccgtaggagatttagcattccaaactttgtcatttctatacttccataacgcccaacaaagcatcgaaacttctatcttagtggcggcatcctagctttccaaacctgcctgaaaccaagcagcaaaagtgacagcttgcgattcaaaaactgcttggccgatgttgcaccagcaggcttttgctacaggacactgaacaaacaaatggaaagaagtttctgcccctacattacaccatggacagtttgtctcaagctgcacatgtctatttctaagctgagatttagtaggaagacatttcgaacaagttctccacaaaaagttctttactttcggaggtaatttcagctgccacaatgccctccaaaaaccagaattattttcagtagtccaagtccctttaagctcttgcaaacagtgataaccactttttattgtatagaacccatgcttttctttgctccagtaccaaccgtcactatctacttctaaacttaatgggatactcattacaagttgttgatctcggacgtttaacacatcctccaaaatttctgtatcccactctctcacacccactttcataagagaactaaccttagtgttatacaatgccgagtgagttgaagagatgaaaggctgctcttcatgaataagccaaggattgcctaaaatgtcaacattaacccctgaccctatcctctttcgaatccccatcttgatcaagtccttagaagctaatacacttcgccaaataaagctaggattagctcctacttcagcagtgagaaaatgaccattaggataatatcttgctcgaaaaattctggcaacaaggctttcttcattagttattaatcgccacccttgttttcctagtaaagcaagattaaaatcccgaagatctcgaaaacccattcctcctattccctgtgtttactcaaatgcttccaactaagccaatgaattccattcttttgagatgacttcgaatgccaccagaagttacacatactcctctcaatatctttacatgtatcctgtggcagctagaatacgttcatggcataagatggtaaatcttgaactacagctttgattaaaatctccttgcctgctcgtgacaaaagcttgtcgtcccagttttgaatctttcttctcactctatccttgaggtaaccaaacacagctgacttgtttcttgataaagtacttggcaacccgagatacttgctatcttctcccgcttccacaatacccaacacctgacaaatacgagtcctatcatgtcttgacgtgttagtactaaagaaagctgatgacttagagaagttgaccttttgtcctgatgcctcctcaaagacccgaagtagttgttgcaccttttggacatcattatcattggacttgcaatagagatagctatcatccgcaaaaagcatatgcgacaccaccggggc

SEQ ID NO: 223805 - DNA, 2058 bp, Cannabis indica
cccttccactggactcatatgccggtgtagctggggctaaacttgtttcagagcacattaccaggtagtctcgttttttccatggcttggaaaaaggtgattcggaatttttcaatcacgggaacatttttgagcttatggatagaagcaagagcctcatgtactcagtaaatataattatataattactaagagttcaattccatatttatagtgaagtaagcatgaatttaataaacatgattatttggttgatgagattcaataaataaatctagtttattggagcttagaattataggtccatggtctccggatcaccaccttgaaacaatgtcaaggggtggagttgtatatgaaagttcagaaaaatctattttgaattatcaaaatagtaattatttatttttgtaataaataatttattattcaaataaattaaatagggtaaagacaaaaattttcaagacaaaacttgtcacgacaaaagacacattccttgtctttgacaagacataggaggcgccacatgcattgtgtccaaacgcagtacatgcactccacatgtccagggcgtctctcttagttttatctttttacgttgattaattcaatagataaatatttgaatttaaaaagtagttgagatattctcttaagtagttgagagattccctcaatcgattattagatgtacatatctatgactgaatttggttataatattttattcgaataattaaatatgttttaataaataaatttaaaattaaataattaactaaataaaacttttattgggtttatttaaatatattgtataacaaagttctgaatacaagttttagggaataaaattttcacgcaacttttctgaaagcctaaaaagggttttactagtacatatttttctctctatcacataagaaatagttcttactcatgtgttgagatttatacaaaagcttcatatacactttgtcctagtagcccacactactccttgtgtatggtgaatcgatttggaagactacggtgtgagattactggatccaacttacaaaaagttttgaagataccctgatagtcatcaagaggtatttatttctttcatggaatttatattttgggtttaatatatatatacacgtggagatccttgggactgtggtacaatgataatcagtaaattattattttactgtgtacctgatttactaccataaaactaacatgaagaacaatggaagatggtctatcagttgccaagtcctggtttaaagtttttgacctcaggtttgtcatcttcgtctcccttccatcataggaagatgcaggttatggtggacgctgctttctcggagtcctctacttctgttggagttgtcatcgtggatgcaaaaggccatgcaaaggaagtttttgttaagaaagttgatgtgtcattggttctccatggttaattgttggtggtgtggtggggagctaaggttatttttgactttcaaggcagagattgggatttggttctctggttgaagcaatcaaaaaaggtaaaccccctgagtggaagaaggctcttgagttctttgagctgttggagatgcttttttcttgtaatatttctgtgtgtttggtttaagagggattgtaatgtagcaacccatgttaatgctatatggggtttgtctaatagctataacgggttgctcagtttctgggaagtgagtctctttgtgctcaccaaaattttggcttcttcttaatgaatttgatgtcgttttagcagaaaaaaaaatattataatatcttttgtaacattattggatcctgagtgtagttatgcaaattaaaagaattttttttattgaattttcataattattataattttgttttcatagtaacacaatttggaaattatcttaattagtaagacttgcactattcacgaaacatacgtagctttcttataaaattagacgttgcagacaatataataattcattcacttataaatgcaaatgtacattggccatatttgaaaataattttact

SEQ ID NO: 223806 - DNA, 1670 bp, Cannabis indica
tttgcaagagatttcttcatggccttgtcttcatctaaaacttccccatgtggaggatggcgctgtgtgctttggcttcaatctcaagtttcttcttgctgtcttcaaataatttcatggtttcatcatcaagtgtcttatagatcctttggtgaactagaaaggccttcacttttaattctccataggctaaaatcatttgaaccattgaacttgtttaccttaagtcttgttgtagccattcaaactaggttcttgattgttttaatctagttcttggaagttcaagtttgattcttgaaatgttgaagatgagtcttgattggttgaatgtgattcttgaactctaatccttgagctctgataccatttgtggtgaatactcactctcaaaacaggttgttatagcagtaacaatattcaagaatgcacaaataaaactagaaccagtaacaaaatcaaaactagaacttaaatgaaattagataagaaaacctagctcaagatggaatgaatcatggatctttattgcttgaatagtaagtagtacacaattgaatatgtccaaaaataaaactcaacatagtgaataattacaaggaaatatctcacaataagggaaatcaattcaagagtgatactcccattacattcttccatatacactcactatgatcttggacactctctctaaaattgaatctgaatctaaagtgtgagctttgaagattagagatcagaacttagaattccttgaaagagtagagacaatcctatttatagttgttggtgaggttttctttaatttggtattaaagccaactgttataactaacaacaactttctttggattcatctgatgagtgaatagatggacctactaactttgacacattaagtgagtttaattctaatatatatatatatatttagttagggttttttggatttttttaacttcatataatataaagattaataatatttatactttcttatacgtattttgatgagtccatatttgtcttataaatatgattaatttatgtattaatattcttaaattgattctttaaattattgattagtataattttaattgttttggatgttttaaagactaatcatgcatttagagtcattttgagggatgttagcacattttggtagaaaattgtggaggttggtgagctcggttttacaagacagaacttaattataaattttgacaaccttagaagcagaactggacttggagctcaacatgaaagttttagatctcgttcttagcttccagaacatcttgaatcacccaattctgaattgtattgaagaagttatgactaaaatactaatcaggtgacagaaacaaggagcaatcgagtcgagaaacaagctggagtatgaaaaatggtgctaggcgctatagcacgggttctagacgctatagcgcaggtttgaaaaaaaaaagataatttgggagcttcaataaatgtcatgccatattctatgtatgcttcgctgaatcttgggccactaaaagaaaagggaatagtcattcaattggctgatcgatctaatgtctatcctcgtggagtagtggaggatgttctcgttaaggtaaaaaatttagttttcccagctgattttatgttctagacatggaaga

SEQ ID NO: 223807 - DNA, 1730 bp, Cannabis indica
aagaccctcagcaagaggaaaagatagggagaaaggggatccccttgcctaataccacgcgttgaatgaaaagggtcggtaagatagccattaatggagagacgaaattgaaccgtggaaagacagcgcattatcagggatgaaaactggcatgggaaaccaacatgattgagcaaatggtttaaaaaaggccattccactctgtcaaaagccttctccatatcaagcttaatagctgcccaaccgatcttccccgatcgtctagaatgaatagcgtgaataatttcgttggcaaggagaatattatcagtaatttggcgaccttagagaaaagcactttgattgatactgataatggagtgaagcacaagctttaaccgatttgcaataattttggaaagacatttatagaaagtgttgcaaagactaatcggtcgaaaatcacgaacattctttgggtttttctttttagggatgaggacaatgatggtttgattgatggaagagatatccccctgatgattaaggatatgaagcatggctttagtgaaatcagtgccaagagtggaccagttacgtttgtaaaagagcgagttaaggccatcgggccccggagctttgtccacagagaggctaaataacgcatttttaacttccacttctgtataaggctcggccagaaaatcaacctgatgagttgagagcctattggggatcccttgaagaagagcattgacagcgacttcacaaactccttgagaggtgaagagggagttgaaaaagtgaaagaattgggcagttatagtggcttgatcatgagatatagatccatcagcaagggtaatgaggcgaatgaagttgttcctttttcgagtggaggcacggtggtggaagaattttgtgtttttgtctccagcacgcagccaatcaactctggaacgctgcttccagtatatttcgtccttgaggagaaggccatccaatctggattgaagggaggctatgtgggagagggaagtgggagtgtggtgggacgcattcaacagggcatcaagttgagcttgagtctgagagatttggagcttgattgggtgctgagatttactccaattcctaatagtggcaacacagtttgattgtttgtcaagaaagagcttcaagggagatgaaacagaggtcctagagttagcccaggaggaagtaagaaggttcgaaaacgaggggtctttcagccaatgattttcaaaatgaaaacgattagatctttgagcagcaaaatgagggtcttgaaacatgatcttcaaaactctatgatccgaaccatagaacccctgatggaagagagtaccatgaggaaaaaggtctcgccaaagctggtttgaggtacaccaatccagacgctcaaggatagaaccatgcttccaagtaaatttaggcccaacatgaggtataggaatatgattatgtttatcaagaaatgcatggaaagaatgcataacatgaggagggggattaagagaggaattcctgtcatttaaggagagataatcattaaaatcacccataactaaccacggcaaaagaggtgcagtatcgaataaacgattgagtaaggtccaagtaacagatttaagattaacatagggagaaccataataaccagaaaagtgccaagctttgtcattaaaattatttataatacagtcaacatgattaagggagtaagaaat

SEQ ID NO: 223808 - DNA, 1718 bp, Cannabis indica
taaatcatcgagcagcagtttccactcaagttgatcaacatacctcaattcagaaatacgataagattagtataatgataggcatatatgattgcatgtttagcatgcatatctataaatcctattagattacattgatagcagtgtcaatatacgtagagttttattggataccgataaatgtatatttggctcaagtattcttttgacgctatcacatcggtacaactaaagtactgagtataggctaatattatggtcagtagtactttcgtacaaatgttctagactgagtagcgcatgggacgcggggataggattatggtttggtgtatgggcgcctaattctaattcaggttatatttatgattatgattatgctttacttactgagtttttcaatgcacagttattgtttgcatgtgtaggtaagggcaaagctaaggctgagcagcactgagtgcgagcggatgaagattgtacatgttggggcagttagccctagagcgtacgatcttttcaatagcacgcagtattttgtatagtcgctaggcaacaacttttgtattgagtattttgtatcacagctgttattattttaaacacgagatcccggttatataaaagttatttgttttcagtttaatagtaattaagtaaagttttaaattatcatgattttcaataaacccgcagatcaacaacggatcacacaagtaatataaaatcactgtaacacgcttaacctagtagggtgttataatttagtatcagagccgctagtttgtcttttgaagatcatcacagcatgtacaatcatcatcagacataagctagactcatgattccataagccttgattgctttagtagttttctttattagtatgttataagaaaaagcctgataggaagcatgttgtagcctaatagttgaataggtgcatgttttattttctaaaataagcagtacttagtaaattatttttgatcgcgatctgaccaggctagctcatggtttcacagggagttctattagaatggatgcaaggccaaaaacgtaaagactgggaaatttggtcgaatccagtgacggtgagggagttcagtttccttcaaacatttgtggccgaggcagaggcccaaaaggtagggcatgggtcagggagatgttaacccactgtcgactgcccgtgattgggaaaacagttttgtagcaatgcaagcaagaatcaatgaacaagatgaagagattagacgtctgaggcagcaaggtactcctgcaatgcctactcctaaaatgcaggtggcccttacccctgctgtgcaggtagccccagttgctgttgtgaaccggatggagccactatacaaaaggttctgcaagcaggcaccttcagtctttcggggaggtccagatgtgatgcaagccaaatagtggctgactattatgacatggattctgaattttatgggagtcactggcaacgatagagtggcttgtgccacattccaattcctagaggattccctggtctggtggggtatggtagctcttactcgggatgtcactaccattacctaggaagagtatcaagagctatttaatgcgaagtattataacgaggtagtctgaagtgcaaagagaaaataattcactcaactgacttagaaagagaatatgaatgttacagagtatacaacctagtttgatagatt

SEQ ID NO: 223809 - DNA, 1783 bp, Cannabis indica
acctcccctttaataataatctatctgatgtggaggctgtcaaacataataataaagcttttacacatactggttttgataaggtgcgctcaggttctaaagtttccaacacggataaccaaaataagagaataaaattagtagaagtagacaaggtgccatctttccggtatgttgagaatatgcaggactactcagaatgttcaaagaatatccaacagaagaacttagatggatgagacagtaaaaaggcagctaataaaggagtgaaggaataatatgtagatgaagttttattttcttctacaagggagttgttcagaataatggtgggggtatcagaatgttatggaagtttggatgtattcggttttaaatttgtgatgttgcttgtatttggttttattaatattctagtttggtcaatagtttaatttgtctaaaagtggatgtaagcaatgatattttgaggaagacttattttttattaaattatgttgtgtttaatttaatcactgttatgattactttaactattatgattatttcttcatgagatacacctacaaaagttcttacagtacattttcttccaataatattatttaagttttatcaacaataaattaagggtttatatggttgataatagaggaacgttacattataatcataagtagtaatattaaacaaaaaatagtcttcaatagctgtcattgtgtagaagtaattattgaaaaatcgaataatattataaagtatgaattatattggtatcatgataattaaattaaaatggggaataaattcactgtactataatgggtggaccttcatgaaaaatattaacatacaagattcctattttaagttaaaattttgatcgttactatttcttaattttgtacatttagtgttggagtaaagaatttaaatttaagtttttaaaaatccttatgagattattcttaaggtggatatatttaaatctatagaatttatttcaattagatttaattgtttggactcggcatatttaatgattttggaaatgtaaatgaattttattggtttaataatgttggttttgattgatttagtaatattagtctttaaagattttattatttataaaggatataagattgtgggtttggttaattctcatttatgtagatgagtgttttattatattttataaagggtactaattacggtaatctaattttaatacatttatatcaatcacgatttttattaataatgatgtttgtgaaaaatcaactgattttcctcaattgaaattgagtgattgtattaggagtgattgaaggaatttagaatatgtgttggtgtagaactaaggtgttgaccaactaatatctaatataaaagatgaattattttaaaagaatttaaaagtagtatctaaggccaaaagttcccaggatattgatatgtagatagtagtgtttattatataataataaaatattataatatacatggtgtctcaaggagaatattaaaaaagcattttgagtttatgaagtaagtctctcaatacacttaaagaggaaatgtcaatagtaagttggaatgttcgaggcttaaatggaaaagaggcaattcaacatttgaagttacttctaaaagaatacaagccagatgttatcttcttaatggaaacaaggttggtggaaggtaagagttatgaaataaagaggcaattgggattcgataatgtttatgaagtgccgagagttggtaggggtgggggttt

SEQ ID NO: 223810 - DNA, 2712 bp, Cannabis indica
aaaagtattgttttaccagatagaatcataagtataatttagtagtacttactccaattccctttggttcgacctcacttgcgtgagctactacttgattgcgtatacttgcgtagtacccataatttttcgtaacaataagtcatcccacaactcgcccccaactgttgagaggtcagtcttgatccctgcttgaagagtagtaagttggatactatcattcaagctcttaactctagcagcagctgtactgaaacaactttaaataaaccttaagtgaatcgcccggttgttgctttacgttagtaagggaagacgcttcaggtcgcccttctcttgctgcctgaaattgtttcttaaaatccttagacagttgttcccaagaggtaattgaatgatgggtgaatttattgaactagctactcgttgctccagtcagcgaggtggggaacaaaatacaacataaattattcgatacgttgctggctcacattatagtattgaaattattgaggtgaaagaccgggtttgaagtcccatcgtacggcgagatgtgagggtttttgaatccttgggaaaatttaaagttcataatgactacaagagtcatgttcactgctcctgcacctccaactctaactctaacaggaactttcgcatctctattcgcatcttcctcacatcgatagaaccagttgtgtgccacatacttggcgcaaatcccgagcttcttgttaccgataggcagcaatccaagtcgctgagggacctaactaagagttctcctctggacctgagagaagagaaggcagatctcctgcatagattctcaatcaatatgcattgaatgaaggaattggtccattccctggccaatattgggtaagcgcgttcacggatcaagctagatggaaaggccgagctcttcatctgagtcataaccaggcagtttcctatattccccatcttggtatctcttaaatttattttccaactcactgattgtaattcgattggatcctcttgcttctgattggcattgagttattggtgtaaattaggtgcattttgatttaagcactcacgcaaatcaggttgtttcaaattaaacgttcacgaagatctggttgtcttcgttcatggttgctcacagacctcgtatctgagtgactctcagatttactgctcctcgtattactcatactttctcgatcatcactatgctgaggtatatcctctcctcgcgtatgtctttttgatcgactgtgatcttgggatcttgaacgtcccaagctagaacttgcctcgtcctgcacggtccttctccttcaggagaggttaaatgtacgcccccagctggggtacgtgtatgcctcctccctattagtgcgaaaggacactgaggatgcctcagtggtaacccacttgccctaggtgtcccaggatttctctcgttattacgagagatctcctactctctagttctgggctgccttatgttctcgttcctatgagaggattctggaatgtcactgttttcattcccctggtttgtgaatccttgggatctccaaggtacctctcgtcgaggtgccagattgtttggttgttcgtcttctagaacatccctagtttccccaggttgctcctcctagattttttggggattttcctgagttgtctcctgcctcttggttcttgaaccccgaggtctacctcgtggcctcctcactccaagatcaggttggttttgtgtagcgtttccttgagtcactctggctgcgacagcctctctttccaactcaacgttttgttggttagactcggccagacgttgctggagttggcagttttccaattcaaccaacgatacatacctagtgggatcataggcatcctcactcctaggtacataaccaccagtattagtatttgtttcctcattcccaatttccgggttttgatcataaccacgttggcttcttcttgaacgtgatgaacgtgctgttctttaagtgggtggtctttgtgaacccattagttcttttccaggacggagattagtctcttcagtacgactatcatcgttttgattatcatcagccatagataaacttctggttggttaggagggatttttctgagctattatcacgtaggctctcagtgaaagtaccaaactatcaacgtagatttttcgttaattaattaataagccattatcgtgataaattaaacatagaagctataagaaatttgagaagaataataattccaatagtgaaaccaggttttttacgtggttttgcagttaactctgcatagtccatgagtgtatcttattaagatatttctggatacaaaattatagttttttcaatcactgatctctctcaaagatttttcgtccccttttttctatataatttgcccctatttataagaatataggttggcagttatttacatttgaatttgaaatacataactgttttcacgaatcgtgggctttgaccacgttccatctgaacacgtgtagagctaaaaatttgtataactgtttgttattcttatctttaaggtagtggacactgacgtgagataggagcatctcgctttgtacatagatgaatgccttggttttcatatgccttccagcaatggcattagcaccagtgtactgagcaaacttaagaactgctctttgaccat

SEQ ID NO: 223811 - DNA, 3146 bp, Cannabis indica
aattcataaaaaatctaaattaagttctgtaaaagcctgaatttattatgttttcatctactttctagaaaaaatattttcagaacaaaactaaaaatatttgtgatcgtaaaattgcaatttccatacaatcatcaaatatgcacataaaccaacatgaacacatccaaatcgacacaaacatcgctttaaattcatatttcatgaaaataaatcattaccatgactttgaggctagttgttggagattgttttaccaggatctagatttactaccatgtacgttgtttaacatcctaaacatgaatgtctaaaacaatggaatttaaacacatataaagttcaagaaactttacattggttgaagcagaattaaatgactctatccactcagatctctaacccttgttcctttctctcgcagattataatcaagatttgagcccaacattccttcagttgattgaattctttacagtcttacacactatgattgagtaccgacttgctatgcttgggcatgtactctaccactataagggttcaaattttgaagagagaaagtgagaaggattcaaaaattagagagaaaaaagagaaggctcaaatctgactgaaggcttaagtttcatcaactatcagttttgagtccatcactatctatttataggaatccttctaggtttaggtttgaattatttgacattaaaaattgataaataaatggtaaaaatgagcattagtggtcggccataggatgtgggcccaccacttgcaattttgccattttcaactatttatcctatactttcacaaatgccatattttctaatttaaccactcaaatgtcaaaaatatttatttaataattaaaataattgtcaaataaaatttccatttaatatatttattaattaaactcaataaagtctcttaattaataaataaactctaaaacctcttttcttcacaattaagtcctagattagtgaaaattcataaataagacatagtctaattttagaattttaattgattaattaaaatcaattaactgattcttacaagcagtattgtctcaactagtatggggaccatgggcctatataaccgagcttccaataagcaaatctagaatttaccaagtaaattctctaacttatttatttctccttgcaccgctatagatttagaattacactctcagttatatagaacgctctatatgttccaggatatagatacgctatgaaaaattaatcatcgttctaatcccaataatcaaagatcctctacagatgatttacatcaagtagggacaaatttaccgttttacccctcaatgtattttatccttaaaacacttagtttcctataaatgatatttcagtaaactaatataatcattgaaataagagcttataatatatttaccaagatcaaccagtgatattgacttagaaagatacaacgataagattataatatctttaccaagatcaatattggttccagtccaatgtatactccatacatccgataatagcatactttaccaatattttgaaaagaacataatacttatccaaggtgtaagtaagctttatcgatgactatcacatcagtgtaaattcagtgcactggtgaatcatgggacattatctttttcagtatataatcacaattaccttccactgtgttgatatcactgtaattgtgaataattatatgttttggatttaacaaaaaatgtatattaaaccataaacatgaaaactacatgtaaacataaatgacttcgaatcttttattgataacataagattatattaaaatgggttttatttaaggcataaaatcccaacagctttgtgtttatgggaacactggtgttctatgggacactataagctaaatggttcaaagaacatatgtcgatatgagatagcagattgggatgacttcaagtcttaagagtaagacttcgtgttatcaagtttgtcgaaatttagtgagtcatcagaggatgcgaggttggttttgggagatggacttgtgaaacagtgttagagagctgacacaagtaggagccagaggataaattcgtggttttgggtgattgttagatcattgaccatgcaaaagaagctcagaggagcacgcatgcaaggggtcagaggggtttttgcatgaagccgtgagtgtacggtagggctggatggctaatataatgagtactttgtgaagagattgtgtgcaagagttcacttggtgttgcattgggtgcacctggcttgcgagcctcgtctaggtgggacgcatcaaattttatcctacaataagagtgtcttgctcgattgccatcaggagaatggtgtgccatggagttggcatgtgaagtttccagagggacttggcttcagtggaagcatgttctgtaggtgcccttgggtacggttggtttgcgaatctcaccccgatgggtgcaccatacttattccttatcaaaaggagtatgtattggtcaattggcaagtgagctactatcaaaggatgtgttagctttaaagtaagtgttgcaagagctatttggttgactggaggtacattgtgaaggactcgaaggagttcatgttgggggaagtattctagtgtagaggcactactccatgggtgattctgaatagtgatagtggcacagtttctttgatcaagtccaagagtgggggagggagatcgtcaccaagagcgtggttctatggagatggaaggaaaagtgcagacttaggattaggatgaagcttggactaagcttaggagtcgagattaggtaggttttcttgcggttcgttgatgagggcatcaacatgttgaagtggggtaacgttcgtgctaagatggcatgttacaagctaggtgatgcccacaagttggccaagtggtggcacatgttgaggtgcatgctggtggcatgcttatgcttagtttgtacgatactggaattttcgtaaatatcttcaatattattcggattgggacaggacttagtattcgccatttatttggttctatgaatacaatggcacaatcagttttaagaaactctgatttggtatatggtttgaccatatgtctacagagaaaaa

SEQ ID NO: 223812 - DNA, 1664 bp, Cannabis indica
tacttatcatgcttcttctgtttctttttatccttcgacgactccttggtaccgacctttctctttgaaccacaagcccccgagttatcaattattgtggaaacagtacttattgaaacattgctgggtttgcaacctgaccttgttttcaacaaattcatttcttttcgggcttcttccttctgaacgaatacttgagccctttcattgaactcagtgtgcttcttactggacgaccttgtaagtcctcccacaactcaccccctgctatccacggattagtagagatccccgcctgaagggctctaagttgtgtgctgtcatccaaatttctaaccttagctgcagccgtgctaaaacgacttaagtacgccttaagtgtctcaccgggctgctgctttatattggttagcgaggtcgctccgggtcgtctatccctagtagcctggaactgtttcttgaaatccctagatagctgctcctagaaggttattgaatgatgagtaaacttgttaagccaactactcgctgctccaacaaagcaaggtgggaaataaaatacttcataaattgttcatcacgttactcgctcgcattattgtgttaaagttattcaaatgcgagagcggatcagtggttgcgtcatatgacgagacatgcgggtttttgaatatcgaaggagaaggggtattcattatatctggatgatacgtctcaagttcctcgccagagccgtatccagattgtctacctaattcccccacttgatatctcctgaacttatcttccagctcggttaattcgcaattggatgggatcctcttgctttggaccaagctattggcgaaggttgggtttcttccgattcagtgctctcgtagatccggttgggagtaattgctgacggaccatgtcttactcacagattgcatcctactcatagactttgtctttcagtggctcgctgatttaccagttcccatacgggatttctcgttcatcagtttctggttgtctcccatctggctgttcatcctaattttttgggggtatctcgttttccctgggttgttcttcctgggcgtttcctgtctcctggttcatgagccacaaggtctgcctcctggtctcctcactccagattcaagttgattttgagcattcgtcccctgtgctgccctggccgaggctgcatcacgctctaactcagcgtttcgacactgtgcctcttcgagacggtgtctcaggcggcggtttctgtttcataaaataccttctcccatagtcttggtacctccaagattgagcttttcatccctcgtcccggggttctagccactcccacgttgagttcacctcgagcgtgttgtccgcgtacgaggaccaacgtcgggttgggctcttcaggaacgtgtggttcgtgtactagggccaccctcaggttgagtcctcctggaatgggtggtccgtctggaccgcgagttggtagacctttggagcccatgcccagaacaatgattggtttcctcatgtggggtgttaacattttctagattttcagccatgaaggaggtgttttttcttcacaagaagggagggttttttctgagctttttcacagaggctctcaatgaaagtaccaaactgttaacgcagatttttgt

SEQ ID NO: 223813 - DNA, 1974 bp, Cannabis indica
gtaatttacctaccctgtggatacgacatagcccgtttactaccgcgaccgcagtgtaactaattaggcgacatcagatagcttggacatagaccaagctatccgtttccaaaataacgtggtcccatggatgatatgcaatccaacttaaagcttctttgatgcctattatttccggaatttcaggttgaacacgaccaatcattcccttagtgaaagcttctaacatattaccatgatgatcccgagatacgcaacccacaccaaaccgaccctcctgatcaaacaaagccctgtcaacattaactttgatcttatgtaacataggtgcattccaatgctcagaatgtcgcccctttcattcaaaggagacaaagaaagaccctttctaccttcagcacatctatactgatcaagcatgttttttgctgatggaacccaactcttttgttgccaaacaaaattattccttgcacgccaaatagcccaactcaccacagccgcttcctccatctcactaacatgtcccctactgaataacaccagtagccagctgctaaatattgcagacccgcccccaacatccaccaagctgtgattccaggtagttgtagcaaactcacactccaccaaggtgtgatgcacagtttatatagcaacattgcacaaaggacaggcaacattagcagggacatgacattttggaagctgaaaacacgttggaaggacactcgatgtcgctctccataagaagttactgacctttagaggaacatttaacgaccataaagtcttccaaaaacctgtattgccatccacacttcaagctccttttgtttcctgcaagaacttataggcacttttgactgaatactggccacaagtctcaaacttccaactccatccatctctaacagctgagtcactaagctgaatgctaaatatcaggtcttggtcacgagccacaaagagatctcttaccacatcttcatcctaggcccgaatatccatctgaaataggcaactaaaaattttattaacaagagcaagatgccttgtttcaacaaagccattagtgttatgagggagccaagggtcatcaagaattgagacattcaccccattagtaatagttctttgagctcccgagtatatcaggcttttagcttccatgatgatttgccaaataaagcttgggttatctcccaactcagctgagaataaactaccatgtgcatagtactttgccttgtatatcctactgaccaacgaactgtcattcaccaaaagttgccagaattgcttccctaaaagagccaaattaaaatctctcatgtgacgacccgagccctaggctgtggcagatatgtaatatccataacttgggtggtcaaaggtcacactttgacccttgtagaaagatactaatttgaaaataatggattaactactatattaataagaaaatattagtaacaaaatcaggaccactcattaatataaaagaacactaatatccccacagttatgtaatcaccaaatagatagatttaataagtcaataaaatacaaaaataatacctagcatccattattcttcatttctaactagtacatagctttccatccagaccatccatttcagcttaaatacaaactctgttttattagaagattaaagagtagaataaactaaactaataacgactttttttctcaaaggtaccatcctcatccgctagcatcaaactgagttcctggaaggggagaaaatatggggttagcttataaagcccaataggaaaacaactaatatcaaaagacccttggtttaataaaattcctgcatggttagctttgtaaaaataaaataactcatcaccaatatcaaaatgtataaacaaaatagagagcacacaaagaatcacaaaatcaagcatcaaatgcatatcacaccgtccactagacccctag

SEQ ID NO: 223814 - DNA, 1375 bp, Cannabis indica
attattttttattttttattttacagtttaagtcagatactctctacagtaacaaagagatcaatgcaatacgggttgagtgggtcgaattcgtaaagcctttaattattgattgagtacaatattatcactttttattatgatacatgggaaataagttttatgattgttgttattaattcttttgcattatgcaattagtttataatttttttttgatgaaatataattagtttatactcagtttttatgatatataaaatataaatttttggattgtttctattaataatgtttgtattatataattaattaatagagaattttatcgttatcgattatagaattaattactaattttataaatattattttaacttgtttttgtattatatatttgcgtcatttccaaactgacacagaatattaaaaagaacgttgtacattttgtgtcgattttgttaacgcaaattttcgttaaataaatttaagcctcgcagtagtaatttcacatagaaaaataaaagctatagaaaaaaagatatgaacacagggttttttacgtggttttgttgttaaaattctgtatagtccacgagtcaatcttattcagatttctgattgtttttttaggagctctctcgtatgaattctttttgtcccctttttcatcttgcctgccactatttataatttcatagtaggcagtaaattacaaaagttgactagaatatatttacaacaatcatccctaaaatcttgggatttgattacatatcacatactgtaaatgcggtttaggattttgaaaatcatatagctgtgatttttccactttaactgggtcaaaataatcctgtattaaacacgtctttagttgttgtatctggagatgtctcgacagaaattggttctagtgatctccatagcgagctgaaatcattcttccttccaaggataacgatgtatgtctggtgtcgatcacggtttttatcctcaaagatttcttcgagactcatttgaacgctattttctagctcgacaagattgtaagcctcgctgacgctaatgggatgaggttatatgaagtcttcccataacgagacggtcacctcgcttacttattcttgagccgatttgacttttacacttagtttgttcattgtacgctaaggacattcgtgattgatacgtgtcactttctttggtgcttcgctattcacatgtagcaacatatggtttctcgctaatatactaagtgccagtttgtacattgatttcttgcctacgaccttacagtcagcaaatatactttgatacttacgtaattaatgagttattccataagaagtaattgcatcgattcacattccct

SEQ ID NO: 223815 - DNA, 1058 bp, Cannabis indica
tagccattccaccaaaatggtggaaagagtattctattggaatgctattccaatactttaaaatgtaaccaaacaaaagaatggaatgaaaattatttcctttccattccatttcattttattacctccaaccaaacgccacctaaaagtaaagtagttacatatgtaaaagaaaattgtaaaacaatatgaaaaaatatatatatttagtttagattattaattttttattacaaagaatgaaattaatttttcaattgttaaaatgcatttactttaatctaaataaaaaaatcattaaaaaaaatgaagtttcaatcaaaatttaaattaaaatctaataaccaaatatatcaatttaatttttttttttttttgcgttcataaatataagataaattttatttgcatcccacaaaataatatgtggacctaaatatttaaaataattaagcttaaaataatttttaaaaattacttttaatatttttttaaaaaaaatctcgtattattttatgttaatgttaatactttttttaattaaaaaatcatgtataattttttaaattttttctaatgaaatttcacatattttctttttaatttttttgttataatatttcaaatataatttattgttgtttgatatgtatatttttaagaatatgaagtggaaaaaaaattaaaaaataataatttaattaaagatataatattatataaaataaaaattattaaaatgatatatttataaatttttgaggtgtaaataaatattcccctaaacataatatggtttcacatttccatctcaccaaaaattatactttccattttctcctctagaaaaaaaaatgttaaaactttaagagttatttgcagcataaatacttaagtttatcttgcggttgcagattaatacctaagttaatttttgaaggtaaaaataccttctgtcaatattttgttgcaaatgagatatttgcgttaacttctctattaaatgtcaactagataaatacttggcaatttctagttggttcaaatcatttaatttt

SEQ ID NO: 223816 - DNA, 1513 bp, Cannabis indica
ttaaaaattcagagaatataatttaatacatgtgaaagtttgcgaacaaaaatccaatattacctctcaaatgcaattggacattatcataaaagacaaaaaacatgttgtaaaattaatttattttttcgaattttaaccgtccttgtaaaaaaaaaacaacttggactaaattaattagctttggctgactagtcgtactccaacaaatatataaaggggtcgtgtacgttctatttttgcataaagccatatatataatatattctccctgttccctcttttattagttctctcatttcactcaaaataatagtcaatttttcttattatattatatactaagatgtgtgggagagactaggtagtgactaaaagctgatcaggagagaaaaattatgggaagagctccatgttgttctaaggttgggttgcatagaggtccatggactcctagagaagacacacttctcactagctacattcaagcccatggtgaaggccattggagatccttgcccaaaaaagctggtaattaatattaattattatataaaattattaactaaattaaaccattatataattattttggttaaatttaattttaattactacagggcttctaaggtgtggaaagagttgtaggctaagatggatgaactatcttagaccagatatcaagagaggtaacattactcccgatgaggatgaccttataattaggctgcattctcttttgggcaaccgttggtctctcattgcgggtcgccttccgggtcggaccgataacgagatcaagaactattggaacacccacttgagcaaacgtatcgtaggatccgacccggaaaaattatcgggtacccgaggaaggtccacaagaaaagagggaacattaataataataataacaagactagtgcaaaatgcaaagaagaagaaaatcattaacaagaagaacaacaagaagaagaataaaaccaataatgatgagttggagatgcccaaaatccatcttccaaagccagttagggtttcttctttgtccttggttaggaactacagctttgaagggagcactactactagtaataatattaataataatattacgaataataataataacgttaatactattactcgatgtgagtctagttcgagccaggaaataaaaggattagatcatcatgaagttgatgatgataataatgatgtaaatgatgatgaacatgttccttggttgagtttcatggctgatgataatgatgatgatcttgataatgatcatgaccttgtcattaatggtagtaataattctactactacagctgcttctgataataatcatagcaataataatgataaagatcataataataataataatagttatacactagaaaagctctacgaggaatatcggcagcttctgaagaccgaagaatttcacgatcagcagcatcatgtattagaatattttatatatggaaattattttctaattaag

SEQ ID NO: 223817 - DNA, 1552 bp, Cannabis indica
tttgaaataaaaataattttttttgtcattccatcaatcctttttccaaaataatatgagacaaataacaaactacatgagtaaataggttattacaaagcaacttgaattaacatgaaagttattatattgcaaattacaatttcattcaaaaaaaaattgaaaaagcaaagtaaaaatcaacaatagttccagtaatccaaattgttgtatccgcccatcttatttatttctttagtggccatcctcaatcttcttcaaacccttcatgtttgtcatttctatcgttgtgtcgtagagacagaatatttgcattagttttatttggttggtctttattagactacttgactagttgattatcatctataaaggttcttctttctttccgttgaagatgtctttaattgaggtttatatattattgtagatatacctcatgtacttaggtaatagcatattactattactttaactaataaacatgcatcatggtcccattatagataagtaagcatcactaatttttttcaaagacaaagtatcagtaaaatattaattgagataatttaagtacttgaacaagtgtaatcagtgaaatattaattgaagtaatttaagtacttgaacaagtgtaatctttcaagtcacaagcatccatcactgatatatcctactgctcttatagtagttttaggcttcaaatccacatgccaatcttcactcactttttaatatcctagctacttatattggtttggtcaaaagacaaaaaagtgtataatgtattaatttgtatacaacataagatatggttgttgttaacagttctacttttcagaagttcattcttgttacttctaattatataatatttatgttaagatgttattaatggtttcaataaaaattttgtttgtatcttttctttttcccagattgtgaggcccaagaagagattgttttagtaggcccatttgaagttgaaactcaaacaagtggggctgctatccaaggccaaacagaagcccaactagatggtgtatattttgaggaagaagaatatgctcctgagtctgaagacttagaagaggagagcataacagatccaagtaaatggtgggggttctattaatgatttttgcagccaaattaaccaagaagactctgatgggggctacgaagaggaggatgaattaagaagcttgcctagtgatggtgaagatgcgcatctgtctaaaaagtctaacaatgaatttgatccaaggactaagcctgaggagatcaagttcaaagagggcatgttgttccctactaatgagcatttaagaaaagctttgaaggattattttgttaccagtgacagagaattcaagtatgtatccaatgatagtttaagaattcgagctaaatgcaaaggcaatgggtgtacatggattccttatgctagaagaatgagagatgatggcaccacatttaggatcaataaaatgaaagacgagcataattgtggaattgtattcaagaacagcttagtagatgcagattggat

SEQ ID NO: 223818 - DNA, 2966 bp, Cannabis indica
ttccaggctctttgtacgggtcatctttgccagttggagctggaggatcagttgtctgagcggggggcatgtcaacattctgaccggaggtagaagtggtcgcctaggattctccatatgccacctgagaagcgcaatactcgagaaacatgtctttcgaatcgcccaagtaatcaaagttttccttgggattagccttccaaaagtcataaaaaatctcgagacccgctgtctctaaggcatttaccttccctccaagcctcgccacctccgctctctgctgctcggcctctgatttgtacttctcaacctcagcttcaagctcctcctccttagccttcttctctgcttccaacctgcggaagaccaatcgaaggacctccctttcttcctggaggctggtcacttttttggacaaggaagcaatggcagtttcaagtcgataagaagcctctagatcttcggtcagctcggccaccttcttctcggcagcgagaagtttcttgttaacttctcccagctccatccggactgccccaagttgaaccctggcttcatcagcatccttcctggccaagtccacttccgcccgcatggtgttggacatggtagcgttcttggaggcagtcgacttagctcgggaataagcataagccatcttcattatcagctccggccagctgctcattcacctcagggaccgatcgagtcatgtagtgggtgagcatatctttgcctctcttagtctctggatgcagcaccggaggtgggtcaggggccatgatctgctcaaatctgcttttgaccagctcagatccgcccttcgactgttcgggcttgtccgagctccctccttgggagtctttagacttagtcatttttggggcagaaggatctacaacggttggctccttgaagagatcaataactgcctcgaccgatgccttctctctggacggaattgtctgactgcccctggacttcttggccggagcagataagcccgtgtcccctttcctaccaaaagagtggacgggcgagtaggtaaactgggctccctaatctgaatcatatgttcgataggcctgtgctgggtcggaagtttcttcttccttttaagttgagtctctggctcttcctcaacctcatcttcctgctcaagacgctctggagcatagtgcttggctcccacacctctcttcaacttagcatcatgcttgagttgaatgagtgcatgctcctgatgagctccctcagcccgaccggcactggatttcctcttcttctccttcacaggctggggaatgaaatcctttgggtatagcccgtactgcacaaaaatgtcctccgaggtcaacaaagtgatactccaggcatcatccggcagctgagtgattctttgagctctatccctaagagctagcatgaagggtaggcagcaatatatagggatctgctggaaccaagtataggttgtgcccatgcaatccaccatgtaatactcgtcaacaaaattcctggttttgctcacggccttgtccccggtgcccgtcaaccatttgaaatctggctgagaaaaatagaactatcccgacctgccttgtttgggagtagacttcaagtcaaaaaaccagctaacttcgtgcggggatggcataccccacttctgggtggtgtagagaacgaacagggaaaatagatatttgatgctcttgggactaaattgggtcagacagagacggaagaagtctgccaccttcctaaagtacgggtgcaaaggcactagtgccccttattaagaatgagcacccaaccaggcacacatccccttcttcaagtttgtggctcggttgtttaaggcaggaacataacattccagcttgcccaagtggtcggactggtctagatcccttagacgtgtctcagtgaccttggatggagggctcacccacctggcacccaaggcaccttgcctcttgtgaggaactacagcagtaagctcctcagtgacgtagtccactccttcgaccaagacatcgccgtccgcatctaccagctccccagctaagttgtaccctccaaaatttggaggtgcagcctcctcctcttccttcgcctcgaaaggactaccaggacgaacattgccctattcctctatctcctggacttgggcgtccccttcatgatccccctcctcctggatgggcggatcctattcggcgctgggtaaagtggcgtgctgggccacgtgagtgtcggatgcgttgaccctacgcattgtctgttttgttcgagccatcatcctatggctagacgggaagattgagttggaatgtccatcacttgaagagggcatactagaacagagatgagggttatcctcaaataatagttgaagcaaatcctggtggattcggtgttcgctttcccaaaactcaccagggtttatccacaaaagacaacacgcgagatgagtgtttggtcgggatatcgaacaataaacaggcaaatatgccgaccaagagtactcaacagattaaagaatggaaatattcaacaataagtcaaaacccagaagtttgaaagttttggagttagggcaaaactccacaaagctttgaataagcaaggtgaaagatagacattgtgcaaccaaaaagcaagcatcatgaaacatgaagtcacactgaccattgtaaagacaaattgtaaagttcctgtgcctagggttttctgcctatcttctacaacaaggttaagattgcgtttagaaattaaatgtgcaaagtaaaaggagaaggaattgagaacttactcactgatcgatgtctggagtcactctaagcgaagttgcttggctggttcttgtgaaaatgtccttgcagacttgagacaaaaatttttttttgctctgaacttgcttaacagagaagttggttaaaatgaagttgtgaacaatgctcagt

SEQ ID NO: 223819 - DNA, 1454 bp, Cannabis indica
caggttgacacctggggctagccctgcgcccatgttgacatttggtcagccttagctatttcaaatggagtttttttagaaattcttttgagaatattctccgttttcaaaaaatattgagattcaactatttttggagaccaaacagaattttcgaagggccaaaagggggacccaacgcccaggttgacatattttcaacctaggatgtttccgatcaagtttagcaaaaagtctatagagcatttttttggtcataaaaaataatgaagattcaaccaaactcgggaagaaaaccacaatcctgagccccttgaaatagggtctagcgtctaggttgacctgttgttgggcccggtggccaggctgaccatcggcgtgggacgctgccttcaatcgctcaaatgtcaaatccaatgttaccattgaatctggaatggtataaatggggtaggagacctcgttttcaagcttacaagccttggaagtatgaaaaacgaaatcctgggagcttgggagtaaagtacccagcgcccaggttgacaaatgggctggtgcgttgggttttgcttatctgaatctgatttcgtttcgaccgtccgtctagtttttcataatgacaaagatccatggagtcagagaagtcaaattcacaactttgcatttgtcatttccagctcacccaaaaatgaagagttttgagtctctcatttctacaaaacaacaacatctccgagaactggtgaccagcttcgtcagaacacaaaaaataactaattaatgtcaaaatatcacttagacatcttaaagtacagaccttggacgttttcacacttacccagcatccaagttgacgtcatatgtcaacctgggcgttgggatgtcaaccttggcgtgggtcatgaaccgccttcaataaaacaaccataaattactcaattttgatctgattgatgtgattcaacttgcgtttcgaaggtaatttaattatttatcaattcattactcacactctagacgtaaatctgaagctatcatcgtcaaaattcaccccaagggagttacagaaataatgtccaagttactcgcagcaggatccatcgggctccgaaaaatggtcatcaccactagaagctaatttttactgttaggtcatcattaatagtcaaaaaaatctttttttttcttcctattttgtgggcctccttcacctataaaacgagagctcccttagctcatttttcacattcagaaaactacccacaaggtcagagcttctctctctagtttctctccctggatattggagcttctgagacttagcctttttctgtaataccatctcgtgcgattctctctctagtttctctctctagaaactagagcttaaacacttagccttttctataattttcgtgaaaaataaaaactcgaagtagatgtagctccattac

SEQ ID NO: 223820 - DNA, 3089 bp, Cannabis indica
gacaaatgtggcaaataacaagttctaaatctcttgaaagttggaccatatatttgtaacttcaagacaatttgacatttgagtcaaatccaacaatctccaccttggcgagaaaaccaaaccaaaactgatatctccacatgcgccctaggcactataagtctgagatgttaatcaagttcaagtagtgttgaaacttgattcctataaccacttttgtaagcatatctgcatggttatctgtagtcccgactttctgaagtataacatttccttcatcaataatttcacaaacaaaatgaaatcaaacatcgatctgcttagtgcgaccgtgatggacttggttgtttgccaaaaaaaatggcattctggctgtcgcagaaaacctccacgttcttctaaacaatacataactccttggtaaaccaaagaagccaaatagcttctttgaatgcttctgttacaaccatatattctgcttctttagtagacaaagcaaccgtttactacaaagttaatccccagcaaattggtcctcctaccattgtgaacacataactagtagttgatcgacgcttatccagatctccaacgtagcaagaaccaaaatatctgactagatgtttaccaacagtcttatccctctcaaacttcaaaccaatatccacagtaccatagacataccaaagaatccaatctattactttccagtgacctttaccaggattgtgcatgtagcgactcaccatactcacaacatgcgaaacatcaggtctggtgcataccattgcatacatcagagcaccgaaaatatttgcatatggaatgcgctccattttcttcttctcatcagtggttatgggtgacatctttgcactaaaattcaaatgaggtgcaagtggtgtattgacaggtttagtctactcgtccatgttaaacctatgcagtactttcttcagatattgagtctgtgttagacagactatgcttacaactttgtttattgtgatcttcatcccaagaattttcttagcttctccaagatctttcattttaaattttgaacttagttgagtctttagcctaatatccaccttgctcttagatgcaattaacataccatcaacatataagagaaaataaatgaaagtaccatcttggagtttttaaaagtatacactagggtcgtatttgttgcaggtatacttctactctctaatgaagttgttaaacgtgtgtaccactatcgcggtgactgcttcaaaccatatagtgactttctcagctctattagatgcaattgacatatcatcaacatataagagaaaataaatgaaagtaccatcttggagtttttgaaagtatacacaagggtcgtattggttgcaggtgtacttctactctctaatgaagttgtcaaacgtgtgtatcactatcacggtgactgcttcaacccatatagtgacattctgagcttgtaaacccaattctcacgacttggcactttgtaaccatccgactgagacatgtaaatctctttatttaaagtaaaatggagaaaatctattttgacatcaagttgagctaactcgagatcaaactgtgctatcaaagtcaaaaaaatttgaataaatgaaagattgacgacaggtgagaatacgtcattataatctattccgtcttttttttattataaccttttgctaccagtctgtctttgtatcggatgttgcctttaccaagaactctctttttggaacatacccatttccagccaataaccttttttcctttaagaggtcgaaccaacacccatttttgattcagatgtagagacttcatttcttcattcattgctaacttccatttcttttcatcaactctctgcacaactactctgtaagtgcatgtgacatcatcatcaattattaaaagtaaaaatgctaccatatatgtgtatgtagcaggctttttaatcttctttctcgttcgagtaatgacaatagattctgattattgattgattggtggtgatgttgagggaacctctacctcagctgagatctcttcttgatcatcactctcatcttcaccatgatagtcaattggaatagtcttttcaggatcttccagtatctcacgctccaccttagaaagagtatttgggttttcattctctttcactaaggtagtctgtcttagcataacagactcatcaaatgtgacatcttggcttaagctgatcttttttgatttactagaccaaagtcaaaaaccttttactccacaatcaaagcccaagaaaataaatttctttgctctaagatccattttgaattctttgacatggaaatatgcaggacaccaaatattcataaggaatcataattacaaacaggttttccagaccatacctctttaggtattttcccatcttgtgcatttgtacggagtttgttgacgatatgggttgcatatgacaaattctcgacccaaaatgcttttctcaatttggattgagatagcatacatcaaactttctcaaccaaagtatagttcattcattcttccatgccattttgttgcggcgcacggcgcacggggtactgaaaaatgtatgattatcccttcttcttgacacacttgtaagaaaggatctcatttgtattcaccaccattgttagatctaagcttcttgatcttccttcctgtttgagtctcaatcattttcttcgatttaaggaagacatccaaaacttcattgtgttgcatggtgtatacccaaacatatctagggaaatcatcaataaaagtcacaaaccatctttacctcaaagtgaagcattcttggacggtcttcagacgtctgtgtggatataatccatagttcccttagtgcaatgcaaagaaatgttaaacttaacccttatttgctttcccagcacacaatgcttgcagaaatcaaaagttttgctcttggaccctttggtagacattacttcactaagccttgcaaagccttctctctagaatgccctaagtgcatgtaccaaaggacggggagttagatgtcttttcttccaaactgc

SEQ ID NO: 223821 - DNA, 4119 bp, Cannabis indica
atctcgaaagctagattattattttatttcatcattaataaagagatttctttgagggcttttataattttgtgtaccaatttggatagatacttttattctataagaatattatatcaaattggtgcggtgagctgcggacaggatgccaaagaaacttgtggagaagagtgacactactgctgggttcgaggacgatttcgaagctctaaaaattaaagtctttggaatcaagaattcaatggaggagatggtaaccaagattgaacaacggcttcaagaaacattgcaacagctgttcaagattctcttggataatcaagaaagatcaagaaccctccaagaaccaagggaagatgtcaatggagctgcggcacccaaaggcatgaacaaaacaaaaatttggcagcaccatttgagccccagtagagtagaacacaacaaggctctagagagaggtctgatggcacatctcccatagtaggattcaagggaactcgacattcagatggtggatcctttgaccgaggacaacaagagactcgttttcgtcatgagaatcgccttaagaagttgaagatgccaacgtttgatggcgataaccctgaggggtggatagtgcaagcaaaaaggttttttatttgccatgattatgacgaagaagagaaggttgaggcagctttcatttccttttctggcgacgctttgctttggtatcaatatgagagcaacaagcgtgacatctacagttgggaggagttgaagaaattgttgctccgccattttcgagatagtcaagaagggtcgttgtacgatcagtttttaactgttaaacaagatagttctgtgtcagattataagaagaaatttataaggttattggcacctttgaagacatttgatccagccatacaattgagcactttcttgaatggtttgttgccatctttacgagctgaattgcgaattcagagaccacggaatgtggatgacgccatggacatcgttcaagacatagaggacaagaacaaagcctcaaggcaacgatactcatcttcccatcgcatggcagtaccggagtcacccacaagggtagagaaaacactagctcggactcatttggcgaattctaccactgaaagtcgaaggcttattgattctgaaatgcagtacaaacgccaaaagggattgtgttttcgttgtgatgaaaaatggtctccaggccatcgatgcaaaaaaccacaattacaagttattatgattctggagaatatagacaacgtcatctcagaccatgaatcagaggaagataaaaaagaaaaagtggagttagaatcaacagaattgctagacaatgtgtcagtttctttccaatcagttgctgggttatctaataattccaccatgaaactcaaaggacaccttggttcaacaacaatcgtcattttgatcgattccggggctacccataattttatttccaaatcattagtggcaacaatggccattccagtcaccaaaacaaaggagtatggggttacaatgggcaacgacaactcgctgaaatgtgaaggggtttgtaaaatcttaaatattcatttccaaggtgtggacgtttgggacgatttcttacccttacaactgggcagcgctaatgttatcttaggattatagtggctcaccacacttggcaccaccaaaaaccaattggaagtcgcaaaccatggagttccaactgggaaaaaggactgttactattaaagggttaccatctcttgaccgatctttaatctccttaaaaactatgattaagactatccaagctgagaaacaaggtatcattttggagctgaatgctaatagcaaggaggacacacaattcgacccaactgtaccagaatttttggccgaaattatcaaggaaaacacagttgtttttgatatgccaaagggccttcccccatcacgatcgcatgaacatgccattacactccagcctgactctggccccataagtgttcgtccatatagatacgctcattcacaaaaaacagagatagaaaaattcatctttgacatgctgacagtaggcttcatacaacctagtaccagccctttttcaagtccgattcttcttgtcaagaagaaggatggctcttggcgtttttgcgtcgactaccgtgccttaaatcgagtgaccataccagataagtatcaaatccctgttatagatgagttgttagatgaactacatggtgctctcatcttttctaaattggattcaaaattaggttaccaccagatacgagtaagaaaggaagatgtgtataagacggcatttcaaacacatgatgaccactatgaatttttggatatgcctttcggtctcacaaatgctccatccaccttttagtcactcatgaataatgtgttccgccctcatttacgtgattgtgtgctggttttttttgatgacattttagtgtatagcaagacactagaactccatcaacaacatttgtctcaagtttttgctctcctacgtaagcaccaactctatgccaataggaaaaagtgctcttttgggtagaagcaagtagagtaacttggccatatcatttctcagcaaggggtggcagttgatccggaaaaaataaaagcaatgctagagtggcccatgccaaaaactattaaagctctccgcggattcctaggcctcaccggctactataggaaatttgtggccaattatgctcgcattgcacagccattaactgaccagctgaaaaaagataagtttttatggggaccagtagctgaacaagcttttaaacaacttcaagaagcaatgactaaggcctcagttcttgcattaccagatttttctcaacctttcgttattgaaactgatgcgtttggacatggcttgctgttttgttacaaaaccaaaagcccattgcatgttacagccaggttttgggagttcaagctcgcagaaaatccatttatgaaaaagaattgatggctatcatctatgcagtaaccaaatggcgcccttatttgcttggtcgtaagtttattgtacggaccgactagcaaagcctaaaattcttattggagcagcgagtcataggctcggagtaccaaaaatggatttctaagctcatgggaatgaactttcagattgaatataaaccagggacacacaacaaagtggctgatgctttatctagacaagtagatgaggccacacttgatgccatggtcactacagactggacgatttggcctgcattagccaaggaaataatagctgatcctgtgcttacacagttactagaagatataaacacaggcaacaagacacatcatggttttcatgtgcaccatgacttacttcattactagaatcggttagtcattccaaaaaagtcaactttaattcctcaaatccttgctgaattctatagtaccccgtttagtggacattcggatgaactaaagacctataaacgagtagctgccgaactcttttgggaaagacttcgggaggacgtgcaccaattcatccagcgttgctccatctgccaacaaaacaagttgctcaccacatctccagtcggcttactccaacccttagcacttccggttcaagtatgggatgaggttactatggattttattgaagggcttccaaggtctgacggatgggatacgatcctcgtagttgttgatcgcctttctaagtatgcctattttatcaaactcaagcatccattttctacccctacagtggctgatgtctttgtgaaggaaattgtgaggttacatgatgttcctcaatcaataatatcagatagggacagactcttcctcagcctcttttggcgccacctcttcaaactcaagacactactttgaagagaagcaccgcttatcatccacaaaccgatggacaatctacgttgcttcacataccagcagcccaatcagtggtcaaaatggatggcttgggccgagtactcctacaatacttcatatgatttatctctcaaaacttccccctttaaggctctatatggtagagaccctcctgctcttataccctgcaaaaaaggg

SEQ ID NO: 223822 - DNA, 1026 bp, Cannabis indica
ggcgaggaggagcaaagtacacagtggtggctattctttacaaagtggacagaggttgacccactggtatccataacctgcaaaaaagttctcgactttgttgtaaagaacataatctgtaagtttggaatacccattaagatagtatctaataacggaactcagtttgatggtgacttattcactgagttctgcgaaaggaacaagattattaagagcttctcatcagtgtccaggcctcaaggaaatgggcaagtagaagttgttaataaaaccttgaaggatactatccaaaagaagttcaacgctgccaaaggtagatgggtcgatgaactacctcaagtactttgggctcattacgcaactgagaagacagcaacagggcactccattctcattagcatttgtcttggaggcaatgctaccggtagaagtaaatatcgcaacacacagacaaaatttctataatcaagaagaaaactaagaactcttaaaattttccttggatctactttaggaaaaacgtgctgagtcacaaattactaatgcaacatatcaacaccgagttacgagatacttcaacaagaaagtgaagaagaggctcttcaacattagagacttggtgctaagatgagtatttgcgaatacaagagacgcttctgcatgagcatttaatctaaactgggagggtccttatgtaatcgaggcaatagttggaaccggggtttacaaattagctcggctaaatggctcgctgataaagaaatactggaacatggaatatttgcgaccctactaccagtaaactgatgttgtaacttctatttctgatgtaatattttgaacatcaattattaataaagttgaatcattattcaagtaattacaaagtgtcatcctttataattacttgaggggcatatgtatatgcttaaccggaatctatctagaaatacatgatatattgcaaacccactactttataatttgttaaaaaaaattgaagtttttgattaaagaaccttt

SEQ ID NO: 223823 - DNA, 2021 bp, Cannabis indica
atttttgagtgtacacttcagcaaagagcttccatcttcctctcaataagtgtaccatagcatcaacttgctatattccaaataaaaaagtcaaaaacaagtcgcacatagatcgcacaaaaatcgcacaaaattaattaccatagtgtgagatcgcatgaaaatcgcacaaatatcaaaaaagtaaaattttattgtaagcgcacataaattgcacagaagtcgcacaaagatcgcattaattttagagttttaaatcacacataaattgcatagacatcgcacaaaaatcgcatacatatcaaataaattaaatgtggagtaaaattgtatagtaatcgtacacaaatcgcgtaaaggtcgcataaatataaatatatgtcgcacaaaagtttaaaacaccaaatttgaacagttaagaaacaacttacagcatcatcgagccattctccttgcaccatcactttttgtaatatcccgaaaaatataatgataattaattgggcatattttattaaatatgtgattatattaatgttggggtaagattatgatcttacttaagctaaatgtgtcataattagcaaaaatttaataagtgattaataaagcgtaatttattaattacggaaattttattggactacgggggtatcgtggaaaccatttttaaaataaaaatattttcaggtaaggcagctttgaaaactcgacggtggtcaaagatgtcacgacaatataagatgaattagaatttgagttataccagactagtttaaaattttaagttaacggttgggcgagatttattaaaaaaagagactaaattacccttaggaattgaatttaatcttaaggattttgaagggcaaaagagtcagttggtaagggaattaatctttgtcctatatggaggtgttggcttaattggggtttagtttattaaataagttaataataaattaggtttttattgataattggagaagaaaagacttagaaatatgaaagctaatttgaaacacaatctttcttcttcctttctccttgctcgagccctaggaccaactgcactcagagaaattttgctagcaatccttcagttcttgattgttttgacaagggttagggtggttcaagctacaaggtgagtttctacttctttccctttgattttctagagttgtaagttaggttttgtgtggaatttataggatttcaggtctttattacttgctatagttcagagggtgtatttaggttctaattaggttgttaggtatgactcaataatggttaagttgaacttgaaacaaattgggtttatgaacttaatctttggttttataatagtgatttatataatttgattaaaattagtgaattgatgtgaatggatagattaaatactttgtttttatgttaatacactattctggagttgttgattaggtttgtaagggtttggctcgagtttgggggagaaaacccaagagttgtggcctgccagaatcggtggaccagttgtcctacagggggagttcttgggttttttcctcaagggcaattttttgctcaggatgtttttgggacctagtttagggtgcttgggagttgtatagcataatttagagctaacagaagttaggttttgtccagttttgaggattagggttagttcccagagttttgatttaaaagtatttattggattttgtggttgtgacataggaccgggatcatcaagcttcatttccactcaggttggccagcacgcctgatttttggatcgaggtaagaaaagttttatgtactgttaaatggtttaataaagaagcaattataattgtagtgcctcaattatgatcgagataaatatgtatttgttgtgactcgattatgatcgagatgatggtgagaaacaattattatcggttgtgactcaattatgaacgaggtaacaattattatcgtttgtgacttgattatgatcgagggaaagatacggtcattactgttat

SEQ ID NO: 223824 - DNA, 2909 bp, Cannabis indica
tttagcttcccttttataaatggggttgaaaaaactgcctctaaaggctaacattgtagtagtgtaattctctaatatgttatatcactattaatacaattagatagagaacttatataatttataataaaataattttatagaatatgactaactaataataaaatatttttttaataaacattattagtacttaataataattaataatattttattaaatattatgtaaaatatattttaatttaataattattatttaaaataattaaaacatttcataatggcaacataatagtgttagaataaatagtatctaagaactatgctcttatattaattttttttttctacgaaaaatattacttttactattattgcggtttcagcatttcggttttcggcacgaaattataactattttaaatatttttatatgttatatccaagaactatgctcttttattaatatatacaatcattataggacaattttacagtagggtttagttttacaatttttggttacagcattttagttttcgaaactatttttaatattatatgatgatgtgaattgtagaaataactaataagagtagatatttcgccaataatttttaaaaatttaattttaaaatatttattgatcaatctaaacaatcaattaactatattttgttttttagagagtgatctaaatcacactataataatcgtgaacgtaagaaaatttcaaattgttaaacagttaatcatctcttaaacagtttgttttttctgttaattactgtttaggcttattgttagtagttaaggttgttaattttgtataacaacttttttgtcttttctgctgtaatactttctggtctataaataaagatgaggcaacctttattgggttaagcctttgcatttttcatttcgtgcctctgcaagttctttcctctgctcatagcattcctctgttcatacttcaccttcttcatggtatcatcgagtctctgacctgcgtccatggaatcttccacctccgatccaaccacgacaaccgctgcttcttcggttcactggaacccgtttgcaaactccctgtcttcctcactcaccatcaagctcgaacgactcaactatctctcatggaagtctcaaatcgtccccacggtcatagggcacgatcttgattcgatcttgttctcggatgtcactccaccaaaaaccttggtcaatggaactccaaactccgagtatctgcagtggaagaagaaagatcaacttcttctttcttggattaggtcttcaatgtctgaacctatccttgcttctgtggcaacttacacaacagccttctcggtttggagggcccttgaacaacgtttttcatcccagaccaaagctcgcctcttgcaattaaagggtaacttctctagacttcaaaaaggcaccttgccaattgctgaatatgttgagaaagctcaagccactgccgatgctttggctattgctggctcacctgtcgacacacaagacttggttctccaactcttgaatggtcttggaccagaatttgatcccgtagtctcgggtatcacttctcgcagtgatgagctttcttttgaggaagtgcaagctttgttactctctcatgaatcaagacttgaacaccacagtagtatcacagatctttccctaaagatgcaagccaatttgagtgtaaatcagtcaagaattggaggaaatcatcactctggtattccttcatctcgagctccaaatggtgaatctggccgcacctctggacgtttctttggccgttccaatggttcaagattgatgtgtcaagtttgtcttcgcattggtcacaccgcggctgtttgtcattaccgctttgacaagaacttcaccacccctaagtatggtagttcctcttcctctcatgctttcttaactgaaattgaatctacctatgatccacaggctttaaccacaacgattcttcccgatatgggagatgatgatctttggtatgtggacaccggtgccaccaaccatgttagccatggcaatgtcactttggatactgctatcccataccaaggaactgaaactctagccgtgggtaatggtaagcaattactcatttcacatattggtcaattgtctataccctctcataactcatcttccttaaatttacaaaacattctacatgtccctgctattaagaaaaacttggttagtgtttctcaactcaccactgacaatgatgtttttcttgaattccataaatcttgttgttttgtaaaggacaagctaacagggactgttcttcttaaagggagggccaaagatggtttataccagcttggggagtcatctacttctgccatccaatgtcatcttaccacaagttctagggtagataaatcttgttgttcatgttcttgttcttgtcactctaatgtacaaactgattcttgtaatactcaagatattaataaaactacccaagatgggtttgctgtttctccacaagctttttctgtctcaaagtttaatgatgtaaatagttggcacttaaaattggggcaccctgccgattctacattggcaaaaattttacctcatatatctcatacaggttctttaaaggcattacatttttgcaatgcttgccatcaaggaaaaagtcataaattgccattttctttgtctcctaatagggccaaccaacctctagctctcattcatactgatttatggggtccctcccatgttgtgtccaaagatggtttcaaatactatgttcattttcttgatgattatagtaggtactgttggatttatccattaactcaaaaaaaccatgcttttgatgtattcataaaatttaaaagtcttgtgga

SEQ ID NO: 223825 - DNA, 1378 bp, Cannabis indica
ctctctctctctctctctctctctctctctctctctcttctctctctctatatatatatatatatatatttctctcaactcaatgtgatcgtcatgtctctaaaaaggataagtgttggtggtattcataggtttaggattaagatcttaaagtcagtttttgtaagaagttaagttattaataagttagttaggacttaacaaatgtaataaactttgatatgagtgagatcttcacgtcagcttaagtgtaggtgcttccaggagcgtgtatgagagcttctagactcacgaaccaaagtacttgtaggaggagcttctcaaataggaaagagccagctaaagtcgactatccagaattcctttttaagggaaacatgatagccatctagaattccttttcagaggaaggctagctttcctgaggacccttcccgaaagggtaagtaagccttccaggacctacttctgcgagtcaacagcttttcaggaataacttttggagacctttttgatttggaggaactattccacaataacaaatacaaaatatagaaaaattttgtagtacacctatatttattttggcatttagaaaaaaattttagttgttatttttctatgatcatgtacgttataattatttaggatcttaaataattttttttggtaagtaagtatactttatattctaccagacaaacaacatgtatagctttggttgtactagttgtttgttggtggaatgtgaagtatcattaccaaaaaaaaaaaattatttaggatcacttataaattttcgaatttttttaaataatttacagtgttgaaaataaaatccaaataattactgataattacttttataataagataaaaaaaatagtcatgttgtaacaaaatatttgaatttaattttaattttataaattatttaaaaatttatgaaaatttacaagttgcataaataactataacatacttatttttagtggaaccaatattagatcaacaatgagattgatttgtttagggaaagtgaattattatataaaacttaatggatcaaagttcaatgtttaaatatgttggggtatcaatctaagtcccacattagaagattaggctaaagttatcatgaatataaatgttttacctactccattaatacgaggtcttttgaaaatgtatttaaaaataaaactctgaaggcttaggccaaagtggggtcaagcggcgaattttgttagagatagcggcgacacatgttattaggttactttaaatttttttaaaattctgaataatctttagtgtcgaaaacaagaattaaatagtctcttactaaacttatgacaaaatatttaaatcttatttt

SEQ ID NO: 223826 - DNA, 3075 bp, Cannabis indica
agcctcgataaaccaatatagactcgcatgtctaggttctatcagctcgtcatacgatgtccatagatgcgactatataagaacgcagacatcctaaacttaattaaatgttaggtctatcttaagcccgcgagcttacactagaatatgaacagtcaactcgcatgttagaagacgcatacgttgctgtatttagtgaatagaaactgttattcatttattgatgtttacgtttttagtttaattattgtaattcaatgtgcaaacggattgacaatgaatgcaatctttgtataactaattggacacttgctttgtatataaaggagtgatccaccatgaaatgagacctacgaaaactcttgctatagtggactaagcagaccgtgatctgactgaaccaatataatcctttgtcttcttgttatttccagttttctgattaagtatttacattcccagctcgagtactcgccattttaggttgaatactcgcaattgttcttcaaacaatttcttcttgttattaatattattacatacttttggtgttgcgaattttgctccataacatttggcgccgtctatgggaactgagaagtacgttcttactaaattcaggaagcaaaatcatcatggctggaaaccaagcaaacggaggtgttaacaacgaatccatcaacgtcggaacaatgaacgttccattgtcttgaattagaacgccgtctgtggatgtcattaatggtggaatatggcgaggtaacgtcagacctctcaatctattccctgaaactgccggcccccaaattggagaaacatccacgccagcagcaacgacggggcactttccacccatcactccggcggtagtatccgagggaatcgtccagctcgccactgaccaatacaccgcgatccaggatcaactacgcgccctacaggccaaggtggatggacagaacagggcacgacgccccctttgagcccccacaactcgcacagataaccctcaggtaacaaattctaggcgtcgtaataaccgtgttcgcagggaacgaagaacaaaccctgaaggtctggacctgcatcagccaacctcaagagaccaatctacgaggtatcccaaccaggagacgcaggttgatgaagaccccgagcgacgcaaacctcacagcaggccttcaagagacaacgatatagaatccacctcctcgtcttcacatggtcgcacacctagcaggtatacgaggtccggttttgtggagacgtagcagggagggcgatatcaggttcataggggtgatctacgtgatcacctcaacgttgttttcagtgcatgatcccacgcccctcgtgacgaggcaacaccccatgatccccaaatgggcgaccaaggtgtaaacactcgcacaaacccgcccaacgcaccagcagcgactactggggttaatgtcccagcaaacctcaccgcagtagccacagctcctgcagtcgcagtagtcgcggctcccatagccgggggtattgatcaaagcatgcttttgcaagctttgaaaatactcgagcagcagagaaagcccatatacaagctgcttgggacctctccttttaccacggaagtgcgacaagctcagcttcccatgggattccaattattcgaatccctaaaatacaaaggtacctctaatcccgtagattatttagaaaagttcaatactataatggaagtagatcacgtacctcagctcgtgaaatgtcgcattcttgcggcaacgctagaggaaaatgcccacgattggttcagccaatttcctgaggcctcaatctcgacaatggagacctttgtcaatctattcctcatgcatttctaggccacgatgacttataggccgccctatactactctggctaacatcaagcaagaacccagtgagtctttgcaagactattttaaacgttttaatgccgaagtaacaaaagtagagaaggctcccgagtcttcgcttgtttgcatgttaataacaggtgtcctgccaagaaccgatttttggaaggagttacaggcccggagaccagaatcgctagtcgaattctttgccatgaccgagctgcataagagaattgaaaattctcaggcagaattggagaaaggcaaagacaaacgtaagtcacagtaccgcggtcacgatcccgcagtccccgagggaaaaattccagaggtcgaagcccaagaagacgcagtccacgtagacagcgaatcttgaaattggccaagtcccctcgaaagaatgagtcctcgccgaaaaaaaaaggcggaccacgcttcgtgaattatactgagctcgcagtaccacaagaccatatctatgccatcaaggaaaagaatggggtctttaagaagccacccccgatcaggagaaaccgcgacaagagggatcccaagaaattttgtaagtaccataaagatattggtcacacaactttggagtgttgggttttgcagtatgagattgatgagcttattaaaaggggaaaattcagcaaatacaaaaggaacgaggaaagtcatccccgagcggatgacaaagaggaaaaccaaaacgcgagtggctcaagaacgcctcgcaatatattgaccatcataggcgggccccatatcgcaggtgactccagaaagtcgtaggagagatatgagaaggaagccaaagagaagccactcaccaacgtgaacaatctcagtgagcgaccagagaagttattcaagagagaatgcgacgacatcacattcatggagagtgatgcgaaatgggtccatcacctgcattccgacgcactggtaattgttgccaatattggcggagacaatgtccaccgtatactcgtggacaacggaatttcagtaaatctcttgaacttccaagcatttaagcaaatggggttgcatgataaggatctgcgacctgttacgtcgagtatatatggttttaccgacgacgttattgcgttgaaaggaatgatttgttgggttttgtgccctaaataaaacaatttacaatctggttagttatcaatata

SEQ ID NO: 223827 - DNA, 4298 bp, Cannabis indica
cctaaaatgagtggaccctaggcgcgggcctagctcgcctatgcctagggccagtcctgcggaggaccttagactatctctaatgggggttgtccattagagctcttttagaacacgtggactaagttagttaggattagttattgggttgttaatcttgattatgtagctaatcattctgttaatagttggttaattctccaagtgatttactttgtatgaacagagctatataagctcattttctcatttgtaaacatttaatcagaacagaaataacaaatccttgctctggttctctgttcttcattctttctttctttcttctcatatggtatcaaacggcatactgccccacgcttccatggccaaaccttcaacccgatcccaggatggcgctcctccatcgtcgatcgacaaccaagctgcagaggtcatctccgactctgtaccagctccagatccctcagcaaatcccattcgaaatccacaaattagggttccatctcagcccacagatccgtttccccaagctcgatccaccattgttgacgacaacaccaatcaagcccctacttctcgatcggttgctgatgatcactccaatcctttttacctcagcaccggtgatcatcccagcttggttcttgtctccactgtcctcaacggcaccaattaccaaccctggaaacgaggaatcaccatggcgttcactgccaagtacaagatcgcattcatcaatggatctcttcctcgcccagaacccggtaatatctatctcaactcttggttaaggtgtaacaatatggtgatgtcttggttgattaactctgtttcgtctgagattgcacaaagtattatgtactttgatttagctactgaaatgtggaacgatcttgctgagcgtttcaatgaaggcaatggccctcgaattttccaattgcagaaccaaatcacccgacttcaacagggtgacaactccgtttctgcttattttactaagctgaaatccctatgggatgaactcaaagagttccagccaattaccacttgcacctgtggtgcaatgaaagtctttttagactgttacaaccagaatcaagttctccagttcttgactggtctgaacgagtcttttgcctcggttcgagcacaaattctgctcattgaacccatccctaacctttcccgcgtttttgctatgataattcaagaagaacgccaaagatctcttggctcaactgaacaaatcccccttgcggctgctgctggtccttcgaacccatcaagagccaagaaaccaaggccatcatgttcgaattgtggcaaacctggacacttaaacgataagtgctactttctccacgattttccacccggttatggagataaaaagaaacaagaaaagggcaaagctaaggcaaacaatacctcttccagcaaccccaaatctgagttagaaggaccatctaccactgctgatctcacttctcaatgtcagcaattaatttccctcctcagtcaacaactaaacaatcataccaatgctgatctcaataccctgcctgctgcagcatccaatcttgcaggtaaaatttctaattctaatcctataccttggataattgatagtggtgctacacaccacatgtgttctaatattgcatgtttttctatattcacacctatcccattccctaagaatgtgctgctactcaatggacagcaagttactgttagaaatattggaactgtccatatcaactcccacattactttccataaagtactctacttaccaaatttcaaattgaacctgttttctgtttctgcatatatggtcgaaacacctaattctatttggtttcatgatgattcttgtttaattcaggatccttctcggaatgtggtgattgggacatctgaaaaacatggaaatttgtacttgcttcaacaagtccaactccctactgcagctgccactatttcctctttttttttttccaataaaacaagtgtaaaccaatggcacaatcgccttggacatccttcaatgtgtatttcaaatttcttcaataaaaaaaaaacaagatttcacataagagttcttcttcatattgccatatttgtcatttggctaaacaaaaacatttacccttcatttcaaatcataatttttccaaaagaatatttgatttgattcatatggatatttggggtccatttcacatcactagcatagaaggatataaatacttccttactatagtggatgacaaatttcggtttacttggacttatttactaaagaataaatcggatgtccaaaatgtgattccaaattttttccacatggtttgcactcaatattcaacaaatattaaggccatccgctctgataatgcaaaagaattcaatttacattctttctttgcatctaagggaataattcattaccattcttgtgtggaacggcctcaacaaaatttcgttgttgaaaggaaacaccaacacattctcaatgttgctcgtgctctaggtttccaatcaaacttaccattagtttattggccatacctagttcaaacggccacttacctaataaatagaactccttctaaattgttcaaaggtatgacttcttttcaaatgctccatggcactaatcctaaatatgatcatttaagaagttttgggtctcttgcctatggctccactctcaactcaaaaagacacaaatttacaccaagaagtagagcttcagttttcattggctatccccaaggcatgaaagcatacctacttcttgatattgaaacaaaacaaatttatacttctcgggatgtagtcttctatgaaacaatatttccattgttttcccaaacatcctcttctgagatcaacacattatttcctgatgtagtgctacccactacaaaacttgtgcaacaaacaagcgttcaccagactgtgaaccataactacaaggtctctggttgcccatttgcaccaatttctggtgcacacgacattgcaagttccaggagcaatactcattcacatcaccctgctgattcacaaaatactgctcttataccagcagctcccacaccagcaacttcatacagttctggccccaaatcagcaaccacacctggtattcacacaccagataaaaattcccaacagaccctagtttccaaccctgctcgcacacaaattcccacaccaggtgcttcaaatacagtccctacattgggcaccactgattttattacagcagtatctaaaccagcccccatacctcattctgaagtcgaaccacaaagctattccgaagcctcccagttttgacattggcttcttgccatggataaagaaactgatgctctcgaaaaaaataacacttggattgtcaccaagttaccacctggccataaagccattggatgcaaatgggtttacaaagtaaaatacaatgaaagtggagttgttgaacggtttaaagcccgtctagtagccaaaggctacactccaaggcatggcgttgactattctgaaacctatgcccctgtggcaaaattcaataccctaaagatcttcttagctctttctgcaatgtacaattggaatgtccaccaattggacattaacaatgcttttctccatggcgatcttcatgaagaagtctacatgaaaattcctcctggttacaaagcacctccgaacactgtgtgcaaactaaacaaaagcatttatggcctcaaacaagcatccaggcaatggtttagtaaacttagccacactctcatttcagatggttttcaccaatcactatctgacaattctctattcataaagagaaccaaaaccttttttctagccatcctcatatatgtggatgacattattgttgccagcaataatgactttgctatctctcacttcaagacataccttcatgacaaatttaaactcaaggaccttgacaccattcgatttttccttggccttgaagttggtagaacaaaacaaggcatttctgtctctcaaagaccatttgcaattcaattactcaaggacacaggttacataggagccaaaccggtctccacacctatggaaacaaacctaaagttaagtaatgacaaagggaatctcctacctgattccactatttttagaagcctcattggcaaactaatatacttaactataacaagacccgacatctcatatgcggtcaaccatttgagccaatttttgacttctcctcgggttcctcatcttcatgctgc

SEQ ID NO: 223828 - DNA, 1657 bp, Cannabis indica
cttaatgtcaccaaatatgatatttgttaaccaaacaaactaaatatatttgtttataaaataaaaaaaaaatgccataaaaaacataaaaataaaatagaattaatgttttcaaattgctctctttcatgcgatacgaatcacgatcccttttctttttctattcttcgattgtttctctctcctgggttacttggatagtcctcactctcttctaaccgattccactattggtacttcttctacgattctagatacttcaaccactacaaaattcgacaaggaccgaaaatttgcatttgtataattaatttacaagaataagaaaataattaatatttttatcttctaaatttataatactactcctaaaagggtattcataacacatgacatgaagagaagtatcaaccaaataataacttacttaatgcctgcatttttttttttgtttaaagtttcaaattttttagtgatcatggatcatctactcaagtagtaatcattggcataggtcagttggaagacaatttttgaggaagacatagttggattttaacgattatataatttcatcatattttatattttattttagggttcgttaggtagccggataagggtcgtattgtattaaataataaataacactatgtttggataaagcaatgtattgtattaattattacgaccaaattttttaatacaatgtatgttgtattatttaatacataataaatggtgcgtattagcttgtattataatatttacaaaggatttgggatcagcaccaatctccaacccgagactcgagacccggacccgactcggacccgaacccagacccaacccggaccggacttggtcccagacccggacccgaacctggactcggatcggacatagacccggaccggacacggacccagactgaacacaaacccgggctgggaccaggaccaagacctagacccggactcggaccgaaacccggacgcggacccgtagttggtgttgggatcgagtgtataaaaaatacattataactttacacaatcaattaatacaagtcaatgctaaacactgtattgtattaaatattactaatacaatacaatacaatacaacacaacacaatataatacaatacattacaatacggcgtaccaaacgagcctttaatttctaaatttaaattcaatatttttgtttggctgtgatactctaaaatactttaaatatctttatttattttcttcgtcgtctctgaacagggtatcatatactattatatcaaaaatataattaaaaatcattatttattaataaatatattaattaatataaaaatctatttaaatataaaaataatttataaaatgaaatttacaactttgggaggagccctcttagtgcctattggttaaagtaggggtgtttatcaaaccgttcaaaccacttgcaccgtaaaaaaaatacggtttgaaattctttgcggtgcagtcacggtttgaatttttcctaaaccgcgcggtgcagtgtagtttgcggtttttaattgttaatatgcggttcaaaccgcaccacaccacacattataaaaataccaatttttatatttacttaggtccaagatgtgaatgtccaacccaaaatc

SEQ ID NO: 223829 - DNA, 1059 bp, Cannabis indica
cagatagattgttatgtgaaagatgaagatattgaagacggctcaactttgagaacatgtgcatctctattgtgccactgaagtaattttcattgaggaagagctcttccagttttttcatttcaaaaattgagcttggaatttgttttgttagcttgttcccattcaaccttagaatcgtcaattgggatgacaacgagatatttgggatggtcaaatgacccacaaactgattatctccaagatttagaaattgtaaactagggatttcgaacaaagttgatggaatagtccctgaaaaagcacagccagagagatctaaattacttaagaacttacgattgccaatggaatatggtagtcttccagagaaactactggaaaaaagattcaatgactttagtttactacaagaactaaaattaatgggaagaaaaccattgaggttaggattggatgaaacatcaatgacttgaatatttggtagatgaaaaatattttggagaaattgaccatgcagattgcagccagtaagtgatagagatatcaaggaggatagatttgcaatggatttaggtagggttgaagaaagatccacgtagtccaagtgaagttcttctaacttggtcatgttttgggcaagttttattgtcgtactatatgaaagactaacacgaggataaaaagcaaagagattaagaaaaatcatattggacaacaaagcaatttcatatgggacctgaccagaaaaaaaggagctagagaggtcgagatgggttaaccttgaaagcagaccaaagcttgatggaatcttggaataattgaagtagtttctggcaaggttgagtctctcaagttgacttaaggtgaagaggctgctattggaacgcaaaggcccttgaagccaactttgactgagatcaaggcctataggctgccctgttttgctgctgcaggtgacaccatcccactcacagcaatcttctccttccctccaaaactgcatcttcgggtaagaaggtgaatcaccatgaggacttttttcaaagacaaactctt

SEQ ID NO: 223830 - DNA, 1539 bp, Cannabis indica
tatttatcgtgatatcggccaacctaaaatgttattagcaatttttattgtgtaaaggtacaaggcaacaagtagtagtaccgttcaaatcatatgctacgaaagtttatattcttttaattagttagtgttgtgattcataaaaacacaagaccatgcaatgtgaattagaacaagtgcaatgctaaaaagaaaaagatgaactgaatttaacaaaatacatgagacgtaaaacagaacaccaaatcttaaccaagtttgaacaagatgatgaagtttacatcacaagcctactctccagccagaacaactccaatggctttagaatctttattgatctaagaatatagttgcattaaaatcaattcactcaatgaatacttgaactcaagactcaaagaagttttgcatcaattacaatttatcctcacttgtggctatagtgatgagatacacactatgtcattgtaaccttccatttctttctttttctctctcaaaaatagctcactaaccctctctgagattccctatcggtgcctagaattacaaatgagtagttatttatagcttataaggtttggaactggttctaactgtcataacagacagttaatacaggtagcttaggaaatgtcccttaattagtgaccaaacataacaattatccccccttgatcattaagtgaggacttagccatagagacttgggattggactggactttattccttaactagcacttgaagatgtttagcaagtttagataaagtctaaacttagctaaactcacatacttggtcatcatgtttgttgggttctcttttgtcccaattttcttcatagacacttcattttctgttatgatatctctgatgaagtgcagcttgatatttatgtgttttgacctctcatggaatattagatttctcatgaaatgcagtgcactttatttgtcacaattcattattatttcatttgatttgaaccccaattcctttgtaagacccttgagccaaattgcttctttttatggcctctgttgcagaaatataatcagccttagttgatgatagggcaaccacattttagagattagatttctagctaacacatcaacttaaaactgtgacagcatatcctataattgatttccttgtgtctctgctttatgcatagtgagaaataacataataatattcactttagtttcatcttttgacttgttgtaaataagtcctacatctattgtcccttttagataccttagtattcatttcacagcaaaccaatgctctttccctggatctgaaatgaatatgttgaccatgcttagtgcataggccaagtcaagcctagtgcataccatgtagtccattaggctgcccacgcatgatgcatagggtactatatccatatacatcttctcttcttctgtcttacgtgtgtgtccttgtatcaatttaaaatgttgtgctaaaagggtgctgacaagctttgcctcactgatacaaaatttgtgaataattttctatatgt

SEQ ID NO: 223831 - DNA, 2350 bp, Cannabis indica
tcaatggttgatcttaggtctatggatcttaatcctgatatggttaggttcagcctagttgtattacttatgttcttcaagttgttcgtggaagctaacttatggttttggcagatatttacatcttaggaacatggtagtttaaactggtttgcttgatgcttctccagactatagctcctccaccaagagtaaatactgacctagatgtcgacttttgacaatctttgtttgattaaaagttaaaatcagtatatccagtaggatttaactctccaccaaaatatacaagcattatatctctcattctctaaagatacttaagaatgttctttataactatccagtgctcctaacctggattagattggtaatgactaacaaaccctataacgtagcatatgtcacgccttgtacacaacattgcatacattaagctcccaactactgatgcataagggtactttctcatgtcctccctcccctaatgattctttggacattgattcttacatagaataattccatgtctagatggtaactatcctttcttggaattctccattgagaatctatcgagcaccttatcgatataagttgcttgagaaagtgctaactgttgacctcaaaaattggccaaccgatagcagagtagaattgaagcttaccacgtcttacacaattagaacaaaaaggtaaatagacataggattttatagaggttcgaaccccttagttagcgggtaatgacctactccccttttggttatgtttataccagagataattccactcatattgctatagttgtgagatctaaagtggctctctttagattacaatgagggaaccaaagttgccaaatatcaattgagtgagagagagggcccttggggcgtgtagaagagagaggaagagagagttagggtttttaaacttagagtagagagcttagggagcttagaggcttaatgacttaggattttagagataggctaatgctctttatatagtagagtttacatgcctaatatccttagaaataggtaaataaagccattatttacataattaattaataaaatacaaatgactaaattgcccctcaacaatagatctattttcatgggctgttaaggctagtccgttgcttgacttgttgtccacaaatcagagctacacatcaaaatctaccgggccaaaagctggccgaccatgtacctacagaatgcaggctggctggccatacaatgtttgtaggttgaggtctggcgaaccatgttcctaccagggtctggcaggtcatgttcttgccagctttgttaagagttggcacagtccttgcatgtgttggccaaccttggttggtgatggccagccttggtgatgaccaaccttggtgatggaggctaacctttggaggtggaggccaacctttgtacatcttttccttatagaggtcaagcttccttggtcgaatggacccttcctttgtttgagagtcagctttggccagacagctagtgctcaaaccttggcaggccatacaagctcatcttggctagcctatagactccccttggccggctagacattgtggtacaacttcttgacagctcgcttaactctgttcgcttgctgcttgatgatttttccataacttgtatggagactttgtcttgctattggcaaggttgtattccacatgtactctgtctttgcttacgtggacatgccacatcaggtggaaaaaaattgggacaatattttcccccaagtcatcgttcgaacatctagtcggatagggacttcttaattctcatcttgcatgtagtagcctctatcgagtagccttgtctagccaagtgctggctttttacatggcatgcttttagatctttgatcttctctctccatatttgcctcatcttctcttctttgacatcttttcttttaacctgctagtgataagttttaagctttttaaacttttagaaactttttgattcttatgctagattgtattccttttggtattttgattcacatgatagttttagaatgcataatgtgtgattccctgatgggaaatattttattttggccttcattgtgattgttgactctataagtcatgaagaacacaaagaacacatttgagtttttaaaaaacaaacatttatattcaaaactaaccttgcgcggccctagggggtcttgtttgagacttagccagccctaggattcaatcatgggagttggctagctttacgctctcaccataggaaactagccagttcatgcctgggtttggtgaccctagccgattcttcgctgagtcatgggaccc

SEQ ID NO: 223832 - DNA, 1248 bp, Cannabis indica
tttttttttttttttaacaagtagtatttagtttttgatattaagaatattaaatttaaaataaaataaataaatgtaatgcatttgaaccttccacgtatttatatttatgataagttaacggaagtggtagtaacggtgtaaaatgtaacataaggaatttttacctccaaaaattaaacattaggtatttaagtgtataaaatctgaaacattaggtgtttatgccccaatttaccctatttgaatcgaaaaataattttgccatatatttatataatttataattataaaatttgatgtaaaatttaatgttaattagtagttttaaggggtttttacaaaaatactagattttgagtaatatttttcaaatttactgtcacatggtaaacattacatttatattgttttcctcatttttttccttttatactgtaaacactaaaaaaaaaaaaaacgaggcttttatcttccacacccatggacagaactactataggaacatcagaacaaccagaaaataaccattaattctgacgagattgagaaaaaataatgaaatcgacctcaaataaataatcatgattattcaaaaaaaaaaaaaaaaaaaagaaaaacaatcatgacaaaataactataaaacaatactaaaacaaatcaaacaaaataaaaagaaaaaaggattaaaaagaactaacaatcttctgcacagcctccacactagattcaatagcagctatatttacaagcccagtcctagaaaatcaaaataaaaaaactactaaaacaaaactaaaacaacacaaaaataaatataaaacaataaaccaaatatagtcacttagaataacataaaagaaccacacacctcaaaattctttttccagtgagctcgtcaaaagtatttatagaagaaacagaataaaaaaatcacaaaacaatcatagagaaggaagaagaaatatatttgtattctctatcttccacacccacggatagaaccaccacaacaatacgagaacacccagaaaacaactattaattctagcgggaaggagcaagaacaatgaaatcaacgttaaataaataaatcatggaaaacaatagtaaaacaacactaaaacgaataaaaaattaaataaaaatgattaaaaaaactaatcatcttcagcacagcctcaacatcagatgcaatagaggctatagttgcaagctcaattctggaaaatcaaaataaaaaaatta

SEQ ID NO: 223833 - DNA, 3661 bp, Cannabis indica
aaaaaatatcatattcattctaccctatccaatctttctacaacctaataatcaatatgcttgcatgacttacctcactctactaatgttaacaatccttgttcggaatcaaaaggaatttccaggttgtaatgtcatggcttacaccataccagtgtcccaaggctttaacattctttttccctttgctctacaagttgtcggcgcccgcaatccttccatctgataattgtagaaattaccctctacaatattaatcatagatatataatctatagcttctataagtatttagaattgaaatgatgattttcttagagcttgacttaacgacataaattaaaaaattatattaatttactgaaatattatttataagtagctaaatgtttgaaggataaaatacattgaagggcaaaacggtaaatttgtccctattcgatgtaaaacatctatagagggtcattaattattatagagtatttgtatttagtatatagagtgttctatgtaatcgagagtgctattctgaatctacagtgaagtcaggaggaattaccaagttagaaaatttattcataaattttgagaaatgtttattgggagcttggttacataggcacatagtgtccacactatctgggataatatttcctcgtagtctcaattaattggcttattaaaccaattaaaattctaaaaaaggactatgtcttattatgaatttcactaagaaaaaggcaaatttgagaacaaaagtaaagagcgggtttatttgttaattatgatactttatggtaggggtgttcataaaatatgaaacattgaaactgacaatcaaaccgatcagaccgtaattaaatttttcgttccacgtcatcaccaaatttggcagtcggtttcagttacaatttttttaacatggcaaccgatttcagttttttaaataaaaaatggttaaaccaaaaatcgctaaaactgccataaagaacccataaccaccaaaaactgcccaaaactgccaaactaaaaaactgctaaaactgccaaaaactatatggtcagttttatacgattataatttctaaatagccagttacagttttcataaaataaaaaccgtagccgaccggtaggttataaaattagtaaaaaccgactataaccgactgattttcatccctattttatgggaataattaataaataatatttaaatgataattttttaataattattaaatagataatgttagcatttaaacaattagaatggaaaatggtaattttttgaaaaaagataagaaagtctacgtttaaaggaatcgaaggaaaaaatccaaagcccttagcccatatggatttcgaccaagctatggccttttagggtcattgtctttttcttaaagcccattatattcaaaacctaaacctagagagactctgtaaaaggaacacaaaggccttaattcaaagaacgctttctttgtctgttaaaatctagaaaactgaaccaaagaaaacgatttctcttccttacatattttcgaatctctctctatctctttcaccctcaattcgtgtcctttaatgattgagaatttcccacacaattaaaggcaatactcaaattagtgtggaagatcgtttaaaaagtgcccgtctattcaaataagaatccaagttcattattcgatattactctacagcagaaaggagcaagagttagaatattgaatggaaggagtcaaatctattttgttgcaatcaatgtgatattttctataattttacatgtttaatttattatttatgagtattcatatttaggatgttagattatagattaaaatcaaacatacatgacttgtaaatctagatcatggtaaaataagtcccaacaatgttaacctaggcgatgggcttagggttttcccctcctgggcatggtttgcaaaactcatctcatagcgtcgttccttgttggatttgaggaatcgcgatgcaaagaaattttcaaaaagccaagctctgggtgccctagcaccctagattggaagtgttccaacattggttctgggcttgtaactttcttgtggcatgtctctcatgtgtttgagtgcaaatgttgggcagctttcacagagataatggcttcggagaccaaaattgatgcattatagagcacataattgtcaacttgggcgttgggcaaggccccagacaccaaattgatctccaagatgtcaaggtgaaatccttagcttctaggtccattatttgttgtcttcttgacttgttagcttagaattttgaaagatggaacttttaaaaacgacttcgtaggatccaagtacctacttggatgcctccttatgtcaacatgggccctgggctaaggctcagctctcacgttgactgccctatcttgggatgcaaagctccaggattatttttcttcttaccatgtgtcgaaaatgatgtctacattattagaactagtttccaggtaaatgttagccatttgttgctttaggtgctatttatagagataaatgagaccaaaaaattagctttttaagtttcgagcacaatcaaaaagaatctcacccatgtggctattttacagctaatgaaattatgatatttcattacttttatttaggtgtgaagcatagaattataagtgattttgtttcatgctattattttatttttttagcttgtttctaatatattcgagaagcattccaagagccctaaatcgtttatatatataatgagcttaatcaattaagtttattaaataaagagaaacttgatttcaccactatagtgattaaataaagtaaattttttaacttgttggaggagaagttttattttgagaaaaattaaagtttgaggttagagatttgtttctacaatcactgaagatttggacattttaatgagattttatcaaattaaaatttaataataatttgacctgatgacgttatgattagactagactaattacatttgtttgtatttttttcgtgttaaaaattaatttcaagttggttatattaaaaaaaataagctcaacaaaacaaataaatcttatgatagtttgattgttcatgaggaaaattcgggtagattacggggtcttaactttggccgaaatggattgacagtttctcatttgtttttcgcggatgatagtctagtgttctttgaagctaatgataaggaatgtgaggtttttaaggagctgctggataactactgtaaaacttctggacaagtggttaattttcacaagtttgagatgtgctttgggaaaacagtgcctcaagtgacacgggataggctggctgctgtcatgggagttcgggtggtagaaaattatgggaggtatcttggccttccttccttttttggtcgaacaaaataagagctctttgctgtgattaaaaataaagtttggagcaagattcggggatggaaggcatctttattttctgtggctggaaaggaggtgttaattaaagctattttgcaggccattcctacttatacaatgagctgtttttgattgccgaagagtgttattaatagtcttcatcgtatggcggccaaattttagtggggttcgtcttagaaagccaataag

SEQ ID NO: 223834 - DNA, 1609 bp, Cannabis indica
ggagtcaattactctgaacctgcaaagccgatctttagttttcaatctctgcaatatggctaaccaggtgagaaagctgtgcttcagggtgttaattctagaccagacttcattgcaccagtccaccctttcctgttcttgaatcagaagcttatagcctgctgctactttatactcttccttcgaaaattcttcatggttcaatgtttgtttcactaaatctttaatagacaccattttcctccaataccaactactactttggagagctttatactcccaccaaatatgattctttatatatacacaatgcacccatttcacccaaagattgtcctttttatttgccacaacccatatgtgtttaaacatggcagctatattccattgagcaatgttcaataagccaagtccaccttcttttttcaggtagcacaaattttcccaaccaacagctccagctccttccattgtactcttccctgtccacaagaaagacctacatattccctctatttctctaatgacttttttaggaaggatcattatctgactccaatacatgtgaattgtactaagaacagagttaaccaacactaacctcccagcatatgacagatttctagttgaccatacccttattttattagtcatcttttgagcaagtgtgacacaatcagaggctgcaattttccttgcacagatgggaactcccaaatacttgaatggtgcttcctgcctcgagaatccagtcatgtccatcaccctttttatctccctttcctccattacactgcaaaaaatagcagacttgcctttgtttggtgttaaacctgaggtgtttgagaataatttgagcccttgcatcaacaaatagatacttttaaagtctcctctacaaaaaatagtacatcatccgcaaaactaaggtggtttagcttcaattctgcactcctctcatgatatccgaatgcttttttccttccaatcttgctcatgattcaacttagatattccatccccaaaacaaagagtaaaggggacattggatcaccttgcctcaaacccctttttgcttcaaagaatccatgcatggatccgttgaacattaaggagtatctaggtgttctaatacaagtcatgattaaccttatgaacttctccgggaacttaaaagcatataacatttcctccaaaaaatcccaatccattgtgtcataagccttttgaagatcaagtttgatcatacaattaggcttagactccttcctaccataattcctaattagatcttggcatatcatgatgttatgtgctatatatctacctttaataaatcctccctgatttagagagactatttcaggcaagatatttttaagtctagaacaaatcaacttagtagccaccttatatagcacattacaacaagatataggtattttagggtgttttcactatgaagtttggtaaaaaaacactagattttatatatgggtgttaggatatgttgtagagtaaacgcttgttagttttacgttaatgtgacttaagagtctccaatcatcgagcaataatttctactcaggttgaacaatacacctgaatt

SEQ ID NO: 223835 - DNA, 3073 bp, Cannabis indica
gtccacgtatattgggcgattttaggagcaacaggctcaaaaatgaattttttcgtgtgacccactttgtttcagggccggccctgattatattttgtcctcgaatgttaaacggggtggggatagggataaaactcctcacctcgacgggaacccatttagtattttattttatatttctaataatattttataatttatgtttgtattttttagcatatcagtatctttttatgaattttaagttgtgttttggataataattaatttattgaatgataattagtgtgcaatattttaattattatgtagtttaatatttttatgaattttaatttttattataaactttatctttttattaggagattttccatcccgtccctgcctccattaggggactccccacgccatctcctatggggaataagcgaggatgagaattaaaatccttaacggggatggggacagtggagaattctttgctagtatcgtgtgcatccctagtaacggtattgcacctccctactagaccaattcaatttattgttttatatatgtagggaaatgtatatatttaagggattattttacaaatacacaaaaataacaaaaaaattacaaaatacgatttatagaatttttaatatttttacgattttttgattttatttacaaaaaatacggtctttatgttattttttgttgatattttaatgttatttagatattatttttatgtagttttcttattgttttcgtgttgtttttataaaaaatcgtattaatataaaattaaattctttaaacataaaaatgtaatttttttacaaacaatagtgtcatgtaattatccctatatttaattatgtattctaattacgattaatatctcaaattttctaaaagttaggttatcaaaatatgcaaaacgagtcacatttatgtaattaatttaagaattctattcttatcaaaaaaaaaattaatttacatcggctaaggccccattttcccaaacacagccctagttataccattcagctattattcaccaaatctcacttaattgaagaatttgaaaattaaagtagctagactcaaaacattgtctagtttttctttttctttttcatctcattattttcacatttccaaattttcacaccaagtgtcaccaacccaaaaacaattggcaccaccggtttaatgttttgcttctcctataatataaataaataattattaccttcatatacacatgatacttactacatacatgttccaaccaaatacgtcctaaaccaaatccaacttctccttgttttttcatacgtagggttggggagaatgggcagcaatggacaatcgaacccaatcatgagcctgcaacttatttcgggctcaccaggtgtgagagggaagaaagttacacctatcgataaacataataatgggttgattagtttcatgcaaactatcattaacgacacccaattacaagaacaagaaccattttatgttcttgatttgggggttgtcgttaatctcatggacgagtggacccgtaccctcccaaccgtcaaacctttctacgccgtcaaatgtaacccagaccaagctttactgggtgccatggccgcacttggctcaggtttcgactgcgctagccgggccgagattcaaacggttttgggccttggagtttccccggcccaaatcgtcttcgctaacccatgtaaacctgaggcccatatcaagtacgccgctaccgtaggtgttaacctaaccacattcgattcaaaagacgaggttgagaagatccgaaagtggcaccccaaatgtgggcttctcattcggatcaaagctccggatgatggcgtggcccgatgcccactgggtcccaaatacggcgcgctgcctgatgaagtcgaacctctccttcgagcggctcaagcagcgggactgaccgtctgcggcgtatcgttccatatcggaagcggagacactcattcgggtgcttacagaggtgccatagaggcagccaagactgtattcgagacagcggctcggctcgggttccaacaaatgaaagtgttaaacatcggcgggggtttcacatccggtgagacgtttgaagaagcggcttcgaacgtaagagccgctctgagaacttacttccccaattctcaagggttgagcatcatagccgagccgggtcggttcttcggggagacggcgttcactttagccgctaacgttatcgggaagcgagttcgaggcgatttgagagagtattggattaacgacggaatctatgggtccatgaattgcttactgtacgaccacgcaactctcacgtgcgtacctctggcgtgctcgtcaaagcgtgccaatcccacgtgcgaaggagaaataacgtatgactcgactgtgtttggacccacgtgcgacgcgcttgatacggttttgactggttaccggctaccggaactggaggtgaacgattggcttttgtttacgaaaatgggtgcttacaccatggcggctgggtccaacttcaatgggttcaacacttcagctattttgacctacctcgcttactcagatccgacgactttgtatgactagttagttttgtaatttcacaaaacctacattcttatcaaaatatctaatgactcatttatttatttaatatacatgttattttctataagttggttggtttaatagaaatttagcaagttttacttttttctatatttctcaataagcattgatatatttttagtttttaccgagctatcactattatatttgtagtcattgatgattatttgttaaataattatttagagttattttaattgcttatataatttttttttattaattgtattattttattttgggtaaatactattttgtattttgtgttttgtaaaagttaataaatggatcttctgttttgttaaatgacaaaatgcatcctatattttctaaattggtaaaaataagacattggactcaatttttaacaatttattttttaatacaaccaactttaaga

SEQ ID NO: 223836 - DNA, 1767 bp, Cannabis indica
aataaatccgatctatacaagacacgggctggaaaaactgcccccaaaatgatactagtcgctcggttattatttttaatgataaattatttaatatttcattaaaataggataaaaataaaaataaaaaactattttttcgtaatctccaacaatcatctatttccatctccatttacatacaaatcaaaccaatatacatatatgtcggtatatatgtactcatctcaaatgaaaataaaataatcgttacaatatatatttagatccattattaaaataaataaattagtatatatatgtatctaaatttatgtgtatgtatctatgtgaataagaataatttttctcgtgtcttctattataaaatattataacaaataaaatgcaccaactcaatatataactaatttagattttagcaagttaagaaattagaagtttatatcttttttttaatattactagaaaattaatatatattatatattattaattttttttataatatgtgtaattaagtgtggattggattggatcagttactttttgaggtcaaacaacactcgatccgcacaagtgtagattttagatttttcagtccaatccaatccgtacaagtgcggatatccgcattttacaaattggattggattggatcgtgcgaattagattgaatcaaatattttatgtacaaccctaataataactattaacgagtaagattggtgagacaacaagtccatctcgagataaacagaatatataatgaaagttattcaagacaagtaaacaaagagcttgcaactcattgactcacatactcgggaataagagcttgcaactcattgacccacatacttgtgggtatgtacaaagaataactacattcgtccatctcactctttatacgttgaagtaatcgcctcactaataccttctaaatggtaaaagagaatcatgagaagcattgtatgtttatacttagtattttttctacaaagacggtaaaaaaagataacgtatacttggcgaggatcatctagtatagtcagcataaccatctatggataaagataaaagagcagttgaatagttatttaacattatcctatatgcacaataataaaacgtggggatgtccacgtttcatgagcagttatgaatgaatagatctcaagggaataactgtcaccatacacatctataaatagagacagacccagggtaaaagggacaaaaaatctagagagaaaaaataagaaataattatcattgatattattgtattctgtaatctatatatttttcttaataagatggacttgtgaactatgaagaattaacttcaaacccacattaaaaactttatgttattcatttcttgctgtaattaattctatggttcatttattaccagaatattaatattttttattagcaaaaatctgcgttaacaagtaaaattttggagctttttctttcttataaaaagcatatttaataataaaaaaaaatcaaaataaaacatgggaaggacagctcaaatgggtaatgcaccaaaatataagttaaaataatatatttatgggtaaataccattttggatcctgtattttgcaaaaattattgattggatcctgtattttgttaaatgaacaaaatggaccctgtattttccaaaatggtaaaaataggagcctgagcttaatttttgacaacttttttttttaatataatcaacttgaagacaattcctaatatgaa

SEQ ID NO: 223837 - DNA, 1334 bp, Cannabis indica
gtaactcggtctaataaaccccaggttcagtaactcctgaagttagatatttaattctttcgattctgctggagccattcgacgatgcttttgatactggttctactcccgaaactagctcaatcacaaattcaatctctcgggaaggtggtaatctcagtagatcttcaggaaaaacatcaacgaactcgcataccaatcttgtattctcaggtccaaatgtcataggttggccggtatccaccgcagtgactaggaacctcagacaacctctgcacatcagatctttggcttttaaaagtgttattcttggtatgcgcgtcccctgaactttacccacaaacattaccgagttagcactgtcgggctcaaataccaccatcttctacttgcagtcgatcgttgccccatatttagatagaaaatccattcccaggattatgtcaaaatcagatagttgtaactcaatttgattggcggttaattcacaaccgtcaatccaaaaggacaaggatcgaatccacctagtggatactataaggtctcccgaaggtaacagagtaccaatccccaaagcatacacatcacatggtttatgaaaaaattctattactctactccacacgtaagagtgagtagctcccgaatcaaacaacacagtgtaagaacaaccatttatagataattgacatgtcatcactaacggactagcatcctcgtcaacctgagtcatggtaaatagtcatcccgggttctggttggtattcttcttcgactcttatttcttggaatgaggacaatctctaataaagtagcctaccatgccacactgaaaataagttttggctcggcattcaccctgatggtgttcttgcattttggacactcaaggtatgatcggaatgaagatttgtggccttccgcttgtgatcagggttaccatcattggtccccttactgacattaccacttacaagaggatttgatgtcgtggcggcatcctttacagcctgcttcttaatcacatgatgccctgcctcctcatctactaaggctagttcgaccactttcttatataatgtgtcgtgagtagtggtaatcttcaagtctcgacggattgtggcattcagccctctcacatatttttgtttcttggtgaaatgtgtaggcaccagatcaccagcaaatttagacagccgatcgaactccagagtgtattcggccacagtcgtttttccctaagtcagttttataaagtcttccatatgtgaagtccttacagcaatgttataaaacttttcctcaaacaaactcttaaactcatcccaagtcat

SEQ ID NO: 223838 - DNA, 1535 bp, Cannabis indica
attatgaatcaagtggagaattactattaagagattgcacttttaatgaactagtgaaaataatgatgaaagaactccaatgcaaccttgatataacacaaatacaactgaaataccaactgaaagaaggatgtcaaccactacaaataaaagatgacaaaagtctactgttctacataaagctattaagcaaagagactgatttcacacggtacccattacgtgtgaacaaaatcagcaacatagagagacaaacctttttggcacctagccaaacaatgatgtgcaacaatatgattatgacaacatatgacaacaactcagcacatgcagatgcgcaacaacctggaaacaacccaacaacaacaaacaagcaacaactatatgcaacaacaattggatcagttgaagatgatacttttttgctcgatactgaaaacaacaacaaaagaagactcctgcagtagatgaatattttaactttaccgactacgcaaagcttgtggctgcagaaaggtacaacaacttgaaaacaaccaaaaagaagaagaagaagtcaacaacacagaaatgattatcatcactgataaacgacatgaaacaatagaaaatggacaaatttacaaggaaaacgatacattgataagtgttctatgctactttgcaatcaagaaaacatttcaatacaaagtagtgaaatcttgcactaaagaatacaatattgtttgtttggactcaaactctaaatggagtttaaatgcttcaaaaaatgaaaacagagaaacattcataataaggatatcaagaagaacacacatgtgcggttccaataagatttagagatcaccgacaagcaactgcaaagttaatagcaaatttcataaaaccaaagtttttgaacctgaaaataaagtgcagtcctgcagatataaatggagaaatgaaagataaatatggagtaaaaatgaattacatgaaagcatggagtagtaaagagggagcacaaagccagctacatggaaatgctaaagaattatacaatctcttgccaagatacctgtacatgctgcaaaaaataaatccaggtactaggaaaatagtttttgaaatatatttgttaaactagaaacattgtttttgtgttgctaattggttgaataacagttgctaattattattgttaccgataaatgactgcttaaattacaggaacaataattgacatagagaaacaagaagatgatagtttccaatttgcatttgttgcattcaatgctgctattaaatgttggccaaatttgcaagccaatcatggttgttgacgacacattcctaaaggccgcgtatggaggcacgttgctcaatgccaacacacaagatacagaatcaaaaatatttccacttgcatactgtattattgattctgagaatgataaagcctgggagtggttcttcaaaaaaataaaagaagcattcgaggttcgagaagatcaatgtctaatctctgacagacatgaaagcatcatcaaagtaac

SEQ ID NO: 223839 - DNA, 1185 bp, Cannabis indica
agaccttctattttgttaaacgataaaatggactttgtatttttcaaatagtacaataggttattgaactcaatttttattaacatgaatgaatgaattgcagcggctatatgtctccagagtacgcactgagaggaattttttcggagaaatctgatgtttttagctatggtgtgttgatactagagataataagcgggaaaaagaacacaagcttcaagggggaggaggagcaataccaaggccttattgcatatgtgagtgaatgaattttgaaattgtttctagattgtaattgtacattgatgtaatgtaatgatggatgaatgaatgtgcaggcatggcaactatggagtgaaagtagaggaattgagttggtagatgaatcattgggtgagtcatgtattaatgaatcatcagaaacaatgatgagatgcatacatattgggcttctttgtgttcaagactttgcttctgatagaccttctatggcacaagtggcttccatgttaaccaaccatatatttgatcaacctcaacccaaacaacctattttcactttccaaccttctactgctactattactactcataattcagaaactgctacttcttcttctaataatactagatgctctgctactatgacaatggttgaacctcgataaaagaataatctaaattattccactccataattccatttcaatttattttcaatgagaatctctattgttataactaagccacatttgtccaacaatttcatcacttacattcttcatatgagccatgtactatgtaggcttaactgaaattaacctctcatgtctcctaaatttatatttatttcatcttctacttattagttttttttgacctagaaataaaaaattgtattgatccaataaaacatactaactaaaacagtagtaaatatctatttaaaaaaacagtagtatatataataaatatgtacatcgtcactatggttacttcggtaaagtcctctcaataacatcgaagcctcttcaaatttgcataaaatgcccctaattcaaaaattaaaaatgttcttctgttcataataaattataacaagttttttccttacacatatagtacttgttagttttttccttacagttatagtaccaagacaagaccgttgtgcatcacttttct

SEQ ID NO: 223840 - DNA, 1778 bp, Cannabis indica
cctaattcaaaaccgaacataacctatccccaaacaactccaaaatagatcaaatagttcataaacaaccaaaaacaggtaccaggttccaccccaagccaaaatagggttcggagaaaacctgagaatttttctcctgcaagcaaccggttgaccggttctagaacaccagaacaatcggtcgactggtttctggcagaccaaaaaaattctaggttattttccccagctcgaaccaaaaccaacacaaacctaaatagcattttcagaacagtataacataccaaatacaacatatccaacacatcaattaaccacaattcatccaattcataacttcaccaagtttgaaccaaaacttgattctaaaactcaattatctaattcaaaccaagccagccacaatatacatcaattataatctaaacattcccaaatttaacttaagaataaactcaagaattcaagctatcccaaccagccgtgaaactctagaataactaaatcaaaaactcaatcttaactaaaataattcaaaggaaacaaacaagattataccttaatatcaaaacaacttctaccccttgcaactacaatccaattgttgagaatttaagcaaaagaaagaaaaaaaaaatccttggttgaagcttcttagggcttcgggtagaaagaagaaagaaggagggtgatgtttgagaatttcctttgtttttcttttacacctcataatctcataatctaataattatattaaaacttattaatatattttctattccagccaagtcaaactaaaaaaaagccttcattatccattcaaaagacatttataccctcccaaaaatcttaaacttaaaacaaaagcctagggaattatggtaattttactaatccaccaaaccgacattctaaaattttaaactagtccaaaatatcctcaaaataattcccccaataatgttgtgacatttctgaccacatcgctaaatttcaacaatcgtcgggcccgaaaaaaatatttttattttaaaaatagtatccccgatactcacatatcccaatataatctccgtaattaataaattacgctttataatcattcaataaatccttactagttaccctaagtaaaatcataatcttacttcattaccaaaataattacatattaattaaaatatgtctttttaaatatcattttattttttgggatattacattgcattacttggcctttgaggtaaaatccttgatgatgtgtgctttgaaaaattatttaggcaaatttttttggaaatatttgtacctttcaagccacccttttagtttttatcctagtttacccttctttgagctttgacttattttattctttatttttatacatatcttgtgctaaaaaatgaatccattattatctatctttgtccctaactataacataagtagatcttaagtttgaaggtattgtgatggggaaagtttatgcatgttatgtgggaaataaaataacattgagagaatttcaagaaaaaaaaagttatttgtaacaacttgaaaagaaaaaaaaacaaaattttaaaaatatagaggcatattgaaagaaaaaaaaataaaaaataaaaaaataatttgttgcaaggttatcaaaaaaaaggttctctcatgtacttagagaaaaaagggatattgtgattatatgtgaaaattgtagggtgatttgattgaagaagcttatggtatacgtgagcctaaatgatgttgttcatataccc

SEQ ID NO: 223841 - DNA, 1448 bp, Cannabis indica
tctcatgtcaacacattggacataaaataggcaatgacacaagcttagacaccaactaaacccgagtagccaggcttccaaataaagataccaaagaaaaagttataccttcggaggcaccttcaaactccaagctatcttccaaaggatcatatcctcattactcaccaccaaagaattcaaattatgcaaaaaattataggcttctttaatggtataaagccctttcatatcatgagaccaataccacaaatctgaggcaaccgattgactaatttgagtgttcaaaattaactccctatcccaaagattgaacagatcttctacaatttccctatcccaaactctcctaccaacctccataaggttgtcaacaaagacatctgcacaatcaaatcagaagtaataaatgattgttattatcaagacccacatatctcgcaaaatatttattgacgagccaggaccaactaggcatctagcccctactttgattaaatcttacatttaaaaaattctcttccaaataaagctagaattatccccaagggaatcattaagaaaagtccatcgaggataataatgagctttataaacatgactcaccaacgaagagtcattagttactagcctccaagcttgtttccctaacatagctagattaaaatcctgtaaatgctaagaaccaagacctccatggtatttatgactacaaagatggttccaacttaaccaacttacaccatgccatttagaggaccccgaattccaccaatacttactcatcaacccctccatctattattacatgtataacctagcagtaagaaaattgatagagcatgtgcaatcatttttataagcacttctttaacaacctttgataacaatctaccatcctaactctgaattcactcttgcattttatccttcaagaaacccataatagcattcttattttcaccataccctacagaccacaaaccagatctttttagggttgagaagaattcgaactaaaatatagggttaatttagaaaaataaattcgatgacctaaggctctctcaaagagttgtaatagctgaataatactcctagcttctcactcatttgctttgtaataaatataactatcgtctgtaaaaaccatacgagaattaacaggagctccattgaaaacttggtcaccatgaatatcacgccttaccataaaccttttaattaaagaatagaatccttagcacaaataggaaacaaataaggtgaataaagggtcaccttggaggataccccaacctgaaacaatatggcccatctctcttccactgcttgtaacaaaataactgaaggttaagatactgtagattatggttacaagttttgtctttttggaaattgaagctgtgaatccgaagagcagatactggaagcttagtgtggatcta

SEQ ID NO: 223842 - DNA, 1213 bp, Cannabis indica
aagggatgagtcagagcataataaccgccatccttgcttggcaagcattgcaagattaaaatcgtggagatgacgaaaacccatacctcccaagtccttgtgaacagccaaccgatcccaagacatccaaataatgccttgtccactagcactctttgttttccaccaaaagctagccataagcttctcaatatcattgcatatttttagaggaatcagaaacacactcatggcatatgttggaagagattggatgacagtctttaacagaatttccttactagcacgagaaaggaacttaccatcccaactatttatacggttaatgatcttattcttgagaaatccaaggataaccgtcttctttcttctaataatattcggcattcctaagtagaaagagccttcggtagctttaggcatgccgagggttgagcatatttgagttttgaccacaccatcagagttaggactgaagaatatcgaagacttggatgcattgacacgctgaccagaggcaagctcaaaagagtgaaggagtctattcatactatcagcaacacttggggtggcttggcaaaataaaaaactgtcatcagcgaagagcatatgagtaatagagggggccccgtttgctacacgacacccatggatgatcctatctgtttcatacttcttaataagagctgaaaacccctcagcacagataataaacagatatgtggacaaaggatcgccctgacgaatgccttgcgaagaaataatagggcccatgatatgaccactatggataacagagtatttaaccgaggtaacacatttcaggataagattaatccatttgctggcaaagcccattcgacacattacagcttgcaagtagccccattcaactctatcataagccttgctcatatcaagcttcaaggccatatagccttttttgcctcttattttcctcttgaggtaatgcatgatctcaaacgccaccataatgttatcagagatgagcctaccggggataaaagcactttgagttggagaaataatctgatcaatcatgcttcgcattatattcgcaaggaatttagcaacaatcttgtaagatacattgcaaagagcaataggacgcagatcacccattgtggaaaagtttttcttcttcggaatcaaaacaagattggtatcattgatatcaggaggcaaatcttca

SEQ ID NO: 223843 - DNA, 2608 bp, Cannabis indica
tttcttaaaattttgctggatgtcttaaataactataacgtacatgaccatgagaaaaaaattgactaaaaaattattttggatcctaaaatagataaggatgcatcaatgtatccattttaaggggtgcattgtagaattctccaatattttaattacctttcctaattatgtaaacaaaataaaataattttgatattttttccaattaatttaataaacaacataaaaaattatttccgattattttatattttaaatcgatttatttattcatttattattctaattataattacagattagtaaataactatttagaataactgattattcctttggttaccctaagagtaactggttacctgacttttttcatatctttcttatcatatagttgtttttctattaataagtttggtgtgtataggtatagatggcattcgttgattgatacaacaatctttagaggaaaattgtatttgtaaattaatttaattataatatatttacaaaagcatacaccaatatgtagttatcatattcatagtgttgtaattaatgaataatttattgtaaagtagaatacattcaaagaatagaaaattcaaaaagtattccaaccgttctcaaaatttgattaacctatatttagttacaattctaagaccactgcaaattaattagagctgttcgcggtgcgggtactgcagtttttgactaattttttaaaccaacccgcacatgtttttttaatttctcaaaccgcatccgcactgcaaaactaaaaaactacagaaatcacaccgcaaaaaatggtgcagtgcggtacggtttatgcggtttttggagtttggactatcgttaaataattaaactattacaaatacaacaaagtttgagcaacactagtcaaaaataccataagacttgaaaataaatataaaaaaaaattcaaattttaacaatacaataattagtgggtttagtttgggcttttattggaactaaataaatataaaaattagtatttttataatatgcggtgcggtgtagtttgaaccacatattaaaaattcaaaaccgcaaaccgtaccgcaccgcgcagtttagaaaaaattcaaaccgcaaccgcaccgcaaagaattttaaattgcattttttttgcggtatgatacagtgcgagcggtttgataaacatccgtagtgcaaagtcatcttgtttatcaaaaactaatggcggggagttgttaaccctcaagggcatttttgtaagcgcactgtttcaaaaggagatcaagagaagagtaggcaaaacagtctaactatacatataattgttgttgagctaattatctaacccaagagaaagaataaaatagttatataacttaacaaaaaatatttttctaagaagaaaagtatgaaattactagattatatctatacttcaattattgtgttttacatattaaattattacactatttatatttgaaagattcttgagtgtgaaatattaaagactagcattacatacatgatattgttaatcatgtaattttgttatttagatattcttattccacaaaaatctaaaacacattacaaattaatgaagcattatttatggtatcatcaccatattctactactttattaatgttgaaagtataaattatattacgcgtttaagcaaaacaaacagattaattgcgtatcctgaatcatagattaaggacgattgttcttcaagtttcttatgaaacaaatcaaagacttcgtctaaaagttcttcttcaacaccgaaatgtttcttaaacattcctcccatgccccctcttattgtgcaggataacacattgggttgagatttttcttggtcttggctctccattatctctatgctaaaacgtccattttgtttcaccacttttttgaattcttgtgaagatgtaaaatatactggaatgtttaatgcgtcaagtttttcgtgactaatttttccctgtaaattttaacatatacatttaaatatgagaaactagctatggtaatactcatacacttaaatattatatgtatcaatattttctgaagaaaaaaataattagttgaaaaaacaattatacattattatttgtaatgttttgatgcattgagtgcacatatcattactcattcatctcaatcgtaaatgaaagaaaagtacttaaaacatgaaaatatatttttaaattgggacaatctttaatctatagtttgcaaaaatatagaaggttatttaagattttgccccctaaactttaatatgtactaaattatgttttttgaacttttaaggtcgttaaaaattcccctgactattgagattgttggatttaaagatttctttctaattttaataagaaaagtctaacatggatgaaagttcagggggcttgatttgatgtatgtcaaaattcgaagaatatgatttggtagatatcaatatttagggagcatatgatttagtacatggacaatcacagaattagtaaaattgaatgaaattacacaaatatccttaaatccaacaatctcaatagttcaatgtgaatttttaacg

SEQ ID NO: 223844 - DNA, 1111 bp, Cannabis indica
tttttttactgaaatatttataaaacaataagagagggtattaccacttagatgaaaataaaacccaaaaatgggtatgaacacatctgtaaaaaaaaaattagaaacctaaaaaaaactatcaagatcacgattacagtagtccaccgtagacaacataaccccgacctccatcaaccagaaactctaagccgctgttggaggagagggattcgaagagtctcaaactatagtgaagtaaaacggacgactttacaaacccccaagcaccggtcattcccctgtaaagaaatagatgaagaagagaagttcaagactttagatctaccgttaaaaatgaaaggaactaaaaccaaaacataggatgacacttgggcctaaactgggcaagcaggcaggcagaatgcaaatatcctaaaatttgacatgaatcaaacaaatgtccttatctcaaaaaatttaacaaaaggagcaaattaaaaaaccttacctttaaccccgtacaccctcacgtttttcactttgtttcagccctcactctcacagtacaactctcttcactgttaccggccaccgtcattgccgatctctgacatgccgacgggtgttacgcctattggcggtgcccatttgggcgttaggacatcggagaagctttgcccaggctggcgatatcatgatcgcagagagaatagacagagaagaagggggaggcgctggtgactggtgtgtggtgtcgtgcgtctgggctgttggacgctgccaacgagagagaagaaagagagaggtgagaggcgtgtaattagggttttcacttaagaatgatatatatatcactttaaataaaataaaaaaaaaaaaagagagagaggtgagaggcgtataattaggattttttgatatatatcactttaaataaaaataaaaaaattaaaaaaaaaatctaatttgatttgatttgaaagagagaaacgatgatgggtcatttattatttatttttttaaaaaaataaattaaaaggattataataatagatttttttataagagactatatagtgacacacattgtgtgtgagaaaatgtgtataccaacacgctatgcgcgtca

SEQ ID NO: 223845 - DNA, 1306 bp, Cannabis indica
tttccttgtactgccactaaggtttgtcagcctttgaagacatagaagtaaaagtttaattttaaagtacttaactacaatccttgtgggatcgacctcactcttggtgagtttactacttgttacgatatgtacacttgtgtgtgcaaattaccacaacacgttgttagaagcctcaaactcaaaatgaagtgcactttggagttgatgtttttgtggagagaagagaatgattccagctccaaaacctttcttgttcaatgctccgtctacatatgtcttccagacttctagctccaagatgagttcctctggattgttttccatctcaatgcattgcccgcttcatgagtctttctaatgactctggttttcgcaacacttgacagagaggatggtttgtcagtaccttaatggcatgggcttgaaagcatggtattaactttcgtgaaacaattagtaaacaaaaggagaccttttcaatcattggatatctggacttcgcgcccaataatcttttgctcacataatatactagaagttttacctttccttctactcacactaaagcagcacttatggcatgatctgaaaatgccaggtacaaaaacaatggttcccctttgacaagtttagataatattagggccctggttaaatgttctttgagtttttggaaagctacttcacactcggctttccattcaaattttttgttcccacagaggacattgaagaacggatacatttgtttgttgatttagagataaatctactgagtgatgtaattcttccagttaaagcctaaacatctttatgcttttgaggtgatggcatgtctagaagagctttaatcttctctgggtttgcttcgattcctctagaattgataatgaatcctaggaatttccctcaggaaactctaaaagtgcacttctttgtgttcagtttcgttccatatttttagatgatagagaatgcttcttctaaatcttcgttatgactcatggatgtctttcactttaccagcatgtttattggaagttattttaccaggatctagatttactaacaagtatgtttgttaatattctataatctaacatcctaaacgtgaatttcctaaactaatgaattaaagacatataaagttctagaaaaccttatattgatggaaacagaatattatggctcattctattcagatctctaaccgttgttcctttatgttgcagagtaataataatatctaaactttgatctccttcaagtattggaattcttcacaatcttccacactatgatt

SEQ ID NO: 223846 - DNA, 2566 bp, Cannabis indica
gactaacatcaagcaactgcccacagaaacattgaaaaatttcataaagaggtttaaggaagaagcctcgaagaccaagaaagttgatgacggaaaacagcttgcacttcttcaagcaaggatccgtacagggactccattttggaatgaattacagtaagaagtagcctccaaccttcaagacttccagaagagagtccaaaagtacatcaccttagaagaggcccaaatagtggcttatgggggatactatccgatcggaatagcagggtatgcacccggagtccaactcccggaaaccctaccaacagctactccaccaatgagcgtcatacaattctccgctaccctaggatataatcagagccaggcattgacttctgcatcttctcattatgggaatccttctgggataaatggacaagtcccgtctcactccgctcccgctgcaagcctagcgggaccttctcaaggctctcggagcaagaggtcctcgaaaggtagcaaccggacggaggacaagcgacagaaaagggggtacactccctaagacacccagtacacagaacagacagactcccaagaatgtgtgtatttcgccaccaggcaaaatatgcactaccggagaccgcctcctctgtacagagatagctcccgaagggatcccaacaaaagatgcgaataccataacaacattggacacatcaccaatgaatgcaaaaaccataaagatgagatcgaaaacttgatccgattgggtcatctctagagtggatgaagaaccagctacctcatctcaacccggttccggcagcaggacctttgccccaaggagcgccagagggtgcgtccgaagcatggcaccagtcactcccccaagggaacctcaacagattcctggcctgccatcgagacccaatggaagagtagctatgatctctggaggaccccatattggagggactactcgaaaggaattgaaacgctatgtcggggccgtaaaacatagtgaggtttgggaagttactcagctcctagctcagaggccccgactcagggatcaatcgattacgttcacagaagaagacgcaaagatagtgtgttttcctcaccatgaccgtctggtcatagagactcccatcgccaacagattgtgccagaatcctaatcgacaatgggagttctgtggatttatatttaaagaagccttcacggcaataggcctcacggaccgggatctctcgccaagtggttcccagctcacgggatttaatgggacaacacttatcccaatgggaaaagtaaggttgccagtcactttgtccccggacacaccccaaagcacttttaaatactgcacattcgtggtggtagaatgcccgactgcatacaacgcaatcctcggccgaccagccctggtggatttcggcgcagttacgtcgatcaggcacttgtgtctaaagttccctactcaggaagctagaatagggaccgtgagtagtaactagggagaggccaggcagtgttataatgttgctgcccgtctaccaatatagatggtctgtgaagttattgagccaggaatggtggaagaagatgagttggatccccgtgtgggatccgaaaaaattttagaaccaatggaggacgtcgaggaaatatcagtatgtgaccttgaccccgccaaggtcctccagcttgggaaaagcctggagccggaggaaaaagaaaaaataattgaagcactaagggcagccacagatgttttcgcgtgatgccaaggggacatgaccggaataagtccccatgtcataacccatgtccttaacattaacccggacgtgccaccggttcagcagaagcgacgcaccctcgacccagtgaaggcagaagccctggagaaagaggtaacaaactactgaccgatggcatgattcgagatgtgtattgtccagaatggctggccaatccggtgctggtgcctaaaccaaatgggacatggcgggtatgcatagattttaccgatctaaacaaggcctacccaaaagactgcttccccctaccacggatcgaccaaatggtggacgccacatccggattcaagctattgtccttcatggacgcttatgtcgactacaaccagatcaagatgcacattgctgatcaagaatgcactagctttaagaccgagaagggggtatactgctacctggtcatgccttttggattaaagaacgctggtgcaacatatcaacgaatggtgaaccgaatgtttaaaggccttctgggagggaacatggaagtgtatgtggacgacatgttggtcaaattaaaggcatgcgcgagccatgcagatgacctcgaagaatgctttgaagtggttcggagatacgggatgaaacttaacccgaagaaatgcacttttgggttcaaatcaggaaagtttatgggctttattgttagccaacgaggggcagaggcaaacccggaaaaaatccaagctctcctgaatatgccttctcccaaaaagcacaaagatgtgaagagcttaaccggaaaggttgct

SEQ ID NO: 223847 - DNA, 2639 bp, Cannabis indica
gagacattaattccgctgcatcaatgtaaggttttcttaactttatatgtgtttcatttatcgttttagaaagttcatatttagggtgtttaaacaacatacttgtgagtagatctaagatcctggtaaaataaatctccaacaatatcacaagtatactccttgtcagtaagaaggcccaccgatctcagattggcctcattcaagaggaagtcgcatgacctaaggtcatggggaagagtcaacaggcggctgtgccgactgaccatctcatgagtagggacaggtgttttcgagagggctgtaaaaaaaacgaacaaaacattcgtcagaaaactaaaaacgaaaagacaaggattagttcaactaagcatgaggaaaacaatcacttacgaattctacgaaaggtggttgtgtcgattggggaaaggctagttgtccaaaagaagtcgtctttgaaagacactttgtttggcaggtccacaataattttaggcttcctacagtgagcaccaagataatagaagccccctgtaccatttttcctcgctagaacagccttaaccgagtacagatactcgatttctactggtgtagggcactcccacttcaaaatttaatacaagaccttcaaactagcaagaatttcgtaagagataggagtcagctagaatggggcatccccaaggtggtttatgtaatcctttaagtagtcacgaagagggagtttggtccctgcactgatatgttcaaggctccaggtgcccatgccagtcaagccactggtactggtctcaccactagctcctagggtatcgcctgagagacacgcagggggtaacatctaaactcaccctctcgcactgacctaactgggcatgctcgcctaagttcgattcaacaggtctttagtatatcacatgcgtagcctgagatagatcgcactttcgattttattaattcagcttcaaaggtcacaatgggatcctagggagtctttgatgtacgtggcttgggagacattatttcaaagtccaagtcatctggttcaaaagcaatcgtgactttgtgtaaaaataaaggctttgccaaaggaataaaggacacactgggaggttctggccaggtcgcatctcgcaagaaatggcacttgcctttgatgatttcttgcaagaagcgcctgtggcgactagcattatcttcttggtgggttctcacgaaatgttccctaaccctagcatccttcaactctaatttggaggtgggttttgaagggttgggtttatacgggacagctgattctgtaggaaactcaagttctatatcttctggatgataaattcctgaaccagagtgggacactgctgcaagaagaaagcagtcccaatccctagaaagaatcttatcaaacctgaaggtggtgagttgaaggttctgaaaaaacctgtgtattgcctgaaccctaatgttgacccaaatacagttcaaccctaaaaactattaaaaccaaatgagatggcaacgatacaaacaaatgatgcatcaattaagcacaatgtagcacgcatataagatattaagaagataagttacttattgtttgaagttggggcttgggacgatatacaactcttcggcctgtgaacctttgaatgcagtaaagatctctttgaaaatatgaagtcggaggaaactcgcagaaaaaatgtcaaggacagggatggcatgcaaattcttcagcaaactcgatgttgtttcttaacaaagaagcttaagagtttatcaggatttctaaaatggaggaaatagcgcaaaggtggcccctttttcttactttatactcttgatatcagcttcgtcggatcagaaaaagtttgatcctacggacagaattcaaagtagaagtggaaaagatggtcatttaatgttgatgtatgccaaaatcagaggacatgcgggattatgacaaaaataccctttgtaatcattaaaaagcactttttattataaaagaactttttaagggacaattgttatacccgaaatttggcataacacatcagaggaaacatgtgtcaagctgggagaacacaaactaaggcacgtaattataattatacttgagatggaataacttgttaaaagcataattaacagagtatatttacaacttgactgactgaatagtcttatgcgagtcaaaaatgtacaactattgccttgtgcctcgatgagaaaccatgtagcttcaggtgtgcaagacgaggcattaacctcgattacgtggatgagatatattgtttgtgaagacacttagcgtataatgtatagtatacaaactaagtataacagacgggtgaactaacgcaagtgatagcgaggcgtccacctcaccataggaagacatgcacactaaaaagatcatctcatcatcgaatactgcggttgtcagatagaatgttatgtttttagagtaaaagcgacgagattttcattatcaaccttggatagaaatatgacaaactccagctcgctatcaagattcactctactctattcccaatgagatattccaatacaatacggtttacaacatatttaatacacgtttattttaacccagtaaaagcgggatattc

SEQ ID NO: 223848 - DNA, 4698 bp, Cannabis indica
aaaaaaaaaatgtgttaaattattttttgtttttttgaagtaggtaaaatcgaaccagtagtaattttaagatggagagctatgccggagaaatcaatctccggcaactcattggatatcctttcctcgatttctatcagagaagtaattattctaccggatcaagctttagttttcctaagttaccctcggtcggctcagttatttacagaagaggacatagattgtgtttattcctctgtgaacatctccaccaaacgaagactagtgaagaagtcacccatttccgtggaccgtaacgagcctaatagtcagatcgtacggtgtcgtctcccgccacgtggcttttcggtaacggccggattgaaacctaaagacaacgacgacgacatcccagtttatctcccaacgaacaatcgatgggactcgctcgcgtacgaagccctaatcgatcgtgacaacacaacgatcgtgttcgtcaaaggatttaatctacggccagaaagaatctccaacgcttcgaaattcgaatgcgtttacggctgggatttcaaaagccccaaattacttctccgatcagaagtaatctcaatcgcacaggagatcgtacggtgcaaaacgcctctgacattattgagtggctcgatgagactgaacagctcagtcatcaaggtctccgtacgaatgaaaggcaggggaaacataaacaccgtagcccgaccgaaacttagaactgaacccgactcgtattcgacccgaaaagctcacgagatgtgtgtatgtaccatggtccgaaaccaagcccggtttttgaaggaatgggttatgtaccactccgtaataggagtcgaacgctggttcatctacgataacaacagcaacgacgatctcgatctagtggtcgagtcgttacgagcccagagatacaacatcacgcggcacgtgtggccgtgggtgaagacccaagaagccgggttcgctcactgcgcggttcgggcacgagacacgtgcgaatgggtcgggtttatagacgtggacgagttcattcacctgcccacgaatttactccttcacgatgttttaaccaatcagacggagcacaacggacacgtggcggagcttcgtacgtcctgtcacagtttcgggccatcggggcttaaacacgtgccatctaaaggagtaactgtggggtacacgtgtcgtcttgctattgcggagagacacaagagtattgtgaaaccggaagcactgaattcgtccttgatcaatgttgtgcaccattttcatttaaagaatgggtttgattacgtgaatgtggatagaggagttatggttattaatcattataagtaccaagtatgggaagtgtttaaggacaagttttatagaagagtggctacttatgtggctgattggcaagatgaccagaatgtggggtccaaggatagggcccctgggctgggaactagagccgtggagccacctgattggtctgataggttttgtgaggttatagatactgggctaagggatcgagttcttcagagtttttctgacccttttacacatactttgccatggcaaaaacttgaggaacttaataatgataatgatagtaataacaatcagaagaagaagaagagcaggaggaagatacttagagggttgttatgattttttgtgaaattttacaactttgaattgttagattgggtgaagagagagaattaggtgtagtttttgttcttatgatatgaagttatgtatagatttattatatttttttttgtgtagatagatttaataacacagttaaatgaatttataaatgcttgccaactttttgcactatgtatatatatatatttatgttattaattgcatggttttaagttaatttttttgtgtgtgtgtggagccatatggcagcctgttattttattgactatgctttaatccaaaattgaacaaagaaagaattacatcacagaaaattgaagaccatatcattcattaccatcataatctcaataaatcttggcctaaatcttaatcattttctgtcacaattcacaacaactgcaaatagaccattgattctcattttacaacaccactaaccatataactattcaattgaatgaagtaatgtttttgaatagaaagtcaaactataattcaaccgtcgaaattgtcacccgcaattaagtttgttgagtaatttcccctgttgtaataacaacattttgtccaaaatgaagcaaagcaagtgcttgcggcatcaactaccacatttctatatagatcttctgattgtaaaatcttgacatacttgtgaaggtttattctttgaaatatcaaacagtttacaaaaactacacagaacagaacccttcaaaatggctttgttaaatttctcaaataataatatcaattgtttgctctgaacacaaaatgttacaaactaatgcctttttcccttttctttctgctaaagaatactcccaaaacaactcattcctaaagtaacagaaaaaaccaaaacccattatgtaagaatagctctggcacacgaaaatgctatcatcccatacatttacaggggaccaagaaaaatgaaagaaagaaaaaaatcctccccatcacgcattgcaccgccaccaaaggatgattccttgtctcacaagtcacaaatctgattcgcaaatcttttgagtgctgtttgtttgatgttaattaaacttcccacctccatcaagttggtgttatcgcaaacataattttaaggagaagaaagattctggatcaaatgtatagtttatgaagaagcttgctcagtgcctatgtgaatgctttcgggtcccgaaatgtgtttcacccttgtccctgtatcttctttgtaacattctcaaaacaaaggaaattgcaccaattgcagccaaaacataaaaaactctatatggggccaaggccagaccagaaagatatgaatagtacccagcgatgaggtagataacgtttagcctcacttcccggattgggattccagggaaagagaacatgtaggaattgtactcgggctttgaattgcagatgccatgaaggatcacacctgaacaaagaacagaatccaaaagccaagggagactctctcccatccctattctctgtaatcatgaaagaagtgcatcaatgaaaaatccaactactgaaacaagagatactgtacttttaaggtaactgaatccaaaatttacatgcagcgacaaaaatctagaaaatgactgatcttgaaatggagataaaactcatatgggcctgtttggtatgagtttgaaagcacacctagagcttaaaagtttttgtaaagtgtttgggtgaattttcgaaaatatgctaaagacaaaagtcttcatcagtttattcaagtaaagtcttcttaagttttaataaaattatgaaatctctaatcttgtctcttttaaataaatagactattcaaacagtaaataaacaaatatttaagcttttactttctcttcttgtactactagggaaaaaaaaagtaagaactgtgcaaaccaacacatacattactttgacatgttcaaatgaaacaataaaggttattgatattattgtaatttacctgcaaccaagctgcgagagatggaagaaacataattgtggccacgagatgtaaaattagcaatccatgtcgatgatggaatagttctagttgtgtttcactgtaagtttttgaagagtctggactgtcagagaatccctctttcgaaggggaattctggtcaaatgtaccctcaaatggaaagctaagttgctctgcactatctccttttttataatcaaatgcttcactttttcgtacatggctgcaaaacgaagccatcaaaaaactgttacaagaagatgaagcaacacttagagttaccagtcatacaatttttcagaatgaaatatcttaacttcctccatcaataaacaagtgataagacgaaattattttatcatcaaaaatttattttgtaaatttgtgtacgaaacatgtttaatgcaatccgtacaaaatactacggtatgaaatacaataaggcatacgagttcaaagcatacctgcaaagtgcagtatgacagcacaaagcatgagagaaaaggataacaaatagacctaaggctggatgaagcaagctagccaaggaattgcagcaagtgcagtgacaagggtcggattgactcttaaaatcctcaccacctgttatgttgaaaccgaaaaataaaagtgaataagctaatttgctcataaacgaaaaacgaaggtgaatcttgacctcaagtaaaaacttgctctagtatatagtgtaactgttttaccttcaatgaagagaggctagtagacagacttaaaaacaatcgaccaaatccaaagcatgtatttccttcccataattgccacctacaacaaattaaatttgtcatcattgtaatttgcatccagatttatatagtgctaagtaaatttatagcatagaatctacaaatttttagcacaatattgagaccactgaaatattttattacttgtagaaatggtgtttttactcttcagcactataaccttataattttgtcacaactaaaagaaaatttgtttgattttcgctcattagtatgagaaaa

SEQ ID NO: 223849 - DNA, 1098 bp, Cannabis indica
atatcttaaattccgagtttcctcaggcattcaaaaacccacatgtttcgcagtatgatgggactatggacccagtcactcacttgaaaaactttaatactataatgcaagctaacaatgtcacgaataatctatgttgcattttattcccaacttctttaacaagagctccgagcagttggttcgacaaatatactcatcattctataacatcatggaaacatttgtctgataactttaaaaagcaatttcaagccgctagagacagatgacttgaagtatcatcattaaccaacataaagcaacaaccaggcgagtcactcaaggcttacttgagtcactttagcacagccactgcaaaggtcataaacttgaatgacagtattcaactcactgcactttagacggggatcaccttctcttttaaaaaaaataaaaaaaactaagaataataagactccttaactatatatttttcatatatacttttagtgatatgatactattgtgaatgttaaacttatagaatatatatcttactattgtttattcaaaattagtattatttattttatatgtgggtgattgataaatataatcttccccaattagtgatcaaaatatgtgggtgattgatattatttatttacatatatttttatattttttttagtctttgtcaaatatttaaaatttaaaaaaaaaattcttaaaatattttaacaaattaaaaatatattttttaaaatttttattttaaattattaatttttgttgaagatatatagtattattacgtatgtaaaataattaaaacctataattattaataaaaaaatacatatttttttagattttttttttattttgtactactaatcttagttaaatatgtatgaaattattacctatataaaacaatttaaatttttaataatttattttataatttttaaaatataattacttttcatagtaattattttttaataacaaaatcttataaaaattacaagttgcactatttttactttagtccaaatctcacacattattataaaatctatcggtctaagtatttttgtaaatcaatatcta

SEQ ID NO: 223850 - DNA, 1324 bp, Cannabis indica
ggaattctgtgcagggaatgtgatggatttcggcacattcaattcgagtgtgcaaacatttgaaaaagaataaaaaaagtttcaatgtcacttagagtgatgacgaaaattctgagaatattgctctaacttgtgttatgaataatgtgttgtgtgattcacaggtgaaagccagactggtatgtttgaataataccactgaacaagaagaatttgattctaatgattctgaaatctgtgaagagtctcttactaaatcatacacagtcatgtaggaaaaatggatacaagttacttctaaaaatagagtgttgattaaaatgaataaaaaattgtctcatcaaattgaaatttttgagttaaaaataaaagagtatgaggcaaatttttgttttgaagatgaaaaaatcactcttttaaattttaaggaaaatgtttaaatgcttaatcccaaatcttctatttttgaagaagctcagaatgcaggtcaaagaggctttgctggcattgtatcaaatggtattgaaagttctggaatcacgaaatttgtaaaatctagtgttccaacaaactttcttgatgcttcaaatttaaagctggctgcaacagattcaaagcctgtcgctgcagaatttgtttctgctgaagcaaagtctccaggattttcaaaaagagtaagatctcaggtaaaaaaatttgtgcctatttttgatttctgtgataggaagggacatattagacataaatgtttcaccatgcaaaatatgaataaaataaattattttggtaatttagaaaaatctcaaaagaaacaaaaatggattaggaaaaagtgtctagctggtttttctgataaaagtgttgcatcttaaatgtggtatttatagtggttgctctagacatatgacaggtgataaggactttttgattaacatccgtcctatgtagtgtgggaaagtcacttttggcaatggcttagttgaaaaagttgttggaatgggaactctcaattttgaagggttgcccagattgaaaatatgatgttagttgaaggactaagggctaatttacttagtattagtcaaatttctgaccaagggtatattttctcatttgacagtgatcattgttatgtacttaatgatgataatcaatgtattttgcaaggatatcgatccactgataattgttataccctaacccctgtgttcacttgtcattcagccatcaacaacaccacggatttgtggcatgctaaacttggacatattaattataaaaatctaaaaaaaattgtctagtgcaagtattgttcgaggtctac

SEQ ID NO: 223851 - DNA, 1278 bp, Cannabis indica
gagaaactgacaaggagatgactggtttagaaatactaagtggtagagaagaagcaaatggttcagatcaggtggatactcgaggacactcacatttagagatagatgaacaagtaattgaagaagaaagtttaccagttgattcacaagactacctgctggttagagacagagaaagaaggcagattaagccacctgaaaggtttggctttgctgattgcacaacttttgctcttgcatcagcagaagagattgacaccttagtacctacaacatatcaagaggctatcaactcaagaaacaaaaggaaatggcttgctgaaattgatgaagaaatgagttctttacacaagaacaaaacttggaaaactgtaacaagaccaccagggtagaaattaataggctgcaaatggatttttagggaaaaggaaggattgccaggtgaagaaaacagatttaaaactaggcttgtttcaaagggattcaaccaaagagaaggtgttgattttaatgacattttctctccagtagtgagacaaacatctataaggattatgatgactaaagtggccaagtataacttagaaatggatcaaatggatgtgaagacatctttcttacatgggagacttgaagaacagatatacatggaagaaccagatggattcaaaagtaataagccaaaacaggtttgcctattacagaaatctctttatggcctcaaacaagctccaaggcaatggaacttgagatttcatgaatttatgatgagcattggatataactgaagcaactatgatccatgtgtgtactacaacagtgaaccaatctggttactgttgtatgtggatgacatactaataattggagaaaagagacaggctattgacaagttaaaacaaaatctaagtgttgaattcgaaatgaaggaccttggtgaagctaagaggatacttggaattgacatcaaaagaactagacctgaaagactttcattatcacagaagggatacattcagaaactaattgacaagttatgtatgaatgaagccaaatgagttagcactccattggctcagcatttcaagctaactcaaaatcagtcacctaaaacagaggaagaaaagatgtacatggattctatgccctatgcctcttgtgttggaagtctcatgtattgcatggtgtgcactaggcctgacttagcctatgcactcagcatggttagccgattcattgcagaccctggtaagaacattggtctgctgtgaaatggat

SEQ ID NO: 223852 - DNA, 1307 bp, Cannabis indica
acaaaacttgattacttttatatatgtaagtctatagtctataccaataaaacttataggttattttcaatatgtatatggcgtaaaagacgggtctaaatagttttttctagtcttccgtagtgaccaaatttgacgggcggggaccgtactcatgggtacagggtacccactctaaattaggagtgtttacgagttagtttgttctgaacttttatatttcttgaactaaactagcataacgattttttgaatattgaaaactaaacaatactaataaatttttcaaaccaaacgattaagaactgttcggtttaagtgaaatttataattattcataattttaagtaattgtactatttttatttagttttttaattttatttttcaaaatacatatttaacatgataaataatagatctataacctataaataacaatataaaaatattttcaaaagtgaaacataacattagaatctaaaattcatgcaataaaaaactgtacacataaaaaagttcaaaattatatacatatagtcataaataaaatatatataaattaattatttattataatcggtttggtccagtccagtttaaccattaacaatttattacaaaccgcaaccgaaccattatgcggtaaacggttcgaattaaccagacaaagaaaaataatttccctagttacggtctaccgtggttcaaattatcgagctctgaatttaaacttcgattttccaatttcgatgaacagtcctaccctaaattgagcgagaattatccactttaataggtaatagagtgggggtagggtacaattttatatacccaaagcaagttcgaagtgggattagggtgatactaacccatttcatatcgatccaaatatatatagttttttcaattattatgaaataaagtcattgactattctaacaaagttgattaataatcttccttaatttaatgcatgctaaaaactttttaataggtagaatatttgtttattttaaagttaaaattttattttttattttaattttaaattacagtacaatattttcttattatatgggagtgtttcattttcatttcaaagtttttttttttttacataaatttacatagcaattaacgaaacaatttaaattacaacccaaaattacataacgacccacataaaaattaccgaaacaactcaaattttaaaaattaaaaaaaataataataataataaatagggtgattccctttattgttttaatcttattaatgagtacctaattagtcatcatactcaa

SEQ ID NO: 223853 - DNA, 2064 bp, Cannabis indica
ggcataaaacccaacacataattccctctactatgatatactgtgcagccttccttctcatctttcgagcttcatttcgattatctaggagtttcctagtattgaggtaggatgttattggcgtcatctagtttggggaagtatccatcatttcgatctcttccgtgccaataatgctaggctctttgaggaacttgataggaaccaagttcgctttatcacttacattactacttgctagccgagctaacacgtctgcagccgtgttttcttcccttagaatttgtttgagaccgtagcttttgaattgtgcgagcaggtcatgtattttgctcagatatgctatcatcttttctccccgacccttgtattctctagatacgtgatttaccaccagctgtgaatcacttcagattttgatgtgttcgactttcatctcccgagctagttttaggccagcgatcaaagcttcatattcggcctcgttattggatgccttgaatccaaatttgattgcagcgtgcaggtgttgcccccaagtgtgacaagggaaattcctgcaccgaatagttaatttgtagccgacttgttcacatgtagtttccaagtcagcttgtcttcactgttacttggctgaggtatttgtactggctcaggcttgccttccgatatgcgttcttctttgcctatgcattctacaacaaagtctgctaaggcatggcctttgattgttgttcagggttggaaagtaatttcatactgacccagctccacaacccacttgagcaaccgtctagaagcgtccgacttttgcaatatttggcgtaacggttggtcagtgtacacccgaacaagatgagcttgaaaatagggccttaattttcttattgctagaatcaggtagtaagtgagtttctctatcaatgggtaccgactttcgaccttaatgagtcttttactaatgtaatagaccgggtgtcatatgtttcttcctctctgattagcacggaactcacagcatgctccgtgacagctaagtatattcaaagttcttctatgtccaaaggtttcaaaactacgggaggctttgcgagttgcattcttagctcgtgaaaagctttttcacattcctctgtccactcaaattgcttattttctcgcaagatgttgaagaatggagcacacttgtctgttaattttgaaacaaatatactgagtgcggcaatccgacgagtcaaactttgtacttccttggttcttgtcggcgattttatatccaggagggcttgaatcttctctggattggcttcaattcctcgggcattgacaataaatcccaaaaactttcccgagctaactccaaaggagcactttaagggatttagtttaatgttgtaattcttgaggattttgaagcattcgtctaggtcatctatatgtcgccagccttactggatttgacgagcatgtcatccacatatacatccatgtttctcccgatctggtctttaaacatcttgtttaccaatctttggtatgtggctccagcgtttttgagaccaaatgacatgactttgtagcaaaatagacccatctatgttcagaaacttgtatgttcttggttcggtggatgcgttttgatttgattgtaccctgaatacgcgtccatgaagcttaatatttcgtgctcagctgttgcgtccacaggctgatcgattcttggaagtggaaaaaagtctttggggcatgccttcttgaggtctgtgaagtcaatacaaactcaccattttttgtttggctcgggtaccagtacaggattggcaacccaagccgggtagaaagcttcaattatgaagttgttatttcatagcttctctacctcttccttcaaggctaaagctcgctctttgtctaacagccttcgcttttgttgaactggtcagaatttgggatcaatatttaggacgtgcaaaattacaaaatgatcaattccaaccatatcctcctgtgactaggcaaaaaaatccaggtttcctctcagaaatttaatcaatgctgatttta

SEQ ID NO: 223854 - DNA, 1288 bp, Cannabis indica
tcagttttgatggtacaaagggacgacgagcccatggtgacagaacaagattggtccccgtgtgggatccgaaacaactatagaatttggaggacatcgaggaagtaagtatgcgacctcgactccactaaaattatctgcctaggaaaaaacctagaaccagaggaaagaagcaatatcatagatgtctcctctagtcctgtaggcatagctttgggatgcacgtggattccagctatctccatggccttttacatggaactatatttcttgatccttctattttgttctttttgggcgaccagtttggcctggtgatcagctgttttttaccttaagactagtaactcggtgtagctaccgtcgtcataagcatcgcaccctttaggattttcttcgtattcctcgtcgtttgattcatctcgttcctcagagcccacatttactcgtgaggccgcctcttcgccctctaggttttgaggatcatgggagggacgaggttggcgtgtgtggtttcgagtttccaccattgcagcttagattttttattgtcattttttgaacaacccttccaacagctctcaatgaaagcaccaaaatattgaccgaggttttcggcaacaaattaaataagataataatgagagctttagggtaattaatgcaggtgatttttacgtggttcagacattaatgagccatagtccacgagtctcttgtattaatgagagtattccttacaaaaaatgttctttagtgtgtcttttctctctcttttttccaatcccattcttcattttctcaggggtatttatagagaatggtgggaatgatcaaaaaggagtaatttttctttgggagccaactatggataggcacaagttctcaaaagatacaaaatagggcatgcactgcctacgtagtaagcagagtagatgttaggtgagaatagcctccatcctttcttgattgatgtgaatcttcataatggagccgtcactagcccatttgattatcgtgtaatcgccctaaatcaagcttacgatatttgacacatcctcttatgggcgttcccagacgttttctacatgctccattaaatgcaaaatgactgttcaagtagagccctcctgacccggaggtgccttcctatatcttgactctcagaagggaaggtgagctttttgaactcgtccgagagctgacgacatgaaccgtacttgttgctctttcaattcaacttttaacttgtctacgggtgacgtgtctattttgtccacatgtcata

SEQ ID NO: 223855 - DNA, 1285 bp, Cannabis indica
taaatgtataattatattatactatccttatttgtgttagagaaatttatataataaaccaaaaattttaaaaaaaattataaaaatatgtctaacacgatatttttttttacttttacgtttagaattttttttatttacaataatacctcttcaataaaaataataaaccattttttagttgttttatagtttatttatagttgtatgatagtgtcataaagttatttttgattgtattatgttttatttacagttaatttatagttatcttgaagttaatttttcgttgttttagttgttttctgactttttttttttaacaaagtgtatttttgtaattttaaatttaacaagtgtatttttgtaaataataactttaggtcataaacttttaaataaaacataaaagatggtatttttaaaattcccaattgtattatatttaagggtcccatatttaatttaatatataagtttgacatatcttaatgtaaatgtacataaattaatgtattaaaagttaaaaaaaattataatactcttaaattagtattagtggatacacatttatttctttcagaaattaattacaagaaaatatgggtagtattaaattaagtcttttaacaccttaattaaatcaccatacatattttatttttaggattattagttgatttatatatatttttagagtaatgtattaaatatttatcaaaacaaaaacacacattcttatattggtctcctgaaatttaattttagcttttttcctgttcggaattttttttacacatcgattgattaattggacacatctgtatatgatgagcattgttattagacataagtacgctataaaatgttgttttatagatagttagcagtggtgtttataaccattatgagatgatattttactaataattagtataaaaaattattacattaaattatttagaacttgatacttaattacatcaacaacaataaaacataccttaagtggtgctagacacaatgctaccttttagcatttctagatatgcaatagttctaaaattacaattttggtcttaacgggagtaataaggatctaaaggttaggtgaaattaaagagcactcaagatggaatttctggccataattaacacaatatggtaatcaaggcatgcaggcaaaaaagatagatgtgcctgcctaccatccaattaataatccatggcttctaaaactttttgggtagctttaaattttgaaatcaaaacaaaatattatttc

SEQ ID NO: 223856 - DNA, 3500 bp, Cannabis indica
agacccagacttggacctcacccgaaagagaactccaaccctaaccccaaactcagaactaaacctcgactctgaccacaaatttattggatatattttactaggatcatgaattaattactaacatgtatgttggattataattctataatctaacaatctaaagatgaatttcctaaaaacaatcaattaaacacataaaggtatagaaaaccttacattgatggcagcagaataatatcattccattcaaatctctaatccttgattatttctattgcgaagtatgatcaatatctgaaccttaattctccttctgatgacaattagactacatagtcttcctcactatgcttagtattgctttgatatgtggacaacttctgaacaccaatgagcatgaatttttgtgtagaaaactcatgagaatttcgaaattctaagtagaaaaataattgtcttttgtttgattcagtttgtcagaagacggagtctaaaagtgttgtaatgaatcaaaagccattatgttctatttatagagattcattaggtatagggttagaactaaatgagctaattcaaaagatccaatgacttaaataaatcactcatagccgaactccctataaggcccatgagtttaatttttgccatgattttgcttcattaatgaaataaaattatctctcttcagtaatgtcatttttctgttctagttataagtactaattctatctatttaataatgataattaattatcaaataaaattaccatttaaatatatttactaattagacctttcaaggtctcataattaataaacaaaccatgaattctcttttcttctcaattatgatattccttagtaaaattcataaagaagacatagtaaatatttagaatcctaaatgattaaataaatcaattaattgagactacaaaataatattatcttagttagtgtgggactatgtgcctatgtaatgaagctcccaataagtagttttagaatttaccctgtgaattatcgatcttattaattcctcctgaatccactatagatttagaattgcactcttaattacataaaacactctattcaccaagaatagatacgctataaattatctattatttcaatctaaacaatcaaagatcctttgtagatgacatacatatagtagggacaaaattaccattttacccttgaatgtattttatctttaaaatatttagattcttataaaagatatctcagtaaataaatataattattaaaataagagctctttccatttatgcctataatcccagctctaaggaaactgtcaattaacttctaaatagtaatagaacttatagattccatatctataattagcgctctcactcaattgtactactgtgttaccaaaatgtaagtattgggccgatccaaatggcgagtgttaatccagaaacttttcatggtgacatggacatcaatgtttaacatttggcatgaaggatgatgtcacaaagttgagtagacttgaactgtagcaataaacttgagagggaaccctagcgctgcacctaggtggacttcaggatattcgagatagaactttgaacttcaataacttgaatccaactcactatcttttagtattttatatcatgaggacatggagcaacctaatccaagccctaagagttaaaattacacgaacctacaacctggaagccatcctgggcacctagggtttggctcgacgcctaggttgacaagtccaactagcgtttcagtttcctagatcttcttagtaaaaatgggttaaaatatgcatttggatatcaactagacatacaatagaaatgtttgacgcatcagaatttgaattggaggaagttcatttttgagcgcccgaggccccagacccgagcacctagcgcccaagttgacaatctatcaatctgggtaccttccaagtatcagatcagagatctaacttttgcaacttcttcatcttgatgaaaatggggaaataggtcctttcggagaagaaacaacactcttgggtgccaaaactaaagcccagctcctaggttgataattcgtgaacttgggccatttttgatggtattttcaaagatttctttcgagcatcttctccaaaaataaaaaatattgagattcaactatttctagggaccaaatagaattttcagaggggcataactaggacctagctggcaggttgacatattgtcaacctagactgtttccgatcaagtttgccaaaaaatgttctaggaatttctctatcatcaaaaataatgaagattcaagcaaacttggggagaaaaccacaagcccaagccccaagaaattgggcccagcacccaagttcacaatcaacttgggatgctatcttcaattgcttaaatgtcaaatctgatacgaccattgaatctagaatggttagaaatggggtaggagacctcgtcctcaaatttaaaagccttagaataatcaaaaacaagatccagggagctcgggattaagtaccgagtgcctaggctgaccaaaggattggttcgctgggttctgcttatccgattttgatgccgtttcgaccataaatctagtttttcataataacaaagatccataaagttagagaagtcaaattcacagctttgcatttctcatttccaactctttcaaaaaataagagtttcgagtctctcatttctacagaacagcaacatctctgagactagtgactagcctcgctaaaacacaaaaatatgctaagtgatgtcaaaataatacttagaaaccgtaaagtacatcccttggaagtttatacacttacccaacatcaaggctcacatcatatgtcaacctcggtgctaggatgtcaacttgggcgctggatgtcaacctaggcgctaggtcatgaactgccttcagtaaaacaacaataactcactcaatttttattagattgacgcgattcaaaatgtattttgaagctaattcaatgctctatcatgtaatttttgaaacttcaatcgtaattctcattttatcgtcatcaaatcttacgcccaagagagttacaaaaataagctctgggttacctgcagcaaaacctatcgggctcaaaaatatggccatcaccaccatcaactaatttttaccgttagattatcatatacggtcagaaatatccaattttaatgtttcctattttttaggcctccttcacctataaaaaagagagctccataagctcattttttaagcttaaaaaactacccacaaggccagagcttctctctccagaaattggagcttttgacactttctgtctctcttatgattacttgattacttttttattcttgcaatctagcaagcgagtgtggcttagaagtctagtccaaatttgttagtcaacatttttatgctttcattgagaggcataactaaagaaagttattagtaag

SEQ ID NO: 223857 - DNA, 1808 bp, Cannabis indica
tggtaaaacatattccaacagccctttgcccagcaactgaccccgctcctctgccaggcttcctagtaccctggcctgcaagttgtatcacatgctgcccagctggtgcggcagaaggggaggaagtggcaacccgacaacatctcctccatgagaagtcctggccaccttggccttcactcatcctgtgggctcatctgaaggtcccccagtaagacctctcatcccggaagacatatatgcaaaaagaaaatagcaaagtcagaaaccaatcataaacattcaatataagacaaaagcatggtgttatcaactatcaactaccttgcccttgcctctagatgcaggcacggggcaagtaggtctctcaaaagcttggtctttgggcctgatatggagagaagcatcattaactggacccccgctggccaggcgccggcagagggccctctccttcctctccagatcatgttcaatgcgagataaaaggtacctcatcatccaagtcacgagcatgcccatctctaaggcaagccccatctacagctggtgctcctacaactccgggagcaagaggatatacgccatacttccagaattgaccacactggtcaactggattatatttctctactctgccgagagagacaggatgtggtttgccctatcccttattcgcaaagtagggatagagcgtctgaagaatggcatcgaccgaaattcatagtgcccgatcctacggaggccataggcgatacaatacttcttggcatacccaacgaccttcgacatggctgtgcaattagtgtcacccaaccattggtgaccgatatgattgagatcaaaatacccagtcctgttctgcttcagctcagacttcagatcaaagtagtattcgatcttgtagcgagtaggttgaggccaacctagctccctatataagataaacatcaccgaaagatacttgacgctttttggcatgagctgtgtcgaacacattccaaagtaagcagtgatgtccaaaaaatactgatgtagcggtagcactgccccatgttcaatatggcattcagaccacgtcaaccaacctagagggagccggtgcgcccgataatttctacggggagtctcacagtggacacccttcactaagccactagcaagaatattgctaaaggcctcatcgaaaagagtagaagcaggagagacccatttgtctccctgtgatctcgcatctagtatctccagctcagaagactgctctaggacataggggtgtacataaacttttataaactgtccaaagcaaataaccctcccaaacaaaaccaagataacccaacaaaaaatacaaactaaaaaacttgacgagaatataacccgcccaatctttatattgggcaggttgaaaataataccaatccgcccaatcaaccagaactaactcgaccaacccgattaagagggtttttttatatatatttataagtttttattatatatatatttatatatcatataatttatatgactatttaaaaaatataaaattaaaattaataaatttttttattgtggttgatttgaattttaaattaaatttatatatatgtctcattattacaatcaactaaaatataacaattaaatgtaaaaattcaaaaaaaatattagtggtcggtttggatgggttaactcgaccaaactgaccaatttcattaggtgggttactgttttcttttttcttaattgggcggattgcacttagatttttgtaacttgatatttacattgggttgaataaaatg

SEQ ID NO: 223858 - DNA, 2230 bp, Cannabis indica
tacctagaaacagcagctgctatgtggactgccttgaacaatcgatttaatcaaggaaatggccctcggatcttcgaattaaatgaatctttaatctaccttcatcagggagatgactcagtcagcacttacttcaccaaattgactgcaatttaggacgaaatcaaccagctacgtccaagaacaacctgcacttgtgctgctgcagcccaacatcaactccaaatcgacaatgaccaggttcttcaattccttactggtttaaatgaatcataccatgctgttagagcccaaatattaatgtatgatccctggccacccttaaacaaagttttttccatgatcgtgcatcaagaaagacaacgcacactaggtactcgaaacaatgtctctgttgctgctgcaactttcacatccgctgcaacctctgatgcagcagcaaatcttgcatccaaaggcaaaaagatgcgccctatgtgttctcattgtcaaaaacctgggcacttcaaggacaagtgctactttctccatggattcccaccaggatatggcaatcgaagaccacctgatgcctctaatcgcaaatctgataaatcccaggcacagaaacaaacaccagtagcttctcaagtctctggatctacctctgaaatcaccacatcacagcttacaactgatcaatgtcaacaactaatctcaatgttggcacaacaacttccatcagctgcttctacttccagtgacacccctgctgtcaccaatttctctggtaaaaattctgatttcccctataatttttggattatagatagtggagcaacccaccatgtttgctatgatagccgatgctttcaatcatttcacacacaccaacacaacaatttcgtgacattacctgatggcacacctattaaaattgcaaaaataggtactgttgtaattaacagtgacataacactcaccaatgttctctatgtgcctcagttcagatttaatttgctatcagtgagtgctcttttaaatatttgctcctctaatatgtcttttactactgataaatgctttattcaggggcattctccgacattgaggattgggattgctaacaaaatcaaaaacctatactacatacaacaagaagcatgctctcgggaacaaccctttactttctgcaatgtttcatgtaataaaaaccattggcattctcgccttggacacccttctgtattggttaccaataaaatcaataaaatgttccatttacctaatcattcttctcatcttcattgtcaaacttgtcattatgcaaaacaaaaaaagcttccatttatttctcaaaataatatggctgccaacatttttgatctaatccacatggatatttggggaccttttccccttaattccattgaaggatatagatatttttttgacaattgtagatgataaatcaaggtatacttggacatatatgctcaaagcaaaatctgatgcaccatcaatgattcataactttttttctctaatcaatacacaatttcaaaccagcatcaaagctgtgagatcagataatgctaaggaattaaccttaacaaatttcttcaacaccaaaggtgttattcaatatcattcctgtgttggtaggcctcaacaaaactctgttgttgaacgcaaacaccaacacattttaaatattgctcgggctctagcatttcaatccaatatccctctaatatattggagctatatggtacgcactgctacctatctaataaatcgaacaccatccatgttacttaaaggagttacttcatatgaaatccttcacaccaaatcaccaaagtatgatcatcttcgaaactttggttgcctatcatatgcttccaacatcaatcatgaccataaattttcccctcgatccaaagcttgcatatttattgggtaccccgaaaatatgaaagcttacaccttacttgacatacacaccaatcggatattccattgtcgagatgttatcttccatgaacacatatatcctttccataacaatagtccaaataatgatatcactcggtctttcttcacaaacagttccaatattgcacctgacattgcaacatttcaccctagcagaaaaccaatgtggttccagccaccaacaaaagctgttccacgcaaaaaatcatgcgcgtccagcacaaacaatgctgctctacagacaaagctgcaa

SEQ ID NO: 223859 - DNA, 1014 bp, Cannabis indica
caccatagaaatacgaacccttgagtgatagagtgagtgcccactacaagtggaaggagacattaaatttcgctgcaaccactgttaggtttgtcatactttatatgtgtttattttatatcgttttagaagttcatatttaggatgtttaaacaacatacttgttagtaaatctaagatcctggtaaaataattccaacaatactctgctatagaaaggatacaagggttagagatctgagtggaaggggccatttaaatcagctgcaaccactgtaaggtttctcataccttgtatgtgtttattttatattgttttagaagttcatgtttaggatgttaaaaacatacttgttagtaaatctagattctggtaaaatatatattccaacacttgagtattggagtacaaatgagttgaaacacaacttaaatgtgatgcatgtggaaaagaatgtttgtgatagtatccttggcaccctattagataatcacaagtctaaagacaccactagtgcaagacaagatttgaaaaatatgggagtttgtcaatccttatggatttacgaagatgcccagaaaaggttgttgaaaccccttgcaccttatgtgttgactgttgaagataagcaagggttttgtaaattcctaaaggaagttaaattgccagataggttttgttcgaatttgaagaaaaaagtaactaataacaatattgttggattgaaatcccatgactgtcatgtcataatgcaaaggttacttccagtttgtatcagcaagtttttgtcaaaggaagtataaaacaccataatagaattgtgtaatttttttagaattttatgaattaatttcattgcaattcgcttacaatttttatttattagcaaaacatagggtcgcattgataattggaaagcttgtcacacaagaacggcacaaacgagtttattagtgagcatgccaaagaaaaaatatgtaagattatgtaaactaattacttttgaatatatt

SEQ ID NO: 223860 - DNA, 4927 bp, Cannabis indica
tatgtgaatttttaatatcttgtttggcaaaatagttagtaattacatgggaaaataatattttttagtagctaatgtataatatggaaagtttttagtaattacacagttaattacattcaattctcatgggggaccatgagaattggagagtgtaattggaacccctcaattactttcaattacacagttacagtgtaattacatggttagacaaacatgttgaattgtgtaattatcttcaattacacacaaatccaatttcatcgtggttttccaaacgcacccttactaatttagttacgaatacacagtgggaataatgactccaaagagagtagctagattagggtagatttttttttttttttttttgttgaaaattacttgtcacaaagcacttatttttcaattcatacatcacttaatatatataggcaatagctaggtcataaaataggtttgacttacccattttattttaaactatttagtaaataaattaaaaggaaattaaaaccatataaatgtgttcacacataagtggtatatagtatataccaattatatgagccaactttaaatttcaaaaatagtttccaaatttgttttaaaaacaaattattatttatttattaaaataattgtaatcaattaaatgtttgtcaaaaactaaccaattataattttgacctttttttttaaaaataaaagtcatcattttatcaaacgaatatctctgttaccaaattaggtaacaactcaactagaacagtgtccaagttgaacagtcgattaggatgggatatagaggccctcgcaaaggaatgagctgctacatttactgatcattttacaaaatgaaaagaaacattacgcaaagtacttaacaaattcttacaatcacttacaactttgccaaataaaagaaatcataaccatagagctacgaacagcttgaacaattgaaagacaatccgtttctaaagtcacattaagcaatgaatgatctttaatccaactcaatgcctcccagactccaattacttcagccaccacaggagaaatcgagccatgaaataactttgtactgccttcaacaaagaaactattggaatctcttgccacaaaaccaactccataggtagaggaatcattaaacacagccgcatcgataaccttaatactactaccactcggagcactccattgctcagccccatcccccggaatgaactcagtgaacaacaactcattgttagaattttgagcaacacgccattgattaaggtagtttgttgcagatgcaacgatgccttcgatccccatgactttatcttgccaaactttatcattcctagcattccaaattgcacagcacaaagccaccagcaagtttgcactattcagatcaagcatttcaaattgattcatgcacaagccaaaaaagagatctcctgttgcaataccgtgccaatacccacccgatcccacacagctgctgcaactgggcaaaataaaagtgcatgttcaatggtttccagagccatattacagaccggataggtggaattcacatgcactcttttttattggagctggatcattgttgagagacatctttccgatgcacgccataacatatttttcattttcggtggggtttttagcttccacagcttcctccaaaacctgtcttcggctaaaacatccaacccaaactcaccattaagttgatgcagaagcttatatgcactcttcattgaatataacccagaaagatcaagcgaccaatttaaagtatccatggttggtcgagatagaacagggatggactgcaccaacaatctatcacgaggcagcagcaaatcattaagaatgtcttcctcccagctcgaaccgtcgatcttcatcaagttgcaaactttggcattggttaagctcgggtgagaagagataatcaaaggattctcaacatccggaagccaaggttcacctagaatggatatactttttctatctccaacaacccatcgggtccccttctttaccaaggattgagcttccaagatactcctccacacaaaacttggattaggaccaattgtcgcagttaagaacgaaccatggggaaatatctagccttaaacaccttcaccatgagcgacttcggactaaccaaaagctgctatccttgcttatccaaaagggcaagattaaaatcacgaaggtttctaaaacccatgcctcccttatctttgtgcccacaaagccgcttctaagacatccaatgtatgcctgaggatgaattattagacgatttccaccaatacttagccatcatactctccatatctctaacaatctcaagaggaagcaaaaaaacactcataagataattaggaagagcttgtgccacagttttaataagaatctccttactctcccgggagaggaactttgagccccaagattgaagctgctttctcaacttttctttcaaataactcaaggctgccattttgttcgacccattgaacttggaagacctagatacatacttccctctagagcaataggcacacccaacaactccacaatcctctccttattatcatccgtagtattggcactaaaaaagattgatgaatttgcaaaattaactctctgacccgaagccaattcaaacttttgaagtacttctttgattcggtgtgcttcctcataagtagctttacaattcaggtagttgtcatctgcgaagagcatatgtgagatacgaggggccccgttagctactttgcatccatgcaaccaaccccgattctcatactttcgaaggaaggccgagaaaccttccgcacacaggatgaacaaatatggggacaagggatccccctgacaaatgcctccggttgggagaataggacctatctcatgagcaccatgaataaccctgtaacttgccgaagacacacagttgagaatcagttgaacccaatgattagcaaaacccagcttcctcaacatcgcttctaaaaaaatccaatccacacggtcataggctttgctcatgtctagtttaagggtcatgtaaccatctttgccttttcgtttcctccttaaatagtgcaagatttcgaaagaaaccagaatattatcagagattaaatgaccagggataaaggctctttgattagctgagatgattgtatctatgaagggcttcattctattaaccatgaccttagtaatgatcttttataggacactacataaagctataggtctaagatccctcattctttctttttctttttggggatcaaaacaatattagcctcaccacaaccgttttcaaatgtaccattctcaaaaaactttcgaacacaggcaataacatcgctcccaactatatctagcacttttggtaaaaagtcagtgtcatcccatctgggcctggactcttatctgggtgcatttagaacagagctttcttcacttcctcaacgtaagtggctgacacaactctagattaacgtggtcaggcaccatcggctccacacaatccacaacttctcgacaagaagcacccgaagtctgaaacacttcctgaaagtagctaaaaaccacgtctgacaaccccgaatcccaagaaacccaattatcatttgcattacgcagttggattatcttattataattttgacctttatttaattcattttattaaaaattttgttatttcttttctcaatgtgatatctttatgacatttttataattaataattaaattaattatttaaggctactgggtttacttttataagagatgacatgggaaccatgaattcatgaactcaagttccaataagttacagtgattttatttcaaacaaataatctcactagtttattaattcttcgtgactccactatagactcgacattgcactcttaatttcatagaacgttttacgccaagtataaataagttatcaattgttataactattcctgtcattcaatcatctatagatgatatactaatgaggtgggtacaaattatcgttttaccccttcttagtattttatccttaactcccactaagttctttataaatgatatttctacaaacttaattatagaaatgggtactctatcatttaacacttgaacctagctataaggaaatcaatgtttcacctcttaaacaaaagtttaaaagctatagattttatgtttatgataaatactctcactcggttatactactaaatctccaatgtgtaagtatggactagtccgtaggataagtcgaaaatgaacaaatcaaaagacttaataatataattagtagaatatatttatcactcggaataaagatcaaattgacctatgatctatgatatgattacataatatacaataacgataattaattatcttatcaataattaatttcagtccaatataacaaaatgtattcgatcatatctacttggtcagtccaataggacatcacactagatgtgtaggtagatcatattgtagataactgaatcagcaaagatttagtgtgttgatttaatcttaagataaaagtattttacacataattataattataattcactgtgattgtaatactatccttgtaacttattatgtgttcaagattttgtaaatgtttgtgttaatagcaattaattatgtaataaagcatgtaaacaatgcaattgacagaccaaaaataatttttacttttttattgataaataaataaattacatagttataaaataatataaagtagatgagaagaaagaagtagaagatgaagagagaaagagaaagtgaatgaatatttctgagttgtttattccaatggggtgaacccctatttatacaaatacaagagtga

SEQ ID NO: 223861 - DNA, 1802 bp, Cannabis indica
atttatgtaatattttatttaccatccttaacattacagattatgataatcaggttatatccattaatataattttttttgttgaaatattatcaatttgatctcaattgtgttttactttaatattagttaataatgtcttagttttgttattccacatgaagttagcggtgttattgagcactagaacatataaatattatagtttcacactttgtttatttatttgttttcaaaattgtttatgttttttctaggtgttgcagaaaatttttattgtatatgtatatatttcttgtttagttcttttatcatcttttcttacatgtttattctttcttatttttctctaacacactttgttagaactttttacaaagtcaatgaatttttgacaaaataagggtttcctagtgtgtatgaaaaagaatgagtctcacatgggatatgagcccttgtttacaagggtatataaggtgcaactttggcacttgggatagtgccccaaggggtactcagttttgtgtaaatgggtgaggacacacacacttgacctaccacacgagcgcgtcgttcgttcaagctgagctggttgatgtggtgtgaccctttatttttacagaaaaattatttaataaaataattatttttgttttttattatttaatttatttgagaaacatgtttaattgaaattaatcacttagtcgtattatctcaagggacgcgttcaacaactactccccacgattcagaaaatattcttcttcctgttgtaatttttcattctattggtctatataatttgattgaatcaacgaaagaaacacatctttacacaccgagaaaagaaactcaatttcactaccaaaaattccacctgtgatatctatttcgaggtgtatttggcggtttactacaatgcagtggtgttctgatacagtgtacaacaactagacttttctatcttagggacgaccggtaatttttgactgcttacacattcttggacagttgacacaaacgtcttaaagagagtgacctagtgcgcgactcaactaaaaaatttccttcggtaatatcgttcctattttgttttcagtagcaatttactcaataattttaagacgtttgatttgctatgactgctaccaatgatttttttagttctattgctgacattaataagtctttttattttaaggatttgcattttaaatgttggagatgttattttttctagctatgaaaaaagttgtgtttgtgctgactgttttaaaaccagttgtgtatgagactccaccacatgccgagaagaaggatgaagttaagtacgaatcgcaggttaaggaaaggaactcttgggtagagaatgattttttgtgtaagaattttattttgaatggtatgtctgatgatttttatgattattataattctgacaaatttgtcaagaaaatatgggaagcattacaaaaaaaaatgataccgaggaggtaggaacaaagaaatacgctgcgagctgctacttgaagttttaaatgaccgatgataaattagtcgaagcctagtctcacgagctttagataatagctagcaaaattttgtctgaaggtatagctattgatgaacaatttcaagttgttatgattcataaattactctctttgtggaaagattttaaaaatactctcaagcacaaaacaaaagagtttttattggaaattctgatcactcatctttgaattgaggaggaagcttgaaaataggaccaaaagaaagaggtgcttgttgttggaaac

SEQ ID NO: 223862 - DNA, 2392 bp, Cannabis indica
atcatcaaaataagtgagtgattaacttttggtcaacatctatctcatggattagctcaatcatgtgcattacatgagatcaaacatggacactcttcttcatcttacaattcatgtagctatgagtagcatcatgtcttgtttgattagacttctgcccaaacatggcctatagaaaattcattatttgagatgcaatctccatatgcgtcttacgtagaatatcgtccatgcttagaagcatgaaatatttggccttgttgtttaattgaatccaagcatctgttctgaatatatttcgaggcattggcagcgggctcctcagttaggacaaatttgtgattctcacaaaccatcattaaatttagatttgatttccatttataaaagttatcaccattaagttcttcaagtgctagtaaagtagtgaggggattttgcatagtagacatgattgaaataaataaagtaacataattactaagcatgaattataaatatcattttggaattactgtaaatgtgatgcatgagctcatacaagtaaaacacataaaatcttgtttaaggtattcaacgataaaactatttgacaattgatcgccgccgggtcggtatcgagtcaatttcattgagcatgtgagaaaattctcatatttattatttaaaaatttaaatatatcatatttccttttcaaaatataaagtaccgctttttgaccaagttagacaactaacactatgaagcttagttgcactttgtgagtgtaacccattatttcagatttcatcacttaacttagtgtgtcgccttaagggttgacgtcacactaaaatacatcactttctcttatcttagtcaagggatcaaccttgggcaacagtatagagacataccttccttagggggacaaaaacaaagcaatctcgaagccagtctatactccctcagtgttgaccaataatggaggtcgtaggttacattgacatgtactcgttctcccactcactatttttggttaatgtatttgttttattaattcccagaattaatacatattaaccactttaataattatgattaatttatttataataatgcctcaaattataaataaatttcccgtcataatcattaaatctgaattaactctttaattcattatttgaaacaatttttaatcaataggttaatttttaattaccaagtaaattctaaattaatcttagccagtttacatgctttggtttcaaaaactataaacataaacacataggacaatcgtaatatatcatgtttctaatatgagatgcatgataacaaaaaactgtgtaggatttctatgtatggcatgttgttcactaatgcatgagcatgttattaatcaactattaattaacatttatttgaaagcaataaaaaaaaatgatgatggattgagtatttctaattttacaacctttgaaattagaagataaattacaaaactaatctttactggtgtaggtgtatttttgtaattttgtggaatcttcgtagttcgtaagcctaaaaattaattaaaaaaatgtaattgattattattaaattaactattcatttaatataccattttgctatcccaaattttatccacctgatgtggtatgtccacgtaggccaaacacagagtatatgtggaatacaaccttgccaataacaagacagggtatccataaaaggtaatggcaaagtcgtcaagcaacaaccgaaaggagtgaagcgagccatcaaggagttgtaccaacatgtctagtcagccaagagaagcctataggccgaccagagtgaggttgtgtggttggccaggatctgggcataagctggccagccaaaaagtgacttctaaccaagggagtttcgtttgaccaagggaacctaacctctacaagggaaagttgtacaaagatgtcctccactttccaaaggttgccgtccacatccaaaggctggcctcctcttggtaaagctaacaggaatatgacgtgcaggatcctagcaggcacatgaccttccaagtcctagtaagagcatggccgaccataccatatcctgtagtgtatggccagccaagaatgacctggtagaattctctgtaaagtctgatacatggattgcaagctacctgcaaattgggcccttatcggcctaacaaactggattgaaatatctactttcaaggggcaatttagcctattgtatttaatcaatttattatgtaaatatcaatttaatttttcaattagggtttaggctctcctatataaaggccttaactctaacctagaaaactaaatctaattctaacctccaaatcactctaaacctttatctctcttctctctctctctc

SEQ ID NO: 223863 - DNA, 3026 bp, Cannabis indica
aacatttgacctcaaggtaaatttggataatcattttgttattattgagaagaaacaaaagcaaaaacaaagcagtaatgtcacaattaaggagattgaggaatgccgacatgagtcatcatgcactaatcgccaggattttcagattggggctatggagacttgcccggaaaagtctccaaggacgccatgaaaatcatagcttggaattgtcgtggtctcgggaataccgcgacagttcgacaattggcgcaacttgtgcgctatcataaacccaatgtgctagttctctctgaaatccgtatgcctcttgacaagtttaatcgagtttgctctaagcttcacttctttgattcacactatgtgccccctgtaaggctatcggggggattagccatgtgttggttgaaaggggttagttgcaacattcaagcctactctaagtactgcatcattggtgagattttatcggaccctccgagaattccctggatcttaatgggcacctacggacctcccaatagtgtggagaaggagttattttggcaaaagatgggagactacacgctcaacacaacacacccggttctcctcttaggagacatgaatggatccttaagggacaatgaatgttttcactaccatggaaatacttcaagatattcatttgatttcagacgcatggttgatagagttggtctgattgacttgggattccaaggcccggttttcacttgggtgaaagggggcaatgacccgagaagaggaggaagtatgaaaagagctagacttgatcgagggcttgcctcaacggattggagaatcttattcccgcaagcggtcataaaccatcttggggcctctgaatcggaccacaggccgttgttacttgatactatgggaggggctagatgcactagacgtcagtttaaatatgaaaatatgtgggcgcgtgatcctcggtgcttttgggtagtaaaggaagcttggaaatctaggatgcatgacaaccctatgaataacttccacatgaaggggaaagccacgggtagaaagcttcagagatggaacaaatcgcagttcaagcacttatctcagcaaattgacaaggcaaagtcccaactccaagaggcagaaatgaagaacccaatcaatatggaggaaattaataaagctaaacaactcctgtcggaatctctacttcgggaagaaatccattggaaacaaaaatctagagtccaatggctaaaggagggggacatgtgttctaagttctttatggcttcgactatagtgcggcgtagaaggaattatgtccaatgtatcaaagctactccggatggcgattggatccgtgaccaagaccaaattgcccaatgcttcctcaaccggtttatagagattttcaagaaggacaaccaaaaccccgcccctttatgcccagatctttttcagaaaattctatcggatcacgataatggcttcctcaatgaggtaccgaatgaggatgaagtgaggagagctattaatactatgggaaaggataaggccccgggccccgatggcttccctccaagcttctacatccatcattgggaaacagtacatgaagatctcactgagatggtaattcactttttcacacacttggagcttccgaatttcattaacgacacttcactagtcttagtcccaaaaaaggactccccagccacggtcaacgacttccggcccatcgctttatgcaatgtggcctacaaaataatttccaagatcatcgcctctagactgagatatatcctccctagaattatatctccaaaccaagcggcgtttgttcaaggaaggcacattgtgaaaacacaatgattgcaagagaagtggtccactctatgaacaagaggaggggaaagaggggatgcatgcttctgaaactagacttggaaaaggcctatgacaaacttcattggattttatcatctccgtactccatcagatcggatttggtagtcctttcactgactgggtcaaggcatgtatttctatagccgatatcaaattgctactgaatggttctatcgttggaaaatttaatccggagagaggtctccgacaaggggatccgttatcaccatctctttacataatggcagctgaagccctttctcgtcttctcattcggaaggaaaatgaaggtggtctcaaaggatttaaactgtccagaaatggaactccgataacccatctaatgttcgctgacgacatcattttgtttggtgaggctaccattcgagaggccagatcattcctacactgccttacggattactgcaatagctcgggtcaaaaaattaacttcctcaagtcctctgtttacttttccaaaggagtgtcgggtagaaaagctcaacaaattgcagagactttgggtgtaaaaaggatgaatagatcggcctcatacttggggctgcctctttttcgttctctcaaaaggacagaagacaccaatcatttggtagaccgagtgctgagaagaatacaaggatggaaagtcaagctcctatcaaatgctggtaagacctgtttaatcaagacagttggttcaagtttggctaactatgtagcttcatcagacgtcatcccagcaaccactgctaataagattgacaagctatttcgagacttttggtggggcgacacagaagacaaaagaaagctccacacgatagcttgggagcgcctttgcaagccaaaaattaatgggggtttgggctttcgaaccacgaagattatgaacaaagcgttccttatgaagtgggcttggaaagtgctaatcaatgatgactccctgtggcgccaactcatgaacgacaaatacatcaagaactcgaacttcttcgatttggagaggaaaccgtcagatacaacactttggaaggccatcctcaatattcaggacaaatttcaaaagggaatttgcaggacaattggaaatggaaaggaaacttcgatttggtttgatcctt

SEQ ID NO: 223864 - DNA, 933 bp, Cannabis indica
agatcgtctgtaatcatatacttaacttctcctctcataatctgagtcacagatgatgacaatgataatgatctcacaaaatttaagactttattcgttaatctctcacaattagtttgcggtcctcaattacatgcttgttatgacaagtagtagcataagtgtatgagataaagaagcaaaatatttactactacaagtagaactatttcgcaagaatagtgacagaattagagtttttaaaacataatttatgtaaacaattagataaattaggttagagaaaacttaaagtgctacatcatgacttcttttgtcttctagtttatataaatacatatagagttagtgtcaattaatttatttttattttaaaaaattattggcttataaagtatatatgggattaaacaagcaacaaaacatgtttgtttatgaataactaattaaacataacttataagtgacacttttaaaatattattaagtgagattttattaaattttatttaattttgtaaataagatcctcatttaattttatttataaatttaataaatattttttataaaataaataaaaccatatttaaaactagaaaagaaattaaaaatatactaagaaagaaaacatctttcacattgcatgaaagtaaaaaagttcatcaaacatttcattgaaagaaaaaaaactaattgaagtctacaaagctaattaattaactcatttcaaagataactcattgtcctaagtcccagtagattttcatggttttttccttggttgtccaagaaatccatttattttactctaataaatattcaaaattacagagaatcaactttgtgaacaaagatgaaaggtgttagaaaaatgctctctcccgagaagagcctgccggaaggattgcttgagaagcctgccaatgccat

SEQ ID NO: 223865 - DNA, 1177 bp, Cannabis indica
tgcaaagtctgaacaggcctccttcctcctctacaatgagttcacacccatccccttcgcgttcccactctgtggaacctttgccaagccccaaatccctcgatctaggtggcttcgatccatcttccaacgacactcagagcagctcgactcgtccaagccgtctcagctgcatcaaaacgagtcgtcccaaccactccagtcgtatcaaccataactccggccaacttcccagacgatcgaaccatacacgcattaatcactctcttacaggtattaactcttttgatcatcttttcctattcactgtcaaatctcatcagagaaatgggttttccttagggtattttagatacaaatttgggcttcccattaaattacctcaggaaaatcgataccaaaaagggattatgggaaaataaaaagattttatattaatttccaaaaaaggtttaattccttttgcccaaaattttcaaaatatagcattaatgttagtctgcaattgtgatctgcctggtacatttcgaaatccttttgtgcagcaactctgttcgaaagtaaatgctacagatgtgatagttaccaaatctgctcataactatctcaaaatggtttttctatataagggcagaacatcccttcggttttgcatctacattcccatcatatctaagcctgattctctaaaaaagctttccaatattaactgtttctgtttatatatatactttattcactgtaatagccaattagtcccccccaggtctctctttcactacacacaaccgagctcagttctgcatactgtcttcagtatctctttctctgatctctcaaggttcctggtatggtattgtactggtcttaagttcactcagttgttccaatattcaggtcaatatttttccacagttagttggttattagctcatagtccccctattattagttttttgaatattattgttcaaatacactcttgtttgcccttgtctttggctcaccatattctgctcagggtcacttttcagactttctatagtcgtcattttaccttactcacacggtcctattacattaatattatttcattcgatctcagtcactatttattcacttgtatcatggatgagctaaacaaatcactatctgttgctctcaacctcacagagac

SEQ ID NO: 223866 - DNA, 2385 bp, Cannabis indica
tggtggggcactaacaaagatggatccaagatacattggaaaagatggaaattactctgtaaatcaaagtttgaaggtggaatgggcttccgatcttttgttgattttaatcaagctatgcttgcaaaacaagcatggaagttattcgacaatccgaactcactattaggtcgacttttgaagcacagatactacccaataaactcttttttggaagctcacaaaggtcactcaccatttttaacatggcaaggaatacactggggccgatagctacttcttaagggtcttagatacaagattggtaatggctttcatgtcagaagtgggctcgatccttggatcccaggacatgatgagttcaagccaatttactatactagtgatccatctacgcctgtatcgacttacattcttgatactatggaatggaatttgcctctactacatgaagactttgctcaaattgacattgaccgaatcctcactatccctttgagtttttaccagtcaaatgatcggcttatatggcatcataacacaaatggcttatacaatgttaaatcaggctttcaccttgcgaactctatctcggagaaggaccaggaatcgtcttcagatgactacaaaacctggtggaaattcttttgggcattgcaaatcccaccaaaagtgaaaatatttgcttagaaagtcatacaaaatgccataccagttgccacgactttacacaaaagaaaagtcattgattcagctttatgttctcggtgtaaatacgcatgggaatcaattggacatgccttgttctcatgtaaatctgccaaggctgtttggaaaaatactaagtttctaattgattatcaccatgctcaatgtatgtttaatggaaattatctgatacatttggcatcaaaagcagatgttgaagcactaatatgtgtaacgtggagcattttgaatgatataaacaaagtacttcatggtggctcacaaagagatcccattttaattgcatcttttgcattgacttacgtagaacactatagaagtgctaaaggcatttcctgcaaaaaattgcagcaccctaaatctcaccaagcagatcccacgcaccagattccacaccaacagggatttcatgaccaaaaccaaactgctgataactcacatgtcacatgggttacaaactccaaattcagtgattcctcttggccgaattaactgtcagcaagttggagagttccagaatagataggctcgactcaatgctaaccaacaccagcagacagcaactggaatgaggcaccagccgaacatctcagctgcagatgacattgtccaacttcaacagcccctggatgatatcatttggaagcctcctgatatgaacatgcttaaatgaatgtagatgctgcaacaaactttaagaatcagacattaggaattggagcagtggtgtgcaattacaaaggagacgtcattgctacactctccaaacaagttcagggatgctttcgaagtgatgaaatggaagcaaaggcgctctttcatagtctcaattgggcttcgcaataccaattgtcaattgctattgtggaaacagacgcactaaaagtttcatctgctttgaactcttctcatagtgacttatcatgttttaatgatctaatcgatgatgtttgttgtcttttatcctctttccttagggttactgttactcatgctcgtaagcaggctaataaagctgcccatggcttggcaaaatacactctagaattggatgaagatgtatcttagataagagaaattccttatcttattttctctattattgtaaatgactgttgatttataataatattaaaaatttctcaaaaattaaaaaaaccaaaataattattaaatctaaaataatatttaactatataaataataacacaaattatatgtcaatcgaatttaataataattataataataataaataagctgataactcttgagttgaatattaattgaaacaagcaaattgaataagccattattgaggttatcctatttttctaaattatgacaactaaaaaaacaaacagaaagatattgttaaaatagtctaccaacaatatccatttttttttaaaggagaaaaaaaaaagaaaaagcaatgtctaatcaattttaaacaatgattgctatatttatttggagtttctcaagttattgcattacatatccaatatatgaaattgtattagtgggtcaaatagaatatattgtttttcttttttaatttagaacaaaaagataatatattattacgataagagcagttaatttaattattaatttttgaccaccaaccaaaaaaaaaatatagagaaagca

SEQ ID NO: 223867 - DNA, 2025 bp, Cannabis indica
tccttcttcatgggagagggtttcttgtatgggacaatagactgagttgttgcatatattgtctctaggtcgtgtattaggacagaaaaagtagtaaattttgaagtattgtccctggggtgctgttcgacatttccaacaaacgttcctttctttttgttgccttgtgtgtcgttattagacctcttccaatttaagtttgaattgttaggatgttgtggactctgaacggacgttcctgccgaggtggtacgtagttgactcttcttttgttcgagggtttctacacgccaaacaacttctttgagcttaataaatccatctccttggtccaaaaattcaaccattgatcccatgatcagcctcttaatatccttccacagttctccaagtggcccaatgcctcccaatatagcagccaaccttccttcttcgatcaaccccttatcctttgtagcctttgtcgtaaatctgcttatataagctctgaggggttcccctgtcatatgttttacctcgactagatcttttagatgtgagggaagttgacaggaggacgaaaactgcgttggaattttgaggagaaagcattccacgaattaaaccgccttggaagcagcttgaagtaccactactgaacggcttctatgagtgtagtagggaatattctacatctgacatcacctcataccccttacaaatccatctgcatctcaaagtattttatatgtgataagggatcctctttccccatatacatcttctaagttggcatcttgaatttcgggggtagtttaaggacttctatatttgaggagaagggtgatctgcatgcctggtctagctcaagatcggtgagttttgggctagttaggccttgtaccatgtttttaagttgatccaattgtgcttgcacaaatggatgaactagttcatcctgttgaccgacttgtgtcacgctaggatctctttgaactggaaactggatgcggatatctggctggacagctagtgggacatacttttcgtccaggcctcttcttttgtttaagtaactcttaaggtcatgtaccacacccaacctattaaataccgaggtataaggtggtcttggcatctgacttgtttggccagagatttcagttggggtgaagttataaggtataactccacccaaaggacgatccgaaaggatttggctatctaccgtttggcccacaggttggacctgtggccgtggattggacagttgaccattgtgagtttgtacggtatgcccagatccatacccttttgaactgcccaaaggaatactatatgcggtagctggttgttgattagcgacttggtaggccctccttatcactatggtggcctgccttctacaatcatcaatggctacttgctgagcattgaaagtttccaactccctgtccctccattctataaactgctgcctctgctcgtcgaatgcaaggtttatagaggcacggagatcctccagatcatggtgtaaagcgttattatgaccttgcatgagtccaatggctattcggaggttttggatctcggtatcatcttcaattttcctttgagaattagtggtggatgggacttcagtgttgggagtggattaatcggctgctgaattagtgttctcagtctcttgcatgcctggtgtgatctcagccagaggggaagttaactcgtggcccacaataggtggctgtatattggtctgtttagggtttgtccctggtggtcctcttgtattcccaggggttagcacattaggatctgtcaccatcgggtcaccctgattagccaggcctctatgagtttacaccaccatcgtgtacccctgctaaaacttaagacaaaaagataacttgggtttttgctctcaatgaatgcaccaaaatgctgacctcactttaagtcaacgacagtgagtcaattaataaacgattaagaatgtaattaaaatagagcaaaaaaaaaaacaaagtaataaagaacaccaga

SEQ ID NO: 223868 - DNA, 2636 bp, Cannabis indica
ttttttgcaaactcaacaatgttatcgggacaaacagcttttccattccaaacgaggtcgttacgggctccccaaacagcccaacaaacagtcgccattaagcacatttcgtccgaggtagcatgctggaacacaccccagcaccagtccaaaaaacccgatccaagaggcactattgtgccaataccaactcggttccaaaccagtttgacaacacggcaagtcaccaaacaatgcagaatactttcatcttcttccttacaaacaggacagagtaaattaacatccactctcttggttttaagttgaaccaaagtgggcaggcattgtgtacaagccctccatagcagattactcaccttggaaggaatttttagcttccatattttagtccagaaggcagtaatcatcaaaccaattatttttctgtttttgcaggaagttataagcagattttaccgaatactcacccgaattttcaagagaccaaaacagatggtcttgtgcagcagtatcgggcaaaggaataccacagatgagggactgatctttgggctcaaacaggtcaacaatgatctccaaatcccatcttgatccatccattgaaagcagatttgccacagtggcatcagcaagcccaggatgagttgaaatcacccacggattggtctcatttggcagccacgggtccttcaaaactgaaattgaatggtcattaccaacgcaacagcggactcccgcacgaacaaggtcttgggcttccactatactctgccaaatgaaacttggatttgaccccagttgtgcattgagaaaattaccatccgcataatatctcgctttaaagatccttgaaaccaaggaagacggtctagtaagcaaccgccagccctgctttccaagaagagcgagattaaaatctcgtagatctttaaatcccatgcctcctccccttttatgcttgcaaagtttgtcccaagacatccaatgaatgcctttaccatcgcttttcgaggaacgccaccagaatttagtcatagcacgctcaatatcattgctaatatccaagggaaggagaaaaacactcatcgcgtagcttggcaaagcttggaccacagatttaattaggacttccttcccagctctagaaaggaatttgccttcataactttgaagtctcttatgaactctatctttgagataacccaacacaacagacttgttctgactcatagtactaggaagccctaaataaaagctaccttcagcagcctcctgcatttgaagaagagaacatagttgctgtttcaccataggctccatgttagtactgaaaaaaatcgaggatttcgccagattaacttgttggtcggatgccaactcaaaactatgaagaagattctgaacatgagcggcctctgtaaccgtggccttatagtacaaataactgtcgtctgcaaagagcatgtgagagacacgaggcgccccattagcaactttacaccggtggatccaaccattgtgctcatattttcgaagaagagctgataaaccttcagcgcaaaggataaataagtatggcgaaagcggatcgccttgacggattcctctagatggagatacaggacccatctcatgatgaccatgaacaattgtgtacttagctgaagatacgcacttcattataagactcaaccaggtagaagagaaatcgatcttctgtaacatggcttcaagaaattgccattcaatacgatcatacgccttgctcatatccagtttcaaagccataaaacccattttccccgctcttttccttttcaaatagtgaagcacttcaaaggagaccatcacattatctgagattaatcttccaggtataaacgcactttgcgaagcaaaaataattccatccatcagcggtttcatgcgattagccatgactttagttatcactttgtagagaacattgcacaaggcaatcgggcgcaaatccttcatagaggcagggttcttattcttaggaatgagaacaacattagcatcaccaaatcccaattcaaactcccccgtgacaaaaaacttttgaacaaagagggtaacatcttttttaataatcggccagcatctttggtaaaaagccggagtcataccatccggacccggactcttatcgggatgcatttggaagatagctttacgaacttcttcttcaacaatcggctggagcaaatccacattatgactatccgagaccatcctacttacacaaatcacctcagtaaaagacacagatgaagcagaaaaaagattgttgaaataatgcacaataacctcagcaagaccatgatcccagtccgtgtacactccatgttcatttttaagcttagaaatcgtattgtgcctcttcctcttactagccataagatggaaatacttactattacggtcaccatctcgaagccaaagttgtttcgacctttgtctccaaaaagtttccctctgatcaagaacattggccaaaatgactttaacctcttcatacctactcactgattgagtatctcttttatttttcaaaacactcaactcatttttacactattgaattcttcttttaaagttcccagttaagt

SEQ ID NO: 223869 - DNA, 1626 bp, Cannabis indica
tgcaatatatattcttactcaaacaaatactgatgccatcacatctactgtctatttagcatagatctacgtgttgcgctcacacgtctatttacattacggccttagattggtttatctcaattttgattaccgagtctaacctaattatgctttacctgcataattctttatttcaacatatatagcatggcattgcattcaaaatcatttaaacactagggtaataaccctaaccatataaccgctcactttggggtaataaccctaatctcattttttcatttaagcaaaagaataataccaaacatgagcgccaccacgcttaactctaggggctaactagtgtcttacctggtatccaaagtatgtggagattccaaacctccgagtgttcctgagcaagcgtgggtaatcctagtcataattctcgagatttcacaaatatggttaatcccaaaattcactttcacataatcacaaaattttaattccatttacagaccaacatatagatcccaaaatgagctttccaacaataccaagaacatccaaaatagagtcccaagtcaaaagttatggtaaaaacaaaatagcaaaaaaaaatatagtaaactaccaatgctatggtcgcgaccaaacttgcgatggtcgcgactagagcccaaacaagggctcatcctctctggttgagtgctagttcgcgaccactaaaatagatcgcggccgctgggtttaaaaacccaaaaaatgcccaaaaaataatattttaacccaaaagaaacataccaaaaccattccatccatccaaatcatgcataattctcaaattcaatatgaaaacagcctatactaatattaacatccatcacaaaggtaatcaaagttcaaaaataccaattcatactcattacacaaaaccttaaatcaaaaccaatataatttctccattttacaagcttgaacacaaagcttttaaatcaacaagaaataccctgcaaaaatccatgccaaacctagatttcaaacacacatcacaaccctaaatttccccaaaatcaagctagatgcaatactcataagcctactagctcaatcaacacaaaaacaccatattttaccttaattcaaatcaacatgcattcaatttccaaatgaatatcaagaacatcaagaacacttaacaattcatcataactttaaaaaattagcaaaataaaaggttaagaatcttaccacaagttctcttaagctttaagtacaaaacttcaccaataagacctctaattcaagctaaactttcaattaaatgagaaaataataaaagagatgagaagaagaagcagatggtcggctagggctggaaatataccaaaaatgagtttctaatttttctaagtcagttttttgttgaataatgcataaatggtcaaatgaccaaattgccctccaaggccaaaatattcgcatgtatgcatacaaggtcaaaatagtcatttcacatcacacatatataacttaatatattcaggttttcatacttatcaaataatgccaaattaaatcccaaaaatatattttgggcctcgaacacgattaggctcaaaatacccaattgtgactata

SEQ ID NO: 223870 - DNA, 2118 bp, Cannabis indica
agaacactagctttttccataaaacaaatacatatgattttacctttgcaaaacacagagtctaattaaatattttttaataatatataaaactgttaaatagctactgaaaaataaaacaggaatgatataattaaataaaaattttagattgagtcacagactaagtcactctctttaaaatgtttgtggcactgcccaaaattgtgcaagtagttagaaattaccggtcgtcctcatgataaaataatctaattgtcgtgcgctgtatcaaaacaccactgcattgtagcgaaccgtcaaatacaccctcaaaatagatatcgtagatggaaattttatatagtgaaaactgagttttttttctcagtatgaaaatatgtatttctcccgttaattcaatcacattatgtagactaatagaatgaaaaaataaaatgagaagaaggacgttttttgaatatggggaatagttgttgaacgtgtcccatgaataaaaataaaaaataattcttttattaaatagtttttagtaaaaaataaagtgtcacgccacactaaccaactcgaatcgaacggatgccgggtgtgtatagttgggttaagcgtgtgtcctcacccattcacacaaaattagatactccttggagccttttcccaaattgtaaagatgcaccttatataccctagtaaaaaagagctcgtatcccatgtgggactaatgatatttcacacactaggacactctcattttatcaaaaaattcactaactttgtaaaaagttccaacaactccccccttgaattttttaaaaaatattttcatctaacaatatcattcatcaataagattgaacaaaaataaatatatctttcgatttgaacctctaaatagtgaatacagtttagattctcttagagtgacccgtagtcttgaactctatctctaacattgtaccacccataggcggacctaggggtgttgagggagggctaaagcccaccctgagatttgaaaatatattaaatagaataattagttaagatgctttaaatttacatggagaccatgttttgaatctcattgccccttttttctatgtgtatctactttttatttattagaaaaaacaaatgaagtacaaggtccaaattaggttcaaatttatgaccactataataggaggatgttgctaaaccatcattccacttaaatttagctaggtatttattattttggattatattaaatgtataactaagcttatcctaaaattcaatttttaagggtataatcaaaagcccgtattaatgaccatgcccgtctatcctagtatagtgaacgctttagaatttttgtctaaaatttcataaaaaacggtcccactctcacattcacataggtaagtctatcaagaatactcctgtagcttggtactccactctacttggagtatggaactcattaaaagcttctattaactcacaagccttaaattgctttaggatttcatgcttcactttttgaataattatagcatgatctcattttaatcacttcataacttgttattattcattgaatctattttttgggatctccagtctataggttaggttgctattatgagtgattcatcaatctaagaacatacaatagtcactttccttttaatgttttaagaactttctaaatccttcgtcaaaagatcaaccaagttaacaactcctattgagagaaattctctaacagagcttttcacctgttaaaaaaattatttttatatatatatatatatatatattggggagaggctatcaactttgaaaatgttggattttttttttaagtcgttctttgcttgactttgtttttactaaactaatacatcaatacaacttgttcaaatatatatataatataaattcttaaactacacatatataaatttatatgtatataaatataagaaagtgatatacactaagccacctaatatatttggctttctctactaaagtaatacatagtcaaagaagatgcttatatggtcaatacactagactggttcaaaacgtgttagctttctccataaacaaatacatatgattaataat

SEQ ID NO: 223871 - DNA, 2071 bp, Cannabis indica
gaagaattatttagtgacaatattcaagtaagtaatttcaaatgacatgacaatgtgggtaatattaagtttaatacttgaaactgtcaattcaatctgttactattgcatgaatcagccctttggtccattcatttgtaatagttggactcatcagtatcatggttgaaattctctcatttttctatttttttcagaaaaataatattgaaagttgctaactatacattatccaacttggtctttgtgtcttttatttagccatttacttgaaatgcttagattttcttcacattggagtattctgttttgttcaggctgatgtaattgaaagactcagacttcagtacaaaaaagatctcttgaagattgtggacattgtgctttctcatcaggtaattcatactttgatgagcccagatttactattcgagtagttttacattttcattttgttcggttttcgtttgcagggtgtcaagagtaagaataggctgatacttcgactcatggaacaactcgtttatcctaaccctgctgcatacagagacaagctaattagattctctgcactcaaccatacaaactattccgaggtttgaattgttatgacaaaatcttaatatctaaaatgttgtaaactaagttctgctgccaatgtgtttatgcagttggcattaaaagcaagtcagttgcttgagcaaaccaaattgagtgaactcaggtccaacattgccagaagtctctcagagttggagatgtttactgaggatggtgaaaacatggatactccaaagagaaaaagtgccataaatgaacgaatggaggatctgtgagtgctcctttggcagttgaagatgcccttgtaggtctatttgatcatagtgatcacacccttcaaaggcgagtaatggagacttatgttcgtcgattataccaggtattgagatttgaattgctgtagttttttgctattacttgaagacaatttcgcgtgttaactttgcatatgtcatcagccctatcttgtaaacgggagtgttaggatgcagtggcacagagccgggctcattgcttcatgggagtttttcgacgagcatatcaagagaaaagaaaagaccaaagtaaatgataatagtgagaggaaatggggaggcatggttataatcaaaactctccaatttttgcctgcaataattggtgctgcactaagggaagcaaccgataacctccatgatcaaaccccaaacgggtttcttgagcaagatagccatgggaatatgatgcatattgcattagtcggtattaacaatcagatgagtttactacaggatagtggtgatgaatgccaggcccaagaaagaatcaacaagttagcgaaaatacttaaagaggaaggagtagcctcaagtctgcgtagtaaaggtattggagtgattagttgtatcatacaaagggatgaagggcgtgctcctatgagacactcctttcactggtcatcagaaaggctccattatgaagaagagcctctattacgccatatcgagcctcctctgtccatctatctggagttggttagttattctaagcaaaaaaaagactttttctatgaatgatggatctgaagtttgttgagtgttgatgtaaaatgttaatattttcaggacaagcttaaaggatatgagaacatacagtatactcaatcaagggatcgtcaatggcacttgtatactgttgtagacaaatgtgtaccgatgcaaaggatgtttctcagaacacttgtaaggcagcctacaacaaatggaatggaaacaacccgaatggcgtttacttcaaggggcattttaaggtccttattgactgcaatggaggagttggaacttaatgcacacaacacaactctcaaatatgatcatgctcatatgtacttgtatatcttacaagagcaacaactagaggatcttgtgccttaccccaggtgaaaaagtttagatatttgctcaactcttttatgactaaactcgatatgttctgtttgttcttacatttggaaaactgtggcaggagagtg

SEQ ID NO: 223872 - DNA, 1493 bp, Cannabis indica
ctaaaattaagatgagaataatgtggaagtaacattattattgagcatttaacctggccatagttcaaaactccagctgaagggctcaactcaatgttcccaaatcgttgtaattcaccatttgaaaagccctcaccttgagaacatttcatgttatacatataatcagtaggaagaaacgcaaatccaaggttgtcccaatcaatgtttgctaattcaactgtttcactgctccaaacaccaaatgattatcatccacacaatcagagcgttgaaataaacaccaaacacttgcaaaaaaattctttctaacattcacacacatataactaatccatctaaaaacaattttcagaaatggagtacctgcgagcatcagacaatgtagcattgcaaaaaaccggagaaattttttgagaagaagcaaaagaaagctgctttgtttggagcagtaactgcataaaaaagaagaagaaaaaaccaaattaaattagaagaaaaaaaaaatcgaacaagaaggaaaagggaagattatgtaaaccttgaggggagaagagaaatgggttttggaaagaagagaaaaagaatggcgggaggggcagagaaggtaattagcgtgaaggccaggcaaaagggcagtggtgcaatccattttctccggctccggaagaagttcggtagggcggcgaaggtgaagaggaggtgaggtgagtaagagtgtgtaatgtatgagtgtggccggtggcgtgggtgggtttggttatacaattcaatacagtctttttaacctaaagcttcgtagtctcttctcttttatattttattaactaggaactaatcgtgtgacgtgttagacaatatttgttaatttttggtactcaattagtaatgatataaaatatagaaaattcctatactagatagatagatacctaaaggataaaccctattttcgtatgcaatgcagctgacttttctagtttaattttctttataatggcatatgtcgtaatatgggtttatggaagaaataaggggttttttcatttttgtattttaaaaattaaattttttatataaaaatttatatagtaattaagggaataatttaaatggcaactaaaatttacatagtagtaagttatcgaaataatctaaactataaattaaaaaataatatatactataaacttattttaaaatataatattgtattctatttttatatttcaatgtgtattgttttaatgataaattcaacatttttaattttattctttgtttttttttaattaaaagatatcattttgaccctgtattttgtaagaattattaattagactatctattttataaaatgataaaatagaccttgtattttttaaaattgtacagataggaccctaaactgattgtttgttaaaataaaacttaataataatctgatctagaggtgttatgacaaaactgatttgttcgtattaaaaattgtc

SEQ ID NO: 223873 - DNA, 1663 bp, Cannabis indica
taacaaacaataaaaaatagagttagaaataaattatgaaacataacagtataaatgaaattatactttaaacttacaatctgcttcacgatttttgtagttaggtcctccaccatgcctttcgtgttcatgtgaagtcttttccatattacagatctatcaaatttggtaatttggttgcctacctctttctttattttttttcttgaaccatccttacaccacctcatccgatgtgatagttgtaaatattttttgccctgctcttttgggccttttttctcctcacctcaatgtctggactcaatcttctagccacaaactctctccattgttgcaaataaattatgctttcatatagtttcgataccttataaagaagttgggtagccacatctttgattgtaaaattaccttttattagggtatttttccaatccttccatctctctccaccttttgaaatggttaatttcttatccgtctttggtatatcgaatgcagcctaaaaaaattaacagtcctagttataggtacaaattacaattaatagtaaaaaagacgaacagtaaaattaagtttacctctatgtcattccataattagtttttaatgtcctgactcactctaggccatgatatgtctcaaagtggaacattaattcgcacctatgttccaatttaggtatcttttttcgtcgctacctttccccattgttgtttgtagttattgtactcaacctcaaacttttttccctcactaactgttgccctggatttttcctaatacacatggaaatcccgaagtcgaccaagtggtaggagagcctaaatatgaagagtaattaaggtaaacctctttagacaacagtctgagacctaatggtcatgtccgagaagcccctccaggagcttcagccgtgtcgtgctaagttaagaattacgcccacctcacggagctacaaaaaacattcaagtctggctgttggatcccgaacctaagttagtataggcgcatcaaatgcagcatggggaagacatctatgaatggctctgaaaagacatgttagaggcatgaaacccattatttggcgattacactctgatctatgaatattatgacgactgcacaatgaactatcacatcaattaaggaaggttaagggcttatctcaccaaacacgtaggaaacgcctataaaacctaccaaattgacatacataccctgttatctgaacctaggaacttgtgcaagtaatacttctacacttggaacaatagtaaaattttcaccttctttatgaggctatcaataccccaactatattctgaagaagggatcagaaaaaacagtgtaaacaccctctgtaaaaactactatattaaatagcagtgactcgttgactaaggctcattaatgcccaaaccacataaaaatacttgcattgaatttcttctaattatttaaacaattctaattaatttgttgctgaaaatatcggtcaacattttggtgctttcattgagagttgtaggaagatttccatagaaggaatatcataataaattcttggtacgatggtgttgagaaggaacaatgcacatcaaccacgtcaacctcaaggccctaagaggccagagaatgaaaaagtagcttcacgtgt

SEQ ID NO: 223874 - DNA, 2390 bp, Cannabis indica
aggaattctcacaaaggttatttcagaaacccaaagcgccttctagcctggacgacttatcacagataatattctgatttcgtatgagataatgcattatcttaaacgaaaacaaaagggcaaacagggatttatggcaataaaactcgacatgagcaaggcgtatgacagagttgaatggggctttttggaagcaatgatgaggaagttaggtttccatgagcaatgcattcggctcattttgaagtgtgtgagttcggttgcatataagtttgtggttggagagcatgaggttggccctattattcctacacgaggtttaaggcaaggtgatccgttatcaccatatctctttctattatgtgctgaaggattttctgctttgcttcatgattatgagagaagaggcaagattcggggttgtaaagtggctaggggagctcctttggtttctcatatgctatttgcagatgatagttacatctattgtcaagcctctgaggaaggtgcccgaaatgtgattaacttattagagtgttttcaggaagcttcgggtcaacaagtgaaccgtcagaaatcttctcttttcttcagcccgaatattcactatgatgagaaggttaggatttgtgcaatgatgggtattaatgaggcaagtgagaatagcctatacttggggttgccgaatacactaggccgaaacaaaacagctcttttgggttttttgaaggatcgaatgaggaagaaaattcaaagttgggaagggagattcttatccaaggctggaaaagaattgctcatcaaaactgttgcccaatctcttccaagttatgcaatgaatgtctttttgcttcctgtagagacttgtcaggaaatggaacaactaatgtgcaaattttggtggcaatcctctacaaagaataataaaggcatacattggaagagctgggataagttgacaactcataaatccaaaggaggtatggggtttagaaacttacgagattttaatctgagtttattgtgtaaacaaggatggcgtctcttaagtaatccggattcgttggtaggcaagatttttaaagcccgttactacaaggatggcaactttctttcggcggaattaggtggtaatccgagttttgtttggcgaagcatcttcgaaactcaagaagtggttcgagaaggagtaagaagtagaattggaaatggtactttggtgagtatcctccgggatccgtggctgcctgattcaactaatccaaaggtaacttctattcatccggctttggtgaatcaaaatgtttctgtgttgatggttactggagaaatagcctgggatgtggacttggtgcgagatttgtttaataacagggacgctagtttaatacttagcattcccttatcttcaagtcgggtttgtgattcatggtattggcatttggaaaatactggcatttttctgtgaaatcaacatataaatttctgcaattgaagaaggaggctggggtgattttgaatgagttggaagtgtggaagtctatttggaagctgcgtgttcctccaaaaataaaggatctgttatggcgtgcaacctcgaattgtcttcccacgaaaacaaggctgcaatctagacatgtgccgattgctaatcaatgtcctaggtgcattgatcatcctgagacacccttacattgtttagtaacttgtccttttgcttctctctgttgggattctggtggaataaggactcatattcagggggttataacctttgctagttggttggaagccatatttaagagagtagacacagctacaaaagaactaattgcagccacctgctgggcgatttggaagaccaggaacgatctggtctggtctgagaaaaacaccacggctgagagtgtaacggtccttgcgcatactaccctttccaactggtctcgagctcaagaccgaagctgtgttcccacaccagcttatttaacagatgctgatggactagagaaatggatgaaaccagctgctacaaagattaaaataaatgtagacgctgcaacttttgacagctatggaacttattcttttgtttgtgtagcaagagatgaaaatgggtgtttgatggaggctctaacatgctgtcgggcaggtacagttcaaccggctttggccgaagccatgggggttcgggaggctttaagttgggtgaagaaaaaggcgtggcatggtgtagtggtggaatccgattgtctctccgtaattcaagcaattcgtagtaatcttcctttgttatcctattttggaagtgttatttcggattgcaaactgtttttagaacaaattggtgatgtttctgttaatttcattagacggtctgctaatagtgt

SEQ ID NO: 223875 - DNA, 2094 bp, Cannabis indica
ttttaccattttaattttttaatattttaatgtcaaataattctaacctaaacctaggtggttgcttataaatagatagtgatggccttaaatcaaaagatgatgaaaacacttgccttcagtaaaaagtttgagccatctattctatgccattcgaaccactctcttctcttcccctcttcataatttcaaaccctatagtgatagagtaagtgcccacacacatcaagtggtactcaatcatagtgtgtaaggctgtgaagaatccagattcaagagaaggagattcgggctcagatcttggtgatactctgctacagacaggatacaaggatttgagatctgagtggaaggagccattattattcctctgcacccactataaggtttctgaaactttatatgtgtttatttacattgttttagaaattcatatttagaatgttaaataacatacatggtagtaaatctagatccttgtaaaactattccaacaggagaggcagagaatggtttcttgcttggagaccatacgtagtgccaagaatgcagagaacgccacctaggcttccctcatctctgtgttgtaaaaagaacttgatgatcataacaagaagttgcatggggttgttgatggccagcaagccattagggaggactatgtcgacatatcctcccaacttacctatgagttccagtatcacaaccctcttgatactgtcatacatgggctgtttggcttttgtggagagaacattggcccgtggagagccactctttgagagccggatagagatagaccagtttgctgcctagggagaggggtcattatttgagacatacaacgaggagttgaccgacccacccgtggagggggtggctagccaagacactgaccaccaggccaaccagcatggtgatgatggggcccaccgagactctttggatctcgatctcgcggctccagattcaactccttctgccccaacatacatttagatagtatttttatcagttgcattcaacattatatttgtataacatagacaatgttttcatgttccgcatagcctgtggcctttcagctttagaacattactcacttttatgttccatgtggcctgtggcctttttggaactttgtttcatgtcctatgtggcctgaggccttttgagaacactactttcatgtcctatgtggcctaaggcctttttagaacatttactttatttttagccccaaggcgttcatgttcgtatctttggtcataagtcctctatctttggtctttaatccttgctatcttcttatggccttgacaagttaggatccagatttactttgccaagtcgaagtatgcttgcacgacttagaggcaggtttagtagcttatactaagcgttaaaatttctctgtataagttttttgtgctagttcgatgcattgaatagtatgggtgccccccaagtgaccatgtggacaagtctcttggtcacttgctattcagcaagtttcacagactttgcttgggttcagtcttgtgagggtaccatagtacgcatgttattattcattaattggtctgttttgctatgcaacttacataaattgaatctacaagcctatgttacacaaaattagcttctagatgtcaggtggctacccttgctcgcctagaatagcagaggccactattgaagagcaatgggagaccacacccaaaaagggctgtgggtgctagcgctttttgtactctaatgttgagtagatagaactgctacttcggagtagagttctataagctagttacttatagtatttgcgaaggtgctctccattccagtatcttggtaggagaacaagctccatgttttcattgtaccttcccagcttataggctcctttactagttatctctataacttgataagggccttcccagttaggtcaaaacactcctactgttgagtcttcagtgttcaggaaaactctttggagcaccatgtctcctatgaagaattttctaccttgacgtgtttgttgaagtgtctttctacctttggctggtaagcctgcaactttaggttagctta

SEQ ID NO: 223876 - DNA, 2297 bp, Cannabis indica
aggatgctctccattctatggctttagataaatccccagtattgacggcatgtcaagcatttttttccagcatcattgggatgtagttgggccccttgtttctgaatgtgtgcttcaaatcttaaatgatggagctaatatctcagctatcaactcaacaattatcactttaatccccaaggtggataatcccaaacagttgggtgaatatagacctattagttgttatcccaatttcggcactctgacgtggcatcacatactggtgacacgtggaatcgacttcacatatctgctcgaaagagatatgctgaatagaacgccgcacatatcaacacgggaaaagccttcccggccgggcagtggacagtccgaacaacatgccaacacttagcaacttcaacacttgcatcgtgaatcacagaagtaatccttataactttgggatcatatcacagagatatggcaagctgtccaaatcccttaatcagtgtactttgtatttaatgtgtaatcttaccaattacaaacattgtaaacagaaaggaaactttccctcaagcttatagccctataaatagtgacctattctcactgagcaaggggtcgaaaaacttatctaagagtatatactcagggatatcattgtaagaactctaagagaagaatcattgcattctttattcttaagtcaatacaaatcaaggggagtaggctattactgaactgcttagggccgaacctctttaaattttctatgtcctgcatttattttactatattatatcatttgtcgcttacaattaagactcattgtcgttggctaaaagcgaggtcaatattttggtgctttcattgagagcgtaaaatcacaaactcgctttttactttaaatttaatcataaacacgatggtggtacagactcgtagaggcatggtcgatccagcgaatccaccggcagtgaatcccacactacagaatccaagaaatgcaggggtaccaccagccacaaatcctgaacaatcaccaactgtaggtcagggtgtgacgaatcctttgagtggaatcgcgcctggtgtccaagagactggaaatacaagttcaatagccaatcagggtattcccaatacttgagttccaccagcaacaaatgttcgaacaaccgttggagatgacaacgagattaagaacctccgtgctactcttggactcatgcaaggtcatacttataccttgcatcatgaccaggaggagctccgtgctttggtgaaccttgcatttgaagagcaaaggcctctattcgtttaatggagagataaagaggtggaaactttgaaggctcagcaagcggccattgaccatcgaataaggcaggtcaccgtgctgatacgaagagcctaccaggctattaatcaacaacctgcaaccatcatcccactgggcgagtcagacgaagatccagccgtgaatgcttctcaaactctgaacggtcagccactcaatccctagtcacaggttccgcctgtgggtcaagcagtaggtagacagaccttatctagtaatttgtcaaaagaagtcatacctaataactctgcccaggttaacgatttcggccaagtgatcggtcaaaccaacaagtcactgagacagcctggtgtatctatatttaatatactgggaatagctcatgatcttagggatgatctgaacagaaggagagggctagacgaggagtatgtcgcaccagtcattcagccccgggctcgtgttcaaaatcccgctcaaagagatcctaacgtgactctggtcggtcaagagactgaacaagttaatccatctgtgcaagcacagttggacgaactaaaaaatatgttccaaggtctggccggtcagaagaacaatgacctcgagttggaccgagcaagtgaacccctttctccccagagatcaatgtcctagagttgcctcacaagttcaagatgtcgacgtggaagatgtatactgggaaggaagatcccttatcacatcttaagtattttgaaatgcaaatggacctacaaggagtacaaggagatgtatgttgcagagtttttcctgccacgctctcagaagtcgcccagcaatggtatttcaagatgacacccggaaggttaaactcttggaaggttttgtcctcggaattccatgcacaattctcttcttctcgccaactcccattgcatttagaagacctggtcgaattgaagcaaaggccaggagaaactctctgagcttacatcaacagattcatgatgga

SEQ ID NO: 223877 - DNA, 2817 bp, Cannabis indica
tttaacataggccttggaatctttaatcattgtcggcaacaaataaccttggcttagaattttcttagataaactctgccatgcagcttagttaccatgaaatccatcatgtaattctgacaaaagtcgtacaacttcttcttgtgtgacacacctaagtaatggcatggagaatcctcttctgtacatgactccctctactatgatgtaccgcacaacctttctccttatttttcgagcttcatttctattgtttgggagttctccagtattgaggtaggctgctattggtgccatctagttcggggatgtatcaatcatttcaacctcttccgtgccggtgatactaggttttttcgagaaactgattaggaatcagattttctctatcatttacattactgctcgcacgtcgagctaatgcatcagcagtcgtgttttcatcccttggaatttgcctgagagcatagcttctgaactgtgcgagtagatcgtgtattttgcttagatacgctatcatcttttctcctcgagcctcgtattctccaaaaacatgatttaccactagctgtgaatcgctgcagatctcaatgtgtttggccttcatatctcgggctagttttaggctggcatcatagcttcatatttggcctcattattggataccataaatccaaatttgactatagcgtgcaggtgttgtcccctagacatgacaagggcgatccctgcaccggatagttgatctgtagccgacctgtccgcatgtagcttccaagtcagcttgtctttctgtgctactcagctgaggtatttgtattggctctgtgatgttttctgaaacgctttcttctttacccgtgcattcaactacaaaatctgctaaggcctgacccttaatcactgttcgtgattgaaagataatctcatatggcccaactccactgcccacttgagcatgcttcgtgacagccaggtatatcccaagttcttctccgtccagaggttttgagagcacagaagattttgcgagttgcatttttagctcgtgaaaagacttttcacattcctctatccactcaaatttcttatttcctcgcagaatgttgaagaacggaacgcacttgtctgttgattttgaaacaaatctattgagtgcggtaatccgaccagtcaaactttgaacttcctttattcttgttggcgatttcatatctaggagggcttgaatcttctccgcatatgcttcaattcctcaggcattgatgatgaatttccatgcttgcacttgtttgttaaaatactgagctactttttgctgatgggctatcagttttaagtttgttgcggttcgctttttttcatgttcatcaagtgattttgcaaggagtacatgattggcctcttggctatatgttaatcttctgtgggatggtggttcgagttctccgggcagcatagcttcatatccatatgccatggcaaatggagtctgcctgattgttgttttctcagttgtgtggtacgaccatagaacttcaggaagttcctctggccaatttcctatggcgtcctcaagtctcttctttagggtgtccttcaatgtcttgttgactgcttcaacttgaccattttcttggggatgcggcaatgcagagaaacttttgatgatcccatcatttgcacagaaatcagtgttgaaattgctaagggtcggcatgctgtttggactgtccactgctcgattaagaagggttcgtccgtgcgaatatatgtggtgttctgttcggcatgtctcttgcgaacagatatgcgaagttgattccacgtgtcaccgttgtgtgatgcaacgttagagtgaaaaaattcggataacagtatgatttaagaaaagcctgttaggaggcatgttagtagcgtgatagttgaataggtgtatgttttaaatttccaaaataagtagcaattagtaagtatacttgatcacgatctaactagactagctcttggttacgtaggctgttctaatagtatggacgccaggcaaaacaccaggagtcagggtaactcaagcggatccaaaagtagtcagggagttcaaattcccccaaatgttcgtggccgaggtagaggtcctagaggtagggcatgcagccggggtgatgttaacccgccacaggctacctaagattgggaaactaggtttgcaaaaatgcaagccaaaattaataagcaagatgaagagattggacgcctgagacaacaggatgcttttacaatcccacctccaaaaatgcaggtaactcttgcccctactgtgcaggcaggaccagtcactgctatgaatgtaatggaaccactgtatgaaaggttccgcaagcaggcacctccagtttttctgggaggtcccgacgtcatgaagtcgaacagtggctaacggttatcactagaattctaaactttatgggcatcaccggcaatgacagagtggcctgtgccacatttcagtttcatgaagacgctctagtatggtgggacatggtgtccctgatccaagatgttactacgatgtcctgggataagttccaggaactgttcaatgcaatgtactataatgaagcagtcaaaagtacaaaaagaaaagaatttactcagcagactcagaaagaaaatatgagtgttactgaatacacaactcagtttgatcgcttggcaagatttgcttcaggaatcatgccaacaaattttagtaagaaagagaaatacctggatgggttaaattcgaagataagagatgacctaatgatcactactgat

SEQ ID NO: 223878 - DNA, 2228 bp, Cannabis indica
gacccagagctaaatctgggacccgatctcagacacaaactcgatcctagattgggatctgtatacgaactttgactcagacccagacctagaccgggatcgaaacccgagacatagatctggatagacatcttgacccagacccaaacatggacccgcaccagggaccctaactcggaccttgagccgaacccagacccagatcaggatccaaacctagacccaaacccgcacccaaactcagatcaggattcagaccccgacctagacccagactcgaacccgaacctagacacagaatccgaatgtgggtctgtgttcgagtccgggtcctagtccgattacaattttaggtctaggtccttgtcctattcttgggtctcgatccgctttttggttggttctagtttcaagtcacgaggtatgggtcgagtccaagcatcgattcctagatcccaagtcccgaggtgggtcctacgtccaagtttggatctagggtcgggtcccgaattgcaatccaagttctgaggccctagttctggtcccggtttgggggaccaattcctaggtctaggtcccatcgatgtttgggtcctaggtcgcagtccaggtcgaagtttgtgttccggttcaagttcatgtctcaggttcctgtccgagtccaggtcccgatttgggttcgggtcccatcctaggctaggttttctcggtcttggtttaggttccaggccatgggtcccggtctgtgtccaagtaccaatatgtgttttggtctaagttttggtttaggtttgggtcctgttacagtccctagcctgggttctcatcccagtcctggtccaattccaatttcgagtctgagatcgggtctggatcccggttcaggttcgagtttgagtcttggtacgatctgggttcgggtcctaaattcaaatactgactatgggtcaagacaaagccttaggtctagattcatatctcggtcttggtttgggtttgggttcagagttgtgtcccggtagtcagttcctacatttcgggtccaaggtcgagtcctgtgtctcgagtttggggtgacgttttgggtctcggtcccagtcgggcccagttttgcgtcccagtcccccatctaggttcgaatccttgatccaggattgggtttggggcccaggtcccccatctaggtcacggtttggttctcaggtcccaggtccgagtctcttgtcccaagtcctggtcccggtcccattcaggttctagtcccagtcaagtttacggctccatccaggtctgagtctcgggttcgagtttgagtctcgagttcgtgtctgagttctggtacgagtcttggtctgggtctgggtcttggtctgggtctagatctgggtttgggttttggtctaggtctgggtccgggtcttagtctgggtttgggtctgggtccaagttttggtacggctctgagatctggtccaggtcttgggtcacgggtgctgggttccaggttctggctcacaagtcctggcgcaagtctgggttcgggtttgggtcttggttcgggtatcgatcccaatcatggtccgtgttcggttccgcatcaagatccagttctgggtccatgtctaattcctgttccatggtccgaattccagttcttgttccaatttcaagtccttagtccgagtctgggtttgggtcctagttttgaaatggttccaagtttggggcttggtaagattccaagatccacacacccactacaagttgggtccaagccccgggtcatgggtcaagatcccgttcccaatcttgggtcccgatctcgttccgattcagatcttgggtcccagtccgtgtctgggtccgggtttgctaccaagaccggggtcaggtcatgggttacattctaaatcttaggtcccaattctggttctaatttcaggttcgggtccccaatcaaagtatggacctgggtccaggtctgagtctccaatcccggtccgggttctgtgtctgggtctggatcaaagtccatgtctaggattcggttcgtgtctcgagtcccaatcctagtttcaattagagtttgcatcccgatctgggtgtgggtctgggtcctagtcccttggtgttgttcccaagtctcagtccgcttccagttctgcttccaatttcgggtcacgatgtacgtgtccgggtctagttccgggtttgggtctgagttcgag

SEQ ID NO: 223879 - DNA, 5267 bp, Cannabis indica
atatgtttagaaatgttgttttgatcatgattaagggctgttagtaagtttaatcaagttttgagttttagaactcaaacttggtgctttaatggtgaaaatcgattctgagcttagattattgttctatcacttggaatatgtttattggggtataatatgcaggtatggaaactttatttgggtttggaaacgttttggttagggtttggagctttgtgggttttctaggtaaaaccggctaaccggttttacaatgcttgtaaaatcggttacccgaattttttagcagggaaaactcgaatttttagcttgtcatttcgtgtcagtttcaggtttctagttggttgattccctgctagtttagggtattgccatattaagttgcagtagataggtttttggtttaaaacctaagtcccagttgtgatttagcgagtcgcttatgcgtgttgttatcgatgtgatttaggagcctataattcgccgagcagttgttccattcaggttgaccagcacacctgaatttagaattgaggtaagattagtataatatcatgcatatattattacatatttagtgtacatgttgtttatgcctgctagattacattgatagtagtaatagtatacatagagttgtgctgattactgataaatgtatgttggctaaaatactgatcgattccgtcacatcattatggctagagtatgactagcatattgagtataggctgacattatggtcgatagtattgtcttatgaacgttctagactcagtaccgtgtgggacacggggattagggttatgatcgggtgtatgggcgtcaggttataacccgggttatttgtatgtttatgttatgcttttcttactgagtctgtcgactcacagtgccatctgtatgtgtaggtaagggcaaggctaaagccgagaagccgtgagtacgagcaggtgaagattgtacatgtcggggcagttaggcctggagcgtacgaactttgggacaacgaggcttttgctgtaaagtcgccgggcgacaaacttttgtttatatgtatagcaaacttttaaaaagtatcttgtaaacgggatcccaaaattttatatatgtaatactttaagtttctaattaaataactaaattttaattattcacgatttttaatagcctcgttggttagcaatgagcagcacagtacgtttaaaatcacgctaacacgcctatgctagttagggtgttacaaaattagtttaattttccaagtactttgaccagtgataatgttgctacttctacaattacatcttatatgtttcaagtggctagatctcaattgactttttccacccatactcaacaatgcttcctttaataaagagattgttgaccctaattctcatcgagtcatgagcacggttgttcctagcagtatattttcttcttctacaaaagacaaagttaatacatctggtatggaagcaaggatttttacaacatacccgccaatgacaactcctcttcattgtggtctaccggtttagtgggacctgtaggaactagaattctagatggtccccaagaaaccccacagaaccagtctttcggttgtctgccgattggggctcttttaggaaccctagttttttccaactttgcgatatttagggtattgccatgttatccatcgatagagaaattttcgattttgattttaagtccccagaaagtattttagcgtgtctctcattagaattatgaatattgtaatttaggggcctgaaaagcgtcgagctgctgttccactcaggttgaccggcacacctaaatttggaaacaaggtaagattagcataaagtatgtacatgtatctctatgaatgcatgcttatattgttcacactactaacattagaatagttgtcttactgagcgtgttagtacaatgtatgatgtttaagggtatgttacggtgttaccaacacgggtacaagtgggtacggagtgcatgtggtacaacactcagtagcaccgggaagtacaatttggccctaccaacactagtacagaggtggtactttagtgcatgtggtacaaaggtcatactttcgttaagaacgttcttgaccatttggtgagccttgtacataggctcaggagggcctaagtacaagtcggtattgcattgtatatatattttatgcatatcttactgagtctgtcgactcatcagtttgtaaccttgtataggtaaagtaaaggctaaagcggaggaacagtgagttgagggctcgacattgattgtacatatcacgacagtgcaacttggagggttccgtcttattgtattttgcgttaacttttgctgtcactatgtgacctgtaaaaaaatatatatgttaaatatactattttccaaaaatttttttaactcgggatcccggcttgtaaaattatatatacatatatgtatatgtttatatatggttaaagtctaaaacaagtagtttttaagtgcaggttttacattacacgactcttcttctttgcatctctccccataaggagagccaactacaagtccagattggagggccaaaagtttcatgtcattagtcaccttagtcttagctgccacctccatcattcgctgaatgaaactctttaggctttctcccacctattttttgatgttggtgatggatcccatctccatgtcataatcgcggggagctataaactattttcagaaggcagattgcaaatccttctatgagtggattgatcttggagccaatctcttcaaccaatcttcatcatacttggtaagagtcatggagaagcacaaacacttggcatctcatcatcttattatatttgactagatgagtctttggatttgtgcacccatcatacagcttgatctggggaatcttaaggttctctgggagcagagcttctgtaatccttctgatgcatggcactgggtcctcatcctcagatttgatgagggccctgctttatttccagaccaatctgtttgaagaaacaattttctcttctaatcttttggtgtcactctctgggaggtctctctcacagaccctgttgtttaggtgattcctgaggtcattacaatgtggcctcgccttctcatttttttctttttcatacttggcgtccaaataccttctgagatctgctgtgaaccaactatcatcaaaatattgtcccctggtcccaccgtcctggttaacagaatcactagggcagtttttctatcccttgggttgtagtactttcgtaccagccttttttggcgcaataaggcctttcggggcaaaagaatgcccaagcccaaaggcgtcggtggtcttctatgcttgagaaggcctgttggctggattcatacttttctgaggaggtacgggagctgcaagtttctgggggtcacctacttttgccttccccttgtccgtagcaggagtagaggttctaatattaatagggttttctttaatgtttcctatgacacattccaatgagggttctttatttgaatctcccttgtctaggtattttaacttacttcaaaggtaagccatcattctttccgttttccgagaaaacttttcttgatgggctagtttttactgagtctcgaacaactccttggatacttgaatcactttggggtcccgctcatagtggtagttatctttattgtactcatctttaacttattctccatcgtcatcatcctcctcgtctttaacatattgatattcatgaacaccatcatgttgtttgtcaaggtgggtctctcgattgtctgggttaaatgtatccctttttcccgcattacttgggtgaggcttagagacaaagggcttacatcctccataacaacattggttccagtaggagggttattctttaataacaatttttcttgtaaacaccatgattgcagcaaaattagaagttttaggtcttccttcagctctcaatgaaaagcactaaaatatttatcgaagttttcaaaaactaaatatatagaagctaaagaaataattaaatgaaaaaatacataagatggagatttttacatggttcaggtgttaattaacctcagtctacgagttagtctattagcctttaagggcttatttgatgagtttatagtattttgcaagaaaccttaattttgtactcttagtttctctcttgaagaagaagacttagagaaatattggcaaagctttggctattttggtggtcatccccttcgtatggaaatagaagggtatttacaagctaagcgtgcgtatagacatgcccatgacccacctaggatttttgctaaaagaccacttatgggataaattacatgcaaaagaaagctgactattaggtcccttgaaatcaattatgctcgtgcctgttgcaacttgacaattgggaaccattgtatgttgccgacacgtgttgcccaaaggcttaacctttaaaactggagggcctgtggcacccaaagctttcacctttaaaagtagaagtctagataaccatcttagaagaaggtggatgaggtgcgcgtactaccatgcctagacacatgggacaagatttgatcccgtgtcagaaaacacatatataatcatcactaggcgatctggattgctccaacggtagacatctgcgacactcttaggtggttgatatttgcaataggccctttgagtacccatccaggtatcagctggacaactgtccatgtttggaccactctaggtctaggagagacattataccttccgcgtccgaaaaactaggataaggtagagtggacttttgtgtatcctctcaaccttgacttgttcccgcatctgtgaggcttttttgctataggtttttaatgggagattttaattagtataggatgaagatgtaatctcttccataataaagcacatgtcgtatgcttaaaaagacggataacaataagcatcacttaaatgttacaataagaagttatgtagttgaagctcctaatatattaaaaatttcaaatatgtcttatctaaaaatcctagaagaatttaatatgtgtcttaagtgatataaatcaaggtcgtgtgcactatatgacaaagatctttgtatgaaataaagacatgtaagtaaattattattcaaaaaatatatatgattgtttatgcaatataaattcataaataacacgttatgatagactcttgaaga

SEQ ID NO: 223880 - DNA, 2114 bp, Cannabis indica
gacctcacttgcgtgagatactacttgattgcgtacacttgcgtaataaacataaaattcgtaacatcctccaacaaccctcgcttagcgacattactcaatttcgagtaaaatgtatcagcctatcttgtgagctaattttagacctgataacttcagaattgagctatggctgtgcggcacactttgattcatcttaaaattatctttctaaatcaagttaaatcaggtcatttggataaaaattgagagagttattcctactttagtgaaggcagtttatgttgtcttgtaccagttacgagcactgacatggccaaatagtagtggttgaccatgcatgctctcggaccccttagggcgtgttttgacttgtttttttatgatgagtcatattttgagagtctcaggacccaaaaaacctcaatttgatgtctgaaaccctaatgggagaccattgccgccagttgaagtcggacaatggcagcggtcggccatggcttgtgggaagccatgggtggtgtttcttacttgtatttgatacatggatgttgaaaatataatttgaccgataaatccattttccttgtgtagtagccgaccactgccactcgtgctatctaattttagggagcactgctgtttccttatggcagtggtcggatatggaccttgtaaagccttgggtgactttattcatttgtatttgatacatatctattagaaatgcaacttggccaacttcttgtgtagggggcgactactgccactccattgtggcagtgcttcccaaaattggggagcactgccattttcttatggcagtggtcggccaagttgtttctttaccacttggtgacttctttcacttggttttgacatattattgatgaaaatacattgttggcaaagaatctcactacccttcttcttggccgaccactgctatctccttatggcagtgctcatcaaaattggggagcactgccatttccttatgatagtggtcggctatggtaaatcctaggtgggaaatgatttttctcatttgttttttactccttggtgttgagggaatctatttgaacaattttccctccatggtttgcaaggagagaccactaccatctccttgtggtagtcgtcatcaaaattggagagcactgccattttcttattgcagtaggcgcatatgccttttttctcgaggatttgatgccatattgactttatgcacaaacccaagtcattgtcatgcctaaataagtcaagtccttgttggtttccttggcggattgagatttctaaggcgaaaacgctcatgcaaacccctaaaccctagtttgagcacacttgggtgtgtgagtcccaacgccaaatgattggttggtgttttcgagtcctctaaaagtgtcatgggaccctcaagaaggatgtcttgatttatctgacatttatgagccttggtcaaagtcacaaggttgatttttttttttttcgaaaattgagtataacaggattagatcgttttctatttatattttgaaattttttcaaaaaaccgatttaatccaactactcacattcaatccaatctaatggtagcttgatgttcatttttttgtaattggattgaatttatttggttcagtgtaattggattggttcggtgtaattagatcataaatcggatcacaatcgttattgaaggttagtaagagaaagttttaaagttaggataaaaatatttgattacaattagaaagagtgtattattatactttattttaaaaaatacaatatctaaattataatttaactaaatataaagaacgatcaataattttgaaaacacagaactaaaatttatatttactcttttacataaccaggcgaagcacattactagtatatatataaaaatatatatatatattataaatttgtaaactgtgttacaaataaaaaattaggataattacatagggcacaattttttgtaagaaaattacatttctacgtttaaagaatttttttatatatatttttactgttttcattagaaataacacgaaaaattacatacaagtaatatgaaaataacatcaaaataa

SEQ ID NO: 223881 - DNA, 1707 bp, Cannabis indica
actatattattatatagtaagtttattctgtcttactgtaggtgttttctgaaaagtcagcgcggtatagttacaaccgggtattttaggccgaactaggttcgggtcccaaaatacatttttgggatttatttatggcatttatatgataaatgagaaaatgtgatttatgtgttatgtaacacgtagatctatgtcaaagtgattttaaaattgatattcatattgttgtttatactgtcttgcacggtcttggctcatgggtgctctattatgcaggaaagggtaaatctgttgttgatcagccatgaggtcgagagcttttgtggtgtattgtacatgttcaggccaagctagaccacgagggttgggtctaccaagggaaaatgttgtaatcttcactttcgccgcttagatcggcgtgtattgataacttgtaatattttgaaaaagtttttacaggatcctaaaacaaaaatgtaatcttttgaatgtttgtaagtttaataattacaagctattatttttattcagcattcgttttaaagtttaattaccgttcttagctctagtaaatcccagtttagcgggattatcatatgtttagtcgcagtttgtggcgttcctattgttagggcgctacatttttggtgttcaataaactattaaatggatcaaagacccttcatggacttcggtaattgttgaaactaacagtcttgtggtggttaaagccatggctagtgagctgaagaatctatgcttatgcttatgttcttaatttataaattgctcaatgtttatttaaagtttgttaaatgatttttaaaaaaaatctcattttgcactagagcatcttcttcacaagctaatttaaactttatctattttattaaataacaatgttgttgtttagtaaaagctaaatttattaaaaaaaacatgatatactaaaaaagaaatgttaaagatgttatttaattttctacacaaggtaacgtgggaaccatctgggtgacacgtgaaatagattctatcacttgggcgggcaatcccacttataaagagccgtgcaaggagatttggtacttgaattcataaacggaagttaggacatccgagcagagtatgccaaaacacctgactagcttccatcaagcaggtggctcgtatgcaccagccagggaatgcaagttagacaattttagagatatatcttatatatcttcatgcttgcaagacacgacactatccctggattcatgggataaactcgtattattgaagaagagagaaaacctgtttagtttcctattttacttattttaattatagaaagtaaactaatttttttattttattccttattgattttggaaaactaatttgatgtaattaatctctataaatagtagactcatcttactattcagaaacaagaatttcattcagagaaaacactcaagcgaaaaactcagagatcattgtaagagcttttgagagattaaggttttcttgttcatctactcacaagtcaatacaactaaaagggagtaggctattaatatcatcaaggaaccaaacctctataattttggtattttttttactttatattattcatatttattatttaattattcataattgcttaaatttgactcactaccgttagttaaaagcaatgtcaacaaaataaaagaataa

SEQ ID NO: 223882 - DNA, 1571 bp, Cannabis indica
taaataaaaaaaattcattccataatgatatagctacaataaaataaaagtaataaaaatagacctagatcatatgtaaatctttttgttatcgacgcaatcttagaaatctgagtcgatgtaacttaaatagttcaaaacactactctacattagacttcctactactaatgcgcaaagagttgttctcatggcctctatctcttatggagaagttaaggaatactccttaaacagatgatcttcatgtttgaaagggaaatgacctcccttatatttagccattgaaaaacataaactacttgcgagagagtaaggagtatgttctttgaatctctaataatttggatttcgagaacgtatcttgcttcatccaaattattcatctaaaatgtagtgcttagttattctttcatgtcttacaatttcttaatattatttccaatgagtaggatatcgtctatgtaaagcatcgagaatgccacaatttgatttgcttttagtatatatacatagggctcatcaattctttatttgaagctataggtatggatgatctcattgaacccatgattctaggaacatgaagcttgattaagactatatatagacctattcaacttgcagactgtaacaccctactagtttaggtgtgctattgtgattttatattaactgtgcaattcattgctaatcaacagattaattaaaaaccgtgattaattaaaactttacttaattatctctaacttgaaagtaaataacctttacataagttgtgatcctgtacttaaaatatttacagctataatacaaaaatgtttgatataaaagttgtcacctagcgactaatcaaaatataacatgttgtcccaaagatcgtacgctctaggtctaaccaccccgacatgtacaatcttcatctgctcgcactcactgctgttcagccttagctttgtccttacctacacatgaaaacaataattgtgagtcgaaagactcagtaagaaaagcataagtaacataaaccgagttacaattaggcgcacatacacccaatcaaaaccctatcttgcgtcccatgcatactgagtctagaacgttcatacattgaccataatatcagcatatacttggtactctagtcgtaccgttgtgatagcgtcaattagtacttatgccaaacaacattcattggtatccaatataactctatgtatactaatactactatttcaatgtaatctaacaggcattcataaaaatacatactaaacatgaaatcacatatgcatataattatactaatcttatctcaattctgaatttaggtgtgccggtcaacctgagtgaaactgctgcttgacgatttacaggcccctaagtcacaatattcgtaaaactgatgagtgacacgctaaatcacttttcaaggacttcaaatcaaaactaaaaatttccctatcgatgaataacatggcaataccctaaatatcactacaataggaaaatctagggtgccctaaactgccataaccggtaaatcagatcccaaccggaaaacttgtttt

SEQ ID NO: 223883 - DNA, 2452 bp, Cannabis indica
catctatagttattgtgtttcatcattttcgacactataaattatatgaataatattttagtgtgtgtatatatatatataattctaatttgttgttgttgttgttattatgtatatgatagcttattttggaaggaaagacgacggtggtttggttgaataagaagtatcgtccttctcgtataccatccgaaatatataaactccttaattaattatcaattaataattcactattttaaggcaaagccattttgtattctcttttttttcttttttttttcttaagaattttgtattaattctctcatctaagccaaaaaagtttaataataataataaaaaaaaaaatcgaagaaatagattttgtattctctaactacttttgttataatttattacatgacacacttgtaaaatttaaccaattattattattattattttttttttttaaatttagtgagcaccgatgcttccatatctgttttctctctctctgtctctctcttgccacttcatacacacatgaccaacttttttttttgcaacaaccttgggcaacgcccattggagaagccctaacaaagttttgattgaatttaaaaaagcccttatatatatttttttttttggtttatgtgtatatttctttaggtattaattttttggtttgtgactttgtttttttgaagtgattgatgaataaaatagtttgtggtagcaagaaaatggatttcgacattaggcaagataacaaaaattgatcaaaagacaaccaaataattgaagtgatcaagatcacgtatcgtagtcttagattcactacaagaaatgtcactttaccagcacatttttgtgttggcaaaagtttggtattgcgctggtaaaatagaatttacttctgtagtgttggcaaaaggggttgacaaatcaacgttggtattagaacttttgccatcacaaatgaaaagccctggcaaaaataactttttccagcgcgtaaatgcgctggtaaaagttagattttagccactacaaatgtgcgctggtaaaaattttttactagcgcagtttgtgaaatgctaacttttaccagtgcagtagcgaactgtgttggtaaaagtaacatttcttatagtgattcgtctttgtcaggaatgagcaattaatggaggttgaaggatgtgtttgagaagaatttcttgaaggtcatgtgggctctaatggcggtaagcacatccaagcgccaagaaaaaaattgtttcaatccaatcgcagtgggagaaaaagcatggtggtaagaacacactacaaaagagtttgtggaaagttcatggacgactgctctgatactaaacttgatgaaatcaagagtaaagacacagataaagagagaaagaaggaaagagctgagagatgaagtattttcaggaattgctattataaacataattactattgcaaagctcatagttatagacaatatagacatcaagatatgacagcctgtcgaaaaaatatcgtctcatgaaagttttggtttgcctaatacgacagttctataaatgtaacgattgtgttattgatcttatggaaaaaatctaattagctagtattcttaatcagtttttttttgaatgaaaatataacttcattaaaccaagtcatccgaaatcaaggatgcaatcgtgggagcagtcctcccattatatagacaccatcaacatatataatagaagctcgtgcgagaacatgaactactttgttcgtgaatcatttaacaaaatgtaaatacacatttttaagttgagaaattaaaacttaatttgttgtcttgaacaacaaaactatattctccgctttaatttatattacaattaatcatattattatattattttgaagtgctcgtaccaaatctcttaacagttcacttttaataagattatttactaatttcctatttcttatttattgactgtgttatcctatgaaaaaaaaatgtattatagtattcttaaccaattattggagtcctataccaatatttgtatatatgtaaatctacttcttatcatcataatttacatttattacccaattatatatttatatattattgttattagctttgaaaatttcaagtaataatgagacatgggcaaataagatatcttcatgatttgtttctcttttacaaatataaaactatattatttaaaaaattaggtacaacgaactcatacatcattcatatgcttatgaattatgataccttatgtatatacatacctaattacctataaaattaattctgtcacacatcttaatacaattatattaatattattatttctgtagatccatatagaaagaaaatagactagaaaaataaaaatatttaaatggaatgacaattcgtgttatcatttcatatcgtgttcgtttt

SEQ ID NO: 223884 - DNA, 1139 bp, Cannabis indica
tatgaaataggattcaattggaacggggaaagcctgaggtgattaaggaagtccttgcaataatctcgcagggggattattgctccagccctaatgtgtttaaggctccaagctccaatcccagtcgagccacttatactggtctcgccattggtcccctcaaaggtttcacatgtaagttgcactggtgggtaatagctaaactcacctgctactaccgatctaatcgacaatctcgcttatactcaataccacaagtcctcaatgtatcacctacataacctccgatggctcgcaccttcgactctattaactctgcctcgaaagtgacattagagtcttggggagtccttgatttacgtggcttgtaagacatgatttcaaaatccaagtcacctggttcaaaagcacttgtgaccttcagtaaaaacaaaggcgttgccaaaggagtagaagacaaagttgggggggggggttctagccaagctacgtcttggaagaaacgacgcctacctttagtaatttcttgcaagaaagcgtctgtggcgactagcaacgtcttcttggtgaattttcaccaagtgttctctaattcttgcatcatttacctctaatttggatttgggtcctagagttctaggtttacatgggacgataagctcagtaggacactctatttctaattcttctggacgataaaattctaaaccagattgggacattgctgcaaggaggaagcaatcccaattcctggaggaaatttatcaaaccagaagttggtaaatttgagaattttgaaagacctacgttctgcccaaaccttaatatttacccaaaatcaattctgccctaaagttttaagaacaaaatgaagttactaaggtgcggactaagaaattagaaatcaaaccgagaaaccccacatcaaaagcatgtaagaaaatgagaagaaaagtcacttactatttggagtttgtttttgggacgatgaacggctttgcaatctacgaagcaatgtacggtgtgaagatccctctaaatgcttgaagtcgagaatgttaatgacagagatggcatgcaaggttttgggcaaacatgggaatggtttttctgcagaagtagtgcaaaggtggttcctt

SEQ ID NO: 223885 - DNA, 2209 bp, Cannabis indica
aaaaataaaaataaaaattagagattaccttgactgaaagtgagaaatgtgacactaaaatcgaaaactcgagcagcgattgttggaggtgtggtggttcatttttttttttttatgttatagaaaaacatgaaatgatgatgatgagagagaaaatgatggtgaaagtggtgaaggtggtgaaaatggtggtgggcggtggtgattagggtggtgggcggtggtgaagtagaagagagaaaaagaaacaaaaagagaaagaaatggggagggggtggggttcgggatttccattttattcagcctcaagtttttcagaggcatttagaagcacgaacaaaagttaattctggaaaaaacttttaccggcgcacttagttgcgctgacaaaaatatcacaataaactctaacattaaacacaacgtttcatttatcgtgcaaacttttgccggtgcaattaagtgcgccgagaaaagtttccacttacttttctgcgcacattttcaatgcgagagaaaagaactgccaaaattttcaccacttttgccggcgcatttattcatcggcaaaagtgaaattaaaatacgtcaaaaattaaattcacttttaccggtgcacttaccttcgtcagcaaaagtgaaattgaaccgccaaaagctcccaccttttggtggttggttgaccactaacaatgataaattctccagtaaaaaactatacgtttaccggtgagataatttgttggtataaggttaacctggtggaatgaaatgcgctggcaaaatggcttattcttgtagtggtaaatgtaaaaattcaggaagaatttttaacatgtcgtatattttagaaggcgaaattagtaaaaagtttagaaggtaaaattattaattattctatataatatatatagagagatagcattgttattagatactagtagtgtctagctagcaccttctagacgtgtcgctttgcgattggctgacgatattctctaaaagttattacattaaaatatatgagactagatacttaattagactaataataatattaacacataaaaatatactagacactactagtatcctttatattttttatcatatttataattatacagtatactacatacattcatatttttattaatgtatgtgcgtacatctgtgcaattagactaaaatattagaagtcttttttaaaatataaaagcatgcacattacatatataatattattattaataaattaagtagaaattgaacttaaaaacatataaaaaaatgtatacggaataaataatataatatttaatatagatgcaatatatatttgatgactccataaaaagggttgacctattatatattattatatctattatcattattatataatagagtatctctaatgcaattgttatgtgttcataatttcaaaattgaataattaatgataatttaacaaaatggttagctaaatatatatttatcgagatcgatcgacacgtgtacgtgcacattatggtatatatatatatatagttatataaatatatctggatccaaacaaatgttacatattggtgattatcatgcatttttacagacaatcttgatagatggatgttgtcatggattatgtaataataatagcttagaaaatgtccccatgtgcttgcttagtttcccgagaacatgtatggaaactacgtatactatatatacatgctaattaatcaaacagaacgtttaaaattgtatctttataagaaaaacatttaaaatgtacatatacattttgaaaattgtattacttcatttttatgtatgtggtgttatatattttaaaatatatatatatatggtgatatacacctttgacatgaaataatgaacaaataattttacaggagtgataccgtcaatctcctgttataatttctcttaattaatcttcacgcctgaaaacatatatcagaatattatttttttttcaaattttcttacggcagtgtttgttatgcttacaacatcattcctataaatttttgaaaatttttgaatagtttacagtaccgaaaaatacgtttgaagttttttaaacatgcccgcataataaactgaaatatcagaaactttattttcggtatgtaaactattacaaaaaaatttaaaaatttatagggatgatactgtaact

SEQ ID NO: 223886 - DNA, 1451 bp, Cannabis indica
cttggcccactgtagatggctatgtgttaggctgctcgagattggttcttggtgggacccttgtgttcccaggggtttgcatagcagggtttgtcaccattgggtcactctgatcaaccaagcctctgcgagtttgcaccaccattttgtatgcatgttgaaacttaaaacaaagaacaaacatggatttttttctctcattgaaagcaccaaaatgttgacctcgcttttagtcaacaaaatgagtcaattatgaagcaatttgaaatataataaaaatagaacaaatttcaataagcaataaagaacaccaagttttgaagagatccaacccctttagtttggtaatagcctactccccttagattgtattaactcgagaataaagaacatagtgttacctctctcaaagctctcacaatgaaatcactgagtatttctcttagacctctctctctaaagtaattctttcgattccttttacagtgaagctagtcactatttataagggcttaatgctcgagggaagatttcccttttgcttacaatagctataattggaaagaacatttattacataattagaatacatgaaatgggggattgagacagcctgcaataccttctgattcaatcccctgattgtagggattgccttcgtacttgggcttccgataccattttgaactagtcaagtcttggtacacagctctgaaaaccaaacttattctctactcggataatcttccctttaccctactcggataagcagatgtactaccagaatcccgttcagaatatcttttcgttcaggtgcaaagaatgttggacacgtgtcactcgtacatgttgccacaccatagtgcaaaaaaaggggataacacaaagcatgccctttcgattagacgatgagtcatcctagttcgaggaggttcctctgtcgattatagatatctgcatcattcattcatgaatgattatggtcactatgcaaaaataaaaaaaaatagttccaaagctcaagtaagaagtctctactcattctccaattaaggtctaaataaaaaaaaacaacagcttaagcctcataacaatgaaaagggacactactacaaatatgggtgttcgcgacggtcctaaaaacatattttttagagaagtgttgctaagaaaataaagagagtatttaacgcgtttcaggtctaaaatttcatttctccgtatcttaaactccaaaattttatttcccacctcttaatatataaacccccaaaaaattagatctcattttttcaaagtcatttataaattttgtttcatttgtcggctctctctcctctgcaactacgatccacgccatccgtctcctccactttgtccctctccttcgctttatccctcttctccgctctctcgtggcagcacaaaggtaagcacaatattctcttatt

SEQ ID NO: 223887 - DNA, 2137 bp, Cannabis indica
atatacgaagagaaagtagcagaaaaatccaaggaaagaaatccctggagatggatactctgagaagtgcaattaagaacggagaaggagagagggaaaaaggcgaaaagaagggaacagaggattaaatgtgggttaaatcacaataaatgaagtaagagagagtaaatgcaacaacagattaatgaagaaagattaaacaccacacgggagagatcaagctggatgcaccagaactgtaacgggatgcaacccttagaaagttccagagagagaaaagttttggatataagttatattgattctaatttcattgtgagagttggacaattaaatagtggcagaaatatacggtagagtgatctctcatatatgagaagctgtcttatgcatgattcatgaaccctcgaataccctaactgtcttccatgtaacacacaaaacctttcaaaaaagagtgttatagtgcctaagatcatatgaatattaccttattagtggtcattctctactcaaagattttcgctttaagagaatttaattgtactatataaaaaatattacccacaaaaaaaaattgtaactattcaataattatatttttattataatcataataattatatttgttttaacttactatataataataggatgttattaataaaattttcatttttaaaattaaattaataataattaattgtttttttttataatttttaatttaaattatttactacaatttttgaaaaactaattaaatagagattaagaaagaaatgaaatagtaaataatagacaaatctgatcttgtctcctatatccaatcaaggcagtacgtgcaccaccaccattcttttagtagatagacatcataaaatttttcttcgaaaggaacaaactttgaatgacatgagttcattacttttaaaggttaaacttttgcgtgacacgtgtacaagtagtagaaaataatccccattatccaactgcaacattcacgggcataatgcgacccatgggaccaaccagtcagctcttcattacatgtaatttaccccaatagtgggaaataagcggaaatcctaagtgggtcatgggacgatccatacctaccacttagcctataaatactccttcatttccatgcaaaggggtcaacatgaaaagacatagccaagactctgctaaaattatccttgatcttcttcttcttcgaaaagatattatgggtagagagttagggtttcctacaaaaatgttgtaaattcatcattattgcccttagaggctaatagactgactcgtggactaaggtcatctaacacctaaaccacgtaacaatcttcttctcctacttttctccatttactatttctttagctcttaaatattttagtttctaaaaatcttagtaaaaattttgctattttcattgagggtcgaagaaagatgaaaaccacggttactaccatggcgtccacactaaagacaactcacaaaaggactcttcaaggtggcctcgagataatcatggatgaagtaaaccccctctcgctggagcacacacaaccgagcaacgtgagaggtagaggcacgttcaacgtgaacgattaagaggaggacctagacaaccatcatgagcatgttggtaatcacaaggatactaggaaccatgaagggaaagaagtggattatgagggttgtgctaaaaatgggttttgcaaagatggccgccattaggaacatgatcctgaggtaacgagagtttccgatgagctgttcaaaactcagcaaaagctagctcgtcaggaaatattttctcaaagaatggaaatgatgttggacagcctttgaagcaagtttggggatctagacgaaggagactctaatgatgatccttcagtggaatacgtcatgagaaataccacagaaaaccccattggcattggaacctttactcctgtacaggagaaggggaagatgaaagtgggtgacccaaaaaaactcttccgctcctgagcctcctcaaaaaaatacaaattaggacaacaatgccttcttggagcagaagacggccaatgcctctaggcttggatgtccttcagcctaaaaaggccctgtgccgccgaag

SEQ ID NO: 223888 - DNA, 1658 bp, Cannabis indica
ctcttgctgttacaacaaggagccattaactggagtagcaacatcaaattcaaaactacctgtggtgaaggatgagggtatatcaattgcaaaattaatcttcaagactataaattattttttttttgaacttgaagcttcatttaacagagaagaaacaaagcatacaagctattacaaggaagataaagaaacattccacaacaactctttatctaatcctaagcctaactttgctaaattataagcattagtattcatatccctgctaacaaaagcaactcgaaggctaggactaaaagacaaagagtttttaacatctacaagcaaatcatcaaaaatattattatttcaaatacaattattaagtttatccacaatacttttgcaatcggttttaatgacctggataggcaacttaatcaaattagaccatgtgaccgcaagagaaacaaccttcgcttcagctactgcaggagcaactaaaccagacaaaggcttaaccagccctgcaactacctgatttgaatcattcttcaccactacgcttaggctgtaaatcctcttcttaacatctagtgctgcatccgtaaaaacctggcaccaacctagagaacaccccatgacttcagaagaatcctgatcacattggtcacgaggagcaagtctcttctgttgagcatccaaatactggaggagaaaattttgacaccaggcaaacatctctttcggatcaagaacaaaccgattaaagaaagcattactttgattccaaattgtccacaagaaacacagcacaatatctgcagaacctttatccaaacttgaaaaaatattagtaataaaatgcataatacaaatgtttattttgtaagtaaaaatgggcaaagtttgaaactttccaagctttcctggctctaggacactctagcaaagcatgcacaattgtttcaggatgattattacacaaggggcacaaatgagaagggataatatgtctttgaaagagcaaaatagccacaggtataaagtttgaaacaattctccacataaagtgtttaactttgggaggaacatttgcatgccaaattttagtccagaaggatttcaaagcttggaaagatgaagttgagggaatgtctctattctcaagggctaaatgatatgctgattttacagtaaaaagaccagagctatccctgccccaaatttgctcatctttaccatcaagtcctgagaaaggaacctccaaaatatcattgacagtagaggaatcaaaacaagaattaagcctatcaaggttttaagagcccgactgattaatgaaataagagagcttagactgctggcaatccatatcacaaaggggttgcttaaatttagaagtaggaagccaatgatcagttagagtattagtagtctcccatcatccactttccacactaaaccagaagctaataaatccatcccccaaagaatactacgccaagagtaaagaaggattactgaccagccttagcatttcagatagaagagtgaggaaaagtacctaagctttgagagtaacgactcaacaaagaattaggttgagtgaagatacgccaagcctgcttagcaagcatagcttgattaaaatagacaagaagccctaaaaaccc

SEQ ID NO: 223889 - DNA, 2578 bp, Cannabis indica
acacttccatggtgtccccaatcaaatctgcgaacatcatatttaccagcctctgatatgtcgcacctgtgtttatcaaatcgaagggcattagttcataacaatacagacctcgatctgtaatgaacgaggtatgttccagatctggttcatacatcgggatttgattatatcccgagtatgcgtccatgaagctgagaagttcatgacctgcaggggcatcaacaagttggtcaatgctaggaagtgggaagctgtctttgggacatgctttatttaaatcagtgaaatcaacgcatgtgcgccatgagccgttaggcttgggcacgaatacgggatttgctaaccaattggggtagaacgactcccgtatgaagccgcatgccaagaggcggtcgacttcttcctttagtgcttggtacctcgtggggtccattttatggtgcttttgtcagacccctcgcacttcggggtcaatgttcaatcgatgacacatgacctgcggagatattccgaccatatctgaatgtttccaagtgaaaatatcaaggttttgtttgagaaatgtcgttagtttttctcgttgctgaaaagttagtttagaactaattttcaaaactttattattatctacaggatcgataggtacctcaatagtgtcttccacagcttgggcgtttccggcataattgaggatcctaggatccgaatccggtccatcttcatgcgacacttcttctatcgtgaagacctcctgacgaggaggtggtgcctctagcagatagatgacattgactgacttcttttttgcaagcttaactgctgtgttgtagcattcttacgagtctgattggattcctcgcacagaacctactccagcgggagtatggaacttcattgtgagatgatagattgacgtcacgatcttaatctctttcagaattggccgaccaatcacggcattgtatgctgagtattggtcgattactgcgaagtcagccatcgacttggctgctacagggtcggttcctaaagtatccgggagattgatcatccctttcaatgcaatgacattgccgataaaaccttatatactcgacgttacaggttgcagatccttctcatgcaaccccatctgtttgaaggcttcgaagttcaagagattcatagaacttccattgtccattagtatacggtcgaagttatctccgccaatattggaaatgataactaatgcgtcagaatgtgggtggtgaacccatctcgcatcactttccaagaacgtgatgtcgtcgcattctcttttgaacagcttctccggtcgctcgcttaggttgttcacgttggtgagtggcttctctcttttgcatatcgctcctgcgactttttggagtcacctgcaatatgtggtccgcctatgatggtcaagatattgcgaggagttcttgaaccactcgcatcctggttttcttctttttcatcctctcggggatgactttcctcattctttttgtatttactaaactttcctctcctgattagctcttcgatttcgtcctgcaaaacaaaacactccaaagtagtgtgaccaatatctctatggtacttaccgaattttttggggtctctcttgccgcggtttcccctgatcgggggaggcttcttgaagaccccattctctttttgatgtcgtagatatggtctcgcggtactgcgagctcggtatagttcacgaaacgcagtccacccttcctttccggtgaggattccttcttgggggggcacttggccagtttcagacttcgctgtctccgtggactgcgtcttcttggacttcgtcctctggatttcttccctcggggattgcgggattgtgatcgtggcactggtgacttacacttatcttttcccttctccaactctgccaaggaattctcaatcctcttatgcggttctgccatggcgaagaagacgacgagcgattttggtcttcgagcctgcagctccttccaaaaatcggttctcgacaggacacctgttattaacatacaaactagcgaagactcgggagccttctcaacttttgttacttcagcattaaaacgcttaaaatattcctgtaaagactcacaggctcttgtttgatgttagccaaagtggtatagggcagcctataggtcatcgtggcttggaagtacgtgatgaacaggtcgacaaaggtctcccatgttgagatagaagcctcaggtaattggccgaaccaatcgtgggtgttttcctccaatgttgccgcaagaatgcgacattttacaagctgaggtacctgatccacttccaaaatagtattgaatttctctaaataatcaatgggattataggtacctttgtattttagggattcggataaccggaatcctttagggagtcgagcttgtcgcactttcgtggtgaaaggagaggtcccatgcaacttgtatatgggctttctctgctactcgagcattttcaaagcctgcagaagcatgctttggtcaatacccccggttaagggagcagtgactggtgtggctgcaggggc

SEQ ID NO: 223890 - DNA, 1491 bp, Cannabis indica
gaaaacaacataaaatcaacaagaaaactatataaaagtaacatgaaaataacaacaaaaaatcaaatacatctaacaaaaaattaacaacaaattaacaagattacaacataaaaaagccgtattttctgtaaataaaataaaaaaatcataaaaatatttataattctgtgaaaccatatttttgtaaatttttttgttgtttttatgtttttgtgaaataatccattattcatatgtactttatcaggtttatatgtattagtcttagctattaagtcttattcccatgataaaattttaataattagataaatattatattcgatgtgattaaatcaatttaatatatatgaatcagattgggccttgggtttggccgtttggtgagccctaagtatgggcttagcttgcggccgtaacctaagattacgcttgtttatgcgtgttgtctcccacattattcatatgtgagcaatttgtgaggtttataattatattagttttagttaccgaagtcttaatcttatgataaaatttttgtaattaaataaatattatgtttagtgtaattaagtcaaccctataaatatatatatatatatttataatattaatgtaatcttcatatgtatgcttgcagattttaacaaatggactatatcctagcattgagcacagagttgtagtaaaccctaaggaggaaaggctctcaattgctacatttcttaatccaaatttagaatatgatataggcccagtctcaagcttgatcactcaacaaaatcctcccaaatacaaaacagtgacaagtaaagaatatatcaaaggtgtattttccaatgaacctgatggaaaagcttatgttgatattatgaaattgtattaaaccttaattaattacatctactgtaggacttgattgttattgaggtggattttatccttgctacaaaggcaaaagatacattactaattactaattactagttactagttactagttactagtaataatgtctttattcttaaaattgtgtaatatatttttttttaatcgagaagaaagcttcattaatcataccaaacccacacaccctcacggctctccaaaggagaccaacctcacccctcacttaattacaaataaatctctttagtaaatctatctccactttggatccattcctattcttgagaagatacaatctatacttgacatcttttttaattttgctggctatacaagtaatagtattagagtaattcaaaaaaatacaattgttcatattccttcaaatatggtatattgtggctgccaaaataacaaccagcaatctcccaatcaagcttgaatttcctagccgaagccaattattccagcttagccgaccaacttctaaaccccacccaagcaaagactgcgtcaagaactagctatgagaacctacagttgaagaataaatgctgatggttttcactatcataacc

SEQ ID NO: 223891 - DNA, 903 bp, Cannabis indica
attatatgatgatatattgctaataaaaatgaagaaacaaatatatgcaaaccgtgccatttacaaaaacaagaagaaaaaaaatcctaacatcacttgttaactaaaagactaataagctagcaaaaatgaaaaaactaaaaagtaatagacccttaaaatagatcctgtgaaatatttatcatttactacatggtatatattgagtaaagtttgacccttaaacacatcatacatatactaaaataaaatatatctgtattggctttggtgaaagagtagatcgttttgtgcaaatagtaatgatacgactgaatattagaattggtttgcaatttaggtacaagacttgaatttcatttgtttgattatttgtttctttgttgtaatactaattttaatccttatcattctgaaataaagtacacaacatagagagacttcgttttttgttttttgttttgttttgtattttttttttttttttggtgattaagaatatagagtaacaacatttttgttaaaacggtagaaattcttaaattcgtattgacaagaaaaaattcctaatgttaaggtcagaagattctacttttagctgacttaatagttaatagtaatatgtgtgatgtggaaaaggacaatgccatatataaataaataatattttatgtatagtttttgtttttatattgtgctagggatttgcgtcattcgtctcattcacattttctttttcctagtgaacatttcttttgttttacaagataattaattaacatgtgatacaatatagtgaattaatgagtgtagagttgaataattaatcatatatattatgtcatctttttatgagcaaattaagttgcggcttttgtttcttttgataactcttacgggaaa

SEQ ID NO: 223892 - DNA, 2105 bp, Cannabis indica
agaagtcaagtttgatactctggccatttgatttcccggccatatagacgccatcatcgaagcgcttgacgcaatgcttgcagacgacgggggtcaggagctcatctcttttagcctttttcaaggcctggtctctgaaatctcttagctccttcacctccacaatcaggttggctgttgactgcaagtctgcctgatgcaactcctctaaggacttcaccctggcagccatctcatccatagcttccctggcttcccgaagctcgcgttttgccctggctgcggcctcgccctctaccttcagtgcctcctggtgcctcgcctctgcctcagcctccctttgcttggcctcctctcggaactttgcctctgcaagggcctccctttgttgagcctcctcctggaacgcccaccttttggcagacaagtttcgcaggatcctcacggcctcatctatgcccccaaactcggacatgacgaagccatggtcgatcagggtcttggaaaggcggccgatctcggcagtaatctgaaaaaagaaacaagattgagatcagatgccttagacaaaacatcaaagtagggaataaattacaagtactcaccgcagccatggtagagctgatgtcttggacctggtaaacagagttcagggaggcacaagccgcatatcttttggctgggaactgagccaggtgggagacgaactggctggtcatcttcgaggcgaagggagctagggtgggcccgacgaagcggttgaaccaatccgtcaaagggtccatgttaaggtcccaaggattttggaaggcgtcctcgtgcaaagtgttctgctactcctcccgcagaatcttctttaagccccccacctcagcgtgcccccgactgtactcgtccagggcgtagttgtgcttggagactcagaggttttgcctctcctcatccgcgggaaccagggtcagcacaatgccgtgaggcacagtgtattcctccgcttcggaaggaattctagagtcgttgctcaccgccggagtgtccctcctccgggtccgcttgggagtctcagcctcaaccatcttgccctttcgcttgcgctcaagggcggccgcatcctccacctcgccttcctcaacttccccctcctcgtctatcaagacgatcgtgcctaaaggggcacttgatgaggacctcccgggggtcaccgactgggagggagccggaggaagagaggcatcagggctgtaagcctcggcgagagtagccaggagatcttccataggcctgactgctgcaataaagaaacaagctaagtgttaggatattcgcaagaaaggcatgcgcccaacaataaagcaacaaaactagtcctaccctgactctctaattcagccctagcaaagtctcgaatcacaatgctggcttcatcatccccgagaaagctttccgaggggagaaaccagctggaagataaatgggctgaattgtccaggggaataggcgccggaggtccagagcccatccaggatcgacctaaaaaatggcctaagtgggacaaataatattctttggcgtgattcccccaccaggtagaaggcattctaaaattacgaaggcactcatcgaaccctataggtctaaggtgggtatactctcagacgggaggaacaaaatgtattattaaagaagacttaccagaacctgaagtgttggcgtcgggagcaccaacattggggaccgcgaccacatgcttgggcctggggggcctccgctccggaggagcttccagacgaagggtcctcccggctgccgcctgggccttgatgtaggccagctcctgttccctcttaaagaggtacttctggtaccggtcctccgccgaggcgattatctccacccgaagcgccctttccacagcgggagtcctcacatttgggcagatgaccttggagagattgaagtcatccaccgactgattctccaatatcagcttggccttccgacagttctccgttgtgaccaactccccaacgtcgagggccttcttgtcgtaagtagagaaagtcttggcccactgcaggacaatcgggtaggcgcggtccgcatgt

SEQ ID NO: 223893 - DNA, 3620 bp, Cannabis indica
cgtaatggggttattgagtttggagaatttgttcgatcactcggtgtctttcacccaaatgcagatgttgaagacaaaattgcatgtaagttaaagatttctagtacttttatgttctaactgttgccaccattagaataacaaaacagaagccagaactagttagtcaaagaaaaccatacattactttcttctaattgactaagttggtggatgggatttatctttttgcagttgcttttagattgtatgatctgagacacacaggatatatcgagcgcgaggaggtgagtacagcaatttttttttttttcttaccttctcattgttttctctaaagtttttgctttatctgagttactaaatgtgcattttattgacagttgaaggagatggttttggcccttttgcacgaatcagatctaatactttccgatgatgaaatcgaacaaattgtggataaggtgcaaatttgtatttatttatgtaatcaagatcctttcttttttcaaccaaacacttctgaaatctttattttcttcagacatttggtgatgctgattcaaaaggcgatggaaggatcgaccaagaagagtggaaagcatttgtgttgaaacatcctactctgataaagaacatgactttaccatatttaaagtgagtaataaattgtgttaaaaggcgccattgatcatcgaaaaaatctgagcttccatgttggagttatttgttcttattccaattacgaaacagctcattgcatttgtgttttctccattttcagggatataactctagcttttcctagctttgtgctgagctctgaagtagaagattcagaaatatgaggcataaagatataaatatgaagaggatatcaacaatgtatcatccttctatgatgaagcaattcaaagatcaaacagcttcataactaagatgacattacaaggaatggaaaattgaggaaacctgcaaaataaatcattccttgagctgcaagttacgaccgcaatcttcgaaatctcatctagttggtcagattgcagaactaacagagagctagggaaaagttgtaaataaaatcatatatgtgcaagttattgtcatttggaacctctttccttttttaatgtttggcataactaaagaaagcaaaaataaaaactcctcaatttgtggtgttattagttaataatagtaaatgattgtatggtaattataataaggataattaggatttttgatccttaaattttgacatgtattaaattatgttctttggatttttctggccccttaaatttttttccagaattattgagattgttggatttaaggatttttatcaaattttatttaattttactaattcggtggattctcaatgtattaaattatgcttcttagactttgatacccaccaaattatgtcccttaaactttgacacgtattaaatcatgtccttcaaactttgatttatattagacttttcttactaaaattagataaaaatccttaaatcaaataatttcaataattcattataaatttttaactgccttaaaaattcaagagcatgatttgatacatgtcaaagtttagaggacaaaaatcttaattaaccttataataataataataataataataataataataataataataataaaatctttctttcttctagactaaacacacatcttactttattttattttcattccaaaaatttatatggataccttactttaataagttttattttatgtaaaatgtacattttttttaaagtttactattcatgctttacatttatagaatattattaattgctttaaatatattttattaattattttgagtttgggtctgggtttgggtctgggactgggtctgggtctgggtccgggtccgggtctaagtccagatccgggtctcgtgtccatgtccgggtccgggtctcgatctaggtcccaagtcttgggtccggaactcgggtcctaggtctgggtttggatctgggtcagagtctgggtcccgtgtctgagtctgggttcgagtccaagttcaggtccgggttcgggtcttggatcccgagtctcggtttgggtcttgggttggtccgagtccaagtctcgggttaggtctccagtctaggtccgagttcgggtctagtctgggtctacgttcggatcgggtccggatcccgggtctgggtcctaagttcgggtccgggtttgagtttggtctcgtgtccaagtttggatcttggacaggttcgaggtctgagtcttgaataaagtttttttaatatattaaaatcgaatcgaattagatccgattcggaaaaaaattaagcgagacggagcgaatctgatccgagatccaataagtatccgaatgttttgagtcataagtgatctgtcagatcggaactctgacctattccaactaaatggatctttttgacatccctaactaaaacataataaaaatacctattacattcaaaatcaccaaaatcctttcattcactcttctcacagatcatcgctcactttctaaattcaaaaacattaaataacatcacattgagtttatttaggtattttatgaactcatttatcattttttactctcgttttctttgagttgtgttataaacataacaacctcagtttgaatcaatcaagctttaatattacaaaaccaaaaattaaaataagataatgcaatgaaaggaaattaagaatagaaaagtaagcgacaagcaaatttaaaggggttcgaacgttcctctacaatttgtagaaagcctattccctttgaattccttccaaaaaatcctccttttactatgataatgtcaaattacaaattttggtttcagataacttaaattgttacaatgatcatcttctcctttgagcaacatccaattaaagcttgaacacttagaaaacttccttgaagatctcttcttccctttgatttctcaattttgttcatctatcttcatctttaacattcttgctacaagttacaattaaatctcgccatacattaatagttctctcagttctctctctaattattttctattattttacaattaatgaataaaggcttccgtttctaataaaattaacaacttattgctaaccgaattaactaactctaaaatatctaacccgaattgtcttgaaacatgccatgtcatcaaagtcgttaattgtttggtttatttaggtttgatataacaagttttagtttggatttgttagagttagttaaaaatgtttgttaatactggtttagtgagttaatcgttgttgtttctgttgtattttattgtttagttgttctcttaacagcctttttgtaagtattagctaattctcattaggttgcttactagttaagattatgtttaatagaggtgtaaacattgtattatatttgacttaaaaaataattttatgatatatttatattaatttatagcattgtgctccaatgcacaaatacaaacttgatgaaaaatttaataattttcttaagagcataaaaaaaaaaatctatcattaattttattattattttatcgtataaa

SEQ ID NO: 223894 - DNA, 1442 bp, Cannabis indica
tccgaatcttgacccagggcttggacctgacccgtagtcagtgtttggatttgggacacataaccggacacaaacccagacccggactcaaacccagacctgtactcggacccaaaccctgacctagacaaatacatgtaccattgacctgggtccaagtccgagtttgggtttgagtccaggaactagaatctaactaggacccagaccgggacgcagacccgagtcaaaagttggatcgagactcgggacacgaatcttaacccaaacacggacttggacccacacccagacacaggacacagactgagatatgagactaagatctggatgtaggacccaaacctagattggagacccaaactcaaaattagaaccagaattgggaaacatgactaggactgggacccaagacccaacccaagtgtcggtcttagacctagacccgaacacggacacggactgagacccaagatctgaatgaaaacgagacagggacccaagatttggatctggatcttgacctacgacctggggcatggacctaacccataatcggtgtctagatcttgcaatcgtaccaagacccgaacctggaacttttcccaaaccaggacccaaacactaactcagacccgaaacgcaaaattagaacaagaaccgaaatcaggaccctagaataggaattggacctcaaccaaaagctggatctagatgcagaaccaaacacggacccggacccaggccgggatcgatacccggacccctaccccaacctagacctagacttgcgccaggacttgcaacccagaacccgaacccaggacccgtgactcgggaactagaccagtacccaaacccagacccagaacaagaccaagacctctacccagacacagactgaaacccagacccagacccagacctagacccagactctgaacaaagacccagacacgtaccagaactcgaactcaaacccgggactcaaacccagaccaagatcaaggctaagacccagacctggactaggaccgagacctgaacctcgactaggactagaacctagactgggaccgggacctaaactaagacccgggacccgatactcggacctaggacttaagaactaaaccgtgagcaaaacccagaccaggccaagacccaagacaaggacaaaccaaacacagaccgggacctgcactaagactaggaccctaacccagaccgggacctaggaccctgacctgaatcggggacccgaacccatggctcaagacccaagacccaaacctagacccaaacctgtacctgaaacccgaaccaagacccaagacatgagctaaaactcaagacccatacccataccgagatcgaaacacaggaccgagacccgaacccgaatccagacccgaacctagaaccaaactcaagacctgaac

SEQ ID NO: 223895 - DNA, 3550 bp, Cannabis indica
aaggatttgaatatgaggtagtggcaacggttaatactggttaaagactatgactgtgagattctctactaccatggaaaagcaaatgtggtagcaggtgctctaagtcaaaaaggtcctaggaatgtctatgcattgaagaagatttcaccaaagttggctaaggatatgaccagagcggggattgagtttgtggttggaaaacttgccaatatcatgttacagtctgatttgttagaaagaatcaagacagctcagcagaatgatccccaactacaagggtacaaagaaaggcttaaagccaggtcagaaaagcactttacaattttattagacggattattacggtataagagcaaagtttgtgtgctagtcgacaaaagtattagagagaaggttctagatgagtctcacaccacaccatatttcttgcatccaggaacaactaagatttatcattgtactagtggtcaggcatgaaaagtgacattgtagagtacgtgtcaaaattcctaacttgtcagcaggtcaaggtagagcatcagagaccagtgggtttatttcaacttctgatgattcctgagtggaaatgggaggaaataaccatggacttcttggttggattaccaagaattaatagtagggttctatgattctatttgggtaattatggatcgatatacaaagtcagctcacttcttaccggtgcggactacgtattcgatggatcagtatgctgatctgtatgtcaaggagatagtttgacttcatggtgctccaaagttaattatctcggatcgagatccaaagtttacatccaaatgctgggaaaatctacaatgagcaatgggtaataaattaaagttcagtacaatctttcatcctaaaactaattgtaattctgagagaactatatacttacttgaagatatgctacagacgtgtgtattagactttgaaggttcctggagtaagtatctccctctaatcgagttttcgtataacaacaattatcaaagtactattggcacgacaccatacaaaatgctttatgggagaaagtgtcgttcacccattcattcggatgaagctggtgaacgaaggtacctaggacctgatgcaatccaaagaatgagtgagaccattgagaagattcgagctcaaatgcttgcctcataaagtagacagaagagctacgcttatccacatcagagttattaaattccaggttgggaatttgtcttccttcgggtgtccccaatgaagggaattcagaggtttggaaagaaggaaaagttgagtcccagatttatttgagattctgaaaagggttggtcaggtagcctatcgactagccttacccactactttatctagagttcacaacgtgttccacatctcgatgcttcggaagtatgtgtctgataccactcatgttctaagttatgaagatattgagcttcaggcatatttgtcatacgaagaacaatcggttcagatcttggacaggaagaaaaaagtgttgcggaacaagactattttgttagttaaagtgatgtggagaaacaacaagattgaagaagtgacctgtgagcagtgtcccgagttattccgataaattttgaggacaaaatttctttagggaggagatagctataatatcccaaaaaatataatagtaattaagtaggcatattttattaaatatgtgattatttgaataatggggtaagattataatcttatactaattgtgagttaattagtatcaatctggtaaatgaataaatgaatcgtaatttgttaattatggagattttatcgggttatgtaggtattttaaataccattttaaaataaaatatttattttcgggttcggcgatcgtggaaaactcgacggagtggtcagaaatatcacgtcggttgaaattgtgttgtattggaattatatcagactaggataaaatgttgagaagtaggtaaacagagaaaaataagaaatgacaaaaatacccctagattatattatagcttaagttttaaagggaagggtagaataattatattgcaatgttagattcttttgttttttagtgtttttaggctgagattttgttgataaaattaagtgtatatgttaagtattatattagtaaggatttataacatagaaaaattaggaaatgcccaaagttttttccttctctctcttccattcgaaaaacctagaggccagctgaaatcaaaggagttcttcatcaatttcttcagattctagcatatttcactcccaaggtcagcctagaagctttgaagtaagttcctttctatgttgtttaaggatttttcaagttttaagttagttttgggttagggttttaagatttcagggctgaggtgttaaattgaagttagaacaagttttagggtttgatttaaagattttttaagcttaatttagtaaggaatagggctgttagttttgtgttagagggattaaggttttatgagctaaatttctactcaactttggcaattttcttgagttgatgaattgttgtgaattgatgagttgaatgcattgtttttatgttacgggactgttctggagcatttaatcaggtttggtggagctcgggattagtttcggggtgtaaaaccacaactaccccaaatctaccaaaatcggtcgactagttttacaggtaattggcaaactggttggtcagttgggggaattctagagtttttccttgaatttgatttttggcacggggtgtttcccaaaatctagtttagggcattttagtgatgtttgggttatttcaaactagttgggagttagatatgtctggttacgaaattagggtttgtttccagagtttggataacttatttatcgaattttgttgttgtgacataggacccaggattatcgagctttgtttcaactcaggtcgatgcgcacacctgattactggactaaggtaagaaagctaaatgcactaataagcatgttaagtgagaaacgattattattatttatgactcgattataatcgaggtaaaagatacagtcattaccgttagtatgaatgagtaattactcgcttaaaatcgtaaatatgttgctcacttatcgattgctgtatcaggcatcgatagtgacatatatagcttgtaaatgacgggtggcagggatgctttatgaggcatcaagaacagtttgtcttattagagaaataatttttgtgtaatgcttgataatgtgatggatatgcgtatatgtgtgcatgataaaattgtacgctatacaatgttttattagcacgtattatttagttttgtgatacatgctttcttgctaggtcttttgactcacaggtacttcgtggtgtaggtaaagggaaggataaagtggaccaaccatgagtcagaagtcttcaagcaatgtacatgtccaccgcggtgcctcaaatatgttcgtgacatgtctaattcatgttctagtataaagtttgaatcctttgcactaagatggtcccaaa

SEQ ID NO: 223896 - DNA, 2259 bp, Cannabis indica
ttcattgttggatgccttaaacctgaatttgtctggagcgtccaggtgttgcccccaggtgtgacaagggcgattcctacaccggacagttgatccgtgtagccgacccatctacatgtaatttctaggttggcttgtctttactattgctcggctgaggtacttgcactggctctaggttattttttaaagtgctctcttctttacccgtacattcaacaacaaaatttgttaaggcctgacccttaatcgttggtcggggctaaaagatgatttcataatggcccaataccattgcccatttgagcaattgtctagaggcgtccggtttttgtaatacttgacgtaatggatggtcagtgtacactcgaacaggatgagcctaaaagtatggccttagctttcttgttgctaggattaggcaataagtgagcttttctatcaatgggtaccgaccttcagcttcaatgagtcttttactgatgtagtagaccggatgttggatattgttctcttctctcatcagtacggcacttactgcatgttctgtgacagccatgtatattcctaattcttctccgtccagtggttttgagagtacaagaggttttgcgagttgcatatttagctcttgaaaggctttttcgcattcctccgtccattcaaattgtttatttcctcgtaggatgttaaaggatggaacatacttgtctgttgactttgaaacaaatctattgactgccgtaattcaaccagtttaactttgaacttccttggtttttgtaggcgatttcatatccaggagggcttgaattttctctagattagcttcaattcctcgggcgttaacgataaagcccagaaacttacctcagctgactctaaaggagcactttaggggattaagtttcaagttgtatttcctgaggactttgaagcattcatccaggtcatatatatgccccccagccttcctggatttgacgagcatgtcatccacatatacttccatatttcgtcagatctggtctttgaaaattttatttactaatctttggtatgtagcttcggcgttcttgagaccaaatggcatgaccttatagtaatatagacccatatctgtttggaagcttgtgtgttcttgatccagtggatgcattttgatttgattgtaccccaaataggcgtccataaagcttaatatctcgtgtcctgctgttgcatccacaagttgatctattctcagaagtggaaaacagtctttagggcatgccttagtgaggtcgatgaagtcaatgcatactcgccattttttgtttggcttgggcactagtacggggttagcaacctaggccgggtagaaagtttcaattatgaaattgttgttacacaacctttctatctcttcttttaatgctagggcccattctttgtctaacaatcttctattttgttgaacgggccgaaagtttggatcgatatttagggaatgtgaaattatagaaggatcgatttcgatcatgtcctcatgcgaccaggcaaaaatgtctaggtttgctcttagaaattttatcagtgctaattttacttcgagcagcaaaccttttcctattttgagttttctggttgggacatttgggtcaattccaatctgttctagttctttcactggcccaacatttttatttggttccccaagtcgggaatccacatcttcgtcctcgccttttgcggttccctatttggcactgtcctttcccttgtctgaactctgactagaggattcttcctttttagccttgtttagggcaaggttgtaacattcccgtgcaacttcttgatttcctctctagcaccctaccctattctttgttggaaacttaaggcacgaatatcgatgtaacaacttttaggtcatataaggctggtcggcctaacatgacgttaaaagttgatggaacatccatcaccaaaaattgtgccatcacagttatgctctttggagcttgcctaacagtgaggggtaggggaatttgccctaaaggtgcaacgctctggccgaagaaaccgtttacgggctggacgcagggaatcatatctttgatttggagccccattttttcatatggtgttttgaacaggatatttgctgaggctccattgtcaatcatagtttgggctactatcttgttggctatctgcactttcataactaacgaatcattgtgcgggaagctaaccttgatagcatcatcttca

SEQ ID NO: 223897 - DNA, 1964 bp, Cannabis indica
acacccacaaaataatggctcttatacaagagtgaatcacttttagcctacttccgagactaccgactggccctatagacagatccaagtatttccaacgtgctttactctaactcgcaagctttaaggggaaacttcctaaatgtagtcaccccaagtcaaggacacttaacgatggagttccttcatgatgggctaccaaaatagaatacttctttctaatataggtagtcctaaacaattcattcaagtcctcaacaccatgtggtcccatgtatacataatctcaaaatcactacatacaacccttccccatgtcatgtggattatacagcttcaggtctttccttcgcggatcacggtggtctaattgtcacagcttgactcatgcccccctggtagtgaatagatccacccacacaatcaccacatctaattcacctagggtttaagacaatactcataagttgtcccgcttatactaacattagatcactttatatcaaaatattccgttcaccaaattaattagttggatacccccattaactactcatatcctatattgcacttaggaatataagaaaatttaactcatattgccatttctctaattttcctaccctgtcagatgaactaccataaaaaaacatactggcacagtccattatgatcttttgatattccctcgttgagtgtacaatttttaataccaatataaatcgaaatagctaatataacatttcccattaaattttatcctaagtcggtcaaaggaccgatatccaagtttttttggagtcgtaaccaatactttgaccggaccggtacactattctcctttaacattaaccattccaaattgagggtaggcccttataagatgacctactaccccacataaaacaaaatcaggctctacaatagccctagaacattttttttctattccataattagtgatcatttagtttctgtcgactgatctgctcatacaagacgagcttgttgtcctctcagatctcgaatttgagtctccttgttgtctaatcacatcttgcatagcagaatttacatgtttccagtattatgacaataaaggattctttttcttaccatttttcatgagcccagatagctcgctaatcaagcaattcaatttcccttactgtataacttgtcacacaattaatccacatcttccaaactcttaaaactcatatagatataaatatcaatatccgtataccatacaaatattcttagtatagataatcaatacactatttcttcccatcatacactataattgtctaagcatgtaaggcaaaagcaaataacataaaaacttactataccgtgagtagacatgtgttcgcagcaaaggtacatcatacactataatttattttttttaaaaaaattgtgagaatattaaagacttgactaaaataaaagactaataatggacattataactgcagtaaaagggtgttccagggattcttgttataaaaatatttacccaaaagactatagacaagagcaatccaaaacacaattcaaaatacaacagatccaaccagtccaaaacaactccttgcaactcggcacacaggctgggggggtcaatatgtacattgttggagaaggtagtcacctcatggcagctctaacttttccttgcccttacctacaccacacaacactcgtgagtcacaaggactcagcaagaaaagcaataataataatcatatagtttattattcgaatgtataatttatacataatacaaatcaaaccattacgcattgttcataagatgaaattcaaatcactactggtatctgtcataaataagcattagcatacacatatctggtaatacaaaactattataccaataatatgaatcatattcatttaataataaaaattatatatatatgttacctcataaggta

SEQ ID NO: 223898 - DNA, 1801 bp, Cannabis indica
cacgagtctatagtattggcctccttgggcaaatgtttatgagattacaagatgattacaatgacgactactctgcttctcttgagagagagctttcttggaatttcagcagagtgactgtaagtaaaaattgctctctctctctctaccaaaagaaagataggactatttataggcagacgtggagtaaagagcataccctttatccacctagggtgtcgtaccccatacgttactaaggtcagtacagtgagaggacgatttgacaattggctggtaagaaccttcttcatcacgtggtgtacaacggcttgtgatggcttttgtacgatcctggacacgcatcgtgcaaaggtctttccttttcaaaatactctttaacctagtcattgggcaaaaaacatatttgagggtgtatacgtgtactatcaggaccttgcacgggggacaaaatcgaatcctatgttagaaaaaggtgtaatcgtctatggagtgatatttgcaatatactgacgtggccaatgtctctaagaccctcaacgccttctgggttctttactaagggaagttactcctggaggccatcgcctctcgttgccttccaggtccatgagtcgttccttttcttggttacctcaaataaatcttgttgtggttgtatccttccctctgatcatgcctaatgaaaacttggataacaggccccatgcatactaaagagttgtcacttcataatttttccaccagttaagtttcccagcagaaaacacacttaacataggcacgtatgactcacgggtttgtggaatatttgacacgcaagtaccattaaatagttcgtgaaagcccttagacttttcaattgccaagtgtcaaagagatatttctacatcttcagagttcatccacatatcctagagcatgtcctaacaattcacagggaggctgcaagcttccgccactcaagagttctgaaagcttgggggctaaatgttatccgcgtttccaaatgaaggacacatggtgaacaatagaagggagtctctagaataatgttgattaagtatccttagtcacgaaaggtcatggagaggtcgtagagagtcgccacaaagaaaatgacgatccgggacctagaaggtttatcattgcttagggacccagaaaagagcaacttacctacaagtgcaggcagatgccggagagacatgctaagagtctaagataaataccctctgtgcacggaggaccagaagccactcacgaggtgaaagtcagatgactttatgacgattattcttttctaacacattatcaaatcttgtcccctgtgttagacaatggtagtgcgcgtaacaccctctgaatactcttctttgtcagacggcacctctaggcattttttccacccaatgcaagccttttcccaacacatgccttggaccaacaatggtccccactgtatggatgactcaccacacgagaaagaaccatctcgggggtccaatagttagttatttaatgtattttactccaatagtaggccttttttgtagaaaccctagacgggtcatgggtatgctcatgcccgtactttagcttgtaaatacccctttattcccacaaaaaacgggggatggaaaatgtaatagttgaagctttgccaaaatctctgtaagctttcttcttcttcagagaaactaatagtacatagggttttctactgtaaacaccactgtaatccatcatataagtcttctaaggctaatatacagactcatggattagggttcgtataatg

SEQ ID NO: 223899 - DNA, 2167 bp, Cannabis indica
acatccggaacataacgaggaccaagttttgtccaataagagtgagcaaacgggcaagagatgagagcatgaacaaccgtttcagcgtataacttacacacagggcaccgtgagtcaatgttcacatgtttgataactagatttaggcacgttggaagacaagcattagaagcacgccaaaggaaatttttaacctttggcggtatctttaattgccacagcttgcgccaaaacccagaattattaggccccgaatgtaggtgcttatcatcttgaaggagattgtaggcacttttgaccgtaaagcatcctttgctatcattcgaccatgaccaaaagtcatcagatgcatgaggactcaaaggcagtcccaatataatgttggcctcctgggtgggaaagaggtctcgaatgatatcaacatcccaggtacgggaatccataaaaaatagagagctcacagtgtttgagattagacccgggtgggttgaggagacatacctattttctgtgcttggtaaccagggatgagtgagtatattagtagaagccccattcccaatagtacgaatggctcccttcttcaccaagtgttgagcaccccagatgctacgccaaacaaagctggggttattgccaagttccgctgaaaggaagtcagaatgtgggaaatacttggctttgaagattcggctaaccaaagtatcagggttacaaagcatccgccagccttgttttgctaacatggcaagattgaaatcgtgaaggtgacggaatcccataccaccatcatctttggaagcccccaaccgattccaagacatccatatgattccattgcctttactagaagaagtcttccaccaaaagctagccatttgtttctcaatctcctcacaaatgccaataggaatgagacatacgctcatagcataagtaggaagcgactggataatcgttttaagaagaatttcttttccagctctagaaagaaatttaccttcccaagtgttcatacgagccatgaccttgttctttaagaagccaaaaatagcagatttgttccttccaataatgttaggcaaacctaggtaaagactaccttcatcagcttcagacatttgaagagtggagcaaataagtgttcggctttggttatcaatgttggggctgaagaagacagaagactttgcgacattgacttgttgcccggaagcttgctcaaaagaatggagaagagacataaccccttcggctgcaccatttgttgcttggcaaaaaaggtagctatcatcagcaaatagcatgtgagtgatgggaggagcccctcgagcaacacgacagccgtgaatgatgcgatttgcttcatattgttggataagagttgaaagtccctccgcacagattataaataaataagatgaaagtggatcgccttggcgaatacctctagtgggatggatgggaccaataacatgaccgtcatgaataacattgtagcaaaccgtggtaacacaatgcatgactaaatcgatccaatgagagtgaaaccccatacgagacatgacttcccgaagataatcccattcaacgcgatcataggctttgctcatgtctagtttaatggccatataaccttttttccttttgtcttcctcttgaggtaggtcatgacttcgaaagcaaccatgacattgtcggatataagtctatcggggatgaaagcactttgggtagtggaaataatctgttcaatgatgttacacatcctattggcaagagcttttgagaccactttatatatgacattgcaaagagcaatgggacagagatcactcatagccataaagttcttctttttgggtatcaagacaagattagtgatgtttagatcagtggggaggctccctgttgcaaagaaatcagtaaccaaagaaacaatgtcggccccaacaatgtcccaatgtttttggaaaaaccccgggttcattctgtcaggtccgagggctttgtcagagtgcatttgaaacaaggcggtacggacttcatcagttgtaactggctttaaaagttcctcattttgatcactgcttatcgaagaaggaataccatcagtgatggagtgttggacatgtccttgagcttcgtacagagtagtgaaatagtc

SEQ ID NO: 223900 - DNA, 9763 bp, Cannabis indica
cgaagtgtaacattcaatgaaaccgagtttccatacaaaagtctattttccccatccaaacctaccactcaaactcacaccactctcctagatcccaatgattttcgtgtcccacatactcatcacaacaccattatcacacctacacagccccagtcaaccaacaatttgagtcataccccctccccaaccatttctgagtcaaccaaccataataatacatcaaaccagtcatcacaccagcacaccgattctgccacttcatccgaagctcccccagtaacacataacatacatcccatgtccaccaggtcaaagatgggcatctttaaacccaagatttaccttaccacttccaatacaggatctgaaccaactaccctaaaggaagccttagccaatccgatatggaactctgctatgaaccaagaaatgacagccttggtcaaaaatagaacttggatcttggttcctaaaccagcagacacaccaatagtgagttgtaaatggattcatcgcataaaatacaggtccgatggctcgattgaaagacacaagtctcgattagttgccaaaggttttcaacaaactccaggaattgattattttgagacatacagtccggttgttaaaccttgcaccatacggattatgtttaccttggcagctaccaacaagtgggacattcaacaaatcgatattaataatgcatttttgcatggtgatcttcaagaaacagtatacatggcacaacctcccgggttcatagatgctcaacatcccacacatgtgtgtaaactcaacaaggctatatacgggcttaaacaagctcctcgagcttggtttgacaccctcaaaaccaccttaatacaatggggctttcacaattcaaaatcagatacaagcttgttttttatacaacaacacacatctctgctgctcttattagtctatgtagacgatattctaatcacaggtgataatcctacacacattcatgccatcatcaatgccttacaaaatcagtttgccctcaaacaactaggctcagtaaactactttctgggattcgaagtcatcagggacaatgacaccatctttctcactcaacaaaagtatacacgggacctattactaagaaccaagatgcttgatgccaagccacagtccacaccaatgtgcacaagctccaaattgtccataaactccggcactcctctaccaaatcccactgagtacagaagcatcatcggggctcttcaatatctatgcaacacacggcctgacatctcatttgctgtcaaccgtttgagtcaatacatgcaaacacccactacagaacactggggggcttgcaaacgtgttctcaggtatctcacaggcaccatacacctcggtctcgtattcactcctgcccctgctctcagcatcaatggttacactgattcagattgggcagggtgcccagatgaccgcaaatcaacctctggctatggcatcttccttgccaataatctcataagttggtgttcaaaaaagcaacaagtagtggcacgaagcagcactgaatccgaatatagagctctagctttagccacctctgaaataatgtggatacaatccctcatgaatgaaatatcagtccctatttcaagttgtccgatactttggtgcgacaacttaggagctggttctctagcctccaatcccgtatttcatgctcgcactaaacatatcgagatcgaccttcactttgtcagagatcgtgtccttgctcaacaactcgacatcagatatgtggacttcctcaaccaaactgcagacatatttacaaagcccctgtctgtctcaccattcctatttctaagaaacaagttgacacttggtgtccacccgtgtcacttgaggggggatattgaaccaacacctcagcaagattcaacatattctaaccaacttggataagttggttatgacagctaggacattttgcaaaaactgttttaactgcattttcttgctttagtgtaacatcttgatttctgttattaagttcttgttgtaaggtctctgaccattattcaatataaataaaggtccaaagctcaacattatttagttgagcatttccatcattccatcgatcacttttctctccattactcctttactgctctctctctttctcttctctgtttctggtcattttttttttctctggtttataaggctttacaatattttaagtatataatattaatttatacacactgttgatacaatttttcatcaataaatttataagatcgtaaacgagtaagatgaacacaagcactaattaatcaatgtaaaccgatttgtaaaaaaaattaacaaagatgaacacgaagattttatagtagttcatccccttttggtggcaatagactagttcacttgaagtattattgatttcaaagcttgaggagaattttccctttcggcagcaatgggctagtccaattagagtgttattaaatgcttgataagagttctccacagttatgttctccaagagttcaatccataagtgagtttgtaaaatgagagagtgggagctaaagagaataatttcatgagaatcaaaattggggtccctttaaaagtgacttcactccccttatatagattttcatctaggatttaaaatctctgaaccctagaagcacctccttgtaactatagccgagttaggtttgaaatacaagtgataacaaaaatcacatttcaaaataaatatctaaaaaaataataaaagttaaatatatcttcaaggtcatgttggtaagtcatgagagacatgtactgctaaggtgaggaccgtcccttgggtcgtgacgacaagcatgttgaggcccacattgggctaaggtgatgtgcatgtgaggccccctttggccgagatgatggtgagggcgcgaggctcccattctagccgagatggtgaggcgcgaggacacccattggtggtgagggcgcgatgacccattggggtgatatggtgagggcgtgaggaccttattgggtggagatgatgagggcgcaaggactccattggtagtgagcgcgtgaggacactattggttgtgagggcgcgaagaccccattgagtcgagatggtgacggtgcgaggaccctattaggtcgagatggtgaggttgcgggggccccattcgggctagaagtgtaaatagatcgggtcagatctgatcccacctgatctagatcatgtaaggatctgccccatcccgctagatcaaatactcaacttgaatttgatccgacccgactttttgtaaagaattttaattttatatctattttaattttgtattagtattatttaataattttaatttaaaacctattttaattttgtattagtattatttaatacaatactatatctagtattgacttgtattaatagattgtataaagctgtaatatatttttaataaacatgaccccaacaccaactatcagtcgagtccgggttcgggtccgggtctggatcaagatttggctcccattgtgggtctcaatctgggtcccgggttcgggtttgtgttcgggccccgggtccgggtttgtaactgggtctagtttaggtgcctagtccaggtctgggtctggtctcgagttcgagtctcggatctcgggtctgggtcccaggcccgagtttggttctcgagtctcgggtttgggtccggttctagttccagtttgggtacaggtctgagttcgggtcctggtcccgggtcctgggtccgggtctagtcctgggttcgggtttaggtcccaagcccgagttcaagtctcaggtctcgagtgcgagtctgagtttaagggcgggtcccgtgtctgggtctgagtccgggtccaggtcccaatttcgagtccgggtctgggtcccaactcttgggtctaagtttgagtttgggtttaggttcggttcgggtctaggtttgggttaggtaaccgggttcagtcagagtctgagtccgtgttgtgtctgaattcgggtctaggttcgggtttcggtctgggtcccgagtcttgggttcgggtacaggttcaggtgcgagtccatgtcccagttttgggtccaggtccgagtttgggtttgaatctaggtcccgggtctgagtcatggactaaacccgggattggcccgcacccgggtttaagtttcaacaacctctaataatattaactcgtggactaatattctcaaacatccgaatcacataaaaatcattatgtcatttataataaaacctaaatattcatatttttttatatatatatttttgttctaattaccaaaaatcttaatcaaccatactaattttccaagttagcatattcatctcaaaattgttcaattaaaacattttgaaattcaattgattaataaaattatactaattctcccagtttatctcattacttttagatttatattataattgctttctatttgatgttggtttaaaaaaattaaatagaaaattagtttaaattagtttagtctgagttaagaaaaaattaatagaacttttgttcataatttaattcacacataataaactaattctaaattttataataataataataataataataataataataataataataataataatctatacaatgcgtaactaagaataggatatcacaaacaaaatttgtaactagcatgtaactgcatgtatacactgcgtaactagaacacaaaaacggagctacataagcagtgacagactcagaatttttactttgtgggagcttatttatcattaaaaaatatttatacctatattataattactcttactagatttatttaattttgtggggggctttttctactattttaatctataattatgaaattaaaaaaaaatgcatttaattttttaaaaggcagtatttttgttagtgggggctatataaaagtgggttcgtccctgattggagggtgaggtgtagggatgcacgggataagaaattagcagggagtgctctctccgtctccatcctcgctaaagattttaattccccgcttatctcccatcgagaatgggacagaaaatcccctaatgggggcaggtatgggattggacgaaaaatctcttcacaaaaaaaataaagtttataataaaaatttaaatgtataaaaatattaaactacataaaaattaaaacattatatattacttattattcaataaactaattattatccaaaatacaactttaaatttataaaaaataatactaatatactaaaaaaaatgtaaaaataaattacaaaatataaaatattgctagaaatataaaataaaatattaaaagggtcattgccagggcaaggagtgtgatcctcgtccccgttctgttacatttaggaaaaaaataatccttgttccggcctcgttcgccatttacacgagaaattcctgctccattacgggcaggtccccgcgagatctatccccataaggaaaatgtacatctctagtaaggtaactttgacccctgaaatttttatattttcttaaaaattaaaaatcacattcaattatttatattttcttttaatttcttctataattatgttttaccccctttaattttctctttagattttggcccccattagtttgagatttccacccaatcacttagattattaaaataagtaattaaagatagtttataccaaacaagtaacttagattatgtatttataatatttcgtactaccattaattttctagcaagtgaaaaaaaaaaaaaaacagaatataaacaagataagacaagataggcacacacgtaaacaaattttcagctagattgttttgatatccgtatttacatcataaatcatgctcttttacaattccaattctaattgcatgattcttactatctttgtttaaacttatttcattttgttacataattgtttattttatcaattaacttcgacaattagttgcaacataactctcaagtctctcaacacaccattttttttttattaaaaccattttttatttaaaaaattactttaacaacatttatttgatgtgtaacggttagattagatcaacctcagtttttcataccactttctttttacttagtttcaaagcaagaacagttcatttattgagtattaattacaatattttattacaattatttatcaatctccaattacatgttggaatattattttttaatttttttcataacggtcttcgttatactcaccgtatcatccttgtaaatttttgaaaaatttcgaacagtttacaatgctgaacatagagtttctgatatttcaatttgttaagtatgttcaaaaaattcaaacgtatttttaacagtgtaaattattcaaaattttataaagatgatattataaacctaacaaatagcaccacttacaaaaaaaaaaaaaacacaatatatattttcaaataaaaaattaactaaaatattataatagaaattcaggctaacactactctttattttatttatttatttcctaaaaaaaggcccaaagccccaaacccatttgaaaatcgcacgcacacactaactcactcactccttcccgattctcttttaactctcttcactcacactcacaatataaaatccttgttacaacccaacaaatgcaccaacattctctcttttctttctttcattttttcaaaaatataaaaaatttaaaattaaaaatgaaattttttcagttcaatgagagacctgtgactcttgttctctttatcttcttcttcttcatcatctcatcatcatatctgaatgtaagtcttttcataatatcatctcttattaatcttttttttgtatgtatatgagtattatatatatataactgagtgttatggccaatgcaggttgttcttgccggagaagaaaacccattttccccacaggcttatttgaatcgttactggaacaaagagatccgaaacaacttggaaaagccatcgtttcttctctcaaaggcttctcctctcacagctactgattcggccatttttgcaaaactcgtttcccaaaactcactcgccacgcgcctaccggagttttgctcctctgcccaccttctctgttttcccgatttggctcccagtctcgagaagcacgacaaagattccaactttgccggctatgccaacaagaacttcactaattacggaacggatcggcaagggggatccgaccagttcaaaaactactctcccggagaaaacatccccgtcgattctttccgccggtacagtcgtgactcactgggtcactccgacaaattcaacaattacggttccgatggcaatgttgtagaccagagtttcaacacttacggtgctcattccataggtggagccggagatttcagcaaatatgccgattcagttaatgtcccaaatctcaaattcacttcttactccgacgatgttaacggccggcaccaaacatttaaagggtacagtgagaacgccaacgccggtgaccaatctttcgctagctattccaagaatggaaatggggcacagaacgagttcacgggttacggaacgagtgccaatgtgattgggtctggattctcgagctacgaccagacctccaatggcggaaaacacacgttcactaactacggaaaagacagtaacaatccccaaaacaatttcagaaactacggcgacggaggaaacgcagtagaagagaaattctcaaactacagagctcaatccaacgtgggtgacgactcattcgactcgtacgggaaatcttcaaacgcagaacagatcaatttcaacaattacggtaaatctttcaacgaaggaactgataaattcaccgggtacggaaaaggagcaacgggtcagtcaatcgggttcaagatctacggcgtgaacaatacattcaaggagtacgcagacaaagagggtatcacattcagtagctacacgaaggtgagctcaggtccaggcaaagcttctgtaacaacaatggcggaagtcagtggcaaattggtaaataaatgggtcgaaccgggtaaattctttcgcgaatcgaatttaaagaaaggggttgttatgccaatgcctgatattagagataagatgcctgaaaggtcgtttttgccccgaacaattacctcaaaattaccattttcgacatcgaaactggtcgagctgaagacgattttcaaagccgccgacaattcatcgatggagagaatgatgaaagagacactctcagagtgcgagagggcaccaagcgctggtgagacgaaacggtgcgtttcatctgttgaagacatgatcgattttgccacgtcggtattgggacgaaacgtcgtcgttcggacaaccgaaaacgtcaacgggtcaaagaaaaacatcttgattggttcggtcaaaggaatcaacggtgggaaagtaacgcagtcagtctcttgtcaccagagcttgttcccttatttactgtattactgccactctgtccctaaggttcgggtttaccaagcggatattttggacccgaattctaaggctaagattaaccacggtgttgccatctgtcatttggatacatcttcatggagcccaactcatggagcttttctctcactcgggtcgggtccgggtcggatcgaggtttgccattggattttccaaaatgatatgacctgggcagtggctgattaattattcactttcacaaataatttagctcactcttatctgatttgggttcgaaccaaatggcttaagaaagcttagccaatggctcgacttcaagttagtccccaagtcccaaccttttttagcatattaagtaatgcctttttttttggttttgattgataagaaatttattaacttatgtttttttttttatgatagatattatataatatttggtaaattttaatttggcttcctcaataataggaagaccaattgcaattaatgcaagaatgatttaagctaaagtgttactattatgtggttgataataataatatatcgatactactacatataataattaatgcatgttagttggtttaatcattattgtttttagtagtcaagtatatagtataaacaattttatttagttatttattttttttcatttttttttaaaacaacacatcatctataggcattgaaaaaatgccaaaatatgaggacggtgaggtggtccaaagagtcatcctttctcatgtgtgagattataaaagaaagaaaccatatgagacagctgttgccctggctttgctcttattttgtttaattgaaaaatccacataacgttatggaacacaatttttttttttggatgagtgggaaatttcatggatattagctcattttgtagcctttacaacacccaacaatagaaaaaaggctaaagagatttcatttcatttatatgcaaagtcaaaatgacggtggaggctttggtgtccctccctagagttttagacactaattgaatcaaaagtattggaagaatataaacactagaatgatgggtatgtgtacaaaatggtgacttttagtgaaatttgttcattaataattgaaatagagactaatgaagggtatgaatgagtaatggtggttgtgtaatgtaaatgtagtgg

SEQ ID NO: 223901 - DNA, 1343 bp, Cannabis indica
tgctctcatctcatccaactattcaactattgacttcaaccaaaccaaatctagttttcattctctgaaaaactagtagataagagacaccttctatacagtttttcaaatcctccttcattgttcttcaaagaattcgcccttagtgatagagtgccatgcccacacatagcaagtcaagtactcaatcatagtacagaagatggtggtaaccaaacccgaaggagagaaagagatctaggttcagatcttgataatgctctgcaacagaaaggaatcaagggctagagatatgaacgaaaggagtcattaccattctgctgcaatcaatgtaaggttttctaaactcttatgtgtttaatttcatcatattagagatattcatatataggatgttaattcaacatactagatcctggtaaaatattcccaacacaaattaggtgaggcctcaccgatggttgagaagagggagcagccactgtcgtttgtgaagaggaaggacccaatgacacatgcttcttattttggaaactcccaatgtaatcacgaccttctgtcaatgtctaaaacacctggcgggcttcttattcaactatttttagtagttcattggttcggtatattcgtctaaggaaaaatgttatactgaccactcccccaagataatgcactggcaagacctactcttctaccgtgtgggccatagtttgatcctgtggcctcggattggacgatgcattaccttgggtttgttgagtattattggctggatgttctcctagcccatactgcgatccatcagggatatagacgtctgtcctgttcaaatcctgaataactaaactattccccattgattgctatccagttagctgataagctcgcctaatcagcatgttggcctacctagagcgattatcaattgtcgcctgctgggctctcacaacctccatttgttaatccatccactcctggaattagagcttttgctattcgagtgcaaaattcacagctcctcgagtgtcttgctgatcgtggtgaagagtgttggtatgctcttgcacctgccctagagcaactctcaaattttgcaattccatatcatcaccaatcactccttgaggagttctaaaagatggattttctataccaggggcagtttgctcgaccttaatactagtggttctggtttcctgtacgcccggagtgaacccaatcagaggggttgtcaccccatgtcctgctgattgcagacctattggaggttgaggaatgatcgccttgggatccgtcctcatgtgatctctctgatttgtaggagttttcacattaggatctgt

SEQ ID NO: 223902 - DNA, 1915 bp, Cannabis indica
tacctcggtccccctttgttgcgatctagttactttttccgtcggcgctttcaggtatttcttccgtcggaagggtatccgggtgcctcttctggtcctgctatactattttacttgtagtcaatccttggtccgtcggcgtctctttccttcttgttcctccttctacttccatcggcattcccttttctcgttccctggtttttggcgttttcctcctttttgtccgtagtgcccccttatggattggcgattggtggtttggtcatatcgggttgggcctatttttatattcttgggcttgggtatatttattttaatgggccctttcaatgtgggccttttagtagtcctttttttgttgggccattttatttccaagtccagttttcccccccaaacactactccccccagttccaattatagttttataatctggaactgcccctaataactgcctttaatgtcagtttttgtttgttattactgatttctcatcacatatcttatttagtgtacagttccctaattttgaatttttcaatttcttaagaagtggcggttacccttgatgtgatggtggtacctcgagaaccgtttttcttataaatgccctattaattccctaacctccctctgtgttttggcgacgcactctcgagtataagactaccaatttcgaaaattcatttcgtgtttttctctctgctgctcgtttcaacttctctgtgttagatcttgctgtcttcaggtatatatattatgcttctctatttaacttaagttttatttcttttttatccctttttatttctccctcccttttttatatcttcctttcatccttgccttcttttcgttcatttttaccccttttatacgtgttgttttaattaccgtgtatattttttgtatttccatccttccattgtcttccctcccatttttcttctgggatcttcccctttcttctaccctattctcctatttcccccttttagtcctgacatttcctcgtttcgtaagggcagttttcttcttagggttagcctttctcccccccttttttttctttgggtaggctttgggtcccgattgtcattttagctgtggtgtaatgtcgaatacggattgtccaggtgtctctccttcggtttctgattctctttcctcgagtattgctcctggattcgtcgaatcattgttagtttctgatactcctcctatggagactgaaaacgttgaagtccccaacgacccagaagtcaagtgtttaggcagcgtctcccttattccccgttctcgttctggaggcgaggcgggcgttagtggccaggcagccccgtctgaaggggttactctagcaattcccccgttgaagaaggccaaaaagaaaaaacatgctctgggtagttcttatctggatgttaggtcgagttgtccgtcggtcctcacccaacgtgaactcgattccttagttttgtcgtgtggttttccgtcgggggtcgaagttaggcttcctaaacagcatgagagggcggattcctctcaaaacgagtgggtatgcctacactcatactggtttgagtcgaagattaggctgaggttgcccattcctagacttattaaggaatttcttatacattattcgcttgctcctgcccagttactccctaatgtgtgggctattcttttgggtctgattgtattaggggataaggcgggcgttcagtgggaagtgtccgacgtcatccacttctattttctgatggaaaaagagccggggcgttatcatcttcgtcctaggaaaagtcgtccttgttgactgacttagagacttcccataaagggtggaaggaaaagttctttttcgcccgaggtcctattgagtttgtttccgacgatcctacgac

SEQ ID NO: 223903 - DNA, 3054 bp, Cannabis indica
attataaaagagtgaataaaataacccaattttattcagatcaagctttacaaactgatcaatcaaacaccatgaaaagagtttctcaaactcatttctctgttcttcttcttcttgttcttatttttgtttggcttccattgaagattacttcctcaccaacaacacaagcagaggctctcataacatggaaaaacaccttggtgttggaaccatcttctctcgattcatggtccaacaacaacatcattagtctctgcaattggactaatgttgtctgtgatgtttccaatgaggaagtctcacaaatagacctctccaacttggaactcaatggaaaattggacaacttcaacttcactccattccttgacatcacagtcttcaacctcaacaattgtaagctctctggactcataccaacagccattggtaatctcaccaagctcactttgttggacttgagtgacaatggttttgaaggagaaattccagtgcagataagccgattgtcagagcttcaatatctaagtctcttcaacaattctcttgaggggccaataccttaccagctcaccaatctaaaaaaggtatggtacttatcacttggagcaaactatttggagaattcagattggtctaaatttttaaacatgcctttgttagcctaccttgatcttaatttgaatagcttcaattcaacattcccaattttcatatcaaagtgtaggaacttgactttcctagacatgtcccaaaacagttggaaaggcccaattccagaatcagtttttaccaatcttggcaaactccaatctttcaatctcacttttaatcactttgtgggacatttgtcatcaaacatttcaaacctttctcagctcacacaccttcatttatcaattaattttctcagtggtgaaattcctcaaggaattggtctgttgcataatcttgaggttcttgaattgtttaacaattcctttagtgggagtattccttcttctattggccaactcaataatctctcacgtcttgatcttaacaataatttgtaaactcaacaattccttctcagcttggtttttgcactaagctcatctttttggctatggctgaaaacagtctcactggtgaaattcctttgtcattatccaatctgaatagtatcacagaaattggtatatcaaataatcaactttctggtcatctctcctcttctttgatatctaattggactgatctcacctcattgcaacttcaacacaacaaacttagtgggaaaattcctaaagaaatcggtctattaaagaatctcactttgattttcttatatagaaatcacttcactggtgaaattcccaaagagattggaaacttgaaacaacttgaaaacttggatctatcttcaaaccatctcacaggtccaattccaatatctctttatagcctcaaaaaactcttctcagtccaacttttctacaataatctcaatggaacaatcccaccagagattgaaaatctagaatcactctcaacttttgatgttgacactaacagtctttcaggagagttacctcttaacatttcaaacctcaagaacttagaagtgttcaatgttttcaccaataagttcgtaggaacaatccccaaagactttggaaagaacagtcctaatttgaagtctgttagtttttcaaacaacactttctctggtgaattgccaccatttttgtgtgtgggattaaagctagagactttgactattaacaacaacaaattcactggttcattgccagagtgcctcaaaaaatgcagaaacttaatccgagtaagactagacaataacaacttcacaaccaacatcactgatgttttcggtgttcacccagttcttgtttatgtcacattaagtgaaaaccaattctttggtcaaatttcaagtgtgtgggggcaatgtatgaatctcacaaacttagatatgggacataacaaaatctctggtaagatcccacctgaacttgggagtgtgaaaaatttgagagttttgagcttagaatctaatgagttaagtggggaaattccaactgaacttgggagccttaaccagttgtttcaactcaactcaagcttagcaaaaatcactttagtgggatcatacctcaaaccttgtccaaactaacaaggttggaaactcttgatttgtctatgaacaatctttctggtactataccaacatggtttgaggattacaaaagtttgacaaccttgattctaaatcacaacaagttttctggtgaaatacctcaagaggttggaaacatggtgtcattgaggtacatgtttgatctcagcagcaattgtttatcaggtgaaatcccatcaaacttgatgaaactttcatcacttgaaattctcaatgtctcaaataatcaactctgtgggcagatcccatcatcattttccaacatgtttggtttagtttctgttgatttctcttacaacaacttcacaggtccaatcccaactgggaaaccattccaaaatgacaactctttcttgggaaactctggtttatacagagacacaactaaaagggtcaataataatcttcttaaatcaaacaacaaaactaagaatattcttataggagtcttagtacccttttgtggtttgataatacttttcagtgtggttgttacactcgtggacaagaagaagaatcaaagttctaataacaagtacaacaaaaaccaggagctgttgatatgggaaaaggagagaaaattcactttcagggaaattgttaaagccacagaagatttctcagagaaattctgcattggaaaaggagggtttggtagtgtgtacaaggctgttctttcattgactagtgttgttgctgtcaaacgtttgaacatatcagatgaagctaccaataactacaactacagacagagttttcttaatgagatcaagactttaactgaagtgagacacagaaacatcattaagctatatgggttttgttcaaggagaggttgtatgtattta

SEQ ID NO: 223904 - DNA, 3636 bp, Cannabis indica
agacggtgtgcttaggcatcctgtggatgctgaagaatggaagcagtttgaccggcttcattcatcttttgccgttgaacctagaaatgttaggctcggattggctactaacggttttaatccatttggcaaaatgagcaactcttatagcctgtggccagttatttgtgtcccatataatttgctaccgtggaagtgtatgagttttgaattgttgttgttggccttattgattccaggtcaatcatctcctaggaaagacatagctgtattcatgagatcattaattgatgaactgaaacagttgtggaagacgggtgttgaagcctgagatgcctacaacggaaatgtattttccatgcgtgcggcaataatgtggacaataaatgattttcatgcttatgctctaacgtttggttggagcacaaaagggtatagggagtgtcccacttgcaatgaacacacaccttccatgggcctacatagtaagattggatacgttggccacaaacattttctcgaaatgaatgatcaaagaaggagaagcaaaaaaatacaatggtaagcctaagaagagagcaccacctcctgtattgacgggggatgatattttatctcaattagaccgaattcaatttcgtttgccttgaaaacacaaaaagtttgggggtgtgaaacgaaagcgttctactaaagagctaaattggtctaaaaaagttatttttttgaacttgagtactggaagcatttgtccttaagacataatcttgatgtaatgcacattgagaaaaatgtgttacagcttagtaggtactcttctaagtatcgacgagaagtcaaaggataccgagaaggcgagaatggatttgtaagacttgaaaatacgacgtgagttgtggttgtatgaacaccaaaatgggaagtggaaaaagcctccatctagttacacacttagtgttcaagaacagattgaatttgcagacttttcaaagtctgtacgatttccggacggttttgtggcaaacttagagaaaaatgtaaatttggatacgggcaagatttccggactcaaatcccatgattgtcatgtgttgttacaacgtttattaccagcaggtatccataagtatcttgaaaaaagaaattcgggacataatcattgagttgtgtgtgtatttcaaacaattatgttcaagaacacttgatgtttcggatttggaaaaaatgcaaacaaatgttctaactattttgtgcaagttagaaacaattttttcaccagatttctttgacataatggttcacgtagttatgcatctccctaaagaagccatactaggttgactagtgcagtacaggtggatgtatcccattgagcggtcaatgtctgtgtacaagcaatatgtcaggaatcgtgcccgttcggaaggctctattgctgaatcttttatggttaatgaggcattaacatttttctctatgtactttcgagaagtggaaactcgattcaaccgtcctgagcggaacaatgacatcgtcccaaacatgccaactcgataattttctgtattcaagcatgttggtcgaccgctgggtatgaggacagtcgacaccttacccatgataagagcgtaaggcagagtggtatattttgaacaactgcaaagaggttgagcagtatatcaagtaagtataaattccataaacagtaactgaaaatagttgacttcacctcaaaaattcttaactcaccaagtgcattatattatgtagtgagcacaaggagttgcttcaagcaaggggtgtaggcaatattaaaaatgtgcaagagactgagttcccataatggtttaaaactcgagtaagcattgtcgcctctcaatactcataattttgttcttaataacttttgaacttttcttaatttaatacttttcctgaattttagattaatgaactacggttgagcaaccatagtgtagtgtcagatgacttgtatgctattgctaacccagcgaatccaacaatttatttttatcctgggtgcatagtgaacggtattaaatttttgttcaatgaaagggatgataactgcaaaacacaaaatagcggtgttatggtgcccgatgaagatgaacaaaatttttatggcacccttgaaaaaattattgtgttcacttatttaaaagactgcaatgttctcttatttatgtgtaagtgatttgacactaatggacgtagaatggataatgatggtgttattaccagtatttacgtcaaccgagagtggtaccaaaatgaaccgttcatacttgcatctcaagcaaaattgatatattacattcctgatatgaagaacagtaaagactggctgattgtaaatgagtacatcccacgaaaagtctaggacttcccggacactgatgaggaacatcctttttacaggaaaataattcagctgaaaccgagttagttgttcaacttccacagttggatgatgttgactatattcgccttgatgtggacccaactgaagttgcaaacatccatcgtctgaattcacagcctcaatagttagatgatttcattgtcgatgatgacaccgacggtctaaatgcagaagacgataactccttagaattagagagtgacagtaatgataatgttgtatatgtaactgatgatgatgatgatgaattgtaattgtaacagtattttaataggaataaaaattaaaatcgttcttgtttaatatgttttgaatatggttgtttattttaaataaataaaatatatgttgtatatatagtatgtctacaccaagtggcagcacttcgaaaaaaaaggggtcagaggtaaatacaaagggcaaaaatgttgaagaatagctctccaaaacaccagctgtgaagttacacattgaattgcatgaagagacgggcaccctagttggcaaaaacagaaagaagttcaataatatgtgtaaatggatggttcgcatgtccatccccatgaataaattcaaataggaagatgttagtagagctaaaattaatgcattgtgggacagactcttgaggtatttcgaaattaattttttaatttttaatttactatattcttcttaaatttctaaaattcgcattaatgtgaatgtgcaactttttgcagaccaagtttgtcctcccacgacataaccctacattcgtagactatggtaagtacgagatgtcaaagggtttacgtgactagtgatcagattgtaagaaaaaaaaagatacaaaacattgaggagcttggacaggagagggccgacatgttacctcttgacggagtaactcaggaggtgtggagtgattgcattgcttacaggagcatagacaataaacaaaaggtatttaataaaatttattctaattttagtatttatttcatgttatatagtcaatcataaataattaattgttagaaaaattattaatttcaggcgagagtagcaaaaaataaagaaagtaagggtaagatgaaacttcagggagcctggggatcaaagcctattatttcacattatcattcatttaaattgttttggtaaaataacaataataatatttttttttcttaaaaataggctaaccc

SEQ ID NO: 223905 - DNA, 1531 bp, Cannabis indica
gttttggtaatatataaactcaatcaattaatgtcatctcatcagcccaccatatactctttgactctttgccgccccggtttccacgactacacaattggttgaagggaataataatttggaatgtgtaaatcaatataataatttaggccattcgagttttgacatttattaaattaaatttttttatcacataaaattttttttttgaacaattgagattgttgaacttaagaacttttgtccaattttagtaaagaaaatctaacattaatgaaagtgacatgatttgacacatatcaaagtacgaggagcgtgatttggtagatattaaagtctgagaagcatgatgtaatacataaacaatcactaaattagtaaaattaaatgaaattagacaaaagtccttaaattcgataatctcaataattcaggagaatttttaacgctaaaaaaaattcatgagacataatttagtatatgtcaaaatttatgggacaaaatcttaattagccataatttattttaaatcattttttttttttggtaggattgatcttggtttgagaactttttttactaattcaatttagcattgttttttgaattgccactattgaaattggttattggttcttcatcctatttattcggacctcaatattaaaatgaatcttataaactaaataatttaactttctgctcaacttcatttttctattaaaaattttataattcaatagaataaattataacttaattctaaaataacacaagtgttgacatcgcttttagccaacgacagtgaatcaattaataagcgattaagaatataattaaaatagagcaaaaacaaataagtaataaagaacaccagatttaaaaaggcttggccccgtgagtgtggtaataacctactccccttgagctgtattaacttgagagaaagaacaaagtgtttttctctctaaaagctcttacaatgaatctctgagtaattctcttagatctctctctgaagcaattctttcgatctctttcacagtgaggctaagtcactatttatagggccttaatgcatgagagaaggttttctttttgcttacaatgtataaaatagaaaattacattaattacataattatgcaaacacgaaataggagattagaacaagttgtcatatttctctgattcaatcccacgattgtaagaattgccttcgtgcctggacttcacaagatcattctgaagtagttaagtcctgataagtagttcagaaagtcacatttatacctgcccggataatttgtctttcatcctgcctgggtaatcaagagttatacatgctgacatacctgttcgaaacattcacttcctcctagatacaggaaatgcaggacacgtgttatttaagtattttgccacatcgttgtgcagaaaatgggataacatttgtcccacaagtctgcgcgggaccttcttagtcgcacgtggacttcactcggtgtaacgcccgtattttataataata

SEQ ID NO: 223906 - DNA, 1918 bp, Cannabis indica
tgatgaataaaagaggcatttttcaacttacccctcaaaaatatatctttttagtatccactaataaaaaatttcctggtattatatttcattaaaatatacatacttttttaagtgaattgtccagtatactctcactttccacttaagtttagtacatattttacattaacctaaagcgtataatgagaacatcatttatgaaagtgactatatcttaaacaatatgaaaataaatattaaaattaaaataaataaagtaaaatgggaatataatataatttcctcgatgggaatcaagtgaaattaatttaataggagaaattagtgaggctcacttaaatttaaattaaggagaaaataaaaggaaatattctttactcattttgatatgaaatatatttctctttctttaacttattttatattaattatatttttatttattaaaaataaaaaagataaatatacttttcaaaaatatataaataaaaaataattacatgttctaacaatagaactttcgtcaaactaaggcatttccattactttttctagttatgtaaacaaaataaaataattttgttttctttttcgttcagtttgtaaacaacaaaataaaatattatttatgattattttatattataaattgattcatttattccattgatttctctgattccaattacagtttaataaacgtgttattaagtttgttataataatatttttaggagaatttttgtttttagggtttttaataaacaaatttgtaaaagtatgatttttttttaaaagttatttcatgagaaaaaaaaaaataaaatgtggaaaacagtataaaataacttgttacccttaattgttttctgtgtaattgttaacttttctttttaaatgaatgataatggattaattttcccaacttttcttttgcttttttgacactaggggagagttgttgtgcccgctccaccagtattttgacaagctcacaaaaacacgagtggcgtgctataaaaaaaatataaattgtgtcatgaagccaacaatattataggataaatttgagatggtccgtaagcccagtattatagtgtcatgcaaaatattgagcttttcaatgttttcaaattagtgctctaagtataggttgaatttgtttgacatgatatgagtttgaaaggtacaaaaagatatggtttgagcatctcacattaaaaaactcaatattttgatggtaataataaatatttatgattattaaatgattatgttggtgtgcaactgggagtgacaatttatgttgtatctgattcacattcgtgttatgtaaattgacatgtttaatttgttaatactaatttgagagtaaattgagtaatacctctttttgtattattaataaaaatatcttcatattatatttcattaaaatagacacattttagtctagcacatattttacattaacctaagaagtataataagaacataatctataaaaatgagtatatcttaaaaaaaaaaataataaataataaaaaaaaataaaatagatacataatgtaacttcctcctgctaattgcgagggaggcttttatgataaatgtgtatagtaaaaaagcccacaattccaagcattcaatattctatattcacgaccagtgtatacatttctgttacaaattgcattcgaactcatgttttttttttaatgaaataataaaaattcattaatcaatattcagagtacaataaagattttagttcatccgaaacattatactaaaaaatattacgatcaaaagagaattgagagcttctagccaaacaatatactacttaatttgcagatcgtttaacaaaaacataaactaacattatttaagaaagaaatcaattcttggcgtc

SEQ ID NO: 223907 - DNA, 1934 bp, Cannabis indica
aaatattatttatatatatgtggattggattggatcggttacttttatatgtcaatcaacatccaatccgcacaagtgcggattttgaattttccaatctaatacaatccgacaaaagtgtggattggattggattggatttggatcgtgcagactgaattggatcggctattttatgaacacccctaccgtcatttatgagtattatgtgtacttattagaatatgcactcaaattttagagattgatgagtttgttttttcaactatcatacttaaaacgacacctataaaaacgaaaaaaaaaaacaatatgacatcactatatatacttaatgtttaggtgcatcattactcataattaattggggtatatatgattcatacgttaatgaacaagagctaatactctttctctctacatgtgtagacctcaaggcaatgtcttttgcgtattatgtccaagattctgaataattcagtagcttaatctcttccaaaattagattaatttaattagcctcaactctaattaatttggttttgcttagtactatctttcttaatgaataaaaaattaatatcggactagggaataggatcgaatggagaacttttacttaatgagagaatcatgaattagcaaaaacttaagagagattagtttttgagaattatttttgctgatatatatcttttaatgcacatcggccctccttttaactataaaaacaaaaatatatgtaaaataaagtaaataaaagattgcaattatctcacactaactttttttttgaacgtatctcacaccagtttgagattgaaagaagattgccattatgattcctactcaaattataaaattttatttaaaccaagggccctaaagacccaatatgcaggctggatgagttagtgaaattatataaataataaaaagtacgtatagcagagtgcatatcttttattttattttgttagttattaatgagatatggttagatttttttttcttagatgaatggatcattgaatattaattagtaattatatgaagagtgcatattatattattttattatgttaagtctcggttgaaactcaaggcacggattcgttatgccgaatctcacccattcctttctttccagtacaatagggtcagtatagtgcatgtccatacttagccaatgtcatttttttctacacatcaaatcatatatcactaccaaaaaaaaaaaaaaaccaaaaaaactattttagtgacaacaccaaattatatatagtaatttgcagcgtaaatacataagtttatctcaaaattgcagataaatacctaagtgaaaattttggcagtaaaaataccttcagttaggttttgaaacttccgtaggtacctttccgtctcatctctctcttctcacatgtttcatctccggggcacctccgcccgaccctggtgaggcattctaccacaaccgatggacgagattcccacataggatcgcaagcattagagcacaccgaagtttgttctccctctcgatcttgcttgagttctctccactctctcagtccctctctttctcgatttctccctactcagagccggacggagcaactccgaccgtccatggcccaaacagactttaccacacctaacggagatacaggtgaggcgtcgacaagaaacttggtcttgattgagatctatgcatcaacgggatctattgtttgtttaaatctggttgcttaggtgttttttacgaaatcttatatctttgtccacgatgaagattttttttagaaatttttgtaaataaagggttaatgtaacctagtgtcgccggtgttggggttgcaatcgcacaagaggacgacgatgatgtttctgggcagactgtttaagcagtgtagaagagaaggattctaggt

SEQ ID NO: 223908 - DNA, 10651 bp, Cannabis indica
tttttagcaacttttttttaaaaaaaaaaaaacaattgttattgggcaccagtggtgcctagtacctctagatatgtggtcttacggttagctagggatactcctgaaaagttattatattaaaatatatgatacctaatacttaattggaccaatagcgatattgacacatatgagtgtgctaaaacattattggcgccttttagcacttctctttaaaaaaaatggtaccattggagatgctcttagtaatacctttttaggatataataataaccaatcgtagggtgtcacctctagataatgttaggcactactggtacccaatagcaatactcttatgagaatatatcatatataaaaataagaaatgttgaaggacactttaatgtgtcaagcaccacaagagatgacatatcattattggtgcaatttaatatcgttattaccatatgagttaggtgttggacaccttaagatgtctagtgttgttactatgcaccatgatacctaccacaagagtttaaatagtttgttgcatgagagatttttttattttatacgtgtgtgaaataaattgtttgaatctttttttttttttgtcgtgttaagtttttgtgactttctcaaaattgtccaaaaatgtcctaaataactacaatgtagacgactttgaaaaaaattagactacaaatttttttcaaatgtcgaaacagatagagagtgcatcgatggaccattttagagggtgcattgtagaattttcttgtactatttataaatgagaattgttgagaaacactttaatgtgtcaagtgtcagtaaaataagtaatactcgatattgaattgcacttagaattttaacaccttattaacatattaggtacatgggtgtcttttaccatttaaataaaatacttttcttttattatcacgattggattggtctaactagtatattatatacgtacttgtacggatttgatgttaattgatatgtaaaaggaattaatctaattcaattcacacataacattttaatgtaaaaaaatagtaatttaaaaatttaatacatataatacaaatatatttcaaaatttaataaatcaaccatatatttcattcttatatataatttattttcttttttacatacaatataaaataaaattaaacatttatttttatatgcactttttaaaattgaatttaaattattgtgcaaattgaattagattcaaaatataaaatccgcacttagtacagatcaaatgcactaagagttaaatagtgcagatcaaatgttatgttgtgggtacgccaacgacaactctacgagatgcctttcgaaataatggttgctctagcaacgttcccacattctcccttatagatctcatagaagactttttgtgcctttttcttgttcattcacctaagaatccctatagatttttagatagttcacttgcaagttgcaattctacaagtaaagtttcattaacttgaacctagagcctagtaagtaaaccaaatgctcaaaacaagatactaactataatatggtaaaataaagaatagagaattgtagtaataataacaataataatttaaacatagagcaaatttatttggaatgcatctttagagtggaccttaaagaatcctaatacattcattaagtatagtacaaccattttgcagtatttgttttacttttttttagtaacattttttcagtaccatccttgttcggaatagactaaggaaggtccattcgacgccaatttcccaccaatggacccatctgctcgatctttccataccacccgagcaacccaccagtgtgtacgaagaggatctttctcccttcccacttctttggattctcactcatgtctttcaaaagcccataagcagcttttccactaaaaggtaaaaaaaaaatattgtttcattttatcttctcaccgccaaaatagaaaatgtcaaaaaaaaaaggatttatacaaacctataaacgggatcaagtacaacgccggtcgcttcagcaatgtccttgactaatttaagctcttctacagtactaattgcatatcccaaacctttggcctgaccgaaaataagattgaaacgagtcagtcactgaatgaatgtgcaataattgataaacataatcaaacaacaacaaattggagaagacacattgttagaattgtatgatgtatgaattgactttgagataaaatctcatgcatcttacaattctaacatggtatcagagtcaaaacaaaatcctaacaagtatccgatccaaatccaataatcggtctaaaaagacgacctaaaagagccgcttgtaattcagggatagtgagccaaaaaatatcgctgatgcaaaaagtcaagccaaaagagccgtttgtgattcggtgagccaaaaagtgtcgcttgtgatcgagctgtccaaaattggtgagcaaaaaacagccaccatcttgagagagatgttagagaatcccacattcataatgtgtggaaagataacactatatataagatgcatgggctactccttccattgtcaattaattttaagatggaacctcatgcatcttataattctaacaacagaaagcaatactcgaaacaaatatcaatatacagagagactcacatcttgtatgttgacaatatcacgcgaggcaacatcagcttcaaggctatcaattaggccttgcacaatttcatacaagtaatcgggttcgtagtagatagagaaagcatgaacctgaagcacatattggattttagttagattagagtagaatatggtcactacatcaagaaagtaaatcaacaaaaaagaggcatacttttgccttgagtgagctcatccacgatcccaatgagagaccagcaacagtaccaccactgatagaaataaaacgtgattagaattcagtcctcatgttagagagtcccacatcgctaatgtgtagaaagatattagagcatatataagatttatgagctacacctcttaatgccaattggttttgagatgaaaccccacccatgcaccttatcttaaattctaacatagtatctatacaaaaataaaaaaacctctaacgactatcctattcccaaaaaaaagaccatcgaacaaaatagctctaaaaaaagagcctatcttgaggggcatatataagattcattggttacatctctcatgagatggaaaccatacactttatcttaaattctaacaccttatactcagataactaaaaaaagagcctatcttgaggggtatattataagattcattggctactgctctcatgagatggaagtcatacaccttatcctaaattttaacacctcatactctgataacaaagaatatctaggactaagtctttattaacagatttgatccaagtaagagaagtccaattgtagatcatgtcactgctcattcatgtaacataggagttaatatgcttgaacttctcaaataatttgggttcaggttgtgcaaattataaatttatacctgccacaagctacaacaatgtcgtcaaattttacatcagcattctcaattaggagttgctgctcaatctctcgaatcgcttcaatatagcccctaaaatagagtacagacaaattattggaattgttggaaatttttacagttaatgaatttttgacaaaataagagagtgtcctagcgtgtgtgaaaataaaaagaggcccacatgagatgtgagcccttgtatacaaggatatataaggtgcaattttgatacttgggatagggtcttgtgcaaatgggtgaggacacacacttaactcaccacacacgcgagcgtcccgagctagctagtgtggtgatgtttctcccctgtgcagtagggatccgatacagtatacaaatgatacaacaaaaagttaacttgccgactaagaaagctattaattaattataaaaagtcagcaatacacattaattcttttattactgcctctcacgtacactacaagaaaacttccttcaattaatgcaaccaggaaaattttttcaaaaaatttaatggagttaggaattatacatttaccaacaaagctagtgatctaatgagactttacaaagctagtgatttaatcatatacggccaaccacgactgtttttcatattgagacaaaagaaaacaaataagcaaatagaaaaacaaactaaaaagaaagagcttggagaaaatctttgcattcaattaatgcaataaaataagattatgagaattgctaaaagatatcattagtgtttcgcacctttctcagtgtcatactgctattggtgtaattaagtatcgggtctcatataacttaagaaaataatttttaaaaaatatcgctaaccaatcgcgaagtaccacctatagaagatgcagggcactagtggtctccaataacaatgctctaagattataaacaaacgatagtaacacaatctaaccaggttcctaaggagtcagatccaccggttgcaatgacatatggcctcctcccttcccttataagcttttctttaaggtggttcataagagcctgagaaaaagaaaatatatatatgaaatcatattataatgtcatgttaattactttcaatatcaaaatacaggaaaatattacaatgcaccctatgcatcgatgtacccttatttattttggtatctggaaaaaaaatttaatctaatttttttcataatcgtgtgcattgtagttaattaagatatgttgcaaaattttaagatctttgaagaaattataataaagattattcaagataaaaataatgattaacgaaccgcactcccaatatttgcaaattctgtttctaaaatgagttcaacgtgagctcccactaaccgctccaccaggagatttcctgtcaatcctggatcttggtccacaaatgcctgagaaaatcaaatcaaatcaaaacaaaacaattcaatgaatcaataaacaaaagaaccgaggaattcgaaaacgaaattattgacctcagaagtgaataatataagataagagtcgagattcagatatctcgcagcaacagcagttgagcggcaatggttgctttgaattcctccaagagttatgacacaatcagcaccttgtgctacagcatctgccagcaagaattccagcttccttgctttgttaccactcagctgcatcccagaaagatcttcgcgctaaatataggcaaataatttagtcagtgtaaactaataaagtgaagaagaaatcaaagaagcacctacaacaatgcatgaaaaaaatagttcattagaaaaatctttaataaaataataaaaatctgattagttctacaatgcaatccttgatacagccatcacagaagtcttttccacagttataataactaggctcattaggatttttgtctcctacaacttttttaaccgttaaaaattctttctgaactattgaaattgttggatctaagaatatttgtccaatttcattcaattttactaattctgtgattatctatgtactaaatcatgctctctagactttgatttgacatataccaaatcaagtcccttgaactttcatctatgttagactttccttactaaaattagaaagaagtcataaattcaacaatctcaaatgttcaagggggatttttaacagccttaaaagttcacgatacgtgatttggtgcatgttaaaatttaggggacaaaaatcttaattagcttaataactaaagcaatacaaatacgaactcaatcttaaccatcaactgaactctaatattcaacagaagatttaatagaaaaatgataacaatatcaaagaaaccaacattaatgaatcagagcataacattacattagaacgggataaagaaactatcagatgcaaccataaaacaaaacaagaacaagaaaaaaataccttcaaccaaacttcagtgtttttaggcaaattaggaagattccatttgtgaattggggtaggaagctgataacagaatcaagtagtaatggaaaagagtaaagactaggaaagaaacctcttttggtacaaataaataaagataaaggttgacttacatggctgagagagtaggaatgagatggtatggggttgagatgagaagcccatgaaggaggggaatatggcttcttggtgaggaaatccaaacccatttgtgaaactaagtgtgacattgaatattgagatggtgaagaagttggctcgagtgattgacaagagaggaatctgcagaaaatgcagtagagtggatgtgctgcttgtgcttctaaggaaaggaattcacaaatacatttatcaagtattctcactctttttctcctagttttatgtggtccctttaatgaacatatgacctagaatcaaaattacacaaataattattatacacccaccctaagtgtcatagtcagcttgtagggctaattttgtgtggaaaattaaagaagagaaaagcacgtatcaattttcaatttattgagtgaccaagagaaatagaactcaaacacccaacaaagaacaatggaagaaaaatcaaaaaatttagaccatttctcgatttgtgtcatccttgtgcaggggtcatgttatcgttccaattttattggatgtccccgaagagactccaccaaagaacaatgagtacttcatgagtacaattcgaagtgctcaacaatttctatctgtaaggttatttgccctctgtttgagtaagttggctctctaccatttgtgttttctttttcgattttaaagctcgacatcatgatcttttggtgattctatcgttgttatgtggttttaagctcaacctagatggttccacacctctcctatcttggaggaagtcatgggtcaatgcctccctccccaaaccccattaggatagaaatatataaactatgtaatgataaattataataattgaaaaagaaaaattatggttgagattgttattgtaaagggaagaaaacaaagagcgtgttgattatattcaaatttaagaacaatcaaaatcttcattcattacgagtaaagacattattgctaatacactaaactctataatatgttctacattataatcaatagcatagagtcatgtaagtctctacttcaagtttctattgggcccaaggctggtcggccctaagtattggtaggctaagcccgcgcctaagacccacttattttaggagcctaaataaaaaaaaatacaattaaaaaatatacatattttttttaataatttttaaaaataccaaatatctttatagtaaggaccaaaaaaattttttgactatgatccatttcaactcagggccaaccctaattaggccttcccccacgactaacgtgttttgtcaagctaccaaaaagatctcttcaactatttaatcccatagttacacagttttagaatgaggaaattagactctatatcctttttatattgtcctcttttatactctctatgtgactcccttatgtcaacgtattttaggtacaatacgtaaatttagttaattgataaataaaagaggtattttccctttcagaatcatcacactttaactttgtctgagaatataggattgcatatagaaactatctatttttattatgtaagagtagcaaagttgatagtgattttgcttaaaatggattttgttgtgtcattttctcactaaattaatcctaatttccaaattctattgggtaaaaaaacaatcacacaagaattggtctgaaaaactcactgtcatttcgaagtgatctctctcagtagccgtccatcaactccttcctacagatatctgcacaattcctaaccctatatataatttgcttacaaaaaagcttataaatgcataaaatttcaaaattttctcggttgccaaacagaacatagtagtgtaagagaatttcaagagaaaaaccacaaaaacaaatgaaattacatacctaagagctggaaagaggaaagggttattgaggaacttagatgaaggaagaatgaagataatggtaatgagggcctcctcctcctcctcctccttcttctcccccgctgccaccaccggcacgacgatgacgtaagtgagaatcatccattgaagcgccattgccgtcggtcggagtcggagttggatccaaattcgaatgatttctctcactttgacggaatataccaattttggtttttttttttagctattacaattgttgccgatgaattttaatatttatcaaattatcttttttctaaattttttaaagtctgttagaaattcttttcgaactattaaaattattgtatttaatgacttttattcaattttactaacgaaagtctgatgcgaattaaagtttgagagcacgatttgatatattttaaagtttatgtgacataatttggtagatatcaaaattcgagagcataatttagtagaattggacacatttttttaaatccaataatctcgatagcttaagggatttttaacggcctaagaagtttgtaacatgatttgataaatattaaaatttagatagaaatttttttttaattagtctttattattattattaaatctaagtaaaaatttgtgtttcccgtaacatgtcattgagattgttggattcaataatttttctttaaattattggaaatatcagaaatattattatggctaatgtcatttgattaatgaaatatttcctcgactcttccttaaaattttgttttcttggagagattgtgtttttttagaggttatttatctaaaaaataatgtatcattttaaaattaattataaaattaatattatcaaaaatctcaataggttctatttttccaatttacttgaaattcatctttcaacattaatgaactttatggtataatggtaaacattgtctttactgacatccttctttatttggatcgagagttcgaaacctaccttcttttgaagggattatcaaaggcttagcccgttgaaggctagctactgtaagtagtgtcatctgtgtgatgagaactcttgaagtgattactgatgacccaattaaaatagactgaagtatataatctctataggtgacacgtgatccccgagattgtcaaaatgaccgaaagagtggggaagaaatctccaccacataatccccttttagattatcaaaaaaataacattaatgaactataataatagtaataataataagaaaacatagaacgcattttatttagaatgcataagtgtggaaacatatgtgcaaacattacgctctattagttaaaaatatggtacacaaccattttctgcagaaattttcttagaacattttcccaataccatcctctcgcggaacagattctgggacatccattcgacgccaatttcccaccaatgaatccatctgctcgaccttatcgtacaaaccgagcaacccgccggtgtgtacgaagagaatcttcctcccttcccattttttcggattcgagttcatgtctttcaacaatgcataaacagctttcccactagaaaataagtaagaaaataatgtttcatttatcttcacatcgcggaaaggaaaaaaaggaaaagaaaaaggatttttacaaacctataaacggggtcaagaacaacaccggttgttgcagcaatgtccttaacaaattttagctcttcaggagtactgatcgcgtatcccatacctttggcctgtccgaaaacatgatccaaagactaaaaccgagactctaaaacaatttcgatataaattttagttcttagttcgaaagagacactcacatcttgtatgttaacaatatcacgcgagtcaacattagcatcaaggccatcgagtaggtcttgcacgaagccatggaagtaatcggggtcatcacaaaccgaaaatcatgaacctgaagaacatattagattctagtttaaattagattacgctagaagagtccataaataatgaaagtaaatctacaaagaaaagatgcatactttcgccttgagagaacttaaccatgatcccaatgaaagaccagcaattgtaccgccactgatggaattaaaatgcggttagaaatatgcggtcctcgctctcttttcgcaaagaacatatctaggattaacatgaaaattacctgccacaagctacagcaatgtcatcaaaatttataccggcgttcccactttggagttgctgctcgatctctcggatagcttcaatatagcccctaaaatagagtcaactcagataattagaatttagaatgacaagagagctcaatgcaagggtttcggatacacacatccgactattcgagaaagcaaataagaacattgagctaggggttttcatccaatccaatccgtattattttgcttacagtgcatccaatccaatccgcacaatgctatcaaatccaatccgtgcaaaagtgcagattggattggatcatgcagattagatttgatcaatgcaatcgaataaaatgataaacaaaaatcagtaagc

SEQ ID NO: 223909 - DNA, 1797 bp, Cannabis indica
attttttttatttattgattattatgtctgtaaagtcctaactaagctcaattatgaactattttatgtttataaataaaagtaacattacagtttttttcgtattttaatgcttgtaaataaattagtaatttataaaaaagtatgggcgctacagttggtatgagagccacagttatattgatcccgaacgttctcacgagttacacaaatcggctaaaaaggttccactcgctactaagtaagtattattgcatgattgtattttatgtgcattttagtaattttaaaattctttttatttttagaatcctagaaccaactaagcaccaacatcatgagaccagagcaagtagaacacattataaggcatattaaagccttaaagagattccccaagaccccacccatgcgagaagaaaacaaagtctttgatagaattaacaaaatacatgagggggtggataagacaatataccgttggaattatttattgaagtcacatgagaagtacatagccctgatgcacgctctcaatatgccacatgtctaacgtagtctaagagcaaattgggaacatctagggcatgtcgggatagatgaggccgaaaggtatgacctacttatgatcaacctagtggatcagtacaaaattaccaacaccatatatcaccctaatggctctaaagaagaaatatatcatcgacccaataatgttgttaggtctaaattcctttaaaagttaccaatctcgtcaaacctagtgtacatagaactcgactacgtagatttgacagaagatacgttagaggaagggtcagacatagaagagtagaagagtcaagttgcattttattttatgtgtttatttgtttatgtaataaggggttttagtatagctccactttagttaggagttttagtgtaactcctttagcttgttatcctttggaattcataaataaataaagagattttattctatctggtaaagatttatataaataaatatataacttcttatgttaagtcttattgaatagttaaggaataattgttgtagatataggagatgtgtctcttagaattaaggcgtcaaacgaaacagtacttgcagaaataaaaagcattctatcacttaagatcaaaaatatctgccacgaagaggataagattcttagagctctacgagaggtcatcgcaattaataaagaaataaaaagagtagtagaggtgaggggagccttaatcaaatcacgagaaaagtttctagtgataagggtttctttgtcacatgtccccgaacttctctactatatcgatgacgtctggcaccgtgtcttaaatcttggcgacgtaattaatactcagcattcatatgtgaactgatgcttgacttccacaactttattttcgaaaagacttatattatggaaacaaaaggcacggaagaagaacgcgtcaagaacgtacgatataagctaagtgacagcagtaaggaggacataactaaatctgtgaacgtaacaaatgaacgagatttggaagaattagaaatgccagactaatttgaaatgacagcagaaatgttggaacttgaactaaaaagcccccctcaaatagaagcagaggaaatagtagaagtaatagagattccttcagatgaagaatccaaagatgaggaaatgctagaagggtccaatgagccagattactctacagtaccaaagagcaaggacttagatctattcacagcgaccaacatcgatgaactagaagatgacatacctgattatc

SEQ ID NO: 223910 - DNA, 1830 bp, Cannabis indica
gttgttcctaaatattaacatttcgttcaaaaaaaaatatattaagtacatatataataattatacggattggtttggtttgaacactacaagatttctaaaactgtgacaaaattaaagaatttaaaatggtctggattgatcaaatcattcaccctcaattcatttaatccggtctcaaatggtttggtctagattgattgaggtttggaactacagattgcggattataagaacactcctagcactgtggttatgagaagaataaaaagaaaaagaataaagtaaaggaaaaatattttaattttaaaattattatttccaaattaaatttatttttttataatacttaaattattaatattatatgtatcaataaaaacttgccacaataacaaatttatttgacatttaacagtgaaaaatttgaaaaaaaaaatgaagacaaaaagaattaaaatttagagggtttaaccgctaacatttcactccaagaggtgatagtaccaaactttaaaattcaaataatttgactacaaattaccattttattttcagaaatgctaaatagtattattgttgtttagcatccttctacgtattaatattattattggtgtaattaactattgaaatcttatataatttaacataataatttttatagagtattactaactaattataaaataacacatttataaactattaggcactcctgatacctaataacaattgtcttttatttttatagggatttttagttttaattgttgtttatattatttataaattgaacaacctgaacatttgatgagagtgtatggcaatatagtcaaatacatggtcaaagagaatctttggccgtccattacacatgcatgcccaatcacatgaccgcattatatattttttttaattattatttgaaacatattacaattcaaaccgttgttgtgtcatgataattaagtaataataattaattcaaatataaaataaataaaatgtggaaatgttgattagtatttgttcaatatattggtttggctgtgtagtcaataacaagcaaataaagaataacttacgttcattttattatattctcacgaagcacacaaaacatacataagacatgaaatctctcacgagttcgaacctttatttttttttctttctatttgttaaatactttgtgagatattcaaataaaacactgttgatcccttcaaactttgatttcatatttatctaattttgtaccttttttgtagttttttttttctgtttgtttttttttctttttttgcaaaccttttgaagctccatggaaccaattataccttgattttctttccaaggcagcaaagcgaaaaagttgaaaaatgtgacaataatttttaaaaaattttgtaatcaaagaaatcatgtagggatatatatgatatatttatatacatagtccaaattaaaccaatttttaaagttagatcacaactagataaatatataaatattcgactgctatcgagatacaagagacgtgagtgtacgtaattttttcttatatgtattaaggtgcatgagatgataatgatgataaaagtccgtgataaggacctccaacaaaaccaaaattaagtttttagatattttcctaacaacttcttcttacaactgcttactttatcttttataggcagaggatatatatgatagggctatttacacaaatactagaaaatgatgataaatttttatatatggcaaaaaattttaattatactaaatatggcatttaataaaaaatttacaaataaaaaataaaaa

SEQ ID NO: 223911 - DNA, 1996 bp, Cannabis indica
ggccacttttatagggtttatcatctgatattttcattattttaatgccaaataattcaaacctaaccctatgtggcatgctataaatagatagtgatggcttcaggaaaaatagactttcacatcttgtttccttcagagaaaaacctgagccttctctctctatacctagccgccaccttcaccctcttcttcttccttgaataatttcgaaccacttagtgatagagtagtccccacacacagcaacatacttgtgagtagatctacgatcttggtaaaataatttccaacagtcctaggtgagcttctaaaaaagagttccttgtaaagtatttatgcttcaatagtcgacttaacaagaagtccgacatctcaaatattctccaggtttgcttcgctaacattgcttggttgaaatcaacaaacgaacgaaaacccatccctctttcaaattttgacttgcatagaaacttccaccttttccaatagattttggaaccatctttgttagtgccccaccaaaagtttgccatcattgattcaagttgtttacaaaaaccaatcggcaattgaaaacaactcatggcgtgtgttgggatagattgaaccaccgcctttaacaacacctatttaccacccactaaaaaaaacttctcattccaagcatgaagtagcttccaaatcttttccttgaagttactgaataattattttttattgttgcttgaataagcaggtataccgaggtaagattcatggcaatcacatattggcatatctaatgtttgactgaaaaaaagtctttgcctcatccttcatgttgagagaaaaagacctgattgacttttgcgtatttaacaattgtcctgacgctcggtgataaacatcaagaacatgtttgataaccaaggccgaatttaaattttctttacagaacaaaagactatcgttagcagataacaaatgcaagactgaaggggcatgtctagtaagctacaaaccattcaaatgtcccaaattttcttcatgattaagaagtcttgagaaaccctcaaaacatattaggaagagataaggagacaaaggatctccttgtctaaatcctcttgttggccaaacattacccacaacttctccatttaagagaaaagaaaagctgttagaggagagacatcgcatgattaatgaaatccatcgatggtcaaatcctatttttgtcatgacagcagataataatcccattccactctatcaaatacttttctcatgtccagtttgagagctgaataacctttgttaccttgtgttttatgctgaagatggtgtaccagcttaaagccaaccaagatgttatctgtgatcagtctgtttgaaagaaaagtgcttcgagtttccaaaataaccattgggaggacctccttgaatcgcaagaccaataccttggatatttgtttgtaaatgacattacaaagactgatagttctaaatttactaattgttgttggttttttgacttttgggataagagtgattaaagacttattcaagatgctcatgtcatggccttcatttaaaacaccaaagaccaccttagttacatccgtaccaatatgcttccaattatgttgataaaacatagctgacaacccatcatttcccaagcttttgtctggactcatcgaattaagtgcattgaagacatcatgttctataaatggcagcaaaagatactggtttaacccttctgttattgttgttggaatggtcagtagaacctgatctaatgcatttttgtctgagcctgtagccgtgaataaattaccaaagtagaagaaaatgatttcagtcaacccttcttttaatgttactgccacaccagctaggttttgcaaggagttgatggtattatttgactttcttaaagaggcataagcatgagaaaattttgtattttcatctccacattgtagccaatttatccttgacctttgtt

SEQ ID NO: 223912 - DNA, 1816 bp, Cannabis indica
ttttttttgcaaatattttggaaaaattaaaaggcacttttatggttccaaggaagcattttatagcttagtagattaatatcttatgaaaagatacttttatggatcttggcagagattagtaaaagaaattttacttttttttttaaaaaaaaaaatatatcttctcatgtttcagtaactcaagggactcggatgcaaaaacattgaataaaaaaataaaaaaataaatgcatactgcaactttagtaataaaaaggcatgcgtattggaataaaaaatgtcagcatttatcaaaactaagaaaaacagccaatattggaggaccattaatccagaagctgaacaagttaaaaaaattgtattaaactgtttacattcccttagtcacaagtaaaactgtataaatatagcttgtgatttgcttgatctcctaccaaaacgctttctactacaaaaattgttatctctcacatccaaaaagtacccctttttctctgaatattgaaaccaatgtcccataacttgtcagccatgcaagaggaccttctccaaaatgttgaaggcttgccactgaacatgaatctttctgaggtagaagtgcctacagtgggagcagtagatgaaagtgtgctggataagaaacgagtgatattgtaggaattttattctttctttgcccttcacacaacaaagtgattaatcaaagccccaaggtcaaatctgacagtttacccagtcaaagaaagcttttttctttctgatattataacccaaaaaaaaaaaaaaacgacagctcccttctatgacctacaagtcagtaatttattgttcagaaaccctaaaacacctctagacatatataagcttcttttcattcaaacacacagcctccactttaaaaaccctagcagagaaccctatagctaccttcgtcttcgatgttcctctctgaagaacacgaagacagcagcaccaatatcagcccagaaaaaccagaaattaaatcaaaaaacaacccaatcccagttcgaacaaacccccttaaaccgaaccttcttcttcgtggttcttctctgaagaacacgaagaacaccgacataaaaatacccagaaaaatacaacaccgcaagcaattatttgaaatgcaaaaaagaaaataaaggaaagagtgcaccgattttatagaggttccccaaaaattgttgttgggtacatcctcttcgagctcgccttagattgctcgtttccattatagaccttcaaagatcaaaagattacaccaaatcacgggtacgattggtaatctataattatttagagtgtttgaaaactctctctttctctctgtttattactaaatcaatactgactttttctcctctcttttccatgaacaatcaccatatgagtttattttcactaagataagattgagtaaccaccatgctagtttaattttttatgctctgctcaaaaaagattcatactccaaatattttttttttccttatccacttatattttatttttacaattttaaaaaatacacttaacatttagggtcagtttggtacgcaggattagactggactggacaagattagatggaattatttaccccaccctgctagatgggataaataatcccagacatattagattagctgtaatagttatccagacttctaacatgcccaaacactggattagacaaattaatctgtgttatccaatccagtcacgcgtaccaaacagaccctaatagttaaatcttttttatataatatagtagcagcagaatttcaagaaacat

SEQ ID NO: 223913 - DNA, 2030 bp, Cannabis indica
ggtttttcggcaaccaattaaatgatataatgagaagagctttggaataattattgcagttagttttaacgtggttcgggcattaataagccatagtccgcgagtctttgttattaatgagagttcttttacagagaatgttcttggtaagtcctctctctcttcttttttctcttcgattgatcgatcccccttttcgttttgttcaggggtatttatagagttttgtaaggatcacttataaagggatcacttgtcttttagtgccagccccctaggtgcacaagttcctaagaggtctagaataatacatacataacctatgccgtaggtatcataggaattaggtgagagtaatctttatcctcccttgattgatgtgatgcttcataatggagtcgtcactagactctttgactatcgggtaattactttaaacgaggctaacgtcgtctatcatatccttttacgggtgttctaatacgtttctcccatgccgcattaaatgtgaaatgactgtctgaacaagttctccttctcccggagatgctttgttgtatctctagctcccggagaataaaggcgggctttatgctcttctctgggggctcactccctgaagtgcacttgcttgtctatatataacttagctaatttcgcggatgaggtgctcttgacatccacgtgccacatgcaactactgccacgtattttgagaaaaatctgaggcaacatatatatatatcaataataatatgttaacaataagaagttagaaaaaataaaaataaaaataacttacatggatgttccttaattttaattgtatggctaggacgttgtaagtatatgagttgcatatgaaaagagaaatcataatgtaaaaatttgtatttttgtaatatataatgtggtacgatttgaatcgcgattattaaattcaaaactgcaaatcctaccgcatcgccggatttggcaaaagcacaaactccaaccacaccacaaaagatttcaaactgtatttttgtacgatgtagtgtggtggggacaatttgtgtagtatgagtggtttggtgaatacccctaaattatctatggtaatgatagtaattacgatatatttctgcaaaaatatagtaatgataattacatatataatattaagcattattgttagtattagtggtacctaataccttcttgaggtagtgtattgtgattagttagtaattttttaaaaaattattatattaaataatatgagactcaatacttaatgtgatatatgatatcaacaataaaaaaaaatggaagtatcactatatattttagtatttttctatgatataatatttaaacgtaaaatagttcttttcttaataagataaaaaaacattacttaattataatatatatgtttttgtttgaacaatcacttataatattttcagtaaaataaccacttaattataatattattagtaaataattatcaaggggcaattcatttggccatgtggctaaatggtttaataattaataatatgtatataggggttatatatataagaataagattgccctttcaaacattataactgaatgccgacaaattgttcaatttgtttggtgatcacgaaattaatgtaagttgaagtaaaaatatagttttgataacgacttcatgagatgaacatgaatatatattaaaaaaataaaaacaaagtcatatattatggatattatctcttccaccactatacagtttttcttagatccactaccttaattatgtgtgctctaatttaagagtgtttataaaatatttggttcaattcaatttgtactatttaattcaatttaatttataaagtgtgaatatttgcactcgtataaattgaattagattaaaaaatttaaaattcgcacttgtgctgaatgttcattaatgtgtaaaagtaacttatccaatctaatttacatatttatatatacattggaaaacaatagaaaaatacaaaaaggaaaaa

SEQ ID NO: 223914 - DNA, 1740 bp, Cannabis indica
aatgcacagcagaggcatggaatagttgcaacatctgctacaaatactcatcagcaaccacaccagtccacgactacagcaacaactgctcctagctcgactccacggcccacaatgcaagcagtacctgctgcacaagtgtggcgaccaccaaattccaaccaattcaagttgaatatagatacagcagttgactctagcaaaggtgtgatcggaataggtgctgttataagggattcaaatggtgctgttgttgctgctctttccaagaagctaataggcaacttcagctcacatgaaatggaagccactgctctctttcatagcttaaattgggcaattcaacaacaactaccattgacacatgttgaatccgatgcacttatggtggttaatgctcttcgaactcccttcaattcaatctcatcttttaatgatttgattataggtatctcatgtcttttatcctttctccttaatgtaactatctcacatgtcaaacgttcggccaatatggctgctcacggtttgacaaagtttgctttaggggtggatgaggtttgttctttgtttgaggaaatccctcctttcatttactctgttattgtaaatgaatgctatttttaatttataataacaagtatttttactcaaaaaaaaaaataaaattagccaacaaaaatgggaaagaaatgaaaaaataaatcaatttaatgatcatattcataaaataaataaatataaaataaaataaatgatatgatgataattaactgtcacccgaatatcatgtaacgacatgttgtcttgttcgcttacgatgcagtccaaacaacattttgttttggcatttttggaaccaatcactgaaatttgtcagttaagcaccttccataagggtattctagtaatatcacaaaaccgttccttgtctgaaaaaatatcttcgccacgtgtcacatatatttggtaaggatctcagttatgagtcccccgagagagtgagagctctctctgagcttctgtggccatgccatggcttcccaatcgctatgtggatggtcaagttcctctccaacatcttccactgtgaacccttcttcttgttcttcgttgtgcagaccttttatcttctttgcctttaacccaactccgtcaaaacgacatcgtttcagtttcagagcttcctttttacgggattcttcttcatcgacccgggctgctactttcaaacagggtggaaggaagtctttacgattcgattgcccgtgctcgagctcgaaatcggacgcgaattcggtaaatcgatccgcaaaacaaacgaaaccaagcttgagtttcaagaccttgtctgcgaagcgatctctctggaggaggatattttttgcgtccaaaaaagttaggagcatcattttgctgaatgtcgtcactctcatttatggtaatccgtcaattttataattgaattaataatttatgatatagtgagagaattatgggttttcaattgtaagctgctattttcttctgcatatgacgaattctggcgtgcttcttttttgttggactgagaaaattcggtattttttttttaatgtttggctttgatttggttcatgacatttgtgctatatctaatagggctatggtttgagaatttaaatgaaatctttcatgctttgatcaaagggtttgcagttgtttgtcttacaatatttcttgggctaccagaattatgcc

SEQ ID NO: 223915 - DNA, 1920 bp, Cannabis indica
tagataaatgaagaataatcagaatcaatattatatatgtggttattaaattatttggaaaagaataataatatttatcttgtttactttatcagaaaatataatcggaatgcttaaattaactaaattatccttttgagttaatctatagtatatgatagttattgtataggacatatttaaaaaaaataaattatcattataaatttaatattaaaaataaataaacataaatacaaatcattactcttaatgacatttctaaaaaaattctctatttttttctctcttagtaaagttttctcttttctaacttcaataaattaaataaagaattgtaaaataatgtcgaatcaaaattccctgttaaaaattggtgtcccatactatgttaaatcaatcaaaatttgatacatcaattaatctaatttatattaaatattttaactatttttgttgactcaattagaggtttaattttttcataaataaaaaattaattgatgtatcaaattttaattaatttgacatagtatgagataccattttttaataggagatcttgattagtgtcacaggctcaccttttcaggcagcgaaacacccgtgcagcaccttaacacctatttgagggtgttcaaataggcggcccgtgacagttagcaatgactacatgattcctattgcttatttattagaaaataatttaagaaagcacatttgagcactccaaaggtagcccaataacagatgtagcccactagtttagcccaatttccattaaacaacaaaacaaacaaccaatctttctatcatattcattcatcaaacaaacatggtcttaatttggacgtttcttccatccaaaaaaaaaaagaatatacatgtatgtttttttctttatttatttattttttgttggtggggttgtatataataactaataagaaatagatttaaaagaagtctagtctaaaatcttacgtgcttaaactacttttttccttttatttctttggtaaagaaaggattggagaataaacattttctttttatctatatagaccatatgatgaaacaaaaatcaaaaaagattgagattgagattgagattgtggaacgtggaagagaatgaaaggagaagaacattctatcaaatgaaaactaaggtgggggcccctactacctgtcggacttttaggtgttttcattgtaacggttaaggacttggaaaaccattgacccattccacggcccactcctacctccctcttccagtccggctccccacattctatctggataatatgggccccacccaccatcaccaccttattagttctttattacatattttttccttttctttttttagattttttcctaaagatttttttcagttttaataataataaaaaaataataatattacaaaaatactttcagttagccaaataaataaatgtacagctcaaataaaaaaaaattacacacaccttcaacccaggatctatacttcctgggcaactattgcgcaactacgcaataacctaatgcaactgaaatgaaaattcaaccagaaagagaaccaccattaatttcagcgacttcagatgagaagacgaccaaaatcaatcaaaacaggagctctttcgaatttaaaaaaaaaaatataaaaaaactactacaaaactaaaattcaactggcaatccaatttaatttacataaaaccaatgtcctgacttcaatttttacatccatgaaaggcagatctcaaaaagttgaactggagttcccaaataatctaactcaagcataatccaaaaaaaaaatcacatcaatactatagtaaaatattcatcctagtatattttcgttgttttccaaatttctaatagtgaatttgttcatattaaatc

SEQ ID NO: 223916 - DNA, 1566 bp, Cannabis indica
gagttgagttgatacaatccatctttaagggttccttgcaacaccaccttccctgtgctttggtccttcacacaacaagaaccagagaaaaattcgacagaaacattattatcagccgttagttttgaaacactaaccaagtttttagatatactgggaacatgtaacatatcattgagcagtaaggaattagtagtagaagtttggattaaacctgtgccaatgtgagaaattggtagctgactaccatcaccaatggtaattagttccttaccctcatattctgtcttgttttgcagtttgtttgcatcagcagtcaaatgattactcgcaccactatcggcataccacgagtcatcattaatcatttcgggtgttgcaacaagagctgagaactgcttgtcctgacctccagtagtgttgggttgatttcccatgtagctttcatcgtatctgttataacagatcgcagccgagtgcccatacttgccacacacttggcaagtcggtttaggcccattacttcttcctcgacctcttcctctttgacttcctcctcttgtgtaaccagtatattgttgttgttgaccccttccttgattttgatttgaaccaaatctcctttggcctgctgtgttagacgacccaggtttttgtgcaaagtttgctgaagcgtttcccaccagtttgctactagcagagatggtgttaagtctctcgagcctaccatcaaagctaagtagcatactctgtaattgttgccaagatgtactctcctgggattcgattaggacaacaatagacaagtattctacatctaaaccagataaaacattagaaacaagatgtctttctggatagggttcacctgcaagtgctaaagaatcagcccacattctcttcatcttcaaatattccgccatggactgagaccccttgcgagtggtctggatcttggttcgtaactcatccatatttgctcgagagtgtgcaccatataattcttcaagagcattccaaagagcaagagcagactggcatcccatgacctcagatgcgattgcttctgtcattgatccatataaccagcccattaagagctggtcatgaaccaaccacgtttcatattctgggttgatgtccattccagatccaggtgcatcaacgtttggttctcctgtgcgaatgaactcaggcggtgctggacggttcccattgataaagccatccaacctatgtcctcttatgatggtattcaccatcgtcttccacaaagggaaattattacggtcaagcttcaaggagaagggttggctaagtgtattgctgaagggagtagaaattggagaaggatttgaggaagaaggtgtaagagtcatggttgaagctgcaccagtgttctggccagcaggagtctgaccgccttgattggttgcacttgcctggtcctgtggagtcgacattgcgtaggcagatttggctctgataccaagtcaaaaatcagagtgtattcaaggtgtaaaagatcagctcaatcgagtctgatgcaggccattctatttataa

SEQ ID NO: 223917 - DNA, 1729 bp, Cannabis indica
ctccacgagggtaaacattagatcgatcaatcaattgaatgattactcctattttttctaatggcctaagatgcaatgaagcatatattgaatatgacgagacattgattgatgctcctaaattcaacatacaccgttcaaccaacttgtccacatagtacaaaggatcataaaattgtttggatcctcacacttgggaggaagtttcttttgaagaatcgcagatacattcaccccacccttactttttcattcacttttagtttccaattattgatacataatttccttaaaaaaatttgcagaacaaagtgctttactaataacatatttacctcaaccttgcaaaatatttcaagaatttatttgtcaatctaatccttctctgtctacctcaatctattagggaatggaggaataggcagcttaggcattggtgcatctttaggaggttgaatctcatcctattgtggtaatagtgtaggagaagatgggatggatgaggaaggtggagttggaggtgcataagttgtgtcacttctcaacgttataacattaacattggctcttgaatttgcaattgattgataatgtaatatttcaaaaagttgggcttccatcttgctcgtagatgtaactatttgtcctataatattctccaaactctttaaagatgcttgcaattcgctgctaaaattggactgtgttacctaccaaagccttgatcaagtattgcatggatgcacattggttctatgtggcagtaaggtggtgcttgtggaggcctaagtgcatagttctgttcaggcatttgttaaaaattaaaaccaagtggtctaattggtgcaacttattgttggtttctataaaaaaaatatatagtatgatgtattaagaatactgcatatttcctttgtgctctgttaaaggcttatttcccttctgtgttatagttagagtttgtccctattcctctaactgttttacctaatctgtaactaccttaacggtttctttactacagttagtagtactctttgtatcctggttcagttaagtttagttaaggtcggtttgggttagttagttgggttagttagtgagggtgttcaaactattatataagctctgtttcgagctttattctgtaactgagcattattcacattaatgaaatttctctcttctttctattccgcaatatggtattagagcgggaaaggaatgctttcccttgatccgttcttccctcttcatcctcgccgtgcttcttctccggcgacgttctgcgattgaaactggctctgctctgtttcgtctgtttctttcttctctttcccagatattcgttctcgaatataccttgatctgattctgtgatggccactgatgatcaaagctctactcatggtgtcgacaatgatggtatatctacaattgctggagatcccctcaatccatcgatgcaacaacaccaaaatcaacaacctgtccaaccaagaagccatcttgaagacctttcgcacccgtactacttacatcatggggacaaccctggtaatgtcctcgtttctcaactcctcactggacaagacaattacatgtcttggagcagagcaatgattttagccatctccgtcaaaaacaagcttggtttcttggatggtacaattcctaaacccccctcttctgatcatattatgtataatgcatggtttaggaacaacaa

SEQ ID NO: 223918 - DNA, 1291 bp, Cannabis indica
acaatgggtaagaagagtttgaaagataatcctcctagccctacttctctagttcctgctaaaaggaaactaggtgctggtacttcgaagaacactagagcaaaacgccatcgacctgtggtggagaactctgactctgattttgtattggagccagagtttgtaaagtctcccaaatctgataaggtatttttgtattgatcttgtgttgttttagagtttttttgcagttttatcatattgttcatttctctgtatttttttttctttgtgcattttcctttttgttgtttcttctattttatgtttttctgtttgtttgatggtgtgtactgttgttgttttgattttgttttgttaaattatagggaaagggtaaatcctcagtgaagattgtgcaatcaacagatgtggttgaggaaataattggcgaaagggttgtttttgattgcgtagtagctgaggacattcttctgtgtttccttgtccttgtacgactgacctttttctacttttgggtgatgtttttctattattagcttcgcgttgttgatgtcgatttctggatctagttttttactgttgttttcaagtttttctaccatttcttcaacaactagattcacatagtcaactatgttgagtttgtcgttttcaaattctcttctttctgactctcctcctttttctgattggtgttcaagtgtgtatgattctgttgttgctgtgttgttttcaagcattgttgtgttgttttcgagcattgccacgttctcttgatatggtgttgttatggttgtgatatttggaattgctgcaggtgttgtgttattgttctgttggttgacacataatggatatgtggtgaaatctgtttctttgatcttcaattgcaagtaaaagtagaggctgacgtcgttgaatatttttatcggtggtattccttctttcgcttggtactgtatttgcagtgttgtttgtgttttcgtaccccaatgaagtaagtaatatttgtaatagctcttcatacttgcaatcttttggtatgaattctccactagcctcatacttgacataattatgtttttctttccattttccattgctctttatcagaattggtatagattccatgagctgtcattgttcacaaaatttcatttacgtggccattgttcacaaccttgattttgtattgtacatttttagtcgtctcttatggatgatctatatgaatatttttcttataaaatgccatgtattattaaacaatttcagattatactgtttt

SEQ ID NO: 223919 - DNA, 3288 bp, Cannabis indica
ttcaattcaaattcaaaaaatcataactaattcataaaaaatccaaattaggttctgtaaaagacaaaatctattactttttcgtctactttccagttaaaataatttcaaatacgaaataaaaatatttttgcaacgtacattgcgatttataaactatcatcaaataagcacataaaccatcatgaaaccatccaagtcaacacaaaacatcgttttaattcatatttcatgaaagtaaaaaattactggctctgaggccagttgttggaattatcttaccacgatctagatttactaacaagtatgtttcactaacatttcactaacatcctaatatgaatttctaaaacaatgaattaaacacataagggtttaagaaaaccttacattgattgcagcagaatgtattgactccttttgttcagatctctagcccttgattcctcgctgtagcacagcattatcaagatctgttgtggcatgattattgtgggcaggaatgtagcagtgcagctcgcccaagtatccgccctggtcaagagttcgtaggcgcgcctccgttatcttggatggagggcttacccacgtggcgcccaaggcaccctgcgttctatgagaaaccaccacagcaagttcctcactaacgtagtccacgacctcaaccaggacatctccgttagcatcgactggctccccagcctcgttgtactccccgtagtttgggggtgcaacctctgcctcttttttctcctcgaaggaactgccaggacgtacattgtcctgcccctcgatctcttggacctcagggtccccttcatgatcctcctccatctgtacggctggatcctgttcggcgctaggcaaagcggcatgccgagccacttaagggtcagatgcgtcggtcagacgcgtcggccagacacatagtttctttgtacaagccatcattctatggctgggtacagggtttgaagaatttccttcgctagaggaaggtggactagaacaaagatgaggatgatcctcgtgcagaagttgaagcaagtcctggtcgatccgatgtccgttttcccaagacttacctgagttcatctacaaaagacaacgcacaagatgagtcttttgtcggaatatcgaacgataaacaagaaaatatgccgaccagaagtactcaacagattaaagaacgattatgtttgaagaaaagtcagaactcaagaagtcaaaaaattttctcgagttcatgaagcttagaataagcaagatgaaagatagatgttgcgcaattcagaaacaagtgttatgactgtaaaatcacacgaagacatgataaagaagaatcgcagaggtttttgagcctagggtttcctaaacatttttctacagcaaagtagagggtgcatttgacatataaacatgcaaagataagcataaaggaaacctgagacttactcgagggtcagaagtctgggtgcgagcaacgtcaatccaacaagcagtttgtatgaaggcgcttcggcaactttgaagcaaagaatctctcttttcgctctgaagcttattcattaaagaaaggtgatgaaaatgagcttatgtgccaatggtgtttggtatttataggcaagtcacaaaaggagataatcgtctcaaaggaacctcaaacgcctcaattttcctccttaaaagcgaatatgggaaataaaaaataatcaagtgtagccgtcagccatggagagacaaagaaagatttcaaaatataaagtgtcagagaatttattagtcgaaaccgaagggacacccagtaagcctcacatcgagtctcggacggtcgcactcaacacgtgtccccatccaaaagcaggagcggcttggatagagtctacacgcaacttcggaagcccgtacaaacttggggggcaaatgttattccaatttttgcactctaacgtggcatcaaatgaatggtgacacatagagtctacttggaacaactgctcgagaagcacaatccgagcaggatgcctcactggcatgcctagagcaatgtattcactaattcgcacagaatggccaaaacacttaacgaattcaaatttggcatcatgagtcatcaacacaatccctataacttagggatcaatttacatggatatggcataaacacgatcctgctatcagtgtattcagcctcaatcccacgatcctttcattcagcattgatccaacgatctttctgtttatacgcattgtaacgagaggggatactcttcctccccaagcttactagccttataaatagtgatgcatgttcgcttggcaagagatcggtcaaaaagctgttgagctaagactataccctaaatatattatctaagaattatatattcagagataccgttgtaagagctataagaaaaggaatctttctccttgatcttaagtcaatacaagtaacgaggattaggctattaccaaactgctcggggctgaacctctataaaattcctttgtctctttattgctttataatatatttgttattataaatcatttatcgcttatcaaatagactcgttgtcgttggctaaaagcgagttcaacacggtgtatggctattagaatcacatgttagtatttttagtttaacgggacaatatttttgacattaggaatgttgggaatagtcgggattttagaatttcccaaaatacctccttagtgccattttgtgactgtggaagagaaaaatggtctttttgcccatttgtatttttgtcctttagtggactttatgttgatgagtaatctgatctttaaagtttaattagctgaaatatttaataaaataagtgttatctcatttattttccaaaaataagaaaattcaaaagaaagcaaacttttctctcaagctctctctctcttttcaaacactagagaaccatttaggttctggttttttcttcccaattcaagcaagttgaagcaagatttagtgtgaatccaagcgaaggtaagtttctagcaatttctagttaggttttcttgaatttgaagaaatggattttgcatgattttgagttggtagctgttgtgattattgttggtgtttgaatcatgtttctatagttagaatatgatttattatgttgagttaagcatgaattagtagttgtttgaaggttttagcaagctttgagttttagaactcaagattgaagctttaatggtgaaaattaactatgggctttgattgttgttttattgcttggaaatagtttattg

SEQ ID NO: 223920 - DNA, 1312 bp, Cannabis indica
agccacctctcatgtacaatttccctaaacagagggtagctaatcagctagtatatctctactcagacaatatcaacaacatagtggcccgagcttatctgtgtgaacatgagggtccaatcacagttcacactaaagactacgatgattcacatacccatattctcattttaaaaatgctgcaagaggatgttgaaattccaatcacaatttaggggtgcaaatatattaaggaagtagcaaacatgttcctttattggcctaaatacctaattgtaacacccgaggtaacttttgttataaattaattatcagtgattagtggagtttgaatattttaaatattcaaccatagtaaaatagattttacgaatacatgtgttgcggtcagttggatgaataatcaattattttatctattttgtttgttattaggcatgtttaaaattttaggggtgttcaattacagccgttatttagctaaaaattcaatataattaggatcaaatttgatatattatatggtattttgtatagggtctactagctcaactactatcaagacgtgatgtgtcgaaggaaaaagatcacatgccaagtcaaaaaggcggtgttgatcaagtagatgaattattcacaccagagatcatgccactaatccctaagtcacttaaatggatggttgaagaatttctgagagtcaaggataaacgtgacatcatcccgattcgggcaccccaacgatttatagcacctcgtacccagatcacgttatctggagaagatttacaacaggtggcgttgtgtgacttcatcgacaaccaggaaatgctttttggaatgatgtatactcttctttaatctgattatccttatatatcacattctactaaaattattataaaacactaaatatttaataatctaatacaggcacatctagaagagcttaaatgatttaagatgattttcaagttttacgagcaagaacttctcgctgttaacagtatcaacgatttagagaaggaagactctttgataatgcatcaaaaggattaaataaccaacaccaaatattctttattccctagaatatcatgtaaacactatttgattttttattgctcattattttctatattataacgtaaaattaaatttacactatcttacaacatcccaatataattttttagtgtgcattagatgttagaggttgttacaccagggaaaattatccatttagacccctatacatcgaccacaaacttcctcctacaattaatgtaatgttggaaggtaataattaatt

SEQ ID NO: 223921 - DNA, 1131 bp, Cannabis indica
aaccacttttatttttcaagtttaaaaattaaaaataaaagtctattctataaatttcatttcaatttgttgattttattaagttaggtacaggagcgggattagggtccatgtttgggtctagttccgggtttcaaggtcaaagttaagtagaagtccaaaatattgctttaaaaaaaattaaagcaactttttttgttttacagttttatagaacattattttagaaaatatttttatctttttaattttaaaaacaaaaactaattaaaatagtattaccaaacgcacccttagttattattattattattattattattataaaattcactttgttttaacattataaaataaataccaaatttgaaacatacgttctcatcaagaatgcaattaattgaatctacttaagcaaaaaaaaaaaagttgaatctcaaataaattaatgatagagacacttgcataatttttatacaattgtatgtgtattaaattctagtaatgtgaattaataatttaaattatataattgaaaacaacaaattaagacaaatgtaccattgaaaataattgttatgacaacttagtgtgaaaacaataaaacatgcacgcaagtaattccaacaagtccaaacaaatttaatgtgcaatctttttcatatataagttaaatttgctgaaatatactttgtaaactatctcacaaactaatttgtttcaaacttgcatataaatatataaagctaatttaaaatgaacaaataaaatttgtcctccattataaaaaattctacctaaattataaaaaaaattaaataaatatctagatttactttagttaatttagtgcaatttaaaagtctaaaaaaaataaattcatattagcatactaatagtaaattataacaataaatacgtattcttaaaatttatatttgtatgtttaatattaataaatttaattttgaatagtttaaaagttattatataaactctccattgcatttgtacctttgtccaagggaaaataaacaaattgttttaataaaaaaatgagcaaaatgtaagtaaaatgacgtatttgaaacgatatatataatttaaaagaattttgtgaaaaataaataa

SEQ ID NO: 223922 - DNA, 1125 bp, Cannabis indica
atgaagatctcaagaatgttttctgccatgtctgaaaaaatttccattatacacctttggaaagttgcgcgagcattgcataatcctgatggcatcgtccgaaaggcaaaggtgccatatgtacaagttaatgttgtttgtcttggtcttccagagctatggcaaattgattatagccagagtacccatcaaggaaacaatagaattcttttcccagcaaaagatcgagcatttgatcaatgattagcagcgggaaatggtcttttcgcgcggccttgttcaacttttgatagtccatacaaacacgccaacctgtgactgttctcatggggatcaactcattgtcttcattagctaccaccgtgactccttcctttattggaacacattgaatttggcttacccaagaactgtctgaaatggggtagacaatgccaaagtccacccacttgattacctcctttgtaaccacttccttgatgatggggcttagtcgcccttgtgctctacagaattgttgcaacaatctttaaacataatcttatgcatgcaaatcgaaggacttatacccttgatgtttgtcaaggtccaaccaatggctattttgtatttcttcaaaacatcaatcaacaagagttctctttgggtacccaacatagcagaaataattatcgacaaggtctctccatctcccaaataaacatacttcaagtgactaggaaacgtcttcaactccaactcgggttgttcttgaatagacgacttaggaggtttgaaattgttctctaatagctccaaagattcaaatggcctcctaaacttagtgaaaggctgctttgactctacccaagtaactttggattcttcatattcacttaaaccttcaagatcttcaagagaacttatcatcttttcatcttgcaaagcttgtttatgaaatttttcagccacaattgaatcaattacacttaagcaagagcattcctcaatctcatccggaaacctcatggcattgaacacattacaagtcacttgttgatcattcaccctcatagtaagctccccttttttcacatcaatcaaggtcctctcggtagcgaggaatggccttcccaaaataatagg

SEQ ID NO: 223923 - DNA, 1216 bp, Cannabis indica
tatgatcgtgtacattatggttaggtaagatatcctataaaatttaaaaaaattagaaaaatttaacacgccgaaaatatattattagttaaatttaacaattgtagtgatttttgttagttaatatgatataatttttttattttattaaaaattaatataataataataaattttcttttagtttatttttgatgttgtagttagagtggacatattttttaaaactaaatttaataatagtgtaacactaaattcgatgagtccttagacattttttttttttttgtagaaaaggctactatatttaaaccaagagttataatacaatagacattagtggaggtggaagttcctccaaccataaacaatcagcatccaccgaaagagcaaatttagcaagagtatgagcagctataatggctcatctcttgacatgtgaaatttgaactccagggaaattgaacactaaaagtagaatattagacaacaaccaatggaaatcagagattgtggcttgattggacttcaaaccattaatcagtaagagtgaatcagattcaatgaaatccacttgccgctgaaggtccttaagccattgcaggctatgaagcagggctaaagcttccataatttctagtttaaaacagccaggaaaaggcctagacatagcagcgatacaatcaccactactgtttcttattatagcaccaaaaccagtaatttgtgtagctttgacagccgcatccatattaagtttcaatcttcctgagggcggattcaaccattttggaacagttgaagatggaatcgcaacatgtggtggagcaagaggctactacttcaacattttctgctgacgtgtgttgtttacacctcgggcaatatgaaaatcatcatgataggtcatagccttgaagagcaacaactcaatcggttgcagttcttggctacgaaaggcgatgtcaaattcccttgaaccatgacgctccttgttcctttctgtccaaagactccataaaatgcaagcaaattgttccaactccaaattaaacgagatcgtggagacatggattaaaatatctttgagtgaagcatgtgtttgaaggagatttttaacagcgaaggtggataaacgccagaacttccttggacgcttacaatggaagagagcatacaatatggtcgatgagtccttagagatgctcttagtttt

SEQ ID NO: 223924 - DNA, 2762 bp, Cannabis indica
acggcgtcggatctggaagttgtcccatggagttcgctcgcacctcggcaacgaacgacatcagagaagaacaaatcgttggggatagcgcctgaggagaagcatctgctggtggcgttgcttgagatgaacaagaatgttggaggagaagaagacaaatggccaaagatgaaaacgccgatgaagacggagccggagaagaaccaacagcggaagtcgtcgctggcgacgaagaagagggagacgtggtcgctggcagagtcgcttgaggttcaaccgctgaagacatcatctcaaagagaagagctgctaaaaaccacaaaggcagtcgcacatggggatcttctttcgaagaagacggtgatggggaggagcttcagtttactaaaacccaattatttaaggcccaagccctaccacaatcaacccatgccatttaattgggctcccagtccatttaattgggctctatatccggcccaccttctaagaattctaaaaccatctctttaacttttaattcagatctctcccaagtctcttttccttttaattggattacatacgtcactcatataatatcacacgtgggcctaatttttcactcagcaaaggcatttaccatttgggatccaggccttagaccaaaagcaaattgttatgcacttccacttcgcagcatcctcggcatttatggaagcttcgtaggcggtgatcgacagaggatgcttcgtcttctctaccatttctttgtacagaattttacactttttgcatcttttggtcatatgattcaaacacaagaaagggatgcggatttgaagatgctgatgaagtggcctactaaggtataaaattactatacagttgggtgaagactttgggtttgttaaggatcaggatatggtgcagttgaacattttccagaccaagagaagggttgttagttctcttgaggtcatgcttcagtactccatgttgtctactaagattaaccatacaagaatggtaagaggttgcctcaatgcatctgaaaagtactatgtggaacatctaagattagtctggagtgagatttttaatatgtttaggacattttttgacaaagcagaacatcaacataaaataatagaagaatttctacacatgtactggttctgcccttgtagtatagcaacagttgggggtctctatgttggtgtcaatgctactatcactccactactaagttttggcaatggtgctttcgggatattggatcttgttcgtgctgtaatgaagtttggcaagttgtctttgcttgactttcagttgctgaggatgcgtttggtggatgagaagtataactttggtgctttgctagtgccattcaagcattgggtttttgatagagggcgccaaacactactccagccagccaatggtgcatcaagaacatgtcagaataccacattactaacctggttctttgacaaaggtcgcacacagcatagggctctagacttgagtgatttgatcaatcaccttgaggacaaggtgaatttcgggcggccggtaatgttacgcactaggattaatatggtgtgttagcatatattaaataaaagggtaattgagtctttgtattgagggtagtgttttaaagggaatacaataatatatatagaatattgaggggaattggggagagtgcattgtattgagtaaacctctgtttgcatcaaaggggcctaagggctcccatactttgtaattgggtttctcatacattcaatatacatttcctactgttttgctactgttctactcctattattgctactgttttattgtgttcttgagtttggagttctcggggcttatcaagatcatggaagtgtcccaatccattatagacagcccagatttactttaataaccttataccacaacaacatttcttaattagaaatgaatctcttcctttgttaaaaatacagagaatttagaaactacaataaaatgaaacacacatgtgacatgcacccatgctaaagttaggattttcttttcaaacttaccattctttaattattattaatgttggatgcatttaaacctgaaaactaatattggatgtttgctgctaaaaaaagcataatatttgatgcatttaaacctaaaaaaaagttatgagtaaagcaaactgcataaatatccatttcgagaaaaaaaataaaaaaactgcataaataaggaaagaagtaaatacattcagataattgtcaagggataaatgcaattaattacctatcaacagattcaccatgcccaagctgcccatttgtgcctcttccccacgaaaagacattctgtctttcggtgacagcaagagtgtgtctccatccacaggaaattttaactactttctgccaaaaaaataaaacatttaagacaggttaagaagaagcaagaacgactgagatggttatgtgtataatcagaaatgacatatcacctgctcattgggaaatttaacttgcacgggtgaacagtgatcctcattatcaccagcacccacctgtccaaactgtacacggaaggtaagtaactaaccgaaaatttcaaatactatcatgaattgtgatggaaagaaagaaagtggactggatagtgtcttatagaattagttgtttatcatccacaatatttatttaaagaattttttacataacacaccaaaaattcaaaaaaaaaattacaaaaatacattaacacgaaga

SEQ ID NO: 223925 - DNA, 1226 bp, Cannabis indica
ctaggactaggaccaggaccaggactaagacacagacccgaaacccaaacccaaataaaaacccagactgagacacaaacctgaacctcgactaggacccatgcctaaacctagaaagggacccaaaccgggacttagactaagaattgagatacgaacttgggcaacggaactaggacagggacccaagacccgaccccaaacccagacttcaatataagaaccaactcgtgactcgacacacgaaatggaactcgaccgagacccgagatcagaatccagatctagacctggggcttggaccgaacccaaagtcggtgttttgatctgggacccagcctcgaactcaaacctagactaggacccgaaactagatgcagacctcaacccagccccaaattgcaacctggacccgaacccgtaccttgtgagccaaaattagaaccgaaactagaagtagacatggactcgggaataggttcggaaccaggacttggactttgacctggaaccgtaatcagacctggacctagacttggaaccgtaaccgaactaggacccaaactccaacccatacctagaaccgaaccgaaactcgtacatagatcccaacccaaacctacactcgatgccgaacctggacccaaactcagacccaaacatggaaccagactcgggacctagaaccgcaccccaatctcggtctcgaactagatttgggactcagaccaggaccaaaacccggccgctgatccaaacctaggacccgaaaatagagcttaaacaataaccgtaagaccaggaccatcgaacaagactaggaccgtgactaggacgtggacccaaacctagaaccgaactcagacctagccccaaaccaaaaccgtgacctgaagtcgggccttgacacgtcgtgtacccagaccaagactgacaccgggaccaaaaccccgacccagaccaggatcgaaactcggaaactagatttgtaacgagaccctgacctagacccagacctagaaccgcacctgggacccgaactcgaacctggacctaaacctagacccagacaaggatccggacctggacccagactcagagcaggaatcagacctaaaaaccataccagacccaaatcggaacacggcactccgacccgaacctggacaccggggccgaacccaagacccaagaaccagactaagacctgggacccgaagcccaga

SEQ ID NO: 223926 - DNA, 2855 bp, Cannabis indica
aaagagaggcacaacatctttaaaatgtttcaaaagaatccaagaaattgccccgattagtgttaacccaaaaacttaccctagtgacatagacatcaatatttgatacatggcaagaaagaaatcattttggagttgagtagtcttgagtcataatgggtgtctagatctcgccaagttgttttcaactcactatcttttagtattctttactatgaagacatgaagcatccaagtcgaaggttcaggagctgaaaatacacgaaacaacaccatgtaaatcaacttgggctagggtttcacctagtgcccaggttggtaaccccactaaggtttcatttttcgagatcgtcttagtgaaaatgggtcaaaatttttattgggacatgaattagacatgtcacaaacatatttgaggcattagaatcagattcaaagcttttttgtttttgagcaatcggagcaccaagtgcttgaggcacctaatgcccaggttgacatattgtcaacttgggtcacttccaaacatcaaactgaagatctatcacatgaattttcttcatcttcatcaaaaacaggaaacaagtacttacaaggaagaaacaactaacttgggagccaaaaagagggctcagcgcccaggtgatgtttgtcaaattggggccaattctaaggagtctttttcgagaagtcttctggggcatgttctctgtttttcatcaaagataagatacaagtatttctaagaatcaaacagaaccatctagcagcctaaaactagaccccagcgcccaagttgacacttggtgttgggcctagcgcctaggttgcaggttgacaatcaaccttgtgcgctggtttcaatcactcaaatgcaaagaatgctccgagcattctctctagcatggttaaaaatgtgtaggagacctctttcccaaattcaagagccttggaagtatcaaaacagcttcctggaagctccagaaagagcacccaatgcccaagctaacatgtgacctggtgcgttgggttctccttatcctattctgattctgaattgagctttcatctagtttttcatagtaactgagatctatgaagtcaaagaagtcaaatttataacttcatattttcactttttcgaaaaagtaacttacttgcaaatcgatcagtttcgagtctcctaattccgcaaaataacaatatcttcgagaactggtgaacgactttccctagaacacaagaaataactaagtgatgtcaaaatatcacttaggtataaaaaaaatacgtcccagaatgttttcccactcacccaacgtccatgttggcgtcatatgtcaacttgggcactgtcccaaaacagctttcaataaaacaaccataattcactcaatattgattcgattgacacgattcaatttgcatttcgaagctattttaatgctctatcaagtcatgtctcacgccccaatcgcaattttgaagttatcaactccaaattttgtctttaagaaagttacaaatttaaggtacaacttacacgaagtgggtctcgcagacgtgagtcaagcatcaaaaattgacgaccgacctttggagtcaattcaccattggatcatcatcaacagtcaaaaatagcctaaatatatttttccatattttttagaatatcttattattattttaataaaacctcattccctatgaaaggagagctcctctaactcatttttcacattcaaaaatgtacccataaggttagagaatctctctctaaattagagtttacaaacttagctatttttcttgtaatcaatcttgtgcgaataaaaactcaaagtagacatagctctattactattgtaacacaagaaatgaactactataaattcttgtgtgtgctctttactttacatatttacttacaactttcatattgtctatacatacgagcaagttggctaaatttttgcgtcaatattttggtacttttattgagagtcacaactcaagaagtcacttacaagatgtttgcaactcgatccacaagtgcggaaagaaccacttggccatcagactaggggcacgccagccacttgaactggtgatgaaaccacacctacatcgcggatgcccaaaagaggtctcggaaccagctccacagctcatcccccaaggccatcgactgctactaatactgagatcagtgaacaaattccacttgggaaaccatgtgtggaactaaaagaccctaaagaggccgatcatcatagaaaatatatgatcatagataatatacggtgatattttaaaagtgataacaagaatcttatgagatatattatcaccaaaataattatggattatatgtatatgaggggaagacatattcatgttgcactcttttcccttagcccaggttttgtcccactaggttttcctggcaaggtttttaataaggcaacttgcaaatagttatgaatatgaaatactctttttaccttagctcaggttttgtcccactaagtttttctgataaggtttttaacgagacaaatttaaattatgttaacatactagcactttatgaagcaagtataaaatgtgtgggagtgagatcatggacataacatattcagaaaacatatggattgcactttgtaacgaagtattaacacaagcactatcctaaagataatattacttgcatcgcgcaactaaaaggaaggtccattgaaggggatcgaattaaaatccatttcaccaaattcttctttatacatttcaagagaatgtatattggtgttcaaaaaattcaatcaagtgtctatcttgcagacttattcacaaag

SEQ ID NO: 223927 - DNA, 3309 bp, Cannabis indica
ttttgttgttctgatggtcaaattcaattaaaattaaatgatacacctaatgaattatatgaattatttacatctaaatcagatgaatcattgcaattcaaaacattcattagaacttataatagtaactttgcttttacatcatttggagtaaaatattacaagaatttatgcaaaagaaacaaaggcatatacacatttagagtccaagagcaaatttatcattatatcaatgaagtctatccaatggatagtcgtccttcatacttacaattatagttttatgacactgagcatgaactagagaatcgactaaaactttcaaagaaattgtcagcatcaatagtgattactttaataaaaatactagaaataaatccttattcgatattctttagaacattgagtgatatttctaattttgaaagtcacaaaatacaaattagatgtgactctagacttgatcaaagagtttacaatatgccgtcagcatcccaagttgctgcaatttgggttgatgatgatccttctacaattgtcaggacttgtgatatatctatgtactgtcattctggtgacacacatagagttcaatattattttggatgttataatccgttgcaatacccattgttatttcccattggagatactggttggcatgaaggcattcaaagagttcccaaacaaaagaattgtggaacttcatctagagtcgaaaatttaattaatgttaatcgaattaattctgctacagaattaatagacagagatggcaggttataaacacttatcttctcattaaatttatttattttctcatgtggtcttctcattaaattcatttattttcttatgtggtttacttctacttttttccagtcttacagaaagggagaaaaagaaatcaagtttcttgttgtgaatattactgttataaattacaaataagatcttcacataaatcaattctattacattttggacgacttttacaataatatgtagttgatatgtatgtaaagctcgaaacgtctagattagattactttagacttaaataaaaagaaagacgagctaaacattatcaaggtatcgttgatagtattgaagtaggtgcgagtaggggccataaagttggtcgaaaaatcattctaccctcatcatttatcggtggtccaagggatatgaaaaagagatatattgatgctatgtctttagttcaaaaatttggaaaacctgatatatttttaacaataacttgtaatccaaattggcctgaaattaaacaagaattaggtagcaatgatgaaatacataatagactcgacttaataacacgaatttttagagctaagttagaagaattcaaggtagatttatttaaaaaacaaatatttggagttgttgctgcatatatcaatgtaatagagttccaaaagagaggccttcctcatgctcatttcttgataattttgaaaacaaattcaaaaatcacatcactcaatttaattgatcaaattgtttgttctgaaattcctgacaaagataaatatccatatttacactcagttgttgtaaaacatatgatgcatggaccttatggttctttaaatcctagtaatgtttgtatggacaaaaatcatacatgcaggagtaattatcctaaatcatatgtctttgaaactttttatggtgaaaattcttatccaaaatatagacgccgtaatgataacaacaaagtaagggttagaggtcctttattagataacagatgggttgtaccatataattcatatttattagcaaaatttgattgtcatattaatgtagaaattttctcaacaattaaggttgtcacatatttatataaatatgtttacaatggacacgatcgaattagttttactgtcaattatgacacaaatttaatagatgagatcacaagattccaatctgctagatggatatcaccacctgaagcgatgtggcgaatttatggatttatattatatgaaatttacccatcagtcatttcactacaattacatcttgaatataaacaaacagttacatttagaaaacagatgatcttaacaaactaatcacaagagatgacacacatagaacaatgttaattgaattttttcgaatgaacattacaaatgaaaaagctaaaattttattgtaataacaatttcctcaacattttgtatgggataaacaatacaagctttggatgcctagaaagaaaggtaatgttgtttgaagaattgttgtagccaatcctatagaaggggagagatattatttacgattgctcttaaatcatatacgaggagcaacatcatttgataacttaaaaactgtcaataatgtttatgtttcaacatttcgtgaagctgcacttttgtatggattactaaacggaaaagataattgtaacattgcttagaagaggcatgcaagtaccaaatgccatactcactgcgtcgattgtttgctacaatactatctttatattctcctgatgaacccaggagattgtggaatcaatttaaagagtttatgtctgaagattacatgaaagattgtatgaacttatctggtgcagaacttaaagcattacaatttataaattctttgttaggacaaataggaaagagtgttaatgactatggaattgttgattatgatataaatcttagagaagaagaaatgttagctaaaataatggatgaagaattggggataattgtctctgatgttgaattatcatatgcaaataatttaaacaaagaacaaaaatctgcacatgatatgattttggacaaagtttttttcaatgaaggggcaatgatttttatagatggtccaggtggaattggaaagacttatttgtattgtgcttgcttgttgctattagatcaagaaaattaattggtctaaccactgcatctttaggagttgctgctggcttattacctggtggccgaactgctcattcaaggtttaaaataccccttgaagtaggtgaaaataccatttgttctattagtaagcaatctactttggctaagctatttcaacttacaaagttgattatatgggatgaagcaccaatggtaaaaagacaagttgttgaagctttggataagatgttacaagatgtgaatgataatgagttaccatttgatggaaaagtagttgttttagggggagattttcgtcaggttttacctgttgtaccaagaggaagcaaagaagatataattagagcaagcttagttaactcttatttatggccat

SEQ ID NO: 223928 - DNA, 1577 bp, Cannabis indica
aatcaaacaataaaataacaagatacaacatataaatacataaaagaccaaatacataaaagaccgtatttaatgtaaataaaatctaaaacactagtaaaaaaattaaaattactctgtacaaaacatatttttgttgtttttgtatttttttttttaaattattccattaaaatatatgctaaattcactacaaaaaatcttatttttaattacaataaaatttgtgactaaaagtaaaaaaacttgtgactaaaagtaaaaaacttaattgtgactaattattaatcatcatttttgtgttgtgactaaaaggtccatgactaaaggtattagtcacaaaaattacaatttgttatgactaaatatacttttgtagccacaatatttgttgtgactaaaaataaattagtgacaacttgtatctaaattattatattttagtcacaagtaactttttgttgtgactataagccacatttagtcacaaaaaaattacatgactaaaagtttatcactaaaagtaacttgttttttagtgattttgtataaatttaataaaatgttatatttagtacactttgtgcaattatgctccaatagattaagatgtaaattgacataaaaaataattatcagtaataataattgtaaaattaaatgtatattttttaaaaattatggcaatattgttattaaaaaaatgtgttacagtaatttattaatactaaatgaaaataatataaataaaatatatgcattaattatgtaccaagtttagcatgcagttatagtgtgtattaaatttagtacaattatttttggaggaaaatacgtgttattataaaacaaattatgaatcgtttacaataacagagtaaataagtgaagggataacctctaaccaagaacaagtctcatccacccttaatgcaaatttaacaaggccatgtgctgctttatatgctgaatgtgtacatgtaaaacatttacaactaggaaaaaggataaaagactaatggcatcaataattaaatctaaaaaagaggaatttaaattggagggagctttcaaagcattagcaactattagtgcatccgtctcgatttgcttaattagcaattgttgttgaagagcccagttaagactaagaaaaagcactatggcctccatctcatgagacttaaaattttcgacaattagcattgatagagcagccacaacatgtccattaacatccctaagctcttacaccagtagtgtttgtggatgagttgactattgtgtcaacattgagcttaaaagctccgctgcaacaggtggaaaccaaggagttgaagcaagagcagcgtgttcttgctggtttgaagttgctggtgcagaaatagcagcagcaggggatgttggttgagcatcacagtaattatgcattaacccagtagcaaaaatggctaggtctttggctattcttgcatttttaccatgaactaccttgtttcattcggtccaaatcgcccaaagtatacaaaaaagttgttccatctcatttttagtataaattgaggacagatggatca

SEQ ID NO: 223929 - DNA, 1304 bp, Cannabis indica
ccatgggcagggggaatccaagaagagggggcaagaactgaacgagtgggacccatgaagcttggaactgatgaggacgcattataatctgccaagaagctctgagccagactagcaatggcctggggttggtcgcaagggaggcctttgagggctttgttcctgttaaaccaaataaaccaagcaatacacaggaaaagttctacatctttcttgggaaaggatgtatgaaccatgtgagccaaatcatgaaataaaatctctgatgagcatgaaaatatatacggataaaaatgcgtacctttccagactttccggacactctgacagtagaacaaagcgtgtgacactgattcttcctggtttccacaacgattacaacccggggattgtatgattttcctaaaagctaggttttgggcagcagggagggtcgagtttgtggctcggaaggcaaaatgtttcaccttggcggggatggaaaggtgccaaagggatttccaccaaggcgaaggggtggaggaagaagggatgtccggaggggaggttgaagagaaactaagataatagcctgatcgaacagtgtaaaccccagaatttgagggttcccaaatcaaatcgtcctgggagggggtgaggggaaggggaatggagaggatagcctgggttatgtggggagggaaacaactttgaagctgagaggtatcccaagacatagaaggggtgatgaaagatgcgaccttctccgggacaggggttaagggagaaacctgacggaaaccaggaatccaatgatccgaaatagtgcatgtgttctgtccatttcctatttttgagataagacccttgcgaagcaactcttttccccagcaaatgctacgccaaacaaaagaaggagaatgccccgttgaactgctaaggaaggaggtctgagagaaatatcgagcagataagattttggacaccgttgagtttggctgtttgagaatgcgccaggcttgcttggccagcatagcctgattaaaatggaccagagaacggaaacccagcccaccattctttttggaattgcaaagttttttccagctttgccagtgggttttgggacgattattgtcattagaaccccaccaaaaattggccatgatggattcgagagagcgacacgtagccacagggaggcggaaacaagccatgctgtaagtagggatggcttggatgaccgatttaagaagggtctccttgccccctttagagaagactttatttcgccaattgtggagatggccccagactttatcatg

SEQ ID NO: 223930 - DNA, 1525 bp, Cannabis indica
gtaacattcgatctaaagcttcaattgctcgtcgatgagacactaggtgccttcatccgaaattatcaaatttagtatgtttgaagcaactttcccaagtcttgattgtttactaacattgcatgtgacatctttatctatattaagaggaattttaaaccttgaatgtgttgtccgcccaccggttaatacagatgcagctacaccagatgatgctgttgccagccctatcaaaccttttgacctaacaatagctagaatacatttatataaatgtgtttttcctattcctccaggcccatctacaaaaatattcctgcttctttagcataaattttattgatgattatatcatatgtatgcttttgttctaaggtaagtgatgatatagacaacaagtctgcatctgaaacaactatatgcaattaatcattaatttctttcataatgctctcattttcattaacaacaatttgatgatcgactaattgatattcgttaatatcactacccatcgattctagaactaatcgtatatgttttaatacttttactctaacatcagcgacaaaaagtttttgattcgtgtaatcttctgatgtaacattttcaaaattctgaaacaacaacttaggattagatggtttacaaaatatcaaaatagtagcaaatagtcgacaaaaaatataaggcatttgatacatgctagcttcttctaaacattcttgtagtgtgctgtcaaattgcaataacccatgcaaaaaagcagactccctaaaagttgtcaccacaacaccatgcacagttttaagatcaagaaatgaagttgggcctttaatatggttcaacaataatcttagataatacctttcaccttcagttggataagcagatataactctaccaatgacatttccttttttcctagttacccataacctatattgttggatccaaacaaaaaattgtggaaaatctttataaagcaatgtacgagcaatttcattagttttattcattctaaaatattctgttaacatagatctagaatataaattatattttgctatgttagagagtttatcaaagtttttgaaactaactaattgtttattctcaagatgtaattgtagcgaataaacaacaggatgcatttcatttaaacaaaatcgataaattctccaagctgctttaggaggagaaacccatcttgcagattggaaattatcaatttcattaattgtacttgtgtcatcttgtaaagttacattaaaagcaacacgatcatggccttgtaaatatatttgtacaaatatttgattgcttttatagttgagcatattttgacatttaaatgacaatcaaatttcgcaagaaaataagaattatatggaacaacccatcgattatctaaaataacttttcttatactaattgtatctccattatcacgacgtctataattagcataagagttttggccaaggctaatcattgagtagaacgatttgggataatggtttct

SEQ ID NO: 223931 - DNA, 1473 bp, Cannabis indica
tttttgtcttttagtagggatttaatattaagtattaatctgaattttttaatgtttattaagctgatattatagttagttaaaacttttttgttcttctattttaaaaaattatgaaaatttcaagaaaagacacactctctctcctagttgcatctctcatttttgagcaccatagaacccagctagggttggtgcttttgctgccttattcagaggttttccagaaagatcttagtgtatccaagtcaaggtcagttcctagcatctccttctttagttttcttaagttttaagttgtgaattttgcatgaggtttagttttgtggttctatagttgttgttggtgtatgtagatgttttttgaagtttaattatggtataatgtgttaaattgagctggttttggtggttgttattaagtttgagcaagctttgagtttaagaactcaatattggctctttaatgttgttttgtgattctgagcatgttatattgttttattgctttggatatgttctttgtagtctaaataacaagtctggaaggtttggttagatttggaattgatttgagtgagttaggaatttttgaagttttcctgcactgaaccgatcgaccggttcagtgggattccggttggtccccaggaaatcccacagcaccggaattccggttggggaacctgtctaccagttgaggcagttttgagaaccctagtattttcccgtttttgcgatatttagggtattgccatgttatttatcgatagggaaacttttagtttcaagtttaaatccccggaaagtgatttagcgtgtcactcatcagttttaggaataatgtgatttagaggcctgtaattcgtcgagcagctgttccactcaggttggccggcacacctgaattcggaaatgaggtaagattagtataatgatatgcatatgtatttacatgtttagtgtgcatgttagttaagcctgttagattacatcagaaatgtatgttggcttatgtattattcgacagtatcacatcagtacgcctagagtatgactagcataccgagtataggctaatagggggtatggacgtctgatcatacttcgggttattgttatgttattgtttatgcttttcttactgagtctgttgaatcgtagttgctatttccatgtgtaggtaagggcaaggctaaggctgagcagccatgagagcgagcagatggagattgtacatgtcgaggcggttaggcctcgagcgtacggtctttgggacatcagggctcatttttattagtcgctaagcgacaaacttttgtattcgtatagtgaaacttttgtaaatgattttgtaaggaattttatgtgtatgatattttatgttttaattaaataaacaaaattttaattaatcacaatttttgataacctcgttgattagcaacgaactgcagagtagttaaaaaatca

SEQ ID NO: 223932 - DNA, 2449 bp, Cannabis indica
gagagagagagagtttggagagataaatgtgtggtttctttctattttggataaaaatgaattattttgtatttctaacttaagttaataataataatattcagaacatatctcttaatttagtcccacaaaaggacaaaagtccaaaaggctaaaaatacctctttaccccttacacacaccatgagtcacaaagacacttaggggtaatttggtcatttccgaaatctcgaataatcttgatattctcaatgtctatctaagttgtcctgctactataaaagtactaaaatgtgattctattagccaaacgtcgcgttcctatgttgccggacacaaaacataaaaaacgtaaatttgtttataagacataaataatacaccctgaattcaaataaatctccataaattcatagatcataattaataatctagattcataattaagccctaattatctactaattcccatataaaaattaagcattctttacaattatccccccgttaaaaggatctcgtcctcgaaatctaacctgaacaactctggatactccaactcccaagtggcttcctccaccttactgtttctccagagcaccttgaccaaagctatggtcttgttctgaaggactttatcctttctgtctaagatctgaactggttgttcttcgtacggtaaatctggttgaagtctaaggttctcataactcagtatatgagtgggatctgaaatgtattttcgtaacatagagacatgaaatacgttgtgaactgctgaaagtgctggtggtaaggctagacgatatcacaccaatctaaccttctcgagaatctcgaaaggccctataaacctagggcataacttgcccttttttccgaaacgtctaatccccttcattggagatacctgtaggaatacatgatctcctacctgaaattctacatttctacgctttgaatttgcatagctctttcgcctactctgagaggcaagcattctggccttgatcttttctatagcttcattagtcttttgcactgattccggacctaggtatttctggacctaggcaagcattctagtcttgatcttttctatatatgaagttaaatactagttgtttttatttcgcaacaaactaaaatttctattttgaggaaaaaataatttcattttcaatgctacttgtttccattttgaagttatgttgttcccattttttaaggtcaaattgttttcattttcaatgtgagttcttttattttttatgatatttatttgtattttgacaacaaacacatatatatatatatatgaggttaaatgctagttattttcattttgatgttatattatttgcatttttaatttgaattgtttttattttcaatgctagttgtttccatttcaaggttatattgtttatattttttaaggttaaagtgtttctattttcaatgtgtgttgtttctattttgatacatacatatatatatatatatatatgaggttaaatacttagtttttttttttccccatttcgtagcttaaattatttgttatttttaattttgtaattgtttcctattttctaatgctagttgtttttatttcaaggttatgttatttctattttttgagattaaattgtttctattttttaatgtgagttgtttccactttttatgttatatgagtttgaatgatagttgtttccattacacaacaaactatagtttccatttcaaagttatattatttctattttcaatgctagttatttttatttcacatttatatatataaatacgaggttaaatgctaatttttgtgattaaattgttttttttttttcaatgtgagttgtttaaattattttatgatatatgaggttaaatgctatttgtttcaattacgcaacaaactataatttccatttcaaggttatattgttttcgtttttagtgctattcgtttccatttcactcatatatgaggttaaatgctagttgtttctattttttgtagttaaattgtttccattttcaatgtgagtcgtttctattttttatgatatttatttctattttcacacaccacatatatatatgtatatatatatgtatatatatatatatatatgaggttaaatgctagttgatttcatttcgcaacaaactaaaattttcattttgtggaaaaattgtttccattttcatgctagttgtttacatttcgaagttatgttgttcaattttttaaactgaaattatttccattttcaatgtgagttctttttatttttatgatatttgtatctattttgacacacatatatatgaggttaaatactagttatttctattttgaagttatattatttgtattttcaatttaaattgtttctattttcaatgctagttgtttccatttcaaagttatatt

SEQ ID NO: 223933 - DNA, 2501 bp, Cannabis indica
ctaggttgacctggtgctaggccagtgctcaggttgacaatcaactcggtgcactggtttcaatcattcaaatgtcaattctgctctgagcattctctctgaaatggtcaaaacatggtaggagtcctcatccttaagttctagaactttggaagtatcaaaatgacatcccagaagcttcaaaataagcacccaacgcctagtttgacaaatggcctggtgcgctacttatctgattctgattttgtctcgatcaatcgtctagtttttcaaaataaccgagagccatgaagtcagaatagtcaaatttacaacttcatattttcacacatccaacaaggtgatttactgggaaatcatgtagtttcgagtctcacatttctgtataatgacaacatctctaagaactggtgactagctttgccagtacacagaaaatggactaagttatgtcaaaataccacttaggcataaaaaattacatccccatcacgttttcccacatcacatgtcaacctgggcgctggatgtcaaccagggcgttgggccctaaataaccttcaataaaatgaccataactccctccatattaatctgattgatgcgattcaacttgaaattcaaagatatttcaattttctatcaagtcatatcttacacatcaatctcaattcagaggctatcgactctaaatttcacctccaagagagttacgaatttaagctacaacttacccgcagcgtgtcccgccgtcgccactggaactccgaaaattgacgatcaatctcaaaagttaattttaaccattatatgatcatctacggtctaaagtagccaacatgtatttttccatattttttttattattttattcacatttaaatgacctcctttacctataacaggagagctcctttagcttatttttcatattctataaaagtagccataaggatagagcatctctctctagaaattagagcatttaggcttagccattttttgtaattaatctcgtgagaataaatattcaaagcagacgcagttttattactgtcgcgatacagggagtgagctactataaattattgtgtctctctatttatacttagcatatatctcattctcgccgatctaacgagtaggtgtggcttagaagtctttatctagatttctaaatcaacaactaattacgaaccaacaaaagggggattaatcactggaattgattatatcaatgaacttctatagtaaaacttagtaaatgtaattctataattactacgagtttaattctatatttataatagaatattcatgaaattaataaacaatattacttgattgatgagattcaataaataatctattttattggagtttaaaattaagatccatggtctctgtattgccacactgaaacactggaagggtagggataaaagttgtatatgaaagtttggaaaagtctattttgatttgtcaaaatagtaattatttaattttgtaataagtaatttattttcaaatttattaattaaataaattgggaaaaagaaaaaaaattgtttggacaaaagacaccaccaatgtcttgttaagacataagtggcgtcacctacattaagttaagacacagtgataggcaccacccattggatttgtttttgggttaatattaattcaaaagataaatatttatttaaatttgaaaagtaattatagatatttagttggttaagagattctctcaaagtagttgagagattctctccaagtgattaagatattctctgaagtagttgagagattcactcaatcggttattagaaataaatatctataatagaatgattataaatatttactcaaataattaaatatgatttaataattaatgtgaattaaaatatttaattaaataaaacttttattatttttaattttaatatactgtataaactaaaaacaaattcgtgttatttttggaaagccataaaagattaatcaaactaattccttttctatcatcattctaaaaaggagttcttctcatgtgttgataattaaactaaaaactctatatacactatatcctactagtctacactagtccactactataatttggtcttttagtgatccgcacaaaaactgtaggtcactaaagagttaagagtgatttttaatgacatgcacaattagattgtaaaatatttagtgttagtctcttataatacatgtcaccaaagatatagaaggtcactaagagtaaaactcaatattttctattttttgttaatttaaaaaatattgttctatagtgatgtgtcagggatgactgggtaaatatgtaccgacctacctggtatataactatatcataatcttaaaataaaagaaataaagaaaacatagctgtaataattaaaaaagataaaagataaaatgcatatttctaaaaaaaagcataatatatactaagtaggggtgtgcaacaa

SEQ ID NO: 223934 - DNA, 2141 bp, Cannabis indica
aaccatgcaacataaaatgttatttctggtctttattaataagtaaatctgattatattgaaatgagttttatttaggacataaaacccaacaaacggtcatttccgacaccttgattattcccgacattctcaatgtataattatattgccccgataaaaccaaaatactaaaatgtaattttattggccaaacactgcattctaatgctatcgggcacaaaacataaaaaacatgaaattttataaataacatatattatacaccctaaattttataaatctccaaatattcataaattataattactaatctagtttcataattaagccacaactatcttctaattccaaattaaaattaagcggtctttacacttacagttatatctttctaagtcaatatcactggttgatcttaggtctatggatcttaatcctgatatggttaggttcaactcaactgtattatttatattcttcaagttgttcgtgaaagctaaccaattgttctggcagatacttacatcttaggaacatggtagttcaattgaatgggagcgctgatcatagatatagaatctataacttctataagtatttagaagtgaaacgatgatttccttcgagcttggcttaatagtgataaatgattgaggtctcatttcagtaaatatattagtctactgaaatgtcattaataggcagctaagttttttaaggataaaatacattgaagggtatgacggtagatttgtccctttttgatgttaatcatctatagatgatctttgactattaggattgtaacaatggataatcataacgtatttatatcttggtacatatagagcgttctatataattaaagtgcaattcaattccgaatctatagtggcccaaggaggaattaataattagtgaacttactttgtaaattctagatctacttgttggaagctcggttatataggcccatggtcctttcactagttgagataatactacttccaaactcagttaattggttttaattaatcaattttaattctaaaattcatatatattcttctcttgttatatatatgtattatattacatgtgttgtattctttttcttatacttttatatatatgtgcaatatatatagtgtatatatatgtgtattgtaatatatatttaattaatctcttgttttagtctttgtattatattacattagagtagtaatatatcttgattatcttccattgtaataaaatctctaacatatcgggcctgcataggactaggccaaaaatccaaattttctccaaaacacatatcccaccattctaaccctaaatctaatccagactcaaaaatcatgcaaaaaaacgatacttgcctttgacgacattgttgatggagaaactgtggttgatggagaagccattgggtctgtgggtcaataggtctatggtggtcattgggtccgtgggttgtagggtctgtggtcgtgaagagaagggactaaggttgtgggtggtgggttatgggtcgagtccttaaggtgagtttagagagcgagagagagaattgaggaagagagagggtaggtgtttgaaatgagaggggtagaatttgattttataaaatgttagtctattctactaatacgagtttacttaaattttaaaaaataatttttaattaataaatgcataaaaattaaattttccttacatttttacaaaacctcatgaaaacatcataaaaataatatataaacaaatatacagcaataaacatagtataacattgttgtgaaatagactctttacttgcggttaaagggctgcaatcttcacaagcttctatttttgatttctatagtttgttaactaatatctctcatttagtgtccaatttctctagagtgcagatctctcatgttaatagatcaacgaatattgctgctcatgtcttaattaagtatgctctttcaatggactctacttgcttttggttggaggatgttaaacaattaatcattacttaacagttttctgttaattgttgttaaggctggtttagtagttaagtttgttattactgtgtaacaactttttccttttttgcttgtaatacattggtctata

SEQ ID NO: 223935 - DNA, 1380 bp, Cannabis indica
agcattgtatccaaatacataattataaatatttatgcaaaatttttaatatttaatcaatacttatttaatattttactaaaaatatacaaaaaacaataattttattactaaaactttttataatttaatattatagctaaacacaatgataaaataatataacacttaattaaaaaaaaataatatatttacggtgatataaattttgtgttatattatgtgtcaaatttaacacaatataacaaattttttataagatgagtgatattagcaatgaacaaatcataaattaataaacaaagagaagaacaaaagtttgatgatttcatcacaagttttttttaaataaatttatcaacaagttttgattatattctctaaattatttttaaatggaaaattttgactttttcctttatctattttaataatataatttatagttagttaaaaaaataaaaagatggatatgaataatgcttaattaaaatatattagaaaatctgtatttttgcaaaagtatcattttagtattctctcttttcaataatgctcgtatcctataatttaaaatcctatatatttaatacccgatgataaaactagcattagttataatatatgtaataaagtacttaaattgatttggaactcatataattgagtgcagtttgattatattaataaaattttattaataaacttgactttagggtacgagtacaaataccaaataagtaatataaaaaaatataaggtaccaaaatagtattttgcaaaaattaggggtagcaatttgtgttgacgtgtcatatttatattcgtaggttgacatgtttaattagtcaactctagctcaacctatatatatttcgtatcaagaaatctcaatcctaactcgaactgttgtgatttcatgtcgacatatcgtgttcgtgtgtcgactatacttatgttacaatatatgttaatcaacatgattgctatcacatattttatttttataaaaataatttatcacaataaaattcttaatatcaagtataaattgtttatcttatatttttgtaagtaatattttttttaatttatataatttttatgaaaataaataataatttaactctaaattaataattttaataatatattgaatgtaaacaggtctatttgcgttgatttcgtgttacatgtgttaaccctaatacagtacaaataataatcatattatttggattcgattcacgtctatttttttttttatgatcttatcgagttcgtattgtgttagggaaatttacaccctgtactgatatttcccattttaatttttttttactgttacacgacaattattataattttactgtgtatact

SEQ ID NO: 223936 - DNA, 1700 bp, Cannabis indica
tgattggttgtcacagtaaataaaagagggatgtggttgtggtatttgaaaatcttgcaacagatattgaagccaagtaacctcacttgtggtggctgctaaagcacgatattctgctcagcagagctcttcgatatggtcggttgcttctttgttttccatgatatgagactatcaccaaggaaaatgcaatatcccgttgttgatcgtcgagtgacagggcaagatgcccagtcggaatctgagaaaccgcgaagattgagagcagaagttgatgaataaaaaagaccctgtcctggatggcctttgaggtatcggagtaggtgatgcacagcttgcaaatgcggtgtccttggtgttgccataaactgactgagacaattcacagcaaatgtgatgtcgggccttgagagagtgagatagagcagttttcctattaattggcggtagtgagacgggttgtcaagtggttcaccaagttcattgtcgaatttgagcttgggatccataggagttttggtgggcttgctgcctagatatcccgtgtcctcaagaagctgaagagtgtactttcgttgagagataaataggccttgttcggcacgggaaatctcaaatccaaggaattatttgagattaccaagtgccttgagtttgaatctctggtgtaaggagtcttgaagattgttgagaagtgagagattcgggccagttattatgatatcgtctacatagacgaggagggctatgaatgtgtcttcggttcctcttgtgaataaggtgtaatcagcctgtgattgtttgaaaccttcatcgaggagcgcatccgagagcttcttgtaccattgccgagaagattgtttaaggccgtaaattgatttgtggagcttgcatactagattagttcctgtatgaagagaagatggcaatgttagtcctttaggaagagtcatatagacctcttcatggaggtcaccgtttaagaaagtgttatcaatatcaagttgtaggataggccattgtttaatggtagatatggcaagtaagagttttagtgtaaccatcttggctacgggtgagaaagtgtcaaagaaatcaagcccctcttgttgcgaatatccttgtgcaacaagtctagccttgagtctttccacacttccatcactattaaattttattttatatacccatctacacccaattgctcgtttatttggtggtaaaggcataatactccaagttttgtttccaatgagtgccttcagttcagtattcatcgcatgaacccatttttcaaattgaacggcttcttggtatgtttgaggttccctcattgtagcaactgcaaagataaaagccttgtatggatcagatattttagaataagaaagaaaattgcaaagattatgaggtgtggatgatttatcctgaattgtagaataacactcaaaatctttgagataggatggaggtttggaggttcgggtagattttcttgtgggatttggagttgaatgttgcgtctgtgatgttgaatcagcattgatattagttacatcagaatttgtaggttctgtagatgtgttagagccatttgtgttttcctctgtatgaacctgttcaggaaaagaaatggttgtatgttgttctgtgggatagtcggatacatgcgtgtcatgaattgttgtgctagggagaac

SEQ ID NO: 223937 - DNA, 2074 bp, Cannabis indica
aagacataatgctccatttaaaaattcattcttggtgccaagatgaacttcagtagcaacatcatttgaatgtcagcttctgtatgagagagctgacacgacggagcagtggagctcattgaaagatgtctggagctgattagtaaaggtacccggagtatgccttccgatagcaagatggatgtctcgctatccattatctatggatcaagctgttacacttagttagtataacgcatattatacgctaagtgttctaacagccaattcgcctcgtcaacacctttctacatattgtgaggttgatacctcgctatgtattatcgatgtcatccttacgactgtgtcctctgatgcgaaatggtttcttgttaatacatgaatcaatagttctacatccttacctcgctaaagactgtgcagtctagagttataaatataccctattgactctgcgtttaatgagttattctattttatatcttttaatataattgccattatatttgttgatttgtattccccaaggttgacacgtgtcatcctctgaagtaccagccgaattttgggtataacaattgtcccttaaaacgtcatttttagtgaaaagtgctttttaaatgactactgtgggtatttttgtcataatccatttcaaaaaaatgcatgccctttgattttggtggttacgtggttctgaggcacatcatgagcattaaataacgatcttttccacttctttcttatttctacacattggatcaattatctcttaatccaacgaagatcaacccaatggtataaaacggaaaaaaaggaatcacattttcatcatctttgccatttcaaaaattttcttgagattctctgcaaaaaactccacccaagtttttcgaagctttgcatgccatctttgtctttgacatacttcttgtgagtttcgtcaaatttgttttaggacctcaatcattcaaagagattatcaagacgttcactgcattgtcgactgcggaatcgttcatcgcgccaaaacccgacttcaaacagtaagtgattcatccctctatgttttcttacctactctcttattttacgtttctgggtttgatcactacttttataatttgcacctctgtcatcttatttggttttagcaattttaggttgaatttttttgggtaatttttagggtttaggtagagcgtagacttttgggtttctcaaatttataagcttctggtttggtaaatttcatccaagaatcgggattgctttctttttgtaacaatgtcccaatctggttcagaagtttatcctctagaagttttagaaacagagtgccttagtgaacttggcatcccgtttaaacccataatttcaaaacctcagtccaaactagaaataaatgatgcaaaaattagggaccacctagtaaaaacccaccaagatgatattgctagtcgccacaggcgcttcttgcaagaaataacagaaggaaaaatgttatttcttgcgagatgctgcttggcctgaacctccaagtttatcatctattcctttggctaggcctttatttttacccagagtcacaattgctttttcaccaggtgacctggattttgaaatcatgacttctaagcctcaaaaatcaaagactccccaagaccccaatgttaattttgaggccaaacttatcgagtcgagggtacaagccatcgaggattacgtaggtagcatcctaaggacttgtggaattgatcaaaagcaaaaatgctggattttgaagctcactagctagttgcccaacttgattctctagagttctcataaaggttgcttgactttggatcatactgtcatttttttcccatataattctcagttcttgtcatcaaaattttctatcttgaccatgaaatcgtgcatcacactctcatgagaatttgtttggacaccatgttggggtctttgttgaaaggcttgttgagaaaaaccaggtagaaagttgggtctaggaggcatagatgaattactaggaccagccccttgacttctgtatgccaagtttgggtgt

SEQ ID NO: 223938 - DNA, 1850 bp, Cannabis indica
tatataattatatcaattatgttctctaaaattatgtattatttttcataaaaaaaattattatgttgtctaacatgtttatttacaataaggccttagaacggttgatctcagttctagttatcgattctaaccaaattatgcattgaatgcataatttttcaaatcaatatataaagcatgacatagcatttaaagatcaataatcactagggtaataatcataggccctataatcgctcactttagggtaataaccttaatccagttcttaattaatcacaattataatattcaacatgagtgccaccgtgctaaactctacgtgctaactactgtcttacctgttgtcccgagtacgtagagattccaaatctccgggtgctcctgaccaattaccggtagtcttagtcacaattttcgagattcacaaatagggttaatccttaaatctattctcacataattataaatttgcattcaaatccaaataaaagtatagagctccgaacgagctttccaacaatactcgaaacacccaaaatagagtccagatcacaaagttatgagcatttgaatagcacattcgaaactgcccagaccacaaggcgggccgcgacactcccccaagcgggccgcggcacctgggttgaaaacccaaaatttcacaagggtgggccacggcgcctgggttccaaacctagaaaaccccaaatagccacacgatttcagcccaacatgcacaaagatcccaaccaaaatatgcatacacctcaaattcatactccatagattataattatcatagcacaacattagaacacataaatcaagctttaatcctcaacaatatatgcatccaaaaatcaaatttaacagcaattaagatgagctcaaaacttgagcaaaactctacacaatttcatactcaaaagcctgaatacttaaatcatattttcagcttgcaaacaacaataaacagaatcaataatcagatttccaactcaaaatacaaccctaaaaactcactaagatagtctagatgcataacacataattctacaagctcaaataacataagaaccatcaattcacttcaatccactacaacatgcattcaatcacctttaaacatcaagagcacaaaagatcatcacaataatcaacattaaaactcaaaaattcagaggtgaagcaattaactcaagcttttccaacaaacttgcaccaacaatcacaaatataagcttgactcaaggtgaattttgaagaattaaagagatttgaagaaatgagatacaaagagagagagggggtcggtttagggccaaagaaattagaaaataagctttctattcttgccaaaaatctcttttattgataataaatcaaatggtcaaaaagaccaaaatgcccataggaccaatatatcacataagcataattcaagggcaaatttttcattcttcacataccacatttaattaaattttcaaattattcaattatcaataaaaacccgaaaatgtatttcggccccaaacccagttaagcccgaaatacccaattgtgactataccacgccgacttgttagaaaatacatgcagaaggacaaaacaagtatactatataataatatagtccataagcacgttataatattagcattacagttttacccttctcaggtaaaaattacaaaaatgtccctgattcaccaacagggtcttaacatgtcgttaatcaatataattcacatatattaaattatatcataatataattccacataaatacacatttaactagttaggattcgctaattcattttcttaatcttaaggtatta

SEQ ID NO: 223939 - DNA, 2367 bp, Cannabis indica
tttcaaaatcaatctcccactttaatagtaatccccagtaattcccctagaaagacattcagaaattctcagaccactagagtgcattctggtcccataggtattcttcatatcacctacctcactagttaagaaactaacatttccatcccacagcaaatctcttaccttaaatgctgaaattaatggagttcagaatccgtgaaccttgcccacgaacacgaatgggtcctcaccttctggttcaagagttaccatctttctttcacgattgataattgcattaaacttcacaaatcaatcaattcctaatgtatcctaaaaatcctcgaattttagctcaactaatataaccaagcattcccttttcctcataactcaggaagggattttaactacctactggagaataactagttctccagtaaatagtaaactaccggaaccacttgataatacatcattaactttatacaaactttccaatcacctttcttgaaatacaggaatatgttcaccagaattaattaaagctatcaacaaagtatggtcaatagaagtttaacttatcacggtagaaagacgagcaccagtctcagtctaagtcaaacaaacaccctaacaagaactaaaatgccatcacccctctatttcgattgctgcaacagcaagcaccttctttctaaatggcctactatgccacattaaaagcaggcccaagtttatcatttaccctaatgacatctcttacatctcagtccttacacccttggcaaaagaggttagatcaactacctaagcttcgaactggacatcccttagttgttaaacaattatatccacattccgagcgatatactcttctcgcttcctcaaaatagaactttgcctatcagtccagtttagtgtcattctccatcaccacgctacctgggattaatcatgtaagttttgctaccttgccactaagttaaacccttactttatatcatacatttattctcaatctctagtggaagattcatacccacactactaactccgagcctggtaagttcacaattatccttactagattgccccatgtacattcttccagtacactcgcgaccatttctttcgatcattaaaatctttcacaccataattaatgctaataagcattaccacatatacataaacatatttaacaattttatcataacttatcatccttctctaacaacttacacatttcaataagcagacaactcaatcaaccaataaataatccactaataaattaccaatcaatacttactaagctatgaatcgaacaactcttcgcagccaatgtacatatcgagccagtcttcaggatctttaaaatttggtcgctctaataccatgttgtaatgccttgaccctcagggacgccacgtgtgtgtgcttttacaaattatctctaactaatctattagtttatgaatagtgtgatttaattaaaactttttgaataaattagaataaaacttctttataaggaaccattaaagtatggggatccctatttataaaaatttctatataaaattacaaaccgttattataaaagcaaagttgcatattcatcataaaagaaaagaagttgatcctgcttcccgaaagccaagacaccacgactaatatgtacattactgggagacctcagtttcatggtcgaacgcagcttaactttcttacctgcaccatgaagcatcagcaagaaaagttattaactcaaaagtattataaacgcagatatgcatatcttaatatacatatatatatattcatgactcacatgtatccatcatgcataaatatatagtattaacattaacatattcccacatactacacaatatgagaaaaatcacaacaccatacagtcaacaatttcattgttatattacatgaatatttaatcaatgcataaccacacattttcaggctttataaagtaccctaatcttacatttctataacacgtattcttacatctcgtgaggcactgaaactctacaaaaaaatgagactaatttcataagtagtataaaattcattcaatcacattataacaaagatgtatccaattacagctcatctcataataacatgcctaatccatttcacatcatcgtaatcacacaatctcgatatttcataaagtactcttaccactcgttaaccatgagctacatatgtcactatcgttgcctgatacaacaaatgataagtaagaatctatcaacagttttaggagtaattactcataacggtaatgatcgtttccaaaacctcaccactagttatccacgagttgcgtatgtcattatcgctacttga

SEQ ID NO: 223940 - DNA, 2545 bp, Cannabis indica
ggtagatacttactccaagagcctttaaaatctaacaaataggcacgtaacatatctgcattgtcctttcagactgtccattagtctgaggataataatttgtactgaatttcaacttggtacccatagcccactagagactctgctaaaattttgagatgaacctcggagccctatcctatataatggatttcggagccccatgcaacctcactatttctttcacgtataactctacatactgatccattgtatagattgttttcactggtagaaaatgtgcagacttagtaaattgatctaccacaatccaaatagaatcatacatccccgtggttttaggtaacccagccacaaaatccatggtgacatctttccactttcacttaggaagtgttagtggttgcaacaaccctgcaggtctctgatgttcagccttaatctactaacagttaaacaccgggatacaaattctaccacatctttcttcatcctgcaccaccagtagaagggttttaaatcctgatatattttggtagtgccaggatgcagtgaataaggagtggtatgagcttccttgagaatttcttttttaagttcaacactatttggaacacaaactctagctctaaacaacaacatctcattacccgacactgtataaaatctttagcttaaccagttaaaacctcttcttggatcttcaccagttttggatcagttaaatgagcaactttaattctatctaacagatcagattgcaatgtcaaactattaagttttcctacaaaaaactcaatacctaatctgaccaaatcatctactaggtgaggtgaaatcttgatcatactagtcacttgcctaggacccttcctactaagggcatctgccaccacattggccttcacaggatgataaagaatttcacagtcgtaatctttaactaactccaaccaacatctctgcctcatactcaaatctttatgggtaaagaaatatttgaggctcttgtggtctatataaatttcacacttctctccgtaaagataatgctaccaaattttcaaagcaaaaaccactgcggcaagttctagatcgtgagttgggtatcactgttcatactcctttaactaacaaaaggcataagtgatgacccgatcagcatgcatcaaaacacacctcagacgctgtctggatgcatcacagtacaccatgaacttttctttatcagagggtagggctatcaccggagttgtgatcaatctttgtttcaactcctgaaagcttatttcacacttgtctgtccacaaaaaccactgattcttttttttagtgagttcgattaagggtgttgagatcttaaaaaaaccctcaacaatcgacgaaaataacaaaccaaacctagaaattttttacttccataactatcttcagtctcggccaatccttgttagattcaatcttccctatatcgaccttgatcccatccttactgacaatgtgtccaagaaaagacaactgagatagccaaaactcacactttttgaacttggcatacaatttatgttctcataatcgtggcagaaccatccagagatgttgctcatactctctttctgattgagagtgcacaaggatgtcgtccataaatactataacacatatatcgaggaaatccttgaataccctattcatcagttccataaaagtttctaaagcgtcgattagtccaaaagacataactagaaattcatagtacccatacctagtgtggaaagcagtagtaggaattttctcctcttagattctcaactgataataacccgattgaagatcaatcttaaagaagactatcttcccctgaagttgatcaaacaggttatcgatcctaggtaaaagatatttattcttgatcgtgagtttatttaattctcagtagtcaatgtacaaatgtagggatacatctttcttcttaaaaaataacacgggagctccctagagtgaaacactaggtcgagaaaaccctaggtcaagcaacccctgaagctgtatcttcaattctttaagctttgccagagctattctgtacggtgccttagaaactggctctgctccaggtgctaaatcgacaacaaaatctatttcttgttgcggtggtaaacccagaagttcatcaggaaaaacatctataaattcttgaagcaccctgatattctctagccaaattgactcagaccatgtggtatccaatatcactgccagaaaccctaagcatccatcttgtaacgaatctctagctttcaataccaagatcactagaattcgggatccctgaactgatcccataaatataaatggttcctcgccctcgggttggaagatcaccatcttctgtttacaatcaatactaccttagtacttcaaaccctttatcatagctatcatacggtctacctaatttatcaaaaattctagccgccacataagaatgagtggccccagagtcaaataatacagagaagtaagagttattgaccgagagctg

SEQ ID NO: 223941 - DNA, 2071 bp, Cannabis indica
aatttttaaatatcaagtttattcaaaatttaaatttatttaaaatttctaataagataatataataaaatatcttgaattttaaatttagatatttcaatattatattctaagtgttgactgaggtaaacggtaactaatataataaaaatatttaagaaagccgtaaggagttaatgcaagagatttttacgtggttggggcattaatgagccttagtccacgagtctgtgtatttatgagagtatttattacagagaatgttcttggtggtttttctctctagttcttacgaaacccagaattctcgaaccctgccttaatgagtttggggggtatttatagtgtttttgtggggtgatccccagaattgaggtacatgtctttctgtaatattcagtaaaggcacacattcccaatgaatacatcataggaaatgcgtggtctaatccctaggctttttaggggtttaatggatgtaatccattatcctctcttgactgatgtgatttctcataaagtagccgtcactaggctcattaatcatagcgtagtagctgcagaaggggggttacgccgtcagactttaatacttatggcagtttcaatacgccttctcccatgcggcattaaatgtgaggtgactgttcagataggatttgatacctcccggaggtgcttcgttgtagccttgctctccgggagtatatgaaaccttcatgcctactccgggaggcatgctgaatgctgatccttttgattaaggaaacttagtcgaattatctcaaagtcttacttcttcggcccacgtgtcacagtccggttggtccacgtatttaggacaaaatcagggacaacactaagtcttataaattaataaatttaaatattacataaataaactaatttgaaaaaaatagatattttagtatggttagaatattttattaaaaataataaaataaaactagtttgaaaatttatggttttgaaaccctaaaatttctattcaaaccaaactaaccaaacttttcaaatttcatgttatttttgccaaaatataattttaataaaaaaaatgtctagtaagataaaatgttaaacctaacatttacctcccaagccttgtttggtaaaaagtgaacaaggcttgcttagatgcctatgattgccttattaacttcctggcatgtgccccgaggcgcgtggggatgcatttatgaccatcattactgcagttatttgctttttgcagacaacgattcgtttcctatccatttaatgatacggcgcattaaatgggtgtcagtcgagtactcaaacgttttctaccgccttgatgaacgcttgtcccaaccgttggatctgtggaatgcgaatcgattgctattctgaccgtacgatgacggtcggtcacagctgtctcacacccgttctggcctataaaagccagccttctcacttcatttggttactttcaccatttcaccaaatcttctcagagctttcacagagagaaaataaatttcaggtaccatagaatacttgcttctcttccttcgttgccagtcttcactttaccggtgatcaacaccaacccccagccttcaaactttatgtaagttcttagtacaccttacacttgcttactgttcatttgtattgcatgtttacagtttctcggttgaattttgaacttttgggaacaaatttgcctgagtttactgtacgatgcgttaaatccctcttttttgtgtcttgattgtttcattttactatgtttcctttgaggaatcgcctttatcttttgtaataacgcctttagggcttagagtggttcgtgctttctcgactttgcctttttttcccttttcttctttgcaatttaattgcctttgggatcttcgcactcgatgcttgccaaggaaagtctcttgcggtttccttatttggcaagcgtccggagggggcctcttccaaccggtaaggggacccccattcccttttttaaacatttagggtttgggtttggggccgtaactgctgggttttctcaattttttcagaacca

SEQ ID NO: 223942 - DNA, 2569 bp, Cannabis indica
cttctaggaacttagttggatacttgtaaatgtgggaaagtcgttgatggagaacgatgagattattttagtcttaccataattatcaattaactcttctttaaagattggatatgtatctaattattaacggatgacctgtatcatttatatagacatgaccagttagggaggaggaatatgatagatgctataagtattatcttggtatttctcaggttataaattctaacaatttggtgactacataactttgagaatattattgttgtatatatatactaacgagtgatccaaaattactcaattattttaattattataggtcttatgtaattttgtaattcatattaagggatcatttgtaagtcttattttttcacaagggtcaaagtgtgacctttgaccatctaagttatagatattacataactaccacgacttaggactcctaggactcgagtcgtgacactatgtatgtataattgtccaacgcctgcattattacgtataattcttccatagcccttcatattccatagaaaagaaagtggaagatagttgaagttgtaccaaaaaagttgtcagttatttcatttttgaataagtaaagaaatttgttgctaatcttatatttttatttcttgttagtgtttcgttggttgcttatatgttcatattgagggcatatatcatttttttggttgagctttttgttatttttcatgcactatgatttattcatgatcataatttgttaagggagacattataaaaataattttgtttgtatgacaaattgtgtgtttgtatcatctagccaccttgtagtgatagtggttaagtcttttgtacaagtattacccagctacgccatgcgcgtgtttctttttcttgaggaagtttttgcgagtcttaagttggctatggcaaaatattagtggcaaacgaagtcaaatcagcgaagaggtgggtgttaaatgggatggaagagattatgtcgtaacaaacttgttgggggcttgggtttgagggactttaggagctataatttagcttttcttgataaacaagggtggaggttgattacacatgttgattatcttgttacctgtgtctataaagatagatattatcccaagggtaatgtcttgtcaactgaattagggaagaatccttgcttcatatagaggagtatttggggacctcaaagccttctttaggctagttgataaacgtgatttataatcatttattagagtattttataacaagtaacttgagcctgttttgcttgaacaaccatcagcttcgtcagggcctcgactagagctgtcaacttagtgatggcgtctacctcgagcataccagcaaccttcttcgcttggcttctttcagttggccattgctagttactcatagccatttctttaagcatatcatatacctcgtttgcactttttctcataaataccccaccaactgcggcatctataatcgttctaaagttactaatcagcccattgtagaaattgtgaaccaacatccactttttgatcccatgatgtggatattttctgatgagagtcttgaacctctcccaagcctcatagagagattcattgtctagttgacaaaaattattaatttctcctcacagcttggcagctttagctggagggaaaattttggacaagaactttgtcgccaaattagtccatggagaaatggagttgggtggcaaagaaatcaaccaacttttggctcactccctcagcgagaatgggaacagcctcaggtggattgcatcatcgctaactccgtttactttgaaagtttggcataactccataaaattagacagatgcaaattcgggtcttcagagggcagtccaccaaactgaactggagattataccatttggagtatggctggctttatcttaaagttattggcctccacgacaggtggtcttatacaagactgaacccccgtcaatgttggaagaacatagtccctcagactacggttgggaagattacgactgttttcctggtcttccacggcacctccgttattaccgttgttgccgccattagcgttatcagctatgacttcttctgtttcagctcttgctgcacttctttcttgccttttgtttcttttgtttcttctataggtctttttaatttcaggatcaatcgaaagtattacactttgtccttgacgccgcatgcacccccaattcctaaaatagaataagacaattcaaaagaaacagattggcaacaagaaaaaagaattaaccaaagtagaatttaatctaatttttgtaatatcaatatttaatcaatttttcggtaacgacgctaaaaacttgttaaaaaaattatgagcagttatgcaagtatacgcagtcttttgtagttttaaactcacacaggtgaggtcaatccacagaaaattgttatcgaataccactaaattagatttgtgtttctatttggaaaatcgattaaaaagattgaagaattaactgactagcaattaaaatgcaaggaaataata

SEQ ID NO: 223943 - DNA, 1498 bp, Cannabis indica
taggtctgggacttgggtccaagcagtctccaatcccggtctaggttgtgcgtctgggtttgggtccaagtccgtgtctggcttcgggttcgtgtcctgagtcgcaatctgagttttaattcggctccgtgtcccggtctgggtctgggtcttggtcctagtcagattctagttctgggaatgagactgggtcccagtccctcggtcttgttcccgggtcccggtacgcttacagttccgcatctagtttcaggtcacggggtacgggtttaggtccgagtccgggtttgggttaaggtttaggtctgagtctgggtccgagtacgggtttaggtccgagtctgggtctaggttttagtccgggtatgggtcccaaatctaaacatcgactatgggtaaggtttaagccccgggtctaaataaggatcccggtctcatgtcccagtctagttccactacgggtcttaggtcttggtcctacttcaggttaggatctgggtccggggttaggtcctgggtctcggtgggtcccggatccaggtccccatcctagtccggttcctaggtcctagtccgagtctaggacccggttggggttcaagtcctagtttgagttcggggtcgagtttccgattctgatctgggtctagacctaggttcgagtcctgggtttgagtcttgattcaggtctgggtccgagtctccggttctgatccgggtctgtgtactgaggcccgggtcaaggtcttccatccaggtccgggtcctaggtcctagtccgggtccatgtttgggttcaggtcctagtcccagttccgattttgattccgtgtccgggttcgggtttgggtttgggtctccgtctaggtcggggtttgagtcctagttcgagtccagggttgggtcttggtccaagtccagatcccggtctagatctgggctttggtccaggtctgagtccaagtcttgggtacgggtccaggcttgggtcttggtctcggtccgaatccaactcccaagttttgatccaagtgggtatgagtctgggtctgggtttaagtctaggttcgtatccagatccatgtttaggttcgagtttgggtctgggatcaggtcccaggttcaagtctgaggtgatccgggatccgaaactggaattagactaggactgggactagaacccagatattggaccgtaatagggccaaaacctaaacccaaactcagacctgaacccataccggcacttggacgcagaccgcgacctgtgacctgggacctaaaccaagactgggacctagttacataccaaaaccaagacccaaaaaccagggccaaacccatgacccaagaacttgactcacacctaggacccgaaacccggacaagactgggactgggacccaaacttggacccgaacccaaaccaagattcggactcggactgcacccatacccaaacccaaaaacgaacttggacccggactgggacctagga

SEQ ID NO: 223944 - DNA, 1292 bp, Cannabis indica
taatttatttaaattgaatattaatattatataactacaaattaaattaataatgtaaataatttttttttgagataacaatgtaaataaatgtatatatatatattattctaagtaaatatagtatacaaatattttaaattagtctaactgtttataagttatcgaattaaacataaaaaaaaaaagaaaaaaaaatcttatacaattattctactcatcaatcaccacaagtaattttattaaccactctcgttgtaacggtaataattttatttttacatggaatgtagcctttcccccaaattgtaaaaagaaataaatacttttattagtacatatgttagattatttgttaatataatatttaaggtaattaataattaaaactcacaactttatatccgttatacccacccgggcattcaaagcaatcttctaaaccgacttcgcactctattttatctaccactctctctctagccggggaaggtcaactaatctcgatccaatgttctgctctcctagctccatttctgaaaatgacgcggaagcatctgacctagccttcgagggcaagaaagaaaatgagctttcactttcagaagtagctatctcttcaacccgacaaactatgaatctttctttccatcgattggatccaatgcattgccatctccagacccaaattcttccatttcccagctattaggatttgcatgtccgacgatgttattgatgtattacataaaatgtacattcttaatttttaggttggtgtgggcaagtgcatttgattcacctaacttcttaaatattttattttgaaaactatattaatatttcaattaattaacacatataacttaactaattaaaatatttcttaagagtaattaaattattaccccctcatcatcacatcaatttatttgagaattttacgaacttctataatttctaaattatatgtaaaaatttcctaaattaataaacaaattataatttaattactcttagctaatttaagttaattaagaataaaacaataaaaaaattataattttctaaattatatgtcaaaatatcctaagttaagactttttttaaatttttacagaaatatctaggtcatttaaatatttaaaatactatttataaatttctgataagtaaaatgatataatataaccataaatataatttttctaacttataatttataaataataaaatattttagataataactaattttgaatttaaaaatattatagttaagatatctataa

SEQ ID NO: 223945 - DNA, 2388 bp, Cannabis indica
gataactaatcagattgtaaagagttttatttagggcataaaacccaacagtttttgcaataattgtcgtaatggttgttcagtgtatacccgaactcgatgagcctagaaaaaaggccttaacttccttgttattaagattaggcagtaaatagctgggctggtttccttaattggccgaagtccttcagagagttgcagcagcgaagcttccccgccaaacagatttagctgtgcagattctgaatacagtgattgtagccactctctatcatatttggaacagaaatgattgcctgtttaatgctatttgcttgtctgcttcttgtcttagtaaatgtataaaaaaatatggttaagacaagaattatgggctttcattgtactagtacaaagaaaaaagacagctattttataaatgttgtaaatagctggtagatgtttttctttttgagttggttggctgctgcaccttcttttgttttgtattttgttggtattttgaataaaaagtttccttttgttaaaaaaaaaaagattaggcagtaagtaagcttttctatcaatgggtatcgtccttcaactttaatgagtcttttgctgatatagtagactagatgttggatgttgttctcttctcttatcagcacgacactcacagcatattctataacagctaagtatattcttaactatttttcgtccaggggttttgagagtatgggttgttttgcaagttgtctttttagttcttgaaaggcactctcgcattcctccatccattcaaatttcttgttacctcgaaggatttggaagaaagtacacacttgtttgttgactttgaaacaaatctaatgagtgcggttatccgactagttaagctttggacttctttaggctttgttggcgatttcatatccaggagtgcttgtattttctctagattggcttcaatacctcaggcattaacaataaaaccaagaaacttagttgagcggaatccaagagagcactttaagggattgagtttcatgttgtattttttgaggattttgaagcatttgtccaggtcttctatatgccccccagccttccaagattttacgagcatgtcatccacgattacttccatattttgtctgatctaatctttgaacattttatttaccaacctctggttggtagctccagcattctttagaccaaatggcatgaccttataacagtacagacccatatctgtttagaaacttgtatgttcttggtctggtggatgcattctcatttgattataccccaaataggcattcataaaacttacgatctcatgcccggctgttgcatccacgagcttatctattcttggaagtggaaaactgtctttggggcacgccttgttgatatcagtaaaatcaatacatactcgccatttcttgttgggcttgggtaccagtatagggttagctacccatgttggatagaaagcttcaatgatgaacttgttattacgtagctttttttacctcttcttttaatgcttgtgcccattctttgtccaataatcttcttttttgttgaacgggatggaagttcgaatcaatgtttagggcatgagatattacagaaggattgataccgaccatatcctcgtgtgacaaggcaaaaatgtctaggttttctcttaaaattttattaatgctaattttacgtcgagcaacaaacctttgccaattttgagtttcctggtcgagacattagggtcgatttctatctcttccaattcttcaacttgtcatacattggtatttggttccccaagttggggatccaaatcctcgtccccgccttgggggacttcctattgggcaatacttttccccttgtccgaactttggccggaggaattctcctttttgatcttggttacggcaaggttatagcattccatgcaattttttgattccctttgaggcaccttaccccattcttcattgggaacttgatgcacaaatgaaaaactgaagtgatagctatcaggccatataggaccggtcggcctacatgatgttgaaatctaatggaacatcaattatcaaaaaattgtgtcatcacagttatgctccttggagcttgcccaatagtgaagggtagacggccccaaaggtgcgacactctggccagaaaaaccataccccaattgggtacaggggattagatctttaaattggagtcccatcttctcgtatgttgtcttaaacaagatattcgaagaggctccattttctatcatggtctgacccaccattttgtttgctatctatacttccactcatttgtgtcgtggctttagtctgcatgaaaatgatagaacttggacgtgtctctttt

SEQ ID NO: 223946 - DNA, 1425 bp, Cannabis indica
aaaaaaaaaaaaaaaacttaactacagctagatgactttcgttatttcattctttctttgagatatagttatttgtattacaatattatatttatcaatgaatttagttattgctttaaaaaaaaaattatcgaaaattgagctcagtgtcttatatttgtacaattttaaaaaatacagaatctattttatcatgtaaccaaacagattatctaatcaataacttttataaaagacaagatctaaaatattataacccttattaataatattctaaattatctaacaataaaaaaaatcatataatacaacattagataaaaagggaaatattcgtgttgaaaataatgatgttttgaagataatgttgacaattattaaatatttaaaattgaggtcatttagagaagcattaattcctatatatttccagttgaggaaaaaaatcccaaatggtggcattaaatttaaatgtgtatcattcactcatctttgttgttatatatttaattagtaattaatttataattaacaataataaaacaatataaatttatatatatgccatttgactttatgccttcataatattattattataatatatctttgtttgagaaagaattaatttaataaaatcactaacaaaggatcaaatttttgcatgtcattaaaggatatatggttattattttaataacttatcaacattgaaattaatttaaatatggtagatttattttattttattttaataaaaatagttttgaatataaatggtccaattgggatttggaatctttgactaaatctcaatttattgactgatgaaatttgcctaatgtggaatcatcactttcctgtttaggttggaaattatataaatgcccaaaaatctgtcaactcaatgcttccattttctattttagatattttttaaaaaataataataatatactttaatttttaatgtttttgtggtgtttttactttttagggttgttggaattttttttaatttaaaagtatatttcaaaggtatatattaaacattttcaaatgtctagtataaggaatgataactgaagtgaaatttagagaagccaaatgatataataaaaataaaaaaaaaaaaattgagagtggccaaattcataatttcttaaaaattcaaaatttatgggaaaaaaaataagttaatgtcattttagaccatgtgttttacaaaaattagtaattgaattctctattttattaaataacaaatattgaactctatattttctaaaatagtactaaatagaattataaaataattttttgtcaaaataaaacttaattgtaacccgatctaaaagtgttttgacaaaattgattacgttttctgtatctattagtgctaggaattatcttcaaattgattat

SEQ ID NO: 223947 - DNA, 1909 bp, Cannabis indica
aattctcagatactctattgtattacggtgacactaatggacaaatcgtcacattttactgttaccgagtataaaatatgaaaaatataataattcatatataacatgcatatcacgcctaaaacttaataaaatctccgtaattgaaaaattatttctcaaacactaccaattgtgacaatacgtcacactttcactaaagcatgcataatcataattaattaattattaaatcattaatacaccactaagttccatgtctaaatatgtggtcatcacaaattaagtctcaataaaaaattatttatagttaaaatataatatctaaatacaagttgtgactaatttaattttattcataatatttgttgtaactaaaaatatatttagccacaaatagtaactatatttttctttgattaatctgacaattatattggaaaatattaaaataactcctaaaaaattaaataaattatttaaagtggacctaaatatttttatatgataattaagcctccgcacaataaaaatttctggtctgtcattcgaccaaataaaaattaaattttttggactttttttttagctatgaaattttttagttataatgataattttttagtcacaattattttacttttattaaaaaaaattattgcaactatttttttttctctatgtttggagaaaaagataaatgaacttatgattagtaaagctagtagaaagagtgtcttataagaaacaatgttgaaagagtgtcttatgattagtaaagttagtatagcaatatttgatactaacaccatctgtttgtaattcgtctagtttaatattaaatttacatttaatataaaataaaatatgtaatatttgatatttaatattaaattttaccaatcatagtagattagtgcaaaggatgatagaatgtcaatcataatttatctgtttggattgggctgagaatgattttggattatattgaaatatgttaaatgtaattcaatgtttgatttgattggactatttgttctttttctttgaaaaaaaaataataaataagataaacaaaattgaaaaaataatttaataatatataattatagcataaaattttaatttaaacaataaaacttgagtcataaattaaataataaatttctgtaaataatattaatatatcatatgtattaataaatatatatgataattaaattaaataataaggtaaataccattttagaccctgtattttgcaaaagttactgactggaccttctgttttgataaatgataaaatagacattgtattttctaaaatagtattaaatagtacccatgaactaattttctatcaaaataaaacttgataataacccgatctagaggattacgacaaaactggttacgtgtacttcaacagtatttcttcttagaaattatgttcaagttggttatattagaaaaaaataaaacaaaaaattgagctcagagttctatctatataattttagaaaatacatgtttattttgtcattcaataaaacagagggtccaatcagtaatttttaaaaaatacagagtccaaaataatattaatccttaataatatatcatgctttaatataataaaaagtaatgtaataataaaataaaagtattttaataataataataataataataataataataaatatttatgtcaagtaatatattaaattaatcatttagttaatttaatataaatattactttgatataaatatttttttaagaagaagaaaagattttatttcaactagtactgaacaatgcacactacaaaagtgcaaaagcaataactaaacaactcaaaaattgttgatcatggctattagatttttctctaaatattattttt

SEQ ID NO: 223948 - DNA, 1787 bp, Cannabis indica
atagtatattttgttaaaattaatctaaaaagtaaaaaaaaaatatcattagagcaaaaattttattacatagatacattttatataaaacaaatatttagtttttaaaaataaaaataaaaaaattatcacatggtagccatttaacctattttttaagcattaaaaaaaagacagcatatgacaacatcatttgaagaataataaatgtgaaattaaggttgtgtatttatgtttttatattctttcacattcacattttctatgcgcgtggcatgggagaaagtatgagaatcctaatatattttttaggagcattactattaggcactagtagtgcctaacaccttctcgacatatcatgttgcgattgactaacgatattttttaaaagctattatattaaactatatgggacctgatacttagttagaccaatagcgatattgacacgtaggagggtgctaggtactactggtgccctttagcatttcccattttttagtgtcatattattattaatgtaagcattagatctcatataatttaagataataatttttagagaatattactaatcaattataagacattcttatagaaagtatttaacaatactgatacccaataataatgctcgagaaaatatacataaataaaagtattattattagatactactagtggtggctaatactttttataagtgacacactaataaatttttgagcattgctattaattgagcattagtggtactcgatacttttcagaggtgatatcttacaattagtttgtaatatttcttaaaaattattatattaaattatataagatctaatacctaattgtacaactaacaatataatacctaaaagggtgttaggtactaatagtaccttttagtatttctttaaattatatgaaacttaattcttaattacactatataacaataaacaaaatactaaacaccactaatattttttaacatttttcaataaatattgggttcacacttctctagtattaggagtgtgtgtactaatacgataataaactctactattatctaaatctctatattaaatatgtatataagctaagtgggtttatgttcataaatcaatagtggtgagaatggaatgtttattcggtggaatagattttcccacacctcgatttgatctaatttttttttttatctttgttttgtagatttaaggatatttcaaatcatattaatgatagaaaactacttttggttggtcataaagaaaaagtaatgtatattataatataaactacgtacggtggagtggagacatcatctgaatccaagaatataaatgtacatgttttatattttatacatctaatcaatattgggttctcacttctttaatttgtttggatttaattttgtctcccactctcattttctttctttcctctttaattaaggatgtttattacatatttcaaaataattgaatatatggtgatgattgcaacgagttaaaggagtaataagagatgttccttattataattcaatattattattggtcaatagtgcataataccatctaaaaataacgttttgccattgattaacaatatttcttaaaataatctaacatacttaattacattaataataacatacttaattacattaataataagataacaacaaaagtagtactaaatttacacaactggtactttttagtatttctaaagttgagtggttggtttaattattagttagatagataaattat

SEQ ID NO: 223949 - DNA, 1217 bp, Cannabis indica
atttttgaggtaattatttatttagatttcatcattcaatatttgaatattcaataatatatatatatttatgtatattaatttttattttttattaacttctcttctacatgtgcaaccaaattctatattaatcttcaaataaattatgtagcatcattaatccaaaaaaaatccatcaactctaagagtgtaaaagttattgagagttataatgttaagaagacaactcttgaagaatatatgtttcttaataggatgtccattcaaaaattgttagaggctaattgaagtgatatccaagtaaaggttttttctttgggtattattattgctattatttaaaagtttcaacacctataattttactttatgataattgttttattgtaggaatatattgttactatgagagcaaaaattatagtcatagataatatatttggatggtattatattttatgcaaatcttgcttgaaaaaagttgtacctaaaaataatatttattagtgtggtatttgcaaaaaagaatttgaatatcatattgtgaagtaaaaaatttatatttagttttctcaaaatgctaatttattatgttatttgtgttctctctaatttttgtttcatattttttttcctatatttttcaccctaatatataggttcaaaatacatatcaaagtcaatgacaaaactattgaaacaactttggtattatttaatgaagtagctagctgaaatattactggacacatcagtaaataaactggttaacaaattatctccaaacaatgatattcctatagagattcaaaggctttgtgggagagattatgtttacaagttgaagttgattgagtacaatttgaaagaagggcttaaaaattttactgtgtcaaatttttttaacccggatgaaaaattagaacaagacatgaattaaagaatgcaaaaataacaaaaaggatcaaaaaagtacattctaaaaataatatatcaaatcatttagaagactctgatgaaaattattgtgatactcacaacaaagaaagaagaacaaaccaaataattctcgatgatgatgaaaataataatagctaagtagtattatttgttggattaaaatcctatgtgggcacatatgtataatgtatatgctattataaagtgtgatacaaaattaagtgaccaattatgttatgggtatcaaaagggta

SEQ ID NO: 223950 - DNA, 1693 bp, Cannabis indica
ttctctatatatagagcccatctcttcttcttcttcttgaacaatacaacattacaatacaagagagatacaatttcgaatccctagtgaaagagtagtgcccacacacagtaaacagtacctcaatcatagtctggaagattgtgaaggatcaaatccaagagaaggacattcgggctcagatcttgattatactctgcaacagaaaggattgaagggttagagatctgagtggaaggagacatattattccgatgcacccaatataaggttttcttaactttatatgtgttttccttttatcgttttagaagttcatatttaggttgttaatcaacatatttgtgagtagatctaagatcatggtaaaataattccaacattttcaacattattttcttcttctattctaaattaatatgtctgaatttgctacgataaacatgagtagctaaacagtttattagggtttagatggatattgtttgacattgattcatggttttgatgtgatttaattttctccaatttctatgtattttatttcattcgtacttaattacatttattgcatgatcaccaattaaatgtttatgattttaatgcaaaatctaagaagtgagtgtcaattatgctatagtaaaatagaacaaaatttcgatataggacgagagtacttatatggtttggatagcttatagggtttctgtatttaatgccttttatttacatgtttaatttatcacgggagtaaaaaatttacatataattgagatttatatatctgagaagactataaattacttaagtgaacctactattgcataaaatttggtaatataaattgaatcatattaaaccatagtcgataaatacaattaaaattgaaaactctaacttttgatcatcattaattaacctattaatttacatgcttcatgtttttattgtttctttctagttttaaattttttcttaaatttgatatagctaaatagaagtaagaatttaattttaaagtatttgactacaatcctcatgagaacgatctcactctttgtgaattcattatttatttacgatacgtttacttacgtattaaaaaaatcataacaaatacacaacttttttaacactccaatggagaatgctctggtttgaaggaagatcaataaatatcaataaaagcaacatcttaaaaggccaataagagaagaggagagattagttaaattatattttagccatacaatttaaattatgaaaattattggagctcaaattaaatatgtgagtgagaataattaaccaaggaataagaagcgattaatatttaaaacatgtttatgcctctttgtgtgttattttttttaaaggtaatgcacacatggtagaattagtcaaagccacatgtaaaattaatttgttatgtttctttttcttgtctatgataaattatagagaattgaattggtacctaacaaaaaaatattgtagtaattaaaagtagttgagccatcaattggttatatgagtcataataatttattgtagagtgattttattatactagtggtgcttaatactgtgatattatgaatgagcttattataataattaataaattaaaattatgtgagactctattctaatacttaatatattaaggaaaatttatacaaaatattatttt

SEQ ID NO: 223951 - DNA, 2466 bp, Cannabis indica
gtgcaagaagagtaaatactcaccaagaacattctttgtatttaatacactcataaatacacagactcgtggactaaggctcattaacgctccaaccacgtaaaaatttttctcttaatttcttacagcattggttgaccaaaaacctcgatcaacataaataaataggtccatgtcggggagggcatgttatcctcattcccgatccgtttaacattcagggatagaaaattacttcccttgcttgcctcatttcctatttatacgaagaaactcccacacactacccgcgagacctcactacccaacaggtgctaattttcatctcttaattttgagtctaagtttgagataattataatagtatattctccattattaagtaaggtaaataattagttttcggaccctatagtaatgacaaaagttatcagttagactctcttgttttaattaaatgaataaaatagaacttgtatatttctactaaaaaaaaaaaaaaaaaagactttgtattttctgaaatggtataaataggattctgagtttaatctttgtaatttttttttaatatgactaacttgaaaacaattcctaacacgaataaatacaaaaaatataaacagttttgtcataacacttttagatcagaatattattaaattttattttgacaaaaaatcagttcatatttctatttgtaccattttaaaaaatacagagtctattttatcatttaacaaaacagagaatctaattagtaattattacgaaatacagggtccaaaattgtatttgctcttattaatattgtttatagaataatttgtggcgataatattaatgtatagcttccgatcacacttaaatatttaaatttaaattttgagcgtaataatattttttgttaacattttattgtaaatgaggtacacctaacgttaaatttattgttaaatgctaattatttacatatacttaattgtgaaaaatttaacttataacgaaagagttataactaagtattattatcactatagattacccttgtttatacaattttatttttcttatcaaaatgttcctaaatatatttttgaatgtgatatttttaagaaaagaaaaagattataagatatgttattattttttaatcctgtagttggagtgtattactctttggtgtaaaaaaataaataaaaataaaaaaaaaaaataaaaaattataagggatgtgacttttagtgttcagttgatagtgtttgatttgatttgtgtctataaaggaaaaaataaaattaaagtcggaccatgttatggtaaacttctcaatacatatcattttgtgtaatgcattagttgtccacaaaaagtttacaaatagtggcatattaggctttctaaacaaacatatttatttaagacacccttttcttaaaaaaaaaaaaaaaagtagactataatatttttataagtattttaaatttacaactatgagtctattactaaaactatttttgtattaggaaagctctagatccaaacatactccttcctttttatgctcaacaactctagaatgaaaggaggtcacatttgaaaacaacttttttggtatctagtttccctttttcttgtaataatatcaaccacgacaatgaaatatgcaatgagactttctcctttacatacctttatactttttttgactttcaagaaccaaaatttttatctatttgaatctaatttataaagacagagacctatagcataagggcaatttgcttagcttacacaaatcactctgcatgctccatccaaattcttgttagactcgagctcgacttcataagatatgatatttctacctaaaacttaattctctttttcctctaatcatagcaaaatgattaacaaagtaaataggccaacaattctcatgaccttttctgacataccactttgcaatgaagaaccataagcaatcatcacagggaactggcagtccccaacagaagggtcctcatctgtcaccatagccaaaccagaaaaatcacaggtccatctactctgatcattgacctgatagtacatgttgaaagcataagaagcattttgatggacagtcagattattacaagaacatccataacccaaagcagtgcaatctgacaagctacaagcataatcaatgttctctggcaatacatccaagtatttaacatctgggttcagaacacaccaccttttcagcatatattccactccatccacagccaccaatcctttatttttctttgacccagttaagtcaagcccatattttggcttcccatcatactcgaataacccccacgtgccgtctcaaagttcccacggctcacactcttggcatctcatcaactgagactaaacacggtaaaagtctctatcttgcctttccgtacgctgggggttcccgattta

SEQ ID NO: 223952 - DNA, 1717 bp, Cannabis indica
tcagagatgaagtcgagaggctatgggcccatgacttcataactgaagctttctatccagttttggtgtccaacactgtgctggtagccaaaactaacaaaaaagtggagagtgtgcattgacttcaccaacctgaacaaagtatgtccaaaggctaattttttcttctaagaattgaccagctgctggatgccatagttgaccatgaaatcctaagtttcatgcgcatgtactactacaaagtcatgccgttcaggctaaagaacacaagggccacatacaagaggcttgtgaaaaaaaaatgatcaaggatcttattggccgaaacatggaggtgtatgtggatgacatgttggtcaagtccaaaaaggctaggggcatgtggacctagagaatgcttcagcgtcctctgcaagtataacatgaagcttaaccccctcaaatgttcttttggagtaggctcaggaaaattccttggcttcatagtgaatgccaggggaatagatgcaaacctagataagatgcaagcccttttggacatgaagtcgcccacaaccatcaaggaagtaaaaagtctaaaaggatgcattaccgcactaagtagatttgtctccaaatctacaaacaagtgtgtacccttcttcaacattctcagaggtgacaaaaaattcaagtggacagaggaatgtgaaaaagcattccaggagctaaaaaacaattggctcaaccacccgtgttgtgaaaacccctagataatgaagagttaggcgtgtacctagcagtcatagaacatactgtgagtgcagtcctaacaagagaagaagatggagtacaaaaccatgtatactacatcaattagagactgatcgacgctaaaagtcagttcccactcatggagaagctgacctacaacttgctctatgcattcagaaagttgaggccatacgtccaagtacacccaataaaggtttacaccgaccaaccattgcgacaggttttacagaaacttgaaacatctggcctactactcaaatgggccactaaacttgcccaatttgatattacttatcaactgagaatgtccataaagggtcaagcccttgtaaattttgtggtcgattgtaaaaacacatctcttgaagtttctcaagatttaggagaaatgcaagagccaaagaagaagcgagagtaagagcagcagtaaaaacctaaaaaatcaacattgaaacttcatgttgatggaagttgtactgaccaattgtctggtgcaggcattgcccttataacacctaggggaaatagctatgcgaagcaatcaaattcagcttcatggcctcaaacaatgaggctaaagatgaagccttaatcactggcctcaagatggtgcatgaagtacgagctgaccacctggacatattcagcgactatcaactagtcgtcaatcaagtcctaagtgaatacacaacttgaggtgaaagaatgatgtcctacttgaaaaagatccaagacttgcaaagttagctcaaaggctattcaataaggcagatctctagagaacaaaatgccacaatagatgcacttgcgtgtctgggaagcagtaccattgctgacaaagcaaacatggtgctaatatagttcctaaaggaacaaagtattaatatccctgaagaagtcaacagttggaagaaagtccaacatggatgaaacctgttgcatc

SEQ ID NO: 223953 - DNA, 2990 bp, Cannabis indica
acttgatcatcacttcaaaaagcccttcgaacttcgaaacaatcttcaaccaaggaagaatgaatttttttaaaaaaaaaaattaaaaaaaaaaaagttctcttgaaattttagagagaggagttggaaactaaaaatgggagggaacatgaagtaaatcaatttgtatcccaagggtttaaatacgatttagcctcatgcgtaagtatcttgacacgtggcgttaaaaaaccaaaagtcactcaatccaacggttatcttaaaacaggtctgcacgaatccctaattagggttcgatgacgtgggacattgggaaaataaaataataaatgcaactgtcatttcaaaacccttgacaagaaaaccaagagtcaccgtcatgtgacagaacaacttgtctgtcccttgtgaatagtttctctatttgacaaatagttgtcatcgcaaaactaggggcatgtgttatagtacgaattttttgcctagaaatacaagtacagtctcataaataactaacacgtggacccggttctcgatggaaaaagatgatgtgtcaataaatagctcaagtagagctaacctcgcttgatgtaaacttgcaagaagatacgatcgagacagggtctagtcgcttactatgcctcgcatagtcaaaagaataagcaagaccaagaggagttaatgttggtcgcacatataccaataatatgtgatggccaagtgtgcctcttctgcgactagtaaagatcgtttgtttacataggtttggtctgaatgactaatgtgtttgacgactcgtcaatgactcacatgttccacgtggtcaacacagaatgtctgattatgcgatcaaagatgaacgcaaatattcaaaaaaaaaaaataggcccaagggccatcctgcgagtacaacaccatagagcttgcaagctcgtgtgttagaatatgatcgagcaactcctgacttctcaagttgcatacgttgatgcacttaatttaagaatggatgaaattgttcttcatttattccttaaatgattattttgattaaatattgtcatttaatgtaaaaacggttctaaacatatcaattatgtaatcttaaaggatattttactttctatataaatgagtgatccaaattaaataaactaggctgaaattattatcaaaaatgtactaagcagaccaaactctgattgaaccactataaatctcttgccttctctttatttctgctttcgtttttatctatttagtagcctatagtctgagtacttgctattctaagcaagtactcctatatctatttttgagtattctaactttatttgaatacttgcataaaattgatgttgtttaatttcctccgacagcaaaaaacttctcgtaatttgacccgtttctttcttctagggaagttgcaccccatattgcttccatgaaatagcctttgttagtttctgtttgttttcctacttgttttcgtttaatgaagattttgaagtcataaagaaaaatgaaatgcaactcctagaaacgattactagtactagttcgagaaaaggctccccattaaaaatcttattatggttcttacaatcaatacaaaatgcaaaggtcaaaaatgtcctaattcattactttaaatggtaacactaaaaaaaaacacaatagaatttttagacttaacgacttgtcaaagcttggaccatacaattgactcaatctggggttgtgatcaattcaaagtctttttttgtaattttttttttattttctaatttttgaattggtctatttcaatagtggccgaccttataaatttattttttggaggactttttttgttcaattttccttctctctcgtcattttcaataaaaacaatttagttttaaaaaaattctatttacacccacagggccacaaaatgataatacatttcaatatttaataagttaaatttgaaatcatttttaaaaaacaatttttaattattttttaattttttttcttatattattttgtgttaattttactatttattttaattttattttcatatttttttaaattatgtatatgttttatttatttttttataataaaattttacataattttttattttaattttttatataatattttaaatataatttatttttaatttaatatgtgtatttttttaagaatttaaattaaaaaaattaatataatttaaaataaaaattattaaaacataaaaaaaaatatataaatataaactcccatttaatttatcaatgctaactcatcaaattttaacataatttattattggtgttagaggtatttttgtaatttcattagttgggttgagagatatggtttaaatatgtgggctacattcatcattggaaatgattcggtttggaagccgaagcattaacaatatactctcattactatattaataacaagataaatgctaaaaggtatcagtagtgccaactactctcttacgtgtcaatatcgttattggtctaattaagtattggattccatatagtttaatataatagattttaagaagtatcgctagctaatcgcaaggcgacacgtcttaaaggtactagtcaccactgatgcccaataacaatactctaataacaacaataataataatctctcacaaaaacaaattatcagatcaagggtatttttattatttcattgtgtgtatgtatgattagataaaaagtgaacaaagaaaccacgaatatctttaacgacagtgttgtttaggggtgtttatcaaaccacccgcaccgcactgcaccgctaaaaaatgcagtttaaaattttttgcggtgtggtttgatttttttctaaattgcgcggtgcaatgcggtttgcagttttaaattattaatatgcagttcaaaccgcaccgcacattataaaaataccaatttttttatttatttaaggaataattacataag

SEQ ID NO: 223954 - DNA, 3282 bp, Cannabis indica
tcaagtgcctcatagatcgcttgctaaactagaaaggctttcattttaattctccatacgctgaaatcatccgaaccattgaacttgtccacctcaaacctttttgaagccattaaaaccagttcttgattgcttcaatttggttcgtgaaagtttgagtttaattcttgaaatgttgaaggtgagtcttgattgatttactgtgattcttgaactctaaaccctgagctttgataccatttgtggtgaatcctcaccctcaaaataggttattacaacagtaacaatgtccaagaaacacaattcctaattaaaactaatcacataattaaaacttgaacttgattgaaattagacaaagaaaacttaacttgataatgaatgaatgatggaatagtcagtagtacacaatagaatgagcccaagattacaactcaacacagtaaagtattacaaagaaatgtctcgcattgagggaaattacttcaagagtgatactctcattacatccctccacacacactcactatgatcttggactctctctctccaaactgaatctaaagtatgagattttggagattagagattagaactctttcccccttggagaatagaagaacacatatttataattgttggtggggtcccctttaagttggtattaaagccaactgttatgactagcagtagctttcttcagatttcatctgatgatcaaatagatagacatactgacttgacaggttaagtgagtttaatcccaacaataaagttgcttccaaacaaggagaaacgttgttaaaacatctaaagagttttaactgaaaaagaccacactacaaaaaaactgtcacttttgccatgtacatttttgcgctagcaaaagtttagtattgtgctggcacaacaaaatctacttttgatgtgttggcaaatcaacattagtatcagaatttttaccagcgcaaaatgaaaaacgctggcaaaaatgacttttcccaacacgtaaatgcgctagtaaaagttagactttttccactgcgaatgtgcactggtaaaactttgacctttgtgctagcacagtttgcgagatgcgctggtaaaagtaaattgtgttggaaaaagtgacatttcttgtagtgccggtaggcatctataaatatacgttgtgtgacacgaacttaccttttcagtcaggaatacccatgtggcaacttactttctctaaaccaatgtaaggtttgtaacaatccgagtaacgatgagtttagtttttgcacgaccgtgtgcctcgtgcatatttttggctattaaatgacgttcgtcgagtcatgctcgcaagtatccatgctgggcatgcaaatttcctagaaggggtaagggaggcgaccaaggtgagagtgccaggtgatgccccacaatcacttcgggcactcgacttcgacaatggaggaggagcactgaaaggcatggtgctcaaaggaccaaagctagcagttttctcccccgagaaaggctcttctgagaagagccagctgaagatcacttcctaatattcttcttcaaaaaaaacttgcaattttagctagcagacctttagatgaagactctaggcgagaagcttccttaggaggatccgtgggagcagctcgcctttcgcctgtggagcgacgccctgatgacccacccaaagaacgggctactcgaggaccagcagaaacatcaccctagcacaaatagctctgtctttttctaccgcgacaccatccccaagttcctctagaggagcatggctaagctcattattgccattggctgctacctcagcctctgaagctgcctctgcccctagaacttcctccttttttgtcggaggaagccgtatgacgtacgatttcttagggtttaacccaacattctctgagaccaatctacattcaatcaagttgggcaaagttagaagatgatggcagagcttgcttttatagtcggctttgaataattttagcatactggaagtatactcctcttttgtgagggaagtagggtggcacgcctatgccaacgaagaaagaaaaagagttgaatgatcatcataaaagggttccttattaattaattaacgtaagtagaaacaacaaagtcacttaccagaaattcataagactttgatcacgtctgcttggttgggcatacagaagaattcttgttttcaagcttttcaagtgttagaaattgaatcgacgactatcggatcagttgaaactttcttgtgttggtacgaattaccttcttaaaggcaatgaagaagaaagtcggagtgttccagccattaggcatgagctgcaggggagctatgccaaagtaattcaaaacctcctcgtaattaaaaagggtgaagcagccgagtaacacccatcttaagaatgtattcgctaaaagctaccgtgccttgaggtggtaaatgagcgtgatcattggacaagggttcgtaaccttgcgttactgcatactggtttaccatcctcctgccttcaaaccaagtcacagtactcaccatgtcaaacattctaaagggaatagatcagtcgtaggttggaagtggtgcactaggcttattcgagcagtgtggtttttccatatctacaaaattgtaaattgagttagaacaagaagaaacacacttcatgttcttcattcagtgagctagaaccttccgaatcaatttaggctaggtcgtgggatcgtcgcttgagtgaccctgggcaacgaaagatggtgaggggtagtaagaggaactgctgccttcgcctggctgatagacagctcgcctcacagccaaaggcatgggagccgggtgaggaggggacggctcaggaggaaaaatgtgctccaagtgagcaagtttctttgctatgtcacgatataactgtctaaggaggaaaaggtaggcatccgtattagcgtgcacctaaccttctaagaactcaatttcttccttaagcttagccagacgctcctaaaactcacaaatttcttctaagcatttcaaacactcatacattagcaagtgatactgtgcccaagggtcgacaacgtccccgtctgaatcgaacaagaccacaatgggggaaaccctctcaagaatgaagggtgttctattgctctccataaaaaaagacaaaggaggataaggcgggggtattgttcaagaaatgttggaaattattttaccaggatctagatttactaacaggtatgtttgattaacatcctaat

SEQ ID NO: 223955 - DNA, 1585 bp, Cannabis indica
cttcgtttcccggaaggtggtccgaaagccaccttctccggcgaagagccattgagggagaggattttccattttagcagagaagccattcagaagcttaagtttcgagctaataactactctgttataaccactaaaacgacaccgtccaactgtaacggtttttctgactcgtcagagactcttgggaaacaatcgaacgacagctggaaaaccgttaacaatggtaacggtttcgatcggacggctgagatttcatccttccaatcactttgtgcacagctgtggcgctccgtcacacgtgcgagaaaaatagaagagtcaaaaacgacgacgtttcgtatggccgtgaactgccgccaccgtgtggagccaaagatggattcacactacttcgggaacgcgattcagagcatcccgacctacgcacctgctggtgagctcatatcgcgagacctcgggtggtgcgccgatctcctccacaagaacgtggtggcgcacgataacgctaaggtgaggttcggcgtagaggattgggagcgcgagccgaggcttttcccgctgggaaatcccgacggcgcgtccatcacgatgggaagctcccccagattcccgatgtacaacaacgatttcgggtggggtcgacccgttgctgttcggagcggtaaggcaaacaaattcgacggtaaaatctcggcgtttccgggacgagaagggaatgggacggttgatcttgaagttgttttggcgccggagaccatggctgggcttgagaacgattctgagtttatggaatacgtatcggaaatagttgtgtgagttgattcggttggtcaacgagttattagatttttctaaagtaataggaagtttattttattttatttttatttttgggttttttaagcataatattagagtgtatatggttgaaataaatttgaaatgaaattctttcaaaccaaatcatgataaataaagagaaacactaatgataatgagataatgaaatctattatttgcttgagaacctagtcaaaaccaaaagacaagtacggtttagcaaaattgaagaggaagttggataatattttggtttcatttttctgtttattacttttctaaaatatatagtccaaataccgaaaaaacaaacaactacctgtactgtgtatccaactttgatggagacaagttttatattttaatatactttttatattaattagtgtagtgatgagaattgttggagccttcctaattgacctaaattataatgacttcacaccctgacacccgttgatcaatatctgtgagtgctttctcagttggtgcttatttctcacttctgagctacagtttcgtttcttactctgcacaataccaaacaagagcttcaaaacataatatagtgtaattttaaactatatttactttaatggaacactaaaattatacttataaatagttttatttacggtgtcccattaaatttggtgggatagaccacattattttttccttttaagtttttaataactgaagaaaaaactaaataattatatatatttagtattaaaatatt

SEQ ID NO: 223956 - DNA, 1521 bp, Cannabis indica
taagtgttctaaagattcctccctcatcccacagagagaacaactcgtatcttcaatataaaatctattcctgataacagaccgaacagggagcgcactggacacgatactccaccaaagtaatttatggcgctctagaattctactattccagagcttgttctaaagtgacgtcgctatctcacagtgcggagccctttccagcgcttgagcaaggtaggaagatttactcgagaactagccattactctcaagattctaaacccacttatcattgccctgacaagagggagtacccccttttaaggttgcaggcacagtctcttgatcaaagaggttgttcaactttttgacatcccaaccatcattggaagccaagagatcggcaactttgcattgatcattggtaggaccaccattagatttcggaataaaatctttgatatgagggatccaaggatccctccaaattttagtatccctgccatcagtcaccattttataggcatctttccttaaaattgaattggttttaataacatttttctagaactaggagtctgaatctttgtacttaaagtaaaggaactccttccctttaaggtattttgattcctaaatctggcagcacagagagtgacaaccattcagaatattccacccccacttagccgaaaggccaagttcatttctctggttttccagaacccaaggcccccaagagatttgggaaggcagagcttatcccaagcttctgatgcaacccatggttaccttttttgaatccccaccaaatatcacgcaccaaaccatcaactttggtagcaaggcaatgggagagcttggtagtttgcatagcatataaaggcagagacaagaccaaaaattttatgagagtagcacgacccgcctttgatagggtttttgctttccgcctttgtaacttcgaagtgaggttatccaggataaaattgaagtatgtgtccttatatcttgatctaaataggggaagacccagatacttgacgttctcctcaagtgtgtcgatccccaaagcttcgttgacatctcttttcatttcattggaagtattcttactaaaaatgattgaagttttgagtttattaacttgttgacccgaacatgcataaaatctctcttccttgatgacactaatagtactaatatgaggatatatattatagaataattctataatagtgacattggttttgtctctatactatagagacattttcttaaccattcatttatatgatttttgaaagtccacattatataatatgcagttttatgcagcaaattatattttctttttcaattattttttctaaaaaggtaaacatactgacaccaaaaaatgaaacttcttattggttattgtaaaaaataaacctatcctcttgcttcttttgggttctagtaaaaatagcttctatagagagaaaaaaaattccttaaatctcaatagaagcctctctcttttacttttttgagaat

SEQ ID NO: 223957 - DNA, 1095 bp, Cannabis indica
tggaagaagtacctcgagatctagaatttgcaagattcacggatgcagaatcaagatctttgtgctttcgttcaatacggtgctcttaagccaaaagaagggcttcaagagcagtgacttcaataggttcagctcgagaattcacagagattacaaaagtatcatagtcaggcgatggaaggcttcgaaaaatagcagtaacatgttctttatttgaaagtgtgtccaacagaattaagtttatcaatgagagaacgaaccttgagtaggtattcattgagagtgagagaacctttcttcagattctgtaattcagtagtatattgatcaatcttggcttcagtatgagaggcaaaatacatttcaagaacggcccagaaagcagcggaggtttcactattcacaacacgagtgagaatagcttcagtcatagatgaaagaagccaggagaacaacaattgatcttgttgttcccaatcaatgaaggcaggattaacatttccagcagatcgatcattatcagaaagaaatcttggtggaggaacagtagttttagaaatgtattgttaaagtttgtgacctctaattgcagaaagaacttgaggtttccagagaagaaagttgtcatggtccaattttgtagccagcttgtgagagaatacaacaggaacgaacgatgatgttgtagctccaaacgcagttgattggcttgttgcagatgacattgttggtgaagaagacattcacaaaccaacggagaagacgatgaatgagaatcagagcatgctctgataccacgtgaaggaatgaaataacagcaagaaaacgaaataaaatgattctcattaattgtgaacaaagagcttacagccttttatatacacagtaaatgaactaggacaaaagacaatactacccttagaatataacaaacataactaaaaaatagttaaggcaattaatacagttattgtatattgtctttaacagattggacatttaaataaatactatcctaataagtagaggagagatatatatatatctgatatatatcacaatcagagacggacctactcttatcaatgtgggggc

SEQ ID NO: 223958 - DNA, 1103 bp, Cannabis indica
ataattagatgaactaagtatgacgccttaagctagccaatcgataacaaaatttgtatatctgtatatctataaatcgatataagtttaattttctataacatctccttttttctccttttaaacttaatacatatattcattgactagtttatcattaatggttaatctatttcgtaatttagtcttatctccctatctagatattattcttactaaatcttttacagtttgaaagatttgtcaagtttttacttgaccataatttacaaaagtttgaaatgatattactttgaatttatttatttatttaaatattattgagtatttttctttctcacatcatatgtctagacaagatctcttctaagcacaatgtagtcgaactatcactctcccattattttgttcatgatttatgctaactttaagattaactcaaatatatattgaaatacataatattattataaagacattttctcaatatagtgtacttgatttgatttaagatttgcaccttgccagaaaagtttgttagttatttttttaaatactacttactgacatattttgggataaaacttttgtaaagttgtggttgactttttccaagaaaaatatatgcgtaaagacttcaattctcaaaggattttgacggacaactcaaggcccagacaagtcttaaaggactttgcccaacaacaaactattctctctacaacactatgagaacactctaaaaagaaagtgaccactttttatagagttttaatactcatttgaatattttaaaattatccaccaactccatggctatcacaaaatattttattggatgtttatgaacacaaataaaaagatcataggaccaattagaacaaacaataagttgtaaaacaactccaaaatagagttattatgtacctggtgacgacacatcgtctgatgcacattataggcgcttttgtagattttgagaaaaggaaagaagtcgtgaactactttaaatattgggtaaatactattttgaaccctgtgttttgcaaaagttatagattggaccctctgttttgttaaatgataaaatggaccctgtattt

SEQ ID NO: 223959 - DNA, 1816 bp, Cannabis indica
attgaaacaaaagggaaaccttccctcaatcacatagccctataaatagtgatccattctcactgggcaaaggggtcgagaaaattatctaagagagtttacttagagatatcagtgtaagagctctaagagaagaatcaatgtattctttgttcttaagtcaataaaaattaaggggagtaggctattagcgaacttctcggggccgaacctctttaaaaactatgtgttctttatttatcacatcatattacatgtaaattatatcacttatcccttacaattaagactcattgtcgttggctaaaagtaaggtcaacaatttggtgctttcattgagaggcaaaattgtaaatttgctctttacttcaaattcaatcataaacacgatggtggtatagagtcgtagaggcgttgtcgattaagtaaattaactgacagtggatcccgcattgcagaatccaggaaacgtagggtttccaccatccacaaatcctaaacaaccgccaaccgtaggtcagggtgtgacgtctcctttgactggaatctgtaaagaccgcttagtttaatttggaattaagcagttaattatggaaaattatttatagctatttaaataattattatgctgttattattgaattctgaaatgcattatatgtcatttagtgattttcataattttgcatttctggtgctcggtaacatggaactaggtgtgtttggcccagtaaaatcacaacttagtatgttagtattgtgggacagtttattagacattgggaatgtcgggattggccgggaatttagaatttcccaaaatacccctttagtgttatttatgttattttagtgtgatggggcaaaatggtcattttgccccattattgttttgtccttttgtggacttagtatgtggaaaataagtgtttatgatgttaagtgttggctgaaatataagggaattaagtttaattctttttgtttattcaaaatttcaaagttagaaaaaaaatcaaagtttaaaggaaagtctctttctctcaaaccctctctctattttcggcccccattgagcagcaaggagccttggtttttctctgtgattcaagcttttgttggtgttttaatcaagctaggttagctccttatcttcttctctttaagtttgttgaaatttatgaaaagatgagtgttgcatgtatgatttttgatgttgttgctgctgttagttgttgttgttgtttttgtgtttaaaatgcttgaattgaatggattagaggggttgtaatgcatgcttgttacccttgtttaagtttgtgaaattttagtacaaaagctatggttttcaaagaaaattcttgattttcgttgttgtggttgctgctatggttgagtagtgttttctggtgttaaatgatgttgaaatatgttgagttatgcatgatttagtggctgtttggagggattagtcaagttttgagttttgaactcaatcttgaacctccaatggtgaattgagtttctgtgattgaagcttggttctcttgctttggatttgttcttaggggtaattagaacaggtctggaaggtttggtatgctttgggttcgaattgatgaagttatgaatttttgagtttttgtctgcgaggaaccggaattccggttgtgcatccggaattccggatggggttctgaaattcccagaaccggaattccggttgggcaaccggtctgccggttgggtgattttcaggaaccctagattttctcgtttttatgttatttggggtattgccatgctttttatcgat

SEQ ID NO: 223960 - DNA, 4337 bp, Cannabis indica
tttcggggccgatttctgatgcccttggcatgtcgagtcccttatataggaattaggattgtgcctcaaattggaaaaatatcagaattaggtcaaaaatccagttttccgtacctagtcacgacccacttaatggctggtcgcgaccacaggcaaaactcaaaaaataggcattctgccaaattccttaagtcgcgaccatagtcgcgagcagataaaagggtcgcgactaggccttgccttggtcgcgaccactgatcaagtttcggcagctccagccgatttttcaccaaattgtcccgtcttttcgccaattgactgaatttgaactccaatgcaccgggaacctgaaacaaggaaaatcaagcataaaaccgctccaaaaaggctacaatgctgagaaaatgcttattaatgtgacccggaacttaggctaaaaatagcctaacaatgacttacatgaggaagtctacatggttcctcctcatggtattcctcataagcaaggcgagatttgcaagctaaaaaaaccttgtatggtcttaaataagctccccgagcatggtttcaaaagttctctaatgttattttgtctcttagttttgtttcaagtgatcataattcggctttatttgtcaagtacacatcttcaagtcgtaatctgctttccttatatgttgatgatatgattattacaggggttgatttacaggaaattaaaatgttaaagtcaaaattagcttctcagtttgagatgaaggatttgggttctttgtgctattttctgggtattgaagttgccttttctctaaaaggttatcttctttctcagtcaaagtacgctaccgacattattgagcgtgctcgccttactaatactagagtagttaacactctctctgagttgaatgttcaatattctccttctgatggctctcctttggaggatcctactttgtattgcaccattattggtaatctagtttatctgagttgaatgttcaatattctccaacatatgcaccagacattgcatatgttgttcatattgttagtcaatttgttgcttcttctaattcactgggctgttgttctttgcatttaacggtatcttcggggtatcatctttcagagcctactgctgccttccacctcctctctggagttgcgagcttactgtaatgcagatcatggtcatgatcccacaaatcaaaaatctgtcactggtttctgtatcttttttgaagaatccttatttcttagaagagcaagaagtagtctattgtttctaaatcttcgacgaaagctgagtattgtgtcatagcgtctactactaaagagattgtttggttgagatggtgacttgcagatatgggttttactcactcttgtcctactcttatgtattgtgacaatcaaagtgcaattcagattgcccataactcggtttttatgaacgcaccaagcatatgagattgattgctattttactcgtcaccatctgaagttgggcactattactttgccttttgttcctttttcgttgtagcttgctgacttttttactaagtcgtatacgatttctcatttttgttttcttttagacaaattctcgatgcttcttacagcatcattgtgagtttgagagaatgtattatatagttatttagggttatttagtctttttttttagtcttttatattagttgtttatataagaattttttattagttgtattcttttactttttactttttactttgaaaccttaatttctctgtatctcttttattcttttctatgcacaaataattatcacctaattcctccttattatcacattacataacataagaaatggaggatgataaatttatgcaaagcttcatttctaggttttcttctttacaattactataaaagaacaacttctttttgtaattgtgaccctaaaaaataattaatttaacaagtacccatttatcttttctttttattatttcacgttacaccactttttctagatcaattggaaattagtgtaatcaatatcttggcttggatattcgattttttttttcttagatcaaaactacttttgcaatcctggtaataatatcaaggtagttattgtggttctcaaaagaagaaaacgaagggtaaaaggaattatgtttcttttaccactaaatttgactaattcacctactttcctacccattttccattttttttatgacttggatgttagatgccaacattaattaaattttgtaacagaaaaataactattttggttcgatcactaaatgaggtatgttggatagatatgcatgtaaattgtataatttaactttttaatgtgtatgaactgcatctgcctcaccataattgcaggtttcaagaaaaacccatgatccaaattcatggagcaagacagaaaccataattaaatgtcgacttttttttattaataatacaactaataaaatgtaggtaatgaatgaagcagaatctaaaatgtttaaaccatggtgaaagaaacttcgcatgtttataaactattgatgttgtatgccaatcaatacatgaatctaaattggggtcaataaaatatgaatctaaatcaaaactccaaaagggtacaactacaaccccaaaggaaccaatcttgatgtattcctacacatgtacgtagcaagctgaattccaggtacccaataaaaaaaattacaatcaaataagtaaacctgccagtgccaccaccctccactcaaagctggttttactttgccgcggttctagcgctcatggatgaatggtaattggtgcttctttgtttcctgtaagaagtataaacatcatcgtactgacttacttcattaggattagctgcagcaccgagccctaaccttcccgagctaccaaatccaggtttacgatctacacttccatcagcatatgtccctgtctcagggtccaattgcaggtttggtggtgggggaatgcaagcccctcccttccgtgaagaagcttctctttcgtactctctctcatactcctcatcaaaatcaccagcatcagatttaaggggcccttcagaagggttaacttctccaatctctttaaagaatttggacactctttcaagaacttctgattgtgtaatactggatggaggtatgacagttgggatgtccaaaggactcatcgaagagtaaggcactccactgccaatctgcatctttctgaccattcctggaattagaccaggcgggaacaaaggatatggtggtaccttttcaccgctgttagcagcttggcatggcaataaagggcctgcagcatgttgacttgctgcttgaatagaggttggtatggggatggagcctgcaaaagcaccaggagggactgaatttggaagaaattgctgggatgcaaccaatgatggcatgttttgaccaggggctgcatgtttatcgtgctcttggtctcctaaaccagtaacggaacctggccgttcaggctgccattgagacaagttatgatttgccatctgctgtggtaatcctgtatcagaagtaagagactaatcagcatttaataactagatgttacgattctaaaaaagcctcgaaaaaaatatgataacacattatgctatagaaaaacccaaacccacagtaaccctatccagagcagtcagacaaataccggcctgaataatgcaaatacttgcaccttgatataataaggacatgcataattccacacaaacactagcaaaagaacaatcagtagcctaccagaagctaaatctgcagcacttgaggatccagcaaaagaattggccgactctccaccaatcatctcatttcgtaaggcattaatagtatctggatcataaatgttattggacgcccataactgtaaaagctgttgtaactttgactggttttcctcttgaatttgaggattatggaagatccttgcaagcatgggacctaagacaggcttgaatgcaagtgcctcattatcaagttcatcaccagttcttcggtgcacactgttaatttaaaagaaaaaatgtcttgtaaagatcacactagtactaagaataattgagcatcaaagaatgcaaacacaaccaagaaatgaaccttcagttaatctatcaccaattattaaaatatatcatagacataacaactaagcaggagagaaaagtgccatgagaaaaattaaaatcaactagtagacaaacaatcatcaagtccatttccaatgaggttcatcctacagcaaataaggctagttattttatacaaaacaagaa

SEQ ID NO: 223961 - DNA, 1485 bp, Cannabis indica
atgaggatatctcacatgcttcgcatcttccttcgagagcacaattaccagttcctgagtcttgtgtttcttagaagattctggagcaaaaactgacagctccttcttaacttcctttacttatctcttctgggcattattatattctccaatgagatgtggccctcccgagataactagaatgtcctctccttcaaggggaggaggttgtagtccctggttgcctgggttattgggcagatttggctagttatgtccatcaccttgtggtttcatatattgccagaagtaacctcgcgagataaggctttctatctcgtctttgaaatgacgacattcttcggtcgtatgcccaatgtccttgtgatacttacaaaaatttgttgcatctattttatgtctcacatgcctcacgggctcaggtttacggaatgtgaccctgtgctcatgtgcgagatagatatttttccgagtttcattaagctcggtataaatagtgtagattggcacgtacctttcctgcttcttctatttttccttgtctttagctaattccttagagccatctttcctcttagagcctcctagattgtcatcctttgtcgagatggtgcttgtcgagaagtgttgggtttatctctcgagccagtctttaacaactctattgctttcctcgcttcctcttttcgaacaaacacctgagccctctcattgaactcgttgatgtttttcactgggcaaccctgcaagtcatcccacagctcgcctccagcagttgagaggtcagtcgtgatccctgcttggagagcggtaagctagatactgtcattcaagtttctaaccctcgcagtagctatgctgaaatcacttaaataggccttaagtgtctcgcttggctgctattctatgttagttagggaagacgcttcaggtcgcctatcccttgttgcctggaactatttcttaagtcttagacagctgttcccaagaggtagtcgagtgttgggtgaatctgttaaaccagctgctcgctgccccaacaagtgaggtagggaataaaatacaatgcaaattattcataacattgctaactcgcatgattgtgttaaaattgttgagttgagagacaagatctgtagtcccatcgtatgacgagacgtgggggtttttgaatccctaggggaattcagtggtcataatgtctaggtggataggctccggctccacgtcagagtcttaaccaggtagtttcctgaattccccatcttggtatctcttgaacttgtcctccaacttgatgattcagaattggataggatttcttttgatagagtttttagcgtaagtcaggcttcttcagatttagttgattacgaagatctggcggttatggatcatagttgcttacaaacctcgtcctcgagtaacttttagttctaattgtgcccgtactctctcgattagtactacaatgagttctatccc

SEQ ID NO: 223962 - DNA, 1363 bp, Cannabis indica
cgtagccattggagaagaactttccttgggctgtggtaatgagagcggaagatgaggaagaagaagcctctgacctgactctgcgtatggctgagtgaattgaatcgataagagttgggtttagcctgtgttcatcttgagccgttagggttagtatgaagattttgcctttcttcactaacgtgcacataattgaatttgaaccttctgtgataatgggtgcctcttcaatgactttgtgaaattaaaaagaaaaaaaataaaaaatatgggaggaagaagtttaaagctttaaaaagttcttcaaactccaaatagaagaacaaaaattaattggttagggaaaaataaggtggttaggaatagtaggccatgttagttaagttacttacgtatggcatatgattttgaatttaatgagattggtttatttgatatataattaattaataattaagggatagttaggtagaataattattagcgtactaattattgatatataatgctttaattgatgtattgaaaatgaatttatgtagagttttttttttttgtgtagcaatgaataacaatttacgtagagttgaagaaatggtaaaaggtattattagtaccctcttatgtgttaatattattattagtgtaattaagtattgggtctcatatagtttataatagaataacatttatagttatctaatagcaatgctctttttgaaaaatgctaaagggctactactggtgcttagtacccttctacgtgtcaatatcgctattgatgtaattaagtatcgggtcctatatatttaatataataacttttatagagtatctctaaccaatcataaggcgacacgtcttgaacatactagacactactgatgtctaatagcaattttattcttatttttttttataattatttgtcaaaataaaagagtttgaaccttgtttatttcacgtataaaataaaaaagtttcacgtgctaaggattgtttaaactttattttcagtatatttgaatgtcttaaatagctataacatagtcgaccatacaaaaattaagctaaacaaatctttttagatgcaacaaattaaggttcatatggatagatatattttaaaagaatgcattatagaaatactgtttttaaagcgttcactgaatgaattatatacaccaaatttaaattttagtgaaaatattatttttagtgtaatttaatatttgattaaacttatttaattatagaataccgttaatctattatagaatgtgtctcacgtgtccccatagcgctgctctgaataaaaaagttttttttttttttttttggtctctagtttctgtcatagtag

SEQ ID NO: 223963 - DNA, 1820 bp, Cannabis indica
gaagaactagagaatgagggagcaattggcaattgtggcccacgaggaattgatggaagaagattgaacattggccatgtattgtaaggggaactaacaaaaatactaaaatttaagttaacttttacaacaatactatcttttataaaacaacagtggaacacaaaacagaacaattaaaaacaacagtggaacaactaaaaaataatagtagaataacagaagaaacttaacacagtacccaatttgaacttcttaaactattattgacatcatgttaattgaggccttccacgcagtccatttgagatatgatggacatgatttgggccaatcttcatttggtcttgttgtcctctatttcatattttattaatttatgcactaaatttaaaattaacacaatattagattaaattaaatatttccaaataaaataatttatgcatctttttttgaaggtaagcgtataaatatattaaataaaactagacctcatggtcgttacacagtaagttctctggtacggagttgatcggaatcaaaccatacacttggtgggtaaaagcccacttagcaacattgtgagctgcaaagttacagttcctactaacattcgaaaaattacaacaactaaaataaggagaagacttagtacaaaaggagacatagttctctagggcccaatgggaagcctacccattgagagcgttgattgttagtctcgagtcattctccacaataacatacttatactttagattcaaagcaacagacaccgccagacaacaggccgccgcttctccacagagagcctccgagaaatccaatcgggacgtgtgaatagcggtcactctccccaagtgattcctagctacaacagcgatgcacatactctccaagcccacacgaacatcgcaattcaattttatccagtccagaggtggaggcgtccagctatccttcgcaggtggcggaggactaggcaagagagaagcatgtgactctgcataagaaaagccaatttgatccatacattttataatatcgggagtactattgttgtgtaccacctcattgcgcattctccatatattgtccacaataatagaagcataaagaaagacatcttcaactcggatgcccctcttattaaggctccaaatgaacttcacccaatcccaaactcggataccagtattacacacaggaaagattccccacggtgaagagcgccataggtgcatagcaacatcgcaggtaagaaatagatgttccacagtttcctcagccaagccacaaaatggacaactagtatcctcgatctggattcttcttctaatcactgcacgaactgggagggcttgagagaggatgcaccaccaaaggaccttatgacgctccactattctactgttccaaagcttattccaaagagctggggcgacattacattgaggtgctctctccaaagcctgagccagatatgccgatttacaagagaaccgcccattactctccaacgtccatatccagctgtcttgtccacttccagagggggctccatctttcagaatagatgaaacaatctcatgatcgaaaagactatttagcttatgcaaatcccacccaccactaggagataagagatcagccacacagttattatctgtacctgcgcttctatatggtttcgggacgaaacctttcaagtgagggatccaggggtccctccaaatgctagtgtctcttccatccgctaccctcttgcaagcccctttttggaggattgcactggctttgacaacattcttccaaaa

SEQ ID NO: 223964 - DNA, 1411 bp, Cannabis indica
attatattggttttggtatgtaatcatcattacaatattcaatgtaataagcattacattgtaataaattacaaaagttaaaaaaaaaagaaaataatataaatgaacattttcattaccattacaatgaaccaaacatcatcttaattacaataactttttttgcttaaatgtttttttttcttaacatttttagttacaataattactacttgctgaagtaaaaaaaaatcccacacgggacgaaaatagacaaaaaaaaaataagtaaaataaaataaaaaggactccggctctgggaactaaatataaaacacaacataatcgaggatgaaactataaaagaaataagtaaaattatagtgaccaaacaatgcaataaataaaaattagtagcagaagaatttcccaaattttccataggaaatgaaggaaggcgggaatccaaaataaataataaaaacaaaaaattaaaattaaattaaattaaataaaatgctcaaattctattcgatgtccgtacagttttcacctctccccatacaaatatttatagagagaaagaggggagagagaatcccttcggtttctcagtttttcccctaaaattcagtaagggtttttggaaatggtagagaaatctctcaaatgcaagggttcgattcagactccgattcctaatgccgcttcttccgattcctcttctctcaaaatcactaaatgtgaagctccgatgatgatgaatactactacaactacaactactacaacaactactagtactactgttgttgttggtaaggaagaggaaccgccttctactattaagagacacagtgctcggattaagcttaaacagatagctgagaaggaagttcttgttcgtaaaagggttgagttgcttgatcatcgtccggaagttaatgtagcttctaagaagaaaagaagaagggtttctctttcttcttctccttctctttccttgccttctgataatgttgctgtagtttctacgcccgaatctgtggctgaaaaaaataccgttaacttgagtgagagtgttgttgttgttccgactcctgttaatttggagggaaagagtgaccatgcgaaagttagggaaactctcaggctgttcaactcacattatctgcatttggttcaggttaacctaccaccattgtgttgttgttgagtttttgtgaaagtagttttgttttgctttgttaggttaggcttggttcttactactttctgggttttttcccctgttttataggaggaggagacgcgatgtgcaagagttgttgaagataagaaaaaatctaaaggttctaaatcgaaggtaaacttctgttctgttgtaatgggtccttaaaggaaatggtttctgctttgttttttttttttt

SEQ ID NO: 223965 - DNA, 1842 bp, Cannabis indica
cagcatagtcctactgaccatttttcaaccttttaatagaatagtagttaaaaacaaaataataatgttcaaatttggtgattcatataaaatatttgtatatctatgattatatttagtactttaattataaaagagggtatttatcaattaaaaatattttgtagttatatttcgttaatgtgtaataaaaaagagtagttctcaacttatcccttgaattagattggattgaatttgaggtttaatttgattggatcgaatgatattgattctccaaatctaattactaattggattggattagattaagtgaaaatgttagatttgatcgaatatcaaattactaattataatttctcaattctagagattttattaaagtctaagtttattatttatgacatatgtgaaaattactatttttatgatttttgatcggtaacgatagaaaatgcgacgatttatcgattagagtcgcacgggaatagtttagaacctttattttagtggaataatcatatgtgatatttgtaataccgagattaagcagggttatggtagtggaccattttactcctaaactttaagtttgcttaagggtgaagcaagggcaaaaatgaaatttttgccatatgtttttagtttattttgatggatttttttgtagaataatttattaagttctgaacccaattagttgaataagacaaataaggagtagataattttctcatccaaaaaataagaaaaaacaattaaccacttcctttctctctctctttctttcgaccctaggaaaccaaggagctcagccatttgtttcttcacctaattcccaaggaattcagcaagaaatcaatggagttagactagaatcaagttaagccttagaaacccttgttctttgagtttttgaagcttaattgggttgtttttatggttgtgggaggtgttgagcaagaactcaaacttgactcaacaatggtagattttataattctgagctatataattgtgttcactgcttggaatatgtttattggacctctattaaatgttcttgagaattttgaaagattttggggtcgatttgtagttgtatggagactttttatttttctgcagcaaaaaacggtatttttactggcagattacctagaaaaatagtctgtcgtttttagagaaacgacctaccatttttcaagaacttttgacattctcattttttttcgttgttccttgatatttagggtattgtcatactatttatcgataggaaaacttctagttttgggttttagtccccgaaaaagttttagcaaattgtttacctattttgcatattatatcgtaggacctccgttcagtgcgtgaatttctattcaagttgaccgacacacttgaattaggaaatgaggtaagattagcataagatatgtatatgtatatgtgtacgtgtattataattaagcattttgtatttatgatttgtatactacgaacactagtacggttgtggtacggagtgtattgatacagtatatgatattcaaagggtatgacatagtgttaccaacactagtaccagacgagtacgtagtgcatgtggtacaatactcaatggtactcgaggtacggttcagccctaccaacactattatgggacgagtagttagtgcatgcggtacaaggaccgtacttctgttaggaacattcttaatgtatctgaagccttataaataggtgtatgagcgcctagatacaagtcagtattatgttatacgttttgtgcttttcttattgagttttttgactcataaatatgtttgcattaggggt

SEQ ID NO: 223966 - DNA, 1272 bp, Cannabis indica
cttcacgtagaaatgtaagcagaaggcaaccccaaactagggaataagaaatccctcgtggtaacaagagagatcctgggagtcaacctaggacaggtgggctaccacccagacaccattaacgtccttctcgaactgatagggaaggggcacatacaaatcccaacaggggcatgtatcaactcgttctcaaaggagaacgccagtgcatgacgaggccaattctagctctagatgtacaagaactcatagccgatctacgcgaggaggggatagaacttgtcgcagtattgatcaagagagtacgggcacatctagaattgaaagttactcaaggacgaggtttgtaagtaactatactcaacaacaatcggatcttcataatcaactaaaccaaaaaaaaacctgacctacatcaacaactcaatcagaaacaaaagggtcttatccaattacaaatcaacgagttggaggacaaattcagaaggtatcaagatggggaatatggaaaactacctagctacgacttggacaaggaacctgagcctttccatctagacattatgagtgctgaattcccccagggatttaaaaactctcatgtctcgtcatatgatgggattacggatccgttcgcacacttgaataatttcaatactatcatgtgagccaacaatatgacaaataatttatggtttattttattccctacctcgctagttggggcagcgagtagctggttcaataaatttacccatcattcaatcacctcttgggaacaattatctaaaaactttaagaaacagttccaggcagcaagagacaggcgacccaaagcgtcttctcttactaacataaaatagcactcgggcgagacacttaaggcgtacttgagtcatttcagtacagttggtgcgagggttagaaatttgaatgacagtatccagctcactgcccttcaagcagggatcacaactgatctctcaactgatggaggcgagctatgggatgacttgtagggtcgcccagtgaaaaacatcaatgagttcaatgagagggcttaggtgtttgttcgaaaggaggaagcaaggaaagagatgaagttgttaaagactggcttaggaagtaaacccagcactgtctcgacaagtatcgtctcgacaaaggttgacaatccaagaggctttaagaggaaacatgactctaaggaatcagttaaggacaaaaaaaaaaaacagaagaagcatgacaagtacgtgccaatctacacta

SEQ ID NO: 223967 - DNA, 1918 bp, Cannabis indica
caacttagcctcacgcttgagttgaatgagctccttctcttgctcgactccctcagtctggcccgggctggatttctcttcctccccttcacggacttgggtacaaaatctgccgggtaaagcttgtacttcacaaagttggcctctgtagtcaacaaagtgatattccgagcagcatcacgcatttggagaattctcagggccttttccctaagcctgaatgtgaatggaggacggcagtatacggggatctgctgaaatacagtgtgagcagtctccatgccctccacaaagtaatacttgttaacaaaacccccaattttgctaacttccgtgtccacggtacccttcagccaattgtcatccaactgagagaaatagaagtaccccgacctgctctacttgggggtacgtagagttcaaatcaaagagccagttgatgtcgtgtggagacggcacaccccatccttgaatggcgtagaggacgaacagggcagataagtatttgatgcccttaggtgtgaactgggtgggacaaagatggaagtagtccgcaaccctcttgaagtacgggtgcaaaggcagcatcggcccttgctttgtgtgggcacccgccaagcacagtaccttgccttcagatttgttgcccgataatttgaagacagaaggaagcactcaagtccgcccagatacccgaccttctccaaattttttaagtggccctcagttacgatggacagaggacacacccatctagcccctaaggcaccttgcttcttatggggaccgcctcggtaaactcctcggtgacatagtcttccccctcgaccaagatgtcacccagctcggacattagctccctagactcattatatcctccaaaacgtagagacgagccactccctcctcctcagcctcggaagggctatcaggacagacgtcatcccgatcctctatctcctggacctcgatgtccccctcgtaatcttcatcctccgcggcgggcagatcatgttcgacacttggcagcgtggcatgccgggccacatgagggtcagctgcgtcaactctctgcatcgtctatttggtgcaagccatcatccttctcctggatgggtattggtgtgtattccgagcaaccgtcacggcaggaacaacaatcagaatgccaaaggcaccaaagcttggacggcccacaggaggagtgtcggcaacaccaggtcggacgatataagtccagttggacggagataacgtctccaacccttcttaagctcccaaataaatcattcatagccttctcttgcgatctattcagagtaacagtgatgttgcacctcgggttttggagtatgagaacgttcactactcacttcccaatcttcaaaacttgagttagagagtccgtcactcgaagaggacgaactggcaaaaaaaatgaggttggtcctcgtacaaaagctgaagcagatcctggttgatacagtgttcgcctctccaaaactcaccagggttcatctacaaatgacaatacacgagatgagtatttggccgagatatcaaacaaaaataggcaaatatactgaccaagtctactcaacagattaaaaagttgaaaacgtgtaaagattaagttcataacccaggagtttgaaatttttggggttaagggttaattttcacgaagctttgaatgggcaaggtgaaaatcgaacattgtgagattaaagccaaaatgtcacaaatgatgaagtcatacgatctactacagtaaaaattacagagtatcgaacctagattttctatatatctcttacaacacgtcaagaacaattgtattttctgcaatggaaacccaaaaaattgaagatacgagattaaagaagagaaagatgagaaacttactcactgtttgaag

SEQ ID NO: 223968 - DNA, 1491 bp, Cannabis indica
aggtgcatgtggtttctactaccttgttatcctcccgagtttagacagatggttggacagaagggtggagatgtccaagttgaagatgaagctcgtttttttttctttaatttttgaattaattgttttagttatcgaaaaatttagtttcaaattattagtatggaaattttattccctatttcatattattgcagacaattcattgtcacattttttagagtattaatataatagttttctctttaaaaggatttcattataaattgcttatatgaaattgagcttcaaattatttaacttgtatgccagtaccaaattatatttatatgtttatgatgttttatgtgttttgtattttattagtgatacaaaatctatggcatattaatctttgaaaagagataacaccacataaacatttagaatttaaattcaatgtttatgaatcaattcttaagcaattaataagatttaatttaataaaaagattttttgatctgatagggtggaagaagttattattatatgcagttcaaagatcttttatatctattgaactttagactttattcgaaactctacaaaatctctataacacttaggggtggaagaagttattgatatatgtagttcaaactctttgaactctagactatactcaatacaccacataatctctatgacacacatattttagttagacatggacataatataatatacaaactagcaacctaatagaacttattcttgatcctgtaaatgttccaatatatatgttactatagtaatagtaaataaataccagtgaagtccttcgacatagaatcacagtagcttatcttagtgggaggattttaaaagtctaatccattatcatttagatgacactagtgatagcctactatgatatgttctagaaggaactttaaaatacaactaaaaaagttaatctaaccattcatatggatagtaataacttgtcaatattatgaggataagataggaaattttgcaatgtctattcgaaagaatcaagcacaatttctggttcttatgaaatgttttatggtatctatagtaattactttatcttaagcaagtattttacattaatgttaatactagaatgctctgttgatgacttagactagaaggaacttaatgttctagactaagataaaatgtcacaacaagaggtccctaagcaccaatggtaagagattaaatgcacacttgtgtatgcattaaaccagactcctactgttgagtaggagccatcaaagatgtaatcaaacaaggaatattagggaaataatcaagaaagaatctctaaaagtgacctatatgttagatgataggggtgtatattagagtctctatatctacaccatctcagaacttaatatcagagatggttgttactctgggggtggaggaattattctagaaggatgtaaaaacccgtctataataatttaagctcca

SEQ ID NO: 223969 - DNA, 1766 bp, Cannabis indica
tgcttatccaattttgattccgtttcgaccgtccgtctagtttttcacaataactaatatccatgaagttagagaagtcaagttcataactttgcatttctcatttcgagcatgggaaactcacttggaaatgaacagttttgagtctctcatttccgccgaacagcaacatctccgagagctagtgaccagctttgccaaaacacaaaaataaactaagtgatattaaaatatcacttagggatcttaaagtacatcccttgggcatttttttacttacccaatgtctaggttaacgtcatatgtcaaccttggcgctgggatgtcagcctgggcgttggatgtcaacatgggtgttgggtcatgaaccgccttcagtaaaatggccataacactcaatattgcttcgattgacacaattcaacttgcattttgaagctaattcaattctctatcaagtctgtatcacacttcaatcacaattttgaagctattgaccttaaatttcaccccaaggaaattacaaaaataagctctgagttacccgcgatgggttccaccaagcttcaaaaaatggctatcactattagaagctaatattcactgttagaccatcatctacggtcaataatatctaattttcacttttctcctatttttttgggcttctttcacctataaaaggagagctcccttagctcatttttttaatttttagaatactacccataaggtcagagcatctctctctagtttctctctctagaaactagagcttaaacacttagttttttttgtaattaccatctcgttaggaataaaaaattgaagtacacgtagcttcattaccatcgcgacatggaaagtgaactactataaattttgtgtctctctaaattatttacttacattcattattaatctcgccaatttagtgagctggtattggccactttttagcatcaatattttggtgctttcattcagagccacaactcgagttccctaaaaatagttcaatttttctgctgggaactgtattttgaaagaaattcataagctcaggagagtaatcatccatgaacatgcaaagccacactaccactcctggtagccacgccactactcagcaagtagcaggcattgagattccttataaggaagcagactacgatgggatctttacttgatatggatcaatcacctgttaggaaaatgagctacaagtgagcgcccgaaaggacaaactcaagatcgtaggcctataggtccaccacatgtagctaataggaccaaccacaactctatttgaagcaattcaaacaatgcaggaaaccaatctcctccatgggattctcttcacaagtctaatgaatctagatcacgccgtgacctttcaaaggaaaagggacatgctgttagacttaggggaagaccctcgaagatctactacaaaagtgaagagtatgagattcagagtgtgaagatcaatgaactactccacactaggaaatactttcataatgaatgaggttcttggcataggtactttgcccgaggtcctaacggccaacagtacaaatacttcccatgggtgcatggaaacaagttgaacttgagaaatcagtccaactctctccacacatgtttctctaaggaagactattttgaaggaaaaagtgttgacctcaaatttggccaactgatagcggagtcgtatttaatgctgatgcttgccatgtattacataataagaacaataaagt

SEQ ID NO: 223970 - DNA, 1884 bp, Cannabis indica
taggatgttaatgaaacatacatgatagtaaatctagatcctcgtaaaatatttccaacactccactgcccacttaagtaaccatccagaggcatccagtttttgcaatatttggcgtaatggttggtcagtgtacacccgaataggatgagcttgaaaatagggccttaactttcttgttgctacaataaggcagatagcgagtttctctatcaatgggtaccggcctttggcctcaatgagtcttttattgatgtaatagactgggtgttgtatgctcttttcttctctgatcagcacgacactcacagcgtgctccgtgacagctaattatatccaaagctcttctccgtccagaggtttcaagagtacgggaagctttgtgagttgcgttttttgctcttgaaaagctttttcgcattcctttgtccactcgaattgcttatttcctatcaagatgttgaagaatggaacacacttgtccgttgattttgaaataaatctgcttagtgcgacgatccgaccagtcaaactttgcacttccttggctcttgttagcgacttcatatccagtagggcttgaatcttctttagattggcttcgattccttgggcattgacaatgaaacccagaaactttccggagctgactccaaaggagcactttaagggatttagtttcatattgtatttcctaaggactttgaagcattcgtccaggtcatctatgtgcccccctgccttcctagatttgacaagcaatacttccatgtttcgtccgattttggtctttaaacattttgtttaccaacctttggtatgtggctccaacgttttttagaccaaatggcatgactttgtagcaatatagacccatatctgttcggaaacttgtatgctcttagtctggtggatgcattttgatttgattgtacactgaataagcatccatgaagcttaatatttcatgcccggctattgcgtccacgagctgatggattcttggaagtggaaaacagtttttggggcatgctttgttgaggtctgtaaagtcaatacacactcgccatttcttgttcggcttgggtaccagtgtgggatttacaacccaagctgggtagaaagcttcaattatgaaattattgttgcgtagcttctctacctcttccttcaaggctagtgctcgttctttgtccaatagcctttgctttcgttggatttgccagaagttgggatcaatatttaggacgtccgaaattacagaaggatcaattctgacaatatcttcatgtgaccaggcaaaaacgtctaggtttgctgttagaacatttatcaatgatgattttacttcgagcaacaaacattttccaatttttagtttcctggccaggatatccggatcgatcttgatctcttctaggttttccacctgtccaacattgttgcttgggtcgccaagttgaggatccacatcttcatcctcgccttgggaagttccctacatagaaatattttttcccttgtccgtgctttggctggaggatacttccttcttagccttggcgacctcaaggttataacattcccgagcaatctcctggtttcctctcagacaccctaccccattctttgttgggaacttcaggcatgaatggaatattgacgtaacaacctttaagtcagacaaagctggtcggcctagcatgacgctaaaggctgatggaacgtttaataccagaaattgtgccattatagtcatgctcgtcgaagcttgcccaaaagtgaggggtaggcgaatttgccctagaggtgcgactccttggccggagaaaccacatacaggcaagagacagggggttagatctttgagctggagccccatct

SEQ ID NO: 223971 - DNA, 1244 bp, Cannabis indica
agaagtaccaaaatccgaacaccgccaaccaaatcttgaagctcaaatctcccctctttttttaatgaacagtcttggattggatgttatcaactaattaagtttgttctagtaaatgagaatacacatggcttatgttatgcattgccaaacgctctttagaaaaacaacaaatggtgttactttctttcatgtctaacaactaagggatctgatttatagttttatgttttattttgtttgttgaatcgaataattagtcttccttttctgctttaagatagtatcacctgtaatgcttcataatcttttagttcaacatataatataatagcttagccaatagccaccataagtcccacatgggaaatgaagatgaaagctgagtagtatataatagtttagaaaacaatattgctcgccgggcctagtagcgtgggtctgtaatccaagtggaggcatgtgggaaatgggacattaggttggtccagtgggctggattcagtgttagctgtttactggcctgcccgttccaagctgggagttgggccttgtggtttggacgaaagtccggcccactgggctcctaaagtggagggtaatgcgtgaggctggtttcacagagcagcgaatacctcccgctctcggcagtggaaggataacgggccggtgctacctgggtccaccatggttcactgggccgaccttaataggaccatttcttttttgatttttctctcttcttttgtagtttctaattttaccaacattttcacaaattaatataaatcacagaagtaatatattttctcaacctcaattgtgattattttgtgcctgaatcctgatcactacaaaaaattaattaaaattgaatagaaaaatagttctaaccaagtcaatttgttactgatttctatgctctgcagtttttaattctacatacatttcacaaataatcaatagaaataactatttttcattcattattattgatataaataattactagaaagataataaggattaaaaaaaaagatggaaacaattatgtgtaaagatttatattgtacacataagaaatttttattttgattatataataaaagattatacacttggaaataggcgttaagttttgaaactctcattattcgagtacgaatcaaatgaatcaaatgggaaatttgattttttatgcttatatttggttaaaaaaaattttctaatcaaataataactaa

SEQ ID NO: 223972 - DNA, 2450 bp, Cannabis indica
gtgaactgagtcgggcagaggtggtagtaatccgcaatcctcttaaagtatggaggcaaaggtagcattgcaccttgcttggtatgagcacccgaccaagcacaaaatccttatcttggactagttgcccggtgatttggagaagggaagaagcattcaatatttcccacgtagccgtgcttctccaaattcttcattttggcctgggttactatggacgaaggagaaatccaccgagcccctaaggcaccttgccttctttgaggaacgacctcagtgtattcctcggtaacatagtcttcaccctctaccaagacttcaccagcctcaaacacgggttccccttactcattataaaccccgaagggcaatctccgagaaactccctcctcctcggctttagatggagaatcaggacggacctcaccctaatcctccacctcttggacttcaaatatccccttcattgtcttcctcctcagtagtaggcggggcctgttcaacgctcggcatcatggcaagtcaagccacgtgaggatcagttaagagtttttgcgcactgatgttagtgcgggtcatcattcatccctggacggcgtttgattagtgtgcctagcaacggtcaccacaaaggtggctataggtataccagtagcagtaggacttggtcaacccacgggtatagtgtcaactatatctgggcggacgatgtatgtccagctggatggcaaatattgtctccacctcttcctgagttcccaaatgaaatgtccgtagccctcacctacgatctggtcgggataaaagtggtgttgtgcttcgggttctagagaaggtgtgtgttcgctgcttatctcccagtcctcaaaacttgaggcagaaagaccgtcacttgacgaggacagactggcacaaagacgaggttgacccttgtacagaagttggagaagatcctggtcaatatgatgttctcctccccaaaactcaccagggttcatctacaaaaggtaggacacaagatgagtgtttggccgggatatcgaacaaaaacaaataaaatataccgaccaggtccaatcgaaggattgaaaaggagaattttgcatgatttaggtttacaacatagaatttcacaacttcagattagggttaattttcactaaaccccgaataggcaagtgaaaccgaatatcgtgaaatcaacatcataatgcaattacagtcaagtcatatggttaagcacaatcaaactctcatattcctaaacttggattttctacggttttcctagagcaagttcaagactatcaaattttctataatggaaacccaaaaaatcaatgattcaatattaaagaggaaaagatgaagaacttactcactgttcgaagctttagagctgttcggatgacatggatcgacactttctggaaattcttcgaaggatttgagaggaaaaggtgttcttgttctaaaatcgtcaagaaagaaaatgctaaaagtggtttattaggactttctgccctatttataagcaaattagtgaggaagtgtaatcatttcgaaatttaaatgcctcagtttctccccaaaagcaaatgttgggcaattaagtacctgaagagcaaccgtcaaaagcgtgcaaatttttggagtatttcgaggtacgaatcaatcagcattaatgagccaaatatcgaagagactcctggtcagaatcacgtcggatcaccatttcaaacatggattcaaatcgagtgaagtctacaagcgacttcggaagtcccgtgcaaacttggggggcaaatgttatcccatttttcgcactatgacgtggcagcatgtactagcgacatgtgtctgtcattctttacacttggttggagaaatgttccgaatagacttcaagcaacgcatctgcgcgcacaaagtctgcttgacctagcagagtaaatggcatataatccgatcaaagagtgaagttagctctccgagccgcgtatgaagacttgactacttcaaagttggtatcgtgaagcccaagcacaaaggcaatccctacaatcataggattgtatcaaagggatacgacaggttgtcctaatccaccatttcatgtattctaaatatgtaatgtatgctcttaccaattatagatattgtaagcaaaagagaaacctttcctcatgcatttagccctataaatagtgatctagcttcactgaaaaagggatcgaaagaattgctttacaaagagatctaagagagaatactcagagatttcattgtgagagctttgagagaggaaattctgtgttctttgttcttaagtcaatataacctaaggggagtaggctattaccgaactaaaaggaccgaacctctttaaaaccttgtgttctttattatttactcatttttgctttgttttattacatttcttatcgctt

SEQ ID NO: 223973 - DNA, 1504 bp, Cannabis indica
gtagactactatatcctaggggggccatggcctctacactccaaaacatgcatccgcccctcggcatataataggtttcatatattttaaagtgtttttaaaatatatgagataaagttataaagttttgtcttatttacatgtataccacttcgtggcccaacgagtatatgaaggaattgtaaatttcagcatttgttttagattcatatatgtatgcaatatttgaattgatatctcatattgtatatttggggtagcacattattagatatatgctcactctaattattttctatttgaaattgatggtttactatatatatgaaataaagtcaagcctatttgaattaaattttgtttaaatttggcatactaaaattttagtgttagtctctcattctaaatgggttgatttgaaacatgatatcgccaaagcaacttctcttatgtagattgctcatgaggaatgtgttgtgtgtgtgttctcatataagtgttgatacggcccaaaaaaaaggttataacttattttaagtgcacaaatacctgtagtgataaatatgtgacaattatatggtttccatgtgaacatatgtccagtaccaaagattgaacaaattgtttgataggatttattgtcaatatttgattactacaacaggagtaccgcttacagttaatattattgtccaaagacttgatattaatatgtgtttggtatcttgagatgggatatgccattatctgaacttattgtgttatgtggattcttttgtgaaccttatttattttgttctcttttttaagttcatgttttcatttatatctaccaacatacagataattctcatgctaaatgggcaaacttttaactaaaggaaagaggcaagcacacttctttagctacatcttttaaatgaaagataaagataaaactcaggatgttgcatatgaaacactactaaagaatatacaaaatatattagatatgaaattatctatgacttttgcaagaggaagtaaaaataaggctaaagtgttctaagtatgccattaggcatatctaaggaaaatgagtttctgatttgttttgtaaatgatttaaggctataaggatattcaaactatggttaaagactagttattttggatttggaaaagatttatacagtatcatcacctagatgattttttggttttgaattctattttgaataaattaggtcattcttgttcaattagaatttgaaagtcttttccaatattggttctactagttctttaacttataaatttattgaaatttgcctcatataaagaaaccttataatttttttttatggtacaaaatataaattgaatcatgaaaattttattatactttggtataattattaaggttaaacctcccaaaaggagaatagaaagacttatattttaatagaacttcttgaccccttgatttaataaatttttagattttgtaaaggggtaacaaaca

SEQ ID NO: 223974 - DNA, 1191 bp, Cannabis indica
taataattaataaataacaataacaaacgaagtttggtacatgtacgacggggagagggaaagagccaagattagtagatcaaatcctaattcttgttttggtaagatggagaggagaggagaggagggaggattactacttattattataccaattagttaaagaatttatactctccattgtaattttatatatatatatatatcttcccaaaaagttaattcaataatgtcaatcgatttctaccaaagtatttagtgaaattattactctcttctctttcgctcttactataactccccatcctctctatatggttaggacattagtttattcaggtcagccctcacaacctatcatattgtcacctaccactctcgtcattccactaagccatatccccaaatattcacttaattgaattcaatttaatcgcattaactcttcctccaccaaataaagtatggaccagattaatcatattattcaacctaaccaatgcagaaaaagaaaataaaataaaattttaaaactaattcagattagggacctttgagaaaccccttttattttctatttacttttgcctaaactttcacttctaatccaaatgacaacttcaatagggttaagaagttatacgtggtcaatttaattaccttgagaaataagacaatggagtgaaggtttcgcttgtactcgtcaagaggcacatgttgaaaagcagaggatcggtctggaaggcatgcgtcgtttgcgccgaagaacacagtcactgctagtggcgattcactagtactatctccacagccattagcagccggaaaaacgttctcaataaccttaagagcccacctcgtgttgtacccactgtaccctcttagtaccacatcgacctgagagttgagaccatccaagacaaaattacccagaatgataaaatgattaaatactatatatattgtctactgtcgatcgtgtaagaatatgagtgtacgtatatacgtactgtgcgagagaaatggttagccagcgaggcaccccagccaccatcaccgaaggactcttccgtgatagaatcgccgaacagataaaactttggtctcatgacaatcttcgcagtttcggttttatgccttcaaatactgctatgaccgatgatcacaataaatgtgtaatatatttatatc

SEQ ID NO: 223975 - DNA, 2004 bp, Cannabis indica
gatgatgatgaatgttttgtacacctgacaacacgaagatcgtcaacatcagggatactcaagattctgaaatacaggtctttgagatagctctagaactagtggagaaccggagacagagaaagcagcctaggtggttcgatgagtacactaaaatgaagaagaagtctaggacatcgaaggaacatgtgaatgtggacccacttagagtcgttgatcgaaagttgctctcaacttttcacagttgggttctcagccaaattgggaacaagtacctgagggagtgttactccggtagacatgattcgacttggttcctccaactacatactctaaggacatggcttggagacgatgtaagtttttaagactttttacgttttttgtttttaaagactttctataactttttttatttaatctctgacatattttattttcatgttttagcatttagatgcggcacttcatttgatgaggaggcgccaacacttttatccggaggtgtacctaaatacatgtgtcatcatgcctcatattttcccatcaggagttattggttggtggaaagctacgaataatgaccactctaacttttagtgggatgacagcatattggatttgattcgaagggacaatgtccaatacttgcagagttagaagaataaggagagaatatatatggccttcttctttgacagtgcaaagcattgggtgactttagaggcaggccttgatcgttggatgttgaccatatttgacttgagccttggatcgattcccccgcatgaattgaagagtcacttaacattatgggaagagttatttccaactttgttgctgcaatctggcctattcgagaatcatgaaatggtcgtcatgcctcgattgacagtctcagagagccatgttagaaatttcagttcagaagtcatcaacgagaagattgtatgacagatgaaatcaaggtaacttaattacaattgattttttaataattaacttgatttaatttgcatacttatatttaattattttttattgtctcatacaaggataattgtgagatgtatgtaatagagcacatcgagcataaaatgctggaactttcgtttgataatgtaaacgatgaaaatatgaagaaatttagagagcggtggtgtgtagatttattctcccaaaatttagcatgaacttctatattttttttgttatatatatatatttatctacacatatgtatttattgagataacaatgtaactagtttcttttattggtatgattatgttcataacaatttaaattaaattttttgtttaaacatatgtttctgtaaaaggacgatagtggacgatacataggttgatagtgtttgatggtggcgtattagtttataacaaatttaggccttccagctatgggacaatggagtctgatagggtctgataggggtccgatggtggtatcgaacaacaacagaacctatcgggctccattgatccatcactattttgttccgttatatttataccagcatcggacacccatcggactagtattggacctgcatcggactagttgttttttataaaggggtttttgcagttagtaaaataacctgttcattccacaaattataataattatcaaaaaaaaataaaataccacaaattttcaagtttaacaaagtccaacatgaattcaataacaatacataatagtacaacacgtcacaatacgactaaattgaacattcatttttaaccttggtaggtgcacgtgcttctgttgtgccccttggcaccacacttgccacaatttcattttatcacaatcttttcaccattacaagcaattaggtttgacttacttcctccaacattttgcttcttgggttgtcctactggttgcttctcaataggcactccaactgtcatgttctttatgtcatagctaattcccaatcatcctcgtcaccaactgacataattgtgccttcat

SEQ ID NO: 223976 - DNA, 1915 bp, Cannabis indica
catacaaatgcgagaaatcttctgtcaagcaccaaaaaagtagcatattaataccgattataggacgttatgttagtgtattgaacatcttaatgtgacgaatagcaattctctacaaatatttttcgtacaaaagttttataacagctaaaatctttaattcttgaggggacaactcaatgttggtcttctggtttggccgaactaggataaatctttagtagtttccatgaaaaggagattatttgatatgatgatgtacattgtaattattttatatgaccagtttacgataagtcttcaaataagagtaatatatagtaacgcagcgtaagttttatttctattttggtattttgtttctataatatcaggggaagaagagtgtagctttaagggtacaactcgtttggagttgatgaaaaatgaggttaagcataatcatatgctatcacattctaaaagtggccctaaagagctttggccaagtgtgtcaaattatgttctcaaactctcatcaccagaagattcagactcaccagtggcttttctctatttcttggactctggtggtggatcctatccccaacttatttcaagtgctcaagtagaatggttcaactccacatctcaaaacatcaaccctaattcaaggtaacaatagttatttttctttctttctttctttctttttttctcctagcaataataatttcgttgaaaataatcgaagtgtaataatctttgcggaaagaagaaaagtcttcaaacaagacaagttctttatccactcttaaaacatactcactagtctataagttcgtaattaggaatatgtctcgagaagactggataacaaacttgtaatatgttaaagtagtcttaccaaacaacacatgtgagtgtcccatattaataaaagaatagaaagttgatcactttataaggccaatgaggtattcccctcgttgccatatggttttaagatcgaacctccttgaacttgtaaagtggattctctcttcatgatgagcggcccaggctcgtatttaacataatattcagttaccaccatttggtgaagttgaatatactagttttacattggtaagtatactaattaatgtttcaccaagttttttttttggctaaaattaacacagggtgcctgaggtaattttctggcatatacctagcaaagcatacaagaaagtggctccaatatttggtatacacaaaccttgtgtgggttcaattaataaagagagagttgatactcaagaagttgaaaatggtatcatggaacttcttgttgaaaggccttctgtcaaggtaagactaaaattattcaattctctcaaccaatggtatagtgtagagtagtatatgcatgattttaatgaattggtttaatggaaatttggacctttttattcataaatcatttactatgtccatatgttttcacaaagcatctaatttcaattaattcagaatattcattaacataaaattgcgacataagtactcaaaattttaagtttctaagtgctataaactcaatatttatttttagtggcttaagtacctaatgtttataaaactataattttcctctaatttcgttagtacatacttcgttttgaatttattaaaagaaaagttagaaataactgatgctacatgtttttgtctagacccaatgatctagaatctgagcattatatgtgccatgtttaagacaataatagagattgtactgacgaaattagagaaaaattatcatcttacaaacattgggtacttataccggtaaaaataaatattgaatttatgccacttataaacttgaaactttgagtagttatgccgttatttaccctattcagtacgtgaaaacatcttgttttgtcaa

SEQ ID NO: 223977 - DNA, 1315 bp, Cannabis indica
ttatctcattcatggcctccctgccttcccgaagctcgcacttagccttggcagtagcctcacccttcgccttcagttcctcccggtgtttcgcctctacttgagcttccctctgctgggcctcctcccggaacgcactcctttcgattgagaagtcctgaaaaatcttcacggcctcatctatgcccccaaattcgaacatgacaaacccatgatcaatcagcttggagaggcggccggtctctatggtaatctgggaaaataaacaaaaatgaaatcagatacattgagacaagacataagtgaaaaggaaagaatgaatcgcaaaaactcactgcagccagggcagcactgatgtcctgaacttggtaaaccgagttcagtgaggcgcaagcagtgcatctcatggctgggaattgagtcagatgggagacaaactggctggtcaactctgaggcgaagggagcaagaataggcccgacaaagcagttgaaccaatccgtcagagggtccatgttcaggtcccaaggattcctgaaagcgtcctcgcgcaaggtgttatattgctcctcccgcaagatcttcttcagggcctccacctcagcatgtccccgactgaactcgtcgaaggcatagttatgtttgacaacgcgaagcatttgcctttcttcgtctgcgggaaccggggtgagaacgatgccatgtggcacagtgtactcctccgctgcggaaggaatcccggagtcagtgctgaaagccagagtatccctccatcggggcctcttgaaagactcgacctcaaccatcttccccttccgcttgcgctcaagggcggctgcaatctcgccctcatcctccttaacttccccctcctcatctaccaagactattgtgcacaagggggcgctggacgatgacctcccgggagtcaccagttgggatgaagccggaggtagagaagcatccgggctgtaggcctcggcaagggtagccaggagatcttccattggcttggctgctacaacaaggaaataaacaaagtgttagaataatcataaggcacgcgcccaacaacaaagtaataaagctaatcctacctgactctctaattcagccctacaaaatctttaactacagtgctggcttcgtcatccccaagaaagctgttcgaggggagaaaccagctggaggataagtgggctgaatgatccaagggaatgggtgcaggaggtccagggcccatccgggaccgacccaagaaatggcccaagtgggaaaaaaagtattctttggcatgatacccccaccgggtgga

SEQ ID NO: 223978 - DNA, 3027 bp, Cannabis indica
cgaggatcaattgggatattttttgttgaaagttggaaccttgttggtagaatgtttgtagagaccctccataagaaatttaccaccttgggggaaggtttcaactgccacaactggcgccagaaccctgaattattcggtacattactgcttgttttagcggcctgtagcaaagaatacgcactcttaactgtaaagagcccagagtcatcttgcatccaataccaggaatcccttcttgaatgattacttaacggcactttccagaccaacttttgatccctgtcactcaaaaaatctttgataacttcttcatctcactcaaccatgccatccttcatcaatgcattcacagtattccctaataaagctgggtggcttgattcaatgtacggatgtaactcattaggtagccagggttctgacaaaataccaatgttagatccatcgccgacaagtcgatgcaccccagcccgaaccagctccttggcctcataaacgcttctccaaatatagcttggattacttcccaatgaagctgtaagcaaagagccagtagagaaataccttgccttgaaaacttttcccatcaagctatcctcacatttcagtaaagcccacccttgcttagcaaggagagccaaattaaaatcccttaaatcacggaagcccattccacccctatccttgtgatctgtgagcttttcccacctcatccaatgaactcatttattgttgtttgatctccaccaaaatttactaatggtacgctcaatatcttgacaaattcccaccagtacaaggaacacattcatcgtgtaggccgggagcgcttgaacaacagacttaataagaacttctttgcctgcacgagacaaaaacttattatcccacgattgaattctttttttaactttgtccttcaaataaacgaacaccacatttttattcctccccactgtgcttggtagccccaaatatttgctatgatcagccacttcatgaatgcccaaccttccacaaatggcctgcctcatagcaacggacgtattagtactgaagaacaccgatgacttcccaaaattcacttgctgccccgtagctgtagcaaacatattcagcagctgttggacccgtgttacctcctcatgagtcgcccgacaatataggaacctatcatctgcaaacagcatatgagacacactaggagctccatttgccactttacagccatgtaaccacctcctttcatcaaacttacgaataatagcagataaagcttcagcacaaacaagaaacaaatgccccaaaatgcccaaaatgccccaccacttcactagttctttagcaccaaaatgcccctttaatagttttataagacttagaccaccgagtgagtgatctagatgacaaaatactttactcttaggtggcgtttggttggaggtaatgaaatggaatggaaagaaaaagaaacaatcttcattctatttatttgtttagttgcatattaaagtgttggaatgtcattctaatggaatggtctttccaccattttggtggagtgaccattttgaaatggaagaaaagaccattccagtgcatgatgagaaaaaattcaataatttttttatcaatttttttatgcattttaaatgggaaatttgaatttttatgcatcttttaaagcataattggttaagtaaacaaaaacttagggtaattgttaaaatatgactattttacttaaaacccaaaaaacccctctcaatctctcataatcacctccaccttttctctcccttccctccaacctctctctgcccgtgcgatacccatcggacccggtacaacaaattttgatttttagggtacccatcgggccccaatcggacatatcggacctggtacaaaatttttttattttttgggtacccatcgggccccaatcggaccaatcggacccggtacaaaaaattttaggtttggggttctcctccgtgcggtagtcgatcggaatactcggttgactccgtgcggtaatcgattggtcggaatggtgggtgggggtcggtcggaatggtgctgtggggtgggcattatgggtcgatgtgttcttacgatggggtatgcatgggcagagagaggttagagggaaggagagagaaaagggaggtgattatgagaggggtatttttggggtttaagtaaaatagtcctattttaacaattaccgtaagtttttaattacctaaccaattatgctttaaaagatgcataaaaattcaaattttccttttaaattttatttcattccattcatattctcattcccattcccattcctatgttttcatttcttctaaccaaacgccaccttagtagtttcttgaattggaagtcataggttcgaatgtgtctactgttcttttaatagtcttaaatgtgagaacaatgtaagagtttatgtaatacactccatcatgaggaaattacatggtatacacccactttagtttacttgttttaatttttacctctatttttatatcctttaagatatactcacttttatagatgatgtccccattagaccccttaggttaatgtaaattatatgctagacttaagtagagagtcagggtataatgggcaatccactcaaaaaagtgggtatattttaataaaatataacatgagggtatttttgattaatggatacaaaaaagtggtatttttcaacttatctcctccatcataagcaggatcggcgctaggtataggcgggttaggccagtgtttagggcccatatttttcaagggcctaaaattaaaaatgaaagatctcattaaacttttatttaaaaaattatagtaaatgacctaaaaacatactactatataggtaaattttcttattttaaaatttgtaaagaaataactattttatactctttattcctcaaattatcatttctcacataaaatttttacggttcttatatatttagtatttatttttttttt

SEQ ID NO: 223979 - DNA, 1206 bp, Cannabis indica
  modified_base (567)..(567): a, c, t, g, unknown or other
aattttatgaggattaggaattttttcccaagtcattcgaatagactatgcaagaattctactatcttattctcataatcctgataagttatttctatccatatgaatggttagatttactttctcagtagtgttctaaagttcctatcacaagtatcaaccaaataaagatgggttaagaattttaaaattctccctctcaaataaggtagtgtgatacaatgtcaaagaattttattggtataattactattacaacagtaatatattaatttgaaaataattcaagatcaagaatatattctgataatttgctaattcattatattacatccatgtttaaaaatatgtgagacaaagagtattgtggtgtattgaatatagtctagagttcaaaacgaactacatatttcaatagtatagtccacccctaagtatatagagattatgatccactcctaaggattgtagaaatcatggtccattagagatcatggtccatccctaagtgatatagagattatgtggagttatgaatataatccagagttcaaatagatataaaangaatcattgaactgcatattgttcttaactttttccacccctatcagatcaaaaaatctttctattaaacaaattcttaataattaagggtgacttcatccaaaaactattgtctcaacagttctatattttcatctgaaacatggtttccatctccattaaccagcccctgatttaggtccatgatctccaacctcacaaacacaaaagaaaggccgagaaaggaaaacaggggagaaacagagaaaaagcacccgactacaaacgcaactagtaacacactgaaagaaggaataaaactaacagctcacacaaaggagcataaaaaagaagatattacttgaattgatggcatctccagaattgaagtcgagggatagtacctaatcatgcaaaaaaaaatattataatttaaaatatgtacaatattaataaattaaaatacctatgtaaatattttagtttttttaataatgtttttattttaaaaatttatagtcgcaaaaaaaaagtttaaatagttttgcttatcacgtgtataaaaaaaatacagaactgacgtgtgataaaatatttgaaccttattttaagctctataaattatttgaaaattttacaggtaatctaaaataagtacaa

SEQ ID NO: 223980 - DNA, 2259 bp, Cannabis indica
aaatacacatagagttttaccccttgttagaactaggtaatccgtaggagaaaacagacctgtaattggcataactgccgattcaggaagaatattttgaatattcgcacctttttgattgcttatctctggaatactcgcaggtatttggatgagcatcttgaatactcgcatatctggttcctttaagaattctgaggattttatcgcttttaccctttgtttagaacttaaggttttctctatattctctgtatattttgttgtggggataatggttaagtttttcaaatggtgggtgtgtcgccgtattccaatgctcatgcgtgcgatcgcattttccttaaggtactgcgatacacccagccatttgcgacatacgcgagcgttccctgttcccatagaaccgtatattttgactagtaggtttgctcgaaacagtgaggtgtttccgttagcccaaggtttatgcgagaaaggcatgccccttgagatatatgagattcctcaactgtttcttgagatataccgctagtcggatatgcgtgatatactcacaggttgtgattggttagatttctcgaaacggtgggtgtttcccagtatataacttcagggtcatgctcgtaaatgcatgccctttgggtcactgggtaactcccaaccattttttgagatattcttttcgtcgcacacttgcgattttatgccttggtgggctgattaggttttcgcgagaatccgaattagccttccagagaaattttttgaatttcttatgcgggtgaggtcacttgtattgttttcgcacattcaccatactgaaaagatcttttatcttttagatgagcaacttgtcggtaagccagatgtttggctctggaggcaatgcttttcgatggcgaccaagacgaggaggatagcttcatcccgacctcgatctcagaagtggagactccagttgccgaagatgcggagctaggcccgttgtcctccgtagatatagaaaggatggtttaggagctcgctgaaccaaggaccatcgagattcgtgatagcgagtctacggtgtcagctcgtgaacaccttgttcattctaggcatgctcctgatgccgaagtcgaggagatgggcgaggactgggaggctccagaccgcgagtcagaggatgaggaggacgcaaaagggagcgggactgactcagtggacaacactcaactggacaagcccttctcatgtgaggatttggttttgcaagtcaccaagtccgacctaaccgcgtatacaaggttaaatctgctacgcctcagtaccatgcgtcctcgtcctacccagagaccgcatctacctttcaccaatcctgcgataatacctatagagaatgtggttgtttctatacccattctccgctgtggggtatcgcttccttttcacccattcatcgctgctattcttaagcgatatgatatatccccctttcaattaaccccaaacagttatcgcatagccctcgggttttatgcgatgtacatggaatacacacataaggagccttcgatggaggacttcagctacttttatgacataaaaagcgtgggccttcacaacggcttctattgcttcagtaaattggctacttctgaaatcaatagggtggaagacatggtttccaatatgggggattagaaatctaagtggttttacgtgtttaaagtaccaagaattaggactgattttaatcgtcgacctagtacgtcgcacactttaacacttagttaattttcatattaccttgtggtatgatctaacacgctcttccttattgtttgcagatagaccgacttgacccgtactggaatcagttagcagagaaatcgctaaagttctcggttgcctccctgttcaagatcgcgactggcgattactgtaaagaccgcttagtttaatttggaaattagcagtcaatcacgtttaattatgaaattatttatagctatttaaataattatttatactgttattattgaattcagaggtgcattgttatgtcatttagtagttttcataattttgcatttccggtgcccggtatcatggaactcggtgtttggctcagtaaaatcacaacttagtatgttagtagtttgggacggtttgttagacattgggaatgttgggaatggccgggaatttagaatttcccaaaaatacccctttagtgttatttatgttgttttaatgtggaggggcaaaatggtc

SEQ ID NO: 223981 - DNA, 1714 bp, Cannabis indica
gggggagatccctctcttggaaatggataagtttctttgctggaatgtccgaggggccaacaacactcaaaaacaaagaactatcaagcaattcattcaaaatcagggtgttggttttgtggggctccttgagacaaggatcaaggttcacaaattggggaccttgtatcttaatgtgtttgatggatggtgtttttcaacaaatattgcgtggcatcgtggaggaagaattgtcattgcttggaatccggtaagatacattgtagatattattaaatgtacaagtcaactaatgcatttaaaaatttctacaatggatcatacctttagtagttttgctactatcatttatgctttcaatgataaaaatgggagagagatgctctggaaagacttggctgctttagcaaccaatgataattggtttttaatgggagactttaatgatattctctcaaaggaggagagaataggccataaagtcaagtattatccagacatagcttttgcgaattgtgttgagcagtgtcatttggaagatgtgaaggcaactgggaactttttcacatggtcgaataaacaacaggggcaagatagaatatggtctaaaattgatagagtcatggctaacaagcttggctagatcaataccgaacagcagaggcaaattttttgaatgaagggacttttgatcactctccttgtgtattgtctttgtatccaaagagagctgaggggaggaagccatttcgttacttcaaaatgtggagtagttacccgagcttcagaagcaaagtgtatgagatgtggaacaagcgggtatatgggactaagatgtaccaggtggtctctaaacttaaatctcttaaaccggtcctaaaagagattaacaaagctggtttttctgatatacatacgactgtacagagagctaagggtgaattagaaagagtgcaacaacaattatagcaagacccccttgatgttgagaagattgatagagaaatagctgctagagctaagttaattcaagtgcagcaggactatacaacatttttacagcagaaggctaaggtcacttggatacaaaatggtgatttaaatactgcaatttttcatgtaagtatcaagcaaagagcaagacacaatcagattttctccatagaaagcaagcatggcaccagaatcactgatccaaatctgatctcagtagcctttgttgattactacaaggaactgctgggaacaagcatgactaacagaagaccagtgctaaagaaacttgtgagcagaggagcagttttgtccacacagcaagctgagaatctgatggtgcaatttactaaagatcaggttaaagctgcactttttgacattcctgggaacaaagctccaggctcggatggttattcgagtttcttttttcaagattgctgggagatagtgggagatgacatctttcaggcagtgacatcttttctggaatcaggtaatatccttaaagagattaatgctacaatcttgacattagtgcctaaaatgaaatgtcctaacacagttaaagattttagaccaatagcttgttgcaatgtgatttataagattgcaacaaagcttttgtgctctagaatcaaactcattctccctaatttagtctccttgaatcaaggaggtttcattaaagggagattcataggacataatataatgattt

SEQ ID NO: 223982 - DNA, 1986 bp, Cannabis indica
gtctgggtttgggtcctggtctgtgttcgagtccttgcctgagtcctaaatctagatacctatcacgtgtcccgatctggttttggttctggtcctgggtcccaagtccgagtactggttcgggaccgagactggggtgcgattctaggcccgaccccagttctctttcctaagtcttgttccatatttggctctgagttcgggccttgagtctaggtctgggttaggattcgagtttgggtcccggttcgggtctaggtctgggccggagtctaggtcctagtctggttacggttccgagtctaggtccacgtccggttacggttcgaagtccaggtacaagtccttgtttcggtcccgttctcagttcccggtctacttctagttttggttccaatttcagatcacagggtacagattcgggtccaagtttggctctgggactgggtttgggtcagggtttgggttcgggtcctggtttgggttcgggtctggggctgggtccaagatccaaacaccgactatgggttctgtccaagccctgggtgctgatctggatctcgatctcaggtcctggtccggttccatttcgggtgccgggtcatgagctgggtcctaggttcatgtcctgggtctgggggtcgggtcttgggtcctagtcctagttccgttgcccaggtccttgtcctgattctgggtctaggtcccagtttttatctaggtttgggtcccgatctaggttcgggtttgagtcttagtcggggtttgggtttgggtctcggtttgggttttcatttgggtttgggttcgggtctgggtcctagtcctgggcctagtcatagtcctagtccggttccagttccaattgcgattccgagttggagtttgggtttgagtttgagttggggttcgagtccaagtccgaatttgggtttgggtcaggatctcggtctaggttcagatcaggctttgggtgtgggttagggtcctgggtctgggtctaagttcaggtccgagtcctaggtttcgatctcaatctgagtcccagtttagtttcgagtctaagtactgggttttgatcccggtctgggttcgagttagggtctgggcgcaggcctaggtttgggtttgattcagggtatgggtcttagtttgggtcctgggttcgggtctgattttgggttcgagtctgggttcaggttttgtcctggcatgggttcatgtccaagttcctgccttgtttgggtctggggcaggtttcgggtctgggtctttgtctgactttggattcccaaggtttaggacaagtcctggtttgggtttgagtcgcggatattgatctgggtttgggttccagggcctaggtcgctggtctacgtcccccatccaagtctggttcctaggtcctagtctgggtcgaggttcgggttcaggtcctaagtcttggtattagtccaggtcccgctttaggtttgggtccaggtctcagtcccagtcttggtccgagttcaggtttgggtccttgtcaaggtttggatcttgtctggctcatgggtcttgggttccagcgagggtttaggatcatgtcccagttcgggtctcggtctaggttcaggtcccaggtctgaggtcctagtcctagtcaaggtctcggtacaggttctggtccgtgttttagttatggtttgggttcggttctggtctcaagtccaggtcttagtcacagttgcagttctgattctaggtccaggttttgttccgagcccgtgtatgggtctaggttgggtcgggtccaagtcttagttcgagtctgggtatgggtttttggatcccggtctgggtctaagtttgagtccgagtccaggttcgggtcctgggtttaggtcccaagttcgggtctgggtctgggtccagtcccgtgtttcgatcctggtctaggtctgggtcggtattcaggtcaggtcaggtctgggttcatgtccatgt

SEQ ID NO: 223983 - DNA, 1576 bp, Cannabis indica
atgttttataattttagaaatcagctcgcacttcgcgtgtggttgtttaaattttatgctcataatattcatataaaaaaattaataaaaaataataagtaggccataaactttgttaacaatctttatttttttcttttgaaagcttgagttttagaaggtggatatttgctgaaaaaatatctatatatattagtaatttatattggataatttacaccacacactgaaatttctaattttttttacttttttactgtagggcggattttttttcaaaaatactgtgttttttttttgtcaaaaataatgtgtaagttttataatgtgtactgtgttttgttttcactgttgttatagggttgtttttttagttgttccaatgttgtttttagttattctattttgtgttccactgttgttttataaaaagacaatatttttgaaaaaaaatctgtgtgacagtatttttataaaagttgacctaaattctagtatttttgtaagttctcctttatactcgacaaaacattgttcagaacaaaaaaatgtacttcactaaacactatattagacaaagtcatcgttaaaaatatcataaatcatgaaaattaaaaaaaaaaacaaattgtaaagcatgatctagtaagtatatacacgattaaaaaaaatactttactaaacactatatcaaaataaatgactataactatcttcattcatccatataattaagtagaaattacacaatatacgtaaaatttttttagtttttacttttttatggtatttttaattaaatcatttgtggtatgcgattttaagttttatttttcactttttatgggttttattttttggcatatttttgtaaacattggcccaaatcccatatttttatcttttttttacttctattatttttaaagtaagctacagtagatgtagcttactttttgcatgcacctgagctcagtactcattaccattaccattattgctattttcctctacttcaatcaatcataaatttcttttatttctcttagtattcgttttcttttctcttagatttgttagggtttctagtttatcatttctttgttcttcttcttgttatttggtttgtgagtttttgggttccattttcgtgcgattcaagctggtgttgcttccgtgtgttgttgttctttgtttcattcatttttcgagcaatctctctggtttaactaaggtgtttgttcatttccgtgtaagtatttgttgtaatttttttagtttagtgattagagtgttttatcttgaggtttttttttttattattattcgtgatggttttgtcatggtcggtggcgtatttagcttatttttggtttctttgttgtgtgttttgtgttatttatgtcgaaatttgttggttgatcattgtttttttagtttatttttgtcttaagtttgtgtttgtgttcattgtttgggttttgtagttaataattgtttaaagcttcatgaattttttagatttttttttattttttgtttgtgtttaatctgtttgttaagtgtttgatttttt

SEQ ID NO: 223984 - DNA, 1946 bp, Cannabis indica
tagtgtgtaagactgtgaagaatccaatcaactgaaggagaatcgtgcttagatcttggtgatactctgctacagaaaggatacaagggttagagatctaagcggaaggagtcatttaattcagttgcaaccaatgtaaggtttcttgaactttatatgtgtttaaattacattgttttagaaattcatctttaggatgttaaataacatacatggtagtaaatctagatcttggtaaaatagttcccaataggaagatcttgagaaagctgaggctaatgctaagaagcttaaagaggaaaattctctgctggaagagaggctatctgagttgaggcggagcatcaagaggccataaagcgttcattggtggttgccctttttgagctttggaaaatcaataagaatgtcttggacatgctgggataagaagaaagagaaacgctcctacaacagatcttgaaacttgacgctgcagagaaagttgccagagatgctattaaggatattcatgagatcgctcttccagatagtacaaatccaaaaaactcttctcttctagctacagaggatgctacagttgttgaagttctgtctgatgctcatatcaacttaacctatcaagtagataatcttgcccagccttaaatctatcttccaatatacttgataacttatttttgaatttatggtttgggagacatgggttcccctttttatctctggggagacaatgtatgtgtccttgccacatgcttttaatatgtaaatattgtaactcctttatattttacatatttacggtctaaattcatcaaatatttgttgaatcttgaatgaattttatttgccaagttaatcttatttcctggttccttgaagttctaattcctatggtctaaacgtcaggacttcaaatttgtttcttagactttaattttcccttaataaattacttgcttttataaatttttagaacatggttccaacagcctggaccttggcatttaaacaatttattttagaaattttttgttaaaatacaatcttaaacatataatataaatataatcacaagttatcgccaaaataagaaataaagagatacaaataagtaatgcaagagtactaaaaaatattattttttgtgctacaatttcttggccgcaaatataataagcctaaaggacttcttgtgtatcaaagaataattaattcttctttcttttgttattgggcttttaattagttcttttatttgttttgttttgtgggcccagttgtaatcctaggtggctaatgtcttaaaagaccaatgcatataaataggagggtagctagttcatttagggagagctgagaaattaagtcagaagacttgagtggagaaatttcaccctctcgaaaggtgggagtatgagagtggagcctcctgaaaagctccaaacctttgtaattctgctactaaattcaataaaatcaaacttactagattcaaactcaagagtaatatcatagatagtaaatttttactaaggaaaatctatcaaattagtgcggtgagctgtggataccatgcggaagaaacaaagagacaagagcacctcggattccaccgtcgacgatgaagttgcagcattgaagatagaagtgttgggaattacaaatgctatcaaggaattggtcaacgaatcgttgctcgagatggggcaccaaatgcaaatgatgtagcaatagttccaacgatttttggaagctcaagatcacgcaagaatggtccaagaaccctcaagaaccaatgatggacaatcaagaatccttcaagaaccacctgaaatagaattacaaacttttattcatcaagatacctctgatgcgaagattccaagcaccataatatgggtaaaagatagtccacaacgactagaacaaagatcaagggttgt

SEQ ID NO: 223985 - DNA, 1418 bp, Cannabis indica
aaagagtttcacataaaaagacatttttgggtctctattggattaccaaatccttaaggaactgtaaattccgttggttcccaagcccccggcaattccaacttaatatggtcataattctcggcgggcctggacaccagaacccgccccacttaagttttttgggatgacattatcaatattttccttagtaaccacatcacctacaatattcatactcggcccactagtcaccatatggccatcaactatcatttcagtaatgggcccctttgaagcattatccccaataaaaactcttctgcgttttggatcagttaaagccaacatttcattcccctccacatagcattgactatcctccaatctttccacatatatcccatgattctcgttgatatcctccccattaactcctccaccaatcttgccagtatcaaatcccccataggcaatatctttgcaacgatctcctcccctctctttggcttgatttgctccctcattaatggaggtttgactcattggatttcggcttccaccctctccatcaccatcgaaaaattgcccaccagtatcctccgaagtcttactatttgacttcccagaccgaagccattgcgaaccaatcatatgtgctttcctttgcggagttgctttcatccatatcccgtatggcttgacaagctgttcaaaagggatatcaatcgccttctcacacaaacgttctgagtgtccgataacgccacagacaaaacagaatgtgggaacgtgttcgtatttgaaatttgcccaaaaccaatcattcgcactccgaacaatcttcatccgacgtttgagaggtttagtgatgtcaattgttacccgaatcttcatatactccctccatacgcctgaataattatttacatcggactcaacatagactccaatatagtttccaatacccttcaacactagttcagactgataaccatgttgtaaatcaaaaacttgcacccataagtctagccgattcagagtcacagttctaaaaaaataatttattaaacatactaatttaataaacaaaatatattattaaaacaaatatattaaaacaaatatattattatattactgtatgtgtcatagacaatttgttttctaattttttagtatatatagatattaaaacaaataagagtacttcggtagacccttttcaaaatttggagtaaaattttctaaaaaaaaatatatttatatataaattgttctacaagcaaatatattgcaacttataaaataggaccgacttttggtcatgcgtgggtttgtgacaaataaaatacatatataaataaatgaaaatactattttggactctatgttttacaaaaattactaattggaccttctattttgttaaatgacaa

SEQ ID NO: 223986 - DNA, 12611 bp, Cannabis indica
tttaacttggtatcagagcgggaggttcctccggagtgatgtcgaccggcgaacaaacaccacctgtaggatctcaggtggacagatctgctccacatccaacacagacgaatagcaacgttgctgctcagtcatcgaacacagccattggagcttctagttcgagtgtagtggttccacagtttgggagtacccttaaccagccatttgctctcaagttggataggaacaacttctctctttggaaaacaattgtatctgccattgtcaaaggacacaggttggatggttacttgacaggaaaaaaggtcaagccgcaagagttcatttcaactccaaaccttgatggtcaaccgggctttggtgttgaaatgaacccagaatatgaacaatgggttgttcatgatcagcttcttatgggctggctatatggctctatgacagagaccatagctacagaagtgatgggttgctctacatcaacagatctttggcgtgctttggaagcactctatggagctcattcgaaagcaaagatggatgaatatcggacaaaaatccagacagttaacaaaggatctcaatctatggtggaatatctcaggcaaaagcggcagtgggcagatgtccttgcacttgctggtgcaccttaccctgaacaacagagaaatttataatcaggctttctagagtacaccatttcatagggagacacattgtttaacacaggtgtagggagacgatttatgagatacacagcagtttggaaagcgtcccaccaatattttagtggcatgttggcttgtgcaagtattgtgaggcccatttcgacaatatgtcgatgttttctttcagctctaccgttttgagctgaagtatggggacacggatgagtgaattcaataccattttgaatgacaaaatcagacaggggttggtattctcctccccaatctgtctgaagtcttttaatcttcctattgaactgattttcgactagagctttaaactgaacaaaagcattggtagcatcggatttggctttcattggataaatccatgtgaaccgtgtgtgatcatcaatgaagtgaatgataataattataaatggtcaaacaattaaacggtcaaatgttcaaaaattagaataataataaatttaaggaatgacaaaaagatatggtcaccacaacacaatccattggccattggttgaagaaaatagagtgcaaaccagctcattcttgttttttgatgctcttcttaaaacttatgcacatgcctactttcttatttctgcaggcctatctttatactctcattgagaaaagtttcaaaaagaagaagttataataagcaaagccaactcatgatttccaattggaatttgtatggatacacactgcaggggaccactttggtgtatatattattttgtcaacttgaacttggatagggaactcttcaagcccaactaattagaatgatcccccacacttttttcatttcatttactatattttccttggaaatagcatggtcagctagatttagcagaagttttggaggtaggaaaaaataaaaagactagaactgctcccaaattgactagaagttttgtttgctttttcacttgttaaattgaacttgttaatttacagttgaaaccgcaactatcactgtgaggttggtcagaaagtaataattagataattcgtacttgttaatgtaattctaatggaattaatatcacataatatctgtaagatgcaaaccataaaaacagtcctagttttcaaaaaccatgagtgccaactcagtcaattatgtgggttgtgttgtttttaattgtacaatctatctgtcctcttttattatctgaaattatatgcaaggggcttctataactggctgtacttattttatttatttattttttttaattttaaggttagacctaaattttattcaacaaggaaaaaaatgaagtcaatacatctttctaataagtcaaaagagctaagcactaaacttgtcttcaatgtcacaaaggagaaccgcctcactatagtaagaactaaaagggaaatgtttaaggttttttttaagcaagagaaatggtaagtcttttattctagttttggagaatattttcatagaattagttcttgattgaaacaagtatgttttaagaactaaatattgtctatagataatgggtgagtctgatcacttaaacagagagagaaaattagttcacgaataatttatatatacataagtttatatacatttattgtatttaaatacctaagttttaattttgatgatataaataatcaatatttaattttgttgcatgttagtttttaggataatttgacaaatatacaaaaataataaaaaaaattacaaaaatacagttttatggaattttaaacattttacgattttttatattatttaaatgttattttcatgttacttttatgtaattttcttattgtttttatgaaaaactgtaaaaatataaaaaaaaaaaataatatatatatatttaaacgtagaaatgtaattttttaaaaagaaaaaaaaataagtgtcttatgtaattattcttaatttttatggttaacatgtgtatttaagtataagttaacaattatatttcttacaaaaaaaaaaataaagtataaccattatataaacttaaaccctaaccttttccgtacgtaatggaaaaaaaaaaaacaaaataacaataaaaattaaataacaggtatttaaaacttgtatttgtagggtccaatattccactagcttatcaatattaatatgagctgacttatcaatattaacatgagctgcaagacttttgctaacaatgaaggacaatggcagtggtgaaactcaaattaaaacattgccatcaaacactaatgatattcaaacatcactaaaatgtgaactgacattaaattgcatcatataatagtgttggacacataattggtgcccttagagaagagtggttaaaatactactcaatttacatttattttatataatatataaataaaatagcgtctaatttataataggcttctcttaattctgtgtgttttaaggatttacgcatgccctttacagtggaagacatgatatgctgtctttaaaatataaagaacattatataatgcctaaagaacttttatgcaaatattccacaagaccacacatgaaagccatacttagtattactattactttaagaaaggaaaagaaatttatttgttcattgtttgtatggcaagtgctaaaaaattctcttgacattttttttaaatggttgacaataatacgtataacatataaactcaaacaaaatttcctgtggtgatgcttttgacagattttactattgagttgttattgaagctcctatgttctgtgctacataatcaaaattacaagaggtgactaaaggaacttgagggtaactacaaaagtaaagggaagagaaaattgattgattcaagattagaactagagattagaatatcgggcagagccagaacctttccttcgccgccgtcgcttctgccgaattctccagaagctcaagaataacagaagacctacattgacaagagaactgatgatcaaacgaggatctactacatatatttctctcaccaaaattagaagtacaaagtcatcaatgactaaccaattactgcaatcagagcagggacaatccaatgactagtagctaatacaggcatatcaagctgcaaaggttaaggtataagcattattcaacatgaaagaatggagaaaaaatttatctcaggaaccaattgtaatgatttcttttacctcctctccgtaaaacaaacccaagtacttgtttcccaaagaatcgcttttactttttacattaacttttcgacgctttgaagtagaactgcgaatggaagaatttagacctctccccaagtcaatgacaggataacctggtaatcttctgtttcttcccctaacctgcaaattgtagcctttggtcccccatatttcaaatctggaatcaatcccacagattaattcctttcctacaactgctgagtaggcagagaaattcacatcagttctacgagatggtaattggttgtcctcctcatataaggcagaatcttgtttagctgagtttgagaaaagcacaggatctctgatatttccactagtgaaatctaatatttttctcaggagccaataacaattagtcaccatatgactgctgtccaaacagttagagtctccatagactgcaatacgaccttcattcgcctctataagaccgaggatgggaaagtcaacctgcattcatcatatctatactcatgaattttttttccatatttacattttgtggttcgcaagctataaattacactattataagtttaggcctaatttaaattaagatgtcacggttggatttttttattttcttttacaagtttagaaccaaaattaaatagtgcttcttcattgttaattcatattgagattttaagattgttttatttgatagatgaaattcctcagtagcaagcaggtaagttaataatccatccttcgaactttcaaaatttgaataaataaataaacaattctaatatcacttgcctacaccttcattgtctatcaactttatttgagttggcattaactaaatgtctacttaccacggccatgtcagaagtccgcaaaacattttgagtggccccactctccgagctatccatgaaagaaaagctgtgcacatggccacctctgggaaatctcacaatgtctgttccagatgcatatctactctgttcaccgtcaatggagaaatcaccattcagaattttatcaccaaaagcaatcccaaatggagccaaaaggtcattcaatgctggaatattagcacctccagtaataggagtccaccaacttcgagtattatcatcaaaaaatctcatcttcaccattgtgtcaacattataccattcaccaaatacagccaatcccaagcctgtattaataacatcatctctaagcttttcaatctcctctgggaagtactcgtcctcgagatctaccaaaagaagtgttccatattggtgagcatcaaagcacgtaagaggcgagccaagggtttctacataatagccagcatcccttaacatgttgaacataatgtggaaatttgtatgtaggtgatctccatgccaatcgagaatatcattacgaacatccaaagagtctcttggaatatagccaggaggatatttaatattgtgaaactggtcccacaaaattcgttttgatcttggtggtgttggaactacttttaacttcagttgaagcacacaggtactactacggagctccttctctcctggagctggaggactaaacactctaaatgtcacatttccctctatttctccagaaaattgtgtgccttcttccttaatttgaatgtgaagtgctaaataaccagtccaaggccagattacttctgaataagtgaaatggatgctaagaagattaccttcttcgtcagaaggatgccatgttggtgagctttctatgtatccagttacacccattccattgagaatggtagcattaaaaataacaggcatggcacctgcataaaggggttgacgacaaaatggccacgaataagggcagtccgtatagtcaagcacactaggaaagatgcttgcacggggttggtagctcttaagaatttcataggatgctaacctggtgaggaagtaagagtattaagaccaaaacaagatacatgagaaattctgataataacaatacaagaccaggatgccaataaagttgacatttcaatctagaaaagaaaaataagcatacaaactgaagagtctaattaagaaattaacaaagaaaacttacaaatcaactctgcctgcaccctgttcatacatatttggaccagcaagctttgcagctccctcaacaagggcttgtttcatgcttgcaggattcaaaatatccttccgattgctttcgggtatgacactaacaagcaaacaaaccataccagcaaccacaggacttgccacactagtaccagacaagcttttacaacctgtactgatcttggatcccataatgtctcgtccataagcaaccacatctggcttcacccggccataactacacatagttaacacttcggtaagtataatgacaaagtatgaaaaaaaaaattgcagaaaaatttagctgtgtcaagaagatgacaactacccgtgaggaagttcccatgtgctcattcctcttgaagaaaaagaagcaatgtgatcactgtagtcaatgccaccaacaccaattacatcgctctggtctgctggattgttcagagttccataaagtggcccatcatttccaattgccgaaaccataattatattatttgctgttatttcccaaacctggtagaaaaataaattaaatacaattttgtatgaagacagagaaaaataatcagtagataaaagggagcaataccttctccacaaatgggagatccaaataatcaggtccacctatgctcaaatttaacacatccatattcattgcaatggcatagttgaatgcatcaaggaaccacgatgtgtatgatacctgcaattagctgaatacaaactctcataatcttactaaaactctatcgactaaatcaggtatcattaaagaaaaacgttatcaaaccaaagtcataagcaggatacaaacttcttcaaaggttgtcaatggctcctatttttccttttttactctgagcttcaaaacaactacttttgttgattaactaccagatacaagatgcagaaaaagacttaaggaaatttaaattgcagtaataaatcaacaatataaagtggaaatctatattgcaacaacgcacgttgtaaatcaaacatttcaacaaggaaccagctattgagtagaagctacaaagtgaaacaaagaagcactttgtttcgctttcaagtacaaaaagcaattgttggacaatatcgtatgtaaatttgcctccagtgcccaatatgcattacctgtgcatctgtaaacacgcggaaagcatagatctcagtatcaggagcaaagccaagacactctgcatctctaccagcaacaacaccagcaacaaatgtcccatgcccaagattgtcatttagggtattctcattggtccagtttgttcgctcctgaaaaagctcaaaagttaaaaccaacacaactgacagtaacacagggtaaaaacaacatttgttcaagtggaatataactgatactgcacacaataagcatagcgatcacaagcacagatggacctgtcctctcatgccaaaaatactgattttcatcaccttattaatatgatgactactaagctttatcatataacaactatacataaaaaagaagataaagtaagaagtaaataaatttttacaagagaagattaaactatgagcagcactgctaccatagaataccttgatgttccgaaaatggggatgattatctcgaattccagtgtcaaatacagccattttgacttttgaaccggtataccctttcgcccaaagagcatcagctccaaataatgaagtaacttgagatctctgcaaaaattgatggaaaaagtgtttgagtgagtgagttaaattaaggcaataatttcctttggcctaatccctattcatcacattttatgacaatattttcattcagggaaaaattggtaataacaaagcgaggtgcaatcgtatttattatttttgctgacacttttaatgtccagttaatgattaacatcaactttttcttaatgcttatacaagaacttgtattaaaattttcagttttattaattcaagagtgctgggctgtactcatgtgataataaaattttacacacattgcaggcttctacaaccattgataaatcagagaaaacaaccgaacaaacccattggtttcctcttttttcttaatgttattatacataaaagattgtatatatctctacgtttaaagataaatcacggcatagaataattaagaaagaaagacaacatgaaaaataatagaaaagaaaataaagaatcagaaaattttctaaccccgccaaacgaaatgcagaatcatatacagttgagacaaatatccttacctccgataacagctcccttcgcaagctaaacgaagaattactcatctctgcgccatgttcgttctcagcttcggaaaacgacatcgacgtgaaaatcttcccaggccgcttgttttcatcaatgaaacgcccatctctactctcttccttgagcaaaccccttgtgtaactggcatccacattcacatccttaaccatccccaatctctcaagttccccaatcaccccttccctggcagactcctcgatccaaaccaatccgaaatcggtcggataccgagacgcgggattccggcgctcgatccaaccccatcccggcgatcggaggcctagttgcagatagtcatggtgagcctcggccctgttgtactcgaggaagcgaacgatgtagttgttgcggttgttgatctgggagtgagtggaattaaggattacagtatggttatgagaattgggagatgagaaacggaggagaaagaaggagaggatgagagggagtgagatggagaagaagaggaaggttcgaggagagagaacgtccatggcgatggagatggtggtgatatgctaaaacttctctcatttggcgggaaaattcctaagaagagaatagaacagagtgaaagggggaacaaagtagaaacggtagtgaggtcaaatctggtaattgcagagttcttcttcttccggttagtttttcttcttcttcttcctttattttatttaattttgtttattttctatctcggagatttggcaaatattgaataattattttttattttgaagaaattaaattaattaattaattatatttttttttctaaaaaaaaataaaattaattatatttttatttttgtaacaattaaatgaaatttagaagctttttttggtttagtcgggtattaccgttgctttgtagaagaattttctgaaatttgcacacctttaatagaaattaactaagacaaattagcagtttgtgcgatcaataagtgcaaagctagttttcaagaattgaagtagcgactaattatagttctattgttgattttacgatcagatcagaaaaatgtttgtagtttattgtgatgcctcccgataagatctggagtgtgctctgatataagttgtcaaggtcattgcttatatttctcgatacatgaaaaaagtatgagcaatactacctaactcatgatttaagaattgtcgcagtggtgtttacatttattatatggcagcattatttccacgaagagaaatatgaagtctacactgaccacaagagtctcagatatttttttactaaaaaagattttgaatatgaggcgaagacggtgattagaattagttaaaaaaattgattgtgagattctctatcatcttggaaaagctaatgtagtagcagatgctttaagtaagaaaggtcccaagcaagttttcaacatgaagatgatcttttctcagctagcatccaaaatggttagggctggtattgagtttgtgtttggcaaacttagcaatttgacactttagtataatctattggaaaggattagaaatggtaaatactattttgaaccctgtattttataaaagttatcaattggaccatctgttttgttaaatgacaattcagaccctgtatttttaaaaatgttacaaaataaaccttaagcttaatttttatcaaattaaaacttaataataatcaaacctgaagtgttatgacaagaatgattatatttttcacaatcgttcacgctagaaactaatttcaagttggttatattaagaaaaaaattgacgaaaattgaattcggggtttattttgtactattatgaaaaatacagggcctcaattatcatttaacaaaatagaaggtccaatctgtaacttttacaaaacataaggtccaaaataacatttatccgattagaattgctcaaattacagatcctaagttagttaagtttcgggaagaagtcttagctggtcgagctaaagacttctcagtctcaatcagtggaatgctttagtataaggatgtggtagaatatgtgtaactccctaattaaaaaaatgtcacatatcatgattacattatgctaatctcgttaaccgaggtcaagtaagccaagtgaattaaaacataataactataattaaaaacagcttgtaataacttttaatttaaactaaaatattaatagaattttgggatcccgtaaatcttttataaaatattacaagttgtttatatgaaagccgacctacgtggaaaaatgagatttctatacaatcttcctattggacccaaccctcacggtctagcttggccaaaacatgtacaattcatcatcaaaaccctcaaactcatggctggcctaataactgctttatattacctaacccgtgagctacgacccaacaagaaagcattaactaacctaaatataacatatagcatacatatcacatttaatatgtcactgcatagataactgtgccgccacactaatataacacgccaccgcgcaaataatgatgccaccacatccgaagtctatattgtgtagacgccacgtgttacactcacacgtctatttgctatataaagccttatcagggtttctcttagttttggtcaccgagtctaacctagttatacattgattgcacaactcttatcatacatgcataattcatacattacgctctcacaaaaatttatcctgatggtatttattaggtctaatccagatatggcttacacacaattcttaatatatatatatacatacaattcaatttacacatgctcaaatatagaaactttagaataataaccctaactcacatttatatccaaccatccacttaatatataagtgtgccactgcgctatgctataagtgcagtgttcactttcttacctgaattcctaagtatgaggagaatttcaaattcacaagtgatcttgagcaagcatcgattatcctagtcacaaccctaggtgtaaaaacacaatagggttaatctccaatctcataacttaatattcacggaccaagtaataaagctcgtaacaagcttctaacgatataaagaacgttcaaaacagagtttggagtcaaaaattacgactaaaacaaaatgagaaaaatcaaactgtcgcctcagagtgccaagactaattgtcgccgcggccaaacatgtggtcttcgcaaccaaactagggaggggctatcccttgttttaggtaaagcctcatcgcgaccaccataagtctagtcgcggtgattgggccaaaacactcaaattttgaacctcaaacatgcacgaaatcaaatcaaacttcacataagtcatatcaaccgaattctcataccaaaatagagtgtttgcaagcacactcacaacaataataacatgcttaaaacacccacataactaaactcaaatgtcctataattttataaacaaagctgagaaaatcaagcacaattcttagctcaaatataacatttgacagcaaaaatcacaactaagaaaaatgacctaaaattcatatttcaaacctaatcaacatactacaacaagacctaatcttatcaacacataattcaattttaatatcattaggaaagaacacatgcaaactcaactcaagagattaaattcagaatttaaagacaacaaaaagtaggggtgtacgtcggtcggtttggttagtttacgttacattttatttaacccaatgtaaagacctggttataaaaatctaagtgcaacccgccgaattaagaaaaaaaagtttcaactcgcccaatgaattggtcagtttagtcaggttaacccgtccaaaccgaacactaatgtttatttttttcacatttagttattatattttagttattgtgataatgagataaatataaaaattgaatttaaagttcaaatcatccgccataaaaaatatagtagtttgaactttctattttttataaatatgcatatatattatagggaaatttgcggcaaaagtccccaaaaagttcagtttgatacagataagtccccaacctccgaaaatagcggcaatagtcctcaaggtcatgttttttatttgtccgttggtctctaagttaacagatccgttaaacccattttaaatgccacatgtcgaaatattattggtggatgttattattttaatttaaaaataaaataaaaaataaataaataaataattaaaaaaaaattaaattttttcttttttactttttctttttctttttttttacttttttctttttctttcttctttg

SEQ ID NO: 223987 - DNA, 851 bp, Cannabis indica
gtgaagaggcgagcgttacctcgtggcgcacgagaacccattgtcgatcaacgcgaggaagagaaagtactcgtcgcaataatgatcaagagagtacatgcacaagtaaaaccgaaagttactcaaggacaaggtttgggagcaggacaaggtccgctagaagttataaccaaccagatttacgcaatcacttgaaccagaaaaaacctaatctttgccaacaactcgggttaaagcaagaggatcctatccaattaggaatagatgagttggaagatatattgaggaggtatcaagtgttggaacaaggaaagcagtctggatatgactcggatgaagaactcgagccattctatccatacatcatgaatactccattcccccaggggtttaaaaaccctcacatctcgtcatatgatgagaccacagattcggtctcacatttgaataatttaaatactataatgtgagcccgcaatgttacgaacaatctacgctatattttgttccccaccttgcttgttggagcagtgagcagctggttcaataaatttacccatcattcaatcacttcttgggaagagttgtctaaggacttcaaaaaacagttttaggccgtaagggataggcgacccgaaatgtcctcactcaccaacatagagcaacggtcgggcaagatgcttaaggcctacttaagtcgttttagcagagctgctgcgagggagaggaacctagatgatagtaccccgcttactgctctcaagcaaggatcactactgatctctccactgctggaggcgagctataagatgatctacagggtggcctagtaaaaaacattactgagttca

SEQ ID NO: 223988 - DNA, 1658 bp, Cannabis indica
tatgatatgagtttaaaaagttcactaattgaaaactatatgatgaaataggttaaggatgagtaataaaaagttaggtgcttgaaaaaattaaaaggagtgtaaattttttttattgtactctcttatacactctcatttttatatggatcagtcacatattcaatgtagacccgatcttagtctaagataaaccaatttagtacgttagactcaggttcactacaattattagggtgttcattggaccacattcaatgtttttaggtctattcaaattcgatctaattatatattaaatgttagattttactatctaatttgatctaattaatttcagtcatccaatcgatccaacattcactggatgttggattggattagttctattcattgaatatgtatttcatagatatctattagtttaatttgtgtttatctaatattttagacctaatatttttggatcagatcgagttcatccaacatttagatccaatatgtacaaaaaaatttaatgttaattttcatatgtacatatatattttatttataacaatataaaatctaattactcatcaaaactaaaactaaatgaaaatgctaattaattcgattgaatgttggatgtattggatttttgaacgccccatccaatgcccggtccgatccaattggatatttaaaataacatctaatctgatccgatcacaattagatatccaatatttagcagtcaattagaattggatcaatcgattgtcattggattgaatcaatttatgcacactacccaaaaaatattaaacatttaataaggcataagatttaacccaaacataaaagcacgttattaattgtaggatatgcatacatatggtcaattatgtttgaattttatatcacgtcacaggagatttaatctttatgtataataacttattgattttaatttttctaaactctcccattaacgaatatctatttttcttttcataaaacatactaaatttgtgttatttctaaagttttaacatttcaatagtaatatttttgtagggaaagtacctatttaacctacatcaatagctcaaaacattaaacacctcaaggtcaattttgacgtttaccttaaccttgttacatttgacttcaaaccaaaaatggcatgtgttttgtatcacacacatacacttaggaagaattgagaaaactcaaaaagcaaacacacaatagatctaagataaaaagcctaacagagcgagttccttacctcaaactcctctaatctaacctagatctggaaaactaaccaataccacactcaaatcacatattagatccaaaataagagttggggaaagagaaaccaaacagaaattgaagagcaacacattgaattaatcatggagttcacctttagaaattggggctacgtctctgtcaagaccgcctcaaagaaagcttgtgtttttcactattaacaatgaaaaaaccaccagtgtaagtctcatatttctagtcacaggtacaatctggtaaatctctctttttttctcttaatttcttccaattataataatctatcttctaaattttttcgttttcgttcggttacatgtattataagtgcacgaatgccattctctctctctctc

SEQ ID NO: 223989 - DNA, 1666 bp, Cannabis indica
aagatcttaaccacttaccttaataggttttcaccattgctagaaattcattaaatttcttaaccatttcaaatttcattgcacaaggtaaaatctatagtgatcatctaaagaatttaacgacaactcatattcacccctaaatggacatttatatatgcgaatatagatgatcctactttcaagtggatattggcatatttactctttaaagagaatgatcttgccaaaaccactatgaacaagatgcaaatgccatagatactaaaatgtggttgttttcttttgatgacttaggtctagttacaataaagatgtaaagaccgcttaactttaatttggaaattaggagataattagggtttaattatgaaactttcatattagttacgaagtatcattttacggagttttatttgaattcaaaatgcattttatatgtcatatattaaatttcgtatatttatatattttgcgcccgacaatattagaacgcggtgtttggctattagaaccacgttttagtatttttagtatagcggggcaatatagtaagacattgggaatatcgggaataattgagattttagaagtgaccaaattaccctttagtgattttatgacttttagtgtgggcaagggcattatggtctttttgtcctttagtggttatttaattgactaattaaacctgattttttatgctaaagttaagttaataaaacctaatttatttctattattttcattttattaaaaaatcaagaaaaacccacttatctctctcttgaactctctctctctctcacacacacatacacactctagagcaagtagggtttgattttgttcttcaataatttagaggtttttagcaagtttctagtgttccaatccaaggtataactttcttagactctcctttatgtttattttaagtttttcgttgagttcaagcatgttttcttgagatagttttgtagttgctgttggtgtttgatattgttttctgaagttagattatggttatttatgttgaaatgagttggttttggtggttgttataaggtttgagaaagctttgagtttaagaactcaagcttggctttttaatggtgaatcttgattctgagcttgtttagttgttttgttgcttggaatatgtttattgggatatattgaataggtttggaaggtttggttgagtttaaggttgttttgagtgagttctgaattttcgaagttttcctacactgaaccggccgatcgattcagtgggacctgtaggaaccggaattttggtttgtccccaagaaacccctcagaactggaattttggttagagaatcgatctaccggttggggcagttttggaaagcctagtttcttccatttttgcgatatttagggtattaccatgttttttatcgataggataacttttagtttcaagtttaagtccccggtaagtcatttaccgtatcactcaccaattttacgaaaaatgttatttaggggcctgtaattcgtcgagtatctgttccacacaggttggttggcacatctgaattcggaaacggggtaagattagtataatgatatgcatatgtatttacatgtttagtgtgcatgttagttaagcctgttagattacattagaaatgta

SEQ ID NO: 223990 - DNA, 2499 bp, Cannabis indica
ggcataaaacccaacagtacccataactaaactagaaatacccatttcctgaattctcaactaataataattaatcaaagatcattctttgatcctgaagtttctttttttcttttcttttttcttttttttttttttatgttggtagaaatcttgataatcttttcaaacacatccagaaatatacatacctcaagtttttttttttttttgttttattaacaaccccttggtacaaactaccaaaacaacttatagtgagtctctcattgatgatgatgattcgtcaacatctgagactcttgtgttgtttttccatcattaccactaaggtttcactccctggttcatacgctacccttactttcttgtaatcatcactatcttcatacttgattaaccactctaaaacttattttacactcaattatatagcttgctgtttaataaacaacctactttgtgatccaacattcaccaatcactcaaatacatatccattaagtttcatctcaattcttaagcttttccccattctggatgagtatgcatttccataattgcttaataaagtaatcctttcctataatttcaatggtctccttataaatcacattgactatccagtcaattataaagtactctccatcattatcgtgtcaccttaagtaattcatgtaatcttctttaccttagtgataccactattcttcttgacgttcttttatacattaccccggtaacgtccccgcttcaagcctccattgggcccttacgcccatggaatgatggctcttatacatgagtgcatcactctagttgtttcctggactgacgactggtcccgcagaccaatccaagtatttctaacgtgctttggtctgactcgtacacttcgtgggaaaattttctaaatgaaaccaccccaagtcaaggacattcaaccatggagttccttcatggtgagctaccaaaataaaatacttcttgctaacataggtagtcccacgcctacataatctcaaaattactacacaatcatcatctttaattcatctaggattccaaacaatactcataaattgtctcacctttggttatgctagatcacttctaaacaaaagattttgttatttgaatcaattagatcaatgcctccattaacgactcatgttctatattccattagggaataccaacaatttaactcatattgtcatctttttaatatgactaccctgttattgggttaccactaaataacatacatgcacagttcgttcaaatttattgatgtgtctaactaaatgtacaatgtttaatatcaatggaaattataatattgtccataaattttaacttgagtcggccgaatgatcgatattcaggtccctttgaatcataactggcacttaggtaggatccatacacttttcttctttaacctcaatctttcttaactgtggacaggttcttttcagataatctactaccccacaattaaacaaaatctggccctatattagttcaaatggcacctttttgtatcttgaacattcaggataaggtcaccatttcttatcccaccttgaccgctatcttgaccaccctggaacctttttgtcctttcccataattggtggttcatttagttttcgcttcctaatctactagtaatttggcttcatatattccaccacatttagtggtacaacaggaagtgtcaagaatataagaatagacagaagatgagccaattgttctttcagatctcaggtctgtttccccttgttgtctaatcatatccttcatattagaataaacatgtttctagtaaaacaacaataaaggaatttcttccttaccgtttcccccaagcccaaatagctcgttaaccaaactattccattgcccttattgcataacttatcacacatttagtccacatcttctaaccatttaaaactcagactgatatcaatatcaatatgcatataccatacacatattcttatcacaatcgtcactatgctacttttgcaacatactttataatagcctaggcaggtaatccaatagcaaataatataaatacttactatataccataagtcgacctttcctcgcagcaaatgtacatattcgaccagtcttcacgacctttaaaatcatggttgctctgataccaagttgtaacgccataatctatagggacgccacgtgtgtaattttataaactagtttaatactaattggaataattaattataaaaaaatcgtgaaaatattaaaaacttgactaaaacaaaatactaaaaaatagacattataacgacataaaatttgtgttccggggatccctgttataaaaagttttactaaagaaatatatacgacaaccatttaaacacaaaataaaatacacagcaactcagcacgcaggccggtgaggtcaatatgtacattgctggagaggactgtcacctcatggttgatcta

SEQ ID NO: 223991 - DNA, 1165 bp, Cannabis indica
ttgtgtaaatgtttaagcatgttcatatatatgagattgaatatatgactgttatattgattattattttgttcacttttcttgctgagtctctgtgagtcatgggtgctatatggtgcaggtaaagggaaggccaaagttgagcagccatgagtttgaggtcgtagcagcaatgcacatatcagccacggtgtcacgtcccagtgaacatgatgtttctttttgattgtattttgaaatgtaaagttatgttgtaagatcacttttaaaccagattataaatattttagaaacaggggaccctgagattaatagtatttatcttttataaaaagaagctttatatgtttgtcttaaattagcaaatttttaattaaccacacttttggtataatcttaagaattaaatggaagaaattttataaaagcacacacacgtagcgtccctgttggacagggcgttacaagatcagtaggatcaatacccttagtttcatcttcttcatcgataggatcttcatgaacacatttgtcatgttgattgtcattcacatgacgattggtcgcctcaataggatctccattgatccatgttcttgattgagtgttgggatcagcttcgtccatcggagggtccttgtagtgaagacaagatttggtttgggtgagtaccatgattaccgtatgtaatcgtcagaggtatcaccactttctttaactctcaccaaaagcacccaaatatttatgagttttttagaaataaataatttaaatgtaagagccaatgaataataatttagaaataaaagaatagctacactcaaggtttttatgtgattgggacgttaacaagccttagtcacaattcaatattattaagtttagactagaaaagcctatgagattacaagaaggtatgagcactctatgtttttcctaacaactgagtaaagaatttctaacccttttgtagggttcattgtacatttatagtacataaaggtcatactagttaccatcttttctctaatgggatgtttacaaataatatattaactttgaatttatctggtgaagcctaatccatgaggtgccttgtatactgacgtagatgccacatcacgatgccaattgttaatattgtacgtgtcatatcatcgtggga

SEQ ID NO: 223992 - DNA, 1337 bp, Cannabis indica
aacaaaagaatggaataaaaattgtttcctttctaattcattcaattttattacccccaaccaaataccaccttagtccatgggggatctactctacggtggtccactttggatgcatggctttgataccacttgatacaaccttaggtagaactcacccccaaaagctagcctaagggaggaagtacccaagcagttatatactaccaaccaatcgcttacttggtcaatgtggatcctaacataaatcagttcaaaattgtacctttccatagtttttttattattaaaaaattataaatatgaatggataagaccccagtacacaacacttatgcttacatcaaaagtagtcctgatgacgtagacatccgtgtttgacacgtggcaagaaagaaaacatcctggagttgagtaatctgggatcatagcaagtcgacctgggaggggtccctagccctgtgcctaggttgactctgggttaatatttgccctccaagtcaactttacacttgtgtggagttgacttggtgacgtgaaccaagcccgtttttctcgaaattatcaggtggatatcaattttgaaaatcttggacaattgtttctgttcttcaagcatttccactaagagtaggagtttgaattcccattcactgttgaatagtggaattcgaaattctaagtataaaaggagaagagaaaagatgaatattttttcttatcatttatcttctccttttcaacttaaaatttatgactccttgagtggtttcctttgagttgagatactgtgaaatcatgccgacattgaaacgtcaacatttacaatagatctttggttgttgtcttagcattgactctcttgtcacactgtatgtttatgtgaatatagatgcagtttttatcttcttttaggttgtagtgttgaagttctttagcattccctcggttgtgtttcagtgaagttggtcttgttcattttctcggttggatagcagaggaggcctccgtcaactccttaactttacagagtaggaggccttcaacatcctctcgactttccagcgaacgaggccttcaacatcccctcggctttgcagcggaggagacctttatcctctcctcagctttacggcggaagaggtcttcgtcatctcctcggcttcacagcgaagaatttcttcttggcgactgtcaacgatgtgttgtagcattcgctggttgttctttggtcaattgaggatgtgaccaactcttgaattaatatgcccaagataagggtgatgttttcccagtctcgagtgcaccttagaatgattgcaagtgcagtctccatt

SEQ ID NO: 223993 - DNA, 1088 bp, Cannabis indica
agaatcaagtggagaattaatttccagcaattgcacttttgatgaactagtgaaaataatgatggaagaactcaaatgcaaccctaaaacaacacaaatacaactgaaataccaactgaaagaaggatgccaaccactacatataaaggatgacaaaagtttgttgttttacataaagctattaagcaaagagactgatttcacacggtacccattgtgtgtgaacaaaatcagcaacacagcaacacctaaccaaacaatggtgtgcaacaatatgatgatggcaacatatgacaacaactcagcacaggcagatgtgcagcaacctggaaacaacccaccaacaacttccaaacaactatctgcacacacaattggatcagttcaagatgatacattttttctcgagacagggattgtaacatcaaaatcaaccatccaacaaccagaaaacaacaacgaaaaaactccagcagtagatgaatattttgacttcaccgactgcgcaaagcttgtggctgtaaaaatggtacaacaacttgaaaacaaccagaaagaagaagaagaagtcgaccacacagaaatgattatcatcaatgacaaatgacatgaaataatagaaaatagacaaatttacaagaagaaagatacattgataagtaccctatgctactttgcaatgaagaaaacattttaatacaaagtagtgaaatcttgcaccaaagaatacaacatagtttgttaggacacaaactgcaaatggagtttacagccttccaaaaataggaacacagaaacattcataataaggagttatcaagaagaacacacatgtgtggttccaataagaattggagatcaacgacaagcaacagcaaagttgatagcagattttgtaaaaccaaagttcttaaacttgaaaacaaagtgcagtccaacagatataaagggagaaataaaagacaaatacgaaataaagatgaattacatgaaagcatggcgtaataaagagggagcacaaagccagctacatggaaatgctaaagaatcttacaatctctagctaagatacctgtacatgctacaga

SEQ ID NO: 223994 - DNA, 1838 bp, Cannabis indica
tttattgtaaaaaaatttataattgggctgagatacaaaattaccttaagtttacaaattattttagtaaatgtcaattttttaaaaaaaaattaacaaaatggtcaaatatattgaattagctaataaaaattataaaaatacatttactacatattaatttttttacaaaaattatataataataaattaagttatataaattttttagttttgcatattgatatattgtaacaaaaatgaataaatctattagatcataaatatatacagcaatatttgatatatcgtatcactaaaaattaatatacagttgtaataaaattatataccacaaagaaattataacaatattaaacctatagtatattaatactcaaaatatatatatcatcctaacaaaattatatgtaccactattaaaatatatataccataccaataaatttatatataataaaatagaaactaaacattatcttaaataaatgatatactataaacaacaaaacatataccgtacaacaaaatatatatacctacaataaaaaaataaaataatattatataatattattaaaaaaaattgtacataccatattaacaaatttatatacaaccataaaataattataccatacttacaaaattatataccatctttatatataataaaataaaaactaaacataatataaaataaaatgatatatatcccattctttgaactatttcaagttgacggtgaaagttttcaaactttccgatactgaagcttttagtgaacaagtttgcagcttgctcatttgtctttagttgtttcattacaatctcgtcttgtagaactttctctcaaagaaaattacactgcagttccacgtgtttaatccttgcatgaaagagtggatgttttgccaaacgaaatggttattggttgtcacaatacaacgatattgcataatctattagtcggtggaaatctttcattagttgtaacaaccgagtactctcttgagttgtcattgatgttgatcaatattctgcttcggttgttgacaaagacactgtcggttgtcttttactacaccaagaaatcgttctagatccaagcataaacatataccttgttggttttatggtattaaagtatatacaaatcaaaataaaagtatttgattatcattgtaccatatcattaggatcaccatatgtttatacattatatttgaaagtaaataaacaaaaatatcgtttaccccttgaagcctattaaggtatcctcaagtcttttcgtatgttgtatacttagttgatgtcaaaatactcacactatagtcttctaaatcttccaccacacacaaggattagtgtgggctagtaggataaagtgtatacaaagttcttattgaaattctcaacacatgagcaagaactattctttagtgatgatgaagagaaaagattgatcagattaatcttttttaggcttactaaaaattaattacctttttttttagtttttttttttttttttgttaatacgatatatgtatataaaaaccaataaaggctttatttaattacttatttaaattcaaatcatttattaaatcatatttaattatttgaataaataatttgttatagatatttatttcctatatttgactgcggaaatctctcaactaccttgagagaatatcttaactaacaaaaatatccataactacttttcaaattcaaatttaaataaatatttatcttttaaattaattaattagttaatccaaaaactaatccagtggggataatcctatatgataggcacctatcaccgt

SEQ ID NO: 223995 - DNA, 1302 bp, Cannabis indica
attaagtaagctgaagttgcaataagaaatttaaggtatgaaacataacgaaagtacccacaaacaatcctttaaataagcctttaaatcactttaaatgcatctctttcaaccaaaacagtggataaagcatgagactttcacagctaataagtagtaactcagaaccagtaatgcataaggaaataaccacaaacaatctggagactatgattagagtttggtcaactactactcaatgtattagcctactttctcctttcctagctttttagtgaatcagtatgcaatattattcaagttacacgtgtttagagagattttctgagaactccacaaaatctttctcttcaaaggctaaaatttcccaaaagaaaagctctcaaaacaggaaaataagatcctgttaatccacaactatgcatacatatacatgtacacatgattcatatgtatacctcgttgcccagaagaaaggcagtgctcttcttgaaagggtgttgatttacagccatagctccatcagtgatctccacgccgcatatatcacaatccttttcctgcaaaaccaaagccaaaatagataaataaaatcaattaatttcaacgaatttcctctgctacccaacaaattatttgaagagataatgaaaccccaaaagcataaataaacaaaggagagataaacataaaagaaaaagggggagggagggaccttgaggaagcggcatgcgtcgatgagggagtgaaaatgacggaatcgaacgtgggaagtggagccatggctaccaaatgagttgaagtcgcgacggccgacaagaataagctcggagaccccaaaagcggtggcgctgcgagcaagcgttccgacgttgtgcctcttggctatgttatgaaccaccacgtagctctccaccaccattgcttgctgctatgaaactaatctgagtgttgaattacacgatgaccctttctggtcattccagtttagccaaatcccgaattgagagcttcaacaatggccgcccacaacataacaaaacaagatcagatcccgctccccgctcaggtgctcagtcccgagaacttgaagttgacacctttacttgttaaattaacccaaaggcggcgtcgtttaggtatgttctttctaatctataagaagaaccgtcccacaaatactaattattattttaggctaatttagaatttttttctccttacttaaattattaaaattatcaaattttaagaatttttgtctaaattttgtaaaaaaattctaacatgaatgaaagttta

SEQ ID NO: 223996 - DNA, 1339 bp, Cannabis indica
agaaagactttcatcaagaaggagtttcagcaaaaataatttccaacacttctattctctgttaaaaaattttgactaactgctcctcatacgacaagttttttgaagttcaatattttgtaactccgtatatggatcgtatttgagtcatacttctgaaacattaaaatagatgttgtgaactctagataaagtagagagtatggctagctgataaactacctgacctaccctttccagaaactcaaacagacaattaaatatgggacttaactttccttttatccaatttccaagtttccttcattgggaacacctgaagaaagacaaaattcccaacctggaattaaatatctctatgttttggatcagtgtggcttttctgtctactttgtaaggcaaacatacgaacttgaatctttcctatggcctcactttttccttgaacttcattaggtccaaggtacctccaatcaccggctcatcccattgaatggatgatcgacatttcctattgtaaagcatatcatacggtgccaccaatagtactctgagaactatgattgtgtgaaaactcaatcagagggagatacttattccaagaacccttcaagtctaatacacacatctgtagcatatccttgggtatctgaatagttttctgaaactcaccatcagtctgaggatgaaaagctttactaaactttaatttagtacccatttctcattgaaacttgcccaaaacatggatgtaaatttaaaatctttatctgagacgatcgactttggagcaccatgaagtcaaactatctccatgacatacagatcagcttactgatccaccatatagttatcccgcactggtaaaaagtgtgctgactttgtatatctatcaacatacccagatagagtaatagaaccctacagttcttggtaatccaaccaaaaagtctatgattatttcttcccatttcaacttaggaatcttcaaaggttgaagtaaacccactagtctctgatgctctacattgacttgtagacaagtttggcattttgacacatacaccacaatatcactttcattccttggaatcagtatagggcttttaaatcttgatatctcttagtggttgccagatgtagggaatatggtgtggtatgagactcgtctagaatctcttgtctgatacctgttggatattattttaccaggatcttagatctactcacaagtacgttgattaacactcgaaatatgaactttctaaaacgatgaaataaacatatataaagtttaggaaaccttacattttgtacagcggaataatatgagtccttc

SEQ ID NO: 223997 - DNA, 1516 bp, Cannabis indica
tcgatctcttgatacattaatagcacaatacacaaattgtgctgttcaatcaatcaaaattgcagagattactgagtgtgcaagatattaagtctagcaggagatacatagatatatttaaggaagttgtagtttattcaatatagaaaaaatgtaatgaatattccatggcaggcaggaagtagttgtaatgtacaatgatattgttttaaatgaagcccttattgaggaaagggaacaggacatgaaagaaatacaattccaaattaaagaaacaaatgagattttcaaggaccttgctgttcttgtccatgaccaaggcatagttattggtaggtctttcaattaatcaactaatctatttttctgttttcctatttattataatgtcataatgtcataatattattattaataataataatatgtttgttacacatatataatcatactacagaagaagttaatacaaacttggactctgcctctattgccactgctgaagctaattctcaactggccaaggcttccaaaagtatcaaatccttatgttcttgggtaacaaatacatacatactctatatatttatagggagcaactataattacagacatatatttgtttttattagagttagtctcatattattaatgtgtaaaattaaattgttatatataagatgaatgagttactcctctcattgctaattagttttgagatagaacctcattcatcttattccaaattctaatatggtatcagagccacttatgatttagtcccacattgctaatgtgtttagcatttagagattttttttttaatttatatgtatattatagtttctgtagacttcttatttgtttttaaaaattctaaataattaacaataacgaaaacaaaattcaaaataatcaattacactctagcttaactgaaagtttgaaccctgttatgaggatattaaattattttaattcttttaaacagatggaatgtatgttgtgattataatgtttacagtcatataagaaaatttgagttataatttctctaaatgttaaaagtaaagacgtctttcaaagacaaaagtagtactctacagtagaatttttgtagatttatatgaagtaagaatgaaaatgaaactaatttggtttgatatttatgaatgttgttgcagtgtaggtggtggatggtagtggttcttgtgctggtcttggttatctttctacttgtccttatcttataataacaacagtcttttaattgaattgattccattgtatagtttgtttattgttgttatagcttgtattgtaatttgtaccattgcctttttttcattgtttggtttgttaatttcttcattacttacttaccattatttgtaactttttaaaatttaacaagttgtgtgctttggatttcaataaaagagtcaaattttgatggcctggactcaatttcattacaatgtgtgttgggctaaaactaaatacacacaaatttacc

SEQ ID NO: 223998 - DNA, 2371 bp, Cannabis indica
tcatataataaaatcaattaaaataacagtccaagtaaaggtaaccctgagaaaatttatctttataggaatcgtaactactattactgctgagattaaggaagggtgaacaaacgaacctgaagtgaaggataaaaggaggagccaaagttgctttattagccattgatttgtactatgatgactttgaagattactctagcaagtatatagtgctgtttaagacaaacagagaatgttagaagtatgaaaatgatgaatgaaaaaagctacttttaatgttaagtttttggttacttgagtataccaaaagttgaggcttttaaactgaaatcgaaaggtgtcaaatggactaataacgactatatttatggatatgagctgttatatatggcctaaacggggattaagaatcattttaatctcagagaaaatggaacaaaagaaatttcagccacaagccaaaacaaattcaacaacacaccaagaacatggacttgaagaaaactaacaacacccaaaccagcaactaaaataataaacagcagctaatttactaaggtgaaaaggcttcattatgccccatatgaaaattaatttagcaatttagtaaagtggttgatagttcacagttaagtatgaatatgaatatgattatgtaagctggaacaagaatccaattaaaaaaaccctttaaacccttataaaacatacaaaagaaatcatgtttaaaatgtaatctcacaggaagcatcaaaggttctgccacgacatatagcttctagattctctccagcatatgaacaaagtggcgatacctctacacctggtattaagatgaattgcatcagataactacaactaacttccccattcaccagctttcatattgaattaaaaaatacaaagaaatcccccaagctaaattcccatctaggatcaacaaaatggcaacgtctaacttggtgagaccactctatctactttccaatttgagtttatgcatgtacacttcgtatcatttctactaacaataaaaactaaaataattaaaagagcatcactagttgcatataaaggcactgaatgtgttaagaatccaccagcagcaactacccaacgagaatgaaggcggagaacaagaagtttagcactgtccgaagtgtcaaaagttgacccattgatatttttaccaggtgcaaactcttcttcgcgtaatacctgttttagaacaagcaattttgaagaaaaattgaattataattcagaataaaaaataaataaatcaacagaaaatgagagagaggtcgacttgccgagaggtaaatgatcgaaggagaaaattagagtaagaaaattacagcattttctttttctttgcttgaatcggtttttgtctttcctaggtgaattgaaatcaagatagagagttaaaattaaagaatataaacataccctctatgaagtaacgattgtaagagaagaattgaccgccggaggttttgaaggaaggaactcagaaaccaccggaggctgtacgaaggaactcacgggagaagagagaccacagaccaccgaagaggagaatagagaagaaaccgtctgaagaggaggtggtttggtgagatctcaccgtcatctgagagagatgcggctgtgaggctgaagcgtctgaagagaatcgcacgagagagggctgagctgagtattttgcgtttttaggctttagggattttactttttgttgcgtgagttatcaactctcactgtattttgtgtcatttttaaaagctagctaacacaatactcgagagttaataaaagacacaaaaatgaaacgtaaattttaaatttttttacttattctcgtcagtttagtttttagcgtcatatacttaaaagatgcaaataacatattataattagtgtcatttttaacgggatgtcccaattatttgaatattatttacgtcggtcaacgctatgaacagtaacagttgaccgacatgaatagtgtaatttatagtagtgtatcaagaaccaatttaccaccatacactaaacacattattatatacatatacacataaatacatatagaatacagtcatatacacttcacatatacaatacatatatacattaatcaagattaattattctaactttaaatacataatcctatactaaacaaaaaaaaaatcattagttatatatattcctaaatacactacatacaataatctataatctataactatataaaaatgaacaggttgttgagaacttagttacttccactactgttaatccatagaagtctgcaacataataagttggaatgtaaaaggcttgaataaaagggataagc

SEQ ID NO: 223999 - DNA, 1453 bp, Cannabis indica
gtaacatagggtaaatgtgtgggaagatatatgggatttaatctaaaactaataggcaataagaggatgagtatctcatatactagtaatgtgaaattctttaacatttcttgaagatggtgaatattttttcctcaccaatcgcaatcggctttttttggaattactattcatgaatcacaagcgactcttttgactcgggtattagatttagattagatactcgttaaagtagaataagatatgtgtatgttaagatgcacaagtatccatctcaaaactatttttttacatatttaattacactaaattaacatttatttgattacaaaaattttatcatgggattatggcttgtaagctactagatgtaatataaatgttataacattactcacacatgataaatatatgacaaagaaacattgttaacccaaaattttttcttggtgtcatgaacattaatgtttgatatgtgccatgaaggatgacgtcacaggttgagtagacatgagtcatagtagttaacctgggaggggaccctagccctgtgcccaggttgactctgggagcttcgggatagaagtttgcactttaataactttaatccaactcactatcttttagtattatgtaccatgaagacatggagcaacataatacaatgtctgggagctaaaattacacgaacctacaacttgaaagccgaacctagggtttccacctggtgcccacgttaacatcctcaactagagtttcaattttccgggaccgtcttagtgcaaagtggccaaaacatgcattgggacatcgacttggcataccattgacatatttgaggcatcagaatcagattaggagcaagttaatttttgagcactcggggcccgagcacccaggttgacaatctatcaatttgggcgccttccaagcattcattcaaagatctgacttttgcattgcatctatcttcataaaaaaaaaaatagggaaataagtccttctggaagaaaaacaacaaattctaggcacaaataacagggcccaagttgacaatttatcaacctgggcgacaaaaatagagttttcccaaaattctttcaagcaacatcttcgtcttcagaaaatattgagaatcaactatttccaagtaccaaacggaacttctgaaggggcaaaagagggacccatgcccaggttgacacctgagactgggcctttttccaattcaaaacagtaaaaagtactccaggcatcttcaccgtcatcagaaataacaaagattcaagtaaactcaaggagaaaaccacaaaccagagtgcctagaaacagggcccagggcccatgttgactcggtgctcggcctaatgcccaagttgacaatcaacttgggacgctgccttcaattgctcgaatgccaaatcagatgtgactattgaatttggcatggtca

SEQ ID NO: 224000 - DNA, 1345 bp, Cannabis indica
ataatttggtaatgtcaaagttcgaggagcgcatgcttcaatagatatcaaagtctggagaatatgatttagtacataaacaatcgccaaattagtaaaattgaataaaattagacaaaagtcttcttaaatccaacaatctcaatattcgagagagaatttttaacggttaaaaaagttcaaatggcataatttagtacatttcaaagtttaggaagcaaaaatcctaattatcctagatttatacacaatttgtacaatagttgtttcttaatcgtaaaatacttgcacaaatagctaccaacatagtgaaattaatctgctttcaaaaaaatgcaaaacttattattccaaaagccaccatttgtgttcataatttgaatgacaaaaagggaagaagtgattgaacctgtcagtgatagctctacgtgctccattgtaaactgaattagtcttattaatagtcacttccccatttgaagagcttccaagccctggatcctcacagtcaaagtcttggtctttagacatgtcacaaaaccctgcaatcatcatcatcatcatcataaatttgtacaaaatacctttaaagtagaagattaagtaaagcaacaacactcacaatattctcttcacttgggcagctttgattcacaaaaaagactaaattttgtaataaaagatgaaaagttgaaacccccaaaaacgaaaatgtgaacagaaaagagaaagaatcatgcaaaatgggtgaaaaaagctatgttttttattgaagagcacgcaaaggcaacaccaaaagtttacatttttctgagagaaacagatattgtggatctgatgagaatgtgaaatgaagaaagaagtgtgtgtgagcagcaatagagagtgtgggaggaagcgagattcgagggtttgaaagtcaaaggggtgagaattaaatttgattaaaaatggactacctttagcttagcttcttccatcatgtcccaatcccagatccagaataggaggaggaggagcaagtgagttgtgttgtcgtacaattccattgacaacgttgccatatgcttctttcttctgcttcttctgccccagaatttcggttatggagtttgaagccttctctctctcccttcattattcccaaggaaaatatgagatgggtctggcttgaagggcctaggaaaacatatattctcttctcactcaatttgaatattgggaatagcgacacattgtgttgtactaattttgaagaaaattatcaactttattaattgcaattattcacgattacatgaagcaattcactagaaacatcatgtaagagtacgatcagcaacaa

SEQ ID NO: 224001 - DNA, 3059 bp, Cannabis indica
caaaagaatagaagtaatcatggacattgagtaatgatactttagtttggcagttgatgacgtagttcattaaagaaccagttctatgtcccacgtgcgcaaagatactgtaagctcccaaaccatggtatgtcccagaagcttcgagggtaaatgttctctgcatttttgtaagcatgacacatggatttttatcaaagaaggtcaagaagtcactaggtttcccaagtacttcattgagtatccctagaagataagggcattaatcttgtgatgaaagcttccgtgaagggaggctccctaactactggccaagagatagactctcgcgaaccatggtcctcctctattttgtgagtagaagtctcacccatccgggagcagagactgtttactgccgctagggatgtggatctacatgaccatgccatagcgtcgcaccagtcctaggtacgacttcgactcatgagacctttatccacacgtgtcaggctacaaacctagggaccaagttttttcatgtacaattttagaggttttcccccatgacacgctatcgtgcaaagcatgcgtatccttatgtactgagctaaacaatccaacgactaggagaaaaggaaattcaaacaagaatgaccctaggatgacacgcgttcgaggcctagccagtacaaccagtatgatctgacacccttaaaagccacataggaaatacgcaacctaccaatccaatggtgggatttcatccccacggtgacctatccaacaatagcccatgcaagagaattggcctataaatatctcacagatagcacaaaaaagggatcctttttttggacctttacctttagattggacactgattcttcatcaattcaacacatttctgtaaccccactattaactcttgaatattcctactaagcttcctcttattcaagaggaaaatggtggaatagagaaaaagttcattgtatttgtatttgtataaatagcaaccgaccaatgagcctaataaaatagactcatggactaaggatagttactgtctgaattacgtaaaaatctcttgtttatgattttattatttacgccatcattactttcttaagctctaaaaatacttggttgtcaaaaaatttgttaaacagtttccaaatgaaagtgtctggaagaaggtaatcatctctaattaattgaacttgatgttcagagctgatgcagaatataacaggttttagcttcaaagctcgatctcttagatcattactctctttggcaaccttaagaagctctgttgccatcacggtataagccactttttctaagttcttagatgtgggcacaataaacttggccctagtgaattgagccatgtgtggatcatatttatcacacattcttcaacttctcttcatacaaggtacgtcagcttcaaaattcaattccttacaaccaaaaaatagctcttctaagccttaacaagacaaattaaaggtgactacaccaagaaggagcataaaatttcagctcaaaacagctcacatgaaattttattttggagtttttgaagtttaaatatggaatttaaggatttctagtgagttctagaatccttggaacaaaatacagaaaggaagaaagagaacgaaagttttgaaaaaaatctaaaattttctacatgaggagttgacgagtacttgaagaattaatgaaaatgaaataccaatgctctcaaaaaggccaaggcatgggaagcagaaagaaaagtaaaaaaaaaatagtaaaggcactcttatgtatagtaagctaaatctcttaatcttaaggcaattggaagtcttttaaattttaaattttaaatgaaaagataaatgacaagtaaaagataatcatcttttctcttttccttttacttaatgaattttgaattccctattcgaataagaataggaattcaaaatttaaaagatacaacaactcctaatgcatttaaggcttaagcaatatttaaactttaaaaagaaaaaagaaaaattataagcgaaagatcaaatcttttctcttcttctttattctttaaatttttaatggcttattccaaaaggagtaggatttaaactcaattaccctaacaccatgagaaatacatgaactttttaagttttcaaaggaaaaataaaagataagtgaaaaatgataagtttttcctcttttcccttacttataattttggaaaattctcaaacacaagagcaaggggattcaaaattctaactctgttaggaattcttgaagaacagaaacaattttccaagattgccaaaattaatgcccacctaatgttttcaagagaaataggctcgattcacgtcatcaagtcatcctcacacaagtgtgaagttgacttagggacaatgttaatccaaacaatttccctagtgatgtcgacatcaatgtttgacacgtgataagaaagataatatctcagagttaagtagtcccgagtaatattagtcgacttgggaagggtccctagccttgcgcccaagttgactttgggaactctagaatggttatttggatcccgccaagttatttccaactaactatctttcagtattatgtaccatgatgacatgaagcatccaagtctaagccctgggagcaaaaattacatgaaacaacaccttgaaaatcaaccctgggacctagggtttcacccagcgcccaagttgacaacccaactagggtttcagtttccagggctgacgtagtgtagtcgggtaaaaattttcaccgagacatgaactagacatactaaaaacatatttgagtcaacagaattagatttggaagaactttcatttttgtagcacctagaacacacaatgcatgggcagccaacgccaagttgacaatttgccaacttgggccagctctaagcatcaaattgaaaatactgactcgcgcatcttcttcatctatgtcataaaatagggagataggtgctttttggtagaagagataggccgaaccctgggggcgtaaaaacaaga

SEQ ID NO: 224002 - DNA, 1660 bp, Cannabis indica
aaagatagagaacaccaataaaatgaaattaacttctataaaataatcatttaaaatataattagtattatatttacacctaaataaacatcgcacattcacattcacacacatatatattcacattgatattcatattcacacgtatatattcagataaatatatatccacatatctattaatacattcaaatttatatttacacatatatatatatatatattaaaaaaatacatatttagagaaatttacacggtattattaacttttactttttttacaaaaatctgacagacagaatttttatttttttactgtatttttttataaatttcatactgcagtatactgtcttaagttttcactagtgttctattagtgttttactggtgttctactgttgttttaagttgttttgctttgtgttttacaggtgttttataaaaacacagtatttttgaaaaaatttccgtgtgacagtattttttgtaaaaattaattttataaatttccctatatattgactaatggtctgatgtattcactgaaataatcaattacacattctgaatttttagttaaatgaaaaagaatagttaaagagttataatttatgtctatatgtgattcaagatgatagaatggagcacatataattttttcatttttcattgttttaaacccatcaaaactcataattgattacatataaataattatataggactgtatcataattacggactacatttttctcagccatttcatcaaacacccaacacgcacaacatgctctacagtacagcaatattgttgcaaaaattatgccaaaaatgatagtaaaaaactttgcaatacaacaatagctacatttcacaagattatcaaatttttccttatcattagtagaaaaaggaaaacagtactcttttgaaaattcatttttttttttctgtttggtaaaagtgtgaaataatattaatgtggaggaatttataaatggcagggtacaaatattttttttttttcaattgattctaatttgtacatatataactacatttaaattatctaaataataatttaaaatagtgtttaatttgctataacgtgattaaaaaaaaataaaaaaagattttttcactttgaaatttaaaggcttaatttattaatgaattttaatttaaccagataattattccctcaaaataaatatatagattaaataaagaatctgaaaaaataaaataaaaattacccgaaaaaaaggggcagatttctcttttattacaccactatatgagaaaactcaaatcaaataaacataaaataaacacaaatcaaaacctaattcaaaagggaaaaaaaacataaaatttattttatagatttaaatagcatatattcattactcacattctaaaggattgaaccttttattcaaaatcggtggtcttctgctgcctagccaaatcttgcaatctaacaagtgagagtgattattgtgagagagacaaaaatgaaaactaaaaagtgtagagatttttgggcttaccgacggcttggagagtgtgctccgacgacggcttggacggcgccgatggttagatttggccaaaaaaaaactgttttggctctgagagagaggccaaagacgga

SEQ ID NO: 224003 - DNA, 1564 bp, Cannabis indica
tagtaataacaatgttatccacacacacaactaacaaaatgataccagcaattgatcttttatagaacacaaaatggtctgacttattttctaacaaactaaatttctcaacagcctgattaaatttaccaaaccaagcacaagtattttgtttcaaactatattaagatttgtgaagacgacaaacttgtcctaactctccctgagcaacaaacccaagaggttgctccaatacatctcttcctaaagatctccatgaagaaaaatattttaatatcaaattgatgcaaaggctaatgatgagtagttgccatggaaataaaaaatcgaacagatgtcaacttagctatgggagaaaaaatatcacaatagtctactctataagttgcataacccttagcgacaagacgagcctctaaacgagcaattgtggcaagacatgaaacaggaggtggagtaggtggaaaaggccgacgcctagagtacactctatgttagacccttggtttgttggacggaatcgcctaatgagcatggattttaattattcctaggtattgatcggtcgctgaagattttcccacctgatccagtgcaaagctgccctttcgggacacaacgcgatggcttctaattgctctgccacagtcagtcgttgtaaattgaagtactgatctgcacgatatgcctaatcatcgggccagtccttgaatatgcgggcagttttaatttttttttttttggctcggaactcttgccgtcttcctctagcttcgttctcatttgtaccaaatctagttgcatttggggttgacgaattctcaccaacaatctgcgtacaaggggtttgagaagtcacaaaggcttcacggatgttagtgagttcatggcgatgcgagcttgaccattcattagtgtcttcaattgttctgtaaccacaactaagctgcgatcataggattttagatgttctttcatgcttgaaatctcggcatctatagtctccattcactggaatcggtgctctgataccaaataataagatttaaattactgctattggggtaataacatataatagtataaaataataattataggaatatactgatttgagagtgaagaaaaatctaatattgatattaagtaaataagttgccacaatacccataggttccgagagcatggggtctctctaattgatgctaaaatcaatattcagatcaagcatgctcactcaaccactcaacacacatatgtgtatatatatgtataaatttatagcactcacaaagcgaaaccaaaagccaacaatcaaaacacaataaatatactaaagaaattgaccaacaaattaattatagcgagacctttcacttttcctagcacaggtgaagcgaaccaaggatctaacactctaataagaggtggatgaggtgtaggcatgtcaggagttgtgaccaaggtaagtgaataaaagactcgtcagaacatgtgtcagacacagaaaatgtgataaaataaacaaacaaatcattatcatcctcctgacgagtaggaatgg

SEQ ID NO: 224004 - DNA, 1345 bp, Cannabis indica
aacctacatatgatgttgatgacaaaatcaagaactttcttgcatgtgatggatatcagaggttcggcttctatccattttgtgaagaaatcaactgtcacaacaatgtaatttttgccacctcttcttgtgggtaaagccctaatcatgtcgattccccatagtgcaaatgggtatggaaaggtcatcatttttaactcggttggttgtactcgattatatgtgagaacgtttggcatttttcgaatctcttgacaaatccgtgtgtgtccttattgatagttaagtagtatctttgacagattatcatttgagataagctttgcaaatctgcatgatctccacagaagccttcaagaatttctctgattatttctttagcttctattggttacatacatcacaatagaagcatagaataaccgcttctgtactattttccttcgaccatcgtgtagcgagggatcaaatataagagtttgcatgcctcaattttatctgcaggaagttttttagttaatagtatttgacgattggtgtcatccatgttgtcgttgtattcatcatatcgacatcttcctcttcacatatgcttggctcgtccagtacctccaccgtgaccaagctgaacttatcgagatcaaactgagatgccattttttctagggcatctgcattagagtttttctttggaatttgttctattttaaaataatctaacttctccaagttcttccaaacattctctaagtatttggccatttttaggcctttcacttggtattctcctaagacgtgattcactattaactgcaagtcactaaagcacgtaatgcttttcacttttactgcctcgactattcttaatcctgctaacaaggcctcatactctgcctcgttatttgaagtttcaaattggaaactaagcacgtagtggaatttgaggttttctggtgacatcactattactcctacctcgagccattcttatttaaagccccatcaacaaatagtttccatgtttctacctcacttcttgttttggaatcttctcctgagtttactccttctatcaaaaagtcatctaaagcctaccctttgattgaagtcctcgggtggtaagttacttcaaattgtcctaattcaatcgaccattttattaatcttcctgaagcatcaagttttgatagtacttgtcgtaatggttgattcgttaggaccttaaaaggatgtgcttgaaaatatgactgcagattgcgagatgcatgaattaggcaaagtgtgagtttttctagaggtgggtatctcaattctgcccttaataaccttttactaacataataaa

SEQ ID NO: 224005 - DNA, 1215 bp, Cannabis indica
ttatgaaactactcgtggagacatcaggaaggcttcgccgcatccacgaaatcctctagtcgtagcggctgggtcatctcaaattggcattcgttctgccaatccccgtcgcgactaggaatattgcccgtcgcgacgggcttcacaagaaaatagcttaatatattttttcctcaacttttttatcttttgtcctctattctcctttaaacatctggggatcttaaacaagagaatcaagcgtaaaacatggtcgaaaactaccttaaaaagcgacccaaaacttagactaaaattagcctaacaaccctctaggaacaacaactagatttcatccccaatactatgcaaaacaaagactagaccaagaattggcgagccccatgtagacttgagagaagatctcaagttagcaagacttagagaggttgtctgccaagccagcctaattgaagaaccacacgctattgattgcgatgtatccatttagcagagatgcaaagtcttgagatgtatggatgaccaagagtacatcctctgatctcactatgtggtgttggattgccgtagtagagaggccaacaacctgataaggcggttcaatcaaagaactaatggaagaggccaggatctcatcaaagatccattccaaggaagactagttcatagatcacggagggtctatcagtaaactgtccaaccacgttcttcaagaggaggacagaccttgccactaaggactaacaacgacaatagccagatcctggtagccattggcctaggaggctggccagaaatatctggcactacaatgccccccattgtccaactcatggatggccaatatcacagaagtgcacctctggctagccaataaggtgaagttctatcttgggaaatccaagagcaagtcactcaaaggacaatctttaattggagaggacagggaacgggtagaaacacccaagacaaaaacaacttaaggagtgaatataatcacttcacacatatagatacattagactccaatagttagtaagatctaccccatgtcaacgcacaggccccatcagccagctaaggaggagtgggcagccaaaccctgccaagcacagggctgggcagccttgaatatatcttttcccaaggtatggtcagccaggctctaccaatccgatgctacaactcaatcaataagggccaataaactacacc

SEQ ID NO: 224006 - DNA, 2074 bp, Cannabis indica
aaaaaaaaaaaaaactaaaactggtcgggcaacagcaaaggaaaaagattaaacaaaggttaagaaatgaacttaatagaaatggcataaagagagtgaaaacctgatggagagatagttgagttagagagtgtttgaatctggtaaatatgttgaagagatcataattaaggattatatatagttttacatacttgtatatggagtaatagggtatggaagtatggagggagggattgcaagttggctactgcaaggagcgtggaatcttctcctaaatataccattgtcatccggttttgaaggaaagtcaatcctagttgataacaataatattaaattaagtggctatgattcccactctacccattctacacacttctttgttcttacttgtactaaccttcaagcaagagggaatgtgtatgagagtactctccattatcttatcatgattaatttgattataattaattcatttgttcacaatgcagtattgacgggtaataaactctctcaattctcagattacttcaacaagtttaaattttgatagaaaaacttggtaaactactattccatttatatttttaaggtgttgtccgacaatttttatcattttgcctcagtggctagtaacatatccaaaataactgcctttacataatctaaagagaaaaaaattataactaaataattaaatcaaaataaaaattaaataacaaaaaaataaaactaaaataataaaacacaaagtgtaatttctctctctccctctctcctcctcctcctccttcttcttcttctacagcagcaacttcatcttcttcatcatcatcatcttcttctttttttttcttctacaacaagaatgatcatggaggttagatgtagacaataaaggttagatatagacggtaaaaattaaatttggacaaagaaaatgttgagattttatgccttaagtaaaatcaatttcattataatcttatttactaattaataaaagattagaaatcattttatgttgcatggttcacatgattacctttattattatatgtttaataataattttgctaaattctgaacataaagttattcatgattatatgtttcaaattatttaatctcacttatcagtgcactgaatttatactgacgtgataatcaacgatatgatttatttacacttgtataagtagaatgtcatttattagcaaagtaaacttatatcaaatgtatcggctatacatcggtctggaccgatattgacagtaaaaaagatatcataaacttactgttatgtcttttctaagtcgatgtcacttagtcggtcttaagtcaattgatcctaatcctgagatagttaggttctagcttaattgtactatacgagttccttgacttgtttgttaccagcttacccgtaggactagcccatacttacatcttaggaattcagtagtacaattgagtaggagcgttaatcatagatatggaatctataacttctataactatttagaagtgacacaatagttttctttgagcttggctaaacgcgataaatgactcacgacttgtcctagcgcctggtgtgagtttttgatggtaaccagtcaccaaaaattcgatttttttagtgttttttattaaaaattcgtttttaataaaataaaagcttaaaaattccaaaaattagtataaaattatattttttaattttaaaccttaatagttttttaaataaaataggaaaatacattaattctataataacaatgtaaagaaataggaaactaaggcgtattatctttattctctaactcaatcccacaaatatagggattatcttcgtgtcttggaaacgacaagactgatctctggaatcgccaacttattgttacaacttttatgattactacgcaagtatacgcaatcaagtagtatctcacgcaagtaaggtcgaaccacggggaattggattaaatactactaaactatacttatgattctatctggtaaaacaatactttttgcaatttaaagaaaataattcagaaaattaaaa

SEQ ID NO: 224007 - DNA, 1461 bp, Cannabis indica
ccacctgttccaagaggactcaacctgagggtggccccagtacatggaccacacattcctggaagactcaacccgacgttggtctgagtacgcggacaacacgctcgaaaataactcagcgtgggaatggccggaactctgggatgagagatgaagagcccaatcgtggggggattcagcctctgggagaaggtacctacaaattggaaaactgtcacttaagacactgtctggaagaggcgcatcgacgaaacgttgaattagaatgtgaggtagctgcggtcaggaacacacagggtacaaatgctcaaaatcaacctgaacctggagtgagaagaccacgaggtagacctcatggctcacgaaccaggagataggaaaatgctcgggaagatcaacccagggaaaatgagataccccctgaaaaccaaaataaccagccagaaccctctcatgaaaatgagaatgggaggcaaccagaaactgatgaacgagaagttcctcatgaaaatgaggaaaatcttgggaatcagcctggagaacgaaggtcacctacgaggaatcaccagcattcttcccaaacccgtagagcgaggactcgtacagaccccaattgggggaaatacgacaaaccacactcagagggaaagaacagagcatgaagaagcaagtgtgacctcgaggcggtcaaggacccacagccgagcaacttgaagaggagaaatgactcaacgagataatgatcgagaaagcatgggaaccagtaaatttgcgagccactcaaagacaaagtgtatgagtaggacgcgatctgttagtaagacgaggtctatcagcaaatactcccaaccagatctacaagagcacttgaatcagaagaaacctgaccttcctcaacagctcgctccaaagtaaaaggatcccatccaattgcggataaacgagctggaggacaagttcatgagatatcaagtgggggaactagggagacaatctcaatacgactctgacgaggagcttcagcggtaccatccaaatatcatgagtaacgcttttcctttgggattaaaaacccgcatgtctcgtcatatgacggaaccactgatccagtctcgcatttgaataactttaatacaataatatgagcgagtaatgttgtattttgttccccacctcgcttgttagagcggcgagcagctggtttaacaagtttactactcaacattcgataacttcctgggagcaactgtcgagggatttcaagaatcaattccaggctgctagggatagatgaccggaagcggcctcattaaccaatataaagcagcaacccggtgagatatttaaggcatacttaagtcgctttagctcggcagtagcaagggttaggaatttggatgatagcagacaactcacagccctttaagcgggaatctctactgattcatcaaccgtaggggg

SEQ ID NO: 224008 - DNA, 1248 bp, Cannabis indica
tttctgtcacttcctttgaaaagcaaaggcttgaaataagttacacctgggatccacgggtcagtagcacaattaatgttgtgaccatccccaaccttccatcttagacctttaattaggagttctttgccccatactatgcctctccaagttagagaaggatagattccagaaccggcatccagaaaagtgagaatgcttgaagtatcttggcttgagaacacggcaaagaagggaattaggatctgaaaaaattcgccatgcttgcttagcgagtaaagcttggttgaagtgaacgaaactcttaaatcccatgccaccttctactttagattgacaaagagcattccaagttttccaattgatacctgtacccgaagagttagaccccaccagaacttattcatcatgacctcaatttgatcaatgagtgaattagatagttgaaaacaactcatggcataagttggtatcgactgtgcaactgcctttaacaacacctctttaccaccaattgagaaaagttgttcttgccaagaggaaagaaatttccaaagcttgtccttaatatcagcaaacaacaattttttatcccttcctgagtaagatggcaaccccaaatatctttcatgacatggctgtatgggcatagccatgatgtgttgaaagtgcaattgaatatgctgagaagtgtttgatgagaaggagagaactgactttgctgcatttaatctatgtcccgaggcactacagtaggtgtttaaggaccttcgtatggcttcagcaaatcgggtgttagctttgcatagaactagactgtcatccgtgaagaataggtgagaaattgcaggagctccacgagcaacacgcaaaccagataagttgccagattcttcttcaaattgaaacaatctagagagacattcagcacatattatgaacaaatatggggataaagggtctccttggcgtatgcctcgagttggtaacacttccccatgggacgaaccatttatgagaaaagagtacgaaacaatagatacgcagcggtagatcatatccactatcgtgtggtggaaacccatagcagtcatcattccttcgatgaaatgccattccaccctatcgaatgccttactcatatctaatttaatggctgagtaaccttctttacctcttttcaaatgtttaagcgaatggattaactcaaaagccaccaatactgtaacaccctaactaccttaggcg

SEQ ID NO: 224009 - DNA, 2728 bp, Cannabis indica
gtgaatatctatacttatacatattgaattgaattagaaaatctaaaattcacacttatacaagttgaactatttaataaacaagttgaattgtatatctctttacataattaataaatctcgcaataaatactttatgggacaagtcgttgaaactcgtgactcaacttgtgatgcgacctcatttaaataaggagcacaaaatttatagaattgagatatttcagcgttgttgggatattttttcaacaaaaaatcaacattttgcaataaggatcttgtagttgatcgtaatatacaataattttgtatctggacgtaatacaaggatcttgtacctcgtcgtaaatacaagaattttgtagctggtcataatacaatgatcttgtaattggtcgaaatacaagaatcttgtatctgctcgtaatacacacttagttatgtatttgctagtattacacactcaggtatgcatctgctcgaatacacttccactatgcatttgctcgtagcacacactctgccatgtatctgcttgcaaacaacatgatttgaccaagtcaaaagaaaacttctttggattttaaatataaacaattatttattcttatccaaatgttcaattgtacgtaaaatatggacattcaccacccactacttgtaacttcccactagatcgaatttagtaaccaccatcttatatcctattcatataaataggggctcactcaaaaagggtggagaaaaaaaaatataacttacagaaactctgttaaattgtaaaacacaaactagaaaactcaataaataatatggacttgtcgtggactatgtagattaaaattacaaaacctcgtaaaatatatggtgttcatatattatttttatctctttatttctttaatttattctctaattattattttcttagattaagttgacgaaaaataatgtcaacaatttaatgcatttattgaaaaaagaagtttcaagagatttaagaggaagagattcagattttatcatcttcaaaatctcaactataagatttgttaaaattaagagtctagtggaattatcgtcaaagtatgcaagaagtaactaacggatcggttaaaataagaaccaacatatttacaagaatttagaacttgagactattactgttaattttttaagattggaaaattatctaaattaaagtaaaagtaaacttttctatgtagtttttatgtttaaattgaaagtgtttctagcaagtaatggtaggacaactaaacattcaaagagtcatgattttaaatagtaaagcgtgaaaattaatggagaacagctaataaacaaaccaaccataagcagcacatctgaaacttatgatttccattaatattttttgttggtagaaaagttagccacaaaactcaaatagtaaaaaataatgatcataaatactaacaaggatacatttggatttcagtagtgtttgaaaatttgattatttaaaaatcattgtccaccaataactttataaaaatgatattggactttcttggatacatacaatactcctatctcacttgtactaataatatagcactagtttattaccccttcaaaaataaattataaataccactagttggaaaatcatgacaattttaaactttttatccaaaaatcttggggtaaatataaaataataatgttattaattacatattaataaaattaaggaagagataaaaataagattaattagtaattttctccccgaactttaacatgtaccaaatcatgcttcttaacttttttagccgttaaaaattcctctaaactattgagattgttagatttaaggatttttgtctaattttaataaaaaaattctaacatgaatgaaagttcaagggacatgatttagtacatatcaaagtttgagagggtatgatttagtagatattaaagtctgtggagcatgatttagtacataaataatcactgaaatagtaaaattgaatgaaattagataaaaatccttaaatttaacaatctctatagtacggagtgaatttttaacagtcaaaaaaattcaaggggcacaatttagtcttcaaggaaaaaattactaacctaaaaatgatattatcaacaaacaaagcatcatactctctctatttcgtaacgtatgttattaatgttaaaaaagtaaacagttaatgccttaactttgaccacaagaaacattatttctatttttgttcccaatatctctgctggtaaatgtggttgaaccaactatatatacagttgatatttgaagtatttaaaatgtgatccactgctcatttctcgtgattttagcaaatcttttgtttataaattatagtcacttaaaatcaaaatgtatatcaactatatgtgctgctgcatgcagactacatatgtttggttttcatcaatttatttatttatttatttgtttgaaaaaattgacctttgttaaaaccttcaacataatccagaaggaaaaactcaagataaaatagtaaggaatactttatcaaactcctcaaactgtccgcaccataaaaaaatatggtttgaattttttgtcagtgtgatagcagtttgttttttttttttaactttgtcacggtgcggtggcagtttgcagtttgtaattgttaatatgcacgttaaacgtcatcccatcgcatattataaaaat

SEQ ID NO: 224010 - DNA, 3751 bp, Cannabis indica
gaaatatgttaagctcatgttttgcttaatcaaatttttaataatcactactatttttcaacactagctacctaatagagtcttgtggagcttcataacttcaccaattcttaaagtaaactgactgaatccaatgaatttattagttatcactaatttagttttaatcacaataaatatattaactaaaaatacatttaatcacaataaattataatttttgtgactaatacttttagctacggaccttttagtataatttataattagttacaatctttttcattttattcacaaattttaatgtgactaaaagtaaaaaaaatttgtagtgtttttataatttttattataataaaaaaaataaaatattatattaaaaaattctaataataatattatatatagttcttcaaatttgagtaaattagtgaaagagagatcatgaaattaagaaaattgatatcactaaaacaattatgtcggtgactatgataaatttgaatattgtggggtgtgagctgttgttgttgtaaagctatttatataaatttttgtggagcttatttaataattaatagaccaatttagttaaaagaacaaaaatagaccaatttagtcacgtgttaatattatatataaaaatagaccaagcgccacgtcctataaaatcctctccactccatactttcattacaagcaataatttcctattaattttctctctctttctctttctaaaaaatattgaaatgggtagccttgactttgtcaactcaaatgacaatcttttcaaccctgaagaatttcgtaaacaagctcaccaagtagtggatttcatagccaactactatactcaaattgagtcttacccagttcttagccaagtcaaaccgggtgatatcagaaaccagttacctaatacagctccatctcaatcagaacctctccaatctattttgaaagacataaccaatgtcataatcccaggcatgacacattggcagagtcccaacttttttgcattttttccgattaacgtcagcactgctgcctttctcggggaaatgctatgcaccggtttcaattgtcccgggtttagctggcaggtatctccggccatagctgagctcgagatggtcgtcatggattggctagcgaacatgatcaatcttcccaaatcttttcttttctcgggtggtagcggtactggtggcggaatcattcagaatacgactagcgatgcaatcatcatgaccctaaatgctgcacgtgatagagtgattaagaaaattgggacggagaatatgatgaaactcgttgtctatgggtctgaccagacccattcgacatttgaaaaggtttccaaggctgtgggaataaatccgaataatatcagattaattcccacagtcatgaagaaaggtcaacctttctccatgtgtcctatcaagttaagaaaagaaatagagaatgacgtggcaaaaggattggtcccactttatttgtgtggaagtgtggggaccacatcaaccaacgctgtcgatccacttgagcaacttgctgacgtggcgacagagtatgggatgtggttccacgtggatgcagcctacgccggaagcgcgtgcatttgtcctgagtttcgacactttttcaacgggatcgagcgagttgactcagtgagtatgaacccgcacaagtggcttctgaccggcctaggctgctgttgtttgtgggttaagagatctgatttgcttgtgaaagcgatgcgagtcgaacctgagtacttaaaaaatgaatggagtagtactgagtctaactcggtggtgaacttcaaagactggcaactgggtgcaactcggagattcaactcgatacgattatggctcgtcctacgtggccacggggttgagaatcttcaaaaccacattcgatccgatgttcgaatggcaaaagattttgaattgtttgtaaaatctgacccaagatttgagattgtggtaccaagattgtttgctcttgtgtgctttaggctcatcaaccctaataacaatgattctgaagatgataatgagttgttaaaccaaaagcttcttgatttggttaactcgtctggaaagatttatgtgtctcacactatagttggtgggatatatttgttgagatttgctgtgggagccacgcttacagaagagtgtcatgttatcgccgcatggaaagtaattcaggagggagccactcaactacttaaaaattaaatattatattttttatatttataatgcttgcttgttttgttatgtaccgaataaatgtgtgttttgtatttgagtgattattaatttattagtgttgttgttgttgtctttaatgaattgggctatgattgaaaacgttgaaggaaatataattaagaaactcttatatatttatgcgtagtaaataataaaagtccttttgttattagtagttatttttttcctatagagtgattaagattataataaaaaaaataaccttcaatgtagagaggaacatctagtcaacaagttaattatttagctagaaggtatacaaaatgagcatattaatcgctacaaaataaaacgacttatataacaccaagttaattcaaaaatttagataaaactatttgagaccatctcaaaagagactcgcagtctaaatgaataatttaagctaacctacaaataaacacattaagttgaaagttgattagtgcactaaaaaaacaaaatattatgaaattttatataacaaaaaaatgtactccaccaatttttcttttctaacaagaaataaaatttaacaaaataacttatatttgaaaacttatgaataatatagtgtcgccctttattgaaactaaaaatttagtctaacttttgaatttctctacttaaggcagagaatattaaacattagaactcctacaaccacaaaagtcaatgcaaagtgaaaattagcccaccaaaattgataataataaaattataaacatttaggtattttaatgttttcttgtagtggtgttaacacttttttagaacatctccaaagagtacactaaatttggtatcacattatcatagaatttagtgtcaaaaactatttctactccaatcacaacaccaaaagttataataaaaaaatattcgttattattatattaattttttaataaaataaaaaattttaaattaattaactaaaatcaccacaattgttatatctaaataaaagtgtcacacgtaaaataaatagttcaaactttattttcggcgtgttaaatttttttaaaatttttaaaattttgcaggatgtcttaaatagctataatgtatacgaccataaaaaaatagactaaaaaagtctttcgaatgtcgaaacaggttggagtacagtagtgtaaaacttttaaagaggtacatcgatttcagtgtgttaaatttttttgaatttcttaaaattttgcgggttgtcttaaataattataacatatacgactataaaaaaaaaatagactaaaacagtccaaggggcgttgttatccacgtttctgcgaagtatgacacatgtcatttaatgaggagggattattccttccttaattgaagtatgctctgtcacgaagaggcttcctggaactgggaaacaaccaggacgaaaggatacacagaagcctactcatgctcgcctcaacctccctgtaacgcccgcatttaaatat

SEQ ID NO: 224011 - DNA, 5472 bp, Cannabis indica
tcaagaaggaacaatcttcattaatcacaaacaaatataatccaaacaaaccaaaagctaggtagcaaacctgctttttacataaaaattctctctatgtatctcttctcatgagcttttaggcttctttttttagctatttgtaatctagagtacactattttcttaatttcatgtgtaatttttgttgctgtactcgagtaattgttgaagaggcagttgtttctattgctccaaatgctgtaaatcatggcagccattatcgaaatatcaatctgttgtttcttatctctactattctacagcagccactgctgcaaacactggaaaccagtcggccatctcctaattcccagccaaacactcacgtgctgtgaaaaacaacagtcaaataatagatgggaattgctctcagctgctgtgtcacacactcggcagctggtgctgtcaagagtgatctgaaattgcacaaacttgtctcgagttacaagttgagagttgatagcttgccaaaaaataaatctgtgcttcggcatgtttagggagctccaaatacatttgatgaactcaaactgagtttgaggtaagcaactgttatataacagagaagatttaaacctgttcacaccagcccctgccttctcaattgctttctgagtgaacttgtcccttagatgacataatttcctccattaccaactagtatcactcttaagctcatagttccacaaagacttgttcttgagataaatattattgatccctttcacccaaggatgtcccttttagaggagatggcccaaatatatttagcaagaatggcttgattctatttgactccatctttgaagcctaagccaccataagcttttgggaggcacactttttcccatgatgccacatcgagtttacttctattcgcattccagccttataagaaacctctacaaagtttttcaacctcctttgtaacactatgaggtaatataaaaatgctcatccaatagtttctaagcccaagtaaaacaaagtgaataagttgagccctacccgcaaacgagagatgcctagtagcccaagtatggaatctttgcttgattttcttgattatcacgccacaatcttcagctttccattttgttggtcttagagagacccctaggtacttaagaggataagttccttcttgaagagccaattctgtcatcattgcctatttatcttcctctttgacccccaaagtaaagatgagatttgttggtgttgattgcaaggcctgaagttgcactaaattcatccaaaacctcctttatctcatgaatagagcttaagtttcctttacagaataacatcaggtcatccgcgaaacacaaatttattatcttaagattcttgcataaaggatgatacctgatcttgaattgattggctgctagcagtaatctcctggtcaagtactccattatcatgacaaattagaaaggagacaagggatcaccctgtcgtaaacccttcttgcctttgaagctcccttgcactcttccgttcatcaaaattgagtaagaggtagctttcaaacaagtcataatccacgagccaaatctggcaggcagtttaaagtcattcagaagcatttccaagaactcccaactaactgcgtcatacactttactaatgtccaccttgagagtacatcttggagatatgtttttccttttataattcttcaataggtcttaaagaatcatgacattatgagctatcgatctcccttgcacaaatgctccttgattctgattaatcaacacaggaagcacttgacagagtctggaacacaacaatttagagatccatttatacacagttgagcagcaggctataggtctaaaatccacagccttggtagggttttctgtcttaggaatgagcgttatcatagttgcatgaaattcttgaggcattgaacctgtcatgaaaaatttctccacagctttggtgaattcagctccaagtttaggccacatcatcttgaaaaaactagctccatattcatccggcgtaggggattttgaatctggagtactgaagaatgccttctttatttccttgcttgtgaacggtttcatcaagctcagttgttgctccaaattgagtctgctccccagctccacacagtcaaatctcaggttctgagtaggatttgaactagttcccatgtagccctggaagtgcactataaagtgccttaccacttcattaaagtcatctatgatctctccttgatcatttgtataagtaactatgctattttctatccttcttttttttttcttcagaaaagcatggaaataagcattgttctcatatcctttacacaaccaagtaacttgctcctctgtcttaagaaactatgatacatcttctcttgggcattaaagttcatggcagcctctttctcagcttggtggtaagacagatcagtatgctcttgagcttgcattctggtttccaaataatgatcctcggcgtcttgatacttcttcccaacatcccatactctgtctctattaaatctcttgatggtgtgtttcaatcgcattatctttaagcataaagttgtcattccctctcttttcatcggtctatactagtcttcaaggaccacttctttaaagtctgggtgctcagcccagaaattatagtacctaaaaggtttgaaccctattttctcattggtggccatcgaaacaacacacaaatagtggtcagaaatagtctcccaattatagtgagctttagctgaaggaaaactatctgtcctatcttcattcacaaatgtgtgatcaatctttgagtagattctcttatccccatcttgattatttgtccagttatatcatgatcctgtcttaagaagtttttccatgtggctttgagctagccaattagttgcatgcctgatatcattcaaagttacctctttgccacccttactatcttctgattcaaaaagagagttgaattcttgttactagccaaggtttagcagagaaattaagattgagtaatccatcccacatcccttttctttcctctattgtgttaaaaccatacaaaaaagtgatgctcatagcattcgaatggccatccattttcacataataatgaaaaaactgagggtcctctctaacaacaatcatccaagtaaaacttttcctctaaataatcaaaaaaaggttctcaacaataacagaacttgtataaaattcccaactagtgaatttcctatccatcatctctctaattctaatactctttaacttggtctccaataacccacaaacccctattttattcaaacaacacaaatcaaacactgtgttctacttctacattttattcaaacccctcacattccaacaccctatattattgttatccataggcagctaaagaaaaaacataaccagtatgctcagtagctacctgagatgctaccccatcctccttttgttcctgcaacacaatgaaggaattgctggtgttttctgcattctcttttgacattccaggttgtgttgttgtcgacagaactatagttttctttggtatctcccactcctgctgttgctgaatattgcttgctgcattgtcctttgttcccttcttctccttctgcttacttttatcctgctgttgttgttgtttttctatcttcattttcataatttcatcatgtctccaggttgctttggtgtggccatacttggagcaatgagcacacttagcaggtaaccattcgcactccacattctgatcttggagttgcccaaactcattaaaataaggaatgaatcagggtggagcatctgtgacttccatttctaccaaaattctagcgtattgcagacgagttcgatccttggtgtgttggtccaccattataggctttccaattgtgctaaccagagcacttagacttttggtaccccaatattgaagccctaggtcatgtaatctggtccacaatggaacagtgcgaaccagattcattgtgtttgaatccgcagaccaaggacggactataatcggttttcgatcgaattgaaccattcctgcctccactacctgatcttgagttgcttgatcatcattaaaccgcaccatgattaatctcatttacagtttactaacctgaataactccaagatggcccagacccttttaacaaagccttcgaatatagtaaatgggtaaattagctcccaataccttgcatataactgttgatttccagcaatttttctcttctcggacctcctctagatctacctgagcaatttttattccatctctaatcattggttttgtgaaaagaagccgttgatctcgattattagttttttccttcgtaaacgtctcccagatcctcctagctgattccgctgattgttgaacatttgaattcatcatttgctcatcttctacctcctctacccaactctgcgatcgacttttgacagatcggttcaactcctttgcttcgattagatcctgagctttgaccatctcagcaatcaaattcaatccctcagtcgaatgagcattgtcaacttcttctgtctcccctgtgattcctacaagtgcatcttcgattgggattcgagtgactggtttccgtcccacttttttctgcctcgccatggaaggagaaagcagagaaacgaaaaacttttgtttgtttgttttactaaaattaacttatatttgataaatttaaattataaatattattaaaataattaaatattaattatagtagagaatataattgaagcaataataataaaaataactctttatattaatttttaagttattttagttaaaagaaaataaacaatagcattaaagatgctcaaagtaattgaaccacagtttacatctcataatgccttcgattttctttttcttttctcagaaagtcgtcacgatgatgcttggtaaccaatccatatattaaaaaaaaatgaaaaataaaaatgaaacacgaaagataagattgataaataaatgaaaatgtgtgccaaaatattcatctttcaagtcaaagtacgtacgtaaataaatattagtggtatacaaaagaatgtcaaagacaatttttataccatttccatctacattttttttttattattattatataaattttatctttctttttgtgaagaaaaaaagtattttcgatattgtatattattaagatgataattataaatataatcaaatcttatcattttcactttgtggctcatgttactattcattcgagctcaaaataaagattttttttttttttttaattttgaatgtactgaagatactatatatgtgcaatctcttacatattcatgaattacaaagttaattaatttctatattcaaagctttcacttttcatagtaatat

SEQ ID NO: 224012 - DNA, 1364 bp, Cannabis indica
gactcaagtactaagataacaccatggctatagttggcctaaggtgaaactcagcaggactaaggtactaaggcactaaggcaacatagaaatatcgaggggcaaagagtcataatgactgaggcattagtttaacatcttcatcaaagtgacatttagaatagagggactgtatgcaagtatgaagttagcttgcgagctataccttgagagatattcctctaagagaaaatttcttcccaagttgaagtgggagcccactaattcatatgtttgaagaatctaggtacttgttcagttttggtgtgtggatccagagagaaaattacaacatatggattgtttagtgcaaagacttgcatgatttctgcaagctacatatagataatatgcatggatgtaggctgagatcaagagtgagctagtttgcggtatgttatgggtgtgatttgcgtttatgggaataatggtattgtatgggatattataagtcgaatggttcaaaaagcatatgctgatgggagatagcagattgggatgacttcaagtcttaagagtaagacttcgtgttatcaagtttgtcaaaatttagcaagtcgttagaggatgcagggttgagtttgggagatagacttgtgacacagtgtaggagaagccagagggccagagggccttttgtatgaagtcatgggtgtgtggtagtgctagagggtcaatattgagtacttcgcgaagagattgtgtgcaagagtgcacttggtgctgcattgggtgcagttggcttgcgagcctcgtccaaaagaggcatatcaaattttgtcctgcgctaagagtgtcttggtcgattgccattaggaggatggtgcgccaatgagttggcttgtgaagtttttggagggacttttctagagaaactttgcttcagtggaagcgtattctgtaggtgttgttggatacagttggttgcgagcctcacctggtgcaccatacttagtccttattaaaaagagtatgcattggacaattggcgagtgaactaccatcagatgatgtgttagcttcagagttaatgttgcaagagctacttagttaactggagggacattgtgatagactcagaggagttcatgttggagtaagtattcaagggcggagggactactccatgggtgattatgaataacgacaatggcgcaggttccttgattaactctaagagtgggcgagggagattgtcaccaagaggatgtaactataaagatagagagacaagtgtagacataggattcggaagaagcttagagtaagcttaggatttgagatcaggaagatttgcctacagttcgtcgatgagggcatcaaca

SEQ ID NO: 224013 - DNA, 1089 bp, Cannabis indica
tttcacttttagttacaagttttgttatgactaaaagtaagattttttgtagtgggatgctaaaaagatgataaaagcgatggctcaaaggtctctcttcaaagtttagcaaagtaacaaaggattcagtcttagcttcctaaaacccaatgtggaaaggagtgttgctatttttttagaaaatggaggaagatgagttggctacagagagaaccaaaaaagtagcaaggggcattggagaaatcaaggaagaagaagaagaagttgtttctaagtcccctactaaggaagcttaattagttataattgtgtgtttgttatttttaactcatgagatactgtaattgagatgagattgatcataatctcacaccactttaatggtgttaggcgtgtgagatgtggagagagagagtgtgtgtggcgtatagaagagagagaatgaaggagtgaaaaaattaattcttattttctctctcattatcgtattgtttctcttgtatcttgtactagtatattatttatgatactatgtatcatatatatagtatcataaataaacctacttaataatatatgaaaagaaatatctaatttgatttgaatttagaatttaaattaaattgtaaatatataataattaaaaaacaaaaatcaattaaattctttattttattatctttttagttaaataaattatccaataatatatttaattcaacaatgaaagataattaattatttttttaattattttaactaataaaataatcaaataaaattaacacaggtctttatatgtcactctacacgtgtggaccatgcctacacgtgtgagccatattttaaggtctaaaattaattttttaattttaccataaataagatttattatttattcttccaataaataataattaattaattcgcattaatctcgtatttcataaagagtaaaataaatattattttctctctttttaatattacttaagaataacattatatttaactaattaatatatttttatctaataaaactaaatagttaaatactatcaattataaaattcataattttataaaaat

SEQ ID NO: 224014 - DNA, 3188 bp, Cannabis indica
ttttacaaaatataagttccaaattaatattaactcttaagttttttttttttttatataaaaatctgtgtgctagtttttttcttctttttttattaagtttcttataagggctctcttgttataatctatatttgatatatttatggaagttttttctctatatttttataataatttatttgtatactatattttactaagaaaaaaaatctataaaattatgttgctgtaatatttttgtgaaataatttttattatttttctatatacttatttttttaattattcgaatttttataaaaatttatatcttcctatatattttaaaaagataagtattataagtaaccgttaaaggttgcttaaattttagtttttttttttctactaccaacgaactagttgcattaattatgttatataaattattttagttggatgacgaatcttgttacatactcgaaagatgttaatctttgttagttttttttcttttattttcatgagattgtgttttttttcttattgttgcggactacatttctaaacgaacattaataataactatttaacaaggtacgtaatctttgaattaaaaaattatttattaaaaaaataataattatattcctgatggtaactctttatttaaaaatatatttaaaatctattagtattgaattagttattatcatcatatccatcatatcactaataaaatataaaattgataatgataaatcaatttttaatgtactattctatactaataattggttatcgtaaagaagaaaaatatttcaatacggcttaacgccaacaagttcactggcttatcggtcgattgttgcttgttcgggttggtgatgcaactcgagtaggctaacttcggctcggtttaaaaaagtaaaaaatactaaattaaatattccaacaaaaaccaacaaaatattacccacattgaaccaatcaaattcaatcaaaaatattgatgttaatatcaaacctacaaagaacaatttcaacaatttcatcatatttatattcaaccaagaacaaaaattaaaactcaagatttttactatatttctcaatcttcaaacccagtaataaaaattaattaaatcccaaattgaaacaatcaatggcatttacctaaatccaaaagctccaaagttgaagcttcacaaatatatattctatatttcttcactattgttatttatcttcttgctgaaaacataaatccataagttgtaaacaactgcagcaaaataatatcagattcaatcatttgataaaaaaatcatcaaaaactaataatttaattagagtaatttgcaacctaagttaacttatttttacagataaatatttaagtttaatttttgacaataataatacttaaattatatttctgaaacttttgtatgtatcagatcgttaagtgttaagtcaatagtcacgtgcaagttcttgattgatctaagatattaaattttttatttattatttaaaattaatttaaacataccaaataagaaaatcatatgtggataatgatttgacacttaatagtcagatatctacgaaaattctaaaaatataacttaaatatgttattactttcaaacattaaacttaagtatttagtatgtgtaaccgattgttaaagttaaatatttaccccataaattactcgtttaattattagaaaatttcgattgatatttcacaccagcccatccaccgttgttctccgccatcacgttgtgtaacatcccacaggcactcgttatttttcaatcgaggctaagtagatccatgtatttgagtttaaccctaaatgggtaaaaaattcgaataaaatgtgtaaaggtttatttacctgtatcgaggaactattttttcatttaacaaaataaaaagtccaattgataatttttgcaaaatacaaaatttaaaataatatttatctgcataaaatattagttaatttatgaaaagattaaacggtaaataaatttcttaaataaaatataaaatttgtatcaaaatgctttaattggtctacatgtgagttttggccaaataattcccacaaatttggttagggaattacattattgttgtgtaacattacaattatttaaaaataaggtcacaaattattttcattaattggtgacctttggtatgaaacttttttagtttattcttttataaaaaataaaaaataaaatagggagatgacattaagggggaccggtcatatagggttgtgatattttattttttaatcattttcttggtgttgatctaaatagagtgtagtgtaggtgaagtaaaggtgaagatatataaaactaaaaaagtgatatctcaacactcttttctatgcttcatttctaaaccaaaatcattctatctctcaattcttttctttttaattgttactatgaaaaattagatactatttccctccttgaccccattttgtgacctacattcctttcatgtcacaatagaaaactccatgaagttctttggtggtctaagctctaaagatgttgtgaggccttggtttaggacctatgagccttgttataaaatgatctttggttttggatggaaggttttgaaggattttagaagcaaataagggctcgaaaaacctgtacacgctcgatctcaaaagcttgaacacgaaagaggtaaaaatcgtaatttttaacttactagtaagcatcgtagagtactgctctatatgtaaagcaacactatttattacttaaacttattttattagttttttaagttttaaattacttcttaagtgtgattatgtgaatatatattaatattatatatttaaaatgaataaaataaattaaaaattataatataagaaaaggttaaagaagttgatagatagtataatgtaaaaatttgttgtaaaataaagaaattaggattttgataatgtaatttaagaaaaaaaattaatataagggagtgctcttattaaaataatatgtaatatttttgaaaattactaaagaagaattatttgaaaaaacaacaaaaaataaaaaaaaaaaaattaaacaaaaatagcagttataaataattttaaacatgtttatagttttaagtattctatttacaaaaataatgatctttaa

SEQ ID NO: 224015 - DNA, 1404 bp, Cannabis indica
tatgcatgaaatataccttttttacataaaaataatagccaaattctaagattgttcataatgagtaattgagtaagatccaacattaaacatcttcttgttttttcatttctttttttttgaaaaagaggaggtcacttgtcttagactgggcctcaacccgatatgtatagaaaactctcacttgtggcagaggaaaaccgtaattacacgtgttttagcacaaactacacgaaaaccaacagcaaacaaaacaaagcaaacaaaaatcaagcctacaatagagttttccaatctctacatatatctaagaaagagaaatccttcgagacccatgatgctgtccaaaacttgatttttccccaaatgtcctctgtagagttctcctttccttcaaaaatactgttatttttttccatccaaactgcccacacagtagccatcaccagtgtcctccataatcttactaggtgtttgttcccaactggcttactgacaatcatttgagggaaggcataaagtaagacccgtgataaatcaaattccttgaatattcaaccacaaactcaaagagagactaaattccataaacaaatgttcaatactctctccattagcattacaacaaacacaccagccaggagaaatagctagataaggaccccttgcttgcattttatgatggacattcactttccctagcaccaccaaccactcaaagactttgacctttgtagaaatgcaacatttccacaacatcttagtccaaaacaagccactgtggttatggtttgacataaaccaactaaaagctgatttacaagagaatatacctttcgaatatggcctccaaagtctacagtcgtccaccatactgatcaagcttacatattccagttgttttaacaactcaatgagactaggaacctccctgtcctaagattccttctaaatttgaagttccaactcgaaactctgccacttctagccccttctacgaagcctaactcacttatacactcattcttagctatgaaaatcacaactaaagtcgggaatgagcacaataaggaagcatccccaagccacacatcttcccaaaacctgattcaattcccttctccaactttaaatttgaccagtgacttgaattcatcatataaatctgaaatgtctctccatagccctttcgagaaaaccgttcaccttttctagagtcccacaagttatctgcgctcccatagcggctagcaatcaccttatctcataaggtgttcaactctcatggaacctccacaaacatttcataagtattgctttatttctcatgtccaatctcccaatgcccaatcccccctcgtctcgtggtctacactcctcccaagccaacaagtgatcaccttc

SEQ ID NO: 224016 - DNA, 1786 bp, Cannabis indica
gtaaaaagaactaagataatttagctatagaataaaacagtcagtagcgtattaagttatgaaatcttaatcaatggttgctagtacgattcactgatgctcggttattggtgcaagtaatctcggttcagattactgatgtaggatgaaatctaagtgaatgtgatgtatataatggcgattatgtatgataagggccgatatgaataaagctatctttatcaaacttactgtttactataaagacctaattcatatcgtaatgatgatcaatagtagattggcctaaatccttagtaatcatgaactcatgttcatattattagtttcttttatgcactcgttaaagtttctcagagaagatgattcatacaacttctgttttgggaatctaataatgtggatagctaggaacatgatctaaaattatggaatcctaacttccctaacatatcaaatattgattccctttatatatttattatagaacttgtgtgcaaatttagataggatgaattatacttcaactagtgaattaatggtactaaaggttaaaaaagtaattagaagggtaaaacaataatttgatcaaaactaattacgtaccgacaaaaagaggtctaattactggaattgattatatgaatggaaactatagtaaaactcaataaatatacttctataattactaagacttcaattccatatttatagtagagtaatcatggaattaataaacaagattatttggttgataagactcaatcaataatctggtttattggagcttcaaattataggtttatggaccccaaattgccactttgaaatactaccaagactagggataaagaattatataatgttatttggaaaaatctattttgagttagcaaaatagtaatttttaatttctgtaataaataaataagttttcaaattaatgaaataaaaaaaaaagacaaaaaattgttcagacaaaattcatcaagacaataatcgttgaggaaaaagttatcacgatgaaagatatcatcttgtcttttgaaaggtaggcgcctaccctatagtagggtgatcctattggttttgtctttttaggttgattaattatttaattagttcaattagataaatatttgaatttgaaaagtcgtagatatttcaagttggttgagatattctctcaaagttagttgagagattccttcaataactgaattctcttataaatatttatttaaataattaaatatgatttaattaatggagaattatactactataaatagaagtgtgatttgagaaatctaaagatgattttttgcactgctattttcaaaatactaagagaagaaaaataatttttctctcactaatagttcttgctgatcatgctttgagaatttatcaagaagaaattctacacttttcgtaatagtctacactattccttgagtgtggtagatcgatttggaagactacggtgtgagtttctaatcaacttgaaaggatataacttacgaaaagtttcgaggatacctgatagtcaacaagaggtatacatatatttctttcatgtgattcatactttgatttaatgtttatacatctggagatcctttgggctattgtacgatgataattagatatataaatcttctgttgcgtacctgatttactacataaaaccaacaattagtatcaacactactacaaaaactagattttgtgttagtatgtcagaaaaatttaaaaccgacgctattaaagaactcgtgaattt

SEQ ID NO: 224017 - DNA, 2714 bp, Cannabis indica
caacataaaaataatatacaaataacaaaataacaagagtacaacataaaaatacaccaaaaaattatattctatgtaaataaaatctaaaaaactttaaaaaattgttgaaaactctacacaaaccgtatttttgtaatttttttgttgtttttgttaattattcctttaaaataaacctcctttatatcattactagttgaatatgtgtattttacatgttgcatttatttattattttattaaatcatactaaacacaatatttacttaattaatgaaaccctataattagattaacacatgttgtatttgttagcttaccatgggtttaacccatattgtatttggtaggaatttcaagcacaacacccccacttggccaatttttggctggccaactccttagtggtgcacctctggccggcaaacatggtgaacttcctccccagaacattcaggagcaagtcatccaaaggctgatctttaaccagctaggtttgggaacaggtggaaacacccaagacaacaactcaagaactgaatacaatctcttcagacagttagatccacccgactccagcaattggtgtgatttacccctgtcaatacacaggttgcatcgaccattcaggagagaacgggcggctagacattgcccagcatagggctggctggccatggccagttaccttacttagggctggtaaaattctaagggcaaaccttgacctcttcgcatggtcacatggagacatggtcggaatagaccatttcgttataatgcatgcactaaatattgatccaaacttttgatttatgcaacagaataggaggttgttagacaaagaacgcgcccaagcgctaagagatgaagtcgaaaggctgagtgcccatgaattataactgaagcattttatccactttgagtatccaaccccatgttggtacccaaacctaacaactagtggaaggtgtacatagatttcaccgacctgaataaagcatatccaaaggattgcttttcgcttccaaggattgaccagctggtagatgttacaacaggccatgagatcctgagcttcatggatgcttattaaggttacaacaaaagcaagatgcacctaccagatcaagaacacataagcttcatgatggatctaggcctatgctgctacaaaatcatgccttttggactaaaaaacacaggggccacctatcagaggcttgtgaacaaaatgtttaaagatctcattggccgcaatatggaggtgtatatggatgacatactagtcgagtctaaaaaggctggggaaacgtggaggatctagatgaatgcttcaagatccttcgagagtatcacatgaaactcaaccccctcaaatgctcagtcggagtaggctcaggtgaattgtttgacttcatagtcaatgctaggggaataaaagcaaatctggacaaggtctaagcccttttggacatgaagtcgcccacaacaatcaaagaagtataaagcctaacgggaactattgctgcactaagcagatttatgtctaaatccacgaacaaatgtgtacctttcttcaatataatcagaggaaacaaaaaattcaagtggataggagagtgtgaaaaagcattccaagagctgaagaaataattggctcaacctcctatcatatcaaaatctctggacaatgaagagttaggtgtgtacctggctatcacagaacatgatgtgagtgcagtcttaataagaaaagaagatggtatacaacatccagtatactacatcagcaaaagaccgatcgacattgaaagtcgatatccattcatggagaagctgacatacaacttattcttagcatcaagaaagctaaggtcgtacttccaagctcacccaataagggtgtacaccgaccagcgattatggtagttttttaagaacctgaagcatctgcccgactacttaagtgggccattgagcatggtcaatttgatatcacatatcaactgtgagtggccataaaaggccaagcccttgaagactttgtggttgaatgtacaagcatatcacctaaaatctctcaagattcaggagaaaagcaagagccagagaagaagcaagagcaagagtagcaggaagaacctaaaaaatcaatatggaaattgcatgttaatggaagctgcactggcgaaatattcggtgcaggcatttccctcattacggggacaacagttggacagggcaatcaagtttgggttgaaagcctccaacaatgaatatgaagccctaatcacttgcctcaggctggcgcacaaagtatgggataaccacctgaacatatatagtgactcttagctagtcgtaaatcaagtcctaggtaaatacacagctcgaggtaaaagaatgatagcctatttgagaaagatccaagacttactaaatcgactcgaaggctatacaataagacaggtccctagaaaatagaatgcaatagtagatgcacttgcccatctagcaagaaataccattgccgacaccacatacttggtggcaatacagttcttgaaagaacaaagcattaccatccctaaagaagtcgatatgttggacgacaatccaacttggatgacacctattgcagcttacctctaaactggagccttgcccaaaaacaaaaacgaggcaaagaagatgagaagaaaaacagc

SEQ ID NO: 224018 - DNA, 1028 bp, Cannabis indica
ccctttgggagttaaccaattagttctatcatcccccatactgcaaagggccaaggacactgcatctttgtgagctcgttcgatggtgctcttaggattttagagaatctctggcacttgtcacatattttgacccactccattgagtcctcggttaatgttggccaaaagtacccctattgcagtatcttttttgataggttttgcccttcgacattgttgttgaagaagccttcattcacttctatcattagccgctcagcctcatccttggtgacacaccttaagagtggcattgagaagctccatctatacattactccatcgaggattagatacctagcagcttttattcttatctcttttgcttcattcttgccttttggcaaggctctggtttggaggtaagttgcaataggtgtaatccatgttggactgtcatccaccatgtcgactgccttagggattgtaatgctgggttcctctaggaactttattggcaccatgtttgccttgctgacaatggtgttgcttgcgagacgggcaagtgcatctactgtagcattctgttctctagggatcttcttgattgtgtagccgtttagctgacttagtaagtcttttatttttctcaagtaggccaccatttttccacctcaagatgtgtattcacctaggattttattcacgactaattgagagccattgaatatgttaaggtggtcagaccgtacttcatgtgccaacttaaggctggctattaagccatcgtattaagccttgttgttctaggctttgaggctaaatttgattgctctgtgcagctacttccccctaggtgttataagttctatgcctgcaccaaacaagtggtcagtggaactagtcagtacagattctgtcaacatggagtttccacgttggttcttctagtttttgctaatgctcttgctctcgctcccgcttcttctctggctcttgtttttctcctgaatcttaagagatttcaagagatgagtttgtgcact

SEQ ID NO: 224019 - DNA, 1494 bp, Cannabis indica
tcttgtcatttattgctattattattaacttattacttaattaatttcggtactaaaaggcttatttaatagttaatgaaaatctgcgttaataggtttgactgatacttgctcactactcccattgcgtagcagatgtttgttctagtacacaacatttcatagatcaaacttcttactgcaggtgcataagaaattcttctcataacctctatctattctaaaatagttgaatactactccttgtatataagaactcaatgtttggtaggcaaacgacatcctgatttaaccgtagaaaatcactctagcaccttatcaatgtaagttgattgtaagagagctaggaatttgttcttgtggtatcttattccaagaacataagttaattcactcaaatctttcattttgaattgagtactcatccattcccttacagttaataatttcttaatgagatatcatctacataaagtatgaggaataccattgcttggtttgtcctttgttgataaacaaagagttcatcaatattttattcgaagctataggttttgacgagatctcattaaaatataagttccaagaacgagaatcttgtttaagtccacaaatagacctattaaatttacaaaaattttcttcttgtccattgaaaatgatctaagaaatggttttaagttgtgttttcattggataaatgagaagctatctagaggtgttactctaaagcaccatcgatgcttgtgtttgcttatttgtacttttttacaaaaacaactgagattttttcttcataaagctaatataataaaaccaatttatagattataaaagcctaattatgatttttgccccctgaacttggacatgtactaaatcataattcctgaactttaaaggtcgttaaaaattctccctgaattattgagattgttggatttaaagatttttgtcaaattttagtaaggaaagtctaatatgaatcaaagttcaggggcatgatttggtacatgtcaaagtttgaagggtatgattggtagatatcaaagtctgggagcataatttagtacatgtacaatcatcgaattagtaaaattgaataaaattggaaaaaaatccttaaatctaataatctcaaagctcaagagaaatttttaatggccgtatcatttggtaaaggttaagttcacgaccaaaaatcttaagggtattttttcatttttatatttctaaaacggttttttttttttttttgcatttttacggaattctacatagaaattcctattgcaactagcgctacaacctaaattgcaacaaaaaatcgtacagaaacccctattgcaactaccgctgcaaccactttagaaatccagaccgtaaatttgaaaaaaaaagttaaaaaattagtatataaagtagtttcccaaatcttaattagttattataaagtagtatatattagaatatttctaattaaggaaataaaat

SEQ ID NO: 224020 - DNA, 2319 bp, Cannabis indica
gagggattacctgtgtctgagactgagaaactcctagaagccggcacgaattctgtcaccgaggaatacaccgaggctattcctctgaggaggcaaagtgcattaggagatgtgtggtttcctcctccatccatggtaaccagagcaaagatgaagaatttactcaagggtggttacctaggggatgtcgaatgcttccttcccactcctaaccttttggcaaccagtccaagggagggttactatgcttggtcaggtgctcacactaagcagggtgctatgttacccttgcttccgtacttcaggaggattgtggatcactacgacctctgcccgtcccagtttattcctaagggcatcaagtacttgtctgccctatttatcctctacgcctcgcaaggatggggtgagccttcccctcacgacaccaactggttcttcaatctataatccatccctaagcaaagcaggttaagatatttctacttctcctaaattgaagggaattggttgaggggcaccacggactaataggtgagcaaaatagggaacttcgtggatgagtattatttcatccagggaatgaatgccgcccacattagctttcagcaggtgccatcatactgccgctctccattacactggggcttagggaaagggtcaaaaaattcgccaactgtcggaatctacacggaacatcaccctctaggccaccgaggctaatttcgtcaaatataagcttttcctagccgattttgttctaaaggctgcgaagaaggcagagtctggccaggtggtggtacccgaccaggaggatctgagcaagaagaaaaagaaggcccctgccagtgaacaggttccagttgagcatgctatcaagatttgggaacctaatagatctgtctggccgtctgccccagtagagggaaaaggaaaggcagtcctgacggagcaggaacaagaagactcttcagaggatgagactccgtccttacttgttcgggagaatgctcctgctcacgtgcagggtattttaacttatatttatttgtcccatggctttctttacattacatttgcatttaactttcttgtcttgtttatatgtagccatgtcttaaaaagtgctccaagctttgaagaagaggactggtgacagtttgggcctgactcccccgcccaagcgatctagaggtgacgaggttttgtccaaggagaagggcccgattgaaacattgatcgacctctctgaggagatggtgcctgctatggaccctccagaccaaaaggtgtccaagtcgaaaaatgccaaaggggggagctcggatgggtccggtccaaccaagtcttcttctactgttgtggtgctaagctctgaggccaaaaaggaaaggacatgctccaatactatcttgatcgatcacttcccgaggtgagcgatcaattgtttagggtagacaatgagttgtccttggagttggtgatgggcagggtcctaaaggaagcagctcgcataagtattttcttctttatttttattgtctttttaccagtacaggttttaacaattttttcatgtaggtcaatctgaggatggattatgcctactcacgagccaagtctacggctgcaaagaatctgccaccaccacaacctgcagagagaggtggatgcaaccaataagaaggtggtggacgtgagagccgagctagtgagaggtgaacaagaagctccttgctgccaacaacagggtcgaggagctgacaaaagaaattcaagatatgccctctacttcccaactcgaggcagacaacgaggccttgtccaaggaggtcgatgcgctcaatgacgagagggagagtctctgcactcttctttcaaatttaacctaggaaaagaccgacctggaagaggatgttaaggccaggcagacgagggaagaagagctctcgaaggaggtcgagaatttggaaactaccgccctgtaggtcttttatgaattctagaaggcaaacactgcaggcaattttgattacctcggagactccaagaaggcttatcttaattactgcgcgggctaggcaactagaaaaagccttggggtggccaattcctcagccccgaccgagcagaacactgaaacctcgactcctttcgtccagagtactgtgcctccagccccttcagacgtccagagtacctttcagatttttacagatgcagccattgatcttaatcgtaaaaaacacagtattggcgttgttgttctagaccaattcaataaggttaaagcagggttctccaaaccctttgttgggt

SEQ ID NO: 224021 - DNA, 1820 bp, Cannabis indica
accaaaatatgcatcaataatcatcaatttttagcaagcttttactagaacaaaaatcccaaatcaagagcttgcataaccataaaaaatatcagcatcttgacgcaaatttattcttaatataactcaagcaaatgcctttaaaatcattagaaacaattttatatctttgcaatacatacatgccaaaaacaacaagattatccccttaatccaacacacatgcaaagatgaacatattcacacatggaacataattttcaatcattttacagcagcttgcaattcaaaataaatcaattaaaatggctatctcaacacaagcacaaagaaaactaaacaaagctttgatccaagaaacaactcacacattcaatcaaagaaagaaatagcttaagagggaaaggggttcgatttttgaagaagaagaaacccagaaatttcagcaacaaattcaattagaaagtaagaaaagctacatcaaatccaagcaagaacaaagtcccaaatctccaaaactaagcttactaccaaaagcaaatcaccacaaaattaaagctagaaaaatgagttttgagagagagggaagggggttcagctgctagggctggaaaaatgcaaaaattaaaatcccatttgcttaatatttctcttttaatgactcaaaaaccaaaatgcacaattaccccattactcttagggccaaattcccattttcaagcatacaaaggcaaaaatataattctcacatggtgataacaatgattttaaaattaatgagtttttaataaattaataaatttttttatattgtttctagaatccaatttaatttatgcaaatgatagatttatttatttgaaacttataatataataatatttctataattaattaattaattttcatttgttcagtttaaaataattaaaagaattatgactctaatttatttttctcgtgttattagtagaatatagttactcatgctatgaaaattatataaaaaatgtcaaatttaagatttaatatattttatgacttaactagacaatatatatagctccaaggcttaatttaattttttttagtacaataataaaaaaatatataattctaatatatagtaataataaaatcatattatataattctatattattaatttttattaagaagtttaaaacttattcaatttaaaatctatatagaattttgaattgtttatttttttcaaacaaatttttattgtaaaagtaggtaaatatgattgtggagggaaaaattggagttttctccataatatattgtttttattgttagacttttatttgggcttacattaaattttattggttttattaaaacttgggttgattggatagttctttgctgtgttagcccatgttgttggtgatcaattgttaatgggcttagcatctgtgagtaaagtctaggtgaagcagaagtgtgggcttttctagttgactgaagcctttgatgagcaggcccagcccaactagggttttgtagctaagtcccctccctaactctataaatacatattgtctcatcacaattgtataccttttgataatcagagaaaataaactgcttctgatttagagatctagggaggaagacttagttgatagtattgcactatcaaattggagtaactgctgtggatcaatcagagataattgctatggatcaatcaggtacacatactcaattatcatatactactattgtgttctatgttatatacaaatagatcttgggttaattgttaatttattaacatgtggtatcagatt

SEQ ID NO: 224022 - DNA, 3501 bp, Cannabis indica
aaaaaaaaacataggaaagatgaaccttagaaaccatcttgatgaaaatgtgggggaaaaaaagaaaaattaagactcaagagagaaaacaggatcaaactacatgtgaaatggaaaattggtcttgtttgattatggttttagagaatttttgtgttctctttcttaatgttctaaactagtagtgacacgttagtgggtagatggaagtaaatgcaagtcagaaggctcttccttctttgattgggtcaccaatctcctccaaaaatggcaattaatgcaccctcaacaaggctaaaaacataactccactgtatacccaccttatcctacttcttctcatgcataaaagaagtaacctcagttagtgtaagaattaagaaatttctatgttttcatcattctttgtaccctcattagaaccttattcaagaaataaagggaaaaaaatcatgtagtcatacgaaaatttgacacatttagcagctatccgtctatatatatattagtccaaagtaaaaaaattctatgtctaaaacaaattatgcttttgtgaatgactgattgttgtgggctttagtctgaatgtctacaaaaaatgacagtgacctaacattacaagtgtcttgctcaattggacatgggatagtaaatgtttttcagtggagtcagagaatgggctctcttgacccacctctgcaatctatttaatctctttttgccccactcaaaataaaactgggaagtcttaaacatgaataagaaagaaaagggaaagagaaatacatactcaacaatttcaacaactacaaaatgcaaaatgattattaacaagtggtgtctaattttaaatatatacactgatcaaaatattgccacaactataaaatgattctgaattggtgattcttcagtaacatattttcccacatagtgcagtaacagacatgaaatattcaacacaattatataacttacaaattaattgcggaaagggcagtaataaaaagattaattatctaagaaccaactgcagacacaatagtacccttgcaacagtagcatattactttgtaaatttgaaggtttcccttcactaaaatcctctagaagttacttagaactaacaggcagaaatgttatgcagtgatgccacttaaatgaacaatgttaattttgtaccacagccaaaaccaggccccagaagtaagtcaaatacttaaattctccaatctaaatatcaatgagcattttgtgtcgaatgcaactttatttagcatggttctcttcttccaattttcctttttctttttgggaaagattagcatgcatctcaacaaaatgatgttgacaattataataacacaatgacatccttattaatgctatctagtaaactataaatagctaccacaagttgaataacactaattttatcagagaaagaagccttctacaatcaaaattatcctttaagacacacagggttgtcaaacaccatgggctgttttctatcttcacctccagaaagtgctgaggttaattttaaactccagctgtagttagaaataaatatgtccatgtgggcttggaatggaatcacagtagagtagttgatacatcactatccagtagagacccaaaagttgtgttatatcactttcccttcttctatctctgaatcccatcatcttagatgacaagcttaccaacttatatctccattacaaaaatatttgacacaaggcataatgcaagctgtgttgatacagttatattatatattggataagaaattaaaatgcttgtttcctaattaaaaattaaaattttaacatcattctaagattaattgcaacacttttgctagagatcaaaatattaaattaaatttgaacaatcaatttctttatgtgctataaataagatgtgtcaaaaataaattgaaaaaaaaaaaaaccagaatagagacatgtaataaattacccttgaaaccacccctcaagaatatggtcaagtggcaaaataagaagtgggtgtaattaattacccttgaaacaaggatcactagtttaaacatttacaccaacaaaggacatcaacccctgaaagaacagggataaaaactgggtaacagaaatgcagttccttccaagcctcataagtcataacattactagttacaacatcaatgaatgggaaaatttgccttatcaagcaactggcactaaccattaagattttcagcaatatcatccgtgccattggattaaacctcggatcacatttccacaaacctccaaactctttaagttttatccacctcttgctctgatttcaccatctgtgtgtagcagcttacaattttcttgcatattttcaaaatgtttcaaatccatgtcaatgaaacatacctgcaagaattaatgctcaaatactatataaaatttaagaggacaactttaaaatccaacttcataaatcactttagtttagcaatctagctaataaaggattatgcttattatcataagaatcagtatatacacaaatctttaaattcactttactgaaaatcattgcacctttctcaaagtttctcttgactgttatacatgaattcattttaaagcaagaatgcataattttcttcctttaactaggcagcctaaacctactatatttggggatcaagaaactataacaattgttgtgtaggtagtactcgggggagatttgaacctcagtccttgtggaagcaaaccacatgcctgaacacttgagctacctctctttaatagaatgcataaattttaaagttgaatgaaattacataatcccataattttggttatgagaaaaagtttttaatcaattactttttcaataaaagcaaacaaaaatataattatacacgcatagctttggtcaaaagtgtatgattgtaatggttagtgctggtgaaatataaagttaattgtttgcacaaagtgatgtaaagcatttgatgagttcacatactggtgatgtgaaatttgactttttgttgtaggcatttagaactttagttttttggtctaaagtgatacaaagaggtgtctaaagatgtacaaaatgtttgggaacattttgaggtgtttaatgtcattttggagaatttgtaatgtcctagaagcgacgcgtcgtgcgtgcatgcatgcgcgcaagcaggcaagtttgacatcgcttgctacagggcaatgtatgttgcctgctgtccatgcaactcgcattttccttccattctttttgttactggctcaatctcattggtgtcgcctattgtccccccgcaactcgcattttccttatattttgcattttttagcggcataatctcattggttgaacctaataacaatgccttgctaacctttctaaatggtttttaagggttttgagactcttttaagtggcctaaactattggtggagcctaacaatcaggcccggccctgggcat

SEQ ID NO: 224023 - DNA, 1036 bp, Cannabis indica
aaaacttatatgttaatgaaaaaagagataacttaaggaagaaaaaggtaaaaaacaaaaaaaaataataatatggaagtaaagagctcaaatacaattaaaaataaaagaaagaaaaaggcatgaaaactaaaacgaagtgaaaagatagaatgtaaaataaagataaaaacataatgaaatgtgtatgagaaagtttctcaattaatttttaattttaattaaaaaagaaaaaagaaacgttgtcacaaaagtgacatgatcggttacatcaaaactttaacttctacaaagtttaaaaataataaaaatatattataataaattttagcaatacacattaattaaattgaacaaaatgtgtaatttttcattaaaaacaagtcagtacatgacaatagaaaaatttaacagtataaaagaaaaaaaaactaaaaaaaaaaatgcatacacacttatgaatcatgatcacctaaccactgacccgattttactctgagtttgagaatcttttttcacactttgtgagttatagcaagcctgcacaacttgatagtgtgatcatgttcacgtacgactgggcagaacctctcagccttctagggccacacggcccacactcgcatatcgtttcttaaggcttgttgggcctcaataggaagaatgcaggtcaccttgggccaggctctaactaattaggattaacaacattctcttttgctttttgcttcactggcactaatttctttccctagaatccctaccagcacaaaaattcaatactgacacattttattctttagggatatcttgtttggtacacagtactggattggattaggcagactaatttgtccaatccagtgtttgggcatggcagaagtctggataactaagccaactaatctcatctgtctggaattatttatcccatccagcaaggtgggataaataatcccatgcaaatgagattttttttttatcattttttaaattttgattttattaatatattaaattttataagaatttaaat

SEQ ID NO: 224024 - DNA, 3941 bp, Cannabis indica
cttcgaccacatacaaacttgcagcatcttagtattgaatactatagaggtacaatattgtcagactggattggggactgtgcatttcttaagttaatatcaatcaggattgacaagtgcaatacttgttgtattttaccctcacttgggcagctaccatttctgaaagatctcttaattagaggatgtaatggtgtcatctcaataggtgatgagattcctcatgatgacaagggtcttcttctattcagatgtctagaagtattatttatttcagatatgttggagtggaaagattggtcatttagcagtgaagctatgcaacaaggtcaaatattcccacttctgaaaaaacttagtctgtatagatgtccaaagcttaatgttgggttaccgtgttgttatcttccatccatggaatctttggaaatctttaaatgtgaacgaatggtgggtttggtgcctagaacaggaactactcaacagacagtcgaaggcacagctccctctctcgtggagataagtatacatagctgttcagtgttggaatcgcttctagactggggatcacactccaaagtaaagagtcttacattacccaactccaaaaagctcattgagaaccataagcaatgggatctacagaggctctcgtgtttgaaatatttaaatatcagtgggtgggaagatggtacttttcctgaagacatagggatccttccgatcactctgactacacttatgatttttgattgtagtaaacttgaaagcctaaacagcaacgcctttcaagaactcacatccctctcttacttgtacattcgtaattgtgaagggttgcggtgcttgccagaagaagggctgcctacttccctatctcaattacatatagaccaatgtcctttgttaacgcaacggtgtcagaaagagaaaggagaagattggcctaagattcagtacatcacgcgagtggaagtggatggtgaacatatcaattaaattctgtgcatgcattaccaaatgctattaattcaatgtatcaataatccaaaaatcaactactttgtttcaatattcattgagatttttagtcatgttctgtgtaaggcagaaggctttatttattattcttgtatttggtatttctaaacaaacatgttcttttcctttaggaatcatcttagtagaagcattggcaaaattaacagaaagaaacatctctctttaaccaacatgttatgaattcacagcaactcagaatggtgctccagtcagtagaaaaaattttgttaaaattttaatgatcaaactccaaggaatgttctctaattgcatcataaaatgtgacaatttacaaagaaaggccccaaatggacaaattactcatctagttaaggatcaaagttacatatgaacaaacaatggaatggaacaccacaaaacgtagaggaaattacaaaagatatcaacacatttcaagctgccacacaaacactcagctatagaggaaattaaaattactacatgaaaagctgctacactcgcacatcacagctccgacaaaatggcgggaatgtaatgggacagctcggcagttaacgattgaaacccattcacaagctgtgtgtggaattcttggtcttcctctccgatcaatctaaaatgtacacggatggcacgcttacaaacagccatgaattcgaggagcgcagcaatgagctgttgtagttcctgagaccgcagcctcgttgcaggctcaccggacaagaatgcagtgcacacacttaacaccccactgttaacctgcaaatacaccgaaagaatcttatcgactactgcatttcaacacaacacaatttttgggtaagaatactagattacatgaatttaacaactaacctggacagccacactgccttgaagaattctctgaagactttgcagacgtgggagttggtccccttcagaactacgaggctcttcgagttcattccgtaaagcagctgttcgagtttcaatcattccaattgcattttctaccggggagaactcgagtgactcggatttggtcaccacgagcctattaacaagtgcagggaaagagccttcagtctgcagaacagttcgcctcttccactggtcttccaacccaccctgagtctttccgtttttggtaaacggtgtatcaaacaagaaacgatcgaagacacgagcacggacacttcctgtagaaagagagaagattctctcccttcggctacccaaatcctcatcctccatgactgcatcaacagcggttatttgaagatagcaaactcccgcctgcaactcgtcagccttaacttgccgagaatctggaattatatgcagcgtgtggttcccgtccatcctagactcataaatgtgactcagcttctccattatgtcacctaaccgcacatcacgaggctctctgtatacatactcctttctgtccagcttcccaaatctatcaccataaaatcccaccctatagtaggtagcatcggtgaatggaattgggcttgattcctgctcgagaatcgattcgtaaatacttgtaagtagcgtgtgacatttggccagctgtccatacgccctcctgcttttataaactggaatcaccagttccaggatgcttgcacagaaatgaaagagctcggcttgagagaaaagcttatttgcgagttgtagatatttcacagctgagtcaactgtgagttttgaagcaccatatccttctacctcagctgcagaggcctccgaggagatctcgctactaaccattgggcatattttacgaagagcagttatatgatccttgctccacaccccatcatttctagccacaagggcctacaagaaaaattaaaactcgttttagaaatatgaccatattaatcagaagcaagagatcaatcccaattgaaaagaataacgaaatggttttggaatgctataataatgcggccttacctgcattacaaccccggcaacagcaacagcacattgggcagcttcggcccaagattgcatttcctgatgtgcatcacataaatgaagtaaccacattatgtgaagatctggaacaggggcaaatgccatggcaagtttataaaagctttcggcagctgcatatctgtccatagtcatcatagatccctgaaaaccgttgtacccaatctagtttaacaatgacagattgtaaaaaaacaagcccggctacaattacatgcatcaatcaatacagatatcggtaagagtacttaccagaagtgaatgttccaaactaccatcaagggcaagaagaagactttctgacagatatttcacatttgaccaggaccacttgctctctgtcatcttttccgggagagccaatagagcactctcggaaagaccacactccctcaacaaaccggggctcttatcttcatctgacatttcttccaaagattttctcagacgccgagcttcaccactctcttctagtgtcccatcgggcttcatctgagtcacttgcacatcggacataagttctgacaatgtaataataagcatgactctcaacctggctgtttgcataaagtaatagaaagaactctgcaaaaaaaggaggcgaaagttaattttgtccgaaatgttgatcttaagaagtgttgcaatgtgaagaacctaccctaacaagtatttggagcccaacacagcccttcttctaatattgtcgttccggaaactgcaagtcgaagaagttggaaagtaacttgttttaagaaacgatcgttctctcttgccataagagttgcaccatgaaggttgaatacactggttgaaaaacggggtagataagctttccagaaacgcgagtggttgatttcgagagatgaagctcataatatggctgtgacacaatcgagttttcc

SEQ ID NO: 224025 - DNA, 1944 bp, Cannabis indica
tgttgtaccacatacactagagtgccaattctgaactcgtgttggtaacaccgtaactactctaaaatcctacactgtactaacacccttaaattacattattgctagtgttagtagggtaaacaaataataaaatacattcattcacatatatatgctttatgctatcttacctcgtttccttgctcaggtgtgtcggcaagcctgagtggaattgcagctcgacgtttcatagggccctaaatcacatcattgtaattttggtgagagacacgctaaacacttctcggggactttaagatcaactaggaataaccctatcaataaaagacatgaccataccctaaaatcaacaatttgaggaaaactagggttcctggaaaaaccccgaccagaaaattggtttccaaaccggttaaccggtttactgggtttcctgagggcaaaactgattaatcggtttatcagatccaaactgattttgtgcagagaaaccaaaaatcgaccctcacacaacaattcaaccccaaactcaatggaaccttccagaacacctgtacattctataatgaaccaaatttaagcaaaagaactcatcaatttactcaaaatccgaagacaccatggaaaccctaggttgaattctcaaataccaatcttgcacaaaacccattccactcaaccaagttaacttaaaaacaacaaaactagcttcaatctagctctagaatacaaaattaaacacttctaaagtaaacagccacgtaaaacacaaactcaacttcaaaacctaatttcaacttcaagaaaatcaaagaggagaaagctaagaattaataccttgaactaacacacccaaatcttgtagtcaccttctggaataagcttagaaagaatcaagccctagtttgcttcattacaaatcgagagagagaaaaagagaagaccaaggtttccttctactaatttattctcaatgcttctaagaaaattcattccttttcttttaatctaataacttaaatcataaattcagattatgttcacaaaagacaaaagaataacccatcaaatgacctcgttgccgttaacataaatcaaatgccgaaaaccaaacaagggtaaattggtcattccaactgccaacaattctcgatatttcaaacacctaacaataatgacccgctattaaaaaaaaaattctacaacacacactaaacgtgactctctactggcccaacatcgctttccaccgcttctaagcatagttacaggtaaacgagaaaatcacatatagcataattaacatatattaaaattaaataaatcttcaccaatatgcaatattataattaataattcaattccattattaaaccctgattatttaataactcaacatataaaacttaagcggtctttaaacttatcccctcgttaaaatgatttcgtcctcaaaatctaacctgaacagctctagatgttgaatcttcatatcagactccaattcccaagtggattcttccactttactattcttccagagtactttaaccaacgctatggttttgcttcaaaggaccttttctttcctgtccagaatttgtactggccgttcgtcataagatatgtccggttgtaactccaatgcctcataacataggatatgcattagatcagacacgtacttccctaacatcgaaacatgaaatacattatgcacagctgagaatgttggaggtaaggctaactggtaagcaacatgtcgaaccttctcaagtatttcaaaatgtcctatgaacctaagacttagcttgcctttctttcaaaagcgtctgcttcctttcattggcgacacacgcaggaaaacatgatctcccggctaaaatgtaatatcctggtgcttggggtttgcataacttttctgcctgctctgcgaagcaa

SEQ ID NO: 224026 - DNA, 2068 bp, Cannabis indica
ctacactcacccagatggtgcttcttacagttgggacactatggataattgtatcacgtttcagaacaaccatgacggttgccacgaccctggttccctcgaaacctcttgttctgacttaagccactagatgctgatgatgcctttctcttctgattagttgttgagtcactaccacccctaccataaccagaggtaggaggagtagtggttccaccaacaatctgtgtccttcggactcctgaacgcagttaactgtgccatctactcgtagttcttttcccaccatgtacgtcagcataggtgctataattatcatctattgtgatcatcatgtcgtgtttgttattgagattcaacctatccaaatacttttctttcttactaaaattaattggcacaatttctgaggccaacctatcaaactgggttgtatactctgtaacaaacatgttctcttcctaagtcagctgagtaaattattttctttgtgcactatggactacctcgttgtagtactttgcattaaacaactcctaaattcttcccaggtaatagcagtaacatcctgaataagaagcatcatatcccaccagattagggcatcctcctagaattggaatgttgcacaagccactctgtcattgcttgtgactcttataaagttcagaattcgagtaatgacaatcagccattgttcgactttcactgcatttcgacctcccaaaaatactagaggtgcctgcttgcaaaacctttcgtacagtggttccatccagttcacaatagcaaccggccctacgtagaaaacaagggtaggagctacctacaccacaggatcaggcattgttggagcaccctgctacctcagacatctaatctcttcatctttctcataaattttggcttgcatcgcttcgaacctgttctcccaatcttgagcagcctgcaatgggttaccatttccccagccacgtgctctacctcttgggcctctacctcggccacgaatattcgagggaaactgaactccctaaccgccactagatcgaaccaaattattctagcttctcgtgttccgcctggcatccattttaatagattatcttgaaaaactaagaactagcttagtcagatcgcgatcaagaataatttactaattaccacttactttaaaaataaaaatatgtgcctattcagctatcaggatactaacatgcttcgtgttaggattttcttataacatacaaatataacaagctactaaagcaataaaggcttactgaactgtgagtcgagcttatctgtgaagatgattgtacatgtcgtgatgatccttggaaggaaacctggtggcctttataccaaattgtaacaccctacaaggttaggcgtgctatcgtgatttttataataaacgtgcaattcgttgctaatcaacaggtttgctaaaaatcgtgattaattaaaactttactgaattattccataatttgaaaataaataactgttatataagtcgtgatcctgtatttaaaatatttacaattgtgattcaaaatattcgatacaaaaattgtcgcttagcgactatacaaaacacagcctattgttccaaagattctacactccaggtctaactgccccaacatgtacaatcttcatcctctcgcactcactgttgtccatccttagctttgcccttacctacacatgtaaacagtaactgtgagtcgacaaactcagtaagaaaaacataatcataacataaatataaacctgattataattaggcgcccatacaccaagtcataaccatatccatgtgtcccacgcggtattgagtctagaacgttcgtacgacaattctattgaccaaaatatcaacctatactcaatactctaatcataccgatgcgatagtgttaatcagtacttgagcacaacatacatttattggtatccaataaactctacgtatattgataccactatttcaatgtaatctaacagacattcataaacatgcacactaaacatgtaatcacatatgtatatcattatacta

SEQ ID NO: 224027 - DNA, 1277 bp, Cannabis indica
agacatcttgcgaatatgtgaagtgagggtagtagctggtaagggcctggtgaaggcatcgaccaactgtcatgtgcttgaaactggaatgagccgaactgtggagttgttgattttgtctcgaatgaaatgacaatcaagttcgatgtgcttggtgcgttcatgaaatgtaggattgttggcgatgtggatagctgattggttgtcacaatatatgaatgccgaacttgtttgttgtatttggaagtctgaaagtaagtattggagccaagtaatttcacttgttgttgcagcaagtgccctatatttggcttttgctgagctttttgagatggtgggttgtttctttgttttccaagatatgagacactcaccaagaaaaatgcagaatcccgttgttgatcgtcttgtaatgggataggaagcccaatcggaatcagagaaaccacagagtttgagagaggaagtggttgaatagagaattccttgaccagggcttcctttaagatagcgaatgaggtggttgagtgcctgcagatgttgtgttctaggggttgacatgaatgggctaagattattcactgcataagtgatatctggtcttgataaagtgaggtacaagagcttcccaattagttgtctgtaggctgagggattagtgagaggttctccttgctgatcgtagaacttagtccttggatccatgggggttttagccggtttacatccagaaaaactagtgtcatcaagtagttgaagtgtgtattttctttgagagagaaagagaccttcttttgattttgcaatttcgaatccaagaaagtatcttagctctcctagagctttgagtttgaattgttgatgtagagactgctgaacttgttgcaaagtgtggatgttaggacccgtgagtactatgtcatcaacatagacaagcaaggcaacgaaatcatcatctgttcctctagtaaataaggtgtaatcggcctgggattgtttgaatccgtcttgaagcagagcatcagtgagcttcttgtaccattgtctcgaggactgtttgaggccgtaaatggatttctgtagtttgcaaacgagaggagcacctgtatccacagattgagaagtagttagtccaggaggtaatgtcatgtacacctcttcattgaggtctccatttaaaaaagcattattaatatcgatttgtagaatatgccattctttaatggtggaaatggcaaaaagtaatttgaaggtgaccattttggccacaggggaga

SEQ ID NO: 224028 - DNA, 4357 bp, Cannabis indica
tattgcaaagctttaaatcatcatataacatgaaagaccaagataaccaatacattcaatgaaaatgataaaaataagatcaaagcacagaacaccatagactcaaaatcttatcaacagaataacatctcttaaacataaatggttaaatgaagccattaataacaacaaaaattacaaaagcaatgtagtaatatcaatatacctttaagcttgatggaaaactcctctgaaatcaaagcaccaaaaccagtatacgtagaagtggaaacagagtaaatcttcttcattgcctcctcctcactgaaacatacaaaaataaatccatttaaatactctcttatttgtcctcgaatttcaatgattaacaatagagttagcgtactaccttcccagaaccgaagcaagggttttgacgaaagaattgaccatttcatcttcggagggtttggggtcgttggcgaactccattacaacaagccagtgctcgtagtcacagccatcgagaagaatggtttctttaggcgggcggttggtccagtttggagaagggtcgttcagcggcgagtatccagagccggaagtcttgaaccggagcggcattttgactgagtcggggatgagttgggattgttggttgagaagcgccaaagcaaagcgattgcgaagcgagagtgaggtagaataaaagggagaatacgtcctagtgaggatggaccctaagctacgcctggcggcggagtacgccattgttgatgcttggaagctgagttgagttgagtctcgttctgaaacgtgaaattgagtaatagttgtcgtttaatgttttattgaaaagaatagttgtcgtttagtttttttggtagaaagttgtcgtttagttaaacagtagcaaaagagtactatttgtcgttaaacttgaaccggctgcatcaaacgacatgttcttcaatattattttatggtagttttataacatttaattttaactaatatataataattaaaatatgccataaaaaatatatttaaaaattacttaagtgaaaaaaatcttatatgttatatacgttatttctattttttttaaaagaataatttctagtctaaaaactaaaattaagaaaaataaatgctataatttttaaattttttatatttaatttaattactttactaattctttcctcattttaagcttaaaaaatataacttttctttttaaattttagcaactaattaagtcatcccaactatcataaacatattttaattgttatatataatagcattttagttaaaactaggccaatatggtgacatgtatcattttaatcaaacttaatacttgatctaacaaggagtgaactctaacaaattattaacttaatatttattttaccaccaaataaatattttatgttacaaaattaactagttcaattttttttctattattatttttgtaaattggtaattaatttttttatgtcatatgcattttagagaaatactagaggcacccatggtgttcaaaattacataaagtgtcatattactgttagaaaattaagtgtggagttccacatatttaaagttaataactataatgaaacattattgtcacaattgttatagtatttaatataactgatacttaataataaacatctagttagtatagatgaattattatcgatccaatttttcatttagaacaaaaatcctcatcattttcacccttgtacattatacacaatcaaatcaatcaagtattagtaagtagttgaataacatatatatttatatgtagatcatcatcaggggtcatcaggaggaggaattaaattcatcttatatataattaattgcttaatgaattaattaataatatcaatgcaactaattatgacaagttacacgtgggctttgtaagccaccaaaagtgctgactcttgcattggcacacgtggcagagatgggtccatttcctatatgtttcaagttgatattgaataggtgaatattctcacactgatattgtgggctacacatcaaattcacacccacttctgagctcgaagttcctcttatgtttatgtattgaatgttactaatctttactcgagatggcttcacaaacaaaacaaaattaaaatattattaacacataatttattaggattaattaattaattaataattaatctaagtgtatacctgtttcttgcaaccacttggacaatatccttggtcgatgatgatggggtttcttacattatccataactaggtcttggaaaatcataccagttgctaaacttggagttgaacctggccatgtcttgattctaattccattatctgttttcaaaaatgtggtgttctttactgtaattcctctaacatcttcctcattctcatattttcccaggctaccaatgctgcatgtctcaccattaaaaaaaaatagtcaaattttatactaaaattcacttttcttaaatgaaatttttagagtgaagcattcaaagctatattttaaggtagaattacctaatgccatgtccagggccacaagtaactttgttgatggcaacatcggtggagcccttgatcataccaatgcaatcatcaccagtagcaatgatagttttgcttactttgacattgattgaggtactaatatgaactccatcagtatttgggctatcacctggggcaactatatgaagcctcttcagcctaatgttctgagaatttgttatgaatatgtgaacccctttgctatctgctgatgtaaaccctctcaagattgcatttgacactttattcaactttatgttctgcattattattatttaattaattcaatatattcataacaagaagaaagcaaaaactagaaattaataatattttttctcttacagaggggagttgaacacagtcattgttgtttttgcaatcgttgtatttccaagcagattcaccttggccatcgaaagcgccaccaccggtgacgattaatccgtcgatgttttcgaattgaaaccatgcaggttcttcatagagggaaatatctgtatcaccttttaatgtgcctgaaacttgaacaattatagggcttggaccaatgcatggccctgcaaatatgagtggtcctagagcataaacccctggtgggatgagaactctggctcttcctttgaagtggcatgctgcaacccatgttttcatgaaagcctgcattatatttttcattagaaacttcttacttcttatccaaataaattttattaggaattgctatatagtcttagaggattactacaccttattataataattagactaattaggatttttgcattctgtttaacatgtatgtatcaaattaagttctttgaatttttttagcggttaaaaattctcttaaactattgtgattgttggatttaaagacatttctctaatttcatttaattttactaattttgtgtgattgtccatgtactaaatcatgttccctaaactttgatatatatatctaccaattcatgccccataaactttgaattgtaacaaatcaagtcccctcatctttcatctatgttagactttccttactaaaattagaaaaaaagtccttaaatctaaacaattttaatagtttaagaggattttcaacggtattaaaaatttaaggggcatgatttggtaaatgttttagttcaagagtaaaactcctaattaacctaataattattggactcaatacttaatataagtatgacaatgtgctagctagacatggctagttttagccagcccttatcagttacatatttttcttataacatgttatgatatttttttttaataaataaaattttttcttttattattagaaatctcaagaggaaaaaagactgccaaggagatgtctttgattaagacaaggagggtagctaggctactaaatcttatgcccatcttccaaatagtggaatgacacctctaagaaatcattacaatgaaagataacattttctaacaacaatatctaatagagagttacaataatgctatttcaatcattcttggaataagtttctgatcaaacaaaacaaatatatacatttccttacctgtgtattatcttttcttccatttgggatggctccaaagttcttgacattaaatattttctcaccaggaacagctttactgcccaatctggtaccccttaacgtatcacgacttggaggcaatagtggtttttttggcctcacaattgatcacagcataaagaaaaaaagatatgatcagactgataatggtatggcaaatttttt

SEQ ID NO: 224029 - DNA, 1658 bp, Cannabis indica
ttacctgaacaactccggatactgctcctgcatctgtgactctaactctcaagtcgcctcttcaatcttgatgttcctccacaacattttaactagcagaatagtcttttctgcaacactttctccttcctatctaggatctaaaccatttgttccttgtatgacaagtctgtttgaagttcaatatcttcatagcttaaaatatgagtcgtatctgacacatacttccgaagcattgatatgtgaaacatgttatgatctccaaacaaagcagggggtaaggctagtcgataagctacctgacctatcctttctaggatctcaaacggaccactaaatctgggacttgactttcccttttttccatatcttcagattcccttcattggtgatattcaaaggaagacaaagtcccctacttggaactcaatatccctacgcttcgaatcaccgtagcctttctatcaactctgtgaagcaagcttatgagcttgaatcttctcaatggcctcactcgttctttggaccgcatcaggtccaagatatctctatacaccggcttcatctcaatgaatgggcgaacaacatttcctcccataaagcatttcatacggtgccataccaatagtactattattgatgcatgagaactcgatcagaagaagatacttgttctaagaacctttaaagtccatcacacccacccgtaatatatcctcaagtatctgaatagtcctcttagactaaccataagtctgaggatgagaggctgtactgaactttaatttggtacccattgctcgttgtagactctcccagaacttagatgtaaactttgggtctcgatctgagatagttcgactttgagatgatcgactttggagcaccatgaagtcgaactatctctttgacatatatatcagcgtactgatccacagtatacgtagtccacactggtaaaaaggtgagctgactttgtatatcaatccacaattacccaagtagaatcatagaaccctactgttcttggtaatccaactacaaaattcattgttatttcttcccaattccactcaggaattttcagaggttggagtaatcccactggtctctcatgctctgccttgatttgctgacaaattaggcattttgacacgtattccacaatatcacttttcatacctggctaccagtacaatgatttcacatcctgatacatcttagttattcaaggatgtaaaatgagactcgtctagaatcttctatctgataccttcatcagttggtacacaaaccatatccttaaatcataataatccatctaatgaaattgagaagtcctttgttaacccagcttcaagtttttatttatactcttgtaattccaggtcactttgttgggttgtcttgattcttcctaacgaatcaagctataacgtaatattggctagtttttccaactacgaactcaatcttctctctagtcatatcctcagccaatttcaatgagatcttcttcaattcataaacttgccctagaccctttcgacttagagcatccgctaccacatttgctttcctagtgtggtagagaatctcacagtcatagtcctcaatcagttccaaccatcgtaattgtctcatattcaaatctttct

SEQ ID NO: 224030 - DNA, 1464 bp, Cannabis indica
gagttaataacatactttctttctaaaatatatatatatatatatatatatatatatttcacccacatatattgaaccttatttgaacccaagcaaacttaaacttcctaaacttacttatttagtatcttgtgttttcatgaaaaatatatttagtaccttatgttttcaataatacttaattagtactttatatttttaaagtgtatatatttggtaccttaaaataaaatttaatcaatacaattttatcaatttaatcaaatagttctcaattttatgtaatcaaataattaaatttgaattcaaaattcataaaattttacacaatttgattgtattgataaaattttataaaaaaaaaaatttgaattaaggttaccaaatatgtatgattttaaaatacatggtaccaaataagtattattaaaaatttaggatacccaacttgtatttagataaacacacagtaccaaatgtgtagacaccttataaaaaatataatttacggctaagttaaatacatagtaccaaatgtgtagataccctatgaaaaaggtaatttatggctaagttagcttttgggtttggtatgatcaaccccttgtactcaaatttcggaaataaaaccttccaaacttcagttaaattttagtcttcatttttttcatccgttttagtatgttaagtgttaaggtagactgttagtgtgcacataaatatacatgtattaaattttcattgttccacacgatattaattatttaactattacaaaaaataattttttattcttgaaaaaacaaaaataattaataatttttagtaatatatattttagaaataataatttttgttttcctttttctttctttctttcacattctgtcatctcccccctcttcctttttcttcttctacatgagtagcaaccgaccaccaccaccagtgacagagatcaggaatgaatggagcatcaacaacgaagagaccaggaatgaatggaacatcaacagtgagatcggggtcgatcctcgattaataccgacgaacgatggaagagagagagaggaaaaaagcttttcattttttgtaatatttaaataattaatattaggtgtactaataaaaatttgttacgtatatacttacgtacacattaccagttcacattagcacttaacaaaccaaagtgaataaaaaaaatagagaccaaaatagaattgaaatttgagggttttattcctaaaattttaattcaagaattcatcctacgaaatacaaaaatttaaatagtttaatcacaaattacttttaaaaaaaaattaagatattgatgcaccattttcgagtcgaggtgtgcacaaatttttttttcaattactgttttttgttatttagaacttgaatatgtttctgaaaacttaaaaagtgaaagtccacgtgaaacttcttaattgggtt

SEQ ID NO: 224031 - DNA, 1864 bp, Cannabis indica
ttaaaacaaagaaaataggaaacaggtcaggaagaacgagcctttaggagcattggcttctccccctatcttcttaaaatataacattctttgatctcccaaccttcccacgacatctttgtgcttgttgagcaaagaaaaaaagtttctcatccaccaaaccttcttcagcattgttgatcttggatttggtcaattgacagcggagccttatttattactaataatcaccacgtgtaaagtataaaagcaaataataaaattgacacagcgattgttggtggtaatgacctacttcgcttttagttgtataaattttagagataataccatgcaaattacatatttttaacttgtaacttctagctatggtctccttgaataataaatggtgagaattgatgtatgacaaattcttaacaagtgaaatgagagaatagactaagtgtcaataaagaggaagtgtcataggagtgagagagctccagggtttcagagattaaaattcaggttccttttcactttgcctaatgcccttatatagtttagggcttacaaaagatcaatattcaaataagttactattcctcaaaaataggggaaaatactttttatcatatatttaagttataaaaataactaattgatgtccctaaaagatagaaagataatttgaggtttaaatcctatctttgtcggttgttggagttgccccgtaactgaaactgagttgtgacccgtccagaaagatggtcgtggaccccaccattcaatcaggcttcctttgatgctctttttctatgtagcctggtctacccctttcttagggcctggctggcacataggttcccttggccagtcagggtatggtccgaccagaccctcctagttggctattttcttattacttggtcttgcctgagtatttggaaccctttttgattgatgtgatgtgcaaggtggctttgcttatctattggcacgttgtattccacatagccttagttttgcctatgtggacatgccacgtcatgtgagtgaaaattgggataacattttccccctaagtacctatgcgaacgtctgtacagataaggacttttcaaatcaagctttggcaaataaaaccttaaccggacaacaatggttggtcaaatatttggcctttcaaatgaccactttatgacaaaaaataactttcattatggggatttattttttggctgctcattttcccacttatgaaatgttggtcttctgcatggcaattcttgtggacaagtaaccacccactaagttttgaggggaaaagtgctccagatactatataaggttcattttctttatttttatttcacttcaatatctctctctctcctttcattctcttcaataaaaagaagaaaaaaaaactccattccctcattgcacccaatgcctcaagctcctcgttccctgaggtttttgcttctttacaataatccaaccatcccacgagcatccacagtggatttcatcagtgggtaagtcttcaaatctcattttctcattattttcttgaatctaccattgatgacttcaagctttttgaaatctttgattctcacgttaaagtgtagtattttttacataataatttgcatgatagctttaggatatatgatgtatcacttcttgatgaaaaagattagattttgagcttcttttagattctttactctttgagtcacaaatatcacaaagaacaatgttcgagtttttaaaaaataggatttttatccttaagaacccctggccggcatacagggtttgtttatgaccctagtcagcacataatttttgcctaagaacttggccggttcgt

SEQ ID NO: 224032 - DNA, 1555 bp, Cannabis indica
ttttttgtcgctttttgatgacgtgtcttgagctacaattacgtcaatcgtgtggtgtggaagagtattggatggacggtcgagattttgtgaggtgggataaaggagatattgagcgttggatgagagaaaagttgaggcggcgtgagtgtgattgacaccgtagttggcggactcacgtagtaggtttatgctttgtttgtaaaattgataaattgacatgaaaaatgacaaaataatatataatttttaccaaaatgctattttattggaaagttataatataaagttaactagttacctaataaaatatttgttatgtgactaagagaggtagagttagaaagtgtttaaattaagaggatataaaactcaagtattggagagagttagcattactaacacttaaacttaaaagctaattaagattgttgctcctaaatttttaagtccgttaaaaatttctctaaattattgagattattgaatttaagaattaaggatattacattgtatactcactttactttatttgttttaatttttattcaattttcatattctttaagatatacccacttttatagatgatatctctattaaacccttttggttaatgtaaattatatgctagacgtaagtagagagtgagtatattttaataaaatataatatgagtgtaggtatttttcaacttatcccttaagaatttttatctaatttttcgtcagaatagtctaacatgaatgaaagttcaacggatataatttggtgtatgtcaaagttcaagacacataatttggtagatatcaaagtttggggagtatgatttggtacataaacaatcactgaattagtaaaattgaataaaattggaccaaaattcttatttccaacaatctccataattcaaagaaaatttttaacagcgaaattcaaataatgatttgacacatgtcaaaatataaaaggtaaaaatcttaattagccaacttaaaatgtgaggcccacttaaaaacacaaatatcttgttattaaaatttaatttactaaatataggttgagtttcaagtttctatttcctctcagtgtagcctcataactaaatgtctcataagaagataattacatagggtaactagttactctaaactttttcctcatatttttaaatttttcaatgaaattatttttttggaaaagaaaaaaaaatatacttttggaaatattgtataataactcctaaaatatgcaatttccacataaataatgaaaaattttcattataatttttgtggcaaacgtttacaattaccaaaatataatttttggggacattttcataaagacccaactatgcaaatagaacatgggccgaaaaccccaaactgacatttgagaattatataaaagcccaaccttttatagactttttttaacaactattggtgtcgtttctcatatttaagtgtcgttttatagtttaacactgtcgttttgatcgtcagcagcaatactggactggggtttgttttgtgtaacgaaaacgaactgt

SEQ ID NO: 224033 - DNA, 1730 bp, Cannabis indica
cgtcataactaagcagagatcgcatgggcatataggcccaataagaagttaacgggcttttggaaactacaggcccaatcgaattcgaagattgggaaattgaaatcagtggtttgcaatctccatagatcaaataagcaaatacgcagccaactatgacaaccaccataggagacatcgcagatacccaaaatagatgtggccttttctgcttctgaaaatttctcgtatatatgtaaatattatataaatataaataagagaaacatttatttgtataattaatattatatatatatgtaagcttacaatatatctggtaaattgaaggaaaataaggaagattgtgcccactaacacactctcccacttccactgcaaaaagaagattgactttaattaattcaattgccaacaactcccaatctcatggccgagcccgtttgggctttgattatctccgatttctctttactgtgattggctagcggtgttgtgtacgctaggacgcgatgcagaggattatggtgtacggagcttttcatacacgaacggcttggctgcattggttggtaggagggatttagatggaaagcggctctcaaggcaatgttcgagtttttagattctaaatacacaggtggccaactccaacaaaacagcttttctttctcgattgttttagaatatttaattgagggcagaggtgattcaattgttttaggatatttaattgaggtgattgttaatatcagttcaaattcaaatatttaatttaggatatttattattattttattatagataaataatattttattattttattaaataaaaattaaaagtcacccataaaattctcaaaaaccaagaatttcaattatataggtatactttatatagaatagatatatttgtagccactaccagtaaacaatgatccaacgttcacgcctccttatttcaatggactttctgcccctctgcaatctggcgtgtgtttgtcatccccgatcaaatacccatatcctaaacatcagcagcgcccgcgtctaaaacctttcccacgatgtgttgtcgtcagcctaaaaaacatggcggcatgaatacacttcctctgagtatcaaaatattgtaggatacgcaactccatggatctctcacgaattcatgaagctattcttcagtcatattgtagagctagctctcatttaaatttctttttgagattctctcaacaccaattatacaaaatatcagattgcgctctttaagttagtgtcaaactcaaaaaaatgcattcttacagatagtgtcaatcttctaataaagatacttctaattgttttatgtaaatagtgtaatatatgtgaattgcatttatactattgtctttttttaagaaacatttatactgatttggttacatttatattgaattacaccaaaccaaacatctattctatataaagtgtgtctatataaccgaattcttggtttatgagaaattcgtgggagactttttatttatattaaaaataaaatgatttattattaaaaataaaatagtttatgagaaattcatgggtcactttttatttatattaaaaataaaatagtttatgagaaatttatgagtcactttttatttatatataataaaataaataaaataaatcccattaaatctaaaaaaaatacgattgggtttttgctgttgtacatttatg

SEQ ID NO: 224034 - DNA, 3346 bp, Cannabis indica
ccctatcccaattctatgtcacaatcccagttctggttgtgtttttatcctagtctaggttcgggtttgagtcctagtcttggttcaggtttgggtctcggtctgagtttttatctgggttcgggttcgggtttaggtcttggtcttggtccgagtcctagttcgattcttgttctagttgtgattcagagtttgcgtttggattcgagtttgggtcggggttcaatccctggtctgagttttggttcgggtccggattttgttctaggtctggatcaggctccgagtgtgggttcgggtccttggtgtgggtccaggtccaggttcaagtcccaagttttgaactcgatctgtgtttgggttcaattctaggtgtaagtcctgggtttcgaactcggtctgtgttcgagttcaggtttaggtccaggtctatgtttgggtcttattctaggtctgggtctgagttcgggtcccgagttcaggtccgattttgggttcaaatctgggttcaggttttgtccttgtttgtgtctaggttcctatcctagtttttgttcggggcaggttttgggttcgggtctgggtccgacttcagattcccgggtccaggtcaggtcctcgttcgggtttgggtccctggtctgggtccccccatctatgtccagttcctaagtccaggaaagggtccaagtttcggtttgggtctcgagtcttagtttgagtccaggtctcggtttgggtttgggtccaggtcttggtcacagtcttggtctaggtttgagttctggtccctatcagggtccaaaacctggtctaggtcccggtgagtgtataggaccaggtcaggtccaggtcacggtacaagtttgggccccaggtctcaggtcccagtcctagtcaaggtctcggtgtaggtctcctctaggtttgggtgcggttctggtctcaggtcctagtcctagtcacagtttcagttctaattctgggaccgggtttgctttcgagtcagggtctaggtccaggttggggtcggggtccaagtcttaatctgagtttgggtacgggtttttcggatcctgggctaggtccaggtttgagtttgggtcctaagttcgggtatgggtctacatttgggttctagtccaggtcccgtgtttcgatcccagtctgggtctaggtcggtattctgttctaggtctaagttcgtgtccaggtctaggtccaaatcccaatctcgatcaagggcttggtctgggtccgagatcaagtctcgagttcaagtttgggttcgggttcgagtctcagtcctagtctgggttcgggaccaggtccgtgattaggtctaagctcgagttttagggcttggttatggtctagtttgggtccgagtcctgagttccgatctaggtctgggttccaaggcctaggtccaagtcccccagccaggtccgggtcctagtcccggtctggatcaatgtttgggtttgggtcctagtcccagttttgattttgattcagtgtctcggttcgggttcgggtccgggtttgggtcaaggtctaagtcctagtctgagtgtgggattgggtttgggtccaggttcagatcccactcttggtctagggtcatttcaggtccgagtttgggtcccgggtgcgtgtctaggtctgggtctgggtcaaggttcatatcaggatccctatctacgtccaagttatggtctgggattgggtccaaggtctaggttcgggttcaggtctcagtcctggtctgggtacacaaccgtgtttgggcccgagtttcggtctcaggtaaggtctggggctatgttcgagttcggtcctaggtctgggtctgggcccgagttccaaatcccgatctcgggtattggtgtggttcaagtctaggtctttagtcgggtcttgggtcccggtccttgtttcgttgccctggtccgtatctcgattatgggtctaggtcctagttttggtctaggtttgggtcctggtctaggttcaagtttgggtcctagtcgcggtttgggtttgggtctcggtctgggtttttatttgggtttgggttcgtgtctcagtcctggtccttgttctggtcctggtcgtagtcctagtctgcttccagttccacttgcgattttgagctcaagtttgggtttgagtttaggtcagggttcgtgttcgtgtcggcgtttgagtcctggtctgagtttgggtttgggtctggatcttgttctaggtctggatcgggctctaggtgtgggttagggtcctgggtctttgactaggttcgggttcgagtcccagtttttgatctcgatatgagtctgggattagttccatgtctaagtcttgggtttcgatcccggtcttggtttaagttcagatctgggtgcaggtcccaggttcaggtccaattttgggtttgagtccaggttcgggtttggtcgtggtatgggttcgtgtctaagctcctatccttgtttggcttcaggacaggtttcggctccaagtctaggtatgacttcagattcccaggtctaggtcaagtcctgggttgggttcgagtcctggatttagatttgggtctgggttccggggcctaggtccctggtctaggtcccctatccaagtctggttcttaggtcctggtctaggtccaagttcgggtttgggtcctgagtcttggttttagtccaggtctcggtctggattcgggtccaagtctcggtcccagtcttggtccgggttcaggttcaggtccttgtcagggtttggatcctggtctgggttgcgggtctcaagtcttgacgagggtttaggaccaggtgaggtctaggtcccaatctgggtcccggtccaggttcgggtcctaggtcttgggtccagtcctagtcaagctcttagtctaagtatgggttattgtttgggttcggttcttgtcttagctttgggtcctagtcacagttctagtttttattccgtgtccaggttcggttccaagttcgggtcttggtccacgttgggtcagggtccgagtcttagttcgagtccgagtacgggtttttctgatttcggtctgggtctaggtctgagtccatgtccaggtttgggtcctagatctgggtcccaggtttgggtctgggtctacgtctgggtccaggtcccatgttacgaagccagtctaggtatgggttggtatttgagtccgggtctggttcgtgtccatgtccaggtctgaatcccagtttatgtcaggggcttggtctgggtctgggatcgagtcctgagttcgggttcgggttcaggttcgagtctcagtcctagtctgggt

SEQ ID NO: 224035 - DNA, 5514 bp, Cannabis indica
catttaagggctcgattttaatttatgttacataagaatggtagcatttatggtatatatgtgccctataaagtttggagtgatttagataagttttggtagtgtttcggtgaggacgaaatttggaattttcgtgttttaccgttttttgaaatttttaagagatcagaaatcgtatttttgccataacttttcactagggtgtccgttttggatgttctatataccgttttgaagcttgtgacgagctataacatatggtatacattttagagccaaattataagttttattttagtgtatttgtactacgagattcggtagaaaaccctaggttgtcctttgcaactattaagtagtgttttgggataaatacttattgatttatcattgttatgacataggggtcgggatcatcgatcgttctccaagcaggtcgaccaacatacctgaaccaaaacttgaggtaagaaaagtataatgtaccacatggcatgataggttttgtaatcattgactatctgattagatagtaataatgcgaatatgacaaacgacgtcacttgaccatgtgatataatatatatagattttagactgtgaaatgggttttcctgattaggcaatatgatatataagtacacttgattaggtgatatggtgccaagttatggcatgggcttagcttgtctgataaggcaaagcagtatacgaatgttatattacaagcaactccaagagctcaagcctaaagccttagtaacgcgcatcctcattgctcgcgtaaagcaagcataggcttgaaggccgaagcgcgctagtgctcgttgcatttccccctcctactcgggtaaagtattccgctcgtttgctgtcaggaattcaggttggctaggctcgatttgcaccaccgggcttacccatttttttagtggatcatgcctcctttctttctgagcccagccttccatttctcttcgatttcttgaacggatgggacttttctctctccaactggactagaataaaggagggtcggcccggcctgtgattgtagcgtagcccgatagctattcttgccccaacttaaccaatggggtccggtagttaggggtaagaatgaacagaagacgactaaccgatctctctttgaaaccagatgcccgaagatgtttgattcgtagggctaggaatgttatattatgacatgagcttgcctaattaggcaatgcgttatatgtatattatgaatgtcaggctatgatataaacttgcttgagtaggtaatgtaatatgtggatatcgatatttaggttgtgcctgtgaggtaactgttataaagtcatgactttgaactgaaaccgttgtcaggtttccaactgtcggcgtaccttattagatacgggcggtagtaatatgaaaatgcctagttatggcatagatcgaaactgttattaggtttccaactggcgacgtactttattagatacgggcgacagtaatatgaaaatacctagttatggcatagatcgaaactgatgttaggtttccaactggcagcgtaccttattagatacatgtggcagtaatatgaaaatgcctggttatggcatagatcgaaaccgttgttaggtttccaactggcggcgtaccttattaaatatgggcgacagtaatgtaaaaatgcgtggttatggcatagatcgaaattgttgttaggttacctactggcggtgtaccttattagatacggacgacagtaatatatgagtgctaagctatggtacatgctcgtttgataggacgatgcgatatattggtgccaaattgtggcacaggctcacctgattaggtggtgcagtgatattatatatgatgttgtattatgacacaggcttacctaattaggttatgcaaatatatgagcatatctatttctacgcatatggatggttaattacctattgttgaatgttatggtataatcattttatgataatgaaatgtacaattagttatttattgtacccttctttattacttttcttactgagtctatgtgactcacgggtgctctgtggtgcaggtaaagggcaagaaaaagttaaagcagccatgagatgacagtcttttccaacaatgtacatattgaccccatcggcttgtgtgtcgaattgtcaggagttgttttaaactgctttatctgttgtgtattactgtgttttgcactgttatcgcatatagtcttttgtaaactttttataacagggagcctcgtaaacacctttttactgccgttatgatgtccgttttaaatattttggtttagtcaaatttttagtattatcacggtttttaataattagctaattctttagtattaaactagttttataaatcacgtgtggcgttcctatagaatagggcattacaatttggtatcagagcaactatggttttggaagtcttgaagattggtcgaatatgtacatttgttgcgaagataagtcgactcatggtatagtaagtgtgtatgctatttgttattgccttagctgcttagataattaaagtgtatgctgggaagaagtagcatactgattatctataataagaatatgtgtacggtatacgcatattgatattgaagtagcatactgattatctataataagaatatgtgtatgctatacgcatattgatattgatatcatttgacgaacccctaatatttcatgtatttctattagtttaattcaactttatccaatattttagacctagtatttattgaattggatcggatccatccaatattttagatccagtatctattagattgaattggatccatccaataaaaaaagttaaattttaatattaatttgcatatatttttttttacttataacaacataaaatctaattacttattcaaactaaataaaatattaattagttcgattgaatgttgaatgtatttgatttttggacatcccatccactattcgattcgatctaattggatattcaaaaatagcattcaatcttatcaaatcacaatgtgatatttaatgtttagcggtcagctgtaattaaactaatcgattatcattggattggatcgatttatgcacactcttaaaaataaaaataaagacaataggaacacattttacacactcatctttagaattcagaaattcaaaaaagattactctccctattctctaacatagctaccaataatagcctctctagaattttgaaccacatagcagttgtaatatgacctactctattctgttacaatatctaaatctctatggaagactgtgaagatccatatttagtaattgatcatatgctttgacagaaaggaacacaggttaaattattgaaagggagaagtcatatcttgttgtgcaacactctgtaagtgtattctgtactcaatttgtgatatagatgtcataagaaattgatgtttatgataaatgttaatttgcatgaaaaataaattaatctagttaagcatgtactcccaacaagaatccctcaaatctgaacataaataaagatagtcatactactaacacaaacatgctcaattaatattctcccaatatcctaaaaagaaacaagaatagaatatcctatcatgaataaataaagccctactaccataaaaatagcaagcttattcagctacactattattgaaaataaaaataaacattaaaaacaaaatatagcaaataaaaataacacactaaaaagattatcacaaatgaatatccaatccagagctaatgagcaactaaaatttccgaaacacaatctaaagaaaaaaagatagagaagaaaaaaacactcagacacaaaaatagcaaccttaatgaaatcaaatatagtgtgaaaatcaagaagacccaaccagaaccacgtcgtaagaccaagaaacagctagcgagccctggttaggcaaaaaactcaagcgacggctaagaacttctaaagaaaaaccctaattatttatttgattagtaattaatcatcaacattataccaagatttggtacaataataatattgcactggagaagaggactttggtgttatatggtacattagagccttctcaaggcatgtacttgtacctttcaattaccaaaaatgctagagaactgtatgaaaaaaaaacactaacactagattgttccaaaagataatgaagacctggcagatggaaaatcagtcagtaatagtgcgagccagtatcataaacacggccaccgggataaggacctctagactcaaaaccatggtctctaccgctgcctccaagaaatcgagccctctctctgtaggaatcgtatcgctcattattatcaaagcctctgtgtccatctgctgcagcagcagcagcagctgaggctgggaattcattgtaagcccgaggatcattgggtccaatgctgctatttgggtaacaatctaccacaccttgctggtattgctgttgtcgtatgcatgattccctccgaaggaactcatctctacggttggcatgcctagctcgaagtgctgctaattgctcttcatactgaccattaattgcattaattttctgatcacaaaaataacaatgagaaggaaacatcacactttgactttatttagaaagaacagcaaaaatagtcaataatagttgattaataaatctttgtgccaattaatgaaagtaaaataatttaccttgaataaaaattgaacaaaaaccgaaacttctatttccaaatgaatatgatttatcttatcctctaaaagacagaattttcaacatcaatatctaatacaaacaaaggaaaatgatattatatttctaggtatagatataaaagcaaacctctctgtgtctattgttttctgcatcctctgcatcgttttgttccttggctagtttcataatatcatcaaggaatatttgctcaagaccttggaacgtttgtgaggaaggagggtcttcatatcccacttccatgtcttcgttgtgtggttgagacctagtatcactgttgctttgtttctctgaggccatcttcatatcattcctctgaccctgaaagtatggtctagctgaatcaccgccttgacctacataacaaacacgaacttgaccataaaaacaagaataaaaaaacagtgataattggtcaatctcgactagtcgttaagtacaaaacttaattcactaaggtggcgtttggttggaaggaataaaaatataggaatgaaaatgagaatgggaatgagaataggaatggaataaaatttaaaatgcataaaaaaattattaaatttttttacatcgtgcatgggaatggtctttactttcatttcaaaatggaattgtcattctaccaaaatggtggaaaggtcattccattagaatgatattccagcactttaatatgcaaccaaacaaaaaaatggaatgaagattgtttcctt

SEQ ID NO: 224036 - DNA, 2926 bp, Cannabis indica
aggagggtccacaacagtttgttcttcagaaaggtcaatgaccactttagctagtgccttctgtttggatggagtctcattgcttttggacttcttggctggaggggacaagcctgagcttccccccactctcttcttcaaagcctcaatcatcttctgagatatttctacacgaaataaaaataacatagtcagaagaaagaataagatatatgaaggcatgaaaatcaagaaagttaaatgcaagatgaagtactcttcacgctggtaggagcatttgcccgaacaagcatagatggggcgtcatcatccgaggaatcttccatctcctccaggacggctttcccctttccttctacaggggtggatggccgagcaggtagatcaggctctctaattcggatagtatgttcaatgggtctctacccgatcgggagggttttcttcttcatgagcggcctctcttgctctgaatatttctgagcctccttctcctactcagaatattcctgagcatactacttggctcctgcttcacccttcaacttagcctcactcttaagttgaatgagctccttctcttgctcaactccctcagcccggccagcactggacttcttctttctccccttcacaggctggggtataaagttttccagataaatcttgtactccacaaagttttcctccgaggtcaacaaagtgatattcggagcagcatccagcagatggacaatcctttgagccctgtctctaagtgccaatgtaacgggtggacggtaatatatcaggatctattgaaaccaagtataggtggaatccatgccttccacgaagtagtactcgtcaacaaaacccccgatcttgttgacatccttgtccattgtgcccattagccacttaaagtctaactaagagaagtggaagtaccccgaccttatttccttgggggtagacttcaggtcaaagaaccaattgaccttgtatggggacgacacaccacatccttgaatggcgtagaggatgaacatggcagacaggtatttaatgatgcccttgggagtgagctgggttggacaaaagcgaaaatagtctgccaccctcatgaagtacgggtggaaaaggcaccattgccccttgcttagtatgagcacccgaccaagcacacatccctttctacgggttcgtttcccgatgatttagagaaggaatgtaacactccagtccacccaaatatctagccttatccaaggccttaacgcgtgcttcacttattttggagggagggctcacccatctggcacctaaggcacttttcctcttgtgaggaactgcttcagtaagctcctttgtgactagtcttctccttcgaccaagacttcaccctctgcagacactgactccccggcctcattataccctccaaagtttggaggttcagccactccttcctcctcggcctcggaagggcagctaggatggacatcttcctgcatttcaagctcttggacctcaatgtccgcttcatgatcttcctcctccatggcgggcgaatcctgttcgcaacatggcaatgtggcgagcttggccacatgaggatcagatgcgttgaccttccgcatcgtctactttgtgcgggccatcatcctcctcctagacggatactaatatgtatgacgtgcaactgtaacagcagggacaacaattgggatgccaaagttacccaaactgggacggccaacgggaagagtatcagcaacacctagccagacaatgtatgtctagttggacggaagataatgcctccaacctttctgcacttcccaaatgaagcggtcgtacccctctccggcgatctagtcagagtaataatggtgttgcactacgggttctagggtaggagaacgatcctactcacctcccaatcttcaaagctcgagttagaaagtccgtcactcgaaaaggatggactggcacaaagacaaggttgatccttgtacagaagttgaagcaagtcctggtaaaatcggtgttcgcctccccaaaactcaccagggttcatctacaaaagacaacacaagagatgagtgtttggctgggatatcgaacaatgaacaggtaaatatgccgaccagaagtactcaacagattaaaaggatgaaaaatgtacaaaaatcaagtcaaaacctagaagtttgaaatttttgggtttcgagttaaatttcacgaagcttcaaatgagtaaggtgaaagaagaacaatgggagattaaaggcaagtgtcgtgaactatgaagccgtacggactattatagagaaaaccacaaagcttcgaacctagattttctatctatcttctacaacaagtcaagaacgcatgcattttctataatggaaacccagaaattaaacatggaaagttaaaagaggagaagattgaaaacttactcactgcttgacgcctaaatgaagtccagatgaagctgtttgaatgcctttggtgggaacctcacgacagacttgaagtaaaaatctttttttgctctgagtttgtttagtagaaaaatcagtaaaggtaaattatgaggaaattccagccttatttgtaggcactttggtgaaaaggggtaatcacttccaaataccccggacgcttcaatttccccccaaaagcaactattgggaaattaaaaaccatcaagtgtaactctcaaagcgtgaggaaaaaactaggtttcgaggcactaattaagtcagagcattaattagccaaaaaccaaagagacggctggtcagcctcacatcgaatcacgaatagatgcgcctaacacgtgtcacccattaaaatgcaaaggcagctcggatgaagtctacatgcaacttcggaaggcccgtacagacttgggggcaaatgttatccaaaattt

SEQ ID NO: 224037 - DNA, 1205 bp, Cannabis indica
ctctctctctctctctcacttgatacttgcctactaattcatacattgtgatcttaagaaagctacttttgatttcacaacacttgtgatctgagtagtattatctctagtatcaataaaacaaaaaggggagtagatcattacccgctaattcaaggggccgaacctctttaaaatttggtgtctcttttactttctttttcttattgtgtaacacgtggtaatcattaatattgaatatgattctgctgtcgattggccaaattctgaggtcaacaccctagaaaagacatttcccttgtccaagtgtaagtaaaccacatcgttgattatcacgtcagtgtaaattaagctcaatgataaatcatgggactaaagagtttgaagcacataatcatgattatttttaactttgtaaacaatactataatatatcatgaataacaatatgtctgacatttaacagaatttatatattaaatatataatcataaaagtaacatgtaaacctagcaatataaaatgatttctgatcttttgttaattagtaaataagattacattgaaatatattttatttaggacataaatcctaacacctaggacttgtgcactatagtaacaaggagattgagactgtagtcacagagttcgtggactcagattatgctagtagcatttacaataggaggtccataatagattatgtattcaaaatcttaggtggatgtgtgtattggaaatctaatcttcaaaaagttgttgctctatcctctacaaaagttgagtacatggcattcactgaagcaatcaaagtggaaatttggctaagagggttcacaactaaattgtgtttcaattcctaagttattgtagtgtggtattgttgtggtaaattcaacacgcaagtacacgtatcgtttacaagtaatagactcaccaagagtgaggtcaatcccatgaggattgtagttaagtatattaaaattaaacttttacttctatttgattaaagaaaattaagaatagattaaaactaaaaaataataaaaatagagaaaagagaaacaatttaaggaaaattaacagttaataaaaactagggcttcgatttcaattgtatctattgaatatggcttaatatgataaccttcttattatcaatttctatgcaatagcaggtttactaaggtaatttatagtct

SEQ ID NO: 224038 - DNA, 2780 bp, Cannabis indica
tctttcagatgagcgacttgtcgtttagccaaatgctcggcttaggaggtggtgccttcgctgacgagcaggacaaagaagatagctttattccggcttcactttctgaagaagaaaccctagttgctagaactgcgcctttaggtccattgtcctccgaggacatagaaagaatggtttaggagctcgctgaaccagggacaatcaagattcatgatagcgaatccatagtgtccgctcgtgaacaccttgttcactctaggcatgctcctgacgtcaaagttgaggagatgggggatgactgagagattcctgaccgcgagtcaagagaagaggaagatgctgagggaagtgggactgattcagtggataatacgcaactgaacgaacccttctcatgcgaggacctggtctcccgagtcaccaaatccgatctcaccacttttatgaggttgaatttgctgcgacttggcaccacgtgtcctcgctctactcagagaccacatctttcctttaccaatcccgcaataatccccacagaggatgtggttgtttttatacccattcttcgatgtggggtatcgattcccttccatccattcattactactatcctcaagcggtatgatgtatctcccttccagctaaccccaaacagctatcgcatagctcttaggttttatgcgatgtacatggagtacgcgcatagggagccttcgatggaggattacagttatttctacgatataaagaacgtgggcctccacaatggcttctactatttcagcaagtgggccacttctgaaatcaacgaggtagaaggcatggtttccaatatgggagattagaaatttaagtggttttacgtgttcaaagtaccagggattaggactgattttaaccgagaccactgaccgcgccaacacttagttaatatttacgttatcttatgagattgtttaacatttacttcctcattgatcgcagataaaccggctcgacctattctaaacccagtccgcaaagaagttgctgaagttctcggtagcctccctattcaagaacgcgataggcgattattgtgcacaacttccaagttgcgagaacataagctaattcctgagaacgcaagccttcatcgggagccggtatacaaagagccatctaaaaaactaaaggagaagatagacaagcatctttccaaacaaacctctcgaccaacatcaggtaactcattgcatatacgtggtatataattatgaattatttgtaattatcttaactttttttcgcctcgcagaaatgactttcttgaagcaggctccagtactcaactgcaagcccaaacacgaaactgcgacgacttctcctattgttcctcagaagaggaagagtgatgttgtcgtgacccctgctgccgactcgtccaagaagcaggttaaaccttcccaggacaagggaaagaaggtcatgattgacccggctgtcagagcccgcgactttgtgactctgcaggacaagttcatgaacggcgagttcgtgtcaaggatggaagtgattcctaccgaggaaatgatatcactaggggcggagctggccgcgcagtttatgaccgttttctcgagggcgttcgtcgtaggttccaaagaagttaatcttctgaaaaagtagatcgcttagtttcaagaaagcaacaagaagctgaagcaggatgcgaattctaaaggcaaagatctcgagaatcttcagaagtccaaagagcaggtagaactacaagccaagctctctcagtcgaaggtcaaagagttggctcgcgacttggaatccgagaaggaaaatggaaagaaacagtatgatcaagctgtttccgactatatatacacgactttatccaaggtgccagacttcgacttctctatccttggggcagaggcggctgagatggcagaggcttttcgtgctatgtcacctacccagacccaggggtgcagaggaagtattttccccgaggaagcagagactgcgaatactgaagaagtcgctgatggagctgctagcaaggtcgcggatggctccactgctccaactgctccaactgctccacccgcttaatttatataagttttatttccttagctattaaactctttttagcggtacatgggtactcgcattttgtacttggaacaaatttcagttttttcctctttcgaacaacatcctttcgaggatttttttcttttgtttttaagcgatactggggtactcgcataattataactgcttttgtcttttgcaatatttttgttattacaactcggtgtaacgacttacaaatgctaaacttgcaaaaaattaaaagtataagaattttaaaaattgagaatctttattataataatcaatagtacaaaggtaggttatacccctatacttaggacatttatgaaaataaattggctaagtataattacattgcgagtactgttgataataatactttaggctttcgccattccaagcccttcggatcgcagtaccatcgataactacaagccgataggtcgcatggccaattttctcagcaattaggtatggtccttcccaattgtcgccaaaaaatccatgtgctgggttttcgtgtttggcatgaccttttgtagaaccaaatctcctacttgcagagttcgctctttaaccttcgaattgaaatagcgagatgttcgctgctaataggtcgcgttcttcagatggccctgatcgcgtttttcttctaagag

SEQ ID NO: 224039 - DNA, 1191 bp, Cannabis indica
tatccaaaatatgtttagatgatatgatatgatttggttatagacacgcatataaactaataatgttgggtgattttggatttatttgtgtagtgatctacacaaactttatttttaaagtcaaagtgggtgagaacatgtgacaagattttgtagttaaagataagtgatattactcttgggataacatgtcgttccaatgctaggcgggaggggaggccatatggttcatcttgccaattttgcattctacacatgttttcgtggtgcaacgaattagaaggtttgtttaaattaatattaacactattattttctttttcgaatcgaaatgtattgatcggacctaaaaactatctttagatctctattaaaccttcaaagactcaattcatatcacaaaatcttttctttttttcgatttgttatttttctagttcttcttgttatttaccttgattctacttcttacctttatttttatatatatttttttttgttatttttaagtatttattaaaatatctatttttatcttgggttttgtaccgttgttagaatattttatatagattaatataattaagtattgtacactcaatcaatgttagtattaacatataatgataactatataatcgacaatgcgtggtattaccatcgaaccataatgtactaacatactcgggcccatggacacgctctaaaacgtatttggtcaacctattgagttaagacaattaatactcacattgggtatgtaggctcaattaacccataatttctcataaaagagatgtgctcttttattggtgattaatgtggaatgtgtgtggctaaaatatgtggagtgtagaagagttgtgttcatgaaaactcttgcatctctttcttctcttttaagtgtagattttatgattaaagaagtataattgatgatgtatgaagacaaccataggtaatatgttttattcactaatgttttgataccttacataaaatggtatttttgatgattattgagtataattgtcattgtataatatttgatttatattttttaatgcttaattaattttaacaattggtatcagagtttggtcatcttattttaagactcaaattgtataatttattttctttaatttttacccaaattttttacatacacaatattaatataaattaaaa

SEQ ID NO: 224040 - DNA, 1900 bp, Cannabis indica
aaacgcttatgtattcatgttgttttttattgtttgtattgacgcagtattttatcaatagatctaagaatattgtaaatgagcaagatgaacacaagtatttgtcaatcaacgtaaaccagtttatcgaaaagaaatttaacaaagatgaacatgaggatttcatagttgtaatgccctacttgactaggcacgctacaataattttctaattactgtgcacgcctttgctaatcaaagaatttctcgaaaaacataataaatgcatatgtttacataaattcgggatcccattaaaagtttacaaaagtattcaaaatattctttttcacaaaatgtgtcgtccaacgactacaaaatatgagctcatgttgtcctgaaattgaacactagctccagacttaattattccacaagctctagactcactgatgctcagcttttggctttcctttacctacacgtgcaaacataactatgagtcgacaaactcagtaggaaaagcataaaacatataaacatattacagacttgtaactaggtgctcatacgtacacatacccacaaggcttaacagatgaatcaagaacgttcttaacagaagtacgactcgtcccatactagtgttggtagggttgattcgtagctctagtacaactgcatgttacaccacataagctccgtactcgtcctgtactagtgttgataacgtgtgtcataccgcttaacattatactgtactaatgcgagcaaaaatggtaggccatttatgagaaaatggtctaccattttgtgttgcagaatttctaaacatctcatttcaactcaaaactaacacaaacttcataaagctttccagaacacctaacttgagtccaacaaacataaatcaagcaacaacaacaactataacccagaaatatgaaaatcaccgttgatgagccaagttgaaaacttttgcaacacctcaaccagccatcaagaaccaacccaacaagcatcaaacaacttagaattaacccagaactaaaaccataaacatctagggttcggacagaacctaaccctcaaaattgcatgcttgaacaaatccaaaactttgaaaaaatcaaaaagaaggattctagggctttatctttggtttgctattccaaaacttcttcatttcttgctggaaaccttgaaattaggttgattctggtctgatttttgttcaagagaggtcacaagggagatatatataggtttagaaagagaaagacttgattttccttagttttgataaaatggataacctaaaacccttttgtttaagttaagttaatattcaaaataatacttaggaataatctactaactactcactaaaagacaaaacttaattttattcaaaattactaattttctctttacttcaagcttaagtacatcttaaggtttatgggtaaaatagttaaacactataacaccacctaaacttgatattctaaatatcaaacacaatttttcgctaaataaaaagttctaaaccaaactcatgtgacactactggccaaactgtcacattttcattgttaccgagcaaaaattacaaaaatattaattttcacatatatcatatgtaatttaataaaatttatggaattgaaaaattataaccctaatacctatttcttcaaaatagggcctacatataacataatcacataatatagctaattaatgctaattgccttaataatccatatcctaagtatgtggtcattacagtagtggttattgaattgttattggtctcaatacttgaggagagttctccaaaattatcttctccaagagttcaatcctcaagtgagtttttagaatgagagagcagaaattcgtgagaatgagttttcct

SEQ ID NO: 224041 - DNA, 1422 bp, Cannabis indica
aaccgacatattatgttcttcactgcaaagtccaatacttttttagatgtgatcgttgctaaaggcttgactatgatccactctgtgaaataatcaacagcaaccactgcatactgtactcttcccttgccattgggcaattgtctgatcaggtctattccccaaatggtaaaaggccaaggactttgcatctgaattggctcgttgggcggtgcacgggggatcttcaaaaatctttggcatttgtcacaattctttacataggcctttcaatcttctatcattgtcggctagaactatccttgccttagtattttccttgataggctttgtcctgctgcatggttgccatagaatccgtcatgtacttcagacaggagccgtgtaggttcttgttttgttacacatctaagtaatggcatggaaaaacctcttttatacatcacaccttctactatgatgtaccatgcaactttcctcatcatgttctgagcttcatttctatcatttggaagttctccagtattgaggtaggctgctatgggtgtcatctagtttggtactgtgtctatcattttgatttcttgcgcacaattgatactaggttggccttatctattgctatgctgctcgcaagtcgggctaaagcgtcagcatttttactttattctcttggaatttgcctgagggtttaacccttgaattgtgcgagcaagtcttgtatcttggttagatagcctatcattttctctcctcgggcctcatactctcctaaaacatgattcactaccaattgtgaatcactacagacctcaatgtattcggcacgtacctcccgagcaagttttagtccagcaatgagggcttcatattttgctttgttgttggaggccttgaactcaaatttgactactccatgcaggtccccaggtgtgacaagggcaatttctgcaccagaaagttggtttgtagctaacccatccatgtgcaatttctaattagatcgatcttcattgttttttggtaggggctcttgtactggctacaggttgtcccttatgttgccttcttctttgcctgtgcattcaactacaaattctgccaaggcctgtcccttaactgttgtttaaggttaaaagattatttcatactgacctaactctatcgcccatttaagtaaccaccaagaggcatcagaattttgtaatacttagtgtaatggttggtcggtgtatacccgaacagggtgagcctggaaatagggcgttaacttccttattgctaagattaggcagtaagtgagcttctctattaatggatatcatccttctgttgggttttatgccctaaataaaactcatttcatataatcaaatttacttattaataaagatcagaaataacattttatgttgcatggtt

SEQ ID NO: 224042 - DNA, 3301 bp, Cannabis indica
atactggaacatgaataagaactaccagaccaagaccttggaacaagactaggaccatgacaaggacccaaacccaaacttaacaccaaacttggacctagccccaacccaaaaaaaaaattggaacttaggcctagacctagacctaaattagggacccgatccacgacataaactcagacttagaatgtgatccaaatatgaaccagaccaagaccaggatcaaaactcaggacctaaatctggactaacatcttaacccaaacccaaacttggacacacacctgggaccctaactcgaactcggacccgaacccagactaagactgggatccagacctggacccaaacccagacacagacttggatagggactcagatctcgacccagaccccgacccaaacctgaacccagacacaaaatctgagtgtgggtctgtgtccgagtctgggtcttggtccggttacagttttgattcttggtctagctcctagtccttgtcctgttcttgggtcccgatttgcttttggtttcggttccagtttaaagtcacggggtacagatcaagtctaagcatcgagtcccaaatcctaagtcccgaggtgggtcgtaggtccaggtttgggtctaaggtaaggtcctgaatctcgatcaaagttctgaggcccaagtttttgtgtcggcttgggggcccaattcccaagttttagtcccccatctatgttcgagtcctaggttccggttcgggtccaattttgtgttccgatttcggttcaggtctcgggtctcgatccgagtctaggtcccgctttgggttcgggtccaagttctggtccccatcccaatctggttcaaggtttcaggtcccaagtctgagtttgattctgtcctgggttttaggtcccaagtcacaggtccaagtctagggccaagtcccggtatgggttttgttttgggtttaggtttgggtcctattatggtcctaggtctgggttctcgtcccagtcctggtccgattcttattccaggtctgagatcctgtccagatcccggtttaagtccaggtcttggtacggatctgggtctgggtcctagatttaaacactgactacaggtcaggtcgaagcctcaggtccagatttggatctcggtcttgggatcccggtcttgttccagttcgggtcctgagtcccgggctgagtcttaagtttgggtttgggtctgggttcggggttgtgtcccggtaggcagttcttgggtttcgggaccaaggtcgagtcctatgtctcgagtctagggtcgagttttggatatcggtcccggttctagggcccagttttgggtccaagtccaccatctaagtcacggtttgtttcccaggttccatgtccgagtctcaggtcctaggtcctggtcttgaaaactgggctctagtcccagtctaggtttagggctccatcctagtctgggtctgggtcctagtcctaaactcagtctcagtcccggttcgagtctgtgtctcgagttcgagtccgagttctattacgagtccagctcatggttcgggtttgggtatgggtctaggtctgggtccatgtttaattttcagtcttggtttgggtcgtcttggtttgggtccgggttctggttcaggtctgggttctggtctaggtcccaggtcacaggtgctaggttcctagttctgggtcacaggttctggagtaagtctgggtccgggtatcgatcctagtctaggtttgagtctgtgttgggctttgcgtctagatcccgttctttgtccaggtccaattcctgtttctaggtcctgattctgcttgttgtttcaatttcgggccccgagtcaaagtctcggtttgggtcctggtctggaaatggttccaggtttgggtcttagtagattcaaagatctaaacactgactacgagttgggtctaagccccgggtcgtgggtcaagatctggatcccaatctttggtccaagtcttgttcagatttgaatcctgggtcccggtccgtgttcgtgtccgagtccgaatctaggaccgaggatggggtcgggtttagggtcccagtcccagtcctgggtcccgattctggttataatttagagttcgggtccccaatccaggtcggggaccttggtccaggtctaagtctccaatctcggtccgagtcctgcatccagatctcgatccaagtccgtgtctgggttcgggttcgtgtctagagtcccgattcgagttttgaattgagtctgtgtcccggtccaggtctgggtctaggtcctagtcagatttcagttctgagaccgagacggggtcctagtcccttggtcgtgttcccgagtcccggtctgcttctggttctgcttctagttttagttcacggggtccaggtcttggtccgggtctgggtttgagtgcaggtatgggtcctagatccaaacatcgactatgagttaggtccaagcccccggtccaaatcaggatcccggtctcgggtcatagtctagttacactatcctatgtccatgtctgggtcctagttcagggtctaggtccaaggtcaggtcttgggtctcagtgccagttccaaagcccgggtctcgggtccaagttccccatccaagtcccagtcctaggtctcagtccgtgtctagggcccattcggcgttcaagtcctagttcgagtgtaggttcggtttttgatccctctacaggtccagatctgagttcgagtcccatgttcgagtctagatccaagttggggtctgagtcttgagttctgatctgagttttggttccgaggcctgagtccaggtcccccactatgttcgggtccatgttcggtttcgggtcctagtcccagttcaaattttgattctgtgtccgaattcgggttcaggtctaggtctaggtaggggtttgagtcctggtctgagtctagggttggcttgggtcaaagttcggatcccggcttgggtctgggttcgggtcaaggttcgagtccatgtcttgggtacaggtccagatttttgtctaggtctcagtccagatcaaggtcccaagttttgatcccggtctaggtatgggtccgagtctgggtttgggatcggttccgaagttcaagttcgacctgatcccgaacccgaaccagaacacaaacttggacccggaccaggacccaggacctaaacttagatgggggacccagacctaggaattgggcccctaaactaggaccagaacttggtctcagaacatggatgaggatcgagga

SEQ ID NO: 224043 - DNA, 1469 bp, Cannabis indica
atattaaatattatataatgagggtttgtaactccaaagcaaattaaattcttgttatgtcagagacaacttaagtatttgcaaccttcataactcaattaatggtaaatgggagaaatgcaaaaatgccacctactaaaagagaaatgtaattttttttgaaagataaagtatcatatcattatattaatataattaagtattaaattctatataatataatataataatttatgtaaaatatcactaatcattgttaaagtgtcattgagtcaccttatatatagtaaatgtttactgagtttttcaaaaattgaataattatagagcttaaaaaaataataaaagcgtaaataaaaaatctctagacaattgatttttacgtggttcagacgttaattatccttagtccacaagtccattttattaggctctatagccgtagaatgtagatacaaataggaatggactttactctaattcctagtatctctcttgaaaaatagggaacttagtaggaatattcaggactaaagaattactgtaatctgttcacaaagaattcaccttcgatcttaaggtggagagtcgaagggattaaaggagaagaagtcgaagcttggatccgatcccccacctcctatgtctttgggggatatttataggtcgattccctcgcaaggatcgtcgtacattgatagatcttgatgagggtgaacccccactgttggattggtaggtggaatattttccatgtgatctttactgatgtcagattgtactggctgtactgacggtgctttggacgtgtgtcactccacgaccttcctcattcgaattacccttactcctagtcgttggatccttttgcatggtacacaaggacatgcatactttatgtggcgtgagggacaacctttgacattgtacataggaaaagagcgagcggtgggcccttaggttggcacatgtagaccgaaccttcgtggagtcaaaggagtgccccagaccaattcatcttgatggaagaatcatgatcttctcgagagcgaaaagtctcgccttccagaggagagggttgctgactcgcggacacctccttgtggtctccattcgtgcagacctcgctcacggagttctatgaagactggtctacagggttggagccttaaccttccgggatcacagagtgaggccctcgggcaacttaatgactcctcgtttttccttaatcgttccccgcgggttaggcaggtgaaaatacagataacatttacccactaagcttttgggacatgccattgttcgggagcttgcagtatctccctctgaaaatttttctcgcacgtggcatttatgacgagccctttaatgcatagcgtcattattgggatttttgtcctaaataaaacctatttaaatataatcagatttactaattaataaaatatcagaaatcattttatgtt

SEQ ID NO: 224044 - DNA, 2332 bp, Cannabis indica
catttaataggacttagcctgcgaacccataacaagaatctaagataccccaaatatacttcttcttagtataaagatacctcatttaccaaatatatccaagcttatagccctataaatagtgatacatactcactgggcaaagggtcaaaagattttctctaagaattcatattcatagatactattgtaagagctctaagaaaaggaattattctccttgttcttaagtcaataaaaataacgaggattaggctattaccgaactgctcgggactgaacctctataaaattcttgtgtctttatttattttactatatttaaatcgtattaacctacttcttgcttagaaaattagactcattgtcgttggctaaaagcgaggtcaacatttttgtactttcattgagagctgaactcaaggatcgctctttattgtaaatttaatcacaagtacgatggtggtacagactcgtaggggcatggttgatctagaaaatccaaaggcggtggatcctgcactacagaatccaggaaacacaagggttccgccagccgtaaatcctggacaaccatcaattgcgggtcgcgatgtgacaactcctgtggatgagatcacgcctggtgtgcaagagactgggaataccagttcagcagctgactagggtgttcaatagcacagtcgttctgcccgctaccaatgttcaaacgaccattggagatgacactaagatccagaacctctgtgccgctcttggactcatgcaggttcatacaaacaccctacatcatgattaggaggaactatgtgctgtgggaaatctcgcgtttgaagagtagagatgcatgtttgccgaatggacggacaaagagatggaagcgttaaggtcccatcatgtagtcattgacaatcgtaatccccttgggcagcaacccacgaatgtaatccccttgggtgaaatagacgaagatccagcaatgaatacctctcagactataaatggtcagccaccaaatcccctgttacagggtacacctgtgggccaagtggtaggttgatataccgtgtctaataattcatcgagagaagtcataccgaacaattccaaccaggttaatggtgtcggtcaacacattagccaaaccaacgaatcactgagacagccaggcatttttcgtattcgataggttggggatgattaataacctcaataacaatctgaataggaggagaggagtggatgatcaacttgacacgccaatcgtgcagcccggaacccacgctcgaattcctgctcaaaaagatactaacgtgactcagatcggtcaaaatgctgaacaagttagtccagtggtgcaagcacagctggacgaactaaagagtatgttccaaggcatggccggtgagagaaacaatgatctcgagttggaccgagcacgtggaacccctttctcccccgagatcaatctcctagagttgccccacaagtttaaaatgccaacctcgaagatgtacactggcaaagaagatcatctttcccacctcaagtatttcgagatgcaaatggatctgcaaggagtacaagcaaacgcatgctacaaaatttttcatgccaccctctcaaaagccgcccagcaatggtatttcaacctggcaccttgaaagttcaactcatggaaagctttctccttggaattccatgcacaattttcctcgccaacttccattgcacctaagagacatggtcgaagttaagcaaagaccaggcgagccgctccaaccctacatcaacagattcatgacggaggcaattaaggttacacgagtaaccaaagagggaaagttgtccgcgatacttgggggcattgaagtccttggtgagctttggaaggacataaggaagaacggtctggtaggctcgatgagtcattttcttgactgtgttgaagtctttatcaaacttgaagaggctattcagcgagcagaaggtggccaaaaacctagcaagtcaaaagctccttccactaggacatctctccagctcccccattacccaagcaattcaagctcgaatggtaaacgttcgagcaacaataataggcaagggaatggggaaaagggaaagttcacctgcaaaaccgaacaagctccctgggagaatcctaccaagtatactacatttacgatctggacggacgacatagaaagtgtttacatggccactgttgtcgagtgaatttcgcaacaccaaaatgtattatttaattaatataaaagagaactttcagggaaatgacaagtgcgagtattcgacctagaatggcgagtac

SEQ ID NO: 224045 - DNA, 2564 bp, Cannabis indica
ccttgtgagagagaagtcgcccacacacagcatacagttaccacaatcattagtttggaagactgtgaaggatcacatccaactgaaggacattcgggctcagagcttgattatactctgctacagacaggaatcaagggttagagatctgagtggaaggagacacttaattccgctgccatcactgtaaggtttcttaccttttacatgttttatttatcattttagaagttcatatttaggttgttaaatcaacatacttgtgagtagatctaagatcctggtaaaatttattccaacacatcagtctaaggatggacagctgtgctgaacttcagtttagtacccatagcccgttacaaactctgccaaaatttagaggtaaacttcgaatctatccgaaactatggactttggtacaccatgcaaccttactatctctttaacgtataaatccgcatactgatcaactaaaaaggttgtcttaactggtagaaaatgtgcagactacgtgaatcggtctaccacaacccaaattgaatcaaataaacccgtggttctaggtaacccaaccatgaagtccatcatgatatcttcccacttcaactcaggtagggttaaaggctgcaacaaccctgtcggtctttgatgttcaaccttgatctactgacaggttaggcatctcaatatgaattctaccacattcttcttcattccgctccaccagaagtaaggtttaagatcttgatacatcttggtggtgccaggatgcagggaatatggagtggtatgagcctcctcaagaatttcatttctaagttccacactatttggaacacaaaccctggtcttgaacaacatcatcccactatctggcactgtaaagtctctggcttgaccagctgatacctcttccctgatcttcactaactatggatcagttaactgagcagctttaattcgttctaatagatcagattgcagcgtcgtgttatgaagtttgcctacgatgaacttgatgcttgatctgaccatgtcttctgctaactaaggtgaaatttgaaccatactagttacttgtctgggacccttcctgctcagggcattagtcactacattggccttcccaggatggtaaaggatctcacaatcgtaatccttaaccaactctaaccaacgcctatgtctcatcttcgaatccttctgagtaaagaaatatttgaggcttttatggtcagtaaaaatttcacatcgctctccgtaaacataatgccgtcaaatctttaaagcaaacactaccgcgacaagttctaggtcatgagtcgggtaccgctgctcataatctttctattgacgagaggcataggcaataacccgatcggcctgcatcaatacacaccccagaccctgtctggatgcatcacaatacaccacgaatttctccttatcagacggcaaggctaacattggagctgtaattaatctctgttttagctcctggaagcttgtcttacacttgtctgtccacatgaaatgctgaatctttttagtgagctcggttaagggtattgaaattttagagaacccttctaaaaaccgacgataatatccagctagacccaagaagcttctagcttctgtaactgttttcgatctaggccaatccctgacggattctatctttcctggatccacattgatcccgtctttactaacaatgtgcccaaggaaggacacctaagatagccaaaattcgcacttcttgaatttggagtataacttatgttctcgaagccattgcagaaccatctagagatgttgctcatgttcctcttctgattgatagtacactaggatgtcgtcgataaatataataacacaaatatgaaggaaatccttgaataacctattcatcagatccatgaaagctgcgggagcattggttagtccaaaagacataaccaaaaattcataatgtccatacctagtgcggaaagctgtctttgggatgtcctcctctcggattctcaactgatgatagcctgatttgagatcaatctttgaaaagaccgccttcccttgaagttgatcaaaaagattgtcgatcctaggtaaagggtatttattcttgattgttagcttgttcaattcctggtagtcaatgcacatacgcaatgacccatctttcttcttaacaaacaatactggagctccccagggtgacacactaggctgtgaaaactctatgtcaagcgacccctggagttgtatttttagttctttaagttctgctggagccattctataaggggccttagaaatcggttctgctccaggtgccaaattaatgacaaaatcaatttctctctgcagtggtaaacccagaagttcatcaggaaaaacatctagaaatttccgaaccaccttaatgtcttctggtcgaacagagtcaggccaagtggtatccaataccacggctagaaaccctagacattcatctcgtaacaatttttgttaatattgaaattaccgggattcgagatccccgaaccaatccgacaaaa

SEQ ID NO: 224046 - DNA, 1970 bp, Cannabis indica
actggaactaggacttggacttggaatcataacttaaattggacatagatccagaactgtagccgtaccaggacccagacaccaaataagacctagacccgaattgggagccggacctggatcccaacttaaacatggaatcgggacccgaacctaaacatgaactcagacccaaacatggaaatagactagggacaaagaacctgggtcgggatctagaactgcaccgcactctcatcctgaacccaaactcaaaaatgggacctgggacctgaactagaacaagaccaagacccgtgataatgatcgagatctttactcgggattcggttaacggggattggaatagacaaatagtcagcgtctagatctaggactcagactacgaccagaacctagacgaagaaccaaacccgaacccaaacctagacctgtgacccaaaattagaacctgaactagaatcgccgaaccaggacccttgaagaagactaggaccgtgagcaggacccagagccagacctagaacagaacacagacctagcctcagacaaaaactgagactggaactcaggcccggacacggtcttttaccaagaccggaaccgagaccccgacctggacctaaatctgggacatgatcccaaacatagacttggacctagatagggatccggatacgaacctggactgggaccaagacccagaatgggatcgaaatgctggtcctagatctagactgagatcctgacccagacccaaacttggacccgcactcaggaccccaacttggacctagacccgaacctagacccagattggggtatagacctggacataaatccggacacagactcagactcgaactcaaaccgacacctagaatcagacccaaagctagacccgaaacaggacccaaactcgaacctagactacgataagaaccaaggacttagacccagaactgaatccacactcagatcgggtttgaaacttgggactcaaacccaacctagaccaagacacaggacgcgaacccacacccggagcctgatctggacctagacttaaatctggacccgaacccaaactcagagcatgactcgaactccgacccgaactcaaaccaaaactcgaacacagaatcgcaaatggaactataaccgaactaggacaaggaccagtaccaagacctaaacaaaaactcgaacccagatcaaaacccaaacagagacctaaaaccgaaccgtgactaggactcgaacccgaacctagaccgggaaccaaacccacacaataacccggatctggacccaaattcagtatgggaccagggagacagaactaggaccgcgacccagtacacgacctagaccataactataacctaggacccagttcgtgaccccgcaccagaaacggaattagactgggtgccgacatttggatccggatctggacccagggcttggacaaaacccgtagtcaatgtcttgatttggacctagccatggacccaaaccctgacaaggaccggaacccacacccagacctgaacccagtccaaaactaaaaagtggacccgaacacgtaccttgtgacccgaaattggaacaaaaacttgaagttcactgggactagaactaggacttggacttggaatcataactgagattggacctagatccaaaaccgtaatcggacaaggactcagactccaaatcagacctagacgcgaattaggagccggacccggatcccaacccaaacctggacttgggacccaaacccgaacctgaacttagaccaaaaaatggaacaaaactagggacacagaaccagggttgggacatagaaccgcaccccaatctcgattacaaaccaaaacttagaaatgggacctaggacctgaactaaaacaagaccgagacccgttaccgttatctagatcttgactcgggattcgggtaac

SEQ ID NO: 224047 - DNA, 1437 bp, Cannabis indica
ttcttggaagactttgaaccggacgcagaagcagacatattgcttcttaaaaaattaagaaaatccaatagttaggccccaaaccgaaccctaatgtttaaaaaagggaatgggggtcccctaatagttggaaagaggccccctccggatgcttgctaaataaggaaaacccaaaaggctttctcggacaaacatcgggtgcaaaagtcccaaaggtagtgactttgcaaaaagaaagaggaaaggggaaataagaaaaagttgagaaaaacgcgaatcactctaagccctaaaggcgttattacgacataaaaaggcaattcccaaaagaaggcgtagtaaaaagaaacaaccaaggcacaaaaaagagagagattctatgcattgtacagcaaactcaggcaaaatcattttccataagttcaaaattcaacccagaaatcttaaacacgcaatacaaacaaacaatatacaagtataaagtgtcctgcgaacttacatgaagtttgaagtttgggggttggtgttgatcgttgataaagagaagactggcaacagtgaaggaaaaagagcagataatctatggtgtctgaaatttttcttctctgtgaaaactcatagaaaatttggtaaaatggtgaaagtaaccaaatgaaataagaaggctggtttttataagccagcacaggtgtgagacagctgtgatcgagcatcatcgtacggtcagaatagcaatcgattcgcattctacagatccaacggttggggcaagtgctcatcaaggccgtaggaaacgtttgagtactcgactgacacccatttaatgcgccatatcattaaatggataggaaacgaatcgttgcctggaaaaagcaaataactgcagtgatgacggtcataaatgcatccccatgcgcctaaaagcacatgtcaagaagttaataaggcaaccggaggcacctaagcaagcctcgtttgcttcccacccaacaaggcttggggggtaaatgttgcccttaattttgtccaaaatacgtggaccaacccgactgtgactcgtggattgaaggagtaaggctttgagataatttgactaagtcttcttaatcaaaaggatcatcaaggagcatgcctcccggagaaggtatgagagattcacatactcccgaagagcaaggctataacaaagcaccttcgggaggtatcaaatcctacttgaacagtcacctcgcatttaatgttgcatgggaagaggcgtatgggaactgccataagtattaaactctgatggtgtaacccccctttctgcagctattacgctatgattaatgagcctagtgacgactactttatgaggaatcacaccagtcaagagaggataatggattacatccacctaactcttaaaaaacctagggattagaccatacatgtcct

SEQ ID NO: 224048 - DNA, 2421 bp, Cannabis indica
tagggcataaaatccaacacaatcaatgctaactcaaccacttttttgtataatgtatcgtgatcggtggtaattttcaagtcccgaatgatactggcattcagtccccttacatatttttgtttccgagtgaagtccattggtactagatcgccagggaacttggataaacgatcaaattccaatatatactcgtccactgtcctcttcccttgagtcaattttacaaaattttccatgtgcaaagttttgatggtaatattataaaatttttcctcaaacagactcttgaattcatcctaagacatggcactaacatctcgagtttgtctcacaatatcccaccagacgcagacatgctcttgaaacatgaatgctacacaatcgactcattccgttcccgttactcccatgttatccagaatgtgggtaataattctcatccactgttctgctttaataatgtcagtacctcccaaaaattttagaggttgcagcttgacaaaacgctcaaaaattgagacttggtgcagcagtacaaatccagggttacccacgactggaacaggagctggtggtaacacttgttcaactggagctgcctaggccggttacctaaacaagcgtaactcatcttcctgacaaagtataatgcttcgcatttcgaggaacatttgctgccagtcggcatgtggattagcattattaaccccgcgttatctctcaaattttttggaggcataggcggtgctgatggattggtttggtcattaccagggtttacaagctcgccctatggtctagttgattgattagggtccattttctctcaaatagccctgaaatcaacaacctcggtgagtcaggaactaaaacaactctcacacacttattgccttaactctaactcatacatactatttctcttttaaaataaacatttatcaatttaattactactcatgatttcatataacattttattttctagatgctcatatgctgcttataatggaaagcggtaaacatttaatcataaaagtagttaagcatttactctcaatacttactggaccacgagtcgagcttgtcgttgacgatgattgtacatgttcagcggtctataagaagtttaaaaactttagcgctctgataccaaattataacgctctaacaataggaacgtcacgcgcactacgactaaatataaactaatcccgctaaaccggaatctactcaagctaagagcaaaaattaaacttttaaaatacagaataaaaataataacttgtagttaataaactttacaaaaacatccaaaagtatacatcttaatgcgggatcctataaaactttttcaacatattacaagttattagtacacgccgacctaagcagtaaaagtggagattacaacattttccccctagtagacccaactctcgtggtctagcttagcctgaacatgtacaatacgctgcaaaagtcctcaatctcatggccgatcagcaactgacttaccatttcatgcacaatagagcacccgtgagccaaggctcagcaagacagtataaataacagtacaaatatcaattaaaatcacttaagtattagtgccactgcacctattgtctatttgacatagacctacgtgttacgctcatgtgtcttgttacaataaggccttagattggtttatctcaattttgattaccaagtctaacctaattatgcctttagcgcataattctttatttcaatatatacaacacattattacattcttaatcacttaaattctagagtaataaccttaggtcacaaaaccgctaaatttagggtaataaccctaatctcggtttctcacataacataaatgagcgccactgcgctaaactctatgtgctagtttactgtcttacctagtaatccaagtatgtgtagattctaaatttcctgagtattcctgagtaagcgccggtaatcctagtcacatattcttggaatttcacaaatagagttaattccaaattcatttttacacatatacataatttgaattccatttataaatcaacatatatagcccaaaacaagctttccaactatactaagaacgtccaaaatggagttccaagtcaaaattatggcaaaaacgagagaaatgaaaaccccaggaaacatgagcttcgttgcggcgaccaaggccctcgccttcaacctgctggagcctcgccaaggggagccatgccgtggtcgcagcgatgagccttgaaacccaaaatttctaatttttcaaagcttcaaaaatcaaccaatttcataccaagactcaagcaaaatcattcctaacctcaagttctattccacaccattcttatccaacattaacaagaatttaagcctaaaacaaagctcaag

SEQ ID NO: 224049 - DNA, 1622 bp, Cannabis indica
ttgctactgcgattagttttgtcactgtaatatatataattttgagtgttttagtcttgtctctataatacaattttaatattattttttgaattaatcaggagatttattaattagtaaactcgttcaaaacaataaaacgcacttcagaggaacaatcctccaattgaaccacacaacctgtagagaaacaagagtctcttgccaagcaatgagccaacttgtttgcagatcgtttaacaaaacataactcaataaaagataaagccaaaagtaaattcctaacatcttgaacaataagaccaaactgtgaggacataaagactttacttggactgcttggacacacaccaaactatccgtttctaacactacattgtcccagggatgagtcgcaatccaactcaacacttctttgatgcctatgatctcagcgatttcgagttagacatacccaacctttcccttcttgaaagcttctaccatgattccatgatgatctcgagctacacagcccactccaaactggccctcttgttcaaataaatccccatcaacattaactttaatcttgtttaacacgagtgcaatccaacgctcacagttctgccccccatcattcaaatgagacaacgaaaggcccttcctttcctaagcaaatttgtattgatcaagcatgtttctagctgatgttataatatttaaagcaagccaactcttcttttgccaaacaaagtcatttcacgcacgccaaatagcccaactcaccatcttcgcttcctccatttcaacttcgtggcccctggtgaaaatttccaacaaccagctgctgaacgttgcagccccagccccgacgtccactatgctgcgatgccaaccagctggtgaaaatattttagttgtgtttgtgtggtatagttttgttttattttgtttcgttgttggttcttctttgctcttcgatgactcattatcaaattgttgttagtagttgagaataacaagttctctgcgacttaaggagttgttactaatgcaattacgtaccttacacaacagttgagtgcttaagctacgagattgaataataaacctgctgcaatagtttttacagttgtgtcttctgagtggtatagatgaaacagaatataagtgttcttaaggttaattgtgatgtcgcaatcttattcatctaattttatattaggtttttttgtcaaatgatctcggaattaagtggttaattatttggctcgtttttctaatttcaatcttaatcatttttccaataaaaaagatgtcatgattggattacatgctaatttatatttttcagtacatttatttttaatattactatattaataccatattttaatggacgatatttattaatatacctaaaatctaataaatctcggttcaatatttaattgtagcaaatattgtttctgttactatcaaaaatagaaattaatatacgtaatttcaagaaaccaccatcttctccggttgaagaaaccaccgacttccacagctcaattattcttgaaaaaaaaaatagatacacaatacacccttagtaacttctataaatacatttactgttgggttttgtgccc

SEQ ID NO: 224050 - DNA, 1680 bp, Cannabis indica
taaagtaaatttatttagatactggaaaatttttaaatatgcaatattataatatttattgtagtaaccaataaaattagatggcgtgacacgtaaatttgtgcaaataaatttgttgaatatatttttgtaaataaaatcaattttagatataatattgaaaaaatttcttataataggatttaagagacttgtagtgataaaggtaatataaatgtaactttaagtatttaatctgctagaagaaaaaacatgttgtatataagtgtatgaaatttaaaacatcaagtatttatgctacaaatactctatgtttgataggatttaacagaaaagtagtgacgaaagtaacggaaatataaattaaaaattttaatccgtcgaaaacaaacatgtggtatttaagtgtataaaaccaaaaacttatcatatttatgccgcaaatatccctaaaaaatataaagttgaaactaatattttttttttattgtggttgatttaaattcaaaattcaatatatctatttactgtctcattattacaattaactaaaatgttacaattgaatgtaaaaataaaaaaaaatattagtggtcggtttggatgggttaacatgaccaaactgaccaatttcattgggcgagttacttttttcttttttcttaattggacaggttacacttagatttttgtaacctaatctttatattggattgaataaaatgtaccataaactgactaaacaaactagcgtacacccttaattagtacataggtaaatgttcttattttaaatttagtaaaaatataaccattttacattactttgtacttaattatattttgtcacgttatatttttcatatttttaatgtttaatctatattttttgattaattttaaacgatttagaaacaaattacttaaatatcatgatatatctatattagttttgttgaaaattatttttattttaaagatgtcaattttatttttatttttttgagttgttgtgggtaattggtgtaagagataaatataactgtgagggcataaaagtaattttactttgataatggtaggaaaactaataaagtaatttggcaaaagtaatataaaacacaccgtttcactagaattagtttttttaacattgcaattcaaatttaaactcattgtacatatctaaaaaaatagggctttttcaggtttatacaaaaaatgcaactattttacaaaaatacagtggtcggccctttaaatatttatacagcccacaatctaaatattacaattatatatcttcttctaaaccttcagccgcacgaaccaaaaacctcactgtctcaagcttcgatcgatcaacccagaatgacaacctaaacgaaaccaaaccaggcggaaaaccaccattaattctagtgacttcacctgagaagaaaaccagaatcaatccaaacaaatgtttcgtattgatgaaagaaagagcagaaaaaatagtttaaaattaaaattcaaccctgaattctgatttaattcgcgaataactgatcctcgtaatatcaactatcagattcataaaatgtagatctctaaaaatagatctagagctctcaatcaatctaaattaggtataatctaataaaaggggaaaaaatacatcaatactataggtagtgt

SEQ ID NO: 224051 - DNA, 2676 bp, Cannabis indica
gccagtatcaatgagaagctataaagtatattttctctgagataagaaaatgccttcagatgatcgtgcgatttcgaagccaaaaaaatattttactggtcccagggccttcaatttaaattgattgtgaagtgaagcttgtagttggtgcaatagagcattgttggggcctgctatgatgatgtcgtcgacataaaccaatagagcaattaagctaattcctgtccctttagtgaataaagtataatcagcttgagattgttggaagccttccatgataagagcgtctgaaagcttggtataccattgtcgtgaagattgttttaaaccgtaaatcgatttatgcagcttgcaaacaagattagaggcagtaccatctgtgtttgggggagttaaacctggtggaataaccatgtaaacttcttcgtttaagtcgccgtttaggaatgcgttgtttatgtcaatttgtaaggtgcgccagttttggattgcagatatggcaaggataaggttgaatgtaaccatcttggctactagtgagaaagtatcaaagaagtcgagaccttcttgttgagaaaaaccttgtgcaactaatcttgctttgcacctttcaacactcccatcactgttatattttatcttgtaaacccatcgacatcctatagctctcttgtttggtggaagcttgacataagtccatgttttatttttcaataaagcatataactcggtttgcattgcttggttccacaccttgtgctggctggcttgtttgtaattctgaggttcagaaagagctgtgacagcaagaataaaggctcgatgagtagtagataatttttcatagttaataaacttactaagtggatgaggcgtagaggattggtcttgtaaaatggagttgcattcgtaatccctcaagtatgcaggagattttgtttgcctagttattcttcgaagaggaacttcatttgtggcaggcgtgttgatgttgttgtttgtgctgttgttgtgatctggtatggtagaggcaggagccatttgttctggttcactggtttgatcctgagagatgtcatctatgttgatatcttgatggttatctacaggaaagtcactcacgggtgtattagaaataagactagaaggaaacaccatattagagaaagggtcaatgtgattttcatcagtatttagcctttggaaagggtaaatgtgttcatgaaatatcacatttcttgaaataaaaaactgtttgctatttaagtcatagagtttatatcccttgacaccttgtgggtaacctaagaaaacacaaggtttggcccgaggagcgaatttagttctatgagccgtgagggtagatgcaaaaacaagacaaccaaaatttcttagattagtgtaatctggtgtagtgccaaataaaagttcataaggtgtcttattttttagaagatgagtaggggtgcggtttattagaaaagtggttgtcataatacactcagaccagaacttgatagacatattagcttgaaaatagagagcacgagcaacatttaataagtgctgatgttttctttcagctatagcattttgttcaggcgtctctatacaagtgaagtcatgcaatataccaagtttagcaaagagatctttaaaaactaattcaggtgcattgtcagatctaaaacgtttgatagtgcaatgaaattgagtttgaacataagaaatgaattgtggtacaatgctagcaacttcagaattttgttgcataagataaatccaagtaaatctagtgtgatcatctactagagtgagaaaatacttgtagtttgaatgagatgggatatgataggggccccatgtatcacaatgaacaagatcaaatctgttattagcaaaagaattcttattaggaaaaggtaattttctttgttttgccaaagggaaaatataacaaggagtatgtttatgtagagtattaacagcacaattcaattgattgcttaacagagccaatcttttctgggataaatgtcctaatctagaatgccataggtcagcagtgacagatagaacattctcagatctggcagtatccaaggtgtagaggccactgttgttgctacctctgccaatctccttcagatggagtttgccctgtatgtgaaaattgttaacagtaaaattgacattaatcgaattgcagctggttagactactcacagagataatattgtatttgaaacttggtgcataaagaacatcagtcaaagtgagatctttgttaataacaatagaaccactttgttgaacaaaaagaaactcattattaggtagaattaacctgactttaaggataggacagacatattgaaaactcttaatgttgttgcaaatatgtcttgtagctcccaaatctattatccatgattcatttttaggattgacataatgattggacaagataatacttgttgctcccaaagatgagctaggatcagtagcagttatattactcggttgattagctaaaagattcagccgttgctgatattgggacacactgagttgaggtaacaaggtgtgactttcttcactggaaggattagattcagcattagcctgcacttggttagttgttgcatctttcgatctgttgctcttgaatcctgg

SEQ ID NO: 224052 - DNA, 1712 bp, Cannabis indica
gaaatgggatcccggcttttgttaataatgtgtaaagtttataaagtttcataattaaaataaaatttttaattttacacgatttttaagaaatttctttgattagaaaagataacactgtaattgaaaaaaaaaatcatcgtagcgtgccttgcactagggcgttacatgttacttctcctttagtaagattggatgattgtcgttaacgcagatttttgttaacttgatttgagcctaactggtgataaatttgcacagaaaaataaaaacagtaaagaaaaaaagtatgaacacgaaggctttttacgtggttttgcagttaaaattctgcatagtccacgagtcaatcttattagatttctgatactgttctagggtcttttctcttatgaatatttttgtccatttttttagtttaccttgcctctatttataatacatagttaggcagttaaatacatagttgactgatatcttacaataattatcccctgaaatcgtggggtttgattacataccacgtaaaataaatgcagttaatatttgaatattacacagctgtgattggtctgcttttattgggtcaatgtaaatgtgcattaaatacgttgcaactcgtatcgttctagggcgtcttgccgagaacatagcaacaataattttggcagcgagctagagcttttcccacttctttctgaggctaataatgtgaacctcgtcatttctgcgcttgaagatgtaacgctccatttgatgatcgcagttcttggcgacaagatgaccttcagcaatcagcatcatttgaatgtcaacttctatctgagagagctgactctacaaagttgtggatttctttgaaagatgtctggagctgattagtgaaggtaccacgggcacgccttcctatggcgagatgaacgcctcgctatttgttgtttggatttacccgactgtaatacttagtttgtatactgtgtgttatacgttaagtgtcttaatagtcattatatctcgtctacgtctactcatgcgtaacgagattgatgcctcgccttgcacatccaatgtcgtatggtttcttgttaatgcacgaggcaacaatttgtatatctttatcttgcgtaagaccttatattcagcaagttgtgaatatactctgtcaaatccgaacttaataagttattccgttttcaaatgtgattaccattacattcattaattcataccctccttaatttaacacatgttctcctttgaaacgatggccgaattttgggtataacaattgccccttaaaaagttcttttaaataaaaagtgctttttaaatgaccattgaaggtaaatttgtcataatccccttcttcaagatcacgcatgtccctaagtttaatggcttcatggttccgagggccaatattagcattaatggattgcccttttcgctacttctttattcccaaatgatagatttcccaacttttggccttaccgttactgggctccaagtataaaatggttgttcaggtgggacatattccataaactcctggtttttgatgaaattcatcaagaacttggattgtcattctcctgcggagatgtcccatccagactcagaattttatccctcaaaacttgaagcaccataatataccaaatgcttttcctccctatttttgggaatatgttactgttgggttttgtgcc

SEQ ID NO: 224053 - DNA, 1253 bp, Cannabis indica
cttttggggtccctttttgcagctccgagatgtccttcggccattggaagttaccaaactagctgttagttgcagcagcgagtctccttgtgtaaaggcagtccacaaacagatggttatgtgtctcaatctcattttcacaaactggacaaagactcgaatcaatattcatcaatttcctcaagttatctctagttaagagattattgttacaaacttgccagtagatgaatctatgcttgggcataatcaatctatgccaaacatttcttgcataatcaactctaggaactgtcagaaggtttgaataaaacagtttagcccgaaacttacctttttttacagcttgttggaggctttgctcgttagttctatgtctgagtctcaacagttttttaaagtaccagctcatgtcatttttgataggcatagtctagagattgttgtctttgatatatatggcatgaatccatctaacccaaagattatcttgtttgctggagactgcccataagaatttagctatcaacgccttgttccattttcttccttctcgaaagccaaggccacctagattcttaggtaagcaaaccttctcccaagatgacagatacagtatgcttctatttcctttcatcccccaaagaaagtcacgacaacacttatcaatagctggagtaaccttttgaggaaggataaacaaactcatccagaagttcctgattcccaacaaaactgagtgaatgagttgagcacgccctgcaaaagatagatttctgctagcccaacagtttaaattcttgtttagtttatccaatataattccacagtcagctgctttccattttgtaggtcttagtttaacccctaaatacttcagaggaaaagacccctcttccatttgcacctcatccaaaatcgtcttcttgtcagtctccttaacacctccaaaataaatgtgagatttggagttgttagcagccagacctgttgcctcacaaaagcttcggaaagcattggaaaccaccttaaccgccttgatgttccctctatagaaaatgagtaaatcatctgcaaagcataagtttatcagattactctgtttacatagaggatggaagccaaaccctttctttgtcgaagcatgggccagaagtctagtcagataatccataacgagaacaaacagaagaggagacatcgggtcaccttgccaaagccctttttcctctttgaaggagccttgaatcttt

SEQ ID NO: 224054 - DNA, 1815 bp, Cannabis indica
tttgttagagttagtttgcctaccgttcatttatgttattttcagttaggcctcaattataatatatatatattgtacaactctttcaaactctttcaataagacaatcctttgttcacttatctttctctttctctttctctctctcttaaaataacataacaattacaagtaataattaagttaataaagttaatgtagagtagattataaataacttcaatattcaaatacaattaaaattgccaactataaagtttaaatttttaattaaacactataaaatacaaattttaaatgtaaaataatttaactattaaattaattttcgtaataatatattatagacgatttaaatgaaaaatatataaatcaatttattcaggttgtttgggtaggttggaataatattcaactcacccattgtatttattaggcattttgaatttttcattattaggttattcaaattatattttttgtcaatttattcagtttgatttgagttgtttgtaaatttttttgaacactcctaatgtccaacatctttggaccttttttttttcattacgtgctggaacaaaacttcttatgcgctttaaatcaaatccaaatatttttcgctcattaatttttctttttgaggatttttttgctcattaattactatcatataaatgacacataaatccattctcaaacaactataatatcgtagatttaaattgtaacatacactgatttaaatgtttacaatttttgtatgttacattattttatttatcaaaacactaatatattattcaaaatatactagtgtattaattatttttgtaaaatatttatggtgttactaatacactgcaaggattatatcaagaactaataatgaagaaactaaattaatacaaacacataaaatttacaagcttcatttgcattgaaaatgcattccagtgattagagcttagtttcctcgagctagagtaaataacctctaataagaatcaaatgtcaagatacaaactccagttttttaaaatcaaagaaatgtaaaataatacaacaatgatccttaaaacaatttaccttaacgatcttgatgactcaatcaagatctaactttaaggttcgaagagcaagctccccttgcttcccttcaaccatgaataccgaactcccttcagatgaaacagactccattatcacaaaagcttgaacccttcaacaatgaaggaatccgcaagaaacaaagaagaagaagaaaaagatttttaccctaacagagaaaaatctctatcaaagaatcaaaatgagtgagagttagttagaatattcaagaatcaattatataaaacaccaactcacacaaaattaactttgacagctcactaataaatcaatgatagctgttcaagatattttaacttgaaaatactgatctgtcaaagctaattcataaaccaataacatacatactcaaatagaactatcgactgtccagatgacataaaactcataaattttcacacaaaataatatcatgtttataatatatatataattaaaaaaccaaattgaaattgttatataaaaaagtaataataattattgtaccaaaaaaaagtcttgaaataacttatttctcctgcatacaaaacaagcttcaaaacaaaatatttttgtatttttgacattgtatgttataatctcgttatttttttatatgttgatatataatatagttatttaaaacttcgcatatttttttgaattatttgctgtgtctaaattatgaaatatttttattttaaa

SEQ ID NO: 224055 - DNA, 2465 bp, Cannabis indica
ttacaaaattatcaagaaaatccttgaatatcctattcatgagatccataaaggctgccgaagcatttgtcaacccaaatgacataaccaggaactaataatgaccgtacctagtatgaaaggctgtcctcggaatatcttcttcccagattctcaattgatgatatccagatctcaagtcaatcttagagaatatcgccttgccttgaagttgatcaaacagatggtcaattctaggcaaaggatattttttttaatagttaacttgttcagctcccgatagtcgatacacatccaaagggtcccatctttcttctttacaaatagaaccggagctccccaaggtgacacactaggttgggtaaatcctagatccagcatcccttggagttgtatctttaattctttcaattttgcaggtgccattcggtaaggtgcctttgaaacaggttctgctctaggtattagatcaataataaaatctatctcccgctgaggtggtaacctgggtaattcctcaagaaacacgtctaggaattccttaaccacattaacctcttcaggtccaagtaacacagatttactggagtcaattacaaccactaggaatcctacacatccactgtgtagtaaatccctagctttcaaagctgagattcttggaacacgagaaccttgaactgaaccaacaaaaacaaatggttcctcattctctggttggaaagttaccattttccgtttgcagtcaatactagcagagtacttggacaaaaagtccatcccgagtataatgtcaaacttagccaatggtaactccacaagatcaatgctcaattctcttcttcaattctaattaacactgatctaacccactttcttgaaataattaattccccattaggcaatagggttccaaatcccatctcaaatacatcactaggcctaccaagctaattaagaactctcgatgctacatatgatcgggtggcacccaaatcaaataaaactataaaagtaaaactgctaataagaagttgacctgtgactactgaagggatgtcgacaacatctgtctgagtaatagcaaatacacgcgcggatccaggtttggtttcaggcttaggttcctctttcttcaattggggacaatctttcttgaggtgccccactgatccacactgaaagcaagctctcctgttacaagtcccgagatgatgtttcttgcagcgcgggcactcaggataggagtaagtctgacgtccccctttaccctaatttcctcgaaacgtcttactttgccctgaagtcctcgatgatgggaaagttctcttcttttgttcaaaagtggaatcaccactctcttttacaaggccagaaatagggagagtagtggtcccaccagcaccaggagtctctcgggtttcttgtaagaacttaactgctccttcaactcgtagagccttgtcaaccattttagcataggttgtcgtgtcatttgttgtgataaccagatcatgcctaatcttggcattcaaccccgccaagtacttctcctttttactgaagtttgttggtccaatccctaaggctaatttggccaagcgatcaaacttggttgtatacttgatcactgacatattctcgtcctgtaccaactcaacaaactctttccgctttgcactacggaccgccttactataatatttagcattaaacagtcccgaaattcttcccaggtcattttggcaacgtccttagcgagggataccatctcccaccacaccaaggcatcttcctgaaattgaaatctggcaaatgccaccctgccattcctgaccactcccatgaagttcaatattctttcaataacagtcaaccactgtttttccttaagcacatcaggaactcccaaaaatattggaggtgcttgcttcctgaacctctcatataaaggctccatacggttactagcaacatgctgttatgctggcaccgcaggaaccggagtaggcggttgtaggggaggctcaacaggagcatctcgttgcctgagtcttcgaatttcatcttcttgttgagtaattctggcttgcatctcagcaaacctccgctcccaatcaaatggagcttgaggtggattctcttgaccacccctaggagcacgaccgcggcctctaccgcgtccacgggagttttggggatttctaccaccccgaccacctccggtctcaaccatttcaccctgctttctgacgtttcgctgggcgtccattacttaggacttagcctgcgaacccacaaggcatgtaggttagatagtggtcaaaatattttcaagaccgcatttagggttttaaaacaacaatttactcatatatgctatatatcttaaacaatttgcaaaatgtcaagcttacggaactgtgagttgagctcgacattggccttgattgtacatatcttga

SEQ ID NO: 224056 - DNA, 3159 bp, Cannabis indica
aacttgacaaagctacaaggtacagacaaagttttggccaatcgtacccaagggtacttgttagataaattacattgtacaaggttgggtatcagcgaagtactgtctcaagtatacctacttagactaatggtgagtcttaagttagggattcaactataatggactcactacaaattcttatatagagttcccaacggaaccatgtataagattacagttgtatatgcgtacaaggccgtcacgagacccttctcgtggtcaaaagagaataaatactttgtcgcccacttggaaccttgcccttggccgaccagggttcccaagctaagagaggtcagcaaagtcccatgacccaaccaagggcctaccagggaccctatgcacatgcattggccagccagcttttggggtaccccctacggctggccaaccctcatgatgaaggcccatggtcggctaggtcttgaacaagacccctatggccgaccagggtacatgtcagatctaagtgtgtattttttaagaactaaaacacaatcttcgtgattcaaagagtcaagaatcacaactaaggtcaaaatcagatctttttcgtcaagaaatcacacattatacatcctaagcctgtcatgcagatcaaaataccaaagcaaagaaaagcttcatgcaaccatggaaaaatcaactaaaacaattaaatagtgggaatagaaagcttacccaatacaagaaacctttggtgaagggaagggacagcttggatcgtcaaaatagcttgaaaatcttaggagttaaagcaatgtggggcgtcagcctctagagagaagggaaatctttcaaaagttgctttttctagagagagaatgaaatttggaaggtgaagagagatttccctccattaagcttatatagctcttgtgggactacctctttacttgccatgcaatgttcaattaaagagcatgcaaaagagtaatgtagttaacttactgcaacaagttagatcaaatagtcacaagaaattattcaaaggctaaatatgttgcaggctacattggtctcgactaagctggaaagtcgctatccgcaaagacgttcgaacagggacttgggggaaaatgttattcacattttgtcccacctaaagaggcgtgcctatgtggacaacttcagtgccacatggtagtatagcttgctaataagaaggccaagtcatctacttagcacttcaaccaacgagaagtctgaatactcaagtaggatgacgaactgacaaccagcaacctcaagggggctggttagccacccttggctggccctatggccagcataggccggccagcttgcatcatacagatgcttggctggccagctttcagcctagcaagattttggtgcgcagcttcagacgtggatagcaagccaaaccacggattaggtcttactagcccacaaaaaatagagagaaaatatctattttgaggggcattttagtcatttgtatattattaaattaatatgtaaataataaattttttacctatttctaatggatttaaagggtgtaaagtctcctatataaaaagtcttagtcaaacctagaagccttagtgctagtgctaagtcagaagtcattaagtctaaaactcgagctctaagtctgataactcacacctctctttctcacacacccagtgctacaaataaaaggggagtaagtaatgacccactaactaagaggttcaaacctctataaaatcttgtgttcatttactttattgttctaattgtgtaacacatagcaagcatcagcattaaatatgactctgctgtcggttggccaaatcttaggtcaacagttcctatccctatggagtttgtctttttgggttaattaattttttaattaattcaattgtgtgaatatctaatttgtgaagtggttatagatatttcaaagttgttgagatattctctcataaatatcagtaaccaaattcaattgtagatatttatttatttaaataattaaataatagtttaattaaaggaatttaactacaataaataggagtctgatttgagaaatcaaaacgacacttctcactccttctgaactagtattttcaaaatacatgcgtagagagaaaaataaaattgtttttctctcaattgttctcgctcatgtgttggaaactcaacaagaacaaaggatatgcactttatcgtaatagctcacactattccttgtgtcgtatgtggtggatcaatttggaagaaactagtgtgagtccaattatattttccttatcatttggattaagggatacaacatacaagaaattttgaggataccctgatagattcattgagatatggtataatgataatcagataatacgaaactcttccgctgcctaactgatttagaagataaatattcttttttttttttgggtcaattaagttgtattatgcatattttgtgttggtatgtgttgcatcatttataatttagaaatttgtcaaaatatttaatatgttttcaattaaattttttcttaattaatatataaaaaatataacaaataattaaaagaaaataaaaagttgcagcacataccttgtatgtgctactcacactagtttatataaatttatataaatgtatgtatgtatattaaataaaagaaaaggtaattaaagaaaaagagaaaaagtgttaacttgtggctagctagagcgttcctgcaataattagtgaaagaaaaaaaaaggaggaaactacattagactacacataacaatgtcttttttaaagtgtaaaattagatcgataatcatggcttttcaatggccgtgattatctgaatgaattgctttttctttgataaattaaccatttcttttcttaaccccacaaaaacgttgtaacaaactaattactcattaatcattatcatcattcttcactatgttttctcttgcaatataataatcaatatatatattaggagaagaagcattgccattacgtagcaaactatcaaaattattgctatctcaaaagtatgatgcatgcttagacacgtttgattaatatgtctcttggtatgcctaactccaaaactagaaagaatatcgaagacttttagg

SEQ ID NO: 224057 - DNA, 2492 bp, Cannabis indica
aaagctcacaggcaagctccgtcggtatctcacttgttattttgctaatgatagtctccttttctgccatgcaaatcagagtctgctttagccataaaaaagattttggagatcaccgtcaagcttcaggacaattccttaataccaacaagtcaatcatgctttctcacccaacacttcacacgatgcaagaactttcttcagccaaactttggggatgccaatctgtgaatgtcatgagacttacctaggtcttcctgcatactcaagtcataacaagaaggagttatttagtaatgtcaaggacagaatatggaagctcctaactgcttggaatgacaaactgttttctattggggggaaagaagtacttttgaaagcggtggtgcaatcgattcctacatacgcaatgagttgttttcgcttgccattgggtttctgcaatcaaatagagtctatgatggaaaatttttggtggggttctaataaggatgggtctaaaatacattggaaaagatggaagttactctgtaaatccaagtttgaaggaggaatgggttttcaatccttcgttgattttaatcaagctatgctagccaaacaaacttaatgattattcgataatccaaactcccttttagctcgtcttttgaagcacagatactttccaagtaacacctttctggaagcacacaagggtcactccccatctttaacatggcaaggaattcactggggtcgagagctacttcttaagggactgcggtacaagattggtaatggttttcatgtacgatgtggaattgatccttggatcccaggacatgatgagttcaagctaatatacttctcaggggaaccatccacgccagtatctacttacatacatgatactatggaatggaatctgcctctcttacatgaagattttgcccaaattgatattgatcggatcctcactacccctttaagcttttaccagtcaactgatcggcttttctggcatcatactacaaatggtctatacagtgtcaaatcaggctttcaccttgcaagctctatctctgagaaacaccaagaatcgtcctcggatgatcacaagtcgtggtggaaatatttttgggcattgcaaattcccccaaaggttaaaatatttgcttggaaagttgtccaaaatgccctaccggttgccacaggtttgcacaaacgaaatgtaattgactctgctttatgttcaaggtgtaaacatgcatgggaatcaattggacatgccttgttctcatgtaaatccgccaaggctgtttggaaaggtactaagtttctaattgattatcaccatgctcacagtatgtttaatggagattatctaattcatttggcaactacaatggaaaaaaatggatgttgaagaaatcatatgtgttatgtggagcatttggaatgataggaacaaagtactacatggtggcttaccaagagatcctatttcaattgcatcctttgctttgaattacattgagaaaaatagaagtgccaagggcttatcctgcaaaaaattgcagcaggaaattacacaccgaaatgccacttcccaatcaagacctgtacaccaaacttcctccaaccaagaatttgttcaaggtcctcacctcacggctgtaaactctcaaggaatgccaacactacacaccatgtctgctcctagccgatcaccatgtcagcagtttagagagaaccatactgaactgcaacctcaaactgcctcgcaccagcacccagcagcagcagcacaatttccacataacaattctgatgcagcaggcagtgtcccacgtcagcagctcttagacaacatttcttggactcctccagctatgaatgaacttaaaatgaatgttgatgctgcagcaaattttaaagatcaaacactaggaattggcgctgtagttcgcaactataaaggagcagtgatcgctgccctctctaaacgagttcaaggatgctttcgtagtgatgaaatggaagcgaaggcgctctttcatagtctcaattgggttaaacaatatccttttttaattgctatggtggaaacagatgcgctacgagtttcctctgctctaaactcttctcataaggatttatcatgttttgcagatttaatcgatgatgttcgttgtcttttatcctctttccctagagttactattatccatgctcgtaggcaggctaacaaagctgcccatggcttggctaggtacgctctagagttggatgaagatgtatcttggataagagaaataccttatcctattttctctattattgtaaatgactgttgatttataataatattggaaatttctacaaaaaaaaaaaaaaaaagaatagagtaaaaaaattgagagtgatgttagattttaagatatgtaccagttgtattgccacctgggcaccatgtagtgacccctacaattattattatttttattatt

SEQ ID NO: 224058 - DNA, 2542 bp, Cannabis indica
attgggggttttgccaccatttatcttataaaatttgagatgaatttggttaaaaaataaagtagtgttatattttagggtaaatactattttagactttgtgttttacaaaaggtactaattggatctgctgttttgttaaataacaaaataaaccatgtattttttcaaaatagtacaaataagaccctaaactaattttttgtcaaaataaaatttaataataatctgatctaaatgtgttatgacaaaactgttttcattttctgtattcgttcgtgtcaggacttctcttcaagttggcattatatattgtggggtattttgttgtgaaactagttttgtttttaatttattttgctgtgttttaggaattgattttctctttatttttttttaattataatcgattaagttattgcgtgttactcattatgttatataaacagttctattttagttataattaatttgagttatttcgtgttatttgtttttattcattataacacctttatagaaccggttatattttaattataactgttttgagttattttgtgttatttgtttttattcattatgttacagaaccggttatatttcaattataacaggtttgagttatttttttattcattatgtcataaaaccggttctatttttagttatatccgagacatctacttttggtaacttttccagcaacaatgacttttttggtgatttttccggtgacttttccggtaatactaactttttcgacgacattttcggcaccaacaacttttctgacaaaacttattattacaagttttattaaatttttttattatttttttctcatattttaaactttaattattttttaatttcatatttttttatattatttatttatgtcatataaaagtagactcgcctacattttcccatatatatatatgaaaaggaccccgatgaagtcacgcatgcgtgactggtcctgcattcattcgctattaaattgactcactaattgatttattatcctaaggctgctaacaaagataattaaataatacttatttattttttaaaaaaaacaaattctttggctattcagccaaatatattgtttttgtactcaatttaatagtcattcttctttaagataacataagttatattttcataaaaaaatataaaaaataagaaagaaagtgatgagtaagttgaaagaggatatttttttttttagatattttcaattattagtttatttgtacttaatcttccaagcttaaattttagtagtaaaataaaatcctataaacgactgaattgttagtaaatttaaggtgtcatctattttttactgttaactgccaacatagactacttatatgtacgctcttgtacacgtagcacatttatattagtacacctaatattaataattaaaaattataaaaaaaaatatttcaaaatttataatatttttttaatatttttattttttattttttataattttatttaatttttaaaataaattttgaaataaaaatattaagtgtaccaatataaacataccgcatgtacaaaagtgtacacataaacaaccatggtggcagttaactgtaaatttttctctgaatttttccgtctcccttttctcctagaattcttactacctaagtttctatttatagagtgataaaatgactaatgtgcaaatacgcttacgacaaattgcataagagaaattcgcacccaaaatattctaagattaatgtgaataattataaagtatttcaaacctaatcaacggcccgatcgccacccgagatgttctaagacccattattacactaatcagtattactcttgttgacttttctagtcaaaaggcttagatttgtatcgatcaccattcatatcacccagatattgtagtttatgcttacattaactatctacagggtatttcgaccctaatcaacgatctgatcacaatctgaaattttctaagatcaataattatactaatcaacattgttcttattgactttactagtccaaaggatttgattggtatggctcaccattgatctcactcaaatgtcatagtttatgcttacattgactatttacgaggtattacagacctatgaaacggtgtgatcgccaccacgaatgttataagatcaacaatgacactaatcggtagtgttcttattaactttatgtagtcaaaaggcttaggtttatatagatcttctttcatctcacctaaatgttgtagtttatgcttatattgactcactacaaggtatttcaggcctaatcaacagtctgatcagcgcccgagatgttctaagatcaacaattacactaattagtagtgttcttattaactttagtagtcaaaaggcttagattagtatcgatcaccgttgatctcacttggatttaatattttaagcttacgttgactaattacagagtatttaagacctaaatcaacgacctaatcgccacctgagatgttctaagatca

SEQ ID NO: 224059 - DNA, 2402 bp, Cannabis indica
tttttttttttatatttaaatagattttttaataaaaaataattaataatcgcttatttagttttaaatttttatattttttgtttaatttttttaatcattcaaaatgattttttttaagatctaaactaaaatttttaagatttactaaaaaaaatattgaatcttttttattttatttggagggagtacgatttgatagttgttaaaatttaggagggaaagtttcaaatttacaaagacacatcatcatttaaacaaaataatgagacaaaacttaacagaatgactaaatttctataaatcactacaagaatgtcaacttttgccggtgcaattgctcaattgcaccggcaaatgttacccaatgctggcaaaagtcaacaaatgcgttgacaaaagaagtcaacaaaatttgtttacctccatgttttgccggcgcatattatcgtcgacaatagagaatattaactctaagttcgccggtaaaagtggcaccccaaccgccaaaaggtgggaatttttggcggttcgagcctactttttgccggtgaacttatttacttttttttttttaatattttttacttttttaggtgccagcaaaagtgtcaaaaaaaggcagtcaatttccctcgtagtgaaaaaacgtgcacgtaaaagtaggtgagggtttttgccggcgcatgtaattacgccggcaaaagtagtgccttttgaccaacgccagccgatgccccccgccagtacaatgtcgaccccacacaatttcctgcagatacgcatattatgacataggtattgggtgagcggtcacgccacttgagaggactgggcccattgccaagacttaagacgggggccaaaagagcaactcccaggccaggtgcatccgggcggcccagtgtcactcaagaggaatatgaggcactgaagcaaagggtggaagaataagaggcacagaacgagtggcaacaaccgatgatgatgactcagattcagatcatgagtgcgttccaacaacaaatgatccaattggccgacgctgttccaggatttaatatgctggatctgcctctgattccaccgattccaccatttcagtcttctggccatgcagctggttcctcctcacagactgcccctcctggtgatgacgacgatgatgctgttgatttgtaattttattagtttacagtctagataatattactgtttatgaattcagaatacttttacttagtttatgacgtttaatataattttgtaataacattataaatgtcggttttataatatatttgatattatatttagtattattttgatttttaatttaaatttaatttcaaaattaatttataaatttatttctttttctaaaaaaacttttgtcggcgcgtaacatgcgccggcaaaagtattattttatgaattaattaatttcaataaactcttttgtcggtgtataagtcgtcggcataggcaaatttttttatttttttaattttggttttgtccgttgactaaactcgctggcaaaaataaggtgccaaattggcatttggcgcctaatccccgccaaaagtcttacgtcgccggcaaaacgtcgtcagggacacatcagccggcgaaggtattgccggcgaatcccttataccggcaaataaatgcgttggtgtaagtacttttgccggcgcaattcaccatgtcgccggcaaaaggtcatacgccgacgaactattgccaacagcttttgccggcgaaaattggcgccggcaaagctttgccggagagttgcacgtacttttgccggcaaggttaaacggcggcaaaagtaccttttcttgtagtgaatgtaaaagtctagagaaatttttagcaaacattatattttaaggggtatgttcaattagttttgaaagttcagaggcaaaattactaattattttattataaatgagtattgttattcgatattttaagatgttgatgtgacatcctataattaattagcaattcttcataatagtaatacaaaaattctgttagttgttgtacatatagaaagatagaatatacataattataacattataaacgggcattgttatttaatactttaaggtgtccaacataaacccatgtgacactttataattggatcaccattgttgtgaaaattaatgtgcaagtgtacacaatcttttcaagtaataaagtgataagtatacattacaaaaatctgctacttatagtgataactttttagttacaacataatttttttgttgactaaatgtgacttttagtcacaacaaaattttacttgtgactaaaatatagtatttagttacaagttgtcactaatttagttttagtctacaacaaatattgtgact

SEQ ID NO: 224060 - DNA, 1631 bp, Cannabis indica
gttgcccaggattgatgatttgtttgatcagctttaggagaagactgtatttgcaaagattgatctacgatctggttatcatcagctcagaattcaagaagaagacataccaaagactctatgccgtacaagatatgggcactgtgagtttttggtattgtcatttagattgacaaatgctccggtggcctttatggatctcatgaacagagtattcaaggatttcctcaataactgtgttatagtgtttttttacgacatccttgtgtactctcaaatagaagaggagcatgagcaacatctctgtatggtattacatcgactcaaggatcataagttgtaggcaaaatttaaaaagtgtgaattttggttgtcagaggtgtcctttctagggcacattatcggaaaagatggaatcatggttaattcagggaaaggttgaggcactgaaaaattggccgaggccaagaactgtgacagaagtgcaaagttttctagggttagtagggtattattgacgttttgtcaaaggattctctaagatttctatgccactaactgagttaaataagaagaaccaacagttcatattgtcagacaagtgcgaggcaagttttcaggagttgaaacaacgatttataatagcaaaggttctaactttcccatcagatcgagaaaagtttgttgtttattgtaatgcatccagacaggggtctgggatgtgttctggtgcaagctaacagagttatagcctttgcctcccgttaagtaaaggattatgagcagcactatccacagcatgatttagagcttgctgcggtggtattttctctaaaaatatggcaacactacctctatggtgaaaaatgtgagatttacacatatcataagagcctcatgtactttttcacttagaaagatttaaatatggaggcagagacagtggctagaatcggttaaaaattacgattctgagattctgtattaccccgagaaagtcaatattgtggaaaatgctttaagtaaaagaggtccttattcgttgcatctgagaactaccaaaatttatcaggatctcaaaccctaaaatggtggtatgggataaaaagagatgtggtagattacgtatctaagtgtttaacctgtcagtaaatcaaagctgaacaccagaagcaggcaaggttattgtaaccattagcccttcataaatggaagtgggaggatattacaatggagtacgtggtaaagattacttatacaatggatcagtatgcagagctgtatgtgaaggagatagttcgtctccatggttctcctaaatcaattatttgagacagagatccaaagtttacttcaattttttgggtatgtgtttagagagctatgggcacaaagctaaagttcagtacaatttttcaccctcagactgatgggcaatcagagagaagaattcagatattaaaagacttattaagagcgtgtgtcagggactttgaggatttgtggagtaaatactagtctttaattgaattctcctacaacaacatctaccaaagtacgataggaatggctgcttatgagattttgtatgttaggaagtgtcgttctccaatccattgggacaaaactgg

SEQ ID NO: 224061 - DNA, 959 bp, Cannabis indica
gagctgtgatcttcttcttcaagaaaggttgcaaggtggtagccaccttgaaccgtgtatgtgcctgtattgtggtgatgccatataagtttgtctgttgtgctaaagtagctcaaagggatggtgagtattttgtcaacatcaagagggcaaaaaacttgctgcaataaaggaacatcccactctctttctcagttataaaatttgataccacagcatttgggggtccaatgtatattattggaaggaaagaagtataaccaggaatccaagggtcattaccacagttgacagtacgtccctctccaattttccatcgcaaccctttggtcaaaagatcacgaccccacttaataccttgccaagttaatgaaggagaatgacccatacttgcttcaaggaacgagttacgtggaaagtgtcggcttttgagtaattggcttaggaatgaatctgaattttcaagaagacgccacgcttgcttagctagtaatgcttgattaaagttgatgaaggaccgaaaacccattccaccctcaccttttgttttgcatagcaaattccacgagcgctaatggattttagacccatttgcattcatcccccaccaaaaattagccatcatactctcaagttggttgcaaaagtaacccggtagttgaaaacaactcatggcatatgttggaatagattgaacaacagccttgagtaggacttcacgacctctgaagagaatatcttttcacttcaagagtgcatgagtttccaaattcgtttcttaatgttgctgaagagctctttcttgtctctacccgagtaggagggtaggccaaggtaacgttcatgacactcacggattggcatggaaaggtgtcgatgaaagaaaacttaggcagccaatgtagtattcggagaaaaagacatcacagatttgtcaggattgagaagttgacccgaag

SEQ ID NO: 224062 - DNA, 1212 bp, Cannabis indica
tagaatagcttctatttgtttatcattattttgaatgacttcttccacaactggaatttctctgataacaggaccctcatcaataataagttcttcttcaataatagggcccttgtcaataatagatcgttcatcaataataagaccctcgttatctttaatttcaagagcaatatattcataagcaatgagagcattatcaattggagtaggaataagactgttattattatcatctcttgaaaaagatacaagaataaaaattctcttagattaaaaattaaatcatagaagattaattttcacactttctcaatttcttataaattttaatactaagtatatcaaaattatttagacaccaaatatgtctaaaattatacttaagttttaggcacaaacatgtctaaaattcatatataattcattatttaaccaaattgacttgatacatttttttaattaatacttccacactttcacattaactttttatgtttatttctttcttgaaatatttttacattaactttgacaccaagcatgtcaaaatttattatttttgcactcataattaatatactcaatctttgattaactttatgggcctctcacccccacacttccactataaagtagattcaccatatcacttttcaaataaaatcttttttatttttacatgcacaccatataataaaaataaactaattattcaaaaataaaataaaaaaaaaagaacaaaatcactttgttagtttatttttgctttatttgtttaaatttttttttgaaaactatcaattttttaagaagtgttgcatatatatatatatatttataattcaagtagaaccaattatcaactccactcgtactagcccaaaatcgagtcaacccccacaaaaaaaaaagcagcccattatcattatggaaggtccaaacccggttgtctcactagtacgcgcccaaaacctaatcaaccctacccaatcaacctgtacccgaacctaatcaaacttgattcatatatgggcgggttcaatattaatttttcaatacccaaaagatgaaaaatgtccccaaaacataatactcgcccaaatgtgcagccctaataaaattttaatggcctatattgatatttcctcattatttaaaataaaataaacatacataatcataaaaatatatatacatatcgtagaacct

SEQ ID NO: 224063 - DNA, 1985 bp, Cannabis indica
ttgggcttgccgagataggccacaaaattaaagaaaaaaatcagcccagcccaaatcatcttatatctctctctcaaaaccctaatcttaccctcaaaactcagctgcaaccctattcctttctctcaaccattccttctcttcttctttctctcatggacggcagggctcgaaggttctctctcagcattgaagactcacaaacaaacggaggttcttgttgctctctcgtcgttgacggctctcacacgacagtgttgactcaatcccaatcccaaaagttgatggatctctctcaggtttcagtgttttaattttttattttcatttatagaatattttgactttacatctttctttagtcattcatccaccaaccctctcttggtctctttgttcgtcgccctcagggattgggatcactctcaaattctcgctattattggtataataatttttctccacacacatatatttaatgattgagttggttgttatttttttttttatatttttcgattacttatttcttttgattatataaagagaaaatttttaatttatcaagtttatggttatggaattcatatattgaattctgctaagctaatataagagtggaaatgatgaagtaaatgcttctaaagctactacgaactgagtgatatcatttctattgtattttcagatatcataaaaaaatgcatataaaaatgttgcatgcctggtgtttgatgatatttctcaaagaaactaaacatattatagttttgttttttgttgcagtggtctttgttgtgttgttgagaaaatatgctagtctcaaaatctttgcatacactattcaaattcaggtaatttttttgcaagaatcaattttttatgttgtttttttatgataagttcaatgacgagattaataattttattcattcgagtatctatgctttattttaattttttgtatgtatatatactccttagttagaagaatagcgtctctataactttataaaggtgaaattgattaaaatggtatctctttgaagggtcacaagttatagaggcttcaaattttatgttgttgaaattgtttaatgaacacacttttgtttagttttgtatacacttttgttccacagtaaataaatttaattgatttcagtatgtgtttagtcttatatagttttacttgtgtaaagaaagaaacacacttttctttctagtactagtgtttgatttgtcaagtaaaccatacattcaaagggattatttctcttgtctaaaccttttaatttttattgtcattcttatatgtgtttcagttaatgcaattactttcactctgtttattactaatttgatttgaagttcaagattaagacttggcaaagctagataaggttctctcaatgagataaaaggtgatataatttcttcttagacacttggtagagataataacaagtttttcaataaattgtcaaaaaattactttacatataatatatatataattgtttgagtatagaattatacgtgctaaaatggcttataattagttgatgtgattttgaagtgaagtgcccacctatttatgaattaggtgatttatacaatgtattttttaagggtcttcaagcctacaaatgtatattggtcttaactttgattatatgtcatttttcatggagctattgaaaaaggaagttaaaggaataatgaggtctatttaattgtcttcgtggctcaaataagacttgttgattctataaagtagcccaacaatatatttctgtaactcttaaatatttgaattcttttttttctattttttggctcagattctgtaatgatgtcttcacaagttttggttgaatattatggaatggtgttagatatattgtttataatgtattgtaattttttttatgtatattcttataataaatatataagggtagggaaaaataaaattaatgata

SEQ ID NO: 224064 - DNA, 1727 bp, Cannabis indica
gatgcccagtcggcatcacaataagcaacaagatcgtgtgacactggtttagtgaacctgagaccatgattcatagtgccactaatatacctcaaaattcgcttaacggcttgccaatgtgtggacaaaggctgctgcataaactgacagaccttgttcacactaaaggaaagctcaggccgagttattgtgatgtactgtaatgctccgacaatagacctgtacatttgaacatcagcaagtggttctccctgttgagctgagagtcgaataccactagtcatgggtgtaggagaaggtttcgaaccaagcatttgtgctttgataaggagatcccgagcatatttctgttgacacaggtgaatgccctcttcagaataagcaacttcaattcccaaaaagtacttgagagggccaagatcccttaaagagaatcttgtattcaaagcagcaacaagattatccaccatggcaagatcacttcctgtaataagaatatcatcaacatacacaagcacaagtgttgttgatgtttcagaatgattaatgaataaggaatgatcggatttggatgaaacaaaaccaaatgacagcagacattgatgcaacttatcaaaccaagctcgaggagcttgtttaagtccataaagggctttgttcaacttgcaaacaaggtgctcttggccaggaatctcaaaaccggggggttgttgcatataaacttcttcttgcaattctccattgagaaaggcattattgacatcaagttgccttatgttccatccatgagacaaggctagagttagaacaactcttattgtgaccggtttgaccactggactaaaagtttcagtgaagtcaaacccagcttgttggtgaaaaccttttgcaacaagccgagccttgtgcttgaaaacactaccatctgggttctctttgatcttatatacccatttacaacctatagcttgtctcccttcaggaagtttcaccaaaatccatgtcctattcctagccaaagcaaggatttcatcactcattgcattattccaatgctcctgttgaagagcttctttgagagaggctggttctcgagaagttaaaaaggccttgggtttgtaaataccaagcttggaccttgttgtcatcttgtgaatattgtgtttaccaggagcatttaggcaaccagcaacaagaggcaaagctgctggtgaagaacaagcaggaggagatctggtatctgctatgacagtaggaagagaagtggatgttggtgaaggaatggtaggcacaccagtttgaacagcagcctcctgagtgtggggaatgctagggctgtgtgatgcagaaataggaggaacttggcctcgggacagatcagtaccagtactgacaccagaaggatcaacacatgctgcagaatttgtacctgtatcaacaaataaaatctgttctggaggcaggttgtgttgcagagttaggcacaaaggtgttgtcaagtaaaacattttggtcactgtcagcatgcaatggaacatgatcaaccacagtattagaaacagtagggacagcatgtggttcaccttgatagagtaaatctatcatggtgtaaggctctttgtagtgagaacatttaggaattataccactaagggtgcatggagttatatgggattgaggagtgttggagtgtttagattcagtctcatagggaaaggagaactcat

SEQ ID NO: 224065 - DNA, 1729 bp, Cannabis indica
ccctagatttacaagacctttcgcgattctcgaaaaggttggacaagtggcatatcgatcagctttgcctcaactctatcagcagttcacaacatattccattctctatgttgagaaaagacgtttctgaccctgctcatgtgcttagttataaaaatcttgagctgcaaccagacatgtcttatgaagaatagccaattcagatctttgatagaaaggataaggtccttcggaataagaccatagttcttgtcaaagtactctagagaaatagcaaggtggaggaagccacctgggagttagaatcagacatgagagcacaatatccagagttgttcaggttagatttcgatgacgaaatccttttaaggggggataattggaaagaccacttacctttaatttggaaattagcagataattagggctttattatgaaaattatttattaatattgaattaattatttatgatagtttatttggatttagaatacattttgtgtcatatatagaaatttcataatttttgcatgtttgtcccctgcaacattggaacgcggtgtttggctattagaatcacatcttagtacttttagtatagggtgaaaataaagttagacattgggaatgtcaggaatagtcaggattttagaatttcccaaaataaccctaagtacccttttatgttgtttcagtgtgggaggggaaaaatagtcattttgtcccatatgtattttgtcctttagtgaatttcatagtggctttaatctaattttttaggttaatactaagatgaatattaagtagataaaacaactctttttctcattttattaagaaatcaaaaatatcattcttgaaggaaaggttctctctcttgccctctctctttcgaaaccctcaaaaccagctagggttgttgtgcatttctccatttaaagcttgttgttgcagcaattgagtgttattaagttctaggtaagcttttaagttgatcctatttagtttcttgagttttaagaaagtggtgtttgcttgaaattaagaatttggttcctgttcttgctgtagttgtttgattttgtttgcaatagttaaattatgtttatatagcttgatttgagcatgttttggtagtttgtttgttgattgagcaagctttgagttttggaactcaagcttggctctttagtggtgttttttaattatgggcatgggtagttgttctatcacttgaaaaaaaaaatttggagtgtattatgcagtttggaaagtttggttgagtttgggaacattttggttagggtttaaaattgtttggtttttctgggtaaaaccggctaaccgattttacaatgcttataaaaccgattacttagattttgcagcagggaaacccaaaaattcagcttgtcatttcgtgtcaatttcaggtttctagttggttgattccctgctcgtttagggtattgccatattaagttgcagtaggtagggttttgatttaaaacctatgtccctattgtgatttagcaagtcacttattaatgttgttatcgatgtgatttaggaacctataattcgccgagcaattattccactcaggttgaccagcacacctaaatttggaattggggtaagattagtataatatcatgcatatgttattacatgtttactgtacatgttgtttatgcctgttagattacattgatagcagtaatagt

SEQ ID NO: 224066 - DNA, 2326 bp, Cannabis indica
gtcactaaaaatcactcttgactttttagtgacatgcacttttttgcatgtcactatataatgtcactaaaaatacaaattatagtagtgtgtgtgatcaaaaataccttcattgagaaatacagcttcagcagattcatatttattgatccatgtttgattggccataattctgtcgatctttgaataaattctatcatctccatgttgcttatttgaccatgtataaaaacttccacttgctttgacatcttccacttgacattcattcacacattgtaaaaattctgtatcaggatgagttttgaccctctggccgatcctctcatctttggcaagaatatcattgaagtctcccatccaaagccaatgctcattcgttttcagctcacacaaatccctccatagtactttcctttcatttcggttatttgaagcataaaccacagtcaccagactatcaaacccttcaattgttgtcaacttcaaatgcattagttggctagtacatttgaggatgtcaacattgaatcttcctggattccaggcaatgacaatcttgcctcctgcatgccatgctatattagatgagaagcaccaatttgcaaaaacattcaagtataaggctccaagtttcggagccttaactcttgtttcgagaagcccaacaaaatcaactttctgaaaattgataaattgctttatcaactgttgcttgtgttgactattggctccccgaacattccaacatactagcttatccattagatagagagggttctccccccccctctagtcttatgccaagctaagtcatgatcttgcacccctatttcacccatctcttcctcttcttccagcacctgaaaagtattcttcacttctgtattgtcattttgcctagaacccgatctcataccctctgtttccattcggctgccacttactagtttcccctgtactttagtaaaaccttcaacatcaacctgtggtattttcctatgatcttgttgaactttccacaattgagtcaccacagccttccttttacaatcggcagtagcatgccccacaccataacagtgagaacaagatataggcttccattcatacttaatcccaaccgatgtattcaagccgaattcattttcaaattctaataaatcttgtagctgctgatcccttagaacttctacaagaattctcgggtagttcagcctctctctttctttagtgacattatccaccaatatcggcttcccaatctgagcaacaatcttaaaaagtgatttctagccccaatatttcagctccaattcctccaattgcacccaaacaagtaccttctttacatcttccttcttataattctcattcgggtcccaagatttcatgattcctgatcttctattgaagaagatgtagcccccatttagaacctggtctctgtcctcaagagagtggaaccaaataataaaaatgccatatgacaacaatttcactctatcaaccttccctttctagattctgtgtgcaaatccatctaaaatatggagtagaggattcactcctaacacatagcaaactatggaaggtttccaaaattggatttcatcttccatgtcatccatagtaatccttactttgttctcattcggcttatcatactcaaatgaattttcaagatttctaacaatagaatttgatcgcaaaacaggaaagatcgaactcttaccagctgcgatttcactattacatcgattgttagcttgcagaaaatgggcgaaatcacttcgtacgtcctcttgcctcctaatcgcatccagagacgacttcagagaaagaggttgaaaatcgtcttgaagaacagggcattcttcgatcatagcttcctcatccgaaagctccaaagcttctacttcagcaatcctttccatcgaaccagcatgaaccgcttcatctaccactttctgtcctcccttctttgaaattttcatggcagatctaggttttccatgattcttggatcttgttctcgccatagccccagccgaaccagctgcaagagcaaaaatcagagaaaaacctcaccttaatttaaattttcatgttattttataaattaaaaattcaataaaataatatgataaatacatacccttttctgattttataatttcatttaagtaaaaataacaaagtttaaaagttagcaaaaatatcatatttccttttaaaataccatgattatagtaatcttattttaaatctaaataaggtcaaattacttaaaatagaatatttttttataaaaggaatttaatat

SEQ ID NO: 224067 - DNA, 3002 bp, Cannabis indica
catcactatttatagggctatggcttaatgataaagtatttcccttctcgttacaatggatataagcagaaagattgcatagtaaatacagaatacactgatcgtgggatttggacagcttgacatatctctgcaatctgatccccaagttatagggatttctttgatgactcacgaggcgaaagctaaattcgctaagtgttgatcgctatgtgcggatagttgatcactttgcttcgagcatgcatatgaggtatcctgttcggactatatcctgcgagcatatactcggagtcgattccacgtgtcaccatcatgtgaggccacgttagagtgcaaaaattgggataacaataaggatccaaatctgggacttagaccaggacccgaacccagactagcacccaaacccagaccctaacctagacccgggaccaaaaactggaaccagaacaagaacttctagactaggaccctcgaaaaagactaggaccgtgacctggactaggacccagacctagaaccgaactcggacctagccccagacccaaacaaagactgaaactcaggcccaaatacggtcgtgtacccagaccggcaccgagatggagacccaaacctagacccagacctagacatgggacctgatcccaaacccagactcgaacctagatagggatttggatacgaacttggacttgaaccaagacttggattcacaccgggataaaaatttgagacctacatccggaccgagaccctaacacagacccaaacctggacccgcacctgggacccaaacttggacctagacttgaacccagaccgggatctgtacctggacccagacccaaacccggacccagactcggactaggactcagaccccatccccaacctggatccaaacctgaacccaaacactcaatcgaaatcaaaactgggactaggacccaaacccgaatatagacccagaccgggacctaggactcggacttggatgggggacctggacttaggccttagaacctagaccaatattagaactcgggacatggacgcagacttggacctagactcgagacgcgaacccgaactaggacctatactaggatctaggagccggacttggatgggggacctagaccagggacctaggccttggaaccagacccatatctaaatctaggactcgaaccttaaccatgacctgacctggacccgggaattcgaagtcagacccagaaccggacccaaaaccttccccagacccaaactaggacaggaacctagacatgaacccaaaccagaaccaaacccaaactcagacccagacccaaaacctagacctgcacccggacccaaactcgaacccagactgggattggaagccaagacttagaccaggaactaaacccagactcagatcgagattgaaacctgggactcggacccaaacctggcccaaacccaggaccctaaagcacacctggagcccgatctgaacctagaccgagatccggacccgaaccaacactcggaccaggactcgagccccaacccgaactcgaacccaaactcgaattcagaattgcaactggagctggaatgggactaggactaggaccaagaccaggaccaagacctagacccaaactcaaacccaaataaaaacccagaccgagacccaaacccgaaccgcgactaggacccaaacccgaacctagaccgggacccaaacccagactagaaccgggacttgcaaccagaatcgggatagggaactgggcatttgaacaaggaccgagacccaagacccaaccccagacccagacttaaaactaggacccagctcgtgatattacacccaaaatggaaccagaccaggactcgagatcggtgtcttgattttggagccagcccagacctcgacccagactaggtccggaacccagacccgaactcaaacccaaacctagacccgaacgcgtaccctgtgacccaaaattggaactcaaactagaagtagaccaagacctgggaacgggaccagaaccagaactttgacctggacctgaaaccgtaaccagacctgcatgtagaccggaaactgtaatcggaccaggaccacgactctaacccagacctaaactcgaacttggacccagacccagatcccaacctagacctagactcagtgtcgaacctggactcgaactcaggcccaaacatggaaccagattcgggacacaaaattggggttgagagctagaaccgcaccccagtctcggtcctgaacccaaactcggacctgggactcaggacttgaaccagaactagaccaagacacgtgacagggatccagatttgggactcagaccaggacccaaacccagaccttgacccaaactcgggacccaaaattggaacctgaataagaatcgcaagaataggcccctcgaacaagacaaggaccgtgaccaggacccggacccagacctagaaccgaactcggacctagccctagacccaaatcgagagcagaacttgggcccatacacggtcgtgtacccagaccgggatcgagacccgaacccaaactaggactcggactcggacccgaacctggacccggatctgaacctagacctgggacgcaatcccaaccccaaactcagacctagatagggatccggatacgaacctggactcgaaccgagacctggacacagactaggatcaaaacacgggacctagatccggaccgagaccgtgacccatacctagacctagacccgcaccagagacctgagctcagacctggacctgaatccagacccaaaccaggatctagacctggatccagacctagaccaaaagtcaaacagggactcagactccaagccagacccaaacccaaaaccgaacccagacactatatcgaaatcgatattgggactaggacccaaacccgaacatggacccagcccgagacctacgac

SEQ ID NO: 224068 - DNA, 5395 bp, Cannabis indica
ttttgacctgagaagggtaaaatcgtaatttcgtgatgcaccgtgcttatggactatattattatatagtatatttattctgtctgtctgtaggtattttttagcaagttggtgcggtatagtcacaactgaatattttgggttgaaccgggtcggggcctaaaatacatttctaggatttatttatggtaattttttaataaatgagaaaacgtgattaatgtgatatgtgtgtttgagcttaatgtcaaaattacttttttttatatgtgtatggtaacctatgggccttatgggcattttagtctttttgaccaattaattattttttttcaacaaaatgtttcagccaaataaacccttttttttttttggtattctttcattcccaaccgccctctttctctccctctctatatgttttagttcaaacacaattttgaaggaaaaatgcttgaattggtgtgggtttgtgcggtatgcccagctgcatatccttttgacccgcctaagggaatactggatgcagtagctggttgttgattgatgactcggtaggaccttcttattagtacgattgcctacctagtgcgatcatcaatggctacctgcttagccctcagggtttccatctcctaatcatccattctataaattgacgtctctgtttgtcaaatgcaaggtttatgtctgtattgaaatcctcgtgatcatggtgcaaagtgttattatgaccttgcataagcccaagggctgctcggaggttctggatttcagtgtcatctccaactggcctctaatcaatgttgggagtggattgatcggttgctgaattggtgttttcagtctcatgtacgcctggtgtgatcccaacaaaaggggaagtcactctgtggcccacaataggtggttgtgtattaacatgctcggggtttgtccctggtggtcttctcgtatttccaggagtttgcacgttgggatctgtcaccattgggtcgccctgatcagcaaggcctctacgagtttgtacaaccatcctgtttgccagtcaaaacttaagacaaagaacttgtgtttttgctcttaatgaaagcaccaaaatattgacctcgcttctagccaacgacagtgagtcaaattataagcgattgaataatataattaaaagagaacaaaaaacaataaagtaaagtgaacactagatttttaaagaggttcggccccgtgagcgtagtaatagcctactcctcttgtattgtattaacttaagagaaggaacaaagtattcttcccctttgaaagctcttacaattgatctttgagtaattctcttagattactcttttttctctagaatctctctctctgaagcaattccttcgatccccttttatagtgaagctaggtcactatttataagggcttaatacgtgagggatggtttttcttttgcttacaatgcataaaataagaaattacaataattacataattacaatatataaaataggaaattgaaataggttgtcctatttctctaactcaatcccacgattatagggattctcttcgtgtttggacataacaagatcattctgaagtagttatatcttgtaagttgctcgacataacaagcttctacttggtcgggtgccttctctatagttttgctcgggtaatcgataattatagatgctgacaaattatgtggaggctgctagggacatttatctccgcctaggtatcataaatataagacacgtgtcgctcggtctcatcgccacgttagtgtaaccaaaaacggaaaaacatcgatattcaaaacaattaaaattattaattataaatttaatttttaaattaaacaccataaactattaaatataattgtataaatttatttggattatggtttttttttttttttaaatctgattcaatatagagatttataaattttgttgaacattacaaaattatgcggtgagtaataataatatctttttatttttgcttaacataataatagtaataatatcagttgggcttgcttccccacactgccacacacgcactttccctcgataaacttcagctttttctccacttcggtctcgtggcagtctcacattcaccgtttccctcctctcttatttttgttacgcccaagcaaccaaaccaagcaactctctctcattcatgtattccacgcctcagcttcacccaaccccactccggtcctagtctccaccccagccaggacccagatgcagcccaccgcccaaaagccaccgtcttccacctccacctccgcactccaaatcctccttacccttatcaacgaaaccctttcccatctcctcctctcttccctcaccgtccgatccttcatcggacggtggcaagttctcaactccaagttcacctctttaaactcttcaatctccgccatctccgactctccccactgggctgagaaccctcttctccacaccctcctccctaacctactttccaccctccagcgcctcaaagctctttccgaccaatgtacggactcatttgccggcggcaaactactcatgcagagtgacctcgatatggcctctaccgctctctccaaccagctccacgaccttgatttgcttctcagatctggtgtcctccaccaatctaacgctatagttctctctcacccgggaccaggttcggctaaagacgatttgagctttttcatcagagaccttttcacgagattgcaaatcggtgggattgagttcaagaagaaggctcttgaatctctgcttcagctcctaaacgacgatgaaaaatcggcctccgtagttgccaaagagggaaacgttggttacttgattcatttacttgatttccacaaccaaccggcggttcgagaacaggctactttcgccgtctcagcacttgcttcggcgaacgatgagtccaggaagattgtgtttgaagaaggggctttgggaccattgcttaggcttttggaaactgggtcgacggtcttgaaagagaaggccgccattgccgttgaatccctcaccgccgatcctgaaaacgcttgggccgttccggcatatggtggggttgccattttgatcgaagcgtgccgatccggatcgtcggtgactcaaacccactcggtgggcgccattaggaacgttgccaacgtcgaagacattaagatgactctgggagaggaaggagccgtaccagtgttgctccaattactggtttgtggtatcggcggggcccaagaaaaggcggcgagttgcgtagcggcgcttgcctcttccagcgagtattttcgcagtttgataattcaggaacggggtttgcagagattgatgcatttgatgcaagacatttcaagctccgacacacttgagcacgttctaagggcgataatctcgctatcaacatcttcagatcacacctctaggattctatcatcatcaaccattttcgttatccaacttggcgagttcatcaagcgtggtaactcagttttgcaacatctctcagcctcgttggtgggttttttatctattagcgacgggaacaagcgcgccatcggtagctgcatggggtcgctagttaagctcatggagtcaccaaaaccagtgggtcttcaggaatctgctgcgcaagctcttgtttctctcttgaccgtccgatcgaaccggaaagagttggtcagagacgagaagagcgtgatgaggttggttcaaatgttagatcccaaaaatgaagcggtggcaaagactttcccggtgatggttgtggccgcaatagttgctggtggaagtcaaagctgtcggaagagacttattgccgccggagctcacccccacttacaaaggttatcggaaatggaggtcgccggagctaagaaggctttgcagagactcgccggaaataggctcaagaccatctttagcctgacatggagggaataacccagccaaggcactaacaccgtccccgccaaaaaaaaaaagaatggttagtttttttttttagttattaagggtaaaaggggaatcgtaatttttgtagatagtttgacctagtgctttttgactttgacttcctacgtggttgatatcaagcaatagaattttgccaagtggcttttgttaattgccacctgtaaggttcacacgggcaatcggttgaggtggccttatgatgcctcttgtctcggtgtgtcgtgtgtactgggatattttgattattctgtgggacccaccaatagtgggaccctgtgagtatttattgaggtttagaaaaaaactggggaactgttttggctttaaaacttctttattcctgaattgaataagataagctgaattaatttaggagaactagccttaatatttgacgtttagggcttatcaaactgttgacccgtgagaatattggattacacttgtattcttctaattatattttaaaacacttttacatggtgatggtgggttgactttgacttaattatcatgtttggtttcatactgagaaatctgttaattctttatctttaaattaatatttaacttctgtgttttatataacaggaggggttcatttggatttttctaactgtggaagaaagtgaaaagtacttgagtggacaggcaacagacacacacatcgtatactccaacctttattttttattattgttaattttttctacctatgataatctattttactttattttattattatatatctaatataatatatgatagaaaaaaaagaagaagcatggatgcggttttttagggagtatcctcgatttgcttttatatatatatataattttttttaattataatctttgtagtggattcccaatgaagttgtatgagtcattatgattgtaattttgcttattaccaatttatgtatgttgaatgtgaaatgtgaatgtacatccaaatatccaatgagtgtaattttatttacaattttaatccatttgatttgtaatattcactggcttattttagttagaaaaagaacaaaagcagatgcaattgttatttgttatccacttgtgtcattgtgtgcaatttaagaaatttgttgagtttgtagaatgaggtaaccatataatgatggtgatgatggcaatgacttgtgaaattttcagtccaaagatttagggtcattttttctttcattcattcattgggtgggtctctgttttaggagtgaaacaggtcatggaaataaatggtaatgatgatgctcttttatttgtgtaaatggtgagttggacctttcatcagatttggttaatggtaggagacttggagtaacagtggacccctttcttcatgcttgttcagta

SEQ ID NO: 224069 - DNA, 1543 bp, Cannabis indica
atgattgttaaggatggagattgacgcttaactatttttaatagcgtattatctatctttatttgctttctatttatgatatttaatcttaatatcaaaagcttcgtttttaattgttcgttataattcttgaataataaattaataatagttctcgtgggttcaacctttatttattattatattgaagtaattggtcatttagaaataaaaaaagaatagctacaaaaatgttaccgaaaaaatattgagttgggcgaaatgacttagtgcagattgcttttctcgatgagttgattctaatggtaaagacagatcgtcaaacgaacaccggaggtgatcaaaaaatgtgttcaaagtttaaagttctaaactttgactcacgatctctccctaacagtgacgaatgaggaggcgccgcttcagagttgacaattctggaggttgggggtctgaatggtgcaacttgtggcttaggtggtggtcggaataaggtcgccggcaataggggtggtggttatagttttttgattgtttgaagaaagagaaagtgtgtgtagtgggtacgggaaagaaattgaataaataaaaaaattatgagtaccacatcctttatttttatcttttttatattttttttttcgttttttctattcatctacacataattataaatcaattatatttatttaaaatgactttacttatcaaaattaagaatttattttttattacattttaaaaataatttaatctcaataattgaacagtacagattcaattaaattatcttaaattttttaattatataattatccgcatgttaaatataactaattgaaacagaataaaaaatacacagatgctttcaaaactaataaaatttaagtatttttaattgattatagtgtagtttactttaagtttagaagaatgacgaataatttcactttcaaataaaaataatcatttgagacgtctaatctctctacacgaatgacacgttcactaattgtttggtgactcaatacctgcttccttaataatagtgatgaaagatacatgttcagcggaaaagattattataggaatttataaagaagaacatatttactataatttattgcaagactctgttttccagagtttgagagcagaggaattgagaggaagaataaaaagatgagaaaggaatgaatatgaatgaattgctctacccaagcaataagaaacaactaatatataaatatatatacatacagttaaagaatatacacagaaaaacaggctcaagttgagctggcaaagctaaacaactaatcataagcaagaagtcaactcagagctaggtggttcacatgatgcaatcccattaaaatttcatttcagtccacccatggccaatgtacggacgaaacaagcacaagagccactactgcaacccagaagctactggcgatggtctaagcgagacttcttccctgagccttctttcgagagcttctcatcatacagagcagccgtctccaacacctgctctcgc

SEQ ID NO: 224070 - DNA, 3138 bp, Cannabis indica
cacaggttagagctttctttgataatggtattctacctgccgagcttaataatacaaatatcgtgctaattccaaagaaaaatagcccacttctatgagtaatttaagacctatatctttgtgtaatgtcctttacaaagttatttccaaggtgttagctaatcggattaaagtgtttctaccccatgttatatctccaaatcaatttgctttcattcctgggcgtttaatcttggataatatcatgattgcttttgaagtcatgcattatctcaagagaaaacgtaagggtaaggaggggtacatggcgttgaaattggatcttagtaaggcttatgaccgtgttgaatggagttttcttagagcaatgatggaaaaaataggtttcgccaatcattttgtggatctcattttggctacggtgaactctgtgaagtataaaattgttcatggcggccatgagttggagtcttttgtgccaagaaggggaatttgtcaaggggatcctttatcccctatccttttttgatttgtgccaaaggatttacttctcttattcgaaaatttgagcatgatggtctcttgaaaggttgtaaagttgcaaatggggcaccaataatatcacacatgcttttttgcagatgatagctatgtttattgtcgtactaatgaaagggaagcttccaatatattgcgacttcttcacttgtttgaggttgctactgggcagcaggtgaatttcagcaagtcatcgatatttttcagatctaatactcctatcgatcttagaaatagactttgtactatgcttggaatgtctatggctgataaacgaagtacgtatttgggtctcccatgcactatgggaagaaataaagatgcgattttggggttccttaaagagaaaatgcagaagcgagtctgaagttgggaaggccgtcttttattgaaaacaggtcgtgaaattcttttaaagacggtggctcaagctttgcctacttatgctatgtccgtgttcttacttcctttgaatacttgctcacaccttgaaagcctaatgtcgaagtattggtaaggctcttctaataatagaacaaaaggtgttagatggtttagttggaaatatctttgtaagaataagaactcaggcgggcttggttttcgcaatttgagagattataatctctctctgttaggaaagcaagggtggcatcttcttttgtatgaggactcacttgtggggcgcatttatatggctcgttattacccacaaggtaattttctttctgctaagttaggtgccaatccaagtttcatttggaaaagtgtgtacgaatctcggcagcttattcgtgatggagctcgaagaagaatcgactcaggtgatactactgcagttcttaatgtctcgtggctggtgtatgatgtcaatctttatgtgttatctacacaccctgctttgtctcaatgcaaagtctcgaatctgatgcaagttgataacagacaatgggatttagaggtaataactgatttatttgaaccaagggatattgatttgattttgaagatacctttaagtaacactttagatgttgatacctggtattggagtaaagaaccgtttggtttttattcggttaaaagctcctatcagtatctccaagaattgaaaggagattggagcattcaaatggaatcaaatttatggagaatcctttggaaagttaaagttccccccaaggttcttcactttgcttggaaaactatatcgggttgtttgcctactcgatctcagctacgaatcaaacatgtccctgtggaatccctttgtgctttctgtaattctaaggaagaatctattctccatgtgttggttgattgtccttttgccaattcttgctagaataggtctggtgtgggattaagtttctctactgccaacacttttactgactggttcaaggggtttttggtagggggtaggtcgggtatgttggaggaagttttgatggttggatggggcatttggaaagctaagaatgagttactttggaagggacgctcaagtactgttactgaggttgtccgattagctcgaaatgcacattttagttggatgtttgcttaaggaaatcggttttgaacctctgctgtacgactcaagtttgaatgacaacagagatttgtgggttaagcctcctgctggtgcgataaaaataaatgtggatggtgcgatttttgacgcgacaaatcagtttggaactggcattgtcgttagggactgcaatgggagtttaattgaagcatattctacactgcataatggtgcttgtcagctggctttagctgaggtgttgagtgtcaaggaggcccagttggctcaagttgaagaatttttcgaatgtgttaatcgagactgattgtattgttgttgttcaagctatgtacagctcgactgcacttctttctgtttttaatatgtttattcaagagtgttaaatgattcttgattctttaaataatgttttaatttctcatgttaaacgatttgcgaacaaagccggacattgtgtcgctcgcggtgcttgttcttggtctgatcgtctttttactgagagcaatatttcttctgctcttcagtctattgtaatagcggatattactgtttaatgaattatcattttcattcaaaaaaaaaaaaaaatagattttacaactaacttaaattagctaaatagaccatcctattacaattatatttgtaacccatgtacatataagtaaattctttattttgaaataatagtagtaatattaaggagaattctatttgcaaccctcaaaataataaatacatctcaatatttaaaaaaaaaattaaagcttaaaataatttttaaaaatcactctattttttaaaataaatttctcacattattctgtattaatttcaatacttattttaattttatttttatatattttttaaatcatttgtaatttttttaaaaattttacataattttttattttattttttttattataatatttaaagtatatatatatatttttttatttgataagtatattttgtaagaacatgaactggaacaacaaaaattaatataattaaag

SEQ ID NO: 224071 - DNA, 1325 bp, Cannabis indica
atatgtttggtacgctcatgaaacacaacatttacaaatatgtggagagcagcttggttgtcacagtagagggttgcaggagtcgagtgtgatatgccaaagtctttgagaatgttgaataaccaaatgagttcacatgtagtatttgccatagacctatattcgacttctgcagaaaatttggagactgtagcttgcttcttggacttccaggagataagagaagggccaagaaagatgcaaaaattggtgatggatcttttggtgtctagacaggttcccccagtcaccatctaagaaaacatggagttggaaagggtgatttggtgttgatgcagaggagctgaagaagagaccttggccaggggtgccttttagatattgtaagattctggtggcagctttcatgtgaggttgtcgtggttcactgtgaaattggctgagacggttgacaacaaaagtgatgtcaggccgtgtgatggttaagtataatagttttccaatgaggcttctgtaagatgttgggtatgaaacaaggggcccaatgtctttgctaagggatatgttggcccccatgggagtggagatagttttgattccaagtgatccagtttcagtgagaattcgagggtgaagggtctttgagagacaacaatgcctgctttggatcgagcaatttctaatccaaggaaaaaattaagtggaccaagatccttgaattgaaatttcaagtttaagaaggttttgaaggcaaatgcatccaagtcattattgcttgcaatgactatgttatcgacatagagaaggagtgcaaagaaagtgttattttatgatctagtgaacaggaaatgatcattgggagattgagtaaagccattgctaagtagagtagtgcttaacttagcaaaccattgcctagaagattgctttaaaccatataaactcttgttcaatttgcaaaaaacatttggaggaagctcccctcatgtacatagagcctttagggattttcatgtagacttgttcttcaagataaccatgtaaaaaaccattgtttatgtccatttggtgaaggggccagttatttaaggcagcaagggcaagaaagagtttgagagtgttaaattttgcaactggtgcaaaggtgtcaacatagtcgataccatgttgttgattacatccccttgcaacaagatgagccttgtatcgtactacttcaccttttgaattgtatttgatcttatatacccatttgtttccaataatatggcatccatgagggagagatacaaaggaccatgagttgttttgtttgagggcaaaga

SEQ ID NO: 224072 - DNA, 1916 bp, Cannabis indica
aatagaatcttaacaactcacaatattataaaagaataatttgcggcataaccctcataagtgttgttatacccaaaattcggctagcacgtcagaagaggacacgtgtcaaactgggaaaatacgaatcaacaaatataatgataattatatttgaaaatagaataactcattaaatatgaaattgacagagtatatttacaactcgctgactgtacagtcttacgcgagataaaaatatacaaactgttgcctcgtgtattaacgaggttgatgcgtagcgaggcatcaacctcgctacacataaagagacgtagacaagatgtgatggctaaagcatattatacaaactaagtataacagtcgaataaatccaaaacaactaatggtgagacacccatctcgctatagaaaagcgtgctcatggtaccttcactaatcagctccaaacatctttcaatgagattcatagctccgttgagtgagctctctcagatagaagctgacattcaaatgatgttgactgctgaagttcatcttgtcaccaagaaccgcgattgtcaaatggagagttatgtttttaagcgaaaaaacgacgaggtttacattatcaacctcggagagatatgggaaaaattttagctcgctaccagggttattgttgctatgttcccagcaagatgtcccagaacaatatgtgttacaacgtatttaatacatgttcacattgacccggtaaaagcggaccaatcacagctgtgatttttaaatagtaactgcatttattttacgtgggatgtaatcagatcccatggtttcaagggattattgttgtaaaatattagtcaaatctgtaattagctgccctcatatgcaattataaataggagcacggaaaattcatctaggaaaaggtcctagaactgtatcaaaaatctaataaaattgactcgtggactatgaagaattttaactgcaaaactacgtaaaaactctgtgttcttacttctttcctttctgctattattttatgtgcaaaaatatcacggtttaggttttaatatagttaacaaaaatatgcgttaacaagtgtttagtttattgcaactaacccccaattcccaaattttggtggtaaaatcccctaaactcatgttttattagcacttagtcttttccatccatttttaagtgttaactgttaagtgcctcgttgtactatcctatattgtctatgctgacaatgtgtacacatgaaataattttattggtctacctaaataaatatttaaaaaaaatgaaaaaattaattattttaaaaataaaaaataataaaaaaaaaatttctcggtcttcttcttctttcctctagagattctctctctaactctaatattcaacccactataccccattgcaaaccctccaaaataataacaaacccacattgaatagctcattggaaaaacaatcaatatatcaaatcttttgaattataaagtatatcctcctccgtttccttcttagttcatacctgttcaataaattaattcctgaaacaaaaaaaaaagtcaaaaaagagggagaaacacaaaactccagaatcatcatcatcatcaacaacaacaacattgaaaccactcccattgaagaaacaaaccaccatgaagagccattaatgacggccgatgagagatctgagaatatgaaccgaataaaaaattaaaaaagaagagggagagatcgatatagatgaagaagagattgttggtggtgggcgacctttaatggcagatagagaacctccacctcgtcgttgatctggaaaatcattcacccatatcgaagctccatccttgctagaaggtagatctgagatcgatggatgactcggagttggcgcctgcgtgttgtgg

SEQ ID NO: 224073 - DNA, 1705 bp, Cannabis indica
atagaatctacctcaaagtttcttcaaatttcagagccattgtcacaatcacaaactcacaatatgttcatgtctatgcgagagaaatagaagtttaaacaaaggagagaaactgaaaataaaaatactataactataactataaaactgtatgtatatatgtgtgagaaataagaactactattactaatatataatatatgttgtatgcataaacaatacaacaatacaattactattactaatttactaatgtataatattactaaaatatttttaagttaataaataaaataattttttgagatttaatatcaattagacaattactttagtttaatcatccgttgagtagactcttggagtcttggtgctgctaattggtgaagtgagtagcgtgtgatactgatatcaaaacatcaatatatcatatattaccaatcaatacaatcacccacaaggtctgccaatcatcacatttcacctaggcacctataaggctattaatattacagttaatcaatacgtcacacacgcaagtcattacatttaatgtaattaaatacatcaatatattatcatactaatattaagttatcaacattatagtgtgaaaacttaaaagtccaatatatcattaaatttttttaaatttgatatattgagaagaggaaacgggctgaagtatctctataacagttaataactaattattatatgttttttttttctgaataattaattattatatgtattaatatatatataaacaggggtatatcggggcggatagtactttctctgaccctacctcgcctccgactcgagtatgtaaaatgaacttcgtccctacctctaatccctactaagtcagggaattcctgccccacttagtggcaggttcccgtctttgtggtgtttatgtgcaatccgttttaagatacttaccataacatgtcctaaataactatatatatataaagaatatagagtgtaaactaaagtggaccaatgtgaggcaatggcttttattaggcttacgtgtatagactcttgtcaatttcgaacctattctagtttttgggtgagtggtccaccacctccaagcaccaacaacattgttttttcattggtctttggttggtaatattttttgtatatttttaattatggtttgatgagttttaaatttagaatcttggaggttttttcacggtgtagaatcttgaaattttgaagaaatttattcatgaattgcatatcctaaatttagaaacccaaaattaaagagggaaaaaagagtaaagaaatgaaatgattttgcttatgtaaaacaaacattagtaaaagaagttaaaaataggtagaaaataaaatagattaatattgaaggtattgagtctatttttaattactgaaataaaattgttaatgtgaatgttaagataaactttattaaataactagtaactactagttacataaatttagtaactagtaacaatttcctttctttaaatattttaaataattgtatttgtttgtaggttttgaattggagggggaaaataattttggtaagtgttgattggttttctaactaactacaattatactttttctaattttttgtttgaattaattatgaataagcatgttaaatgaaattgaatatcttaaatattcatctatagtgaagtatgtt

SEQ ID NO: 224074 - DNA, 946 bp, Cannabis indica
gagaaacctaatccaagccctgggagctaacattacacaaacttgcaactcggaagccaacttgggtacttagggtttcacctggcgcccaagttggcctcctcaactaggatttcggtttttgagactgtcttagtgaaaatgggtcaaaacttgcattataatatcaactagacataccacaaaaatatttgaggcattagaatcaaaatcaaagcaagttcatttttgagtacccggggccgcagggccccgagcacccagcacctaggttgacaatctatcaatctgggtgccttccaagtatcagatcaaatatttgaattttacatattctttgtctacataaaaaatgggtaaataggtccttttgtggaagaaacaacacttcctaggtgccaagagcaaggcccatcgcacaggttgacatatgggctgaccctgcatgtcaacctgggccattttaaatggagtttttcaagaacacattcaagcatgttcttcatttttagaaaatatgagattcaaatatttatggggaccaaatgaaaattttaaaggggcaaaactgagacccagcgcccaggttgacacttggggcaaggcccagcgcatgtcaacctgggctgtttccgatcaagttaaaaaaaggtgttctaggcattttttttatcgtaagaaataatgaagattcaagtaaactcagtgagaaaaccacaaacctgagcccctagaaacgaggcccagcgcccagattgacctagtgttgggcccaacgcctaggttgacaatcaacctgtgaccctaccttcaatgtctcaaatgccaaatctaatgcgaccattgaatccaaaatggtcaaaaatggggtgcggaacctcttcctcaagtttaaaagccttggaagtatcaaaaatgagatcctcaagagctcaggagtaagtac

SEQ ID NO: 224075 - DNA, 1221 bp, Cannabis indica
tttgaatgcataaggtcttttattattggttttatgtttattttttaggcaaaggatttctcacaaaggactttatggaaaaaggagagcaaagtgaggataaaagagtaaggggagagaccaaaggagataaagaatagttaaaagctaaagattttctcttgtctgagggagatcaaggaaatgaggaaatggatttttactttggaattttccagtatggcaatgaaggaagcaaatgaagggacttaatatcattttgcaagattttagtttattaaaataattttcaaggaataatgattagtcggttcagttaattggattattgttttgaatgttttttggaagtttatttatcagttttgttgacaatggaaataagtatcttcttaagtttaagaagagtgtttctagttttcatgttaagaagttctttgctcaagtaatgtcttaaataaaagtttgtttttgcatgataattattattcagtggtgccttttttacataaaatatatctttaatttattataatcgaatattacacttaaagtttattgagactatgcatgaaaattggttataaaaaagtggtataattgggtttttcgtgtggtatgactagagtaagaattagttgattgattgtctataaatagaatcttaaataaataaatactaagtaaataaaatattaggaaaacgtgaggatgaaagcaacatattttaaatatttataggccataaatattattgaaacttatttctacacttatatttatggttaatgtgattggtggaacaaacgtcattactttagtcagccaaaataaattagaatggaagaattatataattattagtattaaaaaatcttatataattaaaatgaggttaatattcttaatttttaaaagagttctttaagttaaaatattggttgttaagtgtgaaggagaataattgaggatatgaaaattaggcactttgatattaaaaattattcatttaatataaaaattttaaatggtaacaaatgatgcaagtatgaaaggataagagtattttgatctttattgtaggctaggtatctttaagtataatttaatgatattttggaatttcgttatacattgatatatgggtaataaagttatggaatgttattagtataaagataatcatattatagtattaaaggaagataaaggagtatcata

SEQ ID NO: 224076 - DNA, 1933 bp, Cannabis indica
tgatctaggatcaactaagtgatattgaattgaatagatattttgataagtttatcatatctaatccaagttcaatatcagtcccttctgatgcatactccatacatctaacccaattttactttaaccaatgccatagaaaggacataacatttatccaaggtgcaagtacgttttagattatcatattagttaaaccttgtgtactgataaatcataagaatacatttaatcacacaatcttgattactttccactgtgttgacaacacaataaataagaatatcagtgtgataaggatttggatgaatttataaataaaataagtaagtaaatgatcacatgaacgaaataacacattaaacaagtaaagaaattaaatatgtttctttatttataattgaatagaaaagattacattgaaatatagatttatttagggaacaaagcctaacaatctcccacaaagaatttccatgctctcacttgtttgttaaaatatcgagctaccttttgttgatgggctatcaatttcaagtttgttgcagttcatttttcttcaacttcatcaagtgattctccaagtagtgtatgattaactttttaattatatgtcagtcttctatgggacagtggttcgagttctacgtgaagcatagcttcataaccatatgcatggcaaaaggagtctgtccggtcgctattttctcatttgtgcggtatgaccataataattcaagaattcctccagctagtttcttttggcatcttcaactcgtttctttaaagtatctttaatgtcttgttgactgcttcaacttgaccatttcttggggatgtgccactgcaaagaaactttttatgatcccatggtaagcatagaaatcagtgaaggactgactgtcaagttgtttgccattgtctgagactatcttgtatggtaatctaaatcgacaaatattgttcttcacaatgaagtcttggactttttttgacgtaatggtggtcagtggctcgacctccgtccatttggtaaaatagtcagctgcaaccactacgcattgtactctacctttgtccttgggaaattgtccgatcaggtcaattacccaaatgtcaaaaggccaaggactttgcatctgagttagtttgttgggtggtgcatagggtatcttggaaaatctttggcatttatcgcaatacttaacgtaggccttggggtcctcgatcattgtttgccagaaataacctttccttagaattttcttaaataagctttgcctagcaacgtggttgctgcagaatccatcatgtacttctgacaaaagtcatacagcttctttgtttttaatacacctgagtagtggcatggagaatcctcttctatacataactccctctacaatgatgtatcgtgcaacttttctcctcattttttgagcttcattcttcttatttgggagttctccggtgttgagataggttgcttttagcttcatccaatttggggatgtatcaatcattttcaatctcctccgtgccgatggtactggattttttaagaaattggatggggaccagattttctttatcttttattgtaacgccctaaataaataggcacgctacccaagttacttacgaaacccaaatgccctaaacgagattactaattaaaatggcgcagaaattaaacttttataataaacggaataaaaataaaacttgtaataatttaaacttttacaaacattattacaagtctctttcttttagccggcctaagcggcaaaatagagattcaaaaattcatcacaggtagacccttaacccacttggtctgatatggaccggacatgtacattcttcgcccagctcctgaactcatggttgatcagctaaagccttaccctttcctgcacagtagagcacc

SEQ ID NO: 224077 - DNA, 2882 bp, Cannabis indica
cataatgggcgtgcctggataccagcacccaccgagcatgtgtttgttgaaccctcctaaacttggttcatatccacctcatcccccacttcctttggcccatctattaagcccaacttccttctccttctctttgaatcaaccaccaataaacaatcctcctcattttgaggatttatttcatgatttaactcagtcaacatatccctctccacgtttatagggatatgtctagtaagcattgatctatctacctatccacatttatctccttgttgacccatgttctcctccacaatcataaggattgttatgccaccaactatagtcgattcttccctcgcctttgaacgatgaaccaatccaacagccatggcatcatcattaccagtatcatcttccatagccaccatgaattgcttcagccacttagccccaattgtatgatccttacgcactggcttcactctcatccattccccatatcgtttaacaatccttccatatgggacatcaaagcgtctagggcaaaatttatccaaatggcccattatcccacgtatgaaataaaatgtaggaagatgttcataattgaaatttacccaaaattggataccctttgtattttgcaacttcatacgcctcttaagtggcctcataacattgatggtaacatgaacacgtaaataatctctccataaccccaagaagttcttctcatccgattcaacaaacttaccaatgtaatttgcaatatccgtgactatcgttgccgttttaaatcccgatcaaagatcatgtaattgtacccacatatcgacctcattcagctctaacattctcggatcttcccccttcctcaaccttttgaaaatcaggaacttgttgaacgtccacaggctacgatcaatcatgctttggttatctaactcatggtagaattgaaacaagtatcgattagtatccaattctttaacgaacattcctttacccggttgccaaagagatgccatcaaatgttgcatagcatcaaaatcaatggatttttctatcaagaaccttccaataatgcaccatcggtcatcataatcattccccgtagtattactagcatcatcggacaatatcgcttcttcttcatcgtcaatagagacaatcgtcatattctccgctgcctccatttgctgataactactcgacgccatggacagccgaacaaactcagaaccaagcactaacgccaaaacaaataaaacaaaccaattaaagaaaactataaaaccatgtcaacagacaagacatttatactagtaaaatactaatattaacactagtataataccaatactaatactagtataatactaatagtagaataatgctatactaaattacatagacggaaagaaatcctaattcttttaaaatacttagttaaaagtcaaacattataattctaatactagtctaacgcaaatactagtaaaacctaatactaatagaagtcctaatcaaaaccaaacactttcaaactcaacactctaataccctaatacaaagattttcttttccagaaaccaatccgattgcaagggtgcatagaccaagggtctctgtcggtcgtcaacagcgcgcagaggagaaggtcgtccgtccattgtcaaccacgagcaatgcccaccatcaccatgagccctagagagatgtggtgaaacccaaccttcttatacgcaagagagaaacccagccttcatatacgcaagagagaaacccagcccgtcgcatcctcaccgtcgatgcactgtcgccgccctcaccgttgttgcaccaccgtcgtcacagtcaccgtcgtcacgagggatagagaccagagacccttctggaatcttcgagcaagggagacgatagcccttcggtatcacgttggagatattccttttctgtgtcattatcgtgtgctggcgtggcctatcaattcaatcgcgtgaaaactcaataacgtcaactctaccttttctttggttgagatattaaaattgtactttttattttattttttaatattaaatgtataatgacaattttgtcttttaaaatatgtcttacaaaataactaccatataatatagtttaactcaaatgggtaatttagtcaatttaagcattatgattacgtttcttaataaactaaacaaggtaaatcactactattccatttccaaaaaatgtagtgaacaacatattacaaatattgattctgattatttttcatttattccgttacatttctccattaatttattccgattctgaatactctatagtaaacgtgccactagttgatattattattttcaaatctgaactgtagtttaagaaaaaaaaaggttttttttttcaccgacacttggttttagtatttagctgcatgtagttatgtaaattttaattgttagctttcttaactgatagatttttatttagaaaatttagctgagtttaatatttttaataaataaatataaaaaatttaataacaatgttaaacaaggcgataactcggtcacctcatacttcactgagttacaagccctatgggatgaactcaacgagtatcaaccaaatactccttgcagttgtggtgccacgcaaaaagttcaagactactacactagagaacatatccttccgttcttgatcggtcttaatgaatcttattggggaatacgggcttagatcatcctcttggatcctcttccgccactatccaaggttttctccatggttgtttaacaagaacaccaacattgtcttggcaacaccggcattgttgctgctacccctgccaaaccgaaactaaatcagccttctcgaaacaagaa

SEQ ID NO: 224078 - DNA, 1642 bp, Cannabis indica
aagaacaatgatttctcccaaaaccaagcttcaattcaatccaaactcaagcaatttcaccaaacaattcaagagaaatcaaagagggtttggagagagagaggggtcaggtgagaggggaataacacgagaagtttctaatttaatttcccaaaaatcaatcttactaaatgagaaataaaagggtaaaaagaccaaaatgccccctagggccaattcccacataaacattcaagggcaaaaatggcattcatacataattaaattttaaataaaattcaaatttctcaaaaccaaataaaaagccaatatttaatcccaaattgcatttcgggcccgaacccggttcggcccgagatacccagttgtgactatatttgcgcaaacctgttagaacacacttgaaaagactatataataatataattccattaagcacgtaattaagttaatttcatcatttgaccattcctgggtcataattactaaaatacccctgactcaccaacggggtcttaccatattataaatcatattaattcacataaattgaacgatataataatataattcctcatttattcataattatctaattagggttttgctaatccatttcttaattccagggtattacagaagcaatcttttgggcaggtcttgttgagatcggtaaagtctatacatactcgccatgtcccatttggctttggcaccagtaccggattagccaaccattccaggtagtacacatcccgaatcaggttgttggttagcaccttgtctacctccttttccagggcgtccgcttttaccggatcaaggggacgtcacttctgctgtactggcggcatgtctgggttaacgttcaggacatgggtaatcacatgaggtcttatgtcagtcatgtgtccttggcaccacgcgaaaacatttatggtcgcccttagtgcttcaataattttttttctttccttcagctctaggatttttcccagacggaggatcttggtagggtcgaggtcgcccactcatacttcctcgatgttctgcataggctctacagttttttcggatcccacgcgaggatccaactcatcttcttccactaatgttggtttaatgccctcacggaccaccaacaccggtaagtgtgctgcaacattatagcactacctggcctctccctgatttcccctcactgtccccaccccggcttcctgagtagggaatttaaggcacaagtgctggatggatgtgattgcaccgaaatcgaccaaggccggccggccaaggatggtgttgtgtgtagttgggtaatctaccaccacaaaggtgcagtacttaaaagtactctgaggggtgtccttgctcagggtgactggtagtctcacttttcccattgggataagtgtggtcccactgaatcctgtgagctaggatccgctaggtgacaaatccctgtccgtgaggcctatgactgggaaagcttctttgaacaacaaattcacggaactcccattatcgaccaatattcttgccacaattttattagcgataggagtctctatgaccagaggttcatggtgagggaaacgcaccagtttcgcatcctctttcatgaaagtaatgggctggtcca

SEQ ID NO: 224079 - DNA, 1164 bp, Cannabis indica
ctatcattttttgttaaacacatagttttcaccttttatttttggaagtttgttgtaggatacgatgatgatgggtcaatgctaatcatgcagtttatagtaaattggttagtttattttgccaaattaataaatgcaattgatattcttcttcatcgttatcgccatcataaaaaatagattctcattattcagaacacatctttgaagttgaagaagctctaatctcatcatcaaaatcgttagtcaatcagattttgctctctttggtcgcccataccactgataaaattaaactaaaatgtcttattttccagttctttgtgtgtatatatatattttttgtttatttcccacaatcgaggacatatatatgatattgtggtttgcgttggaatttaatgtgtctccttagttgttccttacctattcaagttgagtatatatgatagcattagcattgaccgccgatcaatattcgattgtggggtctatgcatttttttttttgaaaaaaagacgacatgcctatataattaacttatttcgatgggatgattttgcagcaagtatccatgcttgttcgatgaactttccgtaactcaacatccaaaggtaccaatgcaaataaaacaaatgttacatacatatttatttttgttgatctatctatatatttacttaatctgaattgattacatgaacagtttttggtgtttgcatgctctgattctcgagtgagtccttcgcatatattaaattttcaaccagggaaagctttcatggctcgcaatattggcaatatcaaaatttgaaaatacattttattattataataaaatatcttagaataaaattatttttattaaaacaaaataaaaaagtcacccaataatttttcatagaatagatatgtactggtgatgtgataaatagtatttttttttagtatttaatgagatttattttatttattttattatatataaatataaagtgatccatgaatttctcataaactattttatttttaatataaataaaaatcacccatgaatttctcataaaccaagaattctgttatataagcacactttatatagaatagatatagagagagagaaagtgatcgaaagagagggtgctctttgttcgaacgaatgag

SEQ ID NO: 224080 - DNA, 3743 bp, Cannabis indica
ttcttacttatctgataagccttgtggataggtgtatgggtgcctagtttcaagtcggtaatatattatttattatatgcttttcttattgggtcttttgtctcatagttgctactttcgtgtgtacgtaaaggaaagacaaaggctgaacaggagtgagcttcgagcttggatggtgattgtaaatgttgagacgacgtgacctaaagtgttcagtctcgggacatcttggattgtattttgtagtcgctgtgcaacaagtttataaatctattttgagaatgtttgtaaaagttgaaatacgagatcttggtttacgtaaataaataaatataaatttataaagtttaaagtttatcaaagttttaatttagcatgatttttgagaaaaaccctttaattagcgaatgtggtacgttaattggaaaatcactatagtgcatctaagtactagggcgttacaatagcttaccccttcaggtaggattccatattccctgactttgttagtgcgcatagaattcatttcttgatccatgacattgttcaactttttttgatttagggtcatccattgtaagtcaatggaacgtccttgtctgtgtaagagtaaagaacatgtgactcatgttaatagaaaacatgttgtctcacaaacctctcactacgacgatgtaccgaggttttatttttaagtaaactttgtcaccacgattggtcgtgcaactgatggtactgaagtgtgggtacattccctgactttgttagtacgcatagaattcatttcttgatccatgagattgttcaacttttttgatttagggtcatccattgtaagtcaatggaacgtccttgtctgtgtaagagtaaagaacatgtgactcatgttaatagaaaacatgttatctcacaaacctctcactacgacgatgtaccgagattttatttttaagaaattttgcaaccacgattggtcgtgcaactgatggtactgaagttgatgatttagaaatttgctcattttatatttcctagataagaactttactacgtggtttgtgatctctcatataatcatgttttagaaagataacatttgtacatacaaatatctttcgatcctcatgactatagaagtatgcacctcgagtctcttctaaatattccacaaatatacacactttcaaccttggcacaagtttccttgttataggtctaagaacatgagcaggacaaccccaaatacaaaaatatttcaaactaggtttttcccattccataattctattgaagtcttgcttattattcaattcaaggatactacatttagaatgtaagtagttgcttgaagtgcgtacctccaaaagttaagtggtagtgatgagtaactcaacatagatctgaccatgtccaacataattctgaccattttcttctctctaaaacaccattatgctgaggtgttccaggtgctgtaagttgggataggatgccatgctccacaaggaagtcttgaattcataatccaaatactctccaccttgattagatcaaagtacttttaaatatttatctaattattttcaagctagtgttttgaagtcactaaacgtactagaagtttcagacatcttgaccattaggtaagtatgaccatgtcgagaataattgtcaatgaaagtgacaaagtatttgaaacctccccgagcttgtatattaataggtccgcacacattagtgtgtactagctcgagctgttccttacctctgttgcctttcgctataaaaggtcttttttcgatcttgcctttaggaaaagattcacaaactgggagagttctaacctctagttctctcaaaggtccatcctttgttaattgatttatcctatctaggccaatgtggtctaaacgcagatgccatagatatgtattatcatctttagaaactttttccctcttattatgttgaggtgtagcaactctaaacaattcattatttaaattaatttctcacatggtctgaacacatgaagtttgttattctattttgcacaataaataggcgtaccatatatactttgaaataataaacccattactcattaaagcaatgtcgtaatgttgtttatgcaaaagagataaagaaataatatccacggtactcaggaataaaataaacattgttgaataaaaaaatttattattaaagttcaatcgaactttgccaacacccttggtcgaacttgtgctctattacccacgcgcatgatcacctcttcattagccaactctcttgaagaatcaagtatctgcatggaaaagtaaatatggttagtggctccagaatcaacaatccatatagatttatcatcttctactaaattatcttcaagaactagtaaatgagatttttttctttttcagctccaagagataattgttacagtttccttctagtgtcacatcacgccacaatagaaacacttgcctttagccttcttgtccttacacttggggctctttttgttcttcttggatttcagtgttcgtgcctatttgtctagctacaaaactgcttgatgtgtccaatcaactcaagattcagttggtatggagaacatgcttctgctcatacttgtatatctccattgataggtagcttcaaactaaatgtggatgctgtgttttatgagcagtctagtattgttggaattggggctattgttagggagagccacggtcatgtattagcagccctagcaaaatctagacaaggaaggtgtgcaccaaaggaaatggaagttgttgcactttctactactttaagctggctgctccactagtggagaatagtgtcatttgatggaatagattcaacaactggtttcaaatgccattaattcaaaatcatcatccatatgaagtttttatgatttaattgatgatgtttcttatcttttattcccttttccttgagcaaatgtatctcatgttaaaagagattgtaaccaagcggctcaaagtattcctcgatatgctcttcagctggataatcaagattctatatggttggaggatattactttcccaatctttactaatggattctctacataaataacaacagtaacttttttctaaaataataaaaaaaatcaaccttgtactttataaatgagttaaatacaacatgattttcattaaaccatttacaaaataatcacgtttacgtttcaataacttatcaatattgttaggacctgcagacaccatctatctccacattggtatgatattgtctgctttgggcctaagtatttttgagcacctttccaaaaggcctcattctaatggagatagtgtccatccttatatacccaagattctttctatttctagtcaatgtggggctttgattgtaagcccaataatcttcccctcaaacaaaggaccaccttacgattgtaggtctaatcttaagcaaccactcaagaacatatttccaacttccttagaaaaattacaaattgaatccatcgattctaacactcaagatccccttgagtaagctagatgaatgccttcaccagctagattcgaactcccttcaaattagatctgaacctctgatggctccactagaaggcttcaactaactttgggatccagctctgatatcacttgttaggatcgtcagacaccatctatctctatattgatattgttagaaattattttacc

SEQ ID NO: 224081 - DNA, 2752 bp, Cannabis indica
ccatgattgagagttcttcttgcattctcctatcttcacttctttttgctgttttactccatcatgaacgtttcctggcttccttttaagtacaccaaagagacaattatatagatcagaccacccttcagcttctgtttcttctggaataatcaccattctgactttgttattcttcagggttgaaatcttcaagaaagctccattagagttagtaaagcattccataaaataacttccactgctgtttctgaagaatcttttgaaggcaaccctttgttgtccagttttcttttttagttcctctagaattccagtcatctagtccgctgcatcgattgttacccctatctcgtacccaaaaagtcttgttctctcacaaattctaaccgaacctccatcttttgataaggtgatcataaacgccttgtgtttggtacgaaaactccaatacttatgaagattctgatcacaatttggatcagagaaattttcccagccaacaccagtggggtgaaggccttttttcttcccaaaaccagtggggttttggtgttttccatggccagaagggccatggaaacccccagtatgcatgaaacgttctcagaaagaggagagagaagagagcatatggaagtcagaggctagttgtattgtatttggtgcggtaagctacaaacatcgaaccaaagaagactaacgaaaaggggaaccattgactctcatggaggaagaaatggaagaagtgaagttggaaatggccggggttaaagactccaatcaagaactgagccgacaaatgcaacaacaatttcagagttttcttggcaagtcaagaaagtacaagaaaggtccaagaacttgggaataacacaagaaaaagagacagtggacaagaattctttgcgcggagccactcgagaccacgaggggggtttagtggggttttcgaccatgaagaacgctgggaaagcactcgctaggagctgttaactcagaaagatctcatgggtttcaccaccattgtcaagaacgcaaattgcggaaacttaaaatgccaaccttcgatggggagattccaaatgggtggataatgcaagtcaagtggtatttttctagctacaactatgatgagagagaaaagatcgaagcaactttaatttccttctccggtgatgccttgctttggtatcaatatgagaataagaagcgaacaattcttagttgggaagaaatgaagagaatggtgttgaagcatttctagtacacacaaatgggctccctgtatgactaactttttttagtaaaacaagaaggaactgtggcgattacaagaaggatttcattagacttttcgctccattaaacaacataccactggaatttcaattgagcactttcttgaatggcttagttccaacaatcagagctgaatgcagatgaagcaatggaggtagcccaagatattgaagagaagttgcaaactgctcattcttttcttcaaaaaacaaggagctatgggtgcacaaattactaaggacctagctctagtcttggtcaaaacaacttcaaatatcttcctgcatgtacacaaagggaaattagatgcttaacagacgctcagatacagcagaatagggagaaagggttgtgctttcactgtgatgataaatgtgctccaagccagcagtgcaagcagaaggagctcaacgtcaaaatgatacctgaagcaaatgaagaagcaatatctgagcatgatttcaatgaccccgagcaaaaaacaacagagatggactcaacggaaattgccaagggagtggaaatatcacttaaatttgttgaaatttgttgctggatttgtctttaaataagaccatgaaactcaaaggccatatcaagtcatccgaggtggtgattctcatcgacccttgggaatcccacaatttcatctccaaaaaaattggctttacaacttaaaatccctattgtttctactattatttatggtgtgactacgagaaatggggattcaatgaagaatgaacgggtgtgcaaaatttttggccaaactaaagcccttaatagatccatagagacttacttgtgatgtttcacttatgagaaccccaaggaatggtacaagtggcttgcacagtctgagttttgctatgatactctatatcagtcctatcttaactgctcccctttcaaagccctctacggtcaagatcctccactactgttaccacataaaagagggattgccatggtttcagtagtggacaattttttggagtctcccgatgcaatgcttgatgaccactgcatacatttgctttgtgcccaacaaaaaaagaagaaacgagctgaccctaagcaccaccatgctgaatttctagtggcaacgaattgtacttcaagctccggccgtatcgccaaaactcattggcaagacgcaccaatgaaaaattaccagctttgattttatggtccctattctgtaattcaacagattggaaaagttacctagaagcttcaatttctcaacagggtcaccattcaccctgtgtttcatgtgtcgcagcactgccgagccatttgtgatagccattcttcaccaactcttcttccacagctcgagtcagatttggagcttcaggtgctatcatgagctgtcttacagcagcgtcccaaggcttcagacccatctaaaatggaagtcctcatcaaatggaaatcgctacccgaa

SEQ ID NO: 224082 - DNA, 2712 bp, Cannabis indica
ggagaccccttacatactttagcgaaaagctatgtggggctgcacttaattaccctacctatgataaagagttgtacgcactggtgcgagctttagaaacatggcaacactgtttgtggcccaaagaatttgtgattcacatagatcacaaataccttaaacatttgaaggggcaacagaagctcaacaagagacatgcacaatgggttgagtacattgagacatttccatatgtcatcggcataaacaaggtaaggagaatgtggttgttggtgccctttctcccaggtatgctttaatctctactcttgatgctaaattacttggttttgaacacattaaggaacttaatcctcttggccatgattttgaggagatttatggtgcttgtgaaaaatccagtgagggtaagttttataggcatgagggtttcttgtttagggagcataggttgtgtgtgcctaattctgttagttcgggaatcccatggaagagggcttatgggatattttggagttgctaagaccttagttatattacaagaactcttcttttggccccacatgaaaagagatgttgagggaatttgtggtagatgtgtcacttgtaagcaagctaaatcgagggtttagccaaatggtctttacacacccctacctattcctagtttaccatgggttaatatttcaatggattttgtgttgggtttacctaggagtaaacatgggagggacccaatttttatggtggtagatagattttctaagatggctcattttatcccttgccataaaactgatgatgcttctaatgtcgcagatttatttttaaggagattgtgagattacatggtatgcctagaaccattgtatccaatagggatgccaagttcttaagttacttttgaaaaacattgtggggaaaacttgggacaaaacttttgtttcctactacttgtcatcctcaaatcgatgatcaaacataagtagttaatagaactttatccactttattaagggctatcattaagtaaaaatattaagacttgggaggattgtttatcacatgttgaatttacttataatctttctatgcattctgctactaaattttcaccatttgaaattgtttatggttttaatcctttgactcctttggatctatcacctttacgtgtttctgagcatttgaatttagatggcaaaaagaaagcagaatttgtgaagcaaatccatgagagggcacgcatcaacatagagagaagagccgagcaatacataaagtaagctaacaagggtcgtcacaagcaggtgtttgagccaggtgattgggtatggttacacatgaggaaagaacgattccaaacccaaagatgttctaattgctaactcgaggaaatggtccatttcaagtgcttgaaaaaatcaatgacaatgcccaccgactcgatttacctagagaatataatattagtgctactgttaatgttttttatttgagccctttggatgcaagtaaagatttaaggacaaatccttttcaagatggtggtgatgaggacactaaggctaaagatacaagtcaagttccagttggtccagtgacgagggcacgagccaagagattcaaagaggaactcaacaacttagtcatccaaattctaaaacaagaggagaccgtggtcaacactgaaggagaattgtagactcaatttaagggtgatttaagagtgatttcgtttttttatcataacttggatttttggcaacttattttttatttttgtttcctattttttttgtctttattagtcaaaaagtcttctttagggggagggggaccaaattccttgtttcttcaattgttttagttttcttttttgtatcttggttgtaagttggctatttaaagccttataaacactttggaaaaccggattattttttaataaaattttgagaggttttcttcttgagctcttgaaagaactattctaacttatcaaggagtattccttgtggcattcaacctgacttatcaaatagatttccatcatcgtttctggcgtcttccttcataccaaggttcatgcttaactaagcattgggtcgcagttccacatcctaaattcttgagttcttggaggctgccatatttggtatcgggttttatcacaatttttggtgtggttcttattaatgttgacaattaatttagaaattaaaatctagaaatcaaatatttggtaaatcataatctgacaatatatagaatatcaaccaattaattgtgaccaaattcaatgaatataacatataattgtattatatacacatataaaattattgattgattttatacttaatatataaaatattctaatattctctcacttggtcagcatttagatttatctcttaaactcaatgtccctcattacataataaaaattgaatcatagcgataggtcctcattatatgtcaagtatatcttccatgtattacgatatattcattacataacaatgtactttatgtggtaatttacataaacaaataaaatctaaaccttatgtttaaaagaaaatattaaaattagagtttcattcaataattttagttgtacaaccaaaaactacataaggggtaactgaattctatagttactttatgatccttgaatttgtgtagcgatatgcctttagtcaagga

SEQ ID NO: 224083 - DNA, 2110 bp, Cannabis indica
aaatagtgtctaggatgtactttttgaagcttgagtgatattttgacatcacttagtcagtttctgtgtttcggtggagatagtcaccagttctcggagatgttactattttgcaaaatcaagagactcaaaaccacccgatttccgaataagtcactttgtcagaaaagtgaaaacataaaattatgaatttgactcttttaacttcatagctctcagtcactatgaaaatctagacgaatgattgagacagaatcagaatcagattagcagaagccagcgcaccaggccatatgtcagcctgggcactgggtgctctttttagagcatccaagtttttgttttaatacttttaaggttcttgaaatcgagggtgaggtctcctaccctatttttgaccatttcaaagagaattcccagaccagagttttcaataaagtgattgaaacgtgcgcaccaagttgattgtcaacctgggtgttgggcctagcactatgtcaacttgggtgttgggctcagttttgatgcccctggaattgtccttttcttcctgagtttacttgtatctttgttatttctgatgatgaaaaaaatacccagaatactttttttaaaaactaatttggaaagtccaagttgacaatatatcaacctaggcactgtgcctagtgtcaggtgtcaacatgggcattaggttcaatttcaggcctttagaaagttccatttgctccctaaaaataattgaatcttaatttttgatggaaacaaagaatagactaggatttttgccctaaaagtaagtatttaatggataatatattatagaatatatgaaatgtaattataagataaatgaatacattaattatagaagtattatagttaataaatatctgaaaatttcttattcatatagagatggtacaatcacataagatcgtagaagagaattaagattatacaatatgaataaaataaattggtagtatattaaagtaagagatctttaatatggaattaccaagtgggatttactatacactatagtctagtgtatgtgtgtgtgtaattttgattcggatcacatatgtgcatagacatatagtagaggtgttgtgtataatttgattatacatgactggaccgatatgtaataatatctttcattaacatgtcgtttaccgtaaaagagttattcatatcataataatgattattaatagattagtttgaattttaagtatacatgaactcctatttgtgttcattgagttctttgattcactctttaaattttttcagagaagatgattcttataacttctgtgttgggagcttaatagcttgagtggttaggaacatgtttatacaataatgtaatccaagctttctgaaaggatcgaatattagttcccttatagtgtgaattctgagagtgctaacaattggatccaaatctataataagattatggattagctgttcacattgaattaatggtacataaggaatcaatagataattagaatgattaaacggtaattttgaccaactctaattatgaactattaattggagggcaaactacttacattacttatatcaatggactacaagtaagaattttgtagcggagtacaattctatattgtcaaagagtacaattccatatttatagtggagtaataataaaattaacgaaccgagttattctattaaagagttcaataataatcaagtgtttattggagctttgaaatataggtccatggtccccaagtcacccttatacaaaattgtacaaggaaatatttaatttgagaaatgaatttgagaaaaaataataattcttaagggaaaattagattttatggaaattattattttgaatgattatatcaattcgtaattgtataattggtattaaactaattagttttatttgataaatttatattaattagttaaatatcatattattcttaaataatattaaagagagaaatatattatttcggtgaaaataatatttatcttaatactattgaaataaaagattaatgagaatttattaattattatttacttacaaaataaataataaatttta

SEQ ID NO: 224084 - DNA, 1843 bp, Cannabis indica
aaaataatttccaacagttgtcacccaagaatattaggtagccgcctatggatcaacgatcatcaatagaggatgcccagtcagcatcagagtaagcacagagatgtaaactagaggcaggccgaagatgaataccatcttttatggtgcctttgacatatcttaggagctttttgcatgcatcccagtgaaccgatgttggggcttgtaaaaattgactcaacttgttcacaataaaggcaacatcaagacgagtcaaggacaaatactgtaaggcactgattgtgcttcgatacaaggttatatcagaaaagggttctccctcatgtagtgacagcttgatggtagcactagctggattaggacaggcttttgctccttccatgtttaacttcactaaaagatctgtaatgtacttgatttgagacaagtacatacctgtatggtcacagtaaatctccacccctaagaaatagtgaacctgccgaagatcttttaaggcaaaactcttgtttaagtcagcaataagctttttaataagcaaagagttaggccctgtgacaagaatttcatcaacgtacaccaggaaaatgactatattgtcgccagacccatatgtaaacagagagctatcagctcttgatccctgaaatccccatgatacaagtgtttgttttaatttgtcgttccaggcacgaggtgcctgtttgaggttgtaaagtgcctttttcaattggcatacataagtgggatgatctttatcttcaaacccaggaggctcgctcatgtagactggctcagttagaggaccatttagaaacacattagtaacatcaagttgggagacattccaactgttagagacagctagagatagaaaagtccgaaccgttattggtttaacaactggactaaaggtttcgtcatagtctatgccagcttcttgaagatatccctttgctataagacgagacttgtacctgttaagagagccgtcttcgtttagtttaacacgatgaacccatttgcatcctataacatgcatgtgaggttcaggtggaacaaaaacccaagtatgtgcctgatgaagagccccaatttcagttgtcatggcgttgttccattttggctaagcaagggcagccttgaaagacttaggctcagttggtaacatagactcgggcagggggtgttttgttgccatatacgactttggttttcttgtgcctgactgagatctggtgcgcatattgtgagtcctgtgagtagtacctatggatactgattctgagttagtaggagcagacgggagagagttgggaaaagtctgagcgttaggcatttggctggtatttatgggctgtgactgagaattggggagatcaggatgtggtaaattggtaggttcagatattgggaaggttgagattgctggtgcagagggaatatttgtggctacagtgggattttcagtgggcgtaatgtttgggactggtgaggaggtgttatgaggtggattgatagttggggagacatgctcaggaataccagaaccagttaccacagtagaaaaaccaccagaatttgtgtcagtttgcgtgcaagtatcagtagaaaaatgtgcagtgggtaaaagagatggagactgagaatttacctgagttgatacttgctgaatttttgttgcagggaaggaattttcatcaagcacaacatgtctgctgatgaacaatctgcctgaccaagccttatatgacctgaaggctgtcatatcaattttacattcgtgcatcaagttcccaacaactaatggggtagggtgcctaaaaggaaatcaacaagt

SEQ ID NO: 224085 - DNA, 1261 bp, Cannabis indica
ctttactttgtccactttctcagtccattttcgttttgcaaaaccttcaaggatgtgtaatggtggattagatccaagcacataacacaccaaagaaggcttccaatagttaatctcatcctctatgtcctctaaatctatcttcagcttcctatcttgttgagaactcttaaatgaattctctaaattcctcactacagttgcagatctcaaaataggggaagtagggttcataccttttgatatactatcgttacattgctctgttgccttgagaaagctcacaaagtcacgctgaacatcctcttgcctttgaatttcccgtagagagcttcgaggagacagtggctcttgaaagtccttcgatcccaagctccttctccccagatcaatttcatctggttcgtcttcactcccagaaatttctaacgcctcaacctcatcaggaagattaatttgcgattgcagctccatgtgcccagctcgattcccatctttcttcggttttttcgaatctgatttcagcttccctcccctcttcgatcgtgttttcgccatcgcttcagcaaagtgctgtatggcctaagtagagagaaaaactaataagactattgttatgatcgtctttgaaacctttatttttatttttattttttgctgttaataaactattaggaaactaaaataaaactattaagaaacgttaaaaaatatttcagaaactaactatttctcaaagtgttttctccttttctttttttcaatataaattcctacaaaaaatggaattaaactattataaaataattatgtaactgtaaatcaacttaaaaaccacaactctttactcaaattaacaaagttgttgtcattgtgccttttcattatgtttatttgaatcacatcaatttccaactattataaaactaatttgccaccatttacataaatcgtaccttgtatatctgctagtttttggtacatgtcaagtgacactccttcataattggtaaaccattttaaaacgatattgcaactgtaaggcaacgcaaaatattaaaaacagccttattcgtaacatgtggttccttaattagaatcagattttgttttttgtttttaagaatctgaattacctgttgtaaaccagggagtcaaccagaatgcaactgtatatgacgtatattcatttttgaataaatttttgttgggttttatgccctaaataaaactccatttcaatgtaatctattttattcaa

SEQ ID NO: 224086 - DNA, 1554 bp, Cannabis indica
ttaaacaaatagttttggcatttaagtggttgaattaggaaaagtggcatttttaggaaaataagataaatagttgagaaaaatagcaaaattgtaaagtggggcccactcctatggccggctacttaagaggtatttttccatttattttttcaatattgtaatgccaaataattctaacctaaacctaggtggttgcctataaatagatagtgatggcctcaaatcaaaagattatgaaacacttgccttcagtcaaatttttgagccatcacttctctctattttcgaaccagtctactctcttcttctctttatattttcgaaccctatagtgatagagtaagtgcccacacatatcaagtggtactcaattatagtgtataaggctgtgaagaatccagattcaagagaaggagattcgggctcagatcttggtgatactctgctacagacaggatacaagggttagagatctgagtggaatgagctattattattccgctgcacccactgtaaggtttctcaaactttatatgtgtttaaattacattgttttagaaattcatatttaggatgttaaataacatacatggtagtaaatctagatcctggtaaaacatattccaacactgaactaggttagggttattaaggattgattccatctgattcaagtactcttcttcttgttccaccttatttaggtcaagtgtaactctatctctttgaatgctctattgtgtttctatgtgaacacatgtagggttaaaagttcctgcatctttactgttagggtaactcttagataaacatggaaattcaatcgcatgaaatatcacatccctgctaattaggatcttaaaacctccttgctctctaacccataatctataacctttagttccctcttgatagcctagaaacatacgctcaatagctcttggttcaagttttcctacactttgctgtgcataagatgcatacccaaacactcttaggtttgacaaatctggtggtcttcctaaccaattctcctcatgggttttcaactctattgcactagagagacacctttttacaagatagccagcagtaaccactgcttcaccctagaaacctaagttaaacaggatacacttagatttatttaggatagtcatatccatcctcttagccaccctattatgttgaggtgtacgcctaacacttctatatctcaacaaaccatgttctccacagtaagcatcaaattggtcattgcaaaaatttgaaatccaatgtctgtgctcgacaccttaagtttcttattagtctggttttagggttttctaggggtgttcgcggtgcgggtggtgcggtttttaaccattttttcaaaccaacccgcacatgcggtttttccaattttccaaaccgcacccgcaccgcgatactaaaaaaccgcaaaaaccgcaccgcaaaaaaatgatgcggtgcggtgcggtttctgcggtttatgcggtttgaactatcacaatttttttttcgtaaatcatcacaaaataattaaac

SEQ ID NO: 224087 - DNA, 4245 bp, Cannabis indica
tagtaattagtaaagttaaaatcaaaggaattgtattaattagacattttgaaacaaatctaaaggaatgtagtaattagtaaagttaaaatccaaaaatctcattaaaatgatcaataaccaatttagtaaacttagaaaacgacacgtattaattaattgcgcatacaataaaaatggtatatttaaaaactatttagtcggcccaaaaggtaaaagcaacccaagaaaagagaagccctaaatgtcaaaccctaagtaattttccatctaattataatatcacttagggcagccattattttatctaaaaaactccaaattatgaaatcttcttctcctctcttcttacggaagaagctagaatttttatggttgagtaattttattatggtcgatggtggtgatggtggcgccgttagtgttcgatggtggagaatgtttggccattcacactaaatctcacaagtatatgctttgtatggttctatgtttttttatatatttttcttttgttacatagaaaccattttttataggaaatcaattgatactacttcaaagattgaaggaaaggcatagagaagggcagaggaagaagactcctctttacccatcgattttcttcaaaagccgattctttctgctttaaaaaaaacgattgaagggaatggcatagagaaagggaggggaagcagagcaagaggactgatcttatcatagtccaataatgaaaatgatcaaagataatcccaggtttgtagttctgttaccttatatatataatgtatatataaatcaaatatatagtatacatatataaaataaaatttctatcaatctccttctttcaatctgctattaaatttattaagttttgtctataaatttattgctataaaatttacaataatgaagcgtcaaaaaaatacctttacagatcgcagtgagaatgtctataaatttattgctattaaatttaaataatgaagcatcaaaaaaatacctttacagatcgcagtgagaactttgcagattttatcagattataaggcttcaacaatgagtggaaattaatttggaaggcggcaccacacaaagtttttgttttgtttaacaattgcaaaaatgtttaatttttcatatataacatgtgtaaatgaatgggtgcttctgtgaataggtatcttccgaataattatgttgttttgtataattgttgtaaatggtttcttttcagttgtgtatgaataaatgtctattaaagttaacttgtttttgagtatattctgttaaatagataacaaactgttaaaaggacacaacaaaaaccgttacatagccattttatacataaggtaagatatatatatataaagtgtatgagaatattaaattattccataattgttgttttttttttaaaaaaaaaaattgatagatgattcaaggtcctttctttctttccaattttttttttcttttaatttagtttatttttcttaatatattgtagtataattaattaattttaaaactcaaatttaattaaattttaaatttgtttgacattttctcattttgtattttttctttcaaataaaatttatatgattattaattaatcatttcttcagttttaaatttaaattttgttagatattttctttaaaaaaaaatcatgtttaaactctccttatgatttttagtattaaatttaaattttgttggatattttctctatatttttttttcttttattctattttattatcattaagttcaaaacattattaactctttagttttaaatttgaattctaaatttgttaaaaaaacgaattttaatttggataaatatttacatttttttaattttctttcatctaatttataaatatattacttattatattatatacgatgatgataacaattttgaattcctaattttaatttttttatattttagaaaaattatccaatttatctataataaattaattaattaaaaaattataatttactagatttaaaataatttgtacaatagtattttctttttgtattattaagataaagaaaagttacttatattatgaaaattagatatatatatatatataaaaaaaaaatattaaaatttaaaatttgatatatttatatgacttattatcattaaacaaaatacaatcgcacacgaagcgcgatttatttcttagcttttttatatataatttaaaatattttatatatctgctgcgaagcgcgagatgtttactagttaacatataagtttttatgtttattttttttttttcagttcttcttcttcatcttcttttcattttttttttttagtttttgaaatttttagtcacgtttttagtaaaattaagagtatgatttttttattctgatattttagaactgggcttacaaatataatttattttgacgttcgatttttactgtttttgctccatctctccggaattaatggtggttctatccgtgagtgtagaagatggaggttataaatacgttttttcttccttctctatggttatttttgtagttttttttattcttattttttcctaaaaaatacatttgacgagctcactggcaaaaataattttgaggtgtgtggttcttctatatttttctcagtggttatatctgctttattgtttgtcatttatttttgtgttattttagtagttttttattgtgatttttcagatctaggcttacaaatatagccactattgcatttggtgttaaggctgtgcaaaaaatagttagtttttttaatcttttttctttttgttttgtttgatttattttagtattgttttacagtttttttgctattattatttatttaacatcaatttcattgttttcgctcaatcttgcttgaattaatggttattttctaggtgttttcgtattgtcgtgttagttttgtgcatgggtgtagaagatggaggcattgttcttgatattcggtgtcagcataaaaaaaaaaaaaagtccaaggcaatataaaaataatttttgcagtgtagcagtaaaattataaatatttgtccaaaatctaatattttttgtaaatttctcttaaaataaatcctgtcattttctatttctaaaatgatataaataaaacattgagcttagttttttgtcataacatcactacattgagttattattaagttttattttgagaaaaactcaattcaagatactatttagggacttttttatttttacactctaaaataattttttttttttgtatttttataaaattccacataaaaactcctataacaactaacaaaacaacttaaatcgcaactaaaatctgtattacaacctacataaaaaccatgggaaaaactataagagaaacccaaactgtaaatttgaaaaaaagaaaaaaataaaaaaaaaatactatatgggataatttctctactatttaatatttagtattattttaaaaaatccattaattaatttatcatttaacaacaaaaaaaaaaagtccagtaataatttttacaaaataaagtatccaaaatgatatttaaatttctctaaaaattaaccttcaattttataggaatattaccctagggaaagacgaaattaaactagttcatttactctgcacaattacagaactaaaatatggaaaatattctgtaacataaaccctatattatatatatacatcataatataatataatatttgagaaaggaaggttgtatatgatactctcagtaactctctttgtttatgtttttctccttttcctgtcagactaatgtgtctaatttacatgtacagatacaatcttacacatgacactgtcttccctactttaagtaattaacaagcacatcgtacaaagtaaatttcagacattgaacaccaaactcttattatttcaattaccatctgtgaagtggagtagttcatgatcataaacaaaaaaaaaagtataaaaaatagctttcatagaacgcttcttatatcttataaacagtgtgcatatacaatagggaagagaaaagattggaacaaatgaaagcaactatgtcgttagaaactgtagagaaagagatgcacataacactagtattgcttttttcttaaaaaaggaaaaatgaaaaagagactgttgtgttatgaaattgagtttggaagaaaaagagaaaagaaaaa

SEQ ID NO: 224088 - DNA, 2598 bp, Cannabis indica
tctctggctcttgcctttctcctgagtcttgagggatctcaagagttgagttggtgcattcaaccacaaagtctgcaagggcatgaccctttatggcagttcttggttggtatgtcatctcgaactggccaagctcaatggcccatttgagtagtcggcctgatgcttcaagtttttgtaaaacctatcagaatgattaatcggtgtacacctttatggtgtgtgcatagaagtagggccttacctatctggaccccaaaagcaaattgtaagtcaatttttccatgagtggatacaaactttcgtcatcgaaaagacttttgtttatgtagtatacaaggtgttgtacactgtcttcttttcttgtgaggataacactcatagcatgttctatgactatcaggtacacgcctagctcttcattgtctataggtttagacaacacaggtggctaagccaattatttcttcagctcctggaatgcattttcacattcctcagtccactcaaattttttgttcgctctaagaatgttgaagaagggtacacatttgtctgtagacttggacataaatatgcttaatgtagcattgcgtcttgtcagactttgtacttccttgactgttgtgggcgacttcatatccaaaagggcttggatcttgtctcaacgtgcccccaccctttttggacttgacaagcatgtcatccacatacacctccatattgcagccaatgagatctttaaacatcatgttcaccagcctttatatgtggcccctgtgtttcttagcctgaagggcatgactttgtagcagtacaggcctagatcagtcatgaagctagtgtgctcctgatctggtggatgcatctttatttgattgtagcctgagtatgcatccatgaaactcaagatttcatggacagctatggcatctacaagctagtcaattgaagcagaaagtagtcctttggacatgctttgttcaggttggtaaagtcgatgcatactctccacttcttgttaggtttgggcaccagtactggattggacacatatagtggatagaatgcctctgttatgaagtcatgggtagcctctcgacctcatctttgagtgcttaggcgcactccttgtccaacaactgccttttttactgaacaggccggatgcttggatcgatgttgagtgcatgggtcatcacagatgggtcaattctgacagtgaccatgcaaaaaggtccaagtttgcccttataaattttatcagtattgatttaatttctagtgctaaacctttcctgatcttcagtcttcttgttgataaagggggatcgacctccacttcctccaactcttttagaggccgaaacatttctgcaggatccccagagcaaggatctatgtatgtgtccccactttgggccagacttcattgtcctttgttgggcgtgtcttttgggcccttagcgggcatcttctctttcttggctttggatagagccaagttttaacagtgacgagcagactgttggtcccccctcacacacgccaccccatgccttgttggaaattcgaggcataggtcgtagattgatgttaccacctttaggtcattgagggtcgatcggcttatcatggcgttgaaggctgagggaacatcaataatgacgaactatgccatcagagctctaagggttggattttctccaattgtgaggggaaatttgatatactcgacatgtgcgatgccttggccaaagaagccatatatcatttcattgaagggtgccaggttggtgagctggagccccatcttttcatataattaatttgaatagaatattagaggaggctctatcgtccaccatgcatcttgatacagtcatgtttctgatgtgtacagtaatgatctaagagtcattgtatgggaaactgccctgagcagcatcttcttctgtgaaggagatcgtgggctctataggcttttgttgcttagagctcctgtcttcgacaactaggatgtctcttttgggctcatgacaaagtgtccaagcatagcgctccctagtgttgctggtctcgcctgtaatgtggggtccgccaaatgacccctaaatgtcctgcactggtggtggcattggatctccgttctgggcaccctatgcctgagtttggtcatcttgcacataacaatgcaggtggggattgttacacattatgaggaattcaataaccctcgtactattttgacactcattggtgtcatggctgaagtttgtgatgccagtagaagttcgacatgtcccttttgctcatgtcccttttgatagggaagggcttttggtatgggattgttccctgagtggccatgaagatggcctcatctttctctgtcaagagggtgaagcaggtgtacttctcctctctattcttttgtggcatgggagaagtgttaatctttccctttttgccactattcctcacagagctattggtgctgtgcttgtttctagtgtttttgccactagaagtctgggcagagttattggtgtctacatgtgcgtatggtaggtcaggagactactggatgtctcgtgg

SEQ ID NO: 224089 - DNA, 1022 bp, Cannabis indica
tatatatatatatatgtatagctcctgaaaaaagacaaagagctccctcagcatacaacagctttatcaggtaatataataagttttaaggcttaaaaaaacaacaaatctcaaaacttggaactttgattatatgatcttaattgtaaagcagagaagagattaaaaggctcaaagctgaaaatccaaatatggctcataaggaagcgtttagtgcagctgctaaaaatgtaagtttttttaaccaaaataaaaagaaacatatcttaataatctatagaaagatttctacttgacttgtgtatttttttcatgtatttagtgggctcattttcctccaactcagtacatagaagatggagagagctgtaatcagaaagaggaggagaataattcaacatgggattctcatgatgtcaataataaggtaacaaagactataataatagtttcgtcccctgaattattattacttcattaatttcgttcccgaataacttagcattgtaaaaattagattcactactttaacataataataataataatagaataacaaatatgtgagagttgtgcaccaaaaaatttacttttagtaaatttttgtagtaagtaacatttctcattgaaaattaataagggacagtaatttaaataaattgccctccaaatattttgaccatgtatttattgctttttaactacctcattatatattataaattcacaacttaaaagggtgtgtttaattagtgatgtgcaccacatcttattgtagtaattaatatatggcactgaaatgggtgcatggctttgtggtgtgataattttcaggttgatgaagatggcaaagttttccttcaaaaaaagggcatcaaagatatctctacatacaaatatgaaaagaaaaaaaacaaccattgttgaaggggttgatttgatctaattttccattacaagcaagtactttctatttagagggagccaataattaaaattgggttaatcataatgatgagtaa

SEQ ID NO: 224090 - DNA, 2372 bp, Cannabis indica
ttttttaaaaaaaaaattacactaaaaaatttaattttttttaacacaaataattaataaattatacaaattacatttatttataaataaacatgtaataaataaatataaaaataaaaaagtactaactatttgtggtggttcaaatcaaattttctagcaaatttcctacaataatgctttcaaagtttctaaaagacaaatatttttcattatatcaacaaatacatatataatataaatcaataaataaaaatatatataactaatattatataaatttattattatgtttcatgaatattacacagctaaaatcagttttctataatttctgtaatgttgaaatttctaatttcttaaaaacggaaaaaaagaaagaaaataacaaaagcaaatcttataaaatagtcaaaagatatgttaaaatatataaaatttaaaaaacacatattaaaagatatgttcactaatctgatcagagtggaggaaagtagtggttgagtgtgatgtggactccgagaaggcacaaccatcaccatccgccaagaacctaggtgttatatccgaaaggattttgacgaaaatgccttctgtaattattaaaaagctctttttactaaaaaagaactttttgaagggcaattgctatacccgaaactcggctggaggaagcatgtccaggtaaagggaatgtgaatcggtacaatatcttttcatggaataattcattaattacgtaagtatcagagtatatttgtaacccactaactataaggtcttaggcgaggaatcaatgtccaaactggcacttagtgtattagcgagaaaccatatgtcgctaaaagtgaatagcgaggcaccagagaaaagtgacacataccttagctcacaataagcaagctaagtgtaaaagtcagatcagctcgaagaataagtatgcgagatgaccatctcgctatgagaagacttcttatagcttcatccaactaacaggagcgagactcataaccctggcaagtcagaagatttctgtatacccgcgatcgacgtacgacatacattgtcgacctcggaaagaagaattgttccagctcgccattgggatcactataatcaagtatctgtcgagacatctccagattcaacaattaaagacgtgtttaatacacaatattcttgacctagtaaaagcgagaaaatcacagctatacaattttcaaaatcatacaccgcatttacatttcgtgatatgtaatcagaacccacgattttagggataatggctgtaaacatattttggtcagctttgtaattaactgccatgatgtaattataaatagtggcaaacaatctcaaaaaatggacgaaaagactcttatgaaagaggccctgaaaaaaatattcagaaatctggataagattggctcgtagactatgcagaattttaactgcaaaaccacgtaaaaaaccctatgttcatattttatttttctgtgttgaattatcatcgtgaggctcaaatttgattaaaaaaaatctgcattaacagtttggtgctttcattgagagcctctgtgaaaaagcttagaaaaagcccttccttcattaaaagaaaaacctttccctttatggctgaaaatccagagaatattaacaccccacatgaggaaactaaccattgttatggaaaagagcacatgagctctagaagatctaccaatccgcagtccagaaggaccacccgttctagaagggcacaacctaaggatggccccagtgctcggaccacacgtccccggagaactcaacctgacattggtcctagtacgcggacaacgcgctcgaggagaactcagcgtgggaatggtcagaatctcgggacgagggatgaagacctcaaccgtggaggtgcccaatctgttggagaaagaacttacgtaaagccaccgcctgagacgccgtctggaagaggcgcaacgtcaaaacactgagttagatgtgaggcagcctcagccagggcggtgtagggaacgaacgctcaaaattaacttgaacttggagtgagaagaccacgaggcagacctcgttgctctcaaagcaggagataggaaaaggcccaggaagaacaacctggggaaaacgagacaccccctaaaaatcaggatgaacaaccagaaaggagacaactggaaactaatgaacgagaaatccctcatgaaaatgaggaggatcttggaactcaactgggagaacgaagatcacctgcttggaatcatcaacgttctacccaaacccatagagcgaggactcgtacgtaccttgatggggaaatacaaaaaactgctgtcgggaggaaagaacagagcgta

SEQ ID NO: 224091 - DNA, 1774 bp, Cannabis indica
acttgtattatacaaagaattaagatcatcacttagccacaaatataatagttagcaacataataaagttatagaatctttaatcaacggttgttggtgcgatttgttgattcctattattcggtgcaagcaatatcgattcagattgttgtatgatatctaagtgaaggtgttttatataatagagattatatatgacatggaccgatatgttattaagctgtctttatgaaacatattatttacaataaagacctaattcatacattaaagatgagaaatattagatcgacttgaatcatgagtaatcatgagctcctgttcatgttattagtttatttgattcactcgttaaagttttttagagaagataattcttacaacttttgtttagggaatttaaaaatatggatggctgaaaacataatttacaattatggaatcatgactttctaacggatcgaatattggttcccttcaagtgttaattctaaaactgaaaaagttgtgcacaagtttatattggatctaaattatactttgactagtgaattaacagtactaaatgataaagaagtaattagaaggataaaatgataatttgaccaaaactaattacaaaaagacacaaggaagactaatcaatagaattgattatattaatggacactgcagtaaaactcagtaagtataattctataattattaacagttcaaatctatatttatagtggagtaatcatagaattaataaacatgattatttggttgatgggattcaataaataatctaattattggagcttagaattataggtccatggttctcagatcgccaccttgaaactctgtcaagggtagggataaaaatttaacattgatgctcaaatttgtaatttaatttctaatttttttcaagagttgtaagattaaaaatacctaaaattttatccggtttatcaccattgtttatttattacttttaaataaatgttcagaagaaggagcttagatttataattaaatttattgcaagacccacgttcaattagggtattgattggagtgtagtttttttagttttacaagcagaagctctagctcttttggtgtgctactagatgatgttataactttattgtctaaatttctatgaacagttttgttccatgttgctcgctttctttagaagttcatagtttgacaaaacatgtccttccatcatgaatgaacatgaaataaatcacatctatcaatgacaatcaatcaaggatctttcaataaaaattaaatagagacaccccatttattcaaactagaataaaaaagaaaaacatgtcaatccatattcaaaattctcgatattaagtatcgatgagttagaaaatatcgtgtcaacaagtcatgagaccaacctcgaatccacatgtgcatccaaagcaaaaagtgattggagatcaatcaggctattctaaaaacaaaaggccaaacacaaaaataaaacataaacaataagttaaggtagaacataattaaaaacacgattgacaaaacccccactaactctaaccaaccacaaaatccctcttccttggcagtacaaggaccccgaccgcacgactaccccaacacccattcttgatagctcctagttgcgcaaaacgaccccaaaccattccaccaaattggataaatgggatttggagatccaaaggaaccgttgaattgagtgggagagaccaacgaccactgaaccactaaatgacacagattg

SEQ ID NO: 224092 - DNA, 4689 bp, Cannabis indica
ttttatttttttattaggggattgcccgcccgtcctctccctcattaggagacttttaacccatgctcaatggagaataaacgaggatggcgattaaaatttttaacggggatagggacggggagcactccctgccaattcgccgccccgtgtgcatccctattttacaggcgtataattttcggagtgttaaacttttccgaatttcttaaaatttgtaggatgtcttaaataattataatttaaatgattatgaaaaaaaatttaataaaaaattatttcaaatactaaaacaaatagagatatattaatacatactttttaacgggtgcactataaaattttccatatttatttattgattaataatcataatcctattcacaatcatattcataataatgatttttttcttgaaaataattaattgaatttaagagacaaagcccttacttaataaattgaaaaagtagcaattattttcgtaaactgaatttcgaaaactgaaatgtttgagcaactccgaagaagaagaagaagatgaatctctacgcccacgacctctctcttctcgatttcaattatggcttctccgattccatcgacgattccttctctcttcgtcgaactatgcttaattcatccttcgctcatcgcgatgaagatttctactacgatcaccgccgcactatgaaattgcatgatgctgccacccgcaattctactgctcctcccacccaccgccacgatggcacttcgccgcttcctttgggtatggattggagtcctcctcctcgtaaatgggtactcttccaaatttcctcaaattgatgaataatgatttcatattaatttgagctttgttgtgtgtttttatgttaatttgattagcacagtttcagtttgcctaaggtctttttagattttaggattaaaagaagttctcactttgattagaaaaaaaacaactacagcttatttaaagtggaatgattaaaaaagttctcattttgattaggagaaaacaacaacagcttacgtaaaactggaataatttacatactaatttattaacactattagcaaaagataaaacttagacattgcatatgccttttgtttctttttttattgtttggtaatttgagcttatagatgaatgtaagctgaaattcatagcttctgaatgtaggaaggacgggactctgtttggccacatgatcctcattcaggatggagctattgttgtgtaattccttcttggacttctatgcccaaatcaagaggttcagaccctgtagtggtatatttttctttcagcttaaattttttgaactgtcttacttttcttctttccaaattaagctcttttctgattggatttgaagtgttaagcttcattgaacatgaactttcaatgtttgctgagtaaatatatatgatgaaagtgaattggcagtattattatttttatattaacattcattggcaacagttttatagggttcaagttggtatacaatcaccagaaggtgtcaccacagtaagagggatattacgaagatataatgatttcttaaagctttttactgaagtaagtagatggactttcttgtgccactgaaattggcatttcctaagttactgcttcccttagtcatatgcaaaattgatgaacttaggatgccccagatgatttgtttttactaaatctgtatgctttagctatcaatctgaccttttaccgtcttgtgtagcttaaaaaggcatttccctcaaagaagatacctctggctcctccaaagaagcttctaccgataaaaagccaggaacatttggaacaggtactttagatatttctctcattagtgtattggtattttggtgctaaatgatactatgtaattcaactataaactttaatgcaaccttcaacagacaaaagtattatcagacaaatatatacgtcttcttattctcaaaatgaattcatttcttacagcgaaggtgttctttggaggattggatggaaaagttgttatcagacattgatttatcaagaagtttccaaatagcaacctttcttgagcttgaagctgctgtgaggtcttgtaggtgtttctttgatacgccttgacattatctttcttcctttcaatctttagcaactatatgctgtaatattattaccaatagaaggatttttatgtatagattgtttttcatggttcttatatgtttttctttttttcaatgcttcagcatttaatgatattgataagcaaagttcagacggagattcttctactagtggtgcggttccaccattcttgtcacaagagaactcagatatggcatcaaattatggtgatgagatgtcttctgagaaatctgaacttagaatgacgcctgaaggggaaggaagagttgtagccacagatcaaataagcgagagtattactaatgttaaacttcttcgcctcaatggaactgagtttattccagagccagtggattccagagctagtggccattctcagagactgtcaacagagagtataggaagtgattcaattagtgatgctgaccttcctggagatccaagaaatgcatatacttcaatagatgcagatttacgaattcctagagatgtagttgctacctttccagtaaatgagagaaataaattgaacagggtcctaataacattacagcagagactagccacagcaaaagcagacatggaagatcttatagcgagattgaatcaagaatctgccgtaagacagtatcttacaacaaaggtatgtttttgtaagaataccttatcaatccgagttagtctttacgatactgatagcattgaaatattaattcgaaggtcaaggatttggaagtggaactcgagactacaaagcagacttgtattgaaaatatacaacatactgttttctctgaaaaggaaaagtttactcagatgcagtgggatgtggaagaacttcagagtaagtgcatgaagttggagttacaactcaagtccgaagaggtttgttcccactattaccttttatcgagtttccttatccattattgagttcttcaaacaaataacaaataaaattgcaggaagggaaaacacgtgcagagtcaacaaaggagttaatcatggatgagaataagatgttatcacaggagttggatgctgttaaagagcagcttcataattttcggaaacatcatgaaggccttgagtcgaaatcaaaggcagaattaaagctgcttgtgaaagaggtgaaatctcttagaaagtctcagtcagaactgaaggaagaacttagtaaacaaatgaaagaaaaattgaaattagaggtaaggtgtagtaaattccgttttgataatttcaatagttaatatatctgatttcgggggatcctgaaagcatattagaattaaaatcaaattcaaatttgtctgtttctgcaatgtgaaactgatgcttttatgtttcagagggttgttgaaaaggaaagaaaaaggcggaacttgcagatgcagctaatgagaaactgcttcacgaatgcgaaattcttcgtagtaggcttgatgaatgtagtgttagtttccttgttgaagaggaagataagttagttttggacacttcattaccttctgacactatggatttactaacaacatccgacaatcgaatcggtcttcttcttgctgaggtactcatctaaataatgtgctttgctttcactttgaaaaactagtgattaactttttaatcccaaccattattaacattccattaactgcaggcacagcttctggcccaggacatggaaaatctcgatgagtcgcataccgataaagtcaacgacaatgtcaacactttgaggaaaagtgaagataagttgaggcagattctaacagatacactagttgacaatgccatattaaggaagcaagtcaactcagttatacgatgtgccctgagaacaagttccaaagataatgacaatgaagaggataccacttcgaggagatccgttcttagcaaatttttagaaaactaactattgcaaatatcaatatgtaaattcagtcgtatgttcatataaataaataaacaaataatttcccacataattttggtggttgtcttagtattatgaatattggatgctcggaatgtgcattgtataatataattattatttttttcttaataaactacacatataaacatatatatattttataaataaaaagggtatcatgagttagattccttcctcaccctttcggtcattttgacaattttagggatcacgtgtcagttataggagtcttatacctcagttactttaattgggtcatcggtagtcacttaagttctcatcacatagatggcaccaccgatcaagtttttcttgaatccctttttagaggggcttggctgggtttagaatctttgacccaagcagaagaggatataaacatgtatttaaaaaaagaattatggctaaaaagtattcaaacgttaatttttgtagataagttttacaaggttaaaactaaaatgcctcaactttgtgaaagtattaaagactgcaaatgtaaattcagtggacatgtacattaaatcaacatattcccacattaattttaagtcttaaaaatagt

SEQ ID NO: 224093 - DNA, 2415 bp, Cannabis indica
tgttgtgggatattaatctaattataattaactgcctccctaagtaactataaatatgggcagaatacactgaaaaaggggacaaaaaatccttgagagaaagaaccctagtttgtattagagaaatctaataagatagactcgtggactacgcaaaattttaactgcaaaatcacgtaaaaagctttctgttatttcgtcttttactactattatttctgtgcaaatgaatcacaaaataggctttattaccgttaaagaaaatctgcgttaacaatttagtgctttcattgggagcctacgtgaaaaacgctctgaaaaaaccctcctaataaaaaataatctttctccatggatgatagcagacaaaatgttgatacacatcctgacgagactactcaccatcctggaaaagagccaatgggcacacggaggcctctcaattcatgatctacatggttcacgcgttcaagaagcacccaatgcgaggatggccaaaatatacagtccacacgttcaagaaggacccagcgtgaaggtggtcagaacctagaaatagggaatgaagaacccaacataagttttggtggtgctcaacccatggagtgtgataatgatagtgcctattataccacgagatttgtgccagttgtcgagttgtaaaacttccatctcacgcgccgcttggaggaggcaaaccgacgaaatgctgagttggaacaggaggcagcctcggccagggcagcacaggagagaaacacacaaaacaaacctaatcctagattgaggagaccactagttaggcctcgtggctcacgaactagtaggtaggaggcggctgaggagaatcctcagaacacttaggaagaacaacctggggaaactgagggtcgccttgagaatgaacaaccaaatgaccaaccggagccttgtcaccgaaatgagaacagaaggtaacccgggaccagggaacaagaaatccctcgtgagaacgagggaaatcttgggactcaacctggtataggtggttaccacggagacatcaccaacgtccttctcgaaccaacagggaaagggcatgtacaaagcccaacatggggcatgcaataacccatacccaagggagaaggacgggacatgacaaggcgagtgtcagctcgagaggcacaagaagcaatagtcgatcaacgagaggaggacatagaactcgtcgcaatactgatcgagaaagtataggaatgagtagaatggaaagttactcaaggatgaggtccatgagtaggacgaggtctgttaataactataaccagcaacaactggatctttgtagtcactttaaccagaaaaaacctgaccttcgtcaacatctcagtcaaaagcaagaggatcctatccaattatgaattaatgagttcgaggacaaatttaggaggtatcaagttggggaatattgaaaggagtgtggatatgacttggacgacgaactgttgcctttccatccagacattatgaatacggaattcccctagggattcaagaatcctgacatctcatcatatgatgggaccatagatccggtctcacatttaaataatttttatactatcatgcgaggcagcaatgtttcgaaaaatttacgctgtattttgttccccacttcgctaattagattagcgagtagctagtttaacaaatttattcatcattcaatcacctcttggaacagttgtccaaagacttcaagaaacagttccaagtagccaaggataggcaaccggaggtgttctcactcactaacataaagcaacaaacatgcgagatgcttaaggcttactttagttattttagcacagctgccgtgagggtgagaaatctggaagatagtacccaacttactgctctccaggcagggatcacaactgatctctccactattggagtggagctatgggatgacctacagggtcgcccactgacaaacatcactgagttcaatgaaagatctcaagtgtttgtttgaaaagatgaagcaagaaaagagatgaagttgttaaagactggcttgggaggtaaacttagcactgtctcaacaagcaccgtctcaagcaaagctgacaattaaggagcctctagttcaaagaggaaagataactctaaggagtcagccaaggaaaagaaaaagcaaaagaagcatgacaagtacgtgccaatctacaccatttataccgagcttaatgaaactcgggaaaacatctatctcacacatgagcataggatcgtgttttgtaaacctgagcacatgaggcatgggaaacataagagagatgcaacccaattatgtaaatatcacaaggacattgggcatacgatagaggagtgtcgtcagctaaaagatgagatagagattctcatcgc

SEQ ID NO: 224094 - DNA, 1693 bp, Cannabis indica
acatgttacacctcaattttacactcccttttatttcctcactaaagctgctactgttcagagaagttctctgccacactttcccattcctcagcttccacaatgcataaacaagggctgcaattgcagcttggtacactagctttcgaaacttggagagcttggccctttgtacctatctcagtagactagaaaggctattagaagtagcattctagcccagccattgcttaatttccaccaacctgctacaggaaaaacaacattcaaagaagagatgttggctggtttcctgctgtgtttcacagagacagcagctgccatcaatttgcagaccaattttcagcaaccgatccttggtttttagcctatttagcattgctaaccaaagtattatacagtgttttggagtattcaatctaccccaaacatccttgcaccaattcagcttggttggagtaggatagaccacacaataacctgctgcaacagtatatttgtccctctgaaactcagtcacattacacaaggatttcagttggtttttgagagttacaaccttcttccaataccagctagcatgtatggaagcattgtaactccaccattcctggtttttgatgtagactccttgaatccatcttacccaaagactatcttgtttattcgcaatagcccaaatatacttgcacatagcagccttgttccattcctcaatctttttgattcccaaaccacctgcacttttggactgacatacactttcccaagcaacagccccacccccatgaagcatagcttgacctttccacaaaaggctctacaaatggcttcaatggatttaattactttctttggtagcaccaaaatctggctccaatatgcttgaatgtcaattaaaaccgagttgatcaaagtgattctgcctgcaaaagagaggtttcgagaactccaactcttaatcctagctgtcattctctttgctaacagctcacattctttgccaaaaaatttcttcgcacaaataggaatccccaagtaagtgaaagggaaatcatatctcgagaaacctgagagttgaatcagccttttcacactctcctcctgcatattacaacattacatagcagttttatttgcattaggatgcaatccagatgtaagtgaaaacagtttgagtgcctgtaacaagtaagtaacacttttgttatctccatagcagaatagcaagacatcatctacaaatgccaagtgattcaatttagccccaagcatctctcatgaaatctaaaatcctccttctcacctatcttcttcataagtctagataggtactccattcccaagataaacaacaggggtgacatggggtctccttgcctaagtcctctcttagcttcaaagaatccatgtaaggatccattgaacataagagagaacttaggagttgtgatgcaattcattacaagttgatgaacttcctgggaaaattcaatccctccaacatttcttctaaaaattcccactcaatggtgtcataggccttctgtaagtcaagcttgatcaaacaacttgccttgttggctttcctgttataatgtctcaccaagtcctgacagatcatgatgttatgccctatataccttcctttaataaatcctccttgagacggagaaattatttcaggaaggat

SEQ ID NO: 224095 - DNA, 1375 bp, Cannabis indica
acaatatactccaaacctgaaatggaacaaattatgtgcactctttgggctatttggactgaacgcaatcaagtggtgcataataaaaaggctaaaccagcacaagccacggccagctttgcatcaacttacttgaacaacttcaaatctgcccagtgcaaataccaaccggctgcctctccagcaacttcaaaccagcagcttcagcaacagcctttgccgactcttcgaccacctgctgctcccccgtggaagcctcctcctgctggtgccttcaagttaaacgtcgatgcggctgttgacacatcaaaaaatgtcacgggtgttggtgctgtcattcgaacatctacaggatcggttgtagctgcactctccaagcaattagtgggcaatttcaagtctcatgaaatggaagctttggctcttttccatagtctaaactgggctttacaacaacaattgcctttgtcccaagttgaaactgatgctctcatggtggctacagctttgcaagctcccttcaattcaaagtctgcttttaatgatatacttgtagacatctcttgtcttttgtcctttttcccaaatgtaacagtatcacatgtcaaacgcactgccaatcaggcggctcatggtttggcaaagtttacattaggggtggatgagacatgtttttggtttgaggatatccctcaacctatttactctgttattgtagatgaactctttgtttaatttataataacaagtattttcacactcaaaaaaaaaaaagtatagtgtcccatataatttaatataatagcttttatggagtattaatagtcaatcgcaacgcaacatgtcaataagattctaggcagatttctaatagcaatgctgattgaattaaactaaaatttatttaagtaagccaaattattattaacagctttgaagtactttccgaaattctatatattctagtaaagtggcatttgatgtatatattttaggcttaggcttagaatagagctacaagaatatgtattattgtttccttagttataatttctccgactaaaagaatatcgtctgtattcttatgtttatttatatagctaagatttttgttctttcggcataggacaacgaattggacctaagatctggctaaatcctagacaaaacgtgatcccctaaaatgcacttttttttttctcttctctctctaattatatacttattactacattatttttttttatacttttacttttgattaaatgtgatcccctaaattttcagcaactaaggtgccatttggtaatacttttgttttctaatttttaatcacaaaatgaaaataaatgtttgtttttaaaaatttttactt

SEQ ID NO: 224096 - DNA, 1304 bp, Cannabis indica
aggaccaggacaaggacctaaacacgaaattgaacctaaataaaagcgagaccgagacccaaacttgaactgagactaggactcaaacccgaacctagactgggacccaaacccaaacaagaatttggaccaggacctaaaatcaggatagggacctgggcaacagaactaggattgggacttagtacccgacccaaacccggacttgaacgtaggacctagcttgtgacccaacacccgaaatggaacgagactaggacctaagatagggatccagatctggacctggggcttggaccaaacccgtagtcggtgtctagatctaggacccaaccccagacccgaaccgagaccagcacccgaacccaaacctggacctgaacccaatcctacaccaaaaccttgacccgaacccgtaccctacgacctgaaattcgaatcgaaactagaagtagacggggacccaaaaatgggaccaaaactaggacttggacttggaaccgtaaccatacatggacgtagtcccagaactgtaaccggaccaagacctagactccagctcaaacctagacccgaaccagaaccaataaccagatcccaacccaaacctggagtcgggaccagaactcagacccgaacatggaaccagactcgggacaaatactggggccaagacctagaaccgcaccctagtcttgatcccaaatccaaactcaaaactgggacctaaaccagaaccagaccaggacctgtgacagggatctagatctagactcgagatccaggaaacagggcttggaacaaacccgtagtaggtgtctggatgtgggactcagactaggttccgaactcagaccaggacccaaacccgaacccagacccagacccaggacccgaaactagaacctgacaaggacccggacccagacttaaaactgaactcgaacctagccctagaccaaaaccgggacaggaactcgggccatgacccgggcctaaatctgggacccgatcccagacacaaactcggtccttaattgggatctggaaacgaactttgactcggaccctgacccagactgggatcaaaacccgagacttagatctggatagacatcttgacccagaccaaaacatggacccgcactagggaccctaactcggacctggacccgaacccagacccagatcaggatccaaacgtggacccagactcggacccaaactcagaccaggctcagaccccaacctagaccgagacccaaacctgaacccagacaaagaatccgagtgtgggtctgtgt

SEQ ID NO: 224097 - DNA, 3119 bp, Cannabis indica
cttgcacaaccccaagacactccacagtcacatgatgccactgctttctctttatccatgtgagagcttccttgacagaaatagcttcagccaagattggctccaccgttttcgatatacaaagatggttcggccctcaaccaaccagcctttatcatctcttgccaccatgcccaaaccaaatcatcgaccatcatcaaacaaagttgcgtctacattaactttaattctattagcaagtggaggggaccaatgctctgcaacatcatgaatctgatcatccgaatatgatgagccaaggacagaattttaagcattattctattgattaaggtagtgtttagcaaacccaacaatgtcatcaacacgggtcgactttcctttccaaacaacttcattgcaagcactccaaatggacaacacacaacagccacaagagatttttttctgcatttatcttgctgaaaatcgagttgcaccagtcaaagaaggaggaacctgatgcatttatagtgccaatccccactctattccagcaagttttaatcacattgcaagtgactaaacactatgttatagtctcattatcaacacgacaaaggggacagagggggcttacctccacatgcttgctccggagttaaatcatagtcagaaggcaacccactgccgcacgccacatcaaatttttaatcttgggaggcaactttaaattccaaagtttaccccagatattagtatcattattatcataccatccccctttaagcttttggagtaaattatatgcactcttcacagtgtaaaagctcgaagtctccttagaccaaacataatgatcttccatattattcacttgcagcggaatggacatgataaaatgcttgtctttgtcaacaaagaggtcgtcaattacctccacatccaaactagaaccatcaagtgtgagtaagttgcttaccgtggcattcgaaagggctgggtggtttgaaataacatagggattaacttcatctggcagccaaggagagcttaggattggaatgctaatacccgacccaatacaccaacaaactcctttctgcactaattcttgagattccaatatactcctccaaacaaagctcggattcgagccaagcgaagttgaaagaaaatcaccctggggaaagtacctagccttaaaaactcgacttaccaaggcattaggtcttgtgaggagcctccacccttgtttacccaacatagccatgttaaaatcacgcaaattccgaaagcccatgccacccccttcttatgtttgcaaagtgtatcccatgacaaccaatgtatcccctttccactatccttgtttgactgccaccaataactcgccatcatgctttcaatgcttcgactaatttccttagggagcaaaaagacgctcatagcataacttggaagcgcttgaggcacagtcttcaccaaaacctccttgccagcccttgaaaggaacttgccttcccaactttgaaggctttttcagactctttctttaagataaccgagtacaacagtttttttacgagacatggtatttgggagacctagataaaagttgtcttcggtggcgatgttcatctgaagtcgctggctaattgcatttctgaccgtggtagaggtattagtactaaaaaaaatggatgactttgataaattcacatcctgaagccatttcaaatttcgtcaacaactcttgaattcgctgagcctcatcttctaaagcttgacaatataagtagctgtcatcagcaaaaagcatatgagaaacctgtggtgcaccattagccaccttgcaaccatggatccacccatatcgttcgtacttcctcaacaaagcagataggccttagcacagagtataaacaaatagggagacggaggatccccttgtctgatgcccctagttggaacaataggtcccatctcgtggaaaccatgaataaccttgtaattagcagttgaaacacattgcataataagtcgcacccaggcttcaacaaagccccgtttcctaagaactgcttccaaaaaattccactcaatacgatcattcgtcttactcatgttcagttatgccatacaaccgacctttccttgacgctttcgtttgagattgtggagtacctcaaaggagaccataatgttatcagaaataagtcgtctccggataaaagcactttgagagtccgcaacaatagagtccataaacaatttcattcgattggtcataacctttgtgacaatcttgtataacacattacaaagagctattggacgcaagtctttcattgtctcaagccccttcttcttaggaattaaaaccacatttgcatcactacaagattcatcaaagacaccggtaacaaagaatctctgaacaaaattcaccacatcttttttcacaatattccaacacctctgatagaaggtcggggtcataccatctggccacaggctcttatcgggatgcatttgaaacatggcagtcctcacctcctcctcagaaacaggctttgtggattccatgttagccaactcaggaaccacatgatcaatacaatctatgacctccctacaatccgtattagcagttgagaataaattcgtaaaatactgcacaacaacatcagctaacccgttctcctaatcgcatttttaagttttgaaatatggttattacgccttctattacttgctgccttatgaaaatatttgctatttgacgttctttgcatgtatacttcactttatagggtgatcttcatcctaatgtgattgccaccaatatccatcattttaaattactcgatgtgatctataatatttccaacaacatttttaatttgaatactaaactaaaaatatctacatcaaaactaatactttgattttcattactccaatttttgaataacaaattggtattttacttcagaactttaccactaataaaagtatgctatgcgaattatttgcaatgttaaatatatatgggtaaatactattttggaccctctgttttacaaaagttactaattggaccctgtattttgttaaatgacaaaatgaaccctgta

SEQ ID NO: 224098 - DNA, 2725 bp, Cannabis indica
attaagtctggagtttgagagatgacatgatagatcattgaattagcttcgatacgtaatttgaatagcgtcaatcggataaaaattgagtgagttatggctgtcttactaaaggcagttcaggttccagtgcccaggttgacatccaacgcccatggtgacatcccagtgcccaagttgacatctgacgtcaacctggatgctcggtaagtgtagaaacatcccaaggatgtcctttaagatgcctaagctatagtttgacaccacttagtccatttatatgtttcagaaaagttggtcaatggttctcgaagatgttgcggttttgcagaaatgacaaactcgaaactcatcatttctgggtgtgctagaaatgagaaatgcaaagttgtgaatttgattcctctaacttcatagatcatggtaatttttggaaaactagatagacggtcaaaataacatcagatttagataagaagaacccagcgcgccaagccatttgttgacctaggtactaggccctttcaaccgagcttctaggattttgtttttgatacttccaaggcttctaaacttgaggacaatgtctcctaccctctttctgactattctagattgaatggttgcattagatttggcatttgagcaattgaaggcagcgtcctaggttgattgtcaacctaggtgctgggcccagccttaggtcaacttgggcgctaggcctagccctaggttaacctaggtcttgggccctatttttagggactcggcactgtgattttctcattgagtttacttgaatctttattattttttatgacaaaaaaaatacccaaaacactttttactgaacttgatcggaaacagcctaagttgacaaaatgtcaacgtgggcgctgggtcctactttttccccttcaaaaattctgtttggtccccaaaaatagttgaatcttaataatttctaaagatggataagatgctcgaaagaattcctaaaaaacctcatgttaaatggcccaagtttaggaaatgtcaacctgggtgttgggccctgttatttgtgcccagaaattgttgtttttcctcttaaaggacctatttcctagtttttgatgaaatgaatacgatgaaaaagtttaatctccgatcagatactcaaaaggtgcccagattgatatgggcactaggtgctcgagccccggggcccaggtgcttaaaaatccacttactttgattctgattttgattcctcaattatgtatgtggtatgtctagttgatgttccaatacaagttttgtccacttcgcactaaggcgatccctaaaactgaaaccctagttgaaaatgtcaactggggcaccgggtgaaaaccctaggtgcctaggttggttttcgagttacaagtttgtgtaattttatctcccaggacttggattaggctacttcatatcttcatggtacaaaatactgaaaaatagtgggttggattcaaattattgaattctaaacttccatcctggagtcaacctgggcacagggctagggttccctcctaggttgactactatgactcgggtctacttaactccgtgacgtcatccttcatgccacgtgtctaatattgatgtccacatcattaggaaaagtatccgagttcttaaataatatatttaaaatagtgtataacaatttattttaaaaatatattaaatataaaagtctcacatcttttataaataatatgtttactgtgttatttttatctatccaaaaagtattttatttattggtaattgatcaatgtacttttgtctacataataatttataatttattattaatattttttcatgacaataatcaaatttattgataatttaatagataaactaagttttatatatttatagattaaattcatttattcttaattacattgagtaaatacaagtctctttggaaaaatttaaagggacctttactcatgattctaagttcaacaacattcctcacttccaaactaagacttctaggataagcacaagtcaactcaaagatacatcggttcctatttttctacagctggtataaagtggccgctgtcactatgttaagaacctgattttggaggtccttcaccttgattctgctcctgctatttagatcagcaatcaaactaggccaatgataaactcccagccaagagttcacctcctcacatacctgcttagaaaaaatacaactgaaaaagatatggtaataagtttcaaactcagtttcacaaaccaggcacatagtattctgcaacggcaccaacttgcaaagaaagtctctagtgagcagttgggtatttacaatctgctagaacacgaatctgtgcttgggcagcaccaagttgtcctaaatagcccgagcatacttaactttaggcatctctaacagcaggttgtagaacttcttagctctgagattcgtacctgtcacagcaagcctcaacatggtttcatttgtactatcccaaagatttagcagctttttaaagtaccaactagtatctctattctttgagaagttccatatgtccattcctttcagatagatggagtttatccatttaacccacaaacatcttgtttgttagacaaagcccaaagatatttcgcgattagggccttgatccattttttccctcacggtaatccaactccaccaacgattcta

SEQ ID NO: 224099 - DNA, 1467 bp, Cannabis indica
gatagttgggacctttgtgaagggtagcatgttatgaagaaaatatcttattgtggggaatctctccaagcatgggggcgagactatacaggcaattttaagcaaaggattggacattgcaagcgggaaatccagcactggaagaaagtgtgtgatgctatatctattcaaaagtttcgagaggctgaactgaattttagtgaagttatgaaccaacaagaagtgttctggcgccaacgctctaaacagttgtggcttcaagaaggagatagtgacaataagtacttccatgctaaagctacttctagaaagaagcataatactataattcgacttatgaatgatgtgggtgactgggttacttgggaggatgagttaccgaatgttatggttgcattaaatcactaatttatttacttcaactgtggccgatcattcagctgtggtagaggagattactccttcgatcaccgtggatcagaatatgtcgttattaattttttaatattaattcttcttatgtagcttttttattatttttttaatatttattattaatttttcattattctccgttagttttcctatatagctaataataatttaaaaatatcattattcttcatgctattggtttttcaaaatttatatctatatttatcaaaaataaataaatttatatatgtatatgtctatcaattagtataaatgagaagtatgaggcagtgatatgacattttaaaatcactctaaactatttttcttctcactctttaattctttcaattttaatattttgttaaagtataaatctataaattgatatgttaatattattttaataatttttctataaaaaaaagcgtaaatctactaattaatattttactattattttaataatttttgtataaaaatataaaatattttttaaagagttagaaaataaaatataaattccaaaaacaatattaaaacttaaatcaaatataattaatcgtaaatttcgtacataaaatatcaatcaatatatatacctttatacacatttaatttttcatacaaaattatatgaaaaattagattaaaatttgatacaatttattacttattgttgtcatcaaataaaaattatgatttattttatatatataatttaaatttttttaaacatccgccgcgaagcgcagattgtttactagttaagaaaaaaaaaatagctttggagagcttttagactgtcatcactgcctcatacttctcctttacataggcggacctagggggtgttggagggaaggctaaagcccactctgagatttgaaatatattaatatacaatatttttattttcatatatacatagtaattaaatagaataattaattaagatgcttttagatttacatggggtagacttatggtttttgaatcacatttgcccccttttttactattgtgtatcct

SEQ ID NO: 224100 - DNA, 2471 bp, Cannabis indica
ttttaatagaatacagtttgtttttactcggttgaaagatggggataatccaagaactatagccgtgaatcatttagacctttgggtccaagttcatgatctccaggcgggatttaagtcagaccaagtcctacgagaccttgcaaactacataggcacgttcgtggagacagatccaaagaactttcaaggaatatggaaggagtatttacgtgtcagagttactatcaatatcactttaccattgaagcgtcagatgaagctacgtaaaacgggaagtgagtggttctgggctaactttaaatatgaatatgtgccaacgttctgctttatttgcggaatcattggacataccgaaagactctatccgaagctgttctctatgccacctgatcaagtcgtcaagccttatggctcgtttcttcgtgcacagccgagaaggaagaactaccaaattggatctcaatggctttgcgatggcagtacgaatgacgccatgttttccgatgtgccagtgacgaaccagatgcaaactaccattaaggaaagtttgcaaacagtagtaaatcagggggagagtcaatgtgtgactagatatggaaagtctgtggtaaataatcatatttttcaggattgtgccgttggtgagcaaataatcaacactgattactctgcaatagttggcaaagagttgattgtggaagtaattgaggaggaaagtcaaactcaactcaatgtggtggatactaaacgtagacgtactgggaaggatattatcaatgagttgcctctaattaatgatactactattgggccggttcacttaacaaaaaatactatggggctggtgggacaagatgtggtgatggatgatgagttgaatggtaatattgggccagtgggtccaacaaacttatcaggggtgggctctgggttccaggcccaccattcgtcatgagtgtgttaagctggaattgccgtgggcttgggaacctacgggccgttcaattcctaaaagaccttgtaagtcaaaagagacccgattttatattcctttgtgaaacgttaagtatgaaggaaacgcttgaaagaattcgtgtgatgcttggctttgatggcgtctttacagttgatgcgaggggtcatagtggtggaattagttttctgtggagaaatcagaatgatttggaagtactgggtttttccaattaccatattgatgtgaaaattaataatgttgagagaggctcatggcgattaactggtatgtacggtgaacctaaccgagcttttcggttcagaacttgggatttgcttcgtacgattgctgatgaatctcagttaccttggtgcgtaattggcgatatgaataacattgcttctcattcggacaagagagggggcaatcgatatcccaatggtttagttgaaggcttccaacaagccctctctgattgcaatctgatggacttagagcttattggatatccctttacttgggaacgtgggcgtggaacaaatagctgggtggaaattaggttggaccgtgctatggctactccccactggtttgagatttttcattcgactcaacttgtgaacttggaaatctcaagctcagatcactgtccgttgttacttgacatggtgaataatgtgttaactgatgctcctcgccattttaagttcgaaaacgcttggctgcgtgaacccatgtgcctgcaggtggttcgggattcctgggctaccagtaatggagaatcaattacagcgacaattaagcgttgtggggaggttctgtcaagctggggtaatgaatatactgtcaacttcaaagatcgaataaaaaaatgcaagaataatatcaaacgattgaagaggttgagagatgaggcttcggctgcagaattgaaaaatgcagaaaaaagcttgtcagaaattcttacacagcaggaggtgttttggaaacaaaggtcgaagcagctttggctccgtgaaggagattccaacagcaagttctttcatgccaaagctacatctcgcaagaagaacaatgctattacaaggctacaaaacagttcgggtacttgggttgattggagttcaggtttgcatgacgttattcacatgtatttttctgaattattcacttcaactaatgctcttactgatgctgtggtggctggtattactccgtccatttcgaatagtcaaaatgaagagttaatccggccggttcatgaggatgaagttagaagggcgttgtttcaaatgcacccagataaggcaccaggtccggatggcatgactccgggcttctaccaaaaatgttgggacgtggttggccatgatgttgtgacgcaagtgaaaaacttctttgaatcaggtgtgctcccagtcaatgccaataatactaacattattcttattcctaaaaagaagaatgttagtaatatgggtgatttaaggcc

SEQ ID NO: 224101 - DNA, 1386 bp, Cannabis indica
atagaaagttttagggaaacagatgcggtcgtcaaggtcgcgggtctacattcagatcttaccaagagtgtcccaaatgcaagaagcaccatcagggtgagtgtcgggctgagacttgtttccagtgtggtatggtgggccactttatcagagactatccacaggctaagaaggacgaagaaaagaagaaaaataaccaaaacccggggcatctgttcactatgactcaggctaacgcagatgttagttcgttagtggtggcacgtcagttgtctatttgattcaagagctactcactcttatgtattgagtagagtaatagaaagttttcataaaccgtgtgatgtgtatgcttcagggtttggaaccctgttaccctcgggagacctaatcgtatctactcggtggattaggtctttgtctttttagattgacgattgtgagttaaccgctaacctaattgagctacaattgtctgattttgatataatcctaggaatggacttcttgtctaaatacgaggcaacaattgactgtaaaacaaaaaatgttggtgtttgaacccgacagtaccaacccagcggtgttcgtgggtaaagtacaaggatcgcacatacctagaataacactcttaaaagctaaagatctaatgcgtaaaggttgtctgggattcttagtaactacagtggatactagccaacctatgtcatttggacctgaaaatataagactggtgtgcgaatttctagatgtatttctagaggacttaactggattaccaccttcccaagagattgagtttgtgatatagttagtttcaggagcagaaccagtatcaaaggcaccatattgaatgcctccagcaaaattgaaagagttaaagatccaactctaggagttacataacttgggatttataagaccgagctattctccctggggtgctctactgttgttcatgaaaaagaaagacaggtcacttcgaatgtgtatcgactatcgagaactgaataagcttactatcaagaataaatatcctttaccccgaattgataatctgtttgatcaattgaagggtaagacggtcttttcaaagatcgatctttgcttaggttaccatcaactgagaattcgtgaagaggatatcccgaagattgtgtttcatacttggtatggacattatgagtttctagtgatgtcttttggattcatcaatgccccagctgcatttatagatcttatgaactgggtatttaaggatcacctagacaagtttgtgatagtgtttattgatgatattctgatttattctgaatcagaagaggaacatgagttacatctcaaatcagtgcttcaacaattacgggatcacaagctttatgctaa

SEQ ID NO: 224102 - DNA, 1933 bp, Cannabis indica
tactttaaacttacaatctgcttaacgatttttgtagtcgggtcctccaccatgcctttcgtgttcatgtgaagtcttttccatatttcaaatctatcaaattttgtaatttggttgcctgcctctttctttatttttttcttgaaccatccttacaccacctcatccgatgtgatagttgtaaatactttttgcccttccctttcgggccttttttctccttacctcaatgtctggacccaatcttctagccacaaactctctccattgttgcaaataaattatgctttcatacagtttcggtaccttataaagaagttgggtagccacatctttgattgtaaaaataccttttattagggtatttttccaatcctttcatctctctccaccttttgaaatggttaatttcttatccgtctttggtaaatcgaatgcggcctaaaaaaattgacaatcatagttataagtacaaattacaactaatagtaaaaaagacaaatagtaaaattaagtttacctttatgtcatccaataattagtttttaatgtcctgactcactctaggccacgatatgtctcaaagtggaacattaattcgcacccatgttccaatttaggtaactcttttcatcgctacctttccccattgttgtctgtagttattgtactcaacctcaaacttttttccctcgctaactgttgccctggatttttcctaatacacatggcaatcccgaagtcgaccaagtggtaggagagcctaaatatgaagagtaattaaggtaaacctatttagacaacagtctgagacctaatggtcatgtccgagaagcccctccaggagcttcagtcgtgttgtgctaagttaagaattacgcccacctcacggagctacaaaaaacattcaagtctggatgcagcatggggaagacatctaggaatggctctgaaaagacatgttagaggcattaaacccactatttggcgattacactctgatctatgaatattatgactagtgcacaatgaactatcacatcaattaaggaaggttaagggcttatctcaccaaacacctaggaaacgcctatagaacctaccagattgacatacataccctgttatctgaacttaggaacttgtgcaagtaatacttccactagggctgcacacgggtcgggtttttggattttcgggtggtcgggttcgggttttcggatttcgggtcttggaaatgcacaaccaaacccaattttcgggtgttcgggtatggcgggtttcgggtcgggtattgcgggttgggtgtggtcgggttcgggtgttattaggctaagcccgaatgtttcatttatggacttagatgaaatttaattttttttatatttaacataaacatcccacaacaattccaaagaaccccatgcagttataatagttctgaccttttagttttctagacagttctctattaatgggggcaaaagtttgaccaagctaattatataataatagagtaaacaataaataggcatataataatatataagaagttataaggttttttttttgagtcttgtgtcttggcttggactctagtctagttggttcgaaaatagtgtatagtcagtgaccttttaatgaataatagtaaacaataaatgtgaccttttaatgaatagtaaacaataaataggcatataataactattagtcactgacagtgaattcaatcgaaaaatatgataaactataaattaatattattaatattttaatataataataaaaaaaattaatgttttttcaggttacgggttagagcccgacctacaaaaaacaaagttttaatatccgaacccgaaacccgtgtggggtattttcgggttgaacccgacctgccacacgggtttttaaatttttggtttttttt

SEQ ID NO: 224103 - DNA, 1792 bp, Cannabis indica
ccagtgaactttccctttttccaatttcttgcctattgttattgttggaccgtttaccacttgagtttgaactgctagggtactggggaagctggacaaatgttccaatagaaagaactttcgactggctaggtttttgctcaacctttgatcgctgaatggcttcttcaagcttgataaaaccatctgcaccatcaaggaagtcactcatagaatctattggtccgttcttcctgatgtccttccaaagttctccaagaacttcaatgccccccagtattgcggacaattttccgtcttcggtcacccgtgcaaccttagttgcctccgtcatgaatctgctgatgtaagctcggagaggttctcctggtctttgcttcacttcgaccagatcttctaagtgcaacggaagttggcgaaaagaggagaattgtgcatggaatttcgaagagaaagcctttcatgagttgaacctcccgggcgccaacttgaaataccattgctaggtggcctctcagagggtggcaggaaaaactctgcaacatacatctcgtcgtgctccttgaaggtccatttgcatttcgaaatacttgagatgggataagggatcttccttcccagtgtacatcttccagattggcatcttaaacttgtggggcaattctaagacattaatctctgggcagaaaggggatccacgtgctcgatccaactcgaggtctttgttcttctgaccggccaggccttggaacatattttttagctcatctagctgtgcctgcacggctggattaacttgttcagcctcttggccgaccagagtcatgtcagcatctctttgagcgggattttgagcacgagccctgggctaaatgactggcgcatcatgctgctcgtccaaccctctccttctgttcagatcatctctgagatcatgaactcttcccaatcgattaaatatagaaacaccggctgtctctgtgactgattggtttggccaactagctggccgacactattaacttgagtggaattattaggtatgacttctcctaatgaattgctagacaaggtctgcccgcctaccacttggcccacatgtgggacctgtgaccggggattggatggctgaccatttaaagtttaaaaggtgttcaccgcaggatcttcgtctgtctcgcccaggggaatgacggttgcaggctattgactggtagcctgataggcttttcgtatcagcacggtggcttgtctggttcggtcgtcaatggctgcttgctgagccctcaatgtttccatctatttgtccttccattcaacgaacatgcgccattgctcttcaaatgcgagatttaccgcagcacgaagttcctcctgatcgtgatgcagggtgttggtatgaccttgcatgactccaagagcagcacggaggttctgtattttggtgtcatctccaatggttgttcgaacatttgttacgggcggaacagaagtgttgggaatgccctgattagctgctgaactggtgttccaagtctcttgcacaccagacacgattccactcacaggagtcgtcacacgtgacctacagttgatggttgttcgggatttatggttggtggaacccttgtgttccttggattctgcagtgcaggatccaccgcctgtggatttttcggatcaaccactcctctacaagtctgtatcaccattgtgtttttgactagatttgtgataaagagcgatccttgagttctgctctcaatgaaagcaccaaaatgttgacctcgct

SEQ ID NO: 224104 - DNA, 1647 bp, Cannabis indica
ggtcttaaaaacgatttttttggaaaaccgtcactaaaataataaagtaactatttaaaactatcaaaaaaaatttagtattcccgacggtttaaaatcgtagtaaacaaaataggcaatattttttaataaaatgtgaatttttaggagagcctcatacccgacggtttactgttttaaactgtcaggtataaagacctattaaaaaattatcatctacttctcgctacatttcccatgtgctcacctatttctttttttctattttccacatacccacctatttcttatcacctatttcttctccatttcccacatcctaaaaagaaaatcttaactctccaaaaccccacctacccttcgcaccatggccctcctctctcgctgtcttcctccctctctcgatctccctttcttctcgtctctctcatccatagatctccacccacccctcctcccgtcggtctccctctcttctccgtcgcatacgtcggaccatctcgtccctaagtgatcaacataacaccatcacctgccccctacctcatcatctcggccgaagaggtctcaagatacttatctcagcccaaggtcaagacactcgccgcggtccaagttgaacctaaacacactcattcatctcggccatgagggcctcagtatgtcatctcagcctaaagtgaggactgcctcacgtgcttctcgggacttatcaacaacatgatcttagaacgtgttccttgtgacgagaaaagctatggatagaagacatctttaacttttatcatttttctagatatttgtttcaaatgttattttattattattttgacctttaaatttaactaaatagtagttgggaggagaagatatcggggatgaaaacctaagtgtgtcctagatgaacacctctataagggggtgatatcaattgtaaaggacacactttaaaaaaaaaatactctgaatacactgaaactcatccttacgaactcccactctctttctccaacaactcactttgggattgaactcttggagaccataactccggagagctatcttcaagcattgagaataataaaactaattaaattagcctattactgctaaaatggggtgaatcactataaaattctcatattcatctttgtcaaattttctttcacaaaccggtttactttgattaacgattgcttgtgttcatcttgctcgattatgatcttcttagatccgttgacaaaaaaccgtgtcaacaaaagtaaatatgaacatgacacatttattaaaggttaattaggatttttatcccctgaactttgacatgtaccaaatcatgccccctgacttttaaggtcattaaaaatggcccatgaactattgagattgttggatttaaggacttttgtctaatttcattcaattttactattttagtgattgtatatgtacgaaaccatgctccccagactttgatatctacgaaatcatgtccctcgaactttgacatgtactaaatcatgtctcctaaactttcatcaatgttagacttttttactaaaattagacaaaagtccttaaatctaacaatctaataggggtgctgggttcagtatgtcgtacccacttctatggctcccaactctc

SEQ ID NO: 224105 - DNA, 1286 bp, Cannabis indica
aacttaaataaaaaaaggtacaatatcgtaacttaaaccccaaataataataatctaattgaatatattaaatcaaactttgcattgtaaagtaatgcaaattttataacttttatttttgtttaaggtgtgtttggaagtaactgtgtaattattaggtaagataattattagggtagtaattatacagtttagtaattacactatattttaaaatgcaatgtgtgtttggatatgaggtggtaattacatatgaattcttaatatcttatttggcaaaatagttagtaattacatgggaaaataatattttttaatagcaaatatttaatatggaaagtttttagtaattacacagtgtaattacatttaattctcattgggggccataagaattggagagtgtaattggaacccctcaattacttccaattacacagttacagtgtaattacatagttagacaaacatgtcaaattgtttaattacctctaattacacacaaatccaattacattgtggctttccaaacgcacccttaagttaatgatcatgcaattatggtatttatcatctttagaaatactaattaatcataattaatcaggaacatttatataagtttctaaatttgattaaatatgcttacattactttaaaattttccctttaaactaatacttacccatatttttagcatatgacaactttagtgttattctcaaaataccctccccatttacatcaactccctctctcttcccattctgccttcttcttctcacctgatttaaatcggacccaatcgaactgggcatcggatccatcagattgggcatcgaacccatcagacctacacatatttaaattttaaatcaattgaaggatccatcggacccatatcggactagcatcggacccattgggccttcttctttttcctcaaaattttccaatttcacaaatctgacataaatgtttaaaaaaaaaatttccctaaatctaacaaaatttaagtttgacaaacaaaataaatctttaacactttcggaccaaaaaaaaacaacatttgacattgttatggatggcgtgcaccgtgtgggtcatggatccggtcgtcaattgcctcttcgatagggtcatgggttcggcaatcgattgggtccaccgtgggtcaaatggggtgttgcgccgtcaccatgggtttgagcgtggtttgagcgagagggagagagagaaggctgattggtttgggatttcaattgtgaggggtattatgggaaaaa

SEQ ID NO: 224106 - DNA, 1693 bp, Cannabis indica
tagaccttaattaggtgttttggagagttgtggaacgattcgggtcgatttgaggttaaaatgggattttttaggttttctaccaacactggtacgattgtagtatagagtttattggtacagtatatgatgttaaaagggtatggcaccgtgttaccaacactagcacgagacgagtgaggagtgcatgtggtacaacacttagtggtactcgaggtacaattcagtcctaccaacgttagtacgggacgagtacttagtgcatgtggtacaaaagtcgtacttctattaagaacgttcttgatttatttgttaagccttatagataggtatatgggtgcctagctacaagtcagtaatatgttatatgtcttatgcatgcttctcttaatgagtctgtcagctcacataaattgtttatatgtgcaagtcaaggaaaggaaaaatagcacttgaaaatggttgtacttatgagaatggttagacttggagtgttcggtcttgagacgacttgggccttcattctatatagtcgcagagcgatacttttgtaaaatgtattttgagtaatattgtaaactatttaagacgggatgactttgatgtagagttatttatttataaaagtttaaagttaatttaaaagttgaaatttgcaacgatttttaagaaaatcttttgattagtaaagatgtgcacaataattaaaaaattactgtatcgaccctaatcaagtaggacattacaatttagtatcagaaccactaggttgtttaccgaaggccgtgaagatatgtacaatcatcgtcagagacaagctcggctcacgatttaataagcctttacttgtttagtaatttatttgattaaaaatgtttgataggaagcatgttaacaatatgttagctgaatagtgcataatctgcaaccgaagtagcggctggagagattggaattcccctcacctccaaaaccgaagtagatgccattggagggctcctgcaggaagttatgttattctgccacataatctacaagataaagagcgaaattttatagaaatacaaactaaaattcagagtcaaggtgagaaaattcataggttatggcagcatggatcttatgttgcaactcttctcccagtgcccattgttcctgccttaatgtttctagcaatacgatttgttgctgataatcaaatagagtcaccatacaagaagtctcatgaaaaacaagatcaagaagatcagtggggagttaatttgaaggcccttatattttctcaaaatgtcccaactgtaagaaacttcatcatgatgagtgtaaaagaaaagcatgtttctgatttagcgtaatgggacatacaaaagggattatccacgatcagatatagaaagatcatgtttttagtgtggacttattagtcacttaaagaagacctgtcctcaactgaaaaaaaataaagaatagaagaaagaagttgatcacttcagtccgtgaggttgtagttcgactcgggtgaaaggtcaacttcttagtactaatttctcttgttcaagtattggttgatcactagaactacacattgcatgtggtagccagcgtgagtaataaactgggtaggctttgtgataattataatttagagtttttgggactccattacttaattagtagagaattagttatctcc

SEQ ID NO: 224107 - DNA, 1578 bp, Cannabis indica
cctagctaaaactctcctcgtcacgtcccgtctttctccgttgggtgtgggtcattgcatgcccgttgttggggtttgtacgtgcacgttccctcttggttcgagaaggacgttggatatgtctcgatggcaacccacctatccaagtttgagtcatgatttccctcgttctcaggagggatttcctattccctggttcttggtcgccttttgttctcatttctgtgaaaaggctccgattgatcatttggttgttcattctcagggggactctcagtttccccaagttgttcttccttagcgttctaaggattctgctcagccgtctcctgcctcctggttcgtgagtcgcgaggtctgcctcgtggtcttatgtattgttctcctatgccgccctggctgtgactgcctctcgttccaacacaccattttctcagtttgcctcttcctggcagtgcctgatacgacaattttccaactcaacaattggcacatatattgtgggatcataggcaccatccttttcatattccataggttgagaactcccaagattgggttcttcaacttcagggttttggccaatttcatgttgagtcctccttgaacgtgtggaccgtttattttggcccccttcaggttgggtccttctggaatgagtggtctatgtagctcgtgagttaggaggcctccgtgagcctattggctcttttccaagacggtgagttgtccatttaggtattaacattttctctgttatcagccatggagaaaggtttttcttttggtcaggagggtttttttgagcttttttcatgtgggctctcaatgaaagcaccaaactgttaacgcaaattttcgttaactatattaaagaatatttcctgattaattttcatagaaataataatagataaaaagtaagaagaataatgcaaagatcacaccaagttttttacgtggttttgcagttaaaattctgcatagtccatgagtctatcttattagatttttttgatacaaaactatgatttccctctcaaagattttttgtcccttttttagtgtatcctgcccctatttatagttacatagggaggcatttaattacaatcagattaatatcccagaaaaatattccccctaaaattatgggatttgattacgtcccacgtaaaataaatgttgttattatttggaaatcacacagctgtgatttatctgcttttactaggtcaatgttgatgtgggtttagatacgttgcaaagtgtatctcgctgggtcacctcgttgggatagcaacaataaccctgacagcaagctggagcttttcccatgtctttctgaggttgataatgtaaaaactgtcgtttatgctattgaaggcataacgctccatctgaaaattgtagttcttggtgacaaggtgaacttcagcagtcaacattatttgaatgtcagcttctatctgagagagctgattcgacggagcagtgaatctcaatgagagatgtctgaagctgattagtgaaggtaccatgtgtatgtcttcttatagcgagatggatgccttgcta

SEQ ID NO: 224108 - DNA, 4512 bp, Cannabis indica
gctttactttacattactattttcttttatgattaattatttttgttttgaatgaattggataattaaaaaaataaaaaaaaaattaaatgagccttaaaaaaaataaaaaaaaataattaatgagtgatttaaaaaaataattaatgattatttatttatttattaatgagccttaaatttaattaattttcagataaaatcaatagagatgccacagagtggggagtctagctctaaccagagttatcaactaaaactagtgagcccaaaacccaaaacccagaacctcttccctctcttttggggagctcagctctactcggcttcaatggcgtccgtactcaacacggttccctctctacttttatgaaactcaaccatttcgtactcggcaaattttgtttcattcactagtgagctcataacaccatttatttttgcttgctattcttaaaatgatgaaggaaataaggaatgaaaaagtttaaattcgttataattgtaatgattattctaaaatttaatttagttattgataaatattgttattggtgatgaatataggtttatgagtttctgtagagattttgtaaatttttcaaaataaaatgaaaaaaaaaaattagataaatatggaatttcaaatttgtattgaattggtaagtttttcaaaatagttgatgtattgatatggttagaaatgtaatatatcactttagttttttaaaattattttactaaagtttagtctacatattcagtatcaccctcgatgatacccttacaaaaattcttgcagttaaaatctggttatctcatatattttctgtttaatgtttactactttcagaagttttctttatattcccatgtgggagtggttttatagagaaacaatttacctgcattagttttagtcatgtgtgatatgaggggctgaagcttgaaggtgccatcatatgttctcgctgttagatgtttttattttataaatgtttagattcgggttcatcacatgaaattttaggcttatcaatgagcttgggcaattctaagaaacatattgacatgcttggttaaatcaaatccattccatacatgtgtgtgaaaatgtgatagttgtatcctgagtcagagacttcttcaaagctattaataagcaaaatgttcaagtaaatagttcttgcactttcaatagcttcaaaagtgtagaaggagactagcactggtacttataaatggttttgtttaattgatttgaaaatgtagttcttgtgtttgtgtggtttcgaaacattttggttttgtgtaagaaatagttcacaggtttgcattgatataactaattgcaaggaaatggggtttaaccaacaattaatttttactgctgaagagtttcaggatcagactaggaactcagaattgaaggagcaaagcaaaggagcaaatgttaacacaggtagtttcttctccggcggtttcactggccagacctctctcgtggcgctggagtgcacttccggtcctactcgactctcagacatcactcttttcttccctatcccttgccatcttccattatagaaccggtgttgtatccttttgttccagtcctcaaatttcagcagaatctggtgatgtattccccaaagaatcatcaaagcgtgtaagatttcattctataatagtaatctggttctttgaaaccttcctaaaccctagcactttccggttgagtactctattttgtaaattttaacccttctgtaaaattttgcttagggtggtgttaatgttctttggttatggatgtggcacggttcttgtttcagggtcctctggaatctggattatatcttgtaggaacaccgattggtaaccttgaagatatcactttacggtactcatactatttcacaaaccccattgcaactttttctcccctgtttatttggttgctatggcactccacaaagacttggtatttttcattgcagggctctccgtgttctaaaatcagctcatgtgatactttcagaagacaccagacattctgggaagcttttacatcattacaatataacaactccccttgtaagcttttttaatcttttaaccatctaactcattttactatttgttattcgtgttgaagttgattctaattctcagttttagatttttacagttaagctatcataaattcaatgaatctcaaagggaacaaacgctgttaaggaggttgaaggaaggtgagattgttgcactgattagcgatgcaggaacaccaggtattagcgatcctggtaccgaattggtgagtttgctagaatatagtttgcccttttaagttttcactcaatttcaactaatgaagtcgatgaatgtatataacatgaccttcatgtaggctaagctatgcgtcaatgagaatattcccgtcattcctattcccggcccatctgctttcgtggctgctctttctgcctctggtctggccactgatgagtttacattcggtgagtttgctgtggattttgatgttctgcttctacttcttggtgtgatggtgtctatattacttgtgtgttatgaattcaaaatcatgctgtagttggatttcttcccaaacacacaagctctagaaaggagaggctaatggtttccgcaaatgaagcaacaacacagatattctatgtacctccacacaagcttcttcaatttctcgaagagacttctgtgctattcagtgatacaaggtaaacattttggtgctgtcccatacattactattctatgtaatttcacttttatgtcatttccttgtgtaccttgttaccaacactgaaatgtgttaatatttgtattatcagagctactctcatctttgtttactacatttggcactgccgtattataagatttgtaaagtcagaaattcactgttgctgtgatgttttactttatttatcaaagtatttttagcttgtttaattacaccatataatttgatctcccttattgatttatttttttcttttgatcaagaaaataaatttgttaatcaaaccaaaccaaaccaaaccaaatacagaccaacggctacagcctcatcatcccgtattgatttttaattgttctgtaacttataatttgtgcaggcgatgtgtcatagctcgtgaaataaccaaactacatgaacaggtatattttaaatgataatcatttcatagaatatattcggatgtatagcagggctgtttccctaccgtttgcagaatcttcatcttttgtcagaacttgacttttaaatgagtgaactagtcacccaatcatttgatgacctaggaccttgatatatatctattttgaaattacatgaattgtcctaccttccttgcttttactcaatatactactttctctttacattctatacctataagtatctttttcatttccttgttgctgtacttttaagttcactaaactatctttttcatttccttgttgctgtaacttctaagttcagaggccttcatggttagagacaccttttcaaaatagattattcatggttttgatgaagaagatatggttggctcaaatgtaccctcaaaaagggtgtattggtgcactcgcacattgatacttacgacatttgtaaatttttgaattttttttgttcagttaaattagtaccgaaaatagagttcagaaaacttgttccacatgcgcataagaaaaaataagtacatgtgtaatagactgattgatctatatttttggcataaattttcaaaaaaatatttgcatcttctagtccctgtaagtgtatgtaatacactggatttgtatctgttttatggaattttgaattgattatgatgatatgtttcattagttttggcggggtacattaggggaagcaaaagaagcattttctgttcataagccaaagggtgagattactttgttaattgaaggaaaggcaaagcctactgttgaaactccatcagattgtgagcttgagaaggaattaagccatctgatctcaaatggtcatagtctttcttcggtaatggctgtcgcatttcattagaatgaactttctatctggacttgttgtggcattcccgctctgcgactactacactggcatttgacattctttcttattgtacacaggctgttaaattagtggctagtggaacatcaatgaaaaagaaaactgtgtattcgattgcattgagaaaatttgggaagcaactcgagtctgaggaggaggatgttgatcttgattcatgcaaaccggagtgagaatgcttacacaatgtttaggagtggaagaggtaaataataaacgttgtcatctaattttgataggttaccattatttgtggaaatgttttaactagtgaagaactggcttgttccatttttgtagttctttattcagcctgttgttaatttttgaggaaaattctaagtcatatatatatatatatat

SEQ ID NO: 224109 - DNA, 1563 bp, Cannabis indica
taatacacattacaataataacaataataattaataaataattaattgtttacgtttttagaagaaaaaggtaagaaagcgtgcccttacttttttttttgttctcttttttttttttacttttcagtggaagatttgtatgcataaacataataattttaagttttaaattaagaaagaaaaaggttaacaggatatttagctataatttagtagtttcacaattcacgctacaaaagatgagtaccaaattcaaatctctttaaaaaaatatattataagtaatagataatattaaatcaaacacaataatattttgaattaagaaagaaagttaagaggataaacataagtaatagataatcaaagataataatgaacgtaaattctccttttaaaaaaataaaaataataaaagtgaatttaatagttcagattcttattttattttatttattaaaatattcatagaaaatggcagatctgttttattaccgccaatccttttgcaaatccaaaaatcctctacgctacgttataagataaataccatgtctttatcagtaattttcaaagagagattaaaataaaaaaaaaataaaaagagagaaagagagagaattttaaaaatatataaataatattttatataatatatagataaatgcatgcacacgtgacaaaaaaaacaaagtgaggtagatagaatcaccaagttataaaagacatttttaaagagtctaacaatgagctgaagtattatatgtaattcaaacaaattcattcacatccaaattttgttttatcaacgcatatgtgaacaattacaattatatctgttcacaaactattaactaatgaaattgatttgaattttgtttttattgattcttataatttataatgttattcttttgaaagaatttataatgttatttgcttgtgaaatagtgtgtttagtgcgtagcatgcaaatatgtataatatatgtctaattgaaaaatattttggttttgtttgacccttaaaaaatgtatgctagaagtctttgtaggattctctacctaatgactcaaaattcatttttatttattatttattattacttattactttggccattccgtcagtcaaagaatcaatttacttaaaaaccaaataacttgcataaataccatacattactattaaaattgatttgataaggcttatgatacactcagttaacttagtcgtttgtggagcatgttttgagaagttttagtgtttggaaaaaaaaataaaaaagggattgtcttgggtttctcaatgtttaaccactacctcattgaacattggcttgaatagcaacccaattggttagatatttcctcagtgtgggcttagataaggtcactccttatcctcctattttttgggttaatttcacaaatgcacaaaaacaacaaaaaaataacaaaataacggtttcacggagttttaaatattttttacgattttttttgatttttatttactataaaatacagtctttttatgtttgaaattttgttcattttgttg

SEQ ID NO: 224110 - DNA, 1413 bp, Cannabis indica
ccaagtccttgtaattttatctgatgatgcttcaacttctaaatcatttgtgacagccactctatacccactgcttactatgtaagttccatttggtgtgaagtgccacacatgatcatcgttggcattattaaaacaaggagccattcccaaaataagggggatatcgtctaaatggaagctttgttcaattaactccttatttcaattaccttgctcatctttcatttgatctagagtagttccttggctaacctttactggagttcggagggagaaagtggttgggcgaggaagccatttatcttcattaatccgaacctctctacctgattgaaccctccacctagtgcctttgtcaataatttgtcttccccaaagaatacttctccacataaaggatccatatccacctatttttgcttctaaaaaattggagttggtgtagtagcatgcctttagaacccgagccaataaagaatggggattattaattattttccaaccttgttttgctagtaaagattggttgaatttctccaagtttttaaaacccattcctcctttgtcctttggtttgcaaagtttgtcccacttcccccaatgaatttttttctttgaatccgaagatccccaccaaaacctcgccatcattccatgaatgtcctttattagttccttagggaggcggaagcaactcatcacataggtggggatggcttgaattacagctttcaacaatatctccctaccggcttgagaaaaaaggcttactttccaaccttgtagtatgtctcggatcttagagcggatactttcgaagacctcctttttccttttccctatcgaagccggaagcccaaggtactttgtgtgacattcaacaagttttactccgatttcagccgcgagaatggcgccttgctcttgtttgatcttgctgcctacacatagagaagattttgcaaagttgatttgttgtcctgatagccatgaatattcctctagaactgccttcatactttggccttcctcaaccgttgcatctaagaaaacaaagctgtcatcggggaaaaataggtgagataatttgatcccctctttaccaaacttaattccatggattctatccgctctttctgcttcgtggatgaaacaagataacccttccgagcaaagaagaaacaaatatggtgatagggggtcgccttgtcggaggccgcattgaggttgaatgtgtccactaacttccccattgattagaactgaaaatgaaaccgaattgatgcatttcatgactttatccacccaactcttatcataacccaagcatatcatcattgcctctatgaatctccacccaactctatcgtaagcctttgacatatcaagtttgagcgccatcttttttcc

SEQ ID NO: 224111 - DNA, 1452 bp, Cannabis indica
gaaatcctttaaactcagtttgaaggtaccgctaatgtaaagagattgctaatgagttttttgctttgggagaaaaattagatgaatctgtactggttaggaaaattgtttgtgtgcctaacaaatttaacacaaaattactatcactggaagaggctaaatattctggcaaaatgaaaatgatgtttctgatgatgaaaatcaagaaaaggtattgcctttaaagtttccgaaaaagatgtttctgatgatgaaaatgatgattaaatagccttgttgacaaaaaaaactttcaaaagtacatgaaaactgttggaaacaaaaagaatctctcaaaaactccatgaggtaacgattcaggtaacaacccctctaaaccttttgttctaaacaataaaaaggtatacaatgcaggggatgcaaagggtgtggtcatattcaatctgaattgccaataccttgaagaaaaataaaagagcttcaatgtcacttgcagtgatgatactggaagtagtaaggatgaaaatgaaaaatttacattgacaagtgttttttcaagtgatttgcaggagaaaggaaaaattatatgtttgaataataccttgactgataacaataagaaagaagatggaccaaatttagataagttagaacatgatgagaattccttagcagagtcttataaggtaatgtaaagccaaattttatcccttatatagatggttaaaaggacagggaagtaaattcaaattcaaattttttggttcctccctcctccccaaaaaaggaatgttagtattcattgaatagtacaaacatcatgcatgtggtataaaacaaccatcattgcatgacttaaaatacagttttcaaagcaatgttttaaatgttccagacagaaaagaaagatctcattagtcacgtctaatcaagggtaaaagccaggcacgcgtcaccattcgatcagattcatgaccagataagtctatatgtgaccaagaagctcccgcccagacttgcgggaaaatgctttccaaatttcttcacagggtgatgtggcattcacttgggtaacacgtgaaacagatttcatgatctgtatggaaggttccactcttgatgaaccacgcaaggagattagatgctcaaacttagaagaagttggaacattctggcaaggcgcgtgagaacacccgaccagcttccaacatgtaggcgctcgcatgagctaaccagataatgcgagttgaacatttttagaggagatatctcacttatcttcatgattgcaagacacgacaagatccctattttcatgggataaatatgcaatatcaaggaagaaaagcaaatgacttagtttcctattttgcttattgtaattatagaaaataaatagtttctcctaatttatttcttactaatttcaggaaactaattgatgtaattaat

SEQ ID NO: 224112 - DNA, 1150 bp, Cannabis indica
atggtactattgaaagaagaataaatagttgaaataaagtggcaaaattgtaactaggaggcccattagagtggtcggccactagtgcgatttttgcccattattttattatttttaatccatataattaaattctaaaccctagttgaaatactataaaaggaacatgatgctctcattcttatccaacaactcacttcaaccaaatcaagcttagttttcattctctgtcaactagtagatgagagactcattttctatagtgattttgcaccttattcattgttcttcaccaatttgagccatagcgatagagtaccatgcccacacatagcaagtcaagtagtgtgcaagacggttgttaaccaacctgaaggaaagaatgagaaccaagctcagatcttgttattactctacgataaaaaggaacaagggttagagatcggagcggaatgagtcatattattccactgccgttaatgtaaggtttataaactcttatgtgtttaatttcattgtattaaaaattcatatttagggtgttagtcaacatacatgttagtaaatctagatcttagtaaaataagttccaactgtgataggggtagatcacaacaattgctggagttaggtggatataagtatctgaagtggttggactcacttctcatgttgttgttatcttgggtgtttccacccgttcctggacctagtcggttaaagactagtctttgggttactcgctcctagatgttccgagtcgagagttcacctttttggtcggccagaggtgcaccactaagggctggtcggccaaaggttggccaatcatgggtgttgttgagtcaaagatccctaactggccctcagaccactggttgtcagggtttagctattctcgccactagatctttgtggtaagacttgtcctccttcgcgcaggggaaggtctatcctggttccagaggaacttggttggacagtcccgatctgtcaactagtctcccttggataggatctttgatgagatcttgacctcttctggtagttctttcattgaactaccttatcaagtcgttagcttctctgttccgtagtctagctccgcctattgagatcaaaggatgtactcttgatcatccatccatct

SEQ ID NO: 224113 - DNA, 1930 bp, Cannabis indica
ctagagagagaagctctcaccttgtgggtaattttttgaatgtgaaaaacgagcttatggagctctccttttataggtgaatgagactcacaaaaatagggaaaaaataaataaaaaaatatatttttgaccattgatgatgatctaacgatgaaaattagctcttggtggtaatggccatattttggagcctggcgagtataccccactgcagtaacccaaagcttatttttgtaactccgttgtaggtgaattttgatgatgatagttttagaattacgattaaaatgtgagacttgactttatgaacattaaattagctttaaaatgcaagttaaatcgcgcaaatctgatcaaaattgagtgagttatgactgttttactcaaggcagttcatgacctagcgtctaggttgacatccagtgctcaggtacatgtgacgtcaacctagatgctggataagtgcaaaaatgtatatgagatgtattttaaggtgtttatgtgatattatgacatcacttagcctatttttgtattttggcgaagctgatcaccaattctcggagatgttgcttaacaaaaatgagagactcgaaactcttcatttccgagtgagttagaaatgagaaacgcaaagttgtgaatttgacttctctgtcttcatcgatctttgttattgtgaaaatctagatggacggtcgaaacggcattagaatcaaataaggagaactcagggtagtaggccttttttttaacctaggcgctaggtacttactcccgagctcctaagatcttgctttttatacttccaagacttcagaacttgagaatgtggtctcctgtctagttttcgaccattccagattcataagtcaagtcaaatttggcatttgatcaattgaaggtagcatccagtttctaggggctcaagtttgtggttttctctccaaatttacttgaatatttattatttctaatgatgaaaaaaatgcttggaacacttttttgtgaacttgatcgaaaatggcctaagttgacaaaatgtcaacttaagcgctgggtcgagccccaagtgtcaacctaggcacttgatcccagttccgaccctttaaaaattctgtttggtccccataaatagtagaatctcaaaataatcttggaaaacaccatcaaaaatggcctaggtttacaaaatattaacatgggcgcaacgctagccccaaatgttaacctgggtgctgggccctatttttgacacctaagaagtgttgtttcttctccaaaaggacctatttccccatttttgatgaagacaaaaaatatgcaaaagtccaatctccgatctgacacttggaaggtgcccaaattaacagattatcaacctgggtgtttggtgctcggggtccttggtgctgaaaaatgaacttattttaattctaattctgatgcctcaaatatgttcatcgtatgtctagttgatgtcttaatgaaagttttgaccctttttcactaagacggtcccgaaaaccaaaatgctagttgggaaagtcaacctggacgctgggtgaaaaccctaggttcccatgttggatctagagttgcaggtacgtgtaattcagctcttagggcttaaattaggagcacttgtgtaattcagttcttgggtcttaaattcggagcactcgtgtaattcagctcgtggggcttgaattagttgctctatatatttatggtacaaaatactgaaagatagtgagttgaattcaagttatagaaatctgaacttccatcccaaagatcctgaagtcaacctgggcgtaaggctagggtcctctcccaggttaactgctatgactcgggtttactcaaccctgtgacatcatccttcttggcacatattaaacatcgatgtccatgttggaaattattt

SEQ ID NO: 224114 - DNA, 2249 bp, Cannabis indica
agtacgtgatttgcttcttggctatacgtccatcttctgtgggatggtggctcaagttctaggggcagcattgcttcatatccatatgtcatggcaaacggggtctgtctggttaccgttttctcagttgttcggtacgaccatagaacttcaggaagttcctccagccagtttcctttagcatccttaagtcttttctttattgtatccttcaatgtcttgttgactacttcaacttgaccatttgcttggggatgcgccactgcagagaaacttttgatgatgccatggttcacacaaaaatcattaaaggattgggtgtcaaactattttgccattgtctgaaactattttgtacagtaatccgaaccggaagattatgttcttcacagcaaagtcttgaacattattagatgtaatggttgccagtggttctgcttccttccacttagtgaaataatcaaccgcaaccactgcaaactgcactccacctttgcccttgggtaattgtgcggtcaagtaaattccccaaatggctaaaggccaaggactttgcatctagttaactcgttgggcagaacttgcggtatatttaaaaatctttggcatttgtcacattttttaacataggcctttgaatcctcgatcattgtctgccagaaaataaccttgccttataattttctgagataaactctgctcgacggcgttatttccacaaaatcaatcgtccattgtagacaaaagtcgtgcaacttcttcttgggtaacacatttgagcaatggtatggagaaccctcatttgtacataattccctctactatgatatactgtgcaaccttccttctcatctttcaagcttcatttcgattatctgggacttctctagtgttgaggtaggtcgctattggcgtcatcaagtttggggaagtatcaatcatttcgatctcttccatgccagtgatgctaggttctttgaggcactagataggaaccatgttcgctttatcactcacattacttcccgaaagccgagctaatgcatcagcagtcgtgttttttgcccttagaatttttttgagagcgtagcttttgaactatgcgagtagatcgtatactttgctcaaatatgctatcatattttctccccaagcttcgtattttctagatacatgatttaccaccagctgtgaatcactgcagatttaaatatgttcaaccttcatctctcgggctagtttaagaccagcagttaaagcttcatatttgcctcattattggaagctttaaatccaaacttgactgcagcgtgtaggtgttgccccccaggtgtgacaagggcgattgctgcaccatatagttgatctgtagatgacccgtccacatgtagttttgaagtcggcttgtcttcattgttacttggctgaggtatttgtactggctcggggttgcctttcgatatgttttcttcctttcctgtgcattctaccacaaagtctgctaaggcctggcctttgattgttgttcgaggttggaaagtaatttcatactgacccagttctaccgcccacttgagtaaccgtccaaaggtatccgacttttggaatatttggcgtaacggttggtcagtgtacacccgaaaaggatgagcttgaaaatagggccataactttcttgttgctagactcaggcaataagtgagtttctctatcaatgggtatcggccttcaacctcaatgagtatttttcaaatgtaatagaccgggtgttgtatgttattttcctctttgatcagcatgacacttacaacatgttccgtgacagctaagtatatcccaagttcatctccgtccagaggttttgagagtacgggaggttttgcgagttgtatttttaggtcctgaaaagctttttcacattcctctatccagtaaaattgtttgtttccttgtaggatgttgaagaatggaacacacttgtctattgattttgaaacagatctattgagtgcggtgatctggccagtcaaggtttgtacttccttggttctcgttggcgatttcatatctaggagggcttgaatcttctttggataggcttcaattcctcaggcgttgacaataaagcctagaaacttaaccgagctgactccaaaggagcactgtaagggatttagtttcatgttgtatttcttgaggactttaaagcattcgtccatgtcatccatgtgccccccagccttcctgga

SEQ ID NO: 224115 - DNA, 1120 bp, Cannabis indica
agaatttttatctaatttcatttgattttgttaatatgacgattgcccatattctaaatcgtgctattcgagttttgatatttacaaaatcgtgccccaaatttaacttgtaccgaatcgtgcgtctctcatttttttctgaacaaatcgaagaacttaatggatcgaacttatccttggctgctacgaaacatattttatctacgtcagattttttttttttagtaaaatttgacaaaagttcttaaatctaataatcttaatagttcgaggggaatttttaacaagtagaaaagtagacatgtatcaaagggtaaaaatttaaattaacctaataattaaaggctagatatgggtggataagataatcatttatgctcacgtgtaccgtaagtatataaaactcacaaaccaatcttgatattcacattccaaataaacacacttcaaattcctttttatttctaaaaattgagaaaaatgacactagatttttcacaagaaaaacatttcccccaaacttatacttttagcaactaagaaaaatgttgtttgttttcaatctctctctctctctatcttcttttatacctgttctcaatcttttcttgaacttttctattgacaacaccgctccacaaaagataacacccaatacaattcaatcccttttttacatgtttatatactcatgatacaaatctaggaactgataaataatagtgtttaattaagctcaagcaagtgtttaacagtaaaaagtatatctttaagctcaaagagggtaactaaggaaaatttaatcaagctcggcttaaaatgcacaatcggtccaataattgcttaaatcactttcctagtcatacatcatttatcatttcgcctcaaatagtaagcaatcaagttctaaaaattttctcaaccaacttttcacatttcacatttagtatgcacaaactaacttcaattgctagaaatttaccaattattattacatatttaataaagtacaaaattgaagttaatttgaaggggaattcgtgcttggaggacacagaccgcgacactacattgtagagtcgcgaccctcctgctaatctaacgaaaaatagggttttaa

SEQ ID NO: 224116 - DNA, 1859 bp, Cannabis indica
tattacattcacacatgctatataaatctccgtaatttaaaaattccgcttatttatccacttatagcaaatttaaaatttatgttcaactagattaataggatcataatcccacttaatacttgattaacccataatataattataaaccctaattattaactattatgcttattgggatattacaagacatcttgctccgggagctttgttgggctcctgccatactagtggccggtgcggattgggacggaagatgagtgctcaccctagagggattgcttacgggcgctccaaagtgtgacagtgctggggttaaggtgagattatggttgtatcctcgagtaacatagaacggtattccgcttgtttaaggagcagcagggcgtggagccccgggaagttatgctcctggtgcatatctcgacactcctgtcgggtaaagccactatttgggcctcctccaggttaatgtatttctggactctcttttgaaattcttggaggctagccactccttcctgttgcaattcgttccagaaatgggttcctatttggatcccgacttggagtaaggctaattgttgtccatcgttcacctttttagttttcgaagcctcctccttgaatctctttatgaagttctttaaagtttccgtgggcagttgttttatattggtcaaggcattaacttcaaggttgatcttccttggtgtcacaaactgtcgcaggaaactaacttataacttgttccaatagtccaccgatcctggctctaatttcttgaaccattcttcggcagacctgcttagtgtcaatggaaagcatagacactttgcatcattgctaaccctcatctgttaaatcgggatagatggtcactggggtctaaatcccctgtgtacgttgccatttcgggcattttgaaattttttgggagttccgcctccaggttgttcctaccgcagggctcccggtccttgcaatcagactttgagtcatctcccttctgcctccgagagactctagcaatgtctttgcggaggatagccaactcgaccaagattccttcattcaaggcgtctcccaacaccggtatcatttgctttttcctttcaggtgctttctcaagtcaccatgtttttcattaattttttgcctcaagtcaaccgggggatgttttcgacttttcctccctttttccccaggttcctgatgcactaatacactctttcggtcctttcggtcctgagggccaagactctctcgagggagcttgcccctctacaaacctttcctttttgggaaatcagagcagacctttcgcggatcttgggcctttttgtttcttccagggattgaagtaggatttttcttagggttcccctcgaaaggataccgtatgggacttggctccctaatcttgggcttttgggtggttggcgaggactctttttgtgtttcctctagtccttaaggcacaactttgggatgcacgtggatttcagctgtctccatgaccttttgcatggcgatcatgatttcttgcatccttctgttttgttctttttgggtggctagttaggtctcatgatcagctgctttctgccataggaccagtaactcggtatagctaccatcatcataagcatcgtacccttttgggttttctttgtattcctcgtcctttgattcgtctcgttctttagaatccacatttactcgtgaggccgcctcttcgtcctttgggctctgagggttctaggggggacgaggttggcgcgtgtggtttcgagtttccaccattgcagcttagatcttttgttttcgcttttcggacaatgcttcccacagctctc

SEQ ID NO: 224117 - DNA, 1090 bp, Cannabis indica
atttatttattattttcaaaaatttagtttcttattcttgtgtgaataggctttcaaaataagatcccatttttatttgacttattgtgaatcaaatatgagttttccttttataaaatatttgattttatcatttactttttaaggaaatttttattcatatttattccttttgatctgatttcttgaccaagaaaccgtgtacaactatgggtattaatgttgtcaaagttgccttatttgtttatggaaactttgatgaaaaattatccagattcactgtatctgttagaatggactgactgtctgtttaaacaaattttgactttcctttttgggaagaatttcatttaatgatcttatcgtttcttggttgtttgtccacgacctagagagtttctaaactatatatatatatatattcatccttaggtcgttggttttggttagctctcttggtgtatcaattctaaattacttttcaaagttagggagtgttttctttgttgtgtgaagaacttgagtccaacaagtttttagtattttattagtatgttactttgtattatttcttgttgaaattgtgtaggttgaacaccttggatattgtaaatcaagcttcgggagaagtcttgtttgtgagtcaccttttcgggaggaaaaagtgcatgtgagtcactcttcaggaggaagattgcaagttagtcactcttcgggaggaagattgcaagttagtcactcttcgatcgggatgaagattgcaagtgagtcactctccgggaggaatattgcaagtgagtcactaccaaaaaatgggacttttgtgtcggtcaaccagtttgaccagatgcgttgaccgacgcgaaaaccatttattatagtagcaacgtgttattactctgcgacagaaaggaacaagggttatagtacttatcagaatgaattatattattttcgcagcaaccaatataaagtttcttatacttttacatgtttatttatcgttttaggattatttatatttaggatgtttgtaaagaccgcttaattttaatttaaaattagccgataattaagatttaattatgaa

SEQ ID NO: 224118 - DNA, 2465 bp, Cannabis indica
gatgaatgcttcaaagtcctcagaaaatacaacatgaaactcaatcccttaaagtgctccttcggagtcaactcgggtaagtttcttgattttattgtcaatgctcgaggtattgaagctaatctagaaaaaattcaagccctcctggatatgaaatcgcctacaaaaaccaaagatgtccaaagcttaactgggcggatagctgcactcagtagatttatttcaaagtcaacggacaagtgtgttcctttcttcaaaatcctgggagggaataagaaatttgaatggatagaggaatgtgagaatgccattcaagagctaaaaagataacttgcaatacctcctatattctcaaaacctctggacgaagaagaactaggaatacacctagatgttacagaacatgctataagtgtcgtgctgattagggaagagaacaatatcatggtctactacatcaacaaaagacttgctgaagctaaaggacaatattcgctgattgaaaagctcacttactgccttatcttagtaataaggaagctaaggccttacttttaagctcatcttgtttcggtatacactgaccaattattacgccaaatattacaaaaacttgatgcctctggacaattactcaaatgggcagtagaattgggtcaatacaaaataatcatccaaccctgaacaataatcaaaggataggctgtagcagattttgtagttgagtgtacgggcaaagaagaaagcattttaaaaagtaatgtggagtcagtaacctgacttttgtatcttaaatattttgtaaaaagtttaacaatgggatcccgacacttgtaaatttttttataaagtttataaagtttcatagttaattctaaaagttttaatttgacacggttttcaagaaaattctttgattagcaagcactactattgaaaaatcactgtagcctgccttagctttagggcgttacataataagtcgacactcaactccctatcttccaccctaactgacatagacctaattcaccttttggagataacaaattccccgataggcggtaggtttccaaaccctctctcaataaaatcacaaggcctacctcattggttaattactcatgattccacatatgaatgtgtagccccagagtcatacaatacagtaaaataggagttgttgataagaagctgacctgtcaccatagaaggactagctgcagcatcagcttgagtaatagcaaacactcgagtaggtatgggttttgcctcttgcttctagtcctctttctttgcctgagggcaatctttcttaaaattcccaaccatgccacacttgaagcatgtttctcgattacactctctaagatgatgtttcttacaacgtcggtactcaagctaagaataaccatggcatccacctctgccttggttctcttggaacctcttgttctgtcccaaaccgccagatgctagggtagtccttcttttctaattagtggtggaatcaccactattcctaccatatctaggagtaggaagagcaggtgttccaccaacacttggagtctctcggggctcttgaagaaatttcaccgcacctttggctcgtaaagctctgtcaaccatctcaacataagttgttgtttcactcgtagtaattaccagatcacgtctaatctttgcatttagaccagccagatacttctctttcttactgaagtctatgggtactatacccatagccaacttggctaaacgatcgaacttcatcgtgtattctgttactgacatgccatcattctgaaccagatcagtgaattccttagctttgcactgcggaccacctcattataatactttgcattgaaaaaatcatgaaactcttcctaggtcatggtggtgatgtctcgggtgagggacactaactcccaccacacgagcccatcttcctggaactgaaaagtagcgcaagtcactcggtcatttctgacgactcctatgaacttaaagattctttcaatcatagtgagccactactcatccttcataacattcgggcctcccaagaagactggaggtgcttgcttgtaaaatctctcatataatggctccatatagttgccagcaataggttgttctattggcaccactagaaccatagcggcctgaacttgcggtagaggcactacaagaggaccctactatctcagcctctgaatctcttcttcttgcttgagaattcgagcttgtatttcctcaaacctttattaatttttatacaatgtttctaaaggaaccatgtatgagattaaggttgtatatgcctacaaagccataacatgattcatgtcgaggtcaaaagaggacagaaagttggccacccacttggaaccatggcctaggctggccagggttcccaagctttgagagggtttgcctgttggaattattttacaagg

SEQ ID NO: 224119 - DNA, 1217 bp, Cannabis indica
gagtgaattaaagaaactaataagatgaacatgagtttgtgattactcaagattcatgttgatctactattgataatttttatgatatgaattaggtatttatagtaaacaacatgtttgataaagacgacttaatttcatatcggtacatgtcacatataatctttattatatacaacaccttcacttagatattatactacatcagcaatttgaatcgagattgcttacactgaataacgggcatcagtgaattatactagcaaccgttggttaaagattctatacttttaatatattcctcattgctttattcatgcctaagtgatcttaattttccgttcaatacaaattacaacctcatctatatataattgtcaacaatgataatacccttgcatttttcatcatctttttcaaatgactgcattgatatttgctaatgacaatgaacattgttattgggtactagtaatatctagcaccgcctaaaggtggcgctctgctattggttagcgatattctctaaaagttattacattaaattatatgggattcgatacttaattgtactaatagagatattgcacatatgagggtgttaggcaccactagtgccttttagcatttgtcaatgaaaatagggtaaatactattttagatcgtatattttataaaaattaccgattgaactcctcattttgttatatgaaaattcagaccttgtattattttaaaattgtagaaaatagaccctgaacttaattttcgttaatttttaaataaccaatctgaagccagtttctagcacgaatatgtgcataaaaaaataactagtctttttgtaacatctccagatcagattattaatgagttttaatttgacaaaaattaactcaacatctattttgtactattttataaattcagggtttaaattatcatttaacaaaataaattataatacccggaattaagaaaaagattagcaaaaccctaattagataattatgagttaattgaggaattatattattatatagttcaatatatgtgaaattttatgaattttaatatgttaaagacctcgttggtgagccaggggcattttagtaattatgacccgagaggggtaaattgatgaagttaattcaattacgtgcttaatagaactatattattatatagtatacatgtgttgtcttttcaggtgtgtt

SEQ ID NO: 224120 - DNA, 1750 bp, Cannabis indica
atagtagcaaaatgaacaaaataaataatttatgccataaatttttctatatatatatttatgtttttgaaaacatattaattcaagatccttcaataacaagggcgataaaatagcaggaatagaagatccactaagaatacaaccagctttagaataagagtcccttataaggaaataagttcaccttatttgcaaattgtttaacaaaagtaacagaaacattattcaaaacaaataacaactttttagactcattaatcaagataccatatagtgaaaatatatgaactttgttgttgatagcatgaacaacattatacaatcttattccacttgtatattttgcaagtcgttcctttttattctactgagagcttctttaattgccacaacttcagcgatatcagctctaacagaactaagtttacttgcttgaaaggtttcaaagaagctgccatcatgatctcttgtcacaaaaccccaaccaaaacttttttcatcaacaaaagttgccccatctacatgctttgatcataggatagttcggtttagtccaatattcatcacgctcaaaaatagctggtaagctgtttgagagagtccctaaaatagattgagtagtttttcattgatcaagggtgagtttaaaaaataagataactctatcaactaatggttaaatattattccaaagaaagtcattgcggcatctccaaagtgcctaacacaacatgaatataagctcaatatcagagctcgtccaacttgaaagaccgtgttgaaatcaaggtgcaaaagtaccttcaatactatctctagatgaccatagtgctttcctccaacagttttggaaaaattagttacatgtaacaaagagatggagggcgaattcaggtgctgagttgtagagagaacaagcagtatcaagaataacatgtcttgatcatagcggaccttagtaggtaggaaataaaaggaagctctccacaagaggtctttaacacgagggggaattcgtaactaccataaagatttttgaaaatcaaaaagatagtcgaggccccagttaccttttaattgctgcaacaagtggtatgcaatttttacagtgtagacaccagcacgatcctttatccaatactagtgatcttctaaagcaaaaaagagatatataattggaggtgaaggataaagtatctattatcccatttttaacaccatgaagtatatgttatcccatttttagcaccatgatgtggcagcatgaattagtgacatgtgtttgttattcttcatagttggctggagaagtgttcgaacagacttcaagtaatacatctgcacggataaagttttcctgatcgaacagagaaaaggcagatgatctgaacaacaaataaagtcatatctctgaaccgtgcatccagacttaactactttaagattgatatcgtgaagctcaagaacaatccctacaatcatggaatcgtatcaaagggatatggcaagctgtctgaatccctcattttatgtattctaaatatgtaatgtatgttcttaccagttatagatattgtaagcaaaagggaaacatttcctcatgcatttagtcctataaatagtgatccatcctcattgtaaaagaggtcgaaagaattgcttctgagagatctaagagaagacactcagagatttcattgtgagaactttgagaggggaaacattatattctttgttctcaagtcaa

SEQ ID NO: 224121 - DNA, 2331 bp, Cannabis indica
aaagaaaaaatcaggagctcgagaccagatgagggacttcaattcccgaactgtagaggtctgccctaaccctctacagttccaagcaatgcctctcatggctcctgtggaggagattccacattctcctccacaggggtatgagagtaagcagacccactcgaaacagcatcatcgatcacaaatgaaccaatcaaggggttcttcaaaataccaaaacggcttggagagttagaactatcctcagaaggctcttcaagtaccatatcaggatcattctctttttgcttggtgtcccagggaaagtcgcggactacacctgggtacttgcggtggattttgtgaggccttgagcaaagagaagcagaagatataaacttccttttcttgaaaggagtagtcctctcattaacctcggaagaagccgagactccagtatcacctcctatcttgcgaatctcatacaaatcaagcttgccaaaatgtttgagatcattcattaactcctcttgagctttaaagaaatgagacaatgcttgctcttcattaatttgaacttgattctcacaaacaccaacgggctttgaagatgtaagaccaacttgcccaccattagcttggtccaaaagaaccggcccaataatagtgggagtaggattagatacaatcgggtccacatgcccaacattagaaatattatttaaatttgattcctccaaaacaggcccaccactaattaaaaaaggcacaacctgttggatcgacccactgggatgggagatatcttgattcaaaatcttaggcccacaatccaaaagctcttcagctggcccaagaagcttcaaacccggcccacacggagacggcccaccatccagagaagacaagtcaacgaccacatcatttgaatttaaaaatatatccctaccctccacgcttggactcctcaaaaaagaaataccaacaaagtcttttccctgcatctgaaccccaatatcacctctattacccgaagtagcaaaagtgtccttaccacctgcagctgattgcttaggatgccacaccaatcgctggagctccccagacttagcagctgcacgatgggtcaccatcatagagcgtctcggtcgacgaaccatcccagtgacacccatcgattcaccagcaaccggagtcggagacgccattaatggacgatacgcaccacttttcttcaccacggcaaaggaggagtcagtactaggaccaccgtaggacggaccagagaacacgtcatggtaagcggaggacgttgagagccacggaccatacattgggaatggaataccatcacacttcgccaccgtcaccggcgacgataacgaacagcctcgtcgttgatgacccagacgaccgcaatggtaacaaaaaatcccaatcctttcaaacttaacttgcaaccattgtttcacaccagaattcaaatcaaaaaagcaccctgaaaataagggtttatgaatgtcaatatccaccaggatcttgaagaacgttgtccacgaggctggtttgtcctcctccatatcaagctttatcacagacccaaccaaacccccaagaagaaatccattagcacttgagtaaaactcatggggaagattgtgaacttgcacccaaactcttagagaattaaacacaatcggcccgtcgacactcggagtccaatcttgcaaagccaacgtataaccacgaacacaccaaggaccgtttgcaagagcccagttcctgtcattaccattatcaaacccaaacttgaaaacatttgaggtcttcacatcatccaccatggccacaacactaaccggctttttccaagttttagccacaaagtccaaaacagtagggatatccacaatcatgggagcaatcactttcccgtacaaacacgatgaagctaaagccttaaccgaagaagggcacggagaaagcttgacagaagtttccatgcacgtaaagttctttcctttaagggaagagatggaggcaatgattggctccataaatacacacaaacagagaagtaaatggaccccaaagacacactacctacccgaatctcaccaactccaaataactgtaaaaaaggaggactttacacaagaaaaacactcaaccccacccaagacaaactcaaacaaacaaaaaacaaagagacaaaaaacaaaccaagccaaagagatacactgaccaagcacgaaccagagaaagaacaaaaggagctaagcaagggccagcttaccaacacagaagcaagaaacaggagacttaaggatgacacgaaagaaggacgactca

SEQ ID NO: 224122 - DNA, 7862 bp, Cannabis indica
tctctctctctctctcaatcttgctttttttttgggtagaaactctcaatcttgcttgctgaactcactttctgatgaaagtgttaatccttatagtggagtagaacatgtatttataggcactaagaccaactaatttaggtagttagatcatttcaaaaaaaaaaaataggtagttagatggatcagttggttaattagataagggtaactataataatggataggatgaactaacgccacaaattccaccgtagtttcttcttgtcacaatttgacagttgctctacttgaagggatgatgatggtgttccatagtcaagcaatgcttagtgaccatttttgaacaagttcatgcattacttgaacttgttcatagggagaacctgatttttcttaatgttaactttctctattttgattttgtcacctttagtttttttctcttatctaaaattatcgaatgtcaatatgtacactcttctcatggtgaattggattcatgcatagatgaattaaagattagttgttccctcttagcatttctattcttgatgtcatgacctgggccttaagtcgtgacagatatgtaatttgggtggtcaaaggtcacactttgacccttgttggaaaataacttttataagtgattttttgatttatttaacaaaattacatatttaaaattaaaggaatagctcctataattatacaacaaatattagtaactaaaatcaggaccactcatcataataaaagaacaataatgtccccacagttatgtagtcactagatatatagatttaataagtcataaaacaccaaaataatatttagcatccatcatttctcattcctaactagtacatagctaattaagtcataaagcatgttttgagccttcacaaaatcaaaaattacaaaaataactggcatacaaaatataacaagctattacatccttgaatgcaacatgacaacatgatgatgaaagtgaaagtatatattacaccacattggattcaagatcatcttccatctcaagcacaacctgaattggaccacttccaaacacaaattcactatcgaaaaacttattcaaaggactatttccgaacaagcatgcatgtggctcgatctaaaattgttacactaggccaacaaccttaactgcaattttcaatttcaccaagcttacataccatacattacagtctaatcagctgtaaagcaacatacatgatgtgtagtcataatggattgaataatgacatgtaatttaattttcaaaaaattgtgataattgtggattacatcatcatcatgtcaaggaatagaaaaattccattctctgcatatgttggtgtactggtctaatctacaccagtgtgtagacaagcatacattcaaccatgtgcttaattgtgtggtcccatgtaaatctgttgcaaatcattttgtaatgattaggatttggttgttagaatattcccccttgtattctgtgtatgacagctgtcaagagctaacggctctctgtattatgtacaattgaacattctataaattgcaatctctgactctgagaatattgagcagagcttttatcaaatacctatattctaaaacttttacttggtatcagagccatctaaggctaacgccatggccacaccagaaaacacaggcagcagtaccacggctcctgctccaaccaacaccaacaatgtccctgctatcatgggatctcaacctgcagcctacactcaacccctcatcactactctaagccaacccttttccctaaaactcgacagaaacaattacaccctttggaaaacaatggtctccaccattgttcgtggccacagactacacggtcacctcaatgaaaaccaagtatgtccacccgaactcatcccagttgaaataactacagaagaaggagaaacaagaaccgaatatcaggtcaatcgtgagtttgagaattggatcataaacgatcaacttctcatgggatggctctacagctccatgacagaaggaatagccatagaggtaatgggttcagcttcggcagctgacttatggcgtgctttggaaagtttgtatggtgcatattcaaaatccaagatggatgacacaagaacactgattcaaacagtgagaaaagggtctacaagaatgagtgaatacctgagacaaaagaaaaattgggctgacactttagccttggccggtgacccctatcctgaagctcatctcatcaccaatgtcttgttgggtctcgatgctaagtatctctccatagttgttcaaatcgaggctcgatctcgcaccacatggcaggaactttaggacattctattgagcttcgacagcaagatagaaaggcttcaaaccttatctggcaacaccaaaaccactgctgcaactcctcaagccaatattgcagcaaaatcttctccaaataaccactctccaggagacagaggtcgaggtgcctatcaaaaccagaatcaacaatatggtggaggaggcagattctctggaaaccgtggcacccctggcagatccagaggtcgtgggagatcaaatggtccgagaccaacttgccaagtttgtggcaaatatggccactccgctgctgtttgttacaaccgtttcgacgaaaacttcatggggtcagatccagccaatgcttccagtcaaaacaaacagtgaaacaataatcacaatgctttcgtagccacaccagaaatccttgacagtgatgcttggtttgctgacagtggtgccagcaaccacatcacttccgatgccaacaatctcagtcagaaacaagattatggtggtaaggaatctgtcattgtgggaaacggtaataagctcaaaatttctcatgttggtaatggctacttgcacactaattctggcagtgttttaatgttgaaagatgttttacatgtccccgaaattgctaaaaacctgattagtgtatcaaaattaaccactgataatgatgtgttaatcgagttttatcctggttattggttggtgaaggacaagcaaacaaggagggttctacttcaaggggtgcttagagatggattgtaccagctaaatcaacctcaagatcagctatgtttttcaaatttctttcaatcaaagccaacagatgttcaaaccaagttgtgccttatgtctagtgttaccaatgtgtcaaaaagtaagggtaatcagtcccaagtcagtaggtcttttgtttctaaaatgatatttggcatagaaggttaggccatccatcatttcctgttttaaatcaagtgttgcaatcacacaatgtaaaactttccaaaagtttgacaaagctcactctcttccttataaaacatctccaaatcgagccaaatctgtgcttgatctcatacacacagatctttgagggccaacccccatagcatccaatattaatcacaggttttacattcatttccttgatgatcacacacgatacacttggctataccctttaaaatttaaatcggatgcactgaatgcctttattcaattcaaggcacttgtcgaaaacaaattcaacaagaaaataaagtgcctaaaatctgacagtggcggtgaatatcagccattttctgcttttgttcaagatcaagggatcgaattcattcatccctgtcctcatacgtctgctcaaaatggcagggtcgagagaaagcatcaccacattgtggaaatgagactcactctcttggcccaagctagcatgccattgaaatattggagtgatgccttcactaccgctgtttatcttataaacaggttacctacacccttgctagctaataaatctccctatgaagtcatcaatgggagaaagcccgattaccaattccttaagacttttggtgtagcatgcttcccctgtattcgaccttgccaatcccacaaattccaattccattccttgaaatgtgtcaatcttggttacaatgagtcatacaaaggctataaatgccttagttccacaggccgtgtctatatttctaggaatgtcgtgttcaatgaattggaatttcctttccactcaggatttctaaatactcacacaacacctcaaccggtcatcattcacagttcaacttggacaactattcctaccgcacctgtgtctgctggttcagtgcatgaacaccattctacagcacctcctgaagtggaatctgcccctggttcgctctcacctcaggtatctcctatgtcccctcaatcttgttcttcacctgataccatagcttctgttggttcagatcatgaaggggtgcattactctcctcatagtgatgaaattcttgactttgtttccactgattgtgctgatcatgacactgccccaacagaaacttctcctcctcatgaacaggttgttaatgctcccattatgcaccccatgatcacgagagctaaggctggaatatttaaacctcgtgtcctgttgagccataccaaaaccaattcactcaaagaaccatccaacatcactgaagctttgaagcaccctggctggtcaagagctatggacactgaggttgttgctctcaaaaacaaaaagacttggatccttgtaccgccttcaccacatcagaatctcattggaaacaaatggatttatcgaataaaattgaatcctgatggtacggttcaaagactaaaagcgcgcttagttgccaaaggctttcaccaaaggccgggtattgactttggtgaaaccttcagtccagtaattaaagcatcaacagtgaggattattctcacaattgttgtctcaagaggatgggacattagacaactggacattaacaacgcatttttgaatggtgatttagaggaggatgtattcatggtgcaaccgcaggggtttgaggaacctggtaaagagcattatatctgcaaattaaacaagtccctctatggcttgaaacaagctcctcgagcttggttcgacaaattgaagcaaactttgcttgactggaactttagcaactcaaaagcagacacatctctattctactacaaatcggctaaggtcattttgctagtgcttatctatgtcgacgatattattgttactgggaatgacactaaagctgttcaggaattcacaaccaaacttcaccctcaaagatctcgggccactgtattttttccttgggatagaagttcaccgagatgagagtggactttacttgacacaaaccaaatatattgaagacattatgaacagaacagatatgaaaaatgtaaagccttgtcctacaccaatcccagctggaaagccaatgtccattcgaaatggtgaaccaatgcagaatccaactctgtataggagtactgtcggagctttgcagtatctttgtcatacaaggccggacatagcttatgcagtcaataagctaagtcaatttctacaaacgcctactactgtgcattggagtggagttaaacgcgtactgagatacttgcagggtaccaaaactcaaggtcttcatatcagttgtagtagcaaactgagcattcatggattctcggatgccgactgggcaagctgccccgatgactgaaaatcagtggcaggttactgcgtatatctgggagaaacactcgtgtcttggtcctcgaagaaacaagctgttgtctcaagatcaagcaccgagtctgagtatcgtgcacttgcacatgtcgcatccgaaatatcttggattgagtcccttctcaaagaacttcagtttcctctgattactccatcaattacctggtgtgataacctaagtgccagtgcattggcttcgaatcctgtcttccatgcccgtaccaaacacattgaaatagatgtgcactatgttagagacaaggtactcagtaaggagcttgaagtcaggtaataccatctcatgatcaaattgcagactgctttaccaaaggtttatcactttcaagattttctttccttgttggcaaacttggagtgagaacctctctccgtttgagaggaggtgtcaaggaatagaaaaattccattctctgcatatgctggtgtactggtgtaatctacaccagtgtgtagacaagcatacattcaaccatgtgcttaattgtgtggtcccatgtaaatctacaaatcattttgtaatgattaggatttggttgttagaatattcccccttgtattctgtgtatgacagctgtcaagagctaacagctctctgtattatgtacaattgaacattctataaattgcaatctctgactctgagaatattgagcagagcttttatcaaatacctatattctaaaacttttactcatcatatagttttagaagtactaaaagtttgctatttcaattgttatgttaattgccattatatgcactacaaagatagatacaaggtggaagaagcaaaagaacttgagcaaactataactattactcagttctatacctttaagaattaagggtgtctaggaggaaaaaggagatgcacaagctcaagaagctgatcctggagaagagaaacttcagaactcggataataataagcagaaaaagaactgtgtgatttggcttcggctgctttttttgcttcttttgctttttcagctgctattagtgctgctctagcttcttctcttgctttcgttgctagtcttgcttcctctctcctttgcttcagctattgctcttaattcttctctagcctttgctattattgcttcttctctgactttcgctgctgctatagcttcttctcttgcttttgttgctagtcttgcttcctctctagcctttgttcagctattgctcttaattcttgtctagcctttgcttcagctcttgctcttgcttcctctctagcatttgcttcagctattgctcttaatgctcttaagtcttctctagcctttgctattattgcttcagtacttgctagtcttgctctctctctagcctttgcttcagctattgctcttaagtcttctctagcctttgctattattgcttcagtacttgctcttcttgcttcttctcttgcttttgcttcttcttcttcttcttcttccttatactaagaattacagaatcaaaacaaagagaattacaccattaatattaaggttaccaataaaattgaaaaacacaacaagtcatgacatgaaaatcactaactctagctaaatcagaatccatcctccgtctcttggcatcaagttcaaaatgtctgcttagctgctcatcaaacagttgtctggtcttgtcatccatgagtatatcatatgaagactggagcctcaggaatttagcagtggctttcgaatcatgttgatttttatcagggtgcaacaacagggccattgttttatatgcctttctaatctcatccactgtgagcttagcaccttccttgccagttggtaacccaagaatggtatagtgatccaagtaaacatcacccatatctgatgcttctttcttgttctgcaaccaaaaatgcaccatatatatatatatatatatattcagtaaacatgtcaaaaaggtggctcaccaattcaggtctgtcaaagattagtagaatggtactattatgtcctgtttgccttaatgtagaattgcttattatgattcttactaagttttattgtacagtatttgatatggttcttgctggttttgagtcttgtacttttctcaacaattacaaaaatgaattctttgatctttcatttcatttaattttttttaaacccttcaaattacagtatgtaatgcattatgcatatat

SEQ ID NO: 224123 - DNA, 6001 bp, Cannabis indica
aataagtagcaaacctggaatattgccaagcttttctggacctggaacaatctagcagagcatgcttggtggtttcagtctccaaatgataaataggacacaagggtgaatcaatcacacttcttttaaagagggatgaagctacagggagagcatgagattacattctccatacaaaaaatttaaccttaggaggagtaatagaggaccaaattttagaccagaattttttagaactagagaaggaagaggatgaggggagatcctggtgagagaaagccaaatgataagctgatttaacagaaaacaagtcagaactttccctttcccaaatcaggtcgtcatgaccataacatcctgaaacaggtacctcaagaatatcattaatcatgacattatcaaaacaagattgcaatttcccaacatcccaagttccagagtcagtgacaaagtaggacaataaacaagaagaagaggagaatcattggtgagaaaaaatttatgtctatgattagggagccaatggtcatccagagttagaatactactcccattacccaccttcctaatgagccccgaagccattaagtcccttccccacaaaatgcttctccaagtataagagggattgtgaccagggacaacaataagaatggaagatcgaggaaagtgacgagctttaagaattgaactgagcaaagagtcaggatttttgaagatacgccaagcctgtttagcaagcatggcctaattgaaatgcacaagagatctgaaacccaaaccaaccctaaatttggactgacatagaaatttccaagacttccaatgaatttttctagactcccgagtagaaccccaccataatctgggcatcgcagcctcaatacccttacagattttagtaggtatcctaaagcaagccatagcatacgcagggatagcttgaataatagctttcagaagaacctctttcccaaccctagaaaaacacttagaagaccatcctctaaggacagaagcaaccttatcgcagagaaaaataaaagaatgatatttagaccgagaaaggcattgaggaagacctaaatacttataaccaaaaggcctatcttctagattaaaagtttgaaaaaacaaagcacgaatttcctgagtagtgttgggagaaaaaaggatagaagatttagagaaattaatagcctgcccgaagccctagaatagatattaaaaacctcctggagagctaagcaagaatttctatcagcagaacaaaacaaaaggctatcatcagcaaaaaaataaatgagagatagaaggagcatgcctagagatagaaattcctttaagagactgaccatcctgcctaagccgaagtaaagaagacaatccttccgcacagagaataaaaagatagggagacaaaggatctccctgtctaaggcccctagaaggcctaagagaacctctaacaacaccattaataagaaaagacagcctggtagtataaatacatttcatgatcagattaacaaacttaattggaaaattaaaatggaacattaagctttccaaaaaatgccattcaacacgatcaaaggccttagccatatcaagttttaaagcagcctaacctctcttaccagtattcctagagttaatagcatgaacaatttcctgagtaataagaatgttatcaaaaatagtatgcccagaaacaaaagcactctgaaagggagagataattttgtgaagaaccaccttaaggcgattagcaagaactttagagattactttatacatagtagtacaaagacttatagtcctaaaatcctttaaagaattagcatgctgcttctttgggattaaaacaatgagagttgtgttaatatcagaaaaatcaactccattatttaggcaatctaaaacagcatgaacaaaactaacaccaagggtgtcccaatttttctggtagaagaaagcattgagaccattcaaacttggggctttatccccagagagactaaaaatagctttcttcacttcttgagttgtgaaaggctgggccaataaatcaatatctgactcattcagggaaggccctaaacagtccaatatttgattagtggcctcaacatcacacccctcagagctaaaaagagtggtgaaaaaagaggaaataatatcaaacatagcctcaggatcattagtattgttaccaaaatcatcttttaagtatttaatagtgttattcttcttcctatgagaagcaaacctatgaaaaaacttggtattcttgtcaccagctttaagccaattaactcgagaccgttgtctccaataaacctcctccttataaaggagagcatcaagctgggactgaaggaacttaacacgaaggctagactctctattattagaagcagaattctgaatcctagcaatctctttctgagtatcctggattcgagattggaagatcactttagtagacttgttccaggattttaaggccgaaacacaggaatcttgacaaaagagaaactagcttagagcattttcatgagcagaaacactacaagaattcagccaggaatcttgaacagtggtatagaaatgagggttatcaagccaaatgttttcaaactgaaaatgtttcctaataaaaggattgctagagacattagcatcatgaagaagaaccttaatggctcgatggtctgagccataacaaggcaaatgatgcaagcttacagaaggaaagagaatcttccaggactcagacccaagagcccaatcgagacgctcatacacagtatgattgtgccaagtatatttatcaccctcaaaagtgagaggtgaaagacaaaattggtcaagaaattgggcaaattggtccatatctttatggttataatatgtactgcctattttatcatcaaaagacaaaaagctattaaaatcacccatgataagccaagggaggtttggagcattagaaaacgttttttcaagcaaaattccaagtaaaagaacgattagaagtaaggggagaaccatagtagccagtaaagtgaaacatttcattatctttaaagttaatattacaatctatatgattgctaaaaaaagataaaatatttatataaacagtagctttccacaaaagaagaagtccacctccaaaatactttctagggacttcaaatccattatcaaaacctaaagctactctaattctatcaacagccttcctaggcaagcgagtttcagtcaaaaaaaccacatttgggcagtgatctttaaccaaaagggagagcctcctgaatgcacgtgtactccccaaaccacatgcattccaactcaaaacactcatttttctaggcgggtgtgcaaagcatcaccccctgttccacatcagcagcagcaggagaagattcctcctcccgatctccagaacaagcacatttgagttgggaccttacaaagtttccaaccacaacatgttgaggctgaaacgaaggtctcttgacaccagagactgaagccagacccttcccatgaacaaaggagtcaggctgaccctgaggagagctaactcccatagcaaagtcaccaatggaggcatgactgccagaaacattcacaggaacagaagtgccagaggataaagtatctatctggctaacagggctatcagccacaataagagagtcaatagagtatgatgtaaaagcagaaggcctcaaagagatgtcaaaggtaggtcgaacagattgtgaagtaatacttgaaacattgggattcaaaggtgtaggcatcatgagaacaaaagtggatggtggaggagcaaaagggccagcaaaatgagaattgagatgaaggaaagaagggaaatttattgagtgaccagagaatggttgagggggcaggttgagattcacaggttgatagttaaccatagtaatagttgggggatggggatattgaaaaggctgggatttgtcagtaatcttttctttgcctctaagtaggatgttataagggcagagaggttcatgcaagagttcatcacacttttgcaggaaggcaacacaaattttttggtatggtctagtttcccatagaagaagcaaaaatctggtagtctctcatacttaaaatcgagccatttaataaactcacgccccatcctaatgaacttaatgatcataccctctgaatagcaaggttaacatccaatagaactctaatacgcaaatagggaccagtaccctccctaatagtgtccttatccacctcaataagatccccaatttacatagctatgaacctagcaagatcataggatttacacataaatggaacgccatacacttggatccaaaaaggaacatagtgtagggtttcaggggtaaggggaaaagaactatcaagagcagtaaagatggttatgcactgggcaaaattccaaggttgaccctcttaaactctacccttgtccccttcacagccaaatgtgacaagaaacataccatatgcatgctcagacacagtgactgggaatcgacattgcgatgaccagatgccagaaagagttttcatgagggaaggcctattataaggatgaatagtatgaagcttaagaagtagactggtggatgcaggggaggaactagaagacccaacatcataggtaaaaatagttgattcataagagggaagagctaaagcattagagatagagttgagaaatttatccatttttataaagacaaaaacttcacagatatcagcaaagagggaaattaatggaggaaggggatgaaaaaaaacaatacctgagcctggaaatatatacaaaaaaccagaagccacgaagaacactccttggaaccgcctagtcacatccctagtctcatccatggatgtcacaatgatgaagaagagcttaagggtttcgggaagccagccgtccgcctcaaatttacaataaccaagagaggtattctgagggaagatttgggaaatcagtagtaaatgaggagaggacaaaaggaaatgatgaagaaaacagctgagagatgaagagagaaagtgtttggagcaattaatgctctgggtaagatttatgagatgtgaaagggagtaataataatccctatagcatttaatgcgctgatagaagagaggattaagcagatgtggatagttgtaatgaagagagtaggacaaaccatcactaaacagtgaagggtggacaaaatcccccattagagggaccaaacttaacgaagaagaagagaagcacctcatacctgctagaaagctccagagaaaagaaaagcttatgaatcatttcatttctttacaagttaaaagttctacttatatatatccattaatataactgtattagttatgtaggctttatattcatcaatataactgtattagttatgtaggcttatgcattataaataatataaaattatatttctctccctactcaatacatataaaattaccaaattgtccacataataattattgaaatgcctgatgccaatttgcacggttagcaaaaccgactatatcagatacatactatatttttggtttatgaaagattgcaggtgattagactttgtcagtcaaaatgataaaatgtgtgaaaatagtcttcttttttaattcaattaatagtatatatattaatactttaagtccatgactggacacacaaatttctcaatgcgtgattgaatcgtgagcctgtaatatatatagtgtatatatatgtattgtaatatatattttaatgtaatctcttttattgtccttgtattatttttaaaattgagttgtatatatcttgatttatcttccattgtaataaaatctctaacaatcaaaagcttatcccttttcaatagaagaggagataaatcaagattttgagaatacaaggataagagattttatgtgaaagccattcataggt

SEQ ID NO: 224124 - DNA, 2317 bp, Cannabis indica
ctatgtgggtttgccaattgtatttatttatatgctactcatggtttttttttttttctttcaatatttgtataatttttataggctgaaagagaccctactcctatccatcgtgctgcaaaattattaatgaattctcaattagaagatggtgatttcccccaacaggtagtatatgatttacaatttaaagagttgtccttatataataaaatatacaaacttttatgacgtttaataattcttggttgtgttttaatatatatggcaggaacttatgggggtttttatgaggaactgcatgttgcattatggagcgtatagaaatatctttcctacttgggctttggctgagtatcgtaatttggttccattaccatcttcaaattaaatgaagactagctaagatattgcatgtttggagcaagctaaatgaagataagattggattaaattaaatattgatttttatttgtatgtaaattaaattattgatatatattatttttcctgcaacccaacaaaagaattttggatgaaaatcagcataattaaatgtacaatttcaaaaatataattaatacctattgcaaaatgtttgaggaaacttagtatatacaatgctatatttttatatctttcaatacagtatatcttttcaaataaatatatagtatatttattatatctataaaagtatgagttaggttattaaaatttggttaagttattaaaataactcatgttgacgctcaaaaggggctaactccgtatcgtctgataagcgataatggcacatgaaaaatataaaactaaagagacaacatagtcactctccatatcgcgataataatagaactacgtctatattgatcttttattatcataaaaaacaaatagcttacaagagaccccgagaaaaaataattaacgagagcttcacctcacaatttttagagagggaaacacatgtggagagataaactctgatcttgtagagagaatgaagaatgtgtaaaatgagctagatgagctctccttttatagtgaaggaggtccaattaaattataataaaataataaaaaaattctcttgaaattcactgggaaatcgttgcggagctcgcgaacctattatgaggccaaaaatttcaaaattgtgggaagaacaaaagccaagcttagatccatcttgaaaagagctttctaatgccacttgaaccgtgtcatttggataaacttgagtgagttatagccaaaatactgagcaatatgtagtgttgaaagatctgttgggttgatgggcggccaagttgacattaaacgtcaccatgggcgctcaaaactctgtttcttggactttaagcatattttgatgagattccaagtattgtgaaagcattccctggttcattctttgactctgatgaagttcttcaccatctcttggtgatttttctcgatgcgcgcaggagatgtccagttgatcaccggtaacaagaaggtgacgactaggtgatcattagtgttagtggctatcggtgggcttgcacatgacacatgtacatgagatattgacttgctgaagtatccaaatcttattttggtagaaaaagtaaactgatgcccgagacataactactgtgtgatggacaaaacattgagctctaggttaaatgtcaaccttggcgcctagtgtgtcatttggtgattctcgggggctaaacaacaacttggatgatattttgttctgattccaagtctcatatgtcgtttttggagaaaaacaagaataatgctcgagacggaatcgtattctgagtaatggaaccacaattcgcatggtatatgtcaacctgggtgcctaagcactactacaaaatgtcgaatttttgtcggtcaacacgtcatactaaaatggttgactgaagcaagaaaaaatgaagattttatgtttcagtggataaccgaagctaaaagaatataattagtgcaagcaatacttcaacgcaaatagagcaaccgaggtaaaaagagaaaatttaaaaatattcttttacatttagctttagtggaaaatagacgctacgttttttttagcttcggttggaaacagaagttaactgttttgctagtgttatttatcgaagcaaaaaactttcatttttgtaatgaccccaaattttcacaaatgaaactcattttcttcttcaaacttttgaagccctagcacatccatcattgtcctctctccctgccagatctcaatctcgaaggtcacagaaaaaacacatcgtctctctctctctctctctct

SEQ ID NO: 224125 - DNA, 2305 bp, Cannabis indica
aaaccatagacaggcaggagacatggggttagatccttaagctatagtcccatcttttcataagcaattttaaataggttattggaagaagctccattatcaatcatggttctggccaccattttattcgctatctggacttccacgaccatcgggtctttgtacagaaatctaattttgacagcgtcttcatcgttgaaggttatggtaggtcctcctgctcatggaattttgggcttcctttcttcaacggccaggataacttcctattgttcgtgctgcgctgttcaggcatacctctcccgagctttgcccgaatgtccagcaatatgcgggcctccaacaatataaacctaattttgtcgaccttttacccagtgagtatagatcactatttatagggctttgtgcttgaggggaggtttcctttatgtttacaatgtctataattggtaagattacacattacatatatagagtacaatgattgagggatttggacagtttgccatatctctgtgatacgatcccagatttatagggattgcttttgtgcttcacgatgcaaatgctaaagttactaagtgttgatatgctgttcgaattgtccacatctcggctgggagggcttcgttcgtgcaggtatatgtggtgttctgctcggaacatctctttcgggcagatatggggagttaattccacgtggcaccagcgtgtgatgccacatcagagtgcaaaaattgggataacatttggcccccaagtctacacgagcttctgatgttgtgtggagacttcatttgagctgcctttacatcgtgtcggatgcgtctgtttgtgatttgatgtgagtctgaccagccggcctttcgggtttcagctaattaatgctatgacttaattattgcctcgaaactcggtttcctttgcatgatttgatggttacacttgattgctttttatttcccaataactacgtttaggcttcaaacagtgagtaagtttttaatcttttcctcttttactttgtatctctaatttctgggttcccattgtacaaagtacatttgttcttgacttgttatagaagatacatagaaaatctaggttcgaaactttgtagttttctctgtaatagttcgtacgacttcgtggtttacgacaatttgacttcaatctcccgatgttcgattttcaccttgctcattcgaagctttgtgaaatttaacccttaacccaaaaatttaaaactcctaggttatgacttaattttttgtgcgttttccatctttttaatctgttgggtggtcctggtcggcgtttttcctatttattgttcgatatcctggccaaacaatcatctcgtgtgttgtcttttatagatgaaccctggtgagttttggagaggcgaacaccaaattgaccaggatttactttaacttctatacgaggatcaatctcgtcttcgtgctagtacgtcttcttcgagtgacggactatctaactcgagctttgaagattgggaagtgagtagtgatcgttctcctactacagaacccaaagtgcaacaccactttaactctgagcagatcgcaagagaagggtatggtcgcttcatttgagaattgaagaagggttggaggtgttatcttccatcgacctggacatatattgttcgatcaggtgttggtgatacccttcctattggaagtccaagttctggttacttcggcattccaatagctgtccctccaattagtgttgcatgacacacacatcagtatcctttcaggagaaggatgatggcccgcacaaagtagacgatgcagaaagtcaatgcgtttgaccctcacgtggcctagcttgccaggttgccaagtgccgagaaggatctgcccgctgtggaggaggaggatcacgaggggaaattaaggtccaagagatagaggaacaggacgatgtccgtcctgataacccttttaatgctaaggaggaaagagtggttgaacctctgaatttttgagggtataatgaggccggggagccagtatccacggagggtgacgtcttggtcgagggggatgactatgtcaccgaggagcttaccgaggccgttccccacaggaggcaaagtgctctatgggccagatgggtgtgccctctgtccaagataagcgaggcacgtatgagggccttagataaggctaggtacttgggcggacttgagtgttacgtaccctctttgaatcaccgggaaaccaacccaatgaaagagttttgtgcttggtcgggtgctcacactaag

SEQ ID NO: 224126 - DNA, 1763 bp, Cannabis indica
ttcggccccgagcagttcggtaatagcctactccccttgatttatattgacttaacaacaaagaatacaatgattcttctcttagagctcttacaatgaaatctctgagtatactctcttagataattctttcgacctcttgccaagtgagaatagatcactatttatagggctctgtgcttgagggaaggttttccttttgtttagaatgtctataattggtaagattacacattagatatatagagtacactgattgagggatttggacagcttgccatatctctttgatatgatcccagatttatagggatcgctcttatgctttatgatgcaaatgctagaatttctaagtgttggtatgctattcggattatccactggtcggctaggaggacttcgtctgtgtaggtatatgtggtattctgatcagaacatctatttcgggcaaatatggggaatcaattccacgtgtcaccaacatgtgatgccatgtcaaagtgcaaaaattaggataacatttgcctccaagtctgtacggaacatctagagttgcgtgtagactttatctgagctgcttttatacttgaatgggtgacacgtgtcgggtgcgtctgtccgggaatcaatgtgagtctgaccaggcgtctctttggtttttagctaattaatgttctgacttaattaatgcctctagacacggtttcctttgatgctttgatggttacacttgattgctttaatttcccaatatttgcttttggggggaaatcaaaacgtctgtggattttgaaatgattaccttttttcaccaaatttcctataaataaggctggaactccttcagaattttattttcaccattttctccacaaaataacatcagagcaaaaaaaggaactttctttaagtttgtcgtgggatttctagcagaggcattcgagcaacttcgtctagactacgtttaggcttcgaacagtgagtaagtcttcaatcttttcctcttttactttgtatctttaatttctgggtttccattactgaaaatgcaatggttcttgacttgttgtagaggatacatagaaaatctaagctcgaaactttgtagttttctctgcaatagttcgtacagctttgtcatcttgactttaatcttgcattgttctattttcaccttgctcattcgaagctcgtgaaatttaacccttaacccaaaaatttaaaactccttggttatgacttaatttttgtacgttttttgtccttttaatctgttgagtagtcctcattagcatatttccctgttattgtttgatatcccgcccaaacacttatctcgtgtgttgtcttttgtagatgaaccctagtgagttttggggaggcgaacaccgaattgacaaggatttgcttcaacttctgtatgaggatcaacctcatcttcgtgccagttcgtcctcttcaagttacgaactttctaactcgagctttaaagattggcaagtgagtagtgatcgttctcctactccaaaacctgaagtgcaacaccactcttactccaagcagatcgcatgagaagggtacgaccgcttcgtttgggagctgaagaagggttggagacgttatcttccgtccaactggacgtataatgatctggccaggtgttgctcatacccttcctattggccgtccaaattctagtaacttcggcatcccaatagctgtccctatcgttactgttgcaccacacacacatcagtatccgt

SEQ ID NO: 224127 - DNA, 2876 bp, Cannabis indica
aaaaagtggtcactttcttttttagagtgttctcatagtgctgtagagggaatagtttgttgttgggcaaagtcgtttgagacttgtctgggccttgagttgtccaacaaaatcctttgagaattgaagcctttacgcatatattctgcttggaaaaagtcaaccatagcttcacagaaattttaccccaaaatatgtcagcaagtagtattgaaaaaataactaacaaactattatggcaacgtacaaatcttaaatcaaatcaagtacactatattgagaaaatatctttataataagattatgtattcaatatgtatttgagttaatcttaaagttagcataaagcatgaagaaaataatgtgagagtgatagttcaacaacattgtgtttagaagagattttgcctacacatattatgtgagaaagaaaaatactcaataatctttaaataaataaatatattcaaaataatatcatttcaaacttttataaattatggtcaagtgaaaacttgataaatctttcaaactgtaaaagatttagcaagaataacatctagctagggagataggactaaattaccgaatagattaaccattaatgataaactagacaatgaatgcatatattaagtttaaaaggagaaaaaatgagatgttagaaaattaaaattatatcgatataaagacatatagatagatagatatacaaatttcttatccattgactaccttgaggcctcatacttagttcatctaattgtaacaaaataattaaatattatttaaaaatttattaaaagacgagaattttaatttgtgtaaaaagaagtttaatttttgtaaaaaaaaataaaatttaattgtaaatattattactaaatgactttattgttaaaataattagagtagggattgaaatataaataaaaaaattatttataaatattaattgctcaaagaggtcttgttaaatatttaattaattaatttaagaaaatagttaattataattaattaattctaaaaaaaaataatatttacctattagtaaccttctattacatgtcaaaaaaaatgtaatcataataattacaataaaaatataactattgaatagtcacctaaaataataatacagctaaagagccatgttatggaaaatggataacttttgtactcattgtaataggatttctcgtaaatttttaagctgtaactctttgagcattagtaagattgtttttttgttgtccatgatttagagagaaaagggagcatactaattgtaaaaagccctacttctgtatccaaaaatatctgaataagatagactcgtagactatacagagttaactgcaaaaacacataaaatccttgtgttattttttatttctatcatttttcttagatctcttataatttctgtgccaaatctattacgaaaataggctcataatcgttaacaaaaatttgcgttaacagtttggtactttcattgagagtctacgtgataaaagctcacaaaaatccctcctgaccgaagaaggaatttcatctccatggctgataatggggaaaacaacaactactgttttgaagagacaaatcgacgtcttggaaaagagccaatgggctcaagaaggccaccaaatctcgaacaattcgttcaacccgttcaacacgctcaagaagaagccaacgtgataattatcaaaacccaattctgggaatgagaaaatcaacactaatgttgatggttctactcctatgagtgagggtgcctacgatcccactaggtacgtaccgttggttgagttggaaaatcgtcaactctagcaacgcctggctgaggcaaaccaacaaaacgttgagttggaaagggaggcagccgcaaccaaggtaacacaagtaaacaacacgcagaaccaacctgatcctggagtgagaaggcaacgaggtaggcctcaaggttcatgaaccaagagacaggagacggctcaggaaaacccctagaacactcaggaggaagaacctcgagaaactggggatgttcttgaagatgaacaaccaaatgaccaggcacctcgttaggaagtgccttagagaccccggggattcacagcccaaggaaatgaaaataatgatttaccagagtcttctcgtagaaatgagaacaggaggtaaccccaaaccatgggccaagagatccctcctgttaacgagagaaatcctgggactcaacctgggacaggtgggttaccaccgagacaccgtcaacgtccttctcgcacttatatggaggaggagtatacacaccccagcaggggccctgtatcaaaccttttccaaaggagaaggcttgtacatgtcgaggcaagttctagctcaggacatacgagatctcaagatcacaattgatctacgcgaggagggaataggtctcgctgcaataataatcgagaaagtataagtcatacaaggagtagccaatttgagagaaactcaggtacaaggtcaacaagcaactacgatcgaagacgactggatgtttgtgagaaactgaatcgaaggaagcctaatttatgcaaagagctcaattccaatcaaaagcaataggatccaatccaattacgaatcagtgagttagaaaataaatacaagaaatactaagatgggaaaatgcttgattacgactccgatgaggagctcgaacctttccatccaaatattatgaccgctgaatttccccagagatttaaaagccctcacgtctcgtcatacaatgggactacggatctggtcgctcacctcaacaactttaatataataatgcaagccaggaatgtcacgaataacttacgctgtatttt

SEQ ID NO: 224128 - DNA, 5387 bp, Cannabis indica
acaacactttttctatgcatgccttaaatcccacttattattatgattatactaataagttatctaaaaccaaggccataattggaaaatagggttagatttgaaaggattgaattgaattgatgaaagaaagaaaacaaacaaagaaaaaaagatattttcataaaaatatgagacgattgtttttatgtttatttttacgttaatgttgcattatactatgttgttgcaatgtagaaacaatattatttttcgaaaaaatgtaaaaaaaaaaattaccattttgcgtactttgtaacaaagtaacaacttttggaaaacttactcttaatattaaaaatttattataatcaaatttaatttttttcatacagtttgtaaaacactcaatgccaccacaattcttcccacgctacaacaacaagcatgaaacccctaaagaagtcttcatcacaacacacaaagggctcatcaaagaaggaggcaaatggctaaccaagacatccgagtcttgttccctcgtggccgcgctcattgccacggttgcattcacaacttccacaactatacccggtggggtcaatcaggaaacaggcattcctatctttagaggagtgttcgcctttgatgccttctcaatctcatcattgctcgctctctgcttctcaatcacagccctagtattcttcctctcgatcctcacctctcgctatgatgagaaagatttcgcgatggacttgcctcgaaagcttctcttcggtttgacatcactctttgcttccatagcatccatgttggtttcattttgcgacggacatatctttattcttacacacaaattaaggtatgttgcgtttcctttgtacgcggctttgtgtttcccaattacttatttcgcttttgctcagctttctctctacttcgatctcatttgggctatcttcaaaaaggttcctcaacgtagtaacaaggcttttctacactaaaaccataagttggagaggtgttttgttgtgtgctaaagttggaattttgttgcaaattgtttgttatgagaattatgaatgatcaattttgtttctttgggggttataaacttttgttttggttttgtgcaataataataaatgtttttatatcaatgtcattaatgttaagagtattgttggtgcctagcaccttctcgatatgtcgtgttgcgattggctagcgatacttcttaaaagttattatattaaattatatgagactcgatacttagttggaccaatatcgatattaacacataggagagtgttagacaccactggtgtcctttaacatttctcttaatgtttactagggagacattcaaaagtatggtgtaccaacaaaattgttggtgttgccataaattatggtccaaagttgtttgttaattttgaagggagaaaaaaaattccttacatcttctgcattgaaaatcaattgtcggtgttaccattatttaaataataaaagaataaaaataaataaataataaaagaataaaaataataaattttgtatgtactcaataaattattaattaatcattaatataattaattatttttctcattttacatcttgtgcattggaaatcaattgtcaatagtgagtcaaatatagcacaaactcattttgagtgctaaatttagcacaaattttaaattttccattagagatggtcttaaataccaaccgggtgactactgtgtatacgtgtgtacacgtaaaagtaaaactttgaagtcaatacagtaataatctagttggtatttaaccacaatatccaactgacacattaaatttaaaaaaaaaaaaaataaacataagaaagttttataaaaaaaaataaataaaagaactaaatagtaaaaaatacaaaaataaaagatttcaccacaaataataaaaataattaaaattaaattcttgattattaactagtataaaaaattgacaacacactataatatttttattaaaaaattaataaaagaaaatatatttaagtcgaaattccattagtaaagttagaaaaattcttaagtaacttttaaccatctaaaaaattcaagacataatttaaaccctttgataaatttgagagaaaaattttaattagcctacatattacataagaaatgtagccataattatccaaaaacaataatataatataatttcctacaaaaaaaaaaccaaataaataaagtgcctaagcctgtaattttatatttatttctacaattaaaatttaaatctataaaattacactacattagcaaagtggctgaaatgaatcatggttgttaattaaaaaataattgaatgaaagaataaaggacaattaatcactttttttggagttcatcatgtacagctaagcttactataaaagagaaaaaagtaatcgaacatcaattgatcttggcaataagatgtgcagtgaaactgaactgcagctgcctgcattttgagccagaactcgaatcgaatgaaatgccattgtcgctaacaccatcaaagaaaagtctctgcacacctgaaccaaaggatagtttttcggtatcactccctttgaagagttttcgaacaggtcagttcgacagtttctgtacacccgaacgaaatgttgcaaggacagtggaacgcccttgctttatctaaaatataactctgtatggcccagaaaaaagaactggcacagaaacggatagagcagacgagcccaagtcttcgaggttccctttcgaacatgatagaagcaaaatctgcagcaagatgatgcagaaatccttctccttggctacttttagcaatttgaaatgatttcccgttgtatgaaaatcgaacttaaaaacaagacattcataaaccgggaaaactggctgtaaatcatctcaccagcattactaaacattggtttgttctgatcaaatttcggtatcagggagaagagttttctctcctacttatcgtcctggaaaggttccatagaaccccattttcttccgagtttcagtttgacttgcaaaggtactgaaaaagcaaacatgtgagacaaattgtaaatacatgtacacaaaaaggaaggaaaccatttatccaaaacgctaaacatataccgagaagcgaagtagcgttctccatgctcatctgtaacaataaagcagcttcggttattacagagggatccgcttccaaaactagctcgtcatgtacctgtaacaaaattcgacagcggccctttaacaagttaaacttgtctgcaaatgatgaaagtgaagccggcactactccatcgactattacacaataaatgtttatcatcgcgatcttaattatgtcagcagcagatccctacaaaagctatatgttagtataaagaatttctttatgatcttcataatcgaaaccattcaagaaaagaaaaagaattttagtttttacctgacaaatagaattcacagcttgtctctcagccttagatttttctttagaatttccaagctttatttttgacaagaaccgtttccttccttttatggtcttcacataactgaaatacaatttaacatatataataacagttgtttaaacaaagaatttaaataataatacagcattaaatttgtcactaaattgctcactgcaaaggatcacaagcagcccacatggagagtaaatagctaaagaaaaataaaaatgataataagaaatgttttgggaaattgtggcacaagtactcgaagtttgaatttgtaaccggtatatatcagatgatttcttttggcggcataagtatccaatgttagtaaaactttaatttccgtccagatttgcaagtacaaacactgttaatgtcataaacatgtcatgtaaagcctaaattctaaattattggggtctgggtggaaacaagtgtattagttacttaattaaattcaaaaactaagtttggttacaattttaagaagctaacggaatctatattgacaaaattagaaaaaagttacactataacaaaacattgagtacttatgccgctaaaaaaatattaatgagtctataccacttacaaactcaaaactttaaaactttcacatatatacgaacaagtatggcacaatggagaaaatgtcttaaactaaatccgaaaccatgaagtgaaaacaatgcagactataaactataacagataatagctaaactcagccaaccgaattagcctaataacagtaatgactaaagtgtatagaaaagttcaacaaagcgtcttaccctttctcacggcagtctacaaccacttcatgaagccaacgagcaactccaggaaaagatttcttaaagcttcgaattttttcaccagcttcagcaggactgcaaccgagttgctctgccagggtgttagcacccattccatagagaatgccatacaccaaccttttggtctgatctcgttcatcagaacctacagaatcttccggacacccagtccatcttgaagctattagggtgaagacatcaccactgggtttacttaaaagttctactagagcggaatctttagagaaatgagccatcatccgcagttctatctgggaataatcagctgttaaaagtaaccagttctcctgatacaatacaattaggacagaaaccactcgtcggtatcataaaatagaaatctcaccaaaatcgaaagacaataaatgtaacaataaatttatacctgagtaggaacaaagtaatcacgagcattgatttcgtaagaatctgcagcatcagcttcttttccctttttatccttgttgatttggaagaccaccatgtgctcaacgttctacataatatacaagtttatatttacaaaataataagtgaaaacactagagagagggagagagagtcctaacctggagattaggttcctccatcgaaagccgaccagttgcagttgacgtttgaagccaatgaccatgtaaagtgtgtttgtgtgtcccaaccgagagcttagcaagcgagcaaattgatcccaatgtacagtttaaaagctttgccaatgtccgatgctcttttataactggaacaataggatgctcgtgcctgaaacacagcatgtacggcatgaaacatatacaacaacaataaaggaaaattaagaaacagttcatgaatataatgaaactatactttattttacaaagtcaaattctttaacacagctttcgaaaccttcttcttaaaaacaccaataagaaataagaattccggtagatttcatgcaaggacatttatgcatcttaattcgcatgtatcttttccttataagaaaggcttactaatatgacaagggacaa

SEQ ID NO: 224129 - DNA, 2261 bp, Cannabis indica
tttagggcacaaagcccaacaagcaaggagctcagcaaagctcccagagcaagagatcttctaaaggtagcacgcggactgagaacaaaaggcaacgaagggggtatgcccacaatacacactgtacactgagctcacagattctcaagagcgtgtgtactttgccacccaaaaaatacgcattatcagaagcctgcatccttgtatagggatagctcttggatagactccaacaaaagatgcgactatctcaatgacatcgattacaccacaaagaagtgtaaaaacctaaaggatgagattgaaaatctaatctgattaggtcacttgtacgagtggatcaaaaataggttaccacatttaaacctagcctaggcgggaggccctttaccttagggaggaactgggggtacgctcgagggtcaggtacatcccggagaggtgctccctcagtagacgcccggaatgccaccccggccaaatgagaaagttgccatgatctttggcgtgcctcatattggaggaaccaccaggaacgagttaaagcactacgatggagctctaaagcatgacgaagaggtatgagaggtcactcagctcccagctaagaggcttaggctcatggatcggcccattactttcacagaggaagacgcaaagccaatatgtttccctcaccatgacccccttgtcatagagactcccatcgccaataaagttgttgctaggatattggtggataatggaagctccatgaatttgctttttaaagatgcttttacgaccatcgggctcactgacagggacattttgcccatcggttcataactcacgaggtttaatgatataactctcatcccgatgggagaagtgagactcctcgtcaccttgtgtcctgacaccccacaaagaaccttcaaatattgcacctttgtggtggtggactgccccaccgcctacaacgccatccttggcaggccgaccctagttgactttggagcaattacctccattcgacacttgtgccttaaattccctactcaggaggtaggagtaggaacagtgagggggggccatggaaaaacaagaccatgttacaaccctgcagtacatttgtcagttctggtggtgcgagggggcgaagagccggtggcagcagaacaggacaaattagctccccgtattggatccaagataattttagaacctatggaggatgtcgaggaagtaagtgtgtgcaacctcgacccatccaaaattatctgcctaggaaaaaatctagagccggaggagcagagtaagatcatagacacgttaaaggcagctacagatgtcttaggatggtactagggggatatgaccggaataagctcccatgtaatcgtccatgtcttgaacatcaacccagatatgcctctagtacaacaaaagggacgcccgcttgacccagtaatggcttacgccacctcgggtttcaagttgctatcctttatggatgccttttggtgaaatctattgtaaccgaatccccgacaaacttagacaagtgatcaaactccagtgtatattcagtcattgtcttatcaccttgaactaattttatgaaatcctccatctaaattgtacgtatggcaatgttatagaacttttcttcaaacacgttcttaaattcttccaaggtcaccatacggaggtctcgagactaacctactaaatcccaccaggtgtgggcatgcttttgaaacatgaaaatagcacaattaacctgctgagtcctggttatgcctatattatccaaaatacgagtaatagtactcatccactgttctacctttataatattagtgccacccaaaaatgtcgaaggttgcagcttgacaaactactcgaaaaattgaatctcagtgtggttgcaaggccaatccagggttggctaccacgggagtaggagctagaggaatcacttgctctactgtagctgcctaaactgattgcctaatctggtgcaactctttttcttgacgaagtataatacctcgcatttcagtaaacattcactgccagtcggcaagaggattgacattttttaccctcacagtattctcataaatttacgggggagctggcagtaccggtggattggttgggttatcaccccgctcaacagactcaccctatgatctagttggtttttcagggttcattctttcaaataatcctaaaatcaataatcccagcgtgttaggcaccaatttcacact

SEQ ID NO: 224130 - DNA, 1059 bp, Cannabis indica
aacatggccattcaacacccatcacttgtaaattttcactaagataagactgagtaaccaccaccctattccaatatatagggcttcattcaaagcaaagagagaggcaatttgatacaaaaactatgccaaaattttaaacacaaccgaaactcgaaaataatattgactcgtggagtatgtagtgttgacctcaaaaagtggccaaccggtagtggagttgtattaacactgatgcttgccatgtgtttcacaattagaactaaaaagtaaaagaacacaatgatttttatagaggtttgacctccttagttagtgggtaatgacctatttcccgtttagttgtattgataccgagagataatactattcaaatcactataggtgggatctgatatagctttcttagaggttacaaagtatgaaccagtaggtagatctctaaagatagagagatgaatccttggaggcgtgtgagagagaaatgtggagtatcctttgggcgtgcataagagatacagagatagagagagaacgagggttttaaacttagaactttatggcctaaatgaatcatagagtaacttagcctttctagaattgagttaaggctctttatatatgagagcataaaccctaagtagtagataaaagaattgatatttacatattaaattaataaatacaaatgatcaaatttccccttaaaagtagatattttcgtagtatcttagtgggctgtcaacgcccaactcgtagcttggcttactgtccacagatgaaggttgtgcatcaatagggagaagctggtcatccatacacctacaagatgacgtctggccggcacatgctcctaccaggatctggcaggtcctgttcctgctagggtctggtaggtcatgttcctgcctgggtttgggaggttatgctcttgtcagctttactaagaggaggccagccttaggatgtggaggccaggtttgtacaccttttctttgcagaggttaggctccattagtcgaacggaagctccctcggtctaaaagtcaccttttggcc

SEQ ID NO: 224131 - DNA, 2089 bp, Cannabis indica
aaacatatcataataaattaattgcaaaaatgaatgtaaaaacttcattgtaaactataaaagatacacatgctttcaatatacaacctcacacctatagaaattatcaaatccaaaattttgggtctgccaattggcgattagcaacaaaacaatggctggctagcttctaaatttttattaagaaatttatagaattaaataggaatttctagctatttgagggatataagtagatgaaaagaggttagtagggttgtgaattttttttgtcattgtaggaattcattagaattcattgggaggcttaagggatcctcaaatttccccttctatcttgtattttctgtgtttgagtatcagtagagaagacttaatagccaatttcagatctgagttcctatcaatttcatgttcaattgagcaaaaagaaccaaacaataagacataatacaacaagtagaacatctatatttaaattatgaaggatttatattagttgtaaaagtttcacatgtccaatttctcaaaagtgaaattggatgtatcatctcaaatcataattgtaatatagaaaccactgagcagtaaataaacttgaaacaaatgtcagaattagacaagcacaagcctttactggcagaatatgacgtgataaggacttatataaaacaaaacatagcacaacacaacaaatggagccattgatagaatttgggaaaaagagctatcaaaatcccataaacaacgaagaattagaaaaatgcatcatgaattcacactgtgttatgtaagattccatcaataactcacccggcaaataaaccaatgaagactatccaactagctattgagaaagtgccaccaagttctgttttccactttttaacaccttcggatcaccctacacgccaaaggaagctaatttaaaccattaactctggactcaacaaaaaacacaaaattatcactttgtgaaacagagattcagaggttaaaaaaaatgttgaaagtggaatttttgtgaggttttaaacccatccaacctttataatatccagaactaagaaatcagatgaggagcaaatacaagaacaaagaaagaacacaaccagcttttacttggttcagactggatgtgcaatactatatccaaggcagaaaaatcactttcttgtcaattcaatacacaagaagaattttttacaattgattttcatcagagaaggttgatgaattttctctagtttttcaagaaacaaacacatcccaatgatcccaattacaaccacatgaactttccccataaagattctatcaccctaagatcacttacaagaaccttctagttctcagttttcatctgtcactaaatcaaaagtgattgtatatatagataaaggagaggaactcttcgcaacggtaaaataatgcgaatctcaaacttctatcatttaataacctatcaacttgtaactaaaattcatatttattagttcccagcaaataacaatgtttgtcatatatggaaaaactaatgtaaccataaactacgtaatagttgaaaaatgagaagactttttttttagaattagtaactttcatacagataaaataattagaagtacaacagttaaataatgtggagattatagcaacttatctagtcctagtaccttttctttgctaatttatgagctaaaagattagcttgtcttgaaacataagcaagaatgagactaaggaaagaagctctaatctcgctaacaatatccttaggatgaggcattatttagaccacaatcacctaatagctacttcagcatatgaaattggtaaagagattaacaaacaccacttgagaatgcaacaaattttggccttcagcagcggtgatgaaataaaattccatgaacaaggcaccactagtcagcaagcactcgtccttccttgtttcttactactactccaaaatcaatcttattccttttttaatcaatggcagcaacaacatcgactgtaagcattaaacaacctataagaggaagtctttcacaccagtaaatcttctaaccgaaatgacgatctt

SEQ ID NO: 224132 - DNA, 1864 bp, Cannabis indica
caagcaagtgagggcaagaaattatttgtgggagatatggtccttagaagagtgttcttaaatacaaaagacagcacgactggcgtattcagacctaattgggaaggaccatatcaagtaatagaagtcatagaatctggagcatacaaacttggtgagtataatgaaaacatggaacatgttctagtaccaaggttatataactgggaacatttaagaaaatactaccaataagtgtacaaggtctgatgacccatttaaagtacataatgctcaaacatctactcttaagtagatggccttctgagcagacctcgctcaaaggtttggataaaatgagtggcacgcaggttagatgaccatctctaaagtacaatttagaaaaaaaaaacaattgttttatgttttaattagctaaagatcagttagattatgtaatagcttttataatttaataaatgtacgttactacggtaacaaaaacattcagaccaatatatgaataaagatattaattatcattctaattgtgtctagtattttcatttatatagcaagttatgaaattaccattaaaaatgtgtacaaaggatctgctcaaacctagtagccaaatagacaaaatcaaacatgtgcaatgcaagtgaccaagaatcataagtctgcttggtcactcgggggaaactacacccgtacaaagcataggtaaataacaagctcaaaaaacaaaaacatttgcatgtgcaactatttaaacttaagagacaatattcattttgaaatataacaaagcatgataactctgggattaaaagctgtctggctagctagttgtcttgaaacaaaaggaagtattaccaagtttaaaagccgcttggtcaactatattgtacaggaaaaaggcccatgggccgaactggaaaaaaataagaaaaataaacttcaaaaactaggttggctggtcacaggtatcggcagtggctaggttggctggtcggggttggctgcctcgaattcttctttgtctttttgacgctcacaaaaactaagatatgcatctttgttttcattgaggtaatcaaagttttcttctgagctcgccttccaaaattcatagtttacatccagggcggccatctacaagctatccacctccttcttaagcacctctcgctctgcctgctgagagttgagactctcctccaaaatattcttctccttggttaaattggaaagaagggtctgaaggctctccctctcatccttcaaagagttgacgtccttggtagagcctcattgtccgcttcaagctgagcggtggacagcatatccttaatctcctgctacagttcctcaacaagcttgttagcaggcagaagttgcttattaacctcacccaggttcagactcttctcctcggcctcctttttggcttctgtaatatctgctttcttgggtaattaattttctttatacttttagtttattttgtttgccaatggggataattaatcatttcgaatatttattagtttagtggtgtatgagatttttttttctagtgacaataaaatttattattttattattattattattattttattttgaggatatgtatagtgttagataaataattaaactattggagataatttaatatttaattatttatgaatattattataggtatattaataataatatgggtaaatatattacagcttattgtttagtttattattattattactgttattattattattattagtaatattattattattatataagtattatattagcaaactagtaaactaatatatatacgagacatgttatatatatatattttttaaaa

SEQ ID NO: 224133 - DNA, 3481 bp, Cannabis indica
aaaattgaggattccgctatccacctacccggaatgaaagccgattggactggactgatcagagtctccatcaaagggcgcaatctattggagagtatcttcgcaattaccttgtaaatgaaattgcaaaggctaatgggtctgaattgatccattctaatagagtgctccatctttggaattaggcatatgaaactgtaattaagtttcggatttaaaacaccagtgtgaaagaaatccacaattgctgaattgacgccatctgcaactacatcccaatttcttctgaagaaacatccagagaatccatcgggcccaggagctttaagaggatgcaattcgaaaactgctttggtaatttcttctgctgatggaatatccgctatcattgcattagagctgtgatcaatcttcttatcaaaaaggctctctaaatcatctgaaataattgggttctgcgatttgaagatgtctagaaaatagttgtttatgatcctttacaatcccaccttgtttggctcaataaacagatgacaagaatagatgtaggggagaaacaagggtaaataccattttagaccctgtgttttgcaaaagttaccaattggaccatctgttttgttaaataacaaaatggaccctctattttctaaaatagtacaaataggaccctgaactgattttttatcaaaataaaacttaataataaaccgatctaaaggtgttatgacaaaactgtttacattttctgtatctgttcgtgttaggttttgtcttcaaattggttatattaaaaaaaatgtcaaaaattaaggtcaggatcctatttttaccattttgaaaaatacagggtccattttggtcatttaacaaaacagagggtccaattggtaactcttgcaaaatacaaggtttaaaatggtatttacccgagaaacaatgttgagcatattcaaacaatgcataaatttgtccctagtggcactcttagtaaaattatcagcaaggttatcgcgaatgctaatctcttctcaacttgaatctgttttgatgataaaatgtctcttatgaaatgtagcttgatattaatgtgctttgacctttcatgaaatattgaatttttcatgaaatgcaaggttgtttgattgtcacaataaactatgttgtcctcatacctaaagtctaacacttcttttaaccacatggcttccttgatgacttctgtagcagccatgtgtttagcttcaattaatgacaaggctactactttctgaaaattagattttcaacttacataacctccaaaagcagtaaacatatagcatgttaggcttcttctggtatctaaattttcagcaaaatttgaatctaggtaaccaattacttcttccttcaactggttctccttactgaatacaatgccattatttaaggttccctttaggtacctcattgcccattttagtatttcctagtgttcagagtcaaggtctaaaatgtacatgtttaccacagtcatagcatgagctatgtcatgtcttaaacataccatggagcacataagactcccaacacaactagcatagggaactttgcttatcttggctctatctgcatcttcgcttagtgattgagtttctaacagcttaaaatgttgagcaagaggagttgcagctggtttgcatttgatcatgccaaatttatccagtacttttagtaagtatgatgcttgagaaattattatcacaccaggcttgggtctctttatgtctatcccaaaaatacttttagctttgccctaatctttcattttaaacgcatcactgactttgctattgagtttgacaatctctgatctttctttgctaaggatcaaaatgtcatcaacataaagtagcttataagtttgatgaccgaaatacatatgaatcatacttgcttttaatgtattcactgcttaacacataggaatcaaaccttaaatttcattgtctaggtgcctgtttaaggccatataagaatttcttaagtaaacatatacctcatatggatccccatgtaagaaagcatttcttacatccatttggttgatttcaaattttaaactagttgccttagccatcatagctctgattgatgcttgcttcaccactacagtagagaaatctcattgtagtctataccctccttttgagtaagcccttaacagccagtcttgccttgactctagttggttcattttcttatatgccttatatttgaaaatccatttgcatttcgctttcttcactatcacctaggttttgttcctcttccaagattgcatttcttcttgaatagcctacaatcatgttgttgcatccttgcttctcatagcttcctgataacctttaaggtttgagctatcaatttcttctgcaaccataagtataaaagcaataaattcagcatacccaaatttgattagggctcttactttgtctcctgtttctgtctctagctaattaatagctacccagctcatgttgatagatatatactatgtcggatggccatctactcaaaagaaataaattcagcatagccatctgttatgtctgtaatcccatattttttggacttgtgatgatttttccttctcagtttagccttcaaggccaaagactcacttctaaaatggtcgtccttcttgcaatagtaacatttctttcttgtagttccattttaacttgatcctccattggagcttcttgaatttgaccttggatggttacccttgtaaccattagagttttgattccctttgtattccctctttggaaattttcctttaacaattagtaatccttctccactgttttctcctttctcatctcctttcttttgaattttttttgaactcaatgcaaccttcacctctgtcatggcaactcaacaagattatggcggcctagtctttcataatttatattcactccaagataattcaaatcaagaatgattttattgtaatcatcaagatgcttccttagttccttttactcatccattcgaagtgtatatagcttcttcttaagatacattttattaactagagatttcttcatgtaaattgaggccagtttgttccaaaatcctaaagccttttttttatcagagatttctcttaacacctcatcaccaaaactgagaagaatggcactatttgctttggcctcaatctcaattttcctcttcttatctttgatcaatttcatggctacttcatcaagaccctcatagatcccttggtaaaatgggaatgcttttatctttattctctatagactgaaatcatttgatccaatgaatttgtccacctcaaactatattgttaccattttattcttgttcttgattgttcgagtttgtttcttaattggttgaatgcgattcctgaaaaactcttctcaattcaccttttctctgatacaatttgcat

SEQ ID NO: 224134 - DNA, 1134 bp, Cannabis indica
atggaaacatatttttatataataccaagatgaataataatatataccataatggaatattttaatttatgattgcatactaggagtcaatatcatatttttattgttatactaaatatgtatactttttagtacataaataaatttatataatgcattcaaaaatattattacttaactacttcttggtatatatgtcacccaaaattttatatactttttgtatctatactactacaaatataagaattcgcgacggccctaaaaacgatttttttcggggaccgtcgctacaaaagtttaagtaactatttaaaatcctcgggaaaaatttagtattcccgacggtttaaaaccgtcccctataccctgtcataggcgacgatattaaaccgccgaaaagtccacattagcgacggttttaaaccgtcgcttattttgcccgttttacgacggtcgtataggcgacagttatagaaaccgataagaatactttaaacgactgtttaaaaatatcgagaaaaaccatttttatagtagtgttagtatataaatttaattgtataactacttgttggtatataattattatatttgtatataaattcaactatatactatctacttgttggtatttaattttttctaaaataactactagttagtatgtatttcacccaatttagtatatgaacaaaataaataataattacatatattttcaataaaaaatgcttaatatttggtcaattttatatattttttttttgagtgcaatttatgctaatcatgaattgaatgagttacatgttcctaccaaattaaaggtaatagcttatcttgataatacattttatactttatggtattcacttgacatgtttcctaataagcatccttgtgatttagatatttggtttgttttgaccaattaaatttgatctttgttctactatttttaattacgagacctatttataaagccacaagatgtgattgagacgagtaagtataaatttgatgagaatgtcagttacaaatatgaaagattaggtatatacataataaagtttatcattatgttataatattttttttaagatatttttaaaattaagtgcatattgttgtata

SEQ ID NO: 224135 - DNA, 2483 bp, Cannabis indica
gggttgctaatatggttgttttatgagataaaattgttgcaagggtttctagtatgattgttgtaagggttgcttaaatgattgcagtatgagattaatgaattattatttactctatggattgctaaaattattgttatatgagattgattataaattgtctatataggatttgctatagtgcacgttaagcatcaaactacaaaaaataataaataatcctatacaattaaaggaaacatgatcaataataattattctatttattttaccaaaggagctttgaggtttgctagaataggcttgatcacaaaattgattttataaaattttatactaatatatattacgcttaaggcttccggcaatacatattattcttagaaatttcattcaaaagatgacgatttaaagaattccaagcaaagaacctttgttttcatatgcttcaaaattttaaatactagtgttttatatggatcccgatcctgtacgtttacgcttcaattaatgaaatcgtacaacatataacatacagtactagtttcctaagttgtattagatgtattgtattttattatatggaattagattatatattatattttttatataatattacattacatcttaatttatattaaaatattatatatttaagtgtctataaaattaatatcaaatataattttcataaaaatattatataaaatataatttaatataatattatacaatacaatacccaataaactcataattagtgaacttccctgttaaatggagccaaattttttctctcaaatttttcatgtccctctatcccaagtcataaaaatgctacactcaattaagaagttatctccatttaagagccaatatatatatatatatatatatatataaaggagaagaataagacgctgatgtggcactctaaaattagtttacataagtttatgtattctctccttaatttttttattttttatatttttataatataaaatattacacttactctaattttttatttttattttaaaaattctactaaaaaaaatcactcctaaaaccttataaaatcaatacggctaaacatttttttaaaacaatttatactagaaaatactttcaattttctaaacattcctcatatttttggaaatctatttttattaatgtagattattttcctttttgttttttttttaatagattgagatcacactcacaataaaacacaagaagccaataaatttgaaaagtggtaaggtaattaattgatttttcttatatatttatttattctcatatgcgctttcataaaagctttttagtatttttagttttttttttatttttatttttaggagaattatcctatatacttgtttttttaattttttttcttcaaatttacggtttgggtttttaaagtggttgcagcgctagttgcaataggagtttctatacgattttttgttgcgatttaagttgcagcgctagttccaataagagtttctatgtagaattccgtaaaaaatacacacaaaaaaaatattcaaaagtgtaaaaatgaaaaaagctcttatttttatttgttggtggacatattacaaaaatatttcttactatttgtattatttaaaagatttgtatatacttagtttatcttctatattaataacaatagatacctcactattaaatggtagtttaaaatgttttaagagaataaatacaaaacaaagattatataaattaaaagtgtctaccatattataataacattttaatgaggtttgccataaaaaatttaaaatttttttaatagtcaatataaataatagaaagattatgaatgaatttatgcgagtacatggattaaaaatgtttaatatgtagaataacacatcataaggtattgtattgtattgtattgtctattagtaatatatattttaaaaaatttggatcattatgaaaatttaaaaaactttaaacaattattctaataaattaattttaattcctattctttattcttttttaaaaaaataattacttacaacaataggccatcttaattttatttttgatttttttaataaaataatcattacttctttaaatatacttttacctatgattaaaaaaaataagaacaattttaatatatatatatatatatatatatatatttaacttttatctactattactttatttctttcaatatactctaaataagcttgttttattaatgcttaattaatcagttgttttgtatttctttatgcatgtattgtgtttaaatacctagtgttttcaaaaaagcttgtttttttaggtaaaaatacttgttattattaaacaaataattattcgtttacaataacagaagggaaatttacactccatactatattttccccatttatttcaattatactgtgatacggccgtaatttcttttttac

SEQ ID NO: 224136 - DNA, 1780 bp, Cannabis indica
caacataattctcatgatcccattataactaattctcatgatacccataataaaaccgtacaaaaaatataacttatttaatatgtatttacaattttattaacgtttaggaagataaaattaatattttaatatattttttttatttcatgtgttaaatatatattaaattaattaatatatatttttttaaataaaatctattaaatatataaaattataaatagtattttaaaaatataaaaataactggatcggtttggttcggttatccattagatcatatgtcacatctaacaaccgatctgatctaattgaattttcaaaatttacacccgatccgatctaactatgattagatatttgattctattagatcgattgaaattgaatcggtcgattgtaattagattagatatctttcaaaacatgatctaatatacatatataatgtatgtatacatatataatatatgtacatcactatttaatacatatataatatacatatatcgacaattcactaacggatagattttcgatttctttgaaaaaaaaaattaatttaaatttaatatttggtagaaataaattaattaagaaattattgtggggacaaattggaattacaaaaagtaatttaatcttctctaagttgacgaagcttaaattgtgttaccaatcctcgtacacacaatacaccaaaacaatttttttcttaaaaataaaagatttccaattcaattttgagtaaatactatttataattatgtgttttgtaaaaataatcaacctctttgttttgttatataataaattagacattgtattttttaaaatgataaaaattaattttttgagcttaattttttttaatataattaatctgaagataattctagcacaaacatatgcaaaaggtataactagtctattcataataattataggttaagttattattaagtttattttaatgaaatgatagtttaagagtattattttgtaccattttaaaaaatatagagtctgaattgtcaattaataataataaaaaaagattcagtcaataatttttgtaatataaggtttaaaatagtattactctttatttttattgccctacctacccaattagactaattaaaatttttttcttctaaattgtaacatgtatcacatcatacttaacttttcaagtaaaacgtaaaattcacaataattcttcaattgtgtttttgtagacttattatattaattgttgaaaacagaaaaggacaaattgaacatgcctacattaaattatataataaaatttttccaaaaaaaagcatataataaaagaaatgtaattatttgttgtggaagatatccatgtgcatatgatggtggatagaggtgaggtcaattccattcaattattataatgtaattgtaggagcaatgtggtaatgtgagtgccaattaatattctctataaaattacaaaagtgaagttgtttggagtggtgtactaataagtaataagatattaagtgtcacaatagactagacaaaatcatcaaatactttaattattttcaatgtagctaccaaccatagattcccaagtgtttccaacaaccttaacttaaatataattaaatatttggggcttatctagaaataaacaaagaatataaaaataatgtagtcaatataaggagagttggatgggttgaaattagtttagggtaaatactattttgaaccctgtgtgttgcaaaagttactaattgga

SEQ ID NO: 224137 - DNA, 1558 bp, Cannabis indica
aaattcaaatcgcgaccgaccgcaaagatttcaaactgcattttttttgcggtgcggacggtttgagcggtttgatgaacacccctactcttatttcttaaaataactttaatatatatcttaatttttagctacaacaactttttagcttcaattttttattaacaaataataaatagcatcaatgctacaacataacattcatgcaaattaatttctagaatgacatctttttctaatggtgtagtatcttaatattttgtcacataatatgtccacttcactaaacattctctaaagttttatcattggagatgttattagaatacttctcaaaattaattatattattatatatataaaatactcattttttgttttgttattattgtagggaaattttcaatcatttaagcagagaacagttattttgatggatgggctagattggtctctcttatttgttagagctttctattcatttctagagtctgattgttaagttttgatctcagctttttctaagcgtttcgtttgatgtaatgatttggacactttcttagctgatttggctagtttactttccagttttcctgaggcattcctagttcatgtctccgttcataattagttgtgcatgcacttaggatggattgtgaatgagcttagtttgatagtttttatcatttgctattgatgtattaaactttgattattgttaataagagtttaatttattttttttttttaaaaaaaaaacattactcttttgtgatattactcttagctagagtgtgtaaatttcgattataacatttgagtgtcatatttgaaatgatgacataaaaaatggtgtggtgttataacacatttatatagtttgtttgaattactaatcacataccttagtttaattaacagtattttgcaacgtaaatattttaatttaactcctactattaaataaatatataagtttaattttttatagttatatttttttaacttccgtaggttatcaatcgttaagtgtctaagttattatccagatgtcattttcttattgatatatttaaattaaatttttaataaaatttaaaatatttaacaatttagactaattagggactgtcacataaatattgacttgacacttaatgaccaagtatctacggaagttttaaaaatataacttaaatattattaccgtaaaaaattaaactaagatatttatttgtaactgggagttaaactttcctatttaactacaaattactctttaattaaactaaacatacatattttaattaccaattttcaactttataagtggctaacaatttctaaatgttatacattgtgaggaattgaaacaaagcttatgaattccttggaatgtaatttttctaaatgtattattaaatatgaaaccataatgtgtaatgtttaggtggtgtttggtaacatctttttaattaattttctgtttttaaaattgaaaaaatgaaaatatttttcaaaaacatgttatataaaactatttttactttttaatttt

SEQ ID NO: 224138 - DNA, 1343 bp, Cannabis indica
ttaagtgtcatgaaaaaaagaaatatttaagtatcatgatgaaaatcaacttagatatttaatttttcaatttaattaaatgtattaaattgaagaaacaaataattaaatagagggctcatgcaaggtcacactaatactttgcatcatgatcaggaagaactccgtgctgcaatgaaccttgcgtttaaagagcagaggcgtcaattcattgaatggagggatagggaaatcgaaacattgaaggctcagcaagcagccatcgatgatcgaacaagacaggccaccaaactgatatggaaagcctaccaagttgctaattagcaaccaactactacgtccaatgtaacgccctgaacctcagggacgccacgtgtgtgcttttaaaaacttatttcttactaatatattagtttagaaaaagtgtagtttaattaaaatttgataatttaaaacatacatataaaatttctttttaaaataccactaaagtatggggaccccctgtttataaaatttccttataacgaattgcaaaattgatattacaaaagtaaagttacacttttacacataaagaaaagaagtcgatcctgcttcccgaaagccaagacaccacaactgatatgtacattgccggtagacctctgattcatggttgaacatagctaactttctacctgcaccacgaagcacccgtgagtcacaaggactcagcaagaaaaattattaaatcaaaagcattgtaaacgcagatattcacatctcaatataacatatatattggcgattcacgcaagtccatcatacacatcaatatggttttaacatttatacaattacctatatgttacgcaataagaaaaccacaacatcttagtcaacatcttcatcattatactaattgaatatttaatcaatactttacaatacattcttagtgcttcataaagcactccaatcttacattcctatgaacacttactcttacttcccgtgagtcattgaggctttgtaaggaaagtgactaatttcataaggaatataacattcattcagtctcactataacaatatatattcaatcacagctcatcacataataacacgcttaattcatttcacaacatcgtaaccacacaatcccggtacttcataaagtacccttaccactcgttaaccacgagctacgtatgtcactatcgttgcccgataaatcaaatgataagtaaaaaacctatcagcagttttaggagtactactgataaccgtaatgaccatttccaatcatcaccactcgttatccacgagctgcctattgttggaagttattttaccaggatc

SEQ ID NO: 224139 - DNA, 2281 bp, Cannabis indica
tgggtctaagtccttggttctgatcctgttctggcatcgagtttgggtccgggtttgggtctagctttgggttcgattctaggtgtgggtttgagttcgggtccctagttcgagtccaatttttgattcggtttcgggttcagtttttgtccttgttcgtgtctaggttcctgtcctagtttgggttcgaggtatgttttgggtccgggtctggagccaacgtcgaattcccaggtccaggtcagatcctggttggggttcggtctcgaatttttatttttgtttgggttctcgggcgtaggtccgtggtctaggtcccctatctatgtccggttcctaggtcctagtctgggttaaggtttgggtttgggtcccgagtcttggtttgagtccaggtcctagtccgggtttttgtccaggtttcggtcccagtcttcggccggcttcgggtttcggtccccagtcttggtttgagtccaggttctagtccggtttttgtccaggtttcgatccaagtcttcggccgggctcgggttcggttccttgttaataactggatgctggtttgggtcccagtgagggtttaggaccacgccaggtcaatgtccggatccaggttcgggtcccaggtctctggtcccgatcctagtcaatgtctcagtccaggttcttgtctgagtttgggttatggtttgggttcggttttggtctcaggtttgggtcctaatcacagttccaattctaattcttggtcttgcatggactccgagtcagggtcagagtccaggttggggttggcgtctgagtcttagtctgagtccgggtacaggtttttcgaatcccggactgggtctaagtctgaataaagctcccatgatcgggtctaggtcttcgtctgggtctgggtccgagtctaggtcccatgtttcgatccttgtttgggtctgggttagtatttggtttcgggtttgggttcgtgtccatgttcaggtccgaatcccagtctcggtcaggggcttattctcagtcttggatcgagtcccatgttcaggttggggttcgggttcaagcctcagtcctagtgtggatccgggaccggactaggttcgagctcaagtttcagggcttggttatggtctagttcgggttcaaatcctgagttccaatctaggtcagggtttcgaggccaaggtctaggtcccccatcaaggtctgggtcctagatcccagtctaggtccatgttcgggtttgggtcctagtccaagtttcgattttgattcagtgtctaggttcgggttttggtctgagtttgggttgcggtctgattcctagtttgagtctcggtccgggtctgggtctaagtccaaatctcaatatggtctgggttcaggtctaggtccgagtttgggtcccgagtgctggtccatgtttgggcatgggtcagggtctcggtcaagatctaggtcctgagttccgatcccggtctgggtccagatctgggttcgagtccaagttgtatctgaatccctatgtaggtccgagtctgggtctgggaccaggtcccagctctaggtcaaggtccgggtttgggtccggatcttggtcccagtctgggtacatgaccgtgtctcggcccgatttccggtctcggttgggtcttggggtaggtccgagttcgtttataggtttgggtccgggtcctagtcacactcctagtcttgttcgagggtcctggtttgtcggttcttgttcaagttcaagcttcaggttctaggtttaggtcagggtccgagtttgggtcatggtctgagtctcagatctagatccctatcacgtatcccggtctggttttggtttaggtcctgggtcccaggtccgagtttggttttggggccttgattggggtgcgattctaggtcccgaccccagttctgtgacttgagtctggttccatgtttgggtctgagttcgggtcccgagtcaaggtttgggttgggatccgagttcaggtcctggttggggtctaggtctgggttggagtccgggtcctggcccgtttacagttctgggtctaggtccaggttcgggtacagttcatggtctatgtccaagtcttggttccggtcgcattctcgggtcctagtcttcttccagtttctgttctaatttcgggtcacaaggtacgggtttaggtccaagtttgggtctgggactgggttcgggtccgagtctgggttcgggtcctggtctgagtttaggtacggggctgggtcccaaatc

SEQ ID NO: 224140 - DNA, 1669 bp, Cannabis indica
aatcattcaaaatgatttttttaagatctaaattaaattttaagatttactaaaaaaaaatattgaattttcctcgattttattttgaaggggtacgatttaatagttgtcaaagtttaggggataaaattgttaatttacaaagatacatcagcatttaaacgaaataataagaatgaacctaaaagaatgactaaatttttgtaaatgtaaaaatttaacatgaattcttaacaaatcgtatattttaggggtcagaatcaatattgtcgaaagttcaaggggtaaaagtactaattatttttaatattatattttgcttaaattttataattatattccaatgcataaggtgtctattgacactcaaaagtcaacaatttttttattgaaactatataaaataattatttaaatgaataataaaatattaaaacacttttaattaataaaatctattaattagtagcaaatgagtaaataaaaaatgtaatattaattatggtggaaatttagctcatgttatattttatgctaaattttattagagctttatttttttattttaaatttttttgacgtggtgaactgaatcatacatgaattaacgatgcaacaattcacaattggtggtagaacctcctcgaaccaggatagctcatcgtctaactgaagagcatgcttttccaaaccatgagctggataattcttattgcaagctacttgtgacaaaactatctccaaaaatttagaacataaagttataacatctttaaatagcaccaccagctcattaaagaacacccttccattattggtagctatcaccaaagtttcagcttgtaatattgagtactacttgaaaaaccaaaaaaacaacacaaaaaaataacaggcattagaaaaggctatatttgaattaaaattaataggatggaaatcgaatttaaacacttaactgaatgaataattagtatttttaccccctaaactttcgacaatattaattttgtcccctaaaatatacagcttgttaagaacaacttttacatttacagaaatttggtccttctgttaggttccatcctattatttcgtttaaatactcatgtatctttgtaaattagcaattttacttcctaaactttgacaactattaaatcgtaccccctcaaaataaaaataagaaaaattcaatatttttttaaataaatcttaaaaaattaatttaaatcttaaaacaaaattattatgaatgattaagaaaattaaaaaagacattaaaattttaaaactaattaagagatttaaaaaaattatttattttttattaaaaattccatttagatatagaaaaaatatataataaaaatttattttttgtaaaaagtaaattttaggggaacaagtttgagtttatttttctctctccaaaaatatagatttgtttaagtaaacataatattcttttaagtttaattttttttaattggattttaaattatttttctttatttttttttaagtatattagtttataaatataaataagtttgatttttcttcataaaatcttaatttgtctaaactatatattagattttcaataattttggtattattttttttaagatacgtgtttataaataaaataaaatttgaaaaatat

SEQ ID NO: 224141 - DNA, 1152 bp, Cannabis indica
tctgctttcgctgcctttgagattttttgcacccaatgtttgctcaggaaaatcatttgggatttccatctttagcaaaaatccggagggggcctctttctagcggttaggggaccctcattccctctattgacagtagggtttggtttgtgggctaactgttggatttttccttttacagaacaaaaatgtctactcatgcatccgaaaccaaatcttctcgcaagggggttgttactctggccaccctggaagaagtaatgaagggcccggtcgcccaggagaactacacttgtcgttccaacggttgggaggcggatgagctctgctccaccctgacttgcgcccatcaattggagaaaattgtgactgtagctgggatcaagccttctgcgtctggggtcttccatcgtttgcctcgggaagaagagatgcccaatcacaattatgggggttttggagctttgagccaaacccatctcatgtccggagccatgcttcctcttgaagattattttataaatttccatgtttttgtcggccttgagccttaccaactcattcctcaagcttactacttgctctcaggcttgtttattttttatgtagcccgtggctgggcttcacctagcccgattgagattttatacttttatgagcttgtgtctgtccccaacaagggggataagtttaagggcgatcttttcacacttcgagcccatcctactaatgagggccgggtcccttataactttcagaagaattttaaggagtaccgccaccgtttcttcttctctttcggctttcaggccgtgaatcgcccagaacttctcacggagtgggtcaggatccctccactacatcgcactgatcttacccagctaggtcttctcaacttacgacaaaaatggccttaacgtgggacacttggtcacaacggagaactgccagaaggccaagcttatctcgggaagccaatccgtggacgacttcaacctctattaggtcctctgcccaattattcgtaccccggacgctgaaaaaggtactctgggcagacattattacctcagcggaggttcgatatcagaattacctcttcaggagggaataggagttagcctatattaaggctcaagctgctgctgggag

SEQ ID NO: 224142 - DNA, 1395 bp, Cannabis indica
agcaacaaggtcattgccaagaaatattgcctttgagaatgttattgacaaccattgttgttcaaatcctctctgcagataatattggagaacagtgagcaaagtataaaaggtttataaatcagatgcaaaagagaatggaagagaaaagcaacacgatccccacacatgaaactacaaacaaactaataatcaattcctctttttacacctacattttgccaattcagacaattatgcaagcacttaaatcagtttatcaatacaggatcaatctacaatattaccaatttaacaataaacacaccaatgtgtcaacctgaaaagatagaaatcacataaattgtaacaaaacaaatttgcacatcaaacgggtagtaatcctacaaattaataaacatgaaataaaacaggcccttcaaagtgacaaattaaacttcgttgttcttgatccattcctcacaaacaatcaatttaaacatttaacatgattacaaccgcaaaataaaatacatatacaggatgaatgccccttaccttgttgtgttctgcaacgagccaggactcaaatgaggaaaacagcagagaagtggcaatacctcccaaaacacggccaaccatcaaaactctgtactgaggagaatgcttggtaatacagctcagtatgtaagtaatacagtaagtcacacatgctctcttacgacccctgaatttgaagcccgtaggacatcagaaaacatcttcataacatcatatacaaatttattgaacaaaactttgaaagaatacttactgtttgtcagctagagaaccaacaattgttccgaacagcatagaggagccaaaaccagcaataaagagctgtccaatctcacctttaccaaatccatacgtactgtaaaggtagtaaacataaggaccttgcaaccaatctcccgctgttcatgaattaatcggtcagtaatcagaattttaacactcttttttcttaaatataaaaccatagttaaaagtaaaacaagaattaacagaatatactttacaaatacaagaatattctgttaaatttaacgccaaaagaaccatccaccattttttttaaaggttggttaaccatccccttcttcacacgattcttttcaaatggccctaaagctagccataatctcactctcaatcccaatcccaaacaacttttaccagttccacatcaattgatataccctttaaacactccctacaacaaaaattccaatcgcaggtcagcaagcgttcttcacaaatatagcgttactgcctcatatcctgtctctactcggacatattcttgccttaaaccatatttaattataggctttaagtgatgctacacttccatgtccagaaaaagcaatt

SEQ ID NO: 224143 - DNA, 8018 bp, Cannabis indica
gtattttatataccatttttaaaataaaatatattcgagttcgacgaccgtaaaaactcgacagatcggtcagaaatgtcacaacaataaatgatgagttatattggaattgtactggactagtttagaatgttgagttgttggtttaattaggatagttagtttgaccaaaatacccctagattaataaataacttaagtatttgaagtctttaaccaagatttattttaattttgtcttttgtggtttctagtaactttttgggttgaattaaggtttagttaatagatttataatattaggttagattataagttaaggattattattcaaagagtaaagaaaatttcaatcacaaaacctttttttctctctctttccccttcaagccctagaaaccagctgaagcaaaggagttttcttcatcaaaaccaccattttctagctgaactagctaaccctaggtgctattcaagctttgagataagttttccctccttttctcattgttttcttaagttttaggttaggttttgttgattttttatatggtttcaggtaagtgatgttaattgggttctaagattgtttctaagtttaaattaagattgtttgtgtgtgtattgggtgattcttaggctgttaagtcttgagttgggggagttgagtttaagaactaaaatttcaccaatttatggtgaatttgatattttgatgtgttactgagttttgaatgcttgagtatgttgtttttatattatagaattattttggaaagtttgagcaggtttgaaaaagctttggttaagttttgatgtgaaaaaccagggtttttccctttctgcaggaaccggtcaaccggttgaccagccggggaaacactagtttttcttcgaaattggtttttgcttagggtgtttttccagaacctagtttagggtattttattgatgtttaacctttttctaagccagtaggaattagggtttttgtctggttgtgaaattagggcttattttaggatttggttaagttgttcacgaagtttcattgtcgtgacataggaccccgaatcgtcgagcattattccactcaggtcggcctgcacacctgattatggattcaaggtaagaaaatccaattgcactgcttatcatgtcaaatgtaatacaattattatcgtttgtgagtcgattataatcaaggtaaagatacaatagttaccattgtagaaatgagttattacccacttttagaaaccactgataggttccttacttatcggttgcttcattaagcaacgatagtgacatatgaagcttgttggtaacgagtggtaaggatgatttataaagcatcaaggtcgcttgtcttataagacaactaattgtttatctttattgcattatgtttgaatggttatttagtctttaggatgcattattttgagattatgcttatcatgttgatcatgttttatttgcttttcttgttgagtctttgtgactcacgggtgctctgtagtgcagttaagggtaaaggaaagctggaccagccatgagtcagaggtctctcggtaatgtacatatcagtcgtcgtgtcttggctctcagtggacaggatccatcttttggttgtattttgaaaatgtaactttattctataactgttgttttgctacatgttgtaaaaatttataaataaggggattcccgaaagtagtggtattttgtaagaaaagtcttaattatgaaatttagttattttataaaatttttaattaaactacattttcttaaattgttagtttttttattataaattaactaatcaataaaagcacacacgtggtgcctttacgagttagggcattacaatacaagtctaatagacactcgagaaaatatctataaagcaacctataacatgatccattataggaaacctccacagatgtcacatggaggaaggaatagacgtgatcaaaacaaagaatgcgagtatcatcgggagaagggtcacaccattaatgagtgtaattaattgaaagatgagaatgttggtctgagcgggacatctaggacagtgggtctagattccgatcatctatctcgaatagagggtcgtgcacggacacatgatcgttcccagacagcagaacgctgtaaatcctccgcaaggggtaagctgttctcaagctctaggaacatcattacatgcactcattactctatgagcctcagttggggtgaactaggaccgggaaccccatgtcctcctcaactcgctccacctctggtggacggacacgtagctacaatcttaggtggatcccatcatgctagaagtactcgaaactcgcaaaaaaggtacctgagagaggtagaggaaggggaagtatgcgcgctggcgtagtctcccgcacaacgccctagaacgatgaattttcccatcacctttaccgaggatgatgccaaaaacttacgcttctcccataatgatcctctagtgaacgatgcatagatcgctaacaaacaagtttccaaggtccttgtggacaatggaagcttagtcaacatcctgttcaatttcgcattccaggcaataaggcttactgaagcggacctaactccccatcctatccaattgcaaggcttcaacggggatgctctaatgccgatggataaaattaagttacctatcacccttaaagaggagaatcatgcgagtgcttttaagcactcaacctttgttgtggttgattgcccaactgcgtacaacgttatactagggcgggcgaccctggtggactttggggcggtaacttctatcaagcatttatgcatgaagttcccatgtgataacagatgtatcgacacaatcaaaggcgatcagaagagtgcaagaaattactataatgtctcaatacgaactgtgttcacggtctaggaatagacattcatggctccggaatagatgatcagatggatactgaagctgcttgggaagattttcaagatgaattagattccagggttgggactgaaaggaacttacaaccaatggaggaggtagatgaggtaagcattagtgatgaagacctcacaaggactattaaagtgggaagaaacctacccctatccataagagagaatatcataaacacggtcaaaaagaaccaggatgtgctggcatggagccattctgatatgaccgagattgaccataacaccatctatcatgctttgaacattagagaagatacgacgccagttcaccagaagagaagaccactagatctggtaagggcagaagctatgaagatggaagtagataagttgactgccaacaatttccttcgggaagcattgtatctggtatggctcatgaacccagttttggttccaaaacccaatggctcgtggagaatgtgcattgactttatcgacctgaataaggcctatcccaaagattattttccactcctgcagatagatcagatggtagatgccacattcaggtacaaattgctcaacttcatagatgcctactctaggtataatcaaattaaaatgcacgccgcggatgaggaatacactaacttccaaactgacaagggcgtttattgctataaggtgatgccatttgggttaataatgccaaaaccacatatcaacggatggtcaactgaatattcaaaaaccaattaggagaaaacatggaggtgtatgtatatgaaatgttggttaaattcaagacctctgaagaacatggccaagatcttgagtaagctttcccagtaatcaagaagtatgagatgaagctgaaccccaagaagtgtacctttggagtttcctctagaaagtacctggggttcattgttgctctcgcggaatcgaggcgaaccctgaaaagattaaaaccttcattgacatgccttctcccaagaaacacaaggatgttcaaagcgttactggtcaaattgttgcactcagtaggtttatttcaaagtttatggataagtacatactgttcttcaatgtgttgcgaggcaacaagaagtttgaatagactgaagagtgcaaagttgctttctaaaaattgaaggagcatttgactcaagctcccattttatcgaagcccatgaaaggcaaagatttgtatttgtacttggcagtatctgatcatgttattagtgctacacttgtgcgagaggaagaaaaggtctagttctcgtctactacataagcaaaagattgttgggtgtcctatgatcgagaaaatgacattttgcttactaactggggctcaaaagctaagaccatacttccaagcccacgtcataaaagtactaacgaatccttccccccgctaggtgcttcagaagtcggagtcctccagtaggttgctaaaattggtcatggaacttagccagtttgatattcagtaccaaccatgggtatctatcaaaggtcaagcccttgctgatttcgtagtagagtgttctagcttaaatgatcttccggaagatccagtctcgaagcttcccacctagaagatctacgtcgacggaacatccaatgaaaagggatctagagctgagatcattctaatctcccccacaagggcattagcttcagagtgctttacattttagttttcgtgcctccaacaatgaagtagaacacgaagctctgttggcaggcttaaaattggctaaagaagtgggagtccaacaaatcgaagtacacagtgattcccagctagtggcgaatcaaatttctgctgagtaccggacgaagggtgaaaaaattactacatatgtcatgatgtcccaggagttgttgtaaggattctaaagttacaacgttcgtcaggttccaagagaacaaaatttgttcgtggacatgttatcatacaacacagagtagtcccaatttttcacttggagaaaccaagcattgaggtctaggagtaaaagttgtagtcgacaactctcacttctagatggcccctatatacaatttcttgaatttaggagagcttcctgtggacaaggccacttccagaaaggtttagtaccaagctccccgttacatgattatggatggaaaactttatcgccgaggactgtcaatgacatacttgaggtgcatcactgaaacaaaaatcaacactgtgatccatgagattcatggtagcttttgcgaagactatactttcaaacccattttatccaagaaaattctttgccaagagtatttttggaccacaataaagaaagattgaatagagtatgtaaagaagtgcaagcaatgccagaaatatgccaaggcacctattgagatcacacacacaagtagcccatgggcggcttttgcagttggaggatagacttagtaaatgatccctccctataggaaaaggagtcaattacgcaataatcgcggttgatcattttaccaagtgggttgaagcgaaaccaataaatagtgtgacctcaaaaaaattcttgaactttattattaaaaacatcgtgtatcgatacaaactttgctatcaacaatatattcaaccaattaaatataacccaaggaataataaagctataattagttagtcaatatatattataggtctccccttacaaaaagaagatcacacaaatttgttgggtatattaaaaagagtgtgtaatgtttaattaaagactcatgtatatcatcacagtcatcatatggggaagtctagctaattataagttaataaagatacatcaacacaaacccaatgatatactttgtagatatatatagtaagaaattgattttgcatcatgataggatcaaaggattgtatccatagagaaaggattgtagatgatattgtccatgtagtagtgagctgggtgagcagcatccatcaccacgaattgcatgtcctccgatggcttccagtgccgttttctctggtttataaaccagttgtttatctgtttcaaatccagccctgtactttctgccagacccagtttttgagcctcctacacacaccatcatcatattaatatatgaaccctatttacacgaacactacaattatatatatatatatatgaacgtacgtacagaaggataaggccacttgtagtgtctactccaccactcgagcaactgttgcctggcttccttaggtagctttccgttctttttcttcttaagaaattcctgcttcagacccccaaggtatccgctgtacttgcgcaacagctgaactttcaactccttatcttctgcttgaggatctattaaaccaccaccaccaccatcatcaccatcatcttcatcatcattcatatgatgatcatccaattcttcttctgaacatccatttacaaaagaatttacattagattcatgcatgattcaccattcaatgaatcaatttacaacacgccaaaaactaatctgattatttgatatctacaaaattactataaagacgtttgactcaacacacagcaggtcagttgattggacagaaaattaaaatatatgtgattctaatatagatttttatatatatatatagacagctgaaaaggcttatgataatattttttgtatttccaaaaccctgcttgctatgacttgtcttgcaaaatatagaatcttatgagttattatattttccaaattaaacctgcagagtcatcagacattatttttagcaaaaatttaaaaggtcatggtattcttcatgaacatttatttcacgagaaactagttatttaaactttgtatttatttataatttttgcaaaacatgacaattatgtaaagataatattagatcttaatttggaaaatcatctgaagactaattaagatttatatattcaaatataaagattcacatggagtttccctatgcaaactatgtaagagtataattgcatattaagtacttcattaatacaaagaataaaaataagataaatacacacagttcacatattggatatataatttgactagcaatatatagttagaaaagtacgtgtttacaactgaattgaaaacctatagcaaacctgacagctaaatacaaaaccctaattacatatacttcaaaaaccagaaagctttagtaataagtaaattctcacaataagaacggaaactatacgtaagaataacacttaattaagaaatctctcatgaaaggaacaaactttaattgcgctgctgtatatatatcaactcatcataataaaacctagctagctactcactaaaacttcgcccagctaccaaaagacgctattttaaatgctttttctcagcacttaatagaaacttataaagagtatagagaatcccacaaaaagcagaattttctaagataggtttgctgttatatattaattaacaatcagctatgctgtagttttaagaattaatgaagaaaaataaattactgacccaaaacagaaaattaaaaatcttcatctctaaacattattgattagttaggctcgggtgtggagaaggaagcagttttcacttctccctaggaaataaacaaattccataataatttgtaagatatatatgagatagatttggtgatgttgacaaataaaataacaagcatataataaattatatatatctccatgttgttttcaaaaggttcatttccaaacagtactaaaagccttgatgtcgttcatccaagaagtttcaaagacccagatgaggaaggagtacgagagaacaaaacaaaaacaaaaaagtaaagtgttttttatatttataaaaaataaaaatatatattatataataataccaggagaatctgaggttgaagaaacggttagggcttttagctggcactctactcttgagaggagagcatggcttctttaaaaggctttgtaagctcttcttcatatttgatcagcatctcacaataagcttccatgaactggtccagagctgggtctggttgatta

SEQ ID NO: 224144 - DNA, 996 bp, Cannabis indica
aaaaaaaaaacaaaaaatgtttaaaaaaaccttcaagctcttagagctatcactagagtcttaatgaaaaagcttcttcgaatgagctattatttctttctttcactacctcctatataaactaccttttaatttcgctttgtctttgactttgtaatttattagacacccaattatatactttataaaatatataaattatttatgttattataatgttcttttgacaaaatataatatattataatatttaataggttaagaaaatatgttaggtaaacattataaatattaaaaaaaaatatataataatattatcaatttttaaaatatatatttaaaataaataaaaaatataatatttaaacaatataaaataaaaaaatgaaaatattgatgtatgtatttgagcataacatagctaaatgtgtatactttattgggtaaataccattttagattctgtgttttttaaaagttgccaattggactctctgttttggtaaatgataaaatagaccatatatttttcaaaattgtaaaaataagtccctgaactcaattttcaacaattttttttaatataactaactttaagacaatttataacacgaacatatacacaaaatttaatcagttttgtcataacatcttcagatcagataattattaagttttattttgacaaaaaatcagttcaggttcctatttgtacaattttaaaaaatataggatatattttgtcatttaacaaaacagagggtctaataagtaacttttgcaaaatctgagatccaaaatagtatttaccctaccttatttgatggagagtgaatattaaccattttagtcgtacttataaatctaaattatcttaactcatctaatattgtaattgctttcactactacaaaaagatgaattcgcgacggtcccaaaaataatttttttagggaccgtcgttaaaaaataaagtaactgtttaaaattgtcggg

SEQ ID NO: 224145 - DNA, 4288 bp, Cannabis indica
ttttagtgagttcggttaagggtgttgaggtcctaaaatatccctcaacaaactcacagtaataaccagcgagacccatgaaacttctaacttctataactgccttcgatctcggctattccttgacatattcaatcatccctagatcgaccttgatcccatctttactgacaatgtgtccatgtaaagacacctaagatagctaaaactcgcactttttgaacttggcatacaattgatgttctcgtaatcactgcataaccatatagagatgttgctcatgttcttcttcaaattaagagtacacaaggatgtcgtcgataaatacaataacaatgatatcaagaaaatcctgtaataccctattcatcaaatccttaaaagatgctagggtgttggttagttcaaaagacataaccaggaattcatagtgcccatacctagtgtggaaagtagtctttgaaattccctcctctaaaattctcaattaatgatggcccgatcagagatagagaagactatcttcccttgaaattgatcgaaaaggttgtcgatcgtaggtaaaggatacttgttcttgatagtcagtttatttagttcccaacagtcaatacacatgcgtcgggatctattattcttcttaacaaaaagtacagggagctccgcagagtgacagactaggccgtgaaaatcctaggtcaagcaacccttgaagtagaatcttctattctttaagctctactgaagctattctgtacggtgccttagaaactggttctgctccaggtgttaaatcaataacaagatctatctctctctgtagtggtaaacccaaaagttcatcagaaaaaacatctaaaaattcctgaactacctggatatcctctggccaaaatgacttaggccgtgtgatatccaataccactgccaaaaaccctagacatccatcttataataattctttagcttttagtacttatattatttgaattcgggatccctgaactgatcgaacaaatatgaacggttcctcgccctcgggttcgtagatcaccatcttccatttacaatcaatactagctgagtacgtggacaagaaatccattcaaagtataatattgaaatttactaaaaccaatactacacaattagcactcaactccctatcctaagttctaatttgcatagacctaacccacctttttgagatacctaattctcctcctggcagtagtgctccaaaccctttatcatgactatcatgtgatctacccaatttatcaataattatggctaactcataagaatgagtggccctagagtcaaacaatacatagaagtaagagttgtttaccgagagctggcctgtaacaagtgaagggctaacatctaaaatcatcctgaggtaaagcaaacacccttgctgcagaaagttttgttgttgtcttcagtttcattttcatgagctacgggcaatctctcttacaccgtccagggaaaccacactggaaacatccttgccctctacactcaccaagataatgtttcttacaattgggacattccaagtaagtgtatcgggtttcggaaccacctttacagttgcctctaccctggttccctcaaaacctcttgttctgattagagccagaaggtgcagatggtgcttttcttttctagtcagtggtcgagtcactactacccctatcataaccagaggtaggaggagtaggggctccaccgacaacctgagtccctcgggagtgctaggtgcactcaactgtgccctcagatcatagtgactttaccaccatatcagcataagtggtgttgtcatcagtggtaataatatggtcacgctttatttttggattcaatccatccaggttcttttctctcttactgaagtcggtacgtctgattcccaaggccaacctagccaatcattcaaattgagttgtgcacttggtaacactcatattctctttatgggtccgctaggtattctttcctcttcacacttctgactgccgcgttacagtacattgaattaaacaattcttggaactcttcccacacaatagtggtaacatcccgagttagggaaccatgtcccaccataccagggcacaggccactctgtcattaccagtgatgccaataaaattcaaaattattgtaattaccatcagccactgcttggctttcatcacatcaggccctcccagaaagactggaggtgcctccttacagatcctttcatatagtggttccattcagttcactgcagcaatcgaccccgcctgcacatcaggagcaggagccacttgcatcactggagcaggcattacaggagcaccctactgcctcaagcgtctgatttgtccatcttgttcgttgattttggctttcattgttgcaaacttgttttcccattcctaggaaacctatagcgggtttgcatctccccaactgcgtgcccttcctctaaggtctctgcctcaccctcatatattaaggggaatctgagctccctgaccgccactggatcagaccaagttaccctggcattagtgtttcccctagcgtccattctattagaacaacatacaaaaccgagagctaccatggttagatcgccatcaagaagaatttactaattaccgcttattttggaaatcaaaacatgcacctgtttagctatcaggatactaacatgcttcctatcaggattttcttatagcatactaataaatgaaactactaaatcaataaaggcttggaaaaacaacctgacagctctgatacccaattttaacaccccactagtttaggcgtgttatcatgattttatactaactgtgccgctcgttgctaataaaatttttttaaaaaaaatcgtgattaattaaaacaatattaaaatacttataaaataccacaataatatagatatataactgggatcccgtgtacaaattatttacaactgtttcaagtactagatacaaaagctgtcacctaacaactatacaaaatatgtccagctgtcccaaagatcgtatgctctaggcctaactgcctcgacatatacaatcttcatccgctcgctctcacggctgctcaaccttagccttgcccttacctacacatgcaaacaataaccctatccccatgaccaacacgatactgagtcaagaatgtttgtacaatagtactatcgaccataatataagcctatactcggtatgctagtcatactgtagccgtactgatgtgatagcatcaatcagtatttgagccaaacatacatctatcggtatctaatataactctacatatactgataccgctatccacgtaatataacaagcttaatagacatgtacactaaacatgtaaacacatatgcatatcattatactaatcttacctcactttcgaattaaggtgtggtggccaacctgagtggaactgctgctcgacgatttataggcccttaaataacattatttagaaaactgatgagttacatgctaaattaattttcagagacttaaaattgaaactaaaagtttccctatcaacttggcaataacataaatatcacaaaaacaagaaaaactagggttcccaaaactgccccaatcggcagaccggttcaccaatcagaagatcaattcggtggggttcttggggactaatagaattccagttcctgcagttccatgtttcgccagatctggtcttcaaacattttgtttaccaatctttggtatgtggctctagcattttttagatgaaacggcattactttgccgcaatatagactcatattggttcaaagacttgtatgttcttggtctggtggatgcattttgatttgattgtaccccgagtaagcttccatgaagcttaagatttcatgccctgctgttgcatccacgagctaatcgattcctggaagtagaaaacattctttgaggcatgctttgttgaggtccgtgaaattaatacatactcgccatttcttgttcggcatgggtaccaatacgggatttgcaacccaaacttggtagaaagcttcaattatgaaattattgttgcatagtttttatacttcttcttttagggctagtgctcgctctttgtccaatagccttcacttttgttgaactggtcagaagttgggatcaatatttaggacgtgcgaaatgatagaaggatcaattccgaccatatcctcatgtgaccaggcaaaaacgtctaggttagctctcagaaattt

SEQ ID NO: 224146 - DNA, 1788 bp, Cannabis indica
ttctcttagatgttttttcacctgtgcgctgaaatgtaaccttgggagctgaatgtcaacctgagtgctagaacctaaactgccttcagtaaaacgatcataactcactcaattttcattcagttgacacaatgcaacttgcgttttgaagctatttaagccctctatcaagtcatgtctcatatactagtcaacattcagaaaactacccacaaggttaaagtttctctctagactttatctctctagagtgtgaagtttctgatacttaaacagttgctgtaaataccatcacgtgagaataaaaactcgaagtagacgtggccccattacaaatattgttgcatctctcattaattactctacaacttttcatattctcgccgatctagcgagttgtggttgtggcttaaaagtccagtccaaatttgtaagtcaatattttggtgctttcattaggaagtagccacttcaatgctttgaatgaacactctcacaacaggtcgtcctgagacgatcttgagttcattccggaagcctcaccagagtttccttcacaacctcatggtcaggagacaactacaagacccaggtcaaccggagttcaagatcgacctggatgaccaagagacctgtgtcacctcttgaacaaaagaagaatgatggacttgggaacttctagaaaagaccctatctgagtaacagaagctccatttgggacgcagaccaccattcacggagttaatcgagcagagttcgacaccttagttgctttagtgaagagggtcattacacttaagttgtctaaatttgagcttgactaagaatggcgctcagcactctccgaaagaatcaaatcccttcccattacttagaagttcaataacccttcctagcatcaataaactaggaaggaagatccattatctcacatctactactttaaagtgcaaaccgatctgcacggtgtgatagatgatgtcaggtgtagaatcttccctgctagcctagcttaacggtggtacctaaagctctcccctgaatcaatcaactcatggaaagatctagtggatgcttttggtaactaatgtgctcctttccgacaacgccaaatcgaggccagtgatttggtagacgttaagcaataggaagatgagcccctcaaagactacatccaacagttcttagaggcagccgctaagaccaaaagtctcagcgaggatgcaagcgttatggtactcgtaactgggctcaagaagatgagtcttttgtggtctcacctttgtctcaaggcagtatacaccatgaatgacttcatagatagagcatatggctttatcaaacttgaagaattcgtcacctgagcaaagggctcaaaaggtggcaagaacaagtcgccaaacactgaagcccctactactgaggtgcagggcaatggaaaaagggaggttcgaatggaggaaatagatccaacaacagtggcaaaccaggaaactcctttagaggaaaaaaaagcctaaaaccgggggcaagcccttcagagactatgagcctcacttcaccagttactcgattctcttgccccaagagaagagatatatacggccactcagtcaatagtgtcgtatcgcaaacctcttcctttcaaagagtcagaaaagagggacatgaataagttctgtcgttaccacaacaactacggtcattataccaacgagtgtaaccagttgcgggacgagatagaatttctcataagataaaaacatgctgctcgttagcgatatgtac

SEQ ID NO: 224147 - DNA, 1022 bp, Cannabis indica
attaaaaattatttttatcaaatgtatataaatatataccataggaaaaaataattaaaatttatagaaataaaattttatacaacataatttttttaaaatttgtgattataatgaactagattataacattatcattgttatctcgatttttcctacctcattttcacatggccaatatcaatgccaagtgagagtgtagctggccaacaaggaagccaagccatctactcaacactttaaccaacgaggggtccaagtacttaggagggacaataaaatgagaaccaaccaccctaagtgggttggccggccactccttgctggccctatgccagcataggtcagccagcttctaagcactgtgtggctgccagcctgcatctggcaagtgcatggccaggaaacttttggtctggaaggtttttgctgcgtagcgttcatcgtggacaacaagttaagcaacaaattgggccttgacaacccacaaaaataaggtaaaaatatcaaaaactttcctattttcgagggataattaagtcatttaaagtttattatttaattatgtaaatacaactttatttacctatttctaaggggtattagtgacgtaagctctactatatacaaagcattagttaaaaccctaagtctgtcttaagctctcagttctaactctcaagccataagtttaaaactcaactatcttctctctcacacacacgccataggcatagtctctccatcacttgagatttgccaactcgattctcatatttgtaatcttaagacagccaattcagattgcacaacacttgtgatctgagtggtattatccctggtattaatacaactaataggggagtaggtcattacccgctaactaagggggtcgaacctctataaaatcttatgtcttatttacttttctatttttattgtgtaacacgtgacaagcatcagtaataaatatgactccactatcggttagccaaatttaaggtaaaaaatttggtactttc

SEQ ID NO: 224148 - DNA, 1798 bp, Cannabis indica
ggtgctctactgtgcaagaaagggtaaggcattagctgatcagccatgagttcaagatctgggcgaagaatgtacatatttgagccatatcagaccaagcgggttaagggtctactagtgatgaacttttgaaattccattttgccgcttaggccggactaaaagaaaagacttgtaataaagttgtaaatattttttgggatcccaactgtttaaaagtttaaattattactaactttttttttcattctgtttaatataaaagttaaattctgcgctattttaattagtaatcccgtttaggggattagggtttcgtaaataacttgggtagcgtgcctaattatttagggcgttacaggtactatgaaatgagataattccactagttaataatgtgttgtagaatatatatatatatagaaagatagaaacaacaattagagagttagaatcataaataccaggataatatcccgaattgtttaaataaatttcgaggatgaaattttactaaggaggggatggttgtaatataccgataagcctaatggtaaataattaaggtttatatttatattatgggttaattaggtaataagtgggattatgatcctactaatttattttaaaaaaaattaatttggctataagtggatatataagcgtaatttgttaattacggagatttatttgaaatacgtagatataatatgagttacttgtgaaatattttcaggttcaacaaccctgaagacccgattggaggctaaaaatgtcacaacagttttagttagaaatattgatagaattattgagataagttgattttagaaataccgaagtattttgggatactcaaagttggccaaatatcctacaaatagaagtttcatagtggctaaaaaatactaagataactattaataataaatttttttattaatattatattatattattattttattattattataatatattaactgaaacttatcagttccgttcgtatgtttatataatatatatattaagtttaatatatgtagcagtgaagaatgaacgaacaaactttcattctctcccttttgacaaaaatttctctttttatatctattttcttcaatttttaatccgaaacctagcgatctaagctccaagagtagcaggatagcaaatacttaaagaagaaaagcttaaggtatagcttaatttcattttaagtttaaaaataattggtttcgtataggggttttgcgaattagaatagttatcgagattctgacttcgtagaattgttctttggtacctatgggactagtatcgatgtttacttgttaaatttgaggtgattttgagttaataatcgagatttgaactttttaaagcttagtccgaacgttaatggtatttttttatttaagggctcgattttaatttctattacgcaagaatggtaatatttatggtatatatgcgcccggtaaagtttggagtgatttggataagttttggtactgtttcgctgagtgcgaaaattgggattttcgagtttcatagttcttagaaattcctagaagataagaaatcgtatatttgtcataacttctgactccgttgttcgttttggtacgttctatataccgtttcgaagcttgcgacgagctctacgatatggtgtatgttttagagccaaatataagttttattatagtgtatttataccccagggttgggtagaaaaaccctaaattatcttatgtgaatattaagtagtgttttaggataaacactt

SEQ ID NO: 224149 - DNA, 3800 bp, Cannabis indica
ttggataagtgagaattaagagtggttgagggtagagcctttgtgaatgcatcagcaagttggagattgttgctgacaggaatgaggcggatggcagaagtggcaatcttttcgcgaatgaaatggcagtccaactcaatgtgcttggttcgttcgtggaaagtgggattgttggcaatattaatggcagattggttgtcgcaatagatgaaggttggtgtaggttgatgtatttggaagtctttgaggagatattgtaaccaagttaagtcactggtggtggcagccaaggcgcgatattctgcctcggcagaacttttggagactataggctgcttcttggttttccatgaaatgagacaatcaccaaggaatatgcaaaaacctgtcgtggaacgtcgtgtgataggacatgtagcccaatccgagtctgaaaaacctcggaggtgaagagaagatgaggttgaatataatatttcttagcctggtgtgccttttaagtaacgcaagagatgatgaagagctattaagtgagttgtttgtggacaagacatgaattggctaagtgtgttcatggcaaaggtgatgtctggtcgtgaaagagtcaagtacaatagtcagccaataagttgtctgtagtgagatggattgtccaagatgtctccttctttgtcagtgagtcttagtcgaggatccataggagcatttgccggtttgctgctggtgtaccctgtatcagcaagcaattgcaaagtgtatttgcgttgtgagaggaagaggccgtactgagcacgggcaatttcaaacccaagaaagtacttgagaggcccgagtgtcttcaacttgaatttggcctgaagggagatttgtaattgctggagtgtgtggatgttgggacctgcgaggatgatatcgtcaacatacgaggagggcaacaaaagttgcttgggatcctcttgtaaacagtgtgtaatcgacatgggattgagtgaatcattcttggagaagagcatcagtgagttttttgtacgattgccttcaagattgtcgaagaccgtaaatagatttgttgcgcttacacaccagattagtgccggtaatagtagagggaaccttgaaaccttggggaagttgcatataaacttcttcttctagatcaccattcaaaaaggcattgttaatgtctagttacaatgtgtgccattgcttgatgttgacaatggcaagtaaaagcttgaaagtgaccatttttgcaactggtaagaaagtatcgaagaaatccaatccttcttgctgtgtatatccttgtgcaaccaagcgagctttgagtcgttccacactaccatcactgttgtatttgattttgtcacccaacgacatcctattgcgcgtttgcctggtggaagggggacaacggtccaagtgttgttgatgatgagggccagtaactcattgtccatcgcttgcaaccattgcttgaattgtatggcttgcttgtaactttgtggttcaaattcagctgtgacatcaagaataaattctttgtaagccttggataattttgtataagacatgaatttaaagtaggatgaggtgtaggagatttatctggtagaagattgaaacactaaaaatcttgaaagtaacttggaggctgtgagactcgagtggttcgtctaggagcaacaagtgttggcgtgggattttcctgctgtggagtagcagtatgttcaacatgggaaatgtcttcaacatcatcattagtatcctgcaaaatggggttaggtgcaacatcaaaattgtcttgtgtaggataatcatctatatgtgtgttagtgatgtgctaagaaggcaaaactagaggcaaaaaaggatctatagattggttgtgtaagttaagtttatgaaaagggaaaacattttcatgaaagataacattgcaagaaataaacaattgtctggtattaatatcatatagtctatagccctttattcctctaggataaccaatgaacacacatgtccttgcccgtggtgcaaatttggttctatgagaagaaatagtggaagcaaaggcaagacatctgaagcatcgaaggtcactgtaattaggtggtttgcctagcagaatttcgtagggagttttgtttttgagattaggtgttggtgttcgattaataaggaacacagctatcataagacactcagtccagtatttgataggaactttggattgaaaatataaagctcttgcgacattaagaaggtgttgatgttttctttcagccacggcattttgttcatgtgtctctatgcaagtgaaatcatgtgtaattccatttttggagaacaaatctttgaaaataagctcaggggcattgtcagatctaaaataattgaaaatacaattatattgagtttgtatataagaaagaaattctggtataatagatataacatcagatttttgtttaagaaggtaaatccatgtgaatcttgagtgatcatcaaccaaagtaagaaagtacttatgattagagtgagaagtaacataataaggcccccaaatatcacaatgagtaagatcaaaacaatgattggtaaatctgttattattaggaaaaggtaattttctttgcttggctaaaggacaaatgtaacaaggttcaatgctatgcaaatttttagtttcacaattcaaagaatcttgtagtaagtctaaacatttatttgacaaatgacctaaacgcttgtgccaagtttcagccgatgtaaaagcattgatgagaacgggtgtggtgtccaatatgtagagaccattagccgatacacctttgccaaatatcatcttggtgtgcgtttcctgtatgtagaaattatcagcaaggaatttcaaagagtaatcgttcccttttgtcaaacaattaaacagaaataatgttgcaatggaaagaaggaacatagagaacattatggagggtaagatgattgttaattctaacggtaccacttcgatatgccagaagacaattattattaggcagaattaatttagtttcagcaataaaatgaaagctttgaaaaaagattcaagtctgaacaaatgtgcctagtggcacccgaatcaatgatccaagacttgtctttggacagtatagcatagttggttaagataatacctgagttcccattagatgtactcgaatttgaagtgggcagattgaaggtttgtgcagcaagaagattaaagagctgctgatattgatttggtgtgagttgtggcaacaaagtgttgctttcactgggacccaaactggtttcattgaaggtttggaactggtttgcagcagcatccttgatttccctcctttgttgtatcccggtggatatccatgtatcttgtaacgcttctcgatggtgtgtccatgcatgttacatgagtcaaaaggcctgcacgtttggtgtgagtctgggtggtccttgtgattcacctttgcctgaattctttctccttggaaggcaaaagccatattggagtttggatccgtggtgttgttttgtcctcctctttggttttcttcctgcgtaactagatgaaaaactctattaatttcagggagtgaatccataacaaggatattacctcgcacttgagcataaagatcggatagtcccatgagaaaggacatgatgtactccatgttgtgatgttcttgcaatttcttgactcctccacaagaacacccattgcaagtacagtttggcctgaaattggacaattgttcccaaacagttttcag

SEQ ID NO: 224150 - DNA, 2161 bp, Cannabis indica
aaaaaaaaaaaaaaaaaactacaaaacggagcatcactgctgaaccaccacgcaaggtggctgcccaagttcgatagtgacgaaaggggtattgaactatgagatcgagaagcccatgccaaggagaacacacatttggagactattagtcgaaaggaggtccagaagccaccgaatcagagtcaaacatctcgaaactccatagattctggtgaacgtcaacacccgattccaatgatcttcaagcccgatctattgaggggttttgttctcctagacctcctgagtttaaccgaaccattcactgtccaaaacctccaagggtgatcgttctcttcgtgcagcgcgtgtcgccggccggtgatggaataccagcgtcgggtttggaggataaaccaccgtgagtaaaggagagggagagagagagataatctgaataatgtttgggggaaaaaagagaaaaaaagaataagaagaaggaatggaagaaggaagaagaagaagaataagaagaatgggtgctggttcgagaagaaagtaaagaagaaagaagaaagaagaaagaagaaagaaaaagaaaaaaaatttaattttttttttatttttttttaaatattttatgattattttttaaaattaataatacgtgaccactaaaaatttttcacgtgtacaagtgtgtacatgtggacagtccactgtggcacttaactgtgagtttttggacggagtggtacagaagcaaaacggaaccagggtttagatagttatgccgccaaaatttgagtttttatggttaagtgttacaaaccgtaaagttcaggtggtttagccgccaacatccctttaaataatattattttaaattttgatagcttatgtttgataatttaaaattatacattttcaataattttaatgaataaattattgataaaaaaattataaataaatttgtaataattcttccatttaaattcttattaaatttaaaataaattaataaaatcaagattaaaaaaacaacaaaaaaaaatctcacatgtatgagattatttatccgaccctgctagatgggataaataatcccagagagatgggtttagctggattagttatccagggttccaacatgtccaaacactagactgaacaaattatcttgtctaatccaatccaatcatgcgtaccaaacaagccctaagggtaagtatataatgctttctatatggctatttggataaactctttatctcttttgaaatttaagaaagtttttagtctaatttttttcataatcgtatatattatagctatttagaactatttataaatattttaaaataatttacaatactaaaaattagatttatatattttgttatacacttcataaacaaaccaagaggtgttgagggaggactagaatccacccgagacctgaaaatatattaatatacaattgttgcttacatatatataagtcatagttaaataaaaaaattgttaaaaatgttttaaatttacatgagagaataggaggatgttgctaaattatcgtaccacttaaatttatcttgtcatttattattttagattacattaaatgtataactaaatataccttaaaattaaatccaagtctatggcatgcacgattattttttttatatgcgtggtaaataataatttaaacattattttagatacagtaaattatttagaattttctaaaaatttacaaataatcttaaaatagctataacatataaaattatattattaaatttttttccgaaatactacaacaaataaaaaatttaccaaaactatttttagaatctaatagtaaaatttcctaccattcatattttaattgtgtggataaataaaggtgatgatgaggtggatatgagagacccaccgaaacccaatcaacagctagataagaaggatacagctgtattgatagctaaacgcggttatacgaccgattaagaaaaggagattttgctaatttgtttccttcaaatacaaatttctatagggctatttataaaaatatgaaaaaatggagatatgctttggcataaaaacttaattactctaaatataatatattttttttaaaattttaacaaatatgagaaaaaatcatgag

SEQ ID NO: 224151 - DNA, 1378 bp, Cannabis indica
tatataatcttatagatcgggatcctgagttttaaaacacagttgaaactacatttactatatatatagtttcataatttatatatatatatatattacaaacgacaagcaactacaaaatacaattcaaaatgttgaaaggcctaaaccctccaagttgcactgccgcgatatgtacaatcctcgtcaagctctaattcactgctcctctaacttagctttacatttacctacacaaggtagcaaactgatgaatcgaaagactcaataagatatgcataatatatataagcaatgatataccgactttatgcttaagccgtcctgagcccaattactgagctcaccaagtggttaagaacgttctaaacggaagtacgaccactgtatcatatgcaataaagtactgaccttgtactcgtgttggtagggccattattgtacttttgggagttattgagtgttgtaccacatgcatgacgtatccctaagtactcgtgttggtaacactgtaactaccataaaaccttacattgtactaacacccttataactatacattcgacagtgctagtagtgtaattggataataacaaacattcattcacatatatatataatttatgctatcttacctcgtttccgtgttcaggtgtgccggtcagcctgactggaactgtagctcaacgctttacagggtcctaaaccacaatatccgaaattctgatgagagacacgctaaaacacttaacggggacttaaactcaaaattaagaataactttgtcgatgaataacatggaaataccccaaaaaatggcccaactggtagaccgattcccaaccgaaagtctggttccctgaggaccaaccggtcaaccagttgctacaggtccccctgaatcgatataccgattcagtgctaggaacctcaaaaatgtcccacacaccacaaaacaaccccgaactcactcaaaagctccatatcacctgtatacactataatagacccaattcaagcaaaagaactcaataattcacacaaaatctcatttcaccattaaagggcaaggcttaagttcgtaaactcaaaccttagccaaacctcaaaataatcaacaaaatccactcaaatccacataaacaacctcaaatatagctcaaaacttaaacccaaacaacaattatcaccttagtaccataaatcaactattcatgcacttacttctaacttaagcttcaaaaatcaaaaagaaagaagctaaaaggtactaccttgaatcaaagctcttcaatactgctggaaatcacagaattaagcaaacaaaatccaaccctaagctgggttcttgatgcttcgaaggagagagagagagaga

SEQ ID NO: 224152 - DNA, 1948 bp, Cannabis indica
tgtcaaattaaaacttttaatatcaactatgaaacttataaactttattaaaatatttaccaatgtcacataggaactacaaaatgacaaccccaaatgtctcgagaccgaacactctaggtcgcatcaccaggacatgtgcaacctcatcctagctcgggctcactcatgttcatgtttcacctttcctttacctacacatgaaagtagaactgtgagtcgacagactcaataagaaaagcatataacatatcacataataacggcttgtatctagacgcccatacacctatttacataattaacagatgagtaagaacgttctatactagggtacaaccactgtaccacataaactacgtacctcactgtacgagtgattgtagggtttgtcccgtatgctgagtaccactgagttatatactacacacaccctgtactttcccgtacatgtactggtaacaccgtaatgcactccttaataatatacactataccaatgcactttgtaccatttctgtacaagtgttggtagtgtaacaatcataacaagcatgcatatacattaacacatatatacatttgcatatccatatcacatattgtacaccgttcttacctcctttctgaattcaagcgagttggccgaccttaatggatgccctaatgacataacataactgtgtaaatcacatgtcaaaaccctaatctgggaaacccaaacttacaactcaaggtatgggcgagaattgagaaaacgagttgttcagggaatctaccaaaaccggttaactgattttacaggacctggaaaacttgttaactggtttgcacgaggtttccccaaacaactctaaaatcgctcaaaacttatccaaatgctgccaaaccttccagagtacctaaacagagcatacacaacattttccaacgaatagaatccagaaaaacatcctaaatcaaaacatgccattgatgactcaagtttgagtttggggaaacctaactgtcccatgaaaatcttcaaaaataggaacaagaacttaaaatcaactcaaataaggcttagaattcaaagcatatacaaatcaaacactaactgcccctatagctcaaaattgcatactcaaccaaaataaaagcttcaaaaacacaagtctatggattctagggttaccttggcttgaatcccctactaaaaacaccaaaaatcagtagcaaaagcccctagttcctgctcgttcgaagagagagaaggggaagagggagagctttcttggtttttggcttttccttatttttctttattttttcctcaaatgaaataaagattaattcaccaatctttgttgaaatgaaatggccaggttttaagtccctaagctgctacctaacacccacatcaaaatgaccaaaatgcccttttacttacaacttaagcaaaaataaagtctaggggtaaaatggtcgaaaaccataaccctgcttaaacttggtattatattttctccaataattatcccactaagaataaggttctagccttacccatgtcattaaaatagtcattcatcgcattttctgttgtcgccgagcaagaattaaaaataatataattcatgtataatacaaataatactcttagagtttaataaaatcttcgaaattgagaaattataactctaatgtccatttttaataagaggacccacaattaaataaattcactaataattataaaaatatcaataattagtgctaattgcctttactaatccatattatgaaatgcggtcagtacaaaaaggatacaatggctactctatttttcatgtttagtgatgcaattattggcttgacatgaagtgttaaacctgggtagttgctctactttattttaattttatttcaacaccatggatgattaggattgattgaattgactatt

SEQ ID NO: 224153 - DNA, 2525 bp, Cannabis indica
ataaagatacaatgctactttcactaataataaatgtaatgcatctaggccctccacgtgtccatgagttaacagaagtggtagtaatggatgtaagagaattgtaatattgggtatttttacttcaaaaaataaaaataatgtatttaagtgtataaaatctaaaatattaagtatttatgccacaatttacccatctatttttctgtaaaatttagagtttatatatgtgatggagttcacttatatacaggctaagatatttgttatattttttttccctacggttataataaatagttagaagaaaaagacttatgatttatgcaaattttaatttgtggatgcttgctaagatcttgggaagtttgcattataataaaaagtcacctctttattattatttaaagtaatttgtggcgtaaatatttaagtttaactcccagttgtaaataaatacttaagtttaatttttggcggtaataatacctaagttataattctggaacttttgtaggtacctgattgttaattgttaagtaaatttccacgtggcaatttctttattggtccaagtcatcaaatttttttttttaaaaaaaattaatttaaatataccaatatgaaaatgacacgtggataatgatataatatttaacggttagcaccgagttcaaaaaatataacttaagtattattaccgtcaaaaattaaagttaagtatttatttacagctgagagttaaacttaagtatttatgccacaaattacttatttatttattattaggcaaaagtcatctttctattatattggtggctctacgtttactaaattattagtattttgttttttgtgaattttaatggggtcctttcttacatgttgcccctacattatcggaagggtcacaaaataaaagcaatccacaatatgagctcattgtgattcctcaaactgttcataattaatttaatttcatatcaacaaacttttttttttaaatgtaatttgacgtcaaaaaagtgcaaagattcgttttcgatggaggtaacagtatcttcagtagagtgataagtgtggtatacatgtattttttttagctcaagttcataaaattgaatccaaatagtaatttgtgatgtaatttaaatttgaaaattaataaaagttgtactaattgtaatatgagttaaattttacatcacaataaatatcagttttttatttattttttgctatctatttatgtaatgaataatttttttatatttttatttatatatttaatatattttttatatatatttttaataaaaagttaatgtttttgttagttttttttactttattaaaataaattttattttattttttatgcattaaactataattataaaatttatactaaatataacatttattttttttttaataaaatttaacacaaaattcacatatgggatctaactaaaaatctaaacataaagagaagtagcaatgctaaaaaataaattattagcagtcatttgttttggttatacataaaatatggtcctttgtgattagctagcaatattttttaaaaattaacttgttaagttatttgggtgtgaatacttaattttaataataataataataataaaaatatgaagcacacctttcaccgtttctgttttatatataaatgaatatgtaatatgtattataatcattacccaatattatataattcaactaattccaagtcactgatccactagtaccatgcgtaccctattattagcatctctcacctgaaactacacctcccgacaaaaacagtttcctagaaaaattcatcagaaattaacaacacctgagaaaatggcagcgtttcgttattgtactgtgatttctccatcaacatctttcttctgctccggaaaccaaaagagagctttccaattccaaagctggacacccagaaagcccaatctcaatgtcaacaacgccagtttttcagggaccgcgggtagtagtgagctggtggctgtgccggatttagtgtgtaataaagacgaatcgagcagctttgggttcaagaatttgatggagactttctgggttgacgttcaagaagctgaagagagaccattgaggcttaaactcatcactgagcctgctgagactgcttcgtcgtctcagcttcaaaatatggccattagagttgaattgaggaatggctgcgtcggatggggcgaggcctctgccacccctgccacgtcagcagaggcggctctggccaaggtctgtgagtttctgcgccggagtccaccgttgactttgaatttggtgcttcaacagattggttctattcttcacggacaggaatatgcttctgtgagtatttatacttattgttaataatataaatatatatttataatcctttcaaaaaaaaaaattaatatatatatataggaccttacttgtaatttagcaataatcaaatgaacgctttttaagatttttttttaaaa

SEQ ID NO: 224154 - DNA, 3412 bp, Cannabis indica
agcaagaaaagtgaataaatctaaaaataatacaacattcatttaatcacatcatatattaacatactctaacaattacacaacatcgtaatcacacaatcttggtacttcataaagtatccttaccactcgttacccacgagctaaatatgtcactatcgttgcctgatacagcgaacgataagtaagaaacctatttgcagttcaaggagtaattactcgtaacggtaatgaccgtttccaaccctcggtcataactgaggcttaaaaagcatatattcagattctcaatcataatcgagaatataacaacacaattattaatcacttaaccctaagtaatgcataacatttttcttacctcagtccataactcaattgtgcgggccgatatgagtagaaacaaaactgggcgctcccgatcctatgccatgataaccaaaattcaataaatgccttaaatcaaaactccagaacaaaaccctaaatctgaaactagacataacttaacttttaacaatcccaaaataggctacacaacacctaaataacctaaaacgggtactgcgcaccaccccgagccaaaaatagaactcgaagaaaacccgggcattcccctcaaggcaaccggtcgacaggttctggtgcactagcaccaactagtcgactagatctggcagaccaaaaaaccttgggttttcttcctcaattccaaaccaaataaaacttaaacctgcgccacagttccagaatagtataataccataaatacaacaaatttaatacattaaaactccacaattaatcaaatctcacaaaaacctaagctggaaccaaaataagcttctaatctaaatttgctaactaaaatactaacaaccatttgaattgcatagccatttgaattgcataatttaagctcaagcatactctgattcagacctaacaacttatccttatttcaccttaatcctactgtcacaaaaacataaaaccctattctaaaaccaacctaacaactaggaattcttaagtccataaagcaagaaacttaccgcaaagcttctaagctaaatttggatgaagataagctaaaattaaagagaattggtgagaaaatcctttggttcttggctgctagaaggagaaagggagaagactaagtgttatctccaaacttctaatttccttttgcttaattttcctttatttacctttaatatacataatacactaataaaaggaatcaaccactaattcataaaggacaaaataagtagaaattctaactctaaaatgaaatgaccatattgcccttcctaatgaaacctaaactatttaaaatctaggggcactttggtaatttaactaattcaccaaaccgacaacctaaaattctaaactaatccggtagaattccaattcattccatactttattgtcgttatatttctgaccactccgccaagttcccacggtcaccaagcccaaaatattttatttcaaaaatggtatccagatacccacatattccaataaaatcttcgtaattaataaattatgctttatttaatcatttattaaattcataataatcaacctaagtaagatcataatctcacttcattactagaataattacatatttaataaaatatgtccaataaaataccattttattttctgggatattacataaacggtttagaagatctcctctgcagtccaactgttcctgcttaataaggtaagaagagaacaacttctgtggaaggcacttctgagtcaaacccagaagtttcaaagaaaacctagaagaccaccaacaagaagtctacctcgactgacatatccatcgaacctagaaaagtcaccccagcaacttctactgtgccagcaattgtgagcactagtggacaacccttagggtctgtccatcaggttaaattctctaagtctcaactcgagatggctctcttggagccttcctactccttgcccacatatgcaagcgttgagggttcccaagcatgcttaatgtatgctacacaaagttggcgccactttaggactttctaacatgaggactggaatctaatcaacaagggcgattaccaaaaccttatgatgagaagcgttgatcttatgtagtgggtaagttccaacttcataaaaaattatttttatgaatatattttacattttgatctcttcttctgacctcgttctatgcaggcttccttcttatccttcgtgactcaacaaaggggctttcaaagtatcacccaacttagcacagagcttcccaagtctaatgcccatcgctagcttttggctaagcaatggaatgatgcccaatcggagatttcttggtagaagacacatgttgagaccccgaagaaatctgagaaggcagtaaaagctgagaatgaagccttgaagactaagaatgaggagcttcgcgaagttgctcggatggcccaagagagccttacagaagccaacaagaagctttccaaaaatgatcaaatattagatcccttaaagtgttaattctaggggtgcattcagttggccccaaatctatgattggaattatacgttaatcgttcacaataaattaatagtacttaaggaattcaagagataattaaaagggtaacacaataattttgacaaactttaattatgaactaataaattggaggataaactacttatattgattatattaatagactactagaaagaatcttgtaaatataattctatactgacaatgagtgaaattctatacttatagtggagtagtaatgaaattaataaacaagaatattttattgttgggatcaatagtaatccaaagtttatcggagcttcaaaatataggttcatggttcctagatcacatctataccacactgtataatgaaagatttcatatgaggattaatttttttgagaaagaattaatttctttaggaaattattcttcaataaattaatttttttttataattgtttaaatatgaattaaataattaaatttaactatttagttttatttacataaaattatatattagttaaatataatattattgtttaaataatattatgagaggtaataaattattttagtagaaaataatatttatctaatccaaaataaataagagattagtgagaattaatcaatttttatttattgaaacataaataataaatcttatttacgacaaagaaatcaatttcgggtattaaaatatatgtcacatgtgtaggtgatatataaatttcataagatttgtcttgattattttattaataaataactcaaaataaactatttatttaattaattattttataagataagatatttattattaaatcattaaataaataaata

SEQ ID NO: 224155 - DNA, 2134 bp, Cannabis indica
ccctagtgggggtctagatatgggaatcgtacaaagacccgaacctggaaacatttctagactatgacccaaacccaaacttgaaaccgagacccgaaatcggaataagaactggaataaggacagtggaacaggaattggacatgggcccaaaaccagatctaggcctagaaccgaataatgactagaacccaagagacgcgaacccaagcccagacttgcaccaggacctgcgacccagatcgcgtaacccaggacgcattacccgagaccaggtcctgaaccaagacctataccagaactcggacccagacccaaacccagaccaagacccagacccagacacggactgaaacttagacccagactcagacccaaacccagactcgtacttgtactagaacccggactcgaacccgggacccggacctagaacgatatcaggtatgggacatagacccggactaggacaaagacctgaaccaggactaggactagaaactagactaggaataggatcgagactcaagagcggggaccgagatcgagaccttggaccgggaccgagaccgggaccgggacctgggaccgagaccgggaccgagaccgggaccgggaccgagaccgggaccgggacccgggacccgggacccgatacttagaccttagacctgtgaaccgaatttttacccaaacctaaaccacgccaagacccaagacaaggaccagtaccgaaaatggaccgggacctgcactcagactgggaccctaacccaaactgggaccttggaccctgacttgaatcggggacctggacccatcactcacgacccaagacccaaacctagacgcaaacctccacctgacattcgaaccatgacccaagacatgagctagaactggacaaggatctggattttggcccgtgacccaggacccaagacaggaggcttcgacctgacccataatcggtgtctaaatcagggaatcgaacctggaccaagacccagacacggaccagaacccaaatccgtaccagaactcaaactagactaaacatgaggtgggtgttttgatttgtgaccaagactcggacctgaacccaaacacggacctagaccaagataaggactcggaccctgacccactcccaaaccttaaatcataccatgtgacccgaaattgaagtcgagacttgaagcggtcccttaaaccctaaaccctaaaccttaaaccctaaatcctaaaatttttacacgtacccctaaaacctaaaccctaaattccttagacactaaacccaaaaccctaaatcctaaaccctaacccggacacgggtatagacccataccgatactgagattggatcccaggccccaaacccagacccagatacagacccgaacctagacctagactcaggacctaaacccagatcagaacctggtctgttacctagactttgattaggacccagatcaggatctagacccgatattgaaaagggactaggactcagaccgggacccggacccagactagaatctgaacccatactaggacctcgactcagacccaaactcaggatccaaacccgaacttaaacttggacatagaccgtgacctaggatccggacctacattggggacctaggccccaaactcgaaactggaaccaaacttggactaaggatctggacctagatgggggacttagacccgaaactgggccccagaaccgggaccgagacccaaaactcgaccctagactcgagacacgggacacaaccttgtactcgaagcccaagacatgagtacagggacacaaccccgaacctggacccaaacacattcataggacgcagcccaagacctgggacataaactggaataagatcgagatccgaatctagacttgatgcttcgacctaacccgtagtaagtgtttgaatccaggatccggacccggatccgtacctagacacggacctagacccagaccgggatccaaacctgatcttagaatcagaataggaatcggaccaggtcaaggactagaacgcagacctgggaagtagcaggacccaaacctaaaccaaaactcaaactagaacccataccgagacttgcaccc

SEQ ID NO: 224156 - DNA, 1838 bp, Cannabis indica
taacagcaaaatccatctaaagagagttgagagagcgaggaagcccgattacccacatcaatcgatttctgttgcagatcaaagtttttgggtttgaagctcaaagattcaatggttggaggtatttcgattcttagttatagtacatatatgttttattaattccgcactttatacataatcatatatgtttcagtttatctatctctttattttttagcgaaattttagttaagatagctaaaaagttaaaataaagagtcattttattatttttgctctaattatgcttcatattttagatagtgtttgattattttataatctaaatttgttaaatataaattaatttaattaaataataaaaaagtaataatatttttgattaaaatactattaaaaaattagcaaaaaagtagagagctttctattcattctctattacagtgagccacttttttgtatggttggagctggttttttttttaagctcactccctattttagctaagaagtcttattttttttttttttttgaaaaataacagttaagaagtgtgtttagaaaacatggttggagatgctcttagcatttaattattttaataatattttataatttgaatttattaaatgtaaattaatttgttgaaataatgaaaaagattatagtgcttttattaaaataatattaaaaaaatttagcaaaaaaatagggagctccctacatttagagagctttctatccattctctattatagagagctattttttttatgattcgagctcattttttttaagactcacctatatttaaataagcgcgtttaaaaaatatggttagagatgctttaatagaaagatgtaaaaaagtcaacaaaaataataaatttttattaaaagtatataaatattatattaaatatataaataaaaatataaaaaagttagtaattatattactaagtagcaataaagtaaataaaaaagtgatatttattatggtataaatttagtctatgttatattttgtgttaaatttagcatatagtacatttagacaacaatatacaccatcgtagggctggccctgagaatatatgtgtctaaggtcatttaaattttggaaagagtatcatgaaattcgaacccatactattaggcaatgtgtcatacaccccaaccaacaaagctgtaaatgttatttatttactatacacttaattttactagaataaaaacctaatgagacatttcattttctattttgggtcccaaaaagtgtgggccctaggaatgggcgtagcccgcttatgcctaaggccgaccctaccccacaattatgaacaaggaaaaaaatgttagactaaatgtagaatgaaaataaagcatatataaacgatatgtaaagcgaaaaaaaaaactacagacatatcgaaataatatatgcaatgaaaggactgaaataccttcagccattgatgtttgagctttaatccctacgatagcttcggtatgagaattcgggcttcctctctctctactctctttagatgaaattttgctattttgcacgaaatgagtgaagagctcggggattgaggctctatatttataggtgagatactccatcagtatctacgccacattaattgtcagaatattttgacaattaatttaggaaatcaaatcaggtaatgaatattgaaatctaaccatatgtagaatatcacgtaattaatttgtctagattcaatgaatataaattattcatttactcaaaatcaattctttattttattccataataaaaaatattctaatattctcccacttg

SEQ ID NO: 224157 - DNA, 3710 bp, Cannabis indica
aaataaaaaacaaaaaataaaaataaaaatgaaatttacagaacactacttttgttttctagtttttaaaattagaaaaacaaaagttgttacaaaagacatttttgttttacaaaaattaaattttttaaaaacaaaattttactttcattttttgattaaaaaattgaaaaacaaaaatcttaccaaacagcaccatagtatgttaatttcaatttttttttaatggatggacatgtgcaattaattatatctgtagtttgttcgatttatttattgatggttctaattctaaatttaaaattaatggtaaaagaatcgagacggcacaatcattatttctctgtggtttgtctattatatatggtgaattatatttatgatgagtagggaagggtgtgggactcgttatttaaattaaaaaaggaaaggagcctatccaatatttacgcagatcttctcacaaaaaaagtaatttacttagtttttattttgagaaagtaatatacttccttgtacattatcattcacttcaataataaaaactaacttattattttaatgtttgtcattctaatacaattatttattatttatttataatacaaaaatcgcatatagcgtatgaacttttttaaaccaagatagctcattgtctaactaatgagtatattttgccaaactatagattgttgaaaacttataacgaaccacatgggataaaactactcatagaaatttagataataaaactataatatcttcaaaaagcacacacaactcaatttccacctgaaacattacaacacgaaatccaaaaataaaatcactcatacaagattactatacaaaactaaaaacctatttatattattataactaaccaaagtattaccctttagctactagcaatttactaacaccccattaattcaaaaactgctcaaaatcaaaacacattaaatatcaaataattctaaaattaaccagtatcttttaatttaaattttactaaaatttctttatgttaatccaattactatttatccatctcgctacttcgtaaataactttacaatatgaagaacattgcgagaagaagaatatttatacttagtattttttctttcaaaaagatggataagaagaataactcacattcagcgagaaacaaccttcttaatcagcatagtcgtttaaatgataaatacaaaaaacagttgggtagttattaaatatctcatgtacatataaataaaacgtgggaaatgtctacgtttcatgagcagttgtaagtgaatagatctcaataaaaataactaccaaccattgagagaaaatactattatttacctttattgagatttatactgtgtattcaaataaatatcccaaataaaaaaaaactcgcgaaatatgtaaattttaactgtaaaacctcgtaaaatatttagagtttatatatttatttatcattattattattattattattattattattattattattattattattattattaaattctataataaatttattacgtaaaatgttatatatttaattaacgaaaatctacgttaacacttatatgtaacaaattgggctcaaacgatctgcatatgatcaatgtttatatttcaagaatctggagtaatctacaactatgttcttattgctctatgtggatgacatactcatcatgaacaaagacaaatctgtgatcaaaagtgtcaaagtcaagctcaagagataattcgagatgaaggatcttggaccaattcaaaagatcattggtattgaagtttcaaggaacatgaaggaagggacaatcaacttaaagcaatctgggtacatcaagaaagttattcagacgttcaacatggaagatgcaaagagtagatcctttccgttaggcggacaatttgttttatcgaaggaacagtatccaaatagtgtgaaagagaaagggaaaatgaaggatttaccctatgcagtaattttaggatgtttaatgtacgtgatggtgagcaccagaccaaacatagctcatgctctaaggatcttaagtcgattcatgtctaatccaagcattgaacattagaaggtcctcaaatgattattaaggtacttaaagggcacttgggattatagtctgacctatgaaaagcaaaaggagaattggaattgaaagggtttgtggatgctaactatgcctcgaatagagataccagaaaattaaccacttcttacgttttcatgacaaaccaaaattgtatatgctggaaggcccagttacagtcagtagttgtcttttccaccatgaaagcaaaatttatggttatcacgaaagcatttaaggaagcgttatggcttcggggaattttgttcaaattgaaacaactgagaggaggagtgaatgtgtactcggagcccgtcatccatccatctttgcaagaacccgatttatcataaaaagagcaaacatatagacataagactctactggattagagagaagatagaggagggattgattgaattaaagaatgtcagaacagaagataatcatagttaatgttgagaataaggtcttaacagtaaataagttcaagcattgcttggacgcttgatcaatcttagaagttagtatactgagatatttgaaacaccaatcatgatagatgcattctttcttcatcctagtcaatattttaatttgaaaaaactaggtagaatttgtggtatagttcctctaaatgaaaaggtctccgtaggtttttcgtcttcctagaaagctagttgtctctcgaaagggctttctcggaaggcctttgtgtccatccactaggaatgttcaagaaagctagtcttcctctggaaaggagttgcggatggctagttattttctcctagaatggagtcttggatagtactccaattgtctctctttctatctgggaagacccttcatcgtgtgctttagtttatagtcttgaaagcgttcgcttcattcaggagcactataacttaagttgacgtggagattctataacgagtagattgttaagtttattaagtcgtaactaatttaacaacttagcacatgtagctaccgagtttagaatctatatcctagatttataaattacaaccaacacctatcattttgaggaatataaggtcagatgagtttcgagagatgatctttagaaaaaaaagattaagaggtgatcccaatataacattggatcataaatttagcactatatatgttgaaaatgttaagtattgacaatatttaatagcataattataaaatatctttaacataaacattgtggtgtttttcttttctttgatagatacataaacattgtggttgttccttatcgtcatgtgatataagcactcgtggctttccttttcatctgtacccatcccatatataaagccagcttggatgagatagtaacatatatatatggtgaggtgaccccatgaaaaaagaatgtttctatcgaaaagtactatgtttcttaagaaaacaagtattgacaaatgtattgatcagaaaacagggatcgatgttcatcaaattaatggtccataccttgacatatcatatcaaaatatacagtttgaagttctttattgccatatagctacacattgtattttttatttatttagttatttattt

SEQ ID NO: 224158 - DNA, 1981 bp, Cannabis indica
agccacagttacttgtctttatatgatgaacatttttttatttgtaattttttatgacatatatatttctttgttttattaaaagtttgtacctggtcatattcaatgacacatgtacaactactcttaaattaaagaaaaataaagcttttgaagctttcttaggagcatgaaaattatttttataagtttttctatattttcttgaaattaagtaccggaacaaaagtatattttccacccttaaattccactcatatataattttatggatcatattatattattttaaattatcatgatatatatagagagagttttttcttttagtacggtggtcaatatatattaatggctttgtaaaagtagcctataatctgtgaaaactacatattaaccaaccaatctcatcaatatcaactatatatataatgcaaaattgaaatgtggattaatatgatttgtacagacatttcttattaagtaacttaaagggatattatagttatttcaaagtaattaagtaatgtttattagtttatctattttttttttttatttgtagatcttacattataatgctgtatgtataaaagagatataattaagaagattgattttttaaagctctcgtatatgcagaccagttcttattaggccttggtcatattaattcccatatatataaataaacaaaagtagtgaagaaagaaaccatcattaataataatggtaagcaatattttcatattattcatatatattatatgataggaaaattaagatgtagagcaatatcatgttcacaaaacattacagaatctcacaactctcacactcttattggcatataaagaaaaataaaaagccaagccaagccacacccacacaccttcataaccatttatataataataataataatagtattaaaagtgtttattattatcatataataaatttagttgtaagcttcagggtggtccttgaggtaagcttcaacagtcttgagcatttgagtggcttgtttctcaccttccttaactttctcttcattcacctgagcatcaccagcactgtagtacttgctaacagtcttaattacgttgcctccatcacccgatgcaaccaattttgattcatgtgtgattttctcaagctgatttccttccaaagcatctccttcaattatgctgtaagagtatgttaggctctccttgtcgatcgcctcgatcttgtgcttaacatacttgaatggaacccctacaaaattaacaacacacactttcatacaaagccgacgcaaacctagtctgctttagcccaagcccgaccctgcttacatacaggatcgtcttttgggtgcataccatcttattaattatttaaaataattttttaaatttattttaggatacttgaatggaaaccctacaaaacaaccgacgcaaacttagtctgctttagcctaagtctgaccctaggtcgtctttcgggtgcataccatcttattaattgttttttaggtttctagcttgcaacacaagttattaattaaaattaccttggccgaaagtgatcttcttgattgttccaactccaccatttccttcaagaatttcaaccttttcaactgcttgaggagagattttcgggacgagattgtctccatcaaggacaaaggccttgaaaagcctagctggagcaattgaggaagtgaactctgattcgtaagtgaaaacacccatgttgttgtgtttgattaatgaacaaaggggaaatttattgagagaatgtatgggtttgagtggtatttttcttagttagttttgctgaagaaataggcacattttggttggtatttataagctataaggtaggctaaaaatactcttgtgttagtgagaacagtactttacttacttaccctctttattgacttatattaaaacaagttgttacttattaattggataactca

SEQ ID NO: 224159 - DNA, 1212 bp, Cannabis indica
gtaaatttactatttaaatttttaagttttttataatagatttatctcattaggttttaagtatttttttttaattattattttttaatatcatatttagtacaattaactttatatacatatcaaaactacttttttttttcgaggaaattagattctgtacctcttttatattgttgtcttttatttttatcttattttttaaagtctatcatttttacctctttattaaaatattgtactaattttgctcttaacattttaaaatactctctatgtgacttatcttagagtattttaagtacagtacatataaaaagaggtatgttttaattaagtataaattagaagtaaatttaattaattaataaatgaaagagatacttttcaatttacccctttttttccttgtaagtagcccaaactataaggtgtagatacccaaaataacaacgatgtgagagactcatttttaaagggtgaagagattacatttgttaaggaaattatgtgaataaactttttgttgcataaaaatgttgattgtctcgactcttgatacacaatatattttttattaaaaataaaaacctaaaaacaaagaaagaggatcaatgtgtgaaaatttggatggattgcggctacttctatcatgcctaaaaagttgttaaagtatgaatatgaagtggaataagatcatatgaaattcattttgggttcctttaattgagatagttgtttttcgtctacactcaactcaataccaaaaagtgttgcttcctttaatgaaaaatgatttcattcataaaatagggtgaaaaacaaggcagtaaattgataatatctctatttctatctaataagccgcataagatgttgacccaaatcccaaaatatagtgagctcagtagtgacacaactgtaattgtcaactatacaaacaagtgttaaaacagacaaagaatccagagagagagaaagagaacctaattcagtctgaggttgtcataacagtcagtgagtgttctgatacgccattactcaaccgtttatggctgacttgaagtggtcgtcatcaactgttgaatatatgtttccctccctcacaaggttttcaatggctaacctgttgtccatatcatatcagattgtcagattgagataatgatgttatttttaaccaaccaagatgtatagagagagagagagaga

SEQ ID NO: 224160 - DNA, 1961 bp, Cannabis indica
aatttttattaatttttttattttccattttcattttctatctcagcttttataaataactggaataaaaacctaccttttaatctgaatttttctataaaaaccaaaagaaaaagtcctatgtttttaatgcatacatattcttcttatattatatagggtaaatagccgtataagtacccaaagttttatgtttgtaagcgatataaacaaaatgtttatttttagcggcataagtacttaatgtttgtaaaactgtaatttttttctaatttcatcagtacagactatgttttgaatttattaaaagagcatttggaagtaattgataatacacatttctatctatacccaatgatcaagaatttagaccttatatgtgccctgtttaagacaataacatagtttgtattgacgaaattagaaaaaaaaaattacatttttacaaatgttgggtacttatgcccctaaaaataaacattaaattatgccacttacaaacataagactttgagtatttatgccgctatttacccttatatatagggattatttcacaaatacacaaaaacaacaaaaaaattacaaaaatacggtctcacagaattttaaatatttttacgatttttttttattttatttacaaaaaatacagtctttttatgttgtactcatgttaatttgttgttgattttttttttttgttatatgtatgttatttttcgttgttgttttgatattatatagatattattttcatgttacttttatgtagttttcttgttatttttatggaaagtaaatatgtaaaaaaaaatacgtataaatttttttacaaaaaaaataatgtcttatataactatcccttatatatattaacacatacatattttgtcaatattatgtatatttcacatatatacaaattatatttataaatgataatcaaaatattttttacatatattcataccaccataactttatacatacaattattaacacataattaataccataaattttccaagatacaaaaataaagaaaatgcacaatattcttcccataagctatcttttttttttctcacattcatatacttgtgactttatctgaaaattaaaagttataatatattgtaagtgacaacatgaaaaaaattaatttcaataataacacattcaaccgtaaagaataaaatcaataagctaacatacgaaaatttaatttcaattattgcttttacttcataatctttataacacaaacagaataggaaaacaagaaatgaaaaaactatcagctattggtaatttagtttataaaaaacttcgttattacaaaataatctattgaacctaatctccctttaaaaacaaaatcttctaggcaaagaactagagaaaaataacaatacaataaataatctgcacaatagataataatttggaaatgaacacaaggatgacaaaatcttataaacatagtttgatattcaatcccaacatatgtaaccacaaagtaaaaaaattagattacaaaaagtaaagctatgttaaaatatgaagtcgaataattataattgacatgcaaattaacaaccacaactaattcatataataacaattcgaagtaaaaatcaaactactattaattatatagagctttcctcaaacatgatatattgaagattaataaaactatataagaattaacaaacagagatgattactattcagaaatagcagactaaacagagaaaataatatagagattaataaaactagcaatgagacttcaatatttttttcttccattttttaggtagaactaaagagaatataaatatatttgttgaattaaaactaaaaaaagaacaatacactaatataaaaaactaatgaacaagaaaatatataaatgtgattatttagaataatagtcatgtcgtgccacaaga

SEQ ID NO: 224161 - DNA, 2147 bp, Cannabis indica
aataaaaaattgaagctaaaaaaatattatagttaaaaattaagatgtatattaaataataatgagtgagatcataattatagtaattttaaagagtgatatacattggagtgtttttagaagtaagagtactaaaaataatgtgaaagagagatagaataaaatattatatttttagatgatgtgtaaattattagcattcttggaagatgctctaaaactgtattattgttgtaattaatgctctaataaaacaccaaatagtgcactattttaaagttttttttaacagtcatatatgctatagttactagttaccgtatttttttatatatttaattaatatatatttatattattgtatttataaaattaaaaatttatttttagaaaattttataatacatctttctaaaagtgatttataaatgtacttttatttattttggtatctaacaagtatttttagtctatattatttttggaattaatacataaaaaatataaattgacactttatttataaaaatacctccataaggtgtggacaacatttataccttttatgtgattttaattactaaaataccacttatattatcactatacacaatcagacgatggttgcagggtggttattgcgtagttgcacggtgaaaagaaagatcaggggaaagattgaatcttggtagagcgacccactttatacccatatgcctattccagagtctcgtccatcgtctgcttaagtgactatttaatagcctttatctctgcctgtgagttaggccaagtactctactatatataatatatccttcctctgttctttttaatatacactaaaccgaaagtcttggtttcaatgactccccaagccatgacctatttgatcctttagaaccagcttcagcattgagtaaagtagtgacaggtgggagcaataacaatagaagctgcgaaagatcctgcaatagtatattcggttgtttgcggtggaatagattcaagcgtctgggccagtagatccagagcaaagaggtgttgacttagttgcttttgcagttgattctaatcccaatgttgatccgacgccacttaccggtgatagtcacaacaccaagagctttcaaaggaggcagacatgtatagacagtagagtggcataccttcttacatcagacgaaggtttcaatcagacgatagttcctgagtggttgctaggtaattgcgcgatggttgcatcagacgaaggtttcaattagacgaaagtttctgggtggttgctaggtagttggccgaaggatgcatcagacaaagttttcaattagacgaaataactattagcaaaatatttatacaactgttgtgaaacattaaaaatcagaaaaatatttcacgtatgtaactctatctacatgattctttatgatttaatatgaacaaattcaccattaaaaatttggaaaataacaaaaatacaccatgataaatattttactatagtattgatgtaattttttttcgaattatacttgagttggattgtttgggactccagttcaactttttgagatctgcctttcatggatttgaaaattgaagtcagaacattagttttatgcaaattaaattggatttccggttgaattttagtttcgtagttgtttttctacacttttttttcttcatgaattcgaaacaacccctgtattgattgattctaatcgtcttctcaagtgaagtccccaaaattaatgatggttctctttctagttgaattttcgtttcggttgcgttgggttgctgaatggttgcacgatggttacacgatagttgcccaagaagcatggattgtgggttgcaggtttgtgtaagtggtatttgtgtaattttttttatttggactgtgtatttgtttatttggccagctggaagtatttctgtaatattgttactttttgttaaaactgaaaaaaaaaccctattttttatataatcgtgtagattataattatttaagacattttataaaatttaaaaaaaaaaattaacacaccgaaaataatatatttttttaaaagtagtgcactaatatatttctactgtcgttaattaatatggtattaattttttttattttatta

SEQ ID NO: 224162 - DNA, 1424 bp, Cannabis indica
ctcacacgacccaccttaacttcgcgaccacaccacccacgaatcaccgcgaccggaccaccgcaaccaccacccaacaccgacaatgtgttcgtcaaagctaattcctaatttttcatgatttagtattaaaacaattagatttagggttaggtctgtatttttagtggagaatatataatttttgaggtttttaggctcggatctgtattttggagggaaatttgtgatttttgcctggttcgatgcatgtctaatgtaggtccttcgaggtccgataggggtaatgaatttacaagtttgcgaggtaggagacgtaggtccaatgggggggtccgatgggagggtccgattgtgtctgatgtggggtttgagagggaggtccgattgtgtaattgggggtgatgtaaatggggggtattttagggatatcataaaaattgtcatatcctacaaatattagttattatgagtttaggagaaaaattttaagcacatgtaaacataaaaaatcaaattgctcctaaaaaatgagcaagcaaagaagaggtgaatgtgagattcaggatataaaccacataccacacatatacaaaaaatattacttttgccaacatatttttgtgttggcaaaagtttagtattgctctggtaaaataaaatttacttttgatgtgttggcaaaagagattggcaaattaacgttggtattagaacttttgtacagcacaaaatgaaaagtagctagtaaaaatagacttttctccgcgtgtaaatgcactggtaaaagttagattttaattactacaaatgtgcgctagaaactttaaactttttgtccagtacaatttataaaataaactgtgactaacaaaagtagacatttctattagtaatataagagagactctaacaaattaaaaaaatctagcaagaagatcttgagtaaagaaatgttcattgactgcttgccacagtataaagcagtgtttcgaaacttttaacttagtaccacactatcctatgataattcattgtgattgtcgtgttacttaattgtggttcacattaagttttttttttgttttttttttttttttgaaagggtggttcacataactttttaagaagtgaaacggatcacaataggtgaccattatttcttttacatttttccttaaatgatttattttattgtatcaaaaagttagaaattagtaatgggttgccatgttatgttatgtcttacatattatgggtacaaacatgtgtttggtctagtcattttcgatgtcatttgattcattttacaaataatgatgctttttctaaaggaaaaaatttaattaacacaactttccaaaaggcagaaaaactaattaaaataagggcaaataaccttttttaaaataataaaaaaaaaa

SEQ ID NO: 224163 - DNA, 1333 bp, Cannabis indica
gagttataatttctcaattccggagaattattaaactgacgcggagtcgtaattaatgagatttaaaccaaaatcgtgacaaaaaatgtaaataatgacgtcaaaaatcacaataaatataaagaaagacaccagaatttaaagaggttcggcccagatatcgataatagcctactccccttgggttttattaatcaaggttgcaaaagtcaagaacatgctcttgatggcaaagaatgaaaaaagtactttttctctaagtgctccaaattgcggattccccttccaggtcatggatgaccccttatataggggaaagggtcggtgcttcgcgcttcaggagacacgacaaaggcggagctatctcaaccgtcttctttatttttggaggtagttgaagtctaatttttatgataatatcccgctattttcgtgagtttatgtctttaagcctttcaagggatctgaacatttgaaatagtcactgacaaggagggtctcctaagggtgtgacacggtcgttgaccaccttcggggatgaagcccatacttggtggcgaaactcttgaaacccaacttgaggaggctgacaatcgtcatcgcggggtgaacccccgagacccaacttgaggagggtgacaatcgtcatctcggagtgaccccccgagaccccttacacttcgttagtagttataatgttatgtaggtgttctcatctaactttgagagcatcattatgtatgtggttggggtagtgtcatctacctcttagactagcttggcatgtgggtgtatggtgattattcatttcgcttacgaaggtgttagtccatagtttttccttgttcgagacgcccaccttactcaagctaggggaaaggtgattgtctgacttccattctaacggtcatatcacccttcatggttgacggttatggccacccttcatggttgacagtcatgaccacccttcatgattaacgatcatcccaacggtcatgactttacatattcttcattaatttattcctaatatttttgtgtcatgtgttgctactcttgacatgtcatcgtcattaaaatttgggtaaacaaattcatgattcaaattataatataaatatcatataattgattaacagaaatcagtcaaatccttttattttattagtatttttttagttaaaaaaattatccaataatatatttaatacaataattaaatgataattaattaatttaattggaattattttaacaataaaataaattaaacaaaatttaacatagacctttatattctatgctacacgtgtgagccatattttaaggt

SEQ ID NO: 224164 - DNA, 1942 bp, Cannabis indica
gttttattgattggatccgacacgccaaagttatgttctcaagagtgtgtggataaaagtatagcaaatgatttcttgggaacaagaaaccaataatttgtgggaaaaagtgtgtattaaatggtattttgaggtctggcgtcgcctgagtatggtggagttaatggagaagatcaaggaatcaatgtagtgttcttggttgacttcaagtgaacttcaaggagaaggtttgagagtggaagatccaaaagagaggaaaaggtctcgaaaagaagaagaaaaaaaaaaaaatcatttcctcaacatcgtacttgatgtatatataggctagagggtttgttagtgatccctcacacatcgggatatttcactaatgaatcccgcataccactcttttttataaataaaatattacaattaaataaatatcaataacaacctccttgtatctaggcaaatattccacaaatattagacaattggttatttttagttgaggatgcaccaatttgaaatggagtgttgaacacatgcgttttagattgccaatgctcgcgcacaacgtcacatagggcgtggctgtgtgctccaccaaacctcgcttagcggcattttccaattttcgagtaaaatgcaccagatttcctttttgtaagctaattttggaccggataactccagaattgagtcatggctgagacacactttcatccgtctcgaaattatctttccaaagcaagttgaaccaggtcatttgaataaaaattaagagagttatacttattttactgaagtcaatttatgctgtcttgtaccagttgcgagcactgctactaccaaatggcaaaggtcaaaaatgcatgttctcagacccctcagggtgtgttttgacttatttttttgaaaaaactaaaccatttacatgctatcaaatagtgagcattttgtatatataattctaaatattcgataattggaacattaattttaagtttgcccatgtaataattttacggttcccattaaaacaatataccattcaacgcaaacatcaactcattttatttccaaaaaaaaaatccgtacaaggaggcaaacaaccttgaaaatgtagagcactataaaataaaatgaataaacaatatacacttacaaatttacatgcacacttagactacaaagagctactgtaatatggctcttcttgatattgactatctctatatataacacaaccttcctagtagtataggttaaagggcaatctaaaagtgctttaacctttctctaaactggcttggaagtatcattacagagtctaaacaaagcccaccttttgtgtgagtgcaatcaatctgggtcatggagaatttaatctttgtggaaacatgggcattgtctactacaaactccccagctctgtatagattccatctcccaggttcagttaagaagaactgagatgtagcgctctgaccgtctgaagtccatagctgaaaccgtactggttttaggtcccaaccatgaacgcgctcagtattgcagactcggcggccaaaccttttgctcgctcttcccaattgcagcctgaagtataggctgtaagtccccggtgggaatgggaactcaacttcaccatcaacttcaaaccaccaaatttgttgaaggtatgcaaccgtttggaatctacaaatgaggaaagataattcagaatcagttgcagcaatcatttcattatcaatatacaacatcagtgtaacaccagaagttgataaaatttcgcatcagtagacccaaactatgaagctttattttctcactcatttctttttttttttttttttgatattgaagagaggggattcgaacttaggacctcccttttgtgaggagagtgtcgattttctgactctaagtagtttcagacaaacataaatataat

SEQ ID NO: 224165 - DNA, 1147 bp, Cannabis indica
ttttatatttttatacacagtagtagtggaaatgggtcggacgccaatttaagtcacatggatacgattttgtatcaattaatttatggggaaatattattggatattttagaatatcagggtttagcggggtaatttaattagactattttatcctagggttatgaggtaacttagcgagaaagtaagggcattttagttttttggcccaaggattagtcacccattttgatgtgactcattctaagattaaaaaataaaattaaacaaaacctaagtcaaaggagattaaaaagttaaaaacctagattaccttcatcctccttcttctccttttcgtggctaccaaaaccagagaaatgccagagctctcctccatttttgaagcttccttctacatggaatttctcatagatcctgggtaaccgtagttttatttattggttattatagggttttcatggttttgggtggttattcttagtacgattggttaggggattccacgaaggttaggggatgttttctaaggttatttaagagtgtataaatctagtttggagtattttgggtggctgtagtggttgttatgcaagtttgagttcaaggaactcaaacttcaatcaatcatgacacaattgagtctattgagatttggcttgtgatttcttcttgaaatatgctcattatgttgtgtttaaaagttttggacaatttggaaagccttgggttagaattgagggtgaaaatcatgtttgtttcctgctgtaaaaatagttaagggatctaaaaattcggtctgccggttttagtatttttgtgaggattacaatttatattttggccttatcttttcatccgggtgttcgttttagacattgtatataccattttgaagcttgcgacaagctctacaatatggtatacattttagagccaaagtataatttttattttagggtgtttttactacgtagttcagtagaaaaccctagattctttttgggaatcaggaagtgttctggagcaaacacttattggttattttgtaaatgtgacttaagacctctgatcattagtagttatttccacttaggttgactggcacacttaaatcagtataaaggtaagactagtataacacata

SEQ ID NO: 224166 - DNA, 1207 bp, Cannabis indica
aaatagttttttgtcaaatagtatttagcacaatttttttaaaattatttttagatttttttttactaaaaaaattaatatttgggataattgcggcaaaagtccccaaacagttagggttgctgcagattagtccccaatctcaaaaattggcggtaatagtctctaagatcaccatttttgttagtctgttagtacctaagttaaatagtccgttaattgctataacaattaccacgtgtcaaagcattattggtacacttaataaatattattaaaaatttaaataattagaaattatataaaaaataaaaactataaaatttatttattttctttttcttttattaaaattaaaaaaaccattatctaagaaaataaaacaaaatcctataatttatccccgaatccaacccaccccgattcttctcttcttcttcttcaaagaatttatcaatgttacagtaaaaaaaaaactgatatttagatctaaatcatcacccacaaatctctcacaaactcaccatcatgatgatggcatcaaaaccattgctccaatggactgtaatggttaaaaggttgaatctcctgttgcactccaagcttttaataatgtcaaattttgttttcttcttttcttactatgtatcactgcctcacatgtctgatggcattctggttacagaatgatactaactagagtacttgcaatgctgttatttgtagaggttggttgtcgatgactgaaaccaactccaaatccaacaatgggtcccttcgatttcgcaaggtggttaggctctgctcatcgactacaaaaaccaacccagaaccggttcattggtcttcaaatctcgacctccggcgaaaagctctggaacgatatcgttgtggtcccaatctcaaatctgagcatggtgtgggtgaggatattttttgttcttgttgtggaaaaactgtaggagaagaaataaaatgggggtgaggcttggcatggggacgatgttggatcttggggtagtctagctcgaacagatctgagaaaattggagctcgaagtgtggtgatcatggttgagctgggttgaagagaaatgaagaagatgaacaagaaaagaggttggctaggttcatgaagaagaagacgaaggggatagagaaaagcaagggtcggctatggaggttttaggggacgacggttggagctt

SEQ ID NO: 224167 - DNA, 1813 bp, Cannabis indica
gcctggtctgggtttatttaacgatttggttatgaggtcccacgtttgagtatcggttctagtcctagtccaagttgaggtatcggtcctagtctgggtctaagtctgagtcctgatctatgtccgggtatgtgtaatgtgtttcagtcaaagttttggtacgagtctgggtctgggtccaggtctaggtctgggttagggtttgggcccagttttaagtccgtgtttgtgttcgggtcttggtctgggtctgtgtctgggtctatgcttgagtgggattgggttctggtccaggtcacgggtcctaggtcccaggtcttggcacaagtttgggtggcgtttgggcctgggttctggtattgatcccagtttggatctgggtctgtgttcggttctgtgtcttgatccagttttggatcaaggtccaattcccattccagggtcctttattctggttcttgttcctatttcgatctcggggtccgagtttgggtttaggtcctagtctagaaattgttccaggtttgggtcttggtacgattgcaagatctagacaccaactacggctcgggtccaagccccaggtcgtgggtcaagatctggatcccaatcttaggtcccagtctcatttccattcggatcttggatcccagtctatgtccgtgtccgggtctgggaccgagaccggggttgggtctttggtctcagtcctagtcctgagtcttgattctgcttctaattaggtgcaggtatgagtttcccatctaggtccgggtcctgggttcgggtctaggtccaagtccgtgtctcggttcgagttcgtgtcccgagtccccatctgagttttgattcagatccgcgtcctaatccgggtccgcgtcccgatccgggtatgggtctgggtcctagtcagattctagttcctgtattcaaacccaaactcggactcggaccctggactggggtacgggtcagggtctgggccagggtcttggtccgactccaggtcttggtttgagtccggatatgggtcctagatccaaacagtgactacgggtcatgtccaagccctaggtctagatctagatcacagtctcgagtcctagtctagttccacttggggtcccaggtctcggtctgggtcctaggtcaaggtccgggtccaagttcatatcttgggtcacagtcccagttttgatgcccatgtcccgggtctaggtctgagtcctaggtctcggtccgagtccaagacccgatcggggttcaagtcttggtccgagactagattcaagttccaatctcggtctgggtccagatcagggttcgagtctagttccaaaatcaggtccaagtcccaagttttgatctgggtcttggttccgaggcccaggtccaagtcccccatccagatctgggtcataggttttcggtatgggtccatgttcgtgtttgggtcctagtcccagtttcaattaccattcagtgtatgggtttgggtttttgtctgagtctgggtcgaggtctgagtcttggtctaattttggggccgtgtcagagtctaggtacaaatcccggtgtgggtctgtgtttgggtccaggtctgggtttgggtcctagatgcgggtctaggtctggttctgggatagggtctctatctggatctaggtcccgagttttgatctcggtctgggctttagtccaggtttgtattcagatactatgtaggtccaagtttgggtttgggatcgtgtcccaaatctaagtccaggtccgggttcgggtcgtcgatcccggtctgggtacacgatcgtgt

SEQ ID NO: 224168 - DNA, 1571 bp, Cannabis indica
taataattttaataattaatattaggtgaaccactaaaaatttagcacgtgtatatacttttgtaaacgtgggtagtctactacaaaaaggggtattttcgtcggtttttaaatgacatataaagattttacgccagtctataaaaccgacgtataagccgtagacgcaaatagttttatatttgcgacctttctaaagtgacgcaaaaaacaattttcgtcattttgaaaccgacgcaaaatattcaatgttctttataacattctgcgtcagtttagaagtgacgcaaaaaaggtttgtgccatttcaaaattgacacaaaaaaaacttgttgaaatactttttttaccttttgcgtcagttataaaatgaagcataattgtaggtaaggaaaaattacaaatttccatgcaatttttcctacttgtattttcagattttagaatattttatataacagtaaatacataataccaaaaaaagaattaaattaaccattataaaacttatataaaaattttataattagtaatcaattctataatcgataacgataaaactaattattaattaattacataatactaaaattgttaatagaaataattataaaacttatattccatgtatcacaaaaactatctataaaataattacataatacaaaagagttaatagcaacaatcataaacttatatcccacgtatcataacaaaaagtggtaagcttgaactcaatcaataatcaaaggcttcacaaattcgacccactcatcccgtactccattgatctcctcgaaacagtaaggagcgtctaacttaaattgtaaaacaaaagataaaaaatattaataagaatgaatagaaaagaagaagaaaaaggagagttttaaaaaagatatagaagatacctgaatgaaaaaaaaaacaatagcaaatatcagttgtttcattctaaaaattgttgtcctctggattaatagccaagaaatatattgtctaccctcaaaagtatttttaaagctttactgaactaaagggttcatcatacaatatattcaacctatcaaagcttagactacatatacacttttttacatcattttataaaacatctgttaggtattaattattagtttaagaggatatatagaccacattttccttacactgcattgtatctcaatacaaacaagcattccaaaaaaactaattagaaaatttttcagagaaacaaagaaacaataaatattatggatgaaaaacttcagggcaggtctttattcaattaaaattgaattataagtatctagaataattatgaaattaaactcaacttaaaagaatgatcattatcatgtcatgagtctgtttccttgaattaacaattactagagtgaaaataattgagcactttttatgcaatttaatttatctatttatttatttatttattatgtacctgcataagaagaataggagctttgatatttacttcccacatcttgttgagaatggattcttgggttcccataattgtggttgcgtttttgccagccattggattgaca

SEQ ID NO: 224169 - DNA, 1927 bp, Cannabis indica
tattttatttctgctggtttttagaaaacatatataacaattctcatgtattccttttttttttatgaaatgaattagacagtctagcttggaaacttgtcctgtctcgaagaggacttcctttgctatcaattggtgctttcattgttcttccttgcaatgaaaaacgaagaaattgctgccttattcgaagatatgaagaagagttttgatgcattctctacaactaacttagggaaatatgcaaaaatgttagagcaacacaaggcggagacgaaggatacattgtcgcaattaccaatcggttctattccaattccgattccacaatcgccattaacgggtgggaactctgggatagctgagaaccgttcagtgccccgtcgatcaaacgctgaagaggatttgcgtgatgttaaattcctcatcaaaaatctcagagtcaaggtagcaagatttgagggttctaacgttgaagactggatctataagatcaataaattctttgatctacatcaagttgattatcatctgcggttgacagtggttccgtttcatttagaaggggttgcatctaaatgttccaatggatggaaaagagtgggtcatttgtggattgggactctttcctcactgccttgcaatcacgatttggggcttccgtctatgatgatccactggggagaatctctaagttgactcaaacaggtcgagtggctcaatttcgtgcggaatttgaagatctgatgacacgaataacaggtgtgcctgaccatttattcttgaatttcttcatttggggacttaagttggaaattagaagggaactgttgttgtctaaaccaattgatttagctgatgctatggctaaagcgcagctgtttgaggatagaaacgatgatatcttgggtcgctctaagggcgatggtatccgttcgggatggtcttcccgctctgttacttactctcaatctccaatctcgaattctacgaatgcgtcgtcctatggctcaacctccacgaatgtgcaaagcccgaagtccttcaaaacaggttcctctccattacctgttaagaagctaactccaactgagattcgagagaaacgggagtgtggcttgtgttttacttgtgatgagaagtatagtttcggtcacaaatgcaagaatcgggtactaattttgtgtggcacggatcaagatgaagaggacgagaccaatccgatggcagaatctgacaagggagagttggatgacacgaatgttgatgaagtaagtttgaatgctctgtccaattcggttaatcctagaattttcagattaaaagccactcatggcaaggaaaccgtggaagttctcattgatagtggcagcaacaacaacttcatataagaatctttagccactcggttgaatcttattagtgagaatacaaggtattttaagacctatatgggcaacggtaactcagtactctattctaaactttgtcgtaatgtggagttgtgcttacaggggcacttattttcagttgatttatatgtacttcctatttgggggctggatatagttctgggtatgcaatggttacgcactttgggaccttgtctacatgatcacaaggcccttaccatggaatttcagtggcaggggaattcggttaagcttgaatgaacttccgatgcggcagcacatcaattaactttttctcagtttcatgccttactccgggaaggagatgtacgagaaatgtatcgtattactgctgtaacaaagagtgacgggccaagtacaccttagatttttcaattagatgccaagttacccaattggggcagaggtcttttacttgaatttcaagatgtttttatggagcctactcagctgccaccattcagaagtatggatcatagaatttttttgcaacc

SEQ ID NO: 224170 - DNA, 2903 bp, Cannabis indica
aaatcttaactagccttaataaattatatataatatgatacaaacctgcttttattttagttttttataaaataaaaaaataaaaaaaaaattaataaatatcaattgcaaaaaaagacatattaaatatttcaattaaaaattaatttattttaagtatatagttaattataattaacttaagtctaaaaataaaaaatttacttattattaacctgttgtaattaaagatgtaaccattatgattatattttaatgtaaccattcaatagttacttatatattttttgacaaataatttatttatatatattgagagaaaaggttttcaccaccaaacatcaagatcaatgagtactctaaaatagtaggggcgagaatctactatcaaccgattatgtataaaaataggactccttggccaccaaatcatactactacttgtagtcaaagtaagtttggtcaagacatgagcaaaactattacaggacctattataacaaacaaaagtaacaactttgagcctattacaaagaccaacaatatcattaaatactagacctaaagaagtaataagagagacattatttttaatttgaagcacaacactcaaacaatcagttcaataataatattgtcatacccaaaagaaaaacattgggacaaagcctttttaatagccaaagcttcagccacctcaggcacaaaacaaccatccaaataccaattcactaaagcacgaacaatacccaaattgtctctaataaccatctccaagccactacaattacctgaagagcttagagtcgtatttttttttactttgagataatcaagaggaggatctttccatttgggaggtgagctaaagacgacagtcatggcagaagaggaggggtaccaccgatcaaacactgcctattgtgaaacatccctaaaaagtcatgagcccaatgaacagtgagagcaggagacaaatcaacattgttatggatcattttattatgcttataccagattctttatatgatcaccataaccagttcgaccatctctttcgaaaggggattaataaatctatgaataaagtcaagaaaatccacacagtgaactaaagaatctcccaacacaaactcgcagattttcctacaaggaagtagagaaatacaaccccaaagcatgatgagtaggtttttcatctacccacccaaaggacataacacattagagaaaagatcatgatgagctaaattgattttagtaggacgccaattatgggatgcttgccaagcaaaaagtctaacctttggaggaagattaagggaccagatctttttccaccaacccgacaaactaccagacggagaagcacaaggcattgccaatttgcaaagagccaaccaataaccactcttaacagaaaaccaacatgacgtctcaaagttttaaataatcttatttggcacatcgtttgaagaccatggaataaaaaggatagcctcagcttcaatagcaaaaaatctagatcaaatcaagtctttatcctaccaccccaagccatcccttaacaaagaaaccattcttgaatcattaaactgatggggagatgtcaagacagagggcggcactgaatgaatctaattatatgagtaaatagcaatgtccttcccattccccatatgctagatttcccctgaatcaaagagtttgttagcccataaaatattcttccacacaaaggagcctctctaggacttcttaatttcggcaaaggttttctttcgaaagtacaagccttttaaaacacgaccagctaagcaaccaggaacattctaaatacgagaaatttttttatctagaagagactgattaaataattgtaggcctcaaaaacacataccaccatcctccttatgcaagcaaagtttgacctaagtacaccaatgcatcttttctttgacatcatttccatcccacaaaaactgagcacacatacgatgaacatttttgattaagtcttttgaaatcttaaagagatttatagtatatgttggaatgaattgaatgattgccttgatcagaacctcatgacctgccatggagaataatttcgacttccacccgttgagctttttccagattctatcacgaatggcatcaaacaaacccatcctgatatgccccgcaaaacaagaaaggcccaagtaattctcatggaaatcaacccccttaacacccaaaagtccaccagattgtctttcttagagctagatacatttaggctaaagcaaattgtagacttgtcaaagttaaccaattggcctgaggccgccccataccagctcaaaagttgcttgaatctaacacaacacatatcagaagccttgaagaagaaaaggttgtcatcatcaaatatgagatgagatataactagaccacttcgaccatagagaaagctaaacaataatttattctcacaatctcctttaaccaaactcgagaggccctcgacagagagtaaaaaaaagataaggggacatggaatgaccttatctaagtccccattatggagtaatagaacccagtacctcaccatttaacaacgctgagtactccacagaagagatacaatacaaaattttcctaatccaatcaccatgaaagacgagcttcaacataatttgtttaagaaaacaccactcaacatgatcataggctttagacatgtcaaatttgagagcacaataaccatccctacactttttttttcttgagagcattaatacattcaaaaccaataagtgcatttgctattcacaaataatatcacacgaaacctcatacatgcagtaagttgtagtcttggaaatgatcttgtaaaaaatattacaaagattaatggg

SEQ ID NO: 224171 - DNA, 1620 bp, Cannabis indica
ttaagggttatttcaaaacccgacacatgaaattttaatctcattattgaatgctttttttttttgaaactattattgaaagttaatttctagtttctattatattaaattatttctattgttctatgttcaatgttaggatatttttatcctaagtttcaggtcgattttagagttgttttctttgttaatgttatcttttggaattgttttacgcttgatttctcttgttttagatccccgaggtattagagttcaaattctatcaattggtgaaaagacgggctaaactgggggaaagtctattgaagctgacaattttgtttcaatagtcgtgactaccaaaatccatagtcgcaatgaattatgaggtgggaactatggtcgcgactatgaagctaggcagaatgctcaatttatgaggtttgcctatggtcgcgactatgggctaaacacgattcggagatattagtcctaatttctatataaggtctcatgttttagaaacaaaatactgaaaaatagaaccctaaaactaaagaaggcgacaaaggaagtaattgtggcgacccgaagcatgatcaccaactaattttttcttttcccttgtttatttctttatgtcaatttctatttcaattattatcatggatttaattatgaactaaattcccaatttagggatatatgaatgttagatgacatttcctcaatttagttaatgtaattattgatttttttctttcctatattgtgtgatttgtttttatttatttaattatatattttagactggacatctttaatgtgattcatgatcctaatatgaaatctgagaagtgaatattaggaatactctaataggacaaacataagttttgatgtaaaacgagagtatttacatagcttatgtgatttttagattatgaatttaatgcaagttatatgttaatttactttagagatgcaagtaaatgatatatgatttaggaccttaatgatctgagaagagttaaggttaatttgataatctatcatcaccaaaagggagagaattaataattaacataaaaattgggaaactgaactaacagaatccatattcttaacattgatccataattaattacacttttttatttttattttcttgctttttaatttatagatatttaattagtcaacttttttttttattgatttcaccaaatcgaaacataaatctaatttagtggtactcaataacaattccttgtggatcgacctcacctgtgtgagtttaaaactgcaatagattacgtatacttgcatagtgaataaaaatagagcaacaagtttttggcattgttactggtaaattgatcaaatattgatattacaataattagattaaattctactttggttaattctttctgctcattgctaatctatttcttttaattttttcttactctatttcaggtattgagggtgcatgcgacgtcaaggacaaagtgtaatactacttgttgatcctgaaagtgaaaagacatgcaaaagaaatagaagaaacaaaaggcaagaaagaagtgcagcgagggctaaggcagaagaagtcatggctgacaacgttaatgg

SEQ ID NO: 224172 - DNA, 1012 bp, Cannabis indica
ttgtaatttttatcggttttttcaatttgatttggacggattattcagtttgggcggtttttacgaatttttttgtacagccctaattctgagcatcttttttatcttcggaaataatgaagatacaagtgatctgagggagcaaataagatattttgggggtcgaaacagggacctagtgcccaggttgacatgcaacctggtttgcatgtttccactcctcaaacaaaaattttactccaagaattcttcttattttggtcaaaaacagggtaggagaccttgctcacaatcttgaatgccttagaagtatcaaaacgagctttgggaagtcaccggggaagcaccaacgcccaggttgacgtgtgacctgatgagctaggtattgcttatcaaaatctgatttcgtcttgaccatccgactattttcttgtagtaaacgagggctacgacttgtgacaaattaaattcatactttgatatttcaccctttcaacaaggtggaatattggcaaaattaggaaattttgagtctacccaatttcaccaaaaagctacatctccgagaactggtgaacaacttcaccataacaaagaatatgactaagtgatgttaacatatcacttaggcatcaaaaaaatacaagtatgggacatttttttacttatccagcgtccaggttgacgtcaggatgtcaacacgttagatgtcaacctgggcgctgggtgctaaacaactttcagtaaaacaataataactccctcaatattgacctgattgatgtgattcaacttgaatttagaagctattatgaagatctatcaagtcatgtatgacacccatatcacaattttgaagatttcaagtccaaaattcgtacctaagacagttgcaattatttccatagattacctgaaaacggttcgacggacgagattcaaacttcaaaaattgacgattttcatcaagagttaattttcaccgttgtatcatcattaatggccaagatca

SEQ ID NO: 224173 - DNA, 2009 bp, Cannabis indica
  modified_base (80)..(80): a, c, t, g, unknown or other
tctagtttccacgaaccagtgttgaaactgttcatgttgcttatcgaaagagactcgcaggattgttgcaagtcaaccanagtttggctgagctgagcaacctaaggatcgaactcctcaaggttgtctatctccacgtgaggctctccaggtgggatctggtcattggtgccagtcccgatagtggctgatggtggccttggagaaagagttgaggagacagttccaatgtttgctcctagcgcttaagccacaaaagtagtcatgattccaactccatcaactggcgagcctctagttgttcggccagttgctggagtctatttgtcaacacttgtagatcgtgttgcaaccatcttgttcagtaactttcttgagctatggctctcaatgaaagaatcaaaatgttgactaaaaaatttggactaaacttttaagccacacccgatcgctagattggcaagaattaatatgtagttaagtaattataagagagacacatcaaaatttatagtagttcaccccctatattgcgatagtaatgtgactatgtctactttgagtttttatttctcacgagatggtaattacagcaatagactaagtgtcagaagttccaaattttggagagagaaagcttagattgagaagctctaaccttgtgggtagttttccgaatgtgaaaaatgagcttatggagctctccttttataggggaaggagacccacaaaaatagggaaaaatataaataagaagtttttgaccgttgatgatgatctaacggtgaaaattagctcttggtggggatagctattttttggagcctggcgggtcccgctgcaggtaacttggagcttattttcgtatatcccttggggtaaattttgatgattatagcttcaaaactatgtctagattgtgatacataacttgatatagcattaaattaacttctaaacacaagctgaatcgcgtcaataagatcaaaattgattgagttatgactattttactaaagacagttcatgacccaatgcttaagttgacatcccaacgcccaagttgacatatgacatcaacctaaacattgggtaagtctaaaaaattccaagagatgtactttaaaatgcgtaagtaatattttgacataacttagtctagtaatgtgttcttgcgaagctagtcacagattctcggagatgttgctgttttgaagaaatgagagactagaaaatctttatttccaagtgagctggaaatgagaaatgcaaatttgtgaatttgatttctctaacttcattaggtcattgtcattttgaaaaactagacagacgttcgaaacagcatcagattcgaataagcagaacccaacacacaaggcttttgttaacctagggcctcggtacttagtcccgagttctcaggattttgtttctgatacttccaaggcttctaaacttgaggacgaggtctccaacccccattttataccattccagattcgatggtagcattagatttcgcatttgagcaattgaaggcagcatcccaggtttattgtcaacttgggcgctgggcccaaccttaggtgaacttaggcactgggcgctatttccagggtctcgagactgtagttttctcttgtagtttgcttgaatcttaattatttctaatgaaagaaaaaaaaaaattcttggaatactttttgctaaacttgatcgaaaacagcctagccccaagtgttaacctaggcgctgggtcccccttttgccccttcaaaaattctgttgttcctcaaaaatagttgaatcttaatattttctgaaaatagagaagttgccaaaataattcttgaaaaattccattttaaatggcctaggttaacaaaatgtcaacctggacgcaggaccagccccaagtgtcaaccttggcagtgggccctgttatttgtacctaggaatagttctttttcctctaaaaggaaatttttctttgtttttaatgaaga

SEQ ID NO: 224174 - DNA, 1802 bp, Cannabis indica
tagtggcacattttaatatgttgattatttttttgttgaaagagattatgttgaatattattgtaataccttaagtttaataaccggattagcagctctaactagattaattatgtattaatgagaaattaaattattatttaatttaatatgtgaaactatttggtttattgtattttaagacctcgttggtgtgtcaggggcattttcgtaattttgacccgagaatagtaaaatcgtaattttatgatatactgtacttatagactatatattatatagtatgtttattctgtttttctgtaggtgttttctgacaaatcgatgcggtatagtcataatgggtattttggctcgaactgggttcggggcctaaaatacatttttgggatttatgataaatgagaaatttttaaatattgtgatatgtatgtgtgagtgaaataactatattacccttgttatttgtttatgacattatttatgccttaggggcattttagtcatttgaccacataatgcatttttcaacagaaggaaaatcatatttttgttaaatttggaaaatcaaattctgagttttgaaccccatagccaaccctctctctccttctatcttgtttttttttttcaaattccaattgtggaagaaaaggcttgagttggtgtagttttgtagatgttcttgcttggggaagcttgaggaacttgtggtattgattcttaacctttttgatttattaatctctgaagttatatgatgaattaagatgttcttgatgttctttaaattgtggttccatgttgatgaagttgaaggtgatttttgtgtttgttgtgtgtttgaactactagaattgtgtatattgcatctagatggtttcgggtggattttagggttgagaaatgtgattaaattcagggtttatgctctgaattttttgggcatatcctgaaggtttgaatgctttgaaattcaaggttgtgaattttgtgtaatggtgtgatttgtgttttatatgctttgtaatgagttttaattggttattttgagcttgttgtggtactcttttgggtcccaaaatttagatgagttgatgttgaattgaatttgaggttatgcatgatttggataagtttggtatgaaatttaggttgattttcgaaggaatgaaaaaaataacatttttggggtttcaaggcccctcatcgcggccatggtttggctcgtcgtggcatgggcaggcaggttgtggccgcggccacggtttgcctcgccgcagcatggccttgttttccttaggaaatttcgtatacttgtttttgccataacttttgacttgagactccgttttggacattcttgatatcgttagaaagctcgtttcgagccctatatgctagtatgtaattaaaatgcaaattatatgtttatgtggacgtgattttggggattaactctatttgtgaaatcttaggaatgtgtgactaggattatcggtgcctactcaaaaatacccagggatttagaatctccacatacttagattaccaggtaagacagtaaactagcatgtagagttaagcgttgtagcgctcatgtatgttattatgcatatgttaagtgagaaaccgaaattagggttattaccctaaagtaagcgattatgtggtctaggattattacactagcatttaagtaattttgaatgctatattatacttataaatatttaaatttttatatcacaccctataagtaaattattacataatcatattttttttatattttaataatt

SEQ ID NO: 224175 - DNA, 3606 bp, Cannabis indica
aagatgtctatatatgatatatatagtccaccttgagagaggcgggagggagtaacataattataacagagtgatgtagctcatattcttggttgttatgttggttatctaaccattagtttggttgttaggataggtagtttgattagtcatttatttatatttttaacctcagtttgttagcttcttctcttctcttcttttgtataaattagtgctctgaactctgaagcacttcttagttggattaaactagaaaaatattatgtttacttaaataaatctagattttggagaaaaattaaaagcaaactcaagcttatcgtaaaatttagtttttacaaaatatatcatatatttttaataaaaaataaatgatttctaaatctcttaattagtttaaaattttaatttctttttcaattttcttaatcattcaaaatgattttcttttttaagatctaaagtaattttttaagatttactaaaaaatattaaatctttctcatttttattttgaggggatacgatttgataattgctaaagtttagggggcaaagttgctaattaacaaagatacatcagtatttaaacgaaataatcggacggaacctaacagaaggactaaatttctgtaaatataaaagttcagaggggaattcttactaagatgtataatttatagggcagaattattattatcgaaagttcaaggggcaaaattactagttattttatttaatattaataattcaattctcactaatttaaataagttaaatagaccttattataactatgtctataatgcatagttacatcaataaagtgggtaaaaaatgaatgaaatataataaaataggcatatatatagttatgctaaaaaaaatttagaacaaaactctagaagaattacataattgagagaaaatttaagtggtgtttggtaacatttttttaatcagttttttgtttttaaaattggaaaagtaaaaatatttttcaaaaacatattttataaaactgttttcacttttcaattttttaattgagaatcaaaattttgaaaacagatttttgttaaataattttttttcttaatcaatattttagactccaataagatccagacccaaatcccctcccccccgaccctggcgctgaacctaacatttgactcaaacccgaatctgatgccgaatttagaccaaaataaaaaaaaaattaaaaataaaaataaaaatgaattttaccgaacaaacttttattttctatttttataattaaaaaataaaagggttacaaaacgtatttttgtttcaaaaataaaaatttacttttatttatgattaaaaaattaaaaataaaagtgttaccaaatgacacttcattatttaaataaaaataaatgttagaccatactaaagatacaaattcattaatatatttaaacaagtttacgataagcaataagacaaaactatttaaacttatattttaatatattgaagaaaaaaaaaaataagtttgaataatttcaaaacatttttgggcttgtggttgtaaatacaaaggtatctgatcatctaattaggtcaagattgatcatacaattttgttacctaatctaggaataaaattaaaagagattaccaatatcaatcaagtcaaacaaataataaatagactccaaaacttcacctaaaagagatgattgatcacggttgagattcacctttgagcatcaatctcaaatctcattgactcaatctagcaaataaccaagtcaacttctataccaaacaaactcattaattagaagagctacaatattatgttcaacaccttaatttggagctacttgcctactattctctcactcacagactttttcaaccggaaaatcttttgaatttaaacaacactcttttaaaaaaattgttttagacaaataatttattataaaagttgttattaataaatcattgaaatctggccttaacctcttggttgtaatttcagtgtgtttatttggcaattttgccttttcagtaaagatactaaaaaaaaaagtaaaaactacttgagtttggaagttcaactattaaaatcttcttgtttaagttaattaaaatatctctaaacactatgactatatagtacattttacggttagttgttatttacttcaaatatgcaaattcataatgataataatatattttaggaaatttatatagtacacatcttaaagagtcgttcggctagattctttattctttgttctttataggttttattttaattttttttatgatcgtatacgttgtagctatttaagattatttataaatttttaaaaaatcccgaacagtttataatatcaaaaataagatttacacaattacttatcacgtgtataaagaaaaacagtcaaacatgcaataaaatatataaatcttattttcgacattgtaaactactcataattttgtgaaaatttatatgttgtcttagataattataacatatacaattaaaagaaataaactaaaaacatctcttatatgctgccaaaatagataaggtctaccaaaatatcctttcaaggtgctagacttaccctatattttatattatttagttgtaattattttcatattttatttagaaaaaaaaaacaaataaaatctctctatgaatgaagtacgtacgtaaaaggagtttataaattactttttgtattttaaatataaataatattgatagcctaagatgcaattttaaggttcttgttagaaattattacatccaagagtttagagaacataaagccataaatcataatatttgttttcttccaaggttgctttttattttattttttctactaaagtcttaaaatacttacaaaactagctttgaatagttcatggtcacaaaatcttcaccagtcattcccatcccactaaacactatcattagcttctttaaaaagaagtatcaccaaataattatttgagttcaacctactcattattcaagaaaatatactttaaaaggaaaaaaatgaagcagaatagaacgatcaaactacagtgaagaacatagcattaaacatatcatcatcctttatttctcagtcaaatcaaaatttggacattttaatcaaataacaacttcacttagggatatatgcattttatcaatgaatgtcatgatggagaattagtcaattagtatatcattattatatctttgctggcatgcatatcaggataacagagctgcaaagaatatgctcaaaattcaaattcaagttcacaccctttcctatattctcttaatttcaggtttttacaacaaagttacatcaccaatttaatgccatacaactataaaagacaactctatatgttcacaaactaaaagcaactaagcttatgatttgtcagacattaaaaagtaaaaaaactacttcagaaatttgcttttacacaagatgatttgatacattaaataattcaaaccaagtggagaagaattaagaaagaaaaaaagaactaatttaccattttaactctcaccatcatcatcatcatcac

SEQ ID NO: 224176 - DNA, 1163 bp, Cannabis indica
aaaaaagagagagatactcccgccattaccgaacaactcactatctcacaatttactcaaacgagaaaataatgccttagaaaatttgaaaaaaaaaactcaaactaaacaatcagtaatatatgtgtatgatataggttgttacaaaaaatatattatatagaacaaagacatttcaaagaaagatgtaataaagaggatttgaataccaatatcacactcggtaccaatggcaagaacagtggccaaatacttggtgtcgaagccacttttcagatttgtgctcttcaccacaataatatccaccagagaagcgcccaataaaaaaactataaacaaagatctagaaagataaaacttacaaaatgtaaaggaaagatcagagacaaggacgtcggatgtgagctcagccaggggacaaaggcgcggggtgcggtcgaagagagacgatcggagctagagacgatcggagaaagagagagagagagagagagatgattggagtagggagatttgatcgagctgagggtagagtgaaattagggtttttgctttctgtaattttttcttacataataaacgattaaataaatctcaaattgtagtttttcattaaaaaatatgtataaatttcttttattaaatacattttttaactaaagttaaaataactctcaaatattattttaggactttaaatattgtacaataatttttagtcctccaataatttttctcttttacaataatttttttaaataattttcacaataaatttttaaatacaactaatttctaaaactatcatctaattaaaaatatataaattctatttattctcaaattataaatttattaagcaaaaaaaaaaatatattttttttattttttaaatttgaaactttttttggtattttattttatgaaatacaaatttgttttattaagagaaaatgtacaattttctttttttaaatttgaaaatttttttagtattttttataaaatacaatttttttattaagcaaaaaaaaaaagtatttttttaaatctaaaacttttttttggtatgttaaaaaagaatattttccaatattttatcacttttaggaatagtaactattcccaacaattataaatcgttgggtatacttagtattccc

SEQ ID NO: 224177 - DNA, 1293 bp, Cannabis indica
aatttctttaaggggaatcttctttctcaccttcatactaactttgaatttggactcatccatatctccaattgctaagcattctcctattgcatccggagcacgtatgggatggaaaaccttgaatgtggcttgctcatcttgagctctcatggtgagctctcctttttcaacatctatcaaagtccttcccgtggcaagaaatggcctccctaaaatgattggaacttccctatcttcctcatagtcaagaataatgaagtccgccggaaagatgaacttatctacttgtaccaaaacatcttcaatttttccatccggatgagccatggaacgatccgctaattgcaaagtgacggtggttggccttgcttctccaattcccaacttcttgaaaatagacatgggcatgagattaatactagctcccaaatcacaaagagctcttccaacatcccgtcccccaatagaaattggaattgtaaagctgcccggatctttcaatttaggtggaattttattcttcaacatagcgctacagccctcggtcaaagcgaccgtttcaaactcgccaagcctccttttctttgtcaaaatatcttttaagaacttgacataatttggcatttgctctagcgcttctaccaagggaatattgatatggagctgtttcaacacatccaaaaacttcctgaattgcccatcttgctgctgtttccgaaatctttgaggaaatggaaggggtggtttaggactagaacatactggtgcggattgctgactgtcaggttgctgaccctttgctgtatcaactgggctggtatcagcaaattcctgggcagttttgttactcaatttttcgtcgatttggattgaagtgggctccccactaccctttatttcctcctcagaatttttcagatgcttgccactccttagttgaatggatttacattgttccttcccatccctccttggattttccgtgtcactaggcaaagaaccttgcggcctagcttttaattcattggccaaatgtccaagctgcaactcaaggtttcgaagagaggcagcctgactttgtatcaccgcatcatttttggccatataatcccgcattagactctccaaagaactcggttgggaattttgagcatgttgtgaatgtcgcagttgttgtgaaaaacctagtggatatgcttgtcttccttgggctggtgcatttcttgagcttgctccttgaccccccccacccccaagacaaattggatgattcttccatgcttgattgta

SEQ ID NO: 224178 - DNA, 1496 bp, Cannabis indica
gttttgattaaatcttaatggcaacccacttgaagcaacttcttcatcattgcaagttgttgttctctttttagtaaatctatttatagtagattgttgtcttttattttgctcgacccaatcgctaaaaggacattttttacattttctctccacatgtgcccataatgtgctagtcccattcaactttgtatctgttgcataatcggtaccacaataattgcaagcagctctcggcttcttcggatcacaatctggcaacatagtataatgatcccaaacactagatgttttccttccaatcctttgcttcttttccggtcttgcactgtctttttccttttcacaaccctcgttttcgttgttgttgttgttcttttctttgtccttgtccttgtctaggcaatcatttctcttcttcgttccattcccttttcttctttctttcattgactcatccctatcagaactagacaaattagtttctgtagtggttaagtcattgatgatctcctctacatttttttcattatccatattatagacaatttatactgcacaaagaaagacaaatataataattagcataataaattaaataaatacacaaaataaatatatatgtcaatgtcataatcaatctaaaactctttttattctgcctttctaacttcctaatggctaatcatatccacgtatataaaacattatatatagagagagtaattaaatcaatataacagaaacagattttattctaaaataatatcaccagaaatcagtatcacacctaaattttataatacaaattcaatccagaacaagtttaggcaaaccagctaaagtgagccaaaaatgtggcaagacaacattgtaacctcagatattgattgtgaaaacttcaagttcctctatctaaattagtattcattacatactgaattattcaatgttagctaagtaactaaattaaaaacatactgcagtaataggaaagtgtaaattaccagcttactagaaactaaaaccataactaaacttgtaaattgacaaattattgaacaaagttagtaattaagaaataatataaagcagcaacattttcaattagtgatttcaaaaacacaaaatatttactagatttcatatatcaactacaaagagccaatcacaacatttatcacaaacataacatctatatataaaagttaatcttaaacattacccaattcatgctgttataatagtttaatatcctacaagcacattttgaatgtgggagatatagccactgtattataatatcttaactatactccaaataataagataataaatataaaacatacatcacatcatctcatcattctataaacttgtttcaattattatatgattccaaacttaaaaaggatacacaatatattaattatgagtggagtttttgaattttagtattttacaacaattttcagcaaaaaggtggctcttaatta

SEQ ID NO: 224179 - DNA, 1722 bp, Cannabis indica
taaacgaaagaggggtcctggtgcagagaaaaaggatgcagctgagatcaaacaaaaagaattcgaagaaagcttgggcaaaatatttgtaagttatttgtcccagtgtttttttgctaatattttttggttttggaaacaacatttttaattccgttcctttatttaattgatgcagccaaaccaatttcgaagcttatgctgttgcacatgcagataaatcaaaaacagatgtgagggacttggagtgtgttatgaatcttttatttttgatattcatcatttagcgttctttacttaatcgagagtcttaattttgcaggtgcttggtagttttaaagagtaatttaagctgctaagtgacaaagtgattgagaattgggcttcatatgaagttgaggcttccccttcgaaggttggtgttagagggaaacagaaaaagttaaaggagacagtatctgctgagtcaggagttgagaacaatgaaggggtaggcgatgttcaagcatctgctcattgctccttcgaacgtttaggtagaatagtcccacttctcaacgacgctagaaaagaaatggtcacaaatgccagtttctcaacattcttaagggaggatggctcgtacattgatgctaagatagttagttggctgatcgatcacgtggatccaaccaattctcggtaggagatatttggaagaataattcaactatcgtcgaagctgtttgaggatgtcataagaatcacggatgggggagaacttgtggtaacagaaaaagaccgtgacctccttgaattgagaaaactttgaaaggaaatgactacaggttttccctgactctactggagaaggatctgaaggaaagtagcgagagagattacctgtttctcattaagtttctacatgtttgtattggaacagtcttgctgtccaataatggtaccgaggtcagcattagctacatgcattctttaattgatacaatttaaattaagaagaattgggcgactgctggctttcgatatctaatgagctctctacagcagtacaagactaagaacacaaaaaatgttttcggctgcaacatattttactggtcaattttccccttattatgatggtattaattttatttgcttgtgtactgcaacgcttatagatgtatgtatttttgttttgtagaagcttatatatttgactcatgttgactggactgctagtcacgtggaccgcactatggctccaattgacttttggaacataaaatagtgcaaatcagtgtccaagtggattcgagaccacggtggtcacacacactagtggaaaggtacatttactactttaattttctgatgcgttagaatttgatttgggagatatgctaactaactttttatgtgtactaagtaggtgaaattgactatcacctatgtgttagtaccaagttttgaatccgctgtagttggggaaccaacaaatgacacaatttacaaagcgacatgactagcaatctaatgaagatagcttgctatattggggagaaagtttcttaagcaaaggaagggatggatgacctaaacgagaatatgcctcaaaagtggaagcaacactcgaacaagcaatagatgttggcgaaagtgtgttaagaatatacaagcaaccagattcatgtcctttacaaataattgtcttcgtcataagatcctgaaacaaacaatgat

SEQ ID NO: 224180 - DNA, 2638 bp, Cannabis indica
gagttcctcgatagagtagatgattttatcaaatttgaagaagccatacgacaggcccaagcggggcatgtcaatagtaggcagtcacgaggcacccattagcctcatgacccactaggctcacaggcagacaacaacaatgctgcccagacctctagtggtaataacactaaaaataagtgcattacctacaactctaggaggaacaatggaaaaaaggggaagtttaacgttccccccacgccatagaagaacaaggaggaggagaagtgtacttgcttcaccctcctaatagaaaagcttgaggccatcttcatggatactcagggaacggtcccataacgaaagccctttgctatcgaagggagatgggtaagagggacatgttgaacttctgcagatatcacaacgactttggcgatgacactaatgagtgtcaaatttagaagagggagattgagtacatgataaggcataacaatccccacctatgttgttttgtgcaagaccactaggcctaggccttgtcttttcagaccctccgaccaatccgtggtttctttcttgtatttatgggccccatacttccatgcaaaaaaagaattggatagagttaatgaagttgggtgatagatttggaggtccttggttgatccttgatgatgttaattttgtgctcaatgattctgaaagagtaaggtctaagggcaaagatcaatttgctccctttatttaagagcttgttttctctcgcggtcttattaatttgcctatccaaggcaaaaagcttgcatagaataatcaccgagagggtggggctcatagtaaatcagttcttcacaagggtttggtcaatgagtggtggttgaatcggttgtcgaaggctactctgtgctcgtactaggcttgtaattaggatcatagactgttgtgctctttttttaatggtttagatgtgaattttaaatggtgcttcaaatttgaggaagggtggacccaagatgatcatagtaaacttgttgtagctcatgcttggtagactaccactcacccttgggcttcgaccaaaattttcaagaaattggggctactagggtcaccctgctacactagaatagacttctgtttgggaacattgataatactattagaactttggaaaataagcttaatcttttacaagctttgtcggtgggtactagagatttgttagaggagtgtgagattcagaacaccctgaataaagctttggaaaggaaagctctttattggaaacaaagagccaagatctcttggcttaaatatggggatcactattctaaatttttctttttgacctctaccattagaggaagacgtaatgttattgaatgtattctggatagaaatgatgtgtggattactagatgtgacttaattaggaaagagtttttggattactggagcagaatttttttgggtccccacccaacccaggagcccgtgttggatgacctcatccaagatagcctgtctttagatgagcaggaagagctcatcaagatttcttcagttgacaaaattagaaagaccctctttaccatgggtagcaataaatcctcgattctgaatggaatgtcagttctcttttttaaacactactgggattcggtgggtggtgacttatgtgacgttgtttctgattttttcaagtctgggactatgcattaaagtgtcaattccactaacttggttctcatccctaaagtccaaaatcccaagagggtgagttattttagactgatctctctttgcaatgttacgtacaaggtcatatctaaaatcaatgtaaataggatcaagcttatccttctaagactgatttgcccaatgtaagtaacttttgttccaggaataaacattcaagaaaacaatgtgattgtccaacaagtcatccatttgttcaagaggaaaaaaggtcgagaaggcttctttgccattaagattgatctagtcaaggcttatgataaacttagttagaagtgtattgatacggttctggataagtttggggctcctaggatgtttagaaactagatcaatcaaagtattcgactactgctcttaatgtttgcctcagtgtggctaggttgggagaattgttccttcttgtagcatctgacaaggtgatcccctttctccctatctctgcatttgggccgataaaattctttctaaacttttgggaagtgctcttggacagggggacattaaagtcattagactcattcaagggcccattctctctcatatccttttcacggatgaccttatccttgttggaagagccaacttggtggaagctgaaaaattttggaagtgcatagaaagtttctgttcctggtcaggtcaacaagtcaacaagctcaaaacctccattttctttagcaaaaatactcccattgggatgaaaagaggtattaaagagttgttgggaatacaggagccggacggtaatattaaatatgtaatgaccgttatacttagacatgggattaatacgatacttagcactaattaatctaactatgtgattatttatgcattttatgctttatagaccctattttcatgaaaatatgtgttatgattattattt

SEQ ID NO: 224181 - DNA, 1565 bp, Cannabis indica
gagagataaggggcactcaagcaggaagtggataagtgttgagtatgacttatacgcgaggcatttttatccctcgtggatatccaaccatgtccttgtcccaaaaccaaatgaaacttggagaacttgtatcgacttctcaaatttaaacaaggcgtgtccaaaggattgctttctgctaccaaggatcgaccagttagtggatgctactgctggacacgagcttatgacgttcatggatgcatattctagatataacctgattaaaatgcatgtccctgatcaagaacatacaagcttcgtaaccaacatgggactttattgttataaagtcatgccatttggtttgaataatgctgggataacgtatcaacgactagtaaatgaaatgtttacaaaatagataggaagaaacatggaggtctacgtcgatgatatgttggtgaagtcgataaaaagtggagatcacacaaaagacctcacggagtgctttgagataccgagaaagtataatatgaagcttaacccaaaaatttgttcctttggagtcttttcaggaaaatttttgggattcatagtcaacgcgaggagcattgaagcaaatcctgagaaaattaaggctttgataaaaataccatcaccaacaaaaccaaaggaagtctaggccttaacaggaagaatgtcagctcttaacaaatcatctcgaaatcaactgataagtgcgtacaattctttaatgtattacgaatcaacaaaaaattcgagtggacaattgagtgcgaggaagccttaaaaagcataaagaggcacttgtcaacaactccagttttggctaaaccaataactggagaaacattacacctttacttggctgtctcaaaaaatgtgattagtgcagcgttagtgcgagaagagggaaagcaccaacaaccagattactatgttagtaaaaggttactgggggcataatcaagatatccaccacttgaaaaacttgccctatgcctaattcatacatctcgcatattaaggccttacttccaggcacattcaattaaggtgttaactgatcaacccatgagacaagttttgtcagaaccaaatgcgtttggaagattgataaaatggttaattgaactggggcaattcgacataacttatcacccaagaacatccatcaagggccaggctttggcagattttctgataaaaaggatagctcaagatgaaaatccacttgttcaatgagacacaaacacttggaggttgtacgtggatggagcatccaatgagcatggctcgggtgtaggggtgatactaatttcgccagaaggctttaaatttcactatgccttaagatttcaattcaacacttcaaacaacgaggctgagtatgaagccttgatctcttgtttaaagatagctaaagtgttaaaggtaaaaaatcttatatgccatagtgattcgcaattaattgggaatcaagttctaggcaaataccaggaaaagggtttaaaaaatggaaaaaatatttagagaaaggttcgaaagaacttggaaaagtt

SEQ ID NO: 224182 - DNA, 1706 bp, Cannabis indica
ataattttaaccccataaaaataataattggacttaaactaataacagtaaattaataaatgaaaccaaaaactaaaaacagtaaattaaacaaaaaaacgaaagtcaaaactaataacagtaaacagtaaataacaaagaacactccaaatcattcaagatcacggaagcagagtcatctgtcgtcgatcaacaacgaaactctcctaggccgaacgacactcctgaacagttatcgtagaaactcctagacgaaaaaacgacactcctggactcgtcgacacgcaggcaatgatcctagactcgtcgatgcgctggcgacactcctggactcgtctacacgccagcgacgcacctagactcatctacatgccagcgacgctcctagactcgcctgtacggttatcgcaaagcttctcgccttctcgcccctcaactcgttgactcgcctgtaagtttctctctccttggtattacgtggtgacgtggcagaagcttctcgatttcactactacaaattacactattcacgtcggtcaactctactgttcatttttttgaccgacgtgaatagtaggtcatgtatttatgtgagtgtttaaaactgacactaaaaaaccattatttgtgtttgtggtatattagacgctaataagataatcgaggagaaaaagaaaacttaaaaatttattgatgttcagcgtcagtttttaatggtcgagtatgactcacgaaatggcctatttcctttaaacctaactcgcaaaatcagctaccactattcattctctttccaaatcaggttgctttgctgattttcgaccttcttttcccttaatcaacgacgagtggtcctcatctcccccgtcattcccctttctctgtgcgcctctcacccccagtcaatctctcccctctgtttattatttcttctctctgaagtcggcactgtacaggttcaacctctctctcattaagacctctctttttcgccattcgacaccctgtggggttagtctttacaaacttttttttttctgcttaatgttttgtactggttagatatgtttggtagggagtgagttctcgcttcatgaatttttaatcattttttttttattttgcttggatctgagttgtcggtgagtgaaagaagttttcatcttttcttgagccttttcgaaaaggtaaggggtgtattgttcatgtggagtcaaagttttaaattgttctttcattttggtgttaattccagtggtgaatgcaattttcctaaaaaaacattatcttagctatgtgatttatctatttttgtttctcgagaaaccattgcaaaacacttgaactaatttatatgtatacaaaattcaggattctaagctgtattttaggaattaatcagtattgaatgcttaatggagctagattttggctaatttagattacattttttttatttggttaatcagttggaggaaactttcagcgatgttggtgcgattcggcagtgtttcatggttacacaagagggtaagctaaactctgctctgagttgcattgaattaaaaattaatggtggtgtttatggtgaatgaatcttcattgtatatttttatttcaaatacttagcaaatgtggttttaaccaatgtactgtatcattgttgtgtatctgctgtttgtctttgtatagaagagtttgtgata

SEQ ID NO: 224183 - DNA, 913 bp, Cannabis indica
acattttatgaattatgttaacactgtttaactttgttgaagtaatgttaaagcaatgcttagctattcaagtctattattccatagatattttttcttgcagataatttttcagtatttgttgtcttattttgagcatattttcattgtcaccaattgattttactttcatcaatcatccatttgtttaagtttattttttcttacaaaagactttaagttgttaactagatgattatacatctattttaatttacaatccctatggagacgatactcagcttatcattatattacttgttgtcgattgcgtacacttgcatataaataatataattttcacaacagtgtgcaataatgtgataatgacagaaaatgacaattactcagtacactcatgatatgcagcaacctgacaacaatacaacaaacaacaacaattaaacaattttgacttgcttcaaggaagggatccgttttaaaaaatattatatgactaatactgagactttgacaacataatcaaccataaagcaacaagaaacaaccaaaagtaaaccctcgaaaatgatgaatgttaaaaattctataattatttattcatcaattaatattgttttggttaaaaataacaaaaacttatgccacttacaaactcaacattttggctactgatattgctaaaaaaactattctatttataccacttataatttcaaaattttaactatttataccgttatttatctattttataaaagtggtgtattttattagaaaaattaatatttcaaaaataataaaattaatacaaagaaatacatacaatttttctaatggatattttatatagttgattaatatgatttatataccacaaacactatgcaccacatcacctatcaccaccagc

SEQ ID NO: 224184 - DNA, 1257 bp, Cannabis indica
ttctttactataatttacaatctcaatcataacccttttttaatctcaaaataaaaaatagcttatagtgtattgtttgtatgaaatttacattttgtttttcaataccgactggaaagtgggtcttgtactatttacatttttgaggaccatgtttggttttttctgagttttgttttgctaataagggtttacttattaaacagaagaaataaaaaggaaaaaataagttaattatttattctggtatacaagtttgcaaaagaaattagaaaacattatctgttgaaactcatatattttgagaatttaaacagattgacagataacctccaaaaacttaactaagaaatcaaaaacaaaagataatgaatgtacctgggaacttccaattacagcaaattaactaactcaacttcactaaggaaacaaattgaaataaaaactagaacttctaaaataaaatttgtagaatcaaagaagaagcaatcaaattcccctacagaaaaatgtcatctaggaattggttttcaatgtcagcttcatttttatttttatttaacaatgagcactccaatgaagatgtaaggctaaaatccatgtgtatgtgtacaagtttcatgaacaaaagaatggtggacaatgtcgacactaattgcattttaataagaatcttgttctctgtcaattctggaaagacccgttgaaaagatataaacatatgatatccagagaaaatagctaacaagatatttacaattatcatctccatctttctaatgtcgattccacaataagatgaaattgttattagacgatcacaccaaattgttaaaagcgcaaacaacaaataaaaaatggtaacaagtgcagtaagtgtagccaacaggccccatgcttagaatgttgtcacttaatccaaggaagtcttcaaagagtgcaatggtgatgtatagtgctaaagttgccaacgtaataaaattctcaactttgaaccttaagagctttatctctccttttctctctctctttctttcttgctcatagtttgttgaaatgatttcatctttttatataggaaaaattacctaattataattgtataccaattataagtattatctttttcctgaaaaaaatatatagtaaggaatctaaatccttttctataattttttttttaggtaaaaatcctttttataatttattattatattcccttttcctcctattattactatttatagaggaagttac

SEQ ID NO: 224185 - DNA, 1483 bp, Cannabis indica
gataactaatcagattgtaaagaattttatttagggcataaaacccaacagaaatatataatcactaaaattttaaaattctttattagtggagtttgaatatgttagatattcatccgtagtgaactaggttctgcgattaatcgaactgcggtcgaatgggtggaatatgcatgttagatgagtttgaatatcttaaaaattcatctgtagtgaagtaggttctgcaaatacatgtactgcgatcggatgggtgtatacttttgtattgttaatgttattttgttattattttattgttttatgtgtttattaattattttttcatgtttaaaattttcgaaaacgtccaattacaaccgttatgctgttgaaattttgctagaattatgataaattttactaaaaatgcaatatatatatatgtgtggtaattaatttaactaattatttactacacatactttgtccttgtcttaaatatggtaacatggagcatatatatagacattactaagataaatgagtatttgtttaggaacggaatagaaaagagttataaggtttggattcaccacggggaaaagaatagaattttgaactatgaggatgatcacattccagaaatgataggagatgtacaatttgaattaaatgtcgatctattgaaattttaaagttttgtagaggatgccgagaagcttatttaccttaattgtaataggttactaaatcatcgacacttattagattatgcaatataaaagctaaacacgggcggagtgataagagttttaagaatttattagctttcttaatagagttattaccaaaaggtaatgtgccttcatctttctatgaggcgaagaagacaatttcttccttaggcatgcaatatgaaaaaaatacatgcatatcccaacgattgcatcctataccataagatgtttatggatgcaatatcgtgtcccacttgtggtgagtctaggtggcaaaagaaaaaaaattctgacgaggtaaaggttggtgtccctgcaaaagtattatggtacttaccccaaataccttgtttggttcagtttttttgaaatgtcaatcatgcaaaaaatttgatattgcatgccagtaatagaaagttagatgctaagatgagacatccagctgactcacccgcttgaaaatcaattgatgctaggtggcctgaatttagcaatgaacctaagaatatatgtcttggtctttctacgaacagaatcaatccacataccactcttagcagtaaatatagttgctggccaattttttttttttttgatgtataacttgccgccttggttggtaatgaagagaaagctcactatgcttacattgttgatatcaaacccttcacagcctggtaatgacactgatgtgtacctagcccctctagttgatgatttaagtcaattgtggtatgaggatgttcctacatacaatgccttta

SEQ ID NO: 224186 - DNA, 1222 bp, Cannabis indica
atcatgtcttaatttctacttatgaaagtgtatagatttaggggtgtatagatttagggggtgtttattgaatcacatttaatatttttttgtatatacaatacaaatttgaatgttaaattttataattcaattcgatctaattaattttaataatctaatattttagccccagtatatattggattgcattgaattcatctacataaaaaaaaaatagtaaaattttaatgtaaattttcgtatatacatatatattttatgtataacaatataaaattaaattacgtattcaaactaaatgaaaatcttatttaatttaatttgatgttggatgtattgaatttgtgaacaccacattcaacatctgatccaatctaatctaatccaattaaatatttaaaaataatattcaatctaaattcgattacaattaaatattgaatatttaatcgttgattgtaattgaattaatcacttgtcgttacattagatcttatatagtacatcatatttatgaacgttctaatcttcccctcatagtttattactcattcatttggataaaatgtgatgtaaaacataaggagaagactttatctcaagtgagaaaaatgtaccaaagtttgtatatttaaataattgtttttttagtaattattaataataataaaaaaaaacttggaggagaaggaaaaaggcaagcgaccagcgttggccgtaaacttataaataaaaagtacacgtaactatagggatcaccactgatcaaggagaacccaaatcaagacaaagttgccattgtcaacagtcaaaattagctcagaaagcaaagatgagttttctcgcgggaagattagccgggaaagaaggagcttactttttccaggaatccaaacaggcagtgagccgtatggtggctaacaagaaagcgtcaccatcgccgcctactcaatcttcttcttcttcttcttcagctccggtgactgagcgtgaagacctagccgacgcgcttcccgaggtgttgcgccactctctgccgtccaagctatttcatcaggagacgtctaattcaacgccttccttatactctgcctccaaatgggatattccctctgaccctaacgctcgcctttctatcaatgccgaggctttgaaccactcaggtctaccttctctgcctcaggtcacctttggcccctaaaacggaccgtttttcttc

SEQ ID NO: 224187 - DNA, 2248 bp, Cannabis indica
tatacatgaaatacatctaatgatagaatcaattcaatttaacttccaacagatattagattgatcgaataactgaaattaatttaatcggatcagacaataaaatctaacttccaatatattagattgaatctgaatagatctaaaaatattaaacgtagaccaataaacatgtctagcccccacatcccaacacttccccttataataaatagccctagtagtttgaatcatctaccaaaaatatacaccaacctcctacaaaattgaatcactgaattattggcaaagaaaaattttcaaagaagaaaatcttgtaaattgtaccattcatttgtttgaaaaaaaaaatgtgccacctactctctatttattatttattaggctccatgccacctttgctgcactttttttagggatatgttagctaccactcatgttattatttacattatttaacacattaaattcttaacatacttattacttggcatttctcaatttgtaaatggtacatcttataaagtgtatttatttgtatcaaaccactatatacttaaaaattatctgttgaaaagaaaaacaaaacataaactggcttggttatacatggctattattctatagttactttcactaactttctctagctttagttttctttttatcacactaaaataaaaatggtactttatgtatatgaggtaataagatccaaaccatgatgtctgatatattaattccctttagaattatatatataataaataggtcatgatccaatctatcataaaaatgaccagaaaaaattaggtcatttgttggagagataagctatatatgagttagctagctagctctataatattattagtgactagtgattaatggagcctacattcactacttgctccaactaagagaaatgctatgaattaaggacatttttaaggtttctctaactctacacataagtgtcttatatccatatataatttttaatatttattagaggtagtcccacattattaatgtgtaaaaataaattgtgctataacaatttagacaataccaaaataaatgatatattaaaaatataaacagaaaatgtgtgaatactcaacctagaacggcgagtattcgggctaatatggatacacaaacgtattgaaaatataaagaacacaagaaaatatagtggttcaattagattacggtttacaaaacaagtgtcctttgattacactagacattgagtctagtttaggcgaggtttgcacttaataggtctctcactgacatctcagccctcatcaaggagagttagaccacatgtcatttttataggagcctgacttcgaatttctaagtgaaaaattctcacgataacactaacaatattataaataatatattttatttaataagtaatatttttttggtaaataaatcatgcatattactcatatcacaaatatttacaactataacctagaacataataataaactatttaactaagacacaacgtggcttgtgatatatgaatatgatgatgccaaagaatcacttacagttacactataatatatattactactatatttataatattagctagaataagttaattttttctttattttaatatatatatatttatatatagtggtcctatcctatataattattatatatcaagggccgaccacaaacatatattgcttttagttttttttatcacaagaaatcataatattaatatgcatttcgtaatattattattgcctctcaacacattaatttgaggataagatatcagagataacgtgttcatatttttatttttatttaagtaacgttttcttatctttctaactacttaattaagttatgtatcttataataattaactgctgtccagaagaaccaattaacaataatatcaagtaaactcgttgatcaatgaaaactaatatatgccctaaggtaattatatttagaacattattattggacatcagtatgattcagtaatacctagcatctctagacatgttactttgcgataacgatactttaagactcaatacttaattggtccaatatcaaaattcacacataagaagatgctaaacaatagcaatacttaatttgtccaatagcaatattgctaaaaaaaccgcctctaaagacttattttgtagtagtggtcgctctaggttgaggagggagttgcagattcatc

SEQ ID NO: 224188 - DNA, 2997 bp, Cannabis indica
acgaaatgaagatctagctcaatatgttttgatcttgcgtgaaacacagggttagcagcaagtgcagtggcactttgattgtcaacccagatgacaggtgagtgagtgtaagtgaactgtaattctttcaacagattgcctatccatctcaactcagctgcagcattggccaaagccctgaattcactttcggtgctcgatcttgccaccacttgttgtttcttaacagaccaagagactaagtttccacttaaaaacacaacatagcctcctgtactcctcctatcatcaacacaacttgcccagtcggcatccgagtaacattggattgacatttcagaagctggtttgagcagaattccctcactgagtgtgccttttaagtaccgaagtaatttcttgcaagcctcccaatgcaaactagtaggagctttaagaaattgactaagtttgttgacaatgaaagcaacatctggccttgttaagctaaggtattgaagagctcctatagtacttcgatactcagttggatctgcaagaggttccccatcattgatgctgagtttgacattagaactgctaggatttgaacatggttttgagccttccattttgagtttaaccaacaaatcagtgacatatttagaccgagacaaatacatgccagactgatttcttacgatttcaacaccaagaaagtaatgaacttcacctagatctttgagggagaacaccatgtttaaatcatgaataagcttggaaattaactgcttattggggcctgtgaccaatatgtcatcaacatataccagaaggataatctgtgtatctcctgagccaaaaatgaataatgagctatcggctctggaagcttgaaaaccccagtgaagcaaactttgtttcaacttgtcgttccaggctcggggagcctgcttcaagccataaatggctttgtgcaataagcacacatgatcaggatactcaacatcttcaaaaccttgtggttgttgcatatacaccacttcatccaatgtgccattcaaaaaggcattactcacatcaagttgagttacactccagttgttagacacggccaaagaaagaactatgcgcactgtcactggtttgacaactggagagaacgtttcagcataatcgattcctggaagttgaagatagccccgtgcaacaagtctggatttgcatctgtccagagatccatctgcattcagcttcacacgaaagatccacttatttgttatgacttgcatatcatctgttcgaggaaccaaagtccatgtcttggctttcttaagagctgtattttctgagtccattgaggcataccacctgggatcttttagagcggctttgacagatttgggctcagatggaagtaaggattctggtaagggatgcttagtggctagatatatttttggttttcgaataccattttgggatctggtaatcatggagtgagatcgagtagaaggttgtgatgtgggaatggttggaagatgatttgtaggttctgtgagtgaagtatttggcacagaaagtggtattgaggcaggtggcaggttatcgatataggcaggaacaggtggcaactcatttgtaatatctggggcaggtgtcatggagttggtaggggctgtgattgctggagaattcccaggtgtagccaactcatttggactggagagatgttgtgtaggaacaacctcagcagtgtcatttacatttgcattcaacacaggaacagagttatggttactgtcagaagtagaaaaaatagcagtggggaaatttgaacttgtgacagcagtatgtacctgattagaagattgagatgtagatgaccaatttccaggaaagcaagtctcattgaacacaacatcgcgagcaatataaattctgcctttgctattttcacacaagtagcccttgtgatatgaagaatagccaagaaaaaggcattgttgggatctcatgtcagtcttgtggctgttgtaaggtcgtaagtaaggaaaacaggcacaaccaaacggttttaagatgttataatcaggaacttggccaaacaaacactcataaggactcaaattggacaaaacatgagttggtaatctgtttatggtaaaagtggcacaagaaaaggcatgccaccaataagtgagatcaagaccagcctgagctaacaaggttagacctgtttcagtaacatgtctatgctttctctccactctcccattttgttcatgagtgtggggacaagggtgactaaaaacaataccctgatcagaaagaaatctagcaaatggcctatattcaccccctccatcagcttgaacagctttgattggtaactcaaattgcttttcaaccatgcttttaaattttacaaacatgtctaaagcttgagatttgacagtgagagggtaaacccaagagaaacgactgtagtcatcaatgaaaatgatataatatcgatagccatccttcgaagggacatgagaaggcccccataagtcagtgtgaactaactcaagaggttgattggcacggctattagaaatgggaaatggcaacttgtgacttttccctaattgacatgcattgcagaatgtaatgttgccagtatgagtaatgtgttttaacactctgtttaggacagtattgccaggatgtcctaacttgcaatgccaattgtttatatcatttttattttgggaaagaaaaacagtaggagaattagatgacaaacagtcatttttattcatgaaggttgaattacaagtatttagagattcaggaatctctgtagtacaagaacagtaaagattacaatctttatcaaccgaaaaaccagattcaacatgaagacattcagcacttgagcttgatgaacaagaagcatcaccaagagagtatagaccatgcttacgtttccctttgagtagcacagctcccgtttgtttgtccttgacaaaa

SEQ ID NO: 224189 - DNA, 1489 bp, Cannabis indica
atgaactaataaaattgtgttatgtgtatattatgtctacgtaaatgcatacgtagacaaatcaatataacacttaacacttaaaatgaaataaaaatattaaattttaacagaacataagtattaagaattttgttgttaaaatttgagtttttgaaaaatttaaattttttttatcttcttaatttcttcgtataatattgcaattgacaagttttagatacaaaaggtccatttaacaaaaaaaaaaaaaaaaaagaatcttccaagagaaaaaatccacataaataataataataataataataataataataaaatattatatagaatgttatacaagcaacgtgtctgaccctgaggattaaagtatatcatataaattggtttaaaggaagaaaaaaaaaagtaagagataagatattggaggacataaatgagagaaggaatctaaagagagtagtgtgattatggtaaaatgattaaattaatggtgcatgtgaatgtgaatgtgatggcttattggcatttgaatcgtggcttttaatatataactcaactcagctaccaaaatatattttttttttcagaatattttttattaattttataatattattatatatatttaaatataaaaattttatttaggagaattactccatatattattttttttatttttttttaaatttattatttggatttctaaagtggtttctgtagtggtttctatgtgggttgttatacgattttttgttgggatttagattacattgctagttgcaataggggtttctatgtaaaatttcgtaataatgcaaaaaacactattttaaagtgtaaaaataaataagccccttttatttattccttctttaattctctcattttttttttaaatcaaaattaataattaattaaacaccaaaccgtataataaatctatgattttttttttttttttgttatttgaagtttaaaaaatatctctaactagctaattaatttaaacaacaacgtgaaaaaaactaatttgaaattacttaatttttataatattatataataaaaaaataactaaataattaatttaacctaagagtatatattatattatataaaccaaacataataactttaaaattataaataggttttcaattactggtagtctatatataatctattaattggttaataaaaaatatataattaattgtgaaatatttaacattatatgttgctacctttagttcaagagcacaatccaaacattgtatgtaatcaaatctataaacatatttctgattataggtttacaagttaaaaccatatatatttgttagaaatattattacaataaaagaaaatcaagatattacaactctattgtaaaataatacaaggattaaaataagagattgattataatatgttacaatacacatatatacactatatatattgcatatatatatatgaaagg

SEQ ID NO: 224190 - DNA, 1957 bp, Cannabis indica
taaatatagagaattgcttaaaggtatttttggtggctagcacctttcttgtcatatacatcagcttttattggctaattaagtatcgggtcccatataattttaaaaaataacttttaaataatatcgctaacaaattttaaggtgccacctgagcactaatatccaataacaatggtatgtaaatatagcttttattattatttaaactaattaaaatggatgttttgtgtaagtgaacgtgcagcaacactgttggccagcacatgttgactagtactcgtggaatgaggtgtcgattattcaccaataatgttatagagacgttattagaagcatttgttggtaacgtaccgaccccaatatgtaaagttccctagttatcaatataagattagttcaataagaaattatatcaattaattgtagcagcaaatcatgagtatgggagtacctatatatatatttatatatatatttaacctcacaagtttctctattattaccttttgacttgaaactctcacatattcatatatggatcatttatgagtacgtactacgtacttgagtcaatctaacacatcagcccagttaatgagagttgatcaatgtgaaattcatatctctattagggtttatgcgttgaactatataatctccaacaaccttaaaatttattatataaatgtgatcccacatcataatttgtgggcaagctagatttggtggtacgtaaatgttaatgttacccattgtataattagtcaatcactaacctttccataaaatattggaattttacacatctcatgcaccctttatacgattttaattataattttacgtcaacgttttctttatttcaatgtttatattataacaaattttttaacgcttttccaacaatatttgtactatatatattatcataaatatatgaatatggatgattaaaacgtgtataatatatatttttgaaataaaccactacaaaaaaataattacttttagtgacaattttttagttgcaacataattttttttttattaaatgcgacttttagttacaataaaaagttacttgtgactaaaacataatatttatacacatgcaaattatcactaatttagttttagtcacaataggtattgtgactaaaaatatatttagtcacaacaatttgtgatttttgcgactaatacttttagccaccgactttttagtcacaacataagaatatatatataatgatttataattggttacaactattttagttttagccacaaataaaatttgtgcctaaaagaaaaaaaaatttgtagtgacaccttactataatagcttgttatatactaaataattttaaacctctttaataaaatgtattttaaataataaaatactaaaatataaagtaaaaataactaattaatatattaaaactcatattgttatccacgattttagatgaacgacacgtggcatactaagaatgtaattgattcgcgtcatcactgacctagaccttccagcatgcgaaggccaagtccaaaccggaggcgggccccaacccttcagacactacaagaataatgggatactggcaggttgtatttagacacgtcaaaaaatcgtgcctagagtgtagacttttagggtcgacacactaatatcatgcctaaaactttttatttttttctgaatcaaaaataatatttagggccgactttttagtttaagcaccacaaatatcgtgcctaacattttcttttatttttgaaaattagattttagggatggataggaaattttccggtcacacgataaaaaaccctaaaatatacctctcttctacttcttttctattgtgctctcaactacttgacctcctcaacctctcaaaaccaccattaaacctcaaataaactttcactctctctttctactctc

SEQ ID NO: 224191 - DNA, 1481 bp, Cannabis indica
gaactaaaaagcttccttggaaaagtaccatacttacgacgttttataccagctttggcagaactcacaaatccactacagccataatacggaagggtgcattattttattggggagaaagacaacagagttcatttgacaggattaaaagcgtgttgtcttctcctcaggttatgatgtcaccagtacaaggagtactgttgctattatatttagttgttaccaagacatctgttgggacattgttagcacaagaagtcgaaatgaaagaaaagcatgtgtattatcttagccgaaaactgaaagacgccgagactaattaaccctatgttgaaaaacaatgtttggctttggtatacacagcccaacgattgtgacattacttagtagcacacaaagtaatagtgatgaccaaggtagatcccataaggtttatgttaaacaaacacataccttctagtagaatagcccggtggatactaatgcttagcgagtttgatatcactgtcatgtatccaaaggcacagaaaagtcaggccttatctgatctattggcatatttacctgataatgatgaaaacttactcatggatgaaatccctggggagttacctgaggctatgatttgcaatgagaaaacacaagaatggtgggcaataacatttgatgggtcgtcaaccactaaaggaggaggtgcaggaatagtattaactgatcctatgggtaagaatcatattcaagcttataagttatcgtttgactgtactaacaatgaagctgagtatgaggcacttattctgggaatcacggtcgcgctaaaaatggaagctagcaaagttgtgattagaggagactccaaacttgttatccagcaagtcaaaggggattttgctgtgaaagagccatcattggcaatatatcgaacaatggtccaaaagctagcaaagaattttgaggaatgtcaattcgagcatgtgcctcgaacacaaaataggtacgccgatgctttggctactatggcttcaaaaattgaggtatcagaaatccaaaacttgacatttaaaatagtcaatcaaaagtgttcaatcacctcggggtatggaaaagagtctgccagcaagaagtggacacaacaaatgattgataagctcgcgaaattgaaaaagactcatctcaaagaaatgcaacgctttgttgttataggtgggacactttattaccgatcatcggatggggtgttagcaagatgtttagaccaagaggaaatctctactcagatggaagaaattcataacgctgtctgtggagtcgaaggccccaaattgtcaagaagatcacaaagggccggttattttggctagaaatggaagaagatgctacaaaatcgcaaaaagattgtccgcaatgtcaactcttatttaataaccatgaggcaattttaatagccaatgattacgattggagagaccatataaagaata

SEQ ID NO: 224192 - DNA, 3269 bp, Cannabis indica
ctgctttagtctccttagcttcttactttgtagtatttccattctcttttactctccttgattgcacataggtgaagggacgctttcccaagtcgcttgaaatgtagtgaggtttgtccatcaaataaagcttatggtgaaaccttttgggtgcccaggcggacatctaacactcgatatggttccaaggtccactgcaattttgcagtcagccctttcgagaggtagtagcttgttgatgtgcacctaaatatgccctcaagagtgatacacgaaacatcgaatggatctgagccaattcaagccaacacttggaaaggccaaaagagtgaagaagtgagcttctcattgcgacgcttggcagtagaacgttatcgataaggtcaaagtttgacgtacaccaaatcacccacttgaaactgcacgtcgtgcttgtcgatccggttgcacttttattttttgttgtgcacggtgaatatttacctcgagttccttaatgatgtcatcttgtgcttggagggttggttccatcgctaaatgtgtgatagggtattgttgtagaaagagagctaataatagcctaataaaaggaacaaaaccagtatatagtgatattagatgataaaatggtaagaacaatggaactatttggtattcaagagacccatcactttcctaagagcctacaaaatgattctccacacccttcactccttacaactgtcccatatataatatatccataaccccattacaatgacccatatacccttcttattcactaaactccacctcacactgctaatcttaatgtaggagtgttcataaaaaccgaaaccgatcatcaaaccgaccaaaccgtaattgaatttttggttccacgtcatcactgaatctggcgaggatgagcatggtttgccatcccccaacggtccagatagtccaatatagtcgatttaacgcaagtaaaatgtgttgattcaccatttgagaactagagaatggcacatatcagtaatagtgactaagtccaaaaacaaattctcttacccaagaaggctcatatttttttagtaatttccttgtgttgaatcattgtagtcaaagcacaaaaggcaccattaattaaaattaagtgctttttctgccccatttgtctagtagtgcccacgaatagacaaccccatatatctcccaccaattttccaagcccaatgaaaaatatgaattcagcaacaaggtcggttctatatcattcaaaatgtatggtgacccaaatagtgttgtgcaagtttcgccatggaagaaactcttgagagcaaacttttctccctctgtcaaaaatccaacgagcagttggtgtctttcccttgtcatacccaaaatcttaaggtgaaggttgtccttcagctactctcacctcctttttcgttgccaaccctgagttgaaatagacaagtcacacctccttaaagacaccaagaggatgaagtcatattcccatttttcaactcgggacctacgaatttagtaatggttaatgggctattattcttatccgaatcccatataacccaattgtgacctaaagtaaatgttggacccacaattatatcagatatattagatgccaactctgtctttaacttgctggaatacattgaatcgactctctaaaccttccacaactacttccaatttctttgccattaggatcgtaagtctctaataccaattgatagggtattgttgtagaaggaaatccaacagtagcttagaaggaacaaaccgtcatataatgatattagatgataaaatggtaagaaaaattgaactactgggtatttgagagacaatcactctcctaagagccaagagctactacttagtacaaaatgattctccatagccttcaccctcttaatattgtcctatgtatattatatccacaagccccattacaatgacccatgtaccccttttattcacttctcctctcactactaatctttatgtctaagatggtgttgcctatttcaaaacaaagtagtggtggtggatcgtgatggtagaaagccttgaatggggtcattttggctaagtgtggttggatatgttatactaatactcagccctaggcaaccatgtcatccatgatgcggctgagagctcacaaaacaacgaaaatatgtcttgaggcaacgattgacgacctctgtttgaccatctgactaagggttatatgtcgggctatgctatgcttaaatattgcacccttttaagcgaaagagttccttccaaaacaaattaagaaaatttctatcacgatccgagacaatggaacatgaaaaacaattgagtcttgcaatcttgcagacgaacactgtggctagtgtagtgtagtgacaaagaaaagaaaggatgggggagagggataaagtggtcatacttgctcaaaggatcgactaccacaaaaagaatcaaacccatttttttaacgaaactcaataaaatccatcgatatgtcctcccaaaccaaaagaaaggatgacagagagggataaagaggtcatacttgctcaaaggatcgacaccacaaaaagaatcaaacccaattgataacaacacactaaaatccatcgatacgtccgcccaaacctgcttgggaatgggtagtggttgaagcattgattttgaatctcagctcaaaaatcatagaatatagaaaacaagtcaggacgtttttcattaaacataactaagttacacgagaataattatccataaagtaacaaaatatctgaatccagattgagacaaaaaaggagaaggaccccaaacaccagaatgaactaacttaaaagggacactagcacgtttattgactcgaggactcaaactaactcgatgatgtttggcaaactacatgactcacaatttaatgaagacagcgtactatattggggacaaagttttttgagcaaaggaagggatgaatgagatgcaacaatttagattacgagtgagttgactaacgaaaagcaaattaaaggacaaattaggtaaatgtaagactaatgacaaagtgagcataggtgtaggaacaaaaatgctagatccaagaacagaaaatgttgatccatcagctaaggtaacaatagaagttggactatgaggctgaaaagtgaaaaagagattggaatttcctgtcatatgatttgtggcaccataatcaatgacccattttgaggatttggaaagaaggcatg

SEQ ID NO: 224193 - DNA, 1544 bp, Cannabis indica
agctcaaaagcttgctcgactgttgggggacaaccgcaatatcattcagttgacctccgaggacaactttgtgaagtacgggctctaaccgaaggatttcattcccgagccaaggagaggaagaggaaatctgttgttggacgggccgagggagctcataaggagaatgaactcattcaactcaagcgtgaagggtgcaagggccaaacaatatgctcttgagcccttgaatcctaaagacgaggctaaggaagagcaggtgactctgctcaaaaggaggaagaaacttctggccctgcctaggcgcattgagcataccattcagattagggagccaagttcacgtgctcggccatcttcccccgtgctaggaaaagggaaggccgccctggcggacgcgacagacttatcaagtgatgatggactctcgagtcttactcgaacaatcactttgtaggatattctgtcttgtttttaaactttttgactatcatgctttatgattctgattccttttttcctctaaccatgctgtttttgtttcgtgcagaaatgtctcagaagatggttgatgctttgaagaagagggttggaggaagctcaagctcatctcctccgaccaagaaatgtaagggcagtgaggcgagcccttcgaaggaaaaggcaccggccggggaggtcattgaccttttcgaggagctaattgttgcagatccttctactccaaaagttgttaagtccaaagattctcgaggaggaagctcgtacaggcctgagcaatcaaagggtggatctgagctgaccaagagcggatctgagtaggtgcgggctcctactccacctttgccagtgcttccagaggctaagaatggcaaagagatgctcgcccattacatgaacgagttggttcttgaggtaagtgagcagctggccagtgctgataacgagtcttccttgagttgctgatgggaggagttttgagggaattcaccagggtaagcgtttgttgatagtttccttgaattcttctttacttggtttagactttaaagttttttctctatgtaggctggtttgatgttggcttacacctattcccgagctaaatctactgcctccaaaatgtctaacaccatgagggcaggggtggacttggctaggaaggatgctgataacaccagggtggtacttggagctgttcggatggagctgggcgaagtcaataagaaacgttttactgctgagaggaaaatagtcgagttgactaaggacctcgaggcctccgaccagcttgaagctacaattttggcactctgttggtggaagtgaatagccttcaagaggaaatgggagttcttcggactgtcttccattggctggaagaagagaagaaggctaaggaggaggcgcttacagctgaggtggcgaggctagaagagaaagttcatgccttagagacagccgttcttgagatcttttatgatttttggaaggctaacccttaggcaaatttcgattacttgggcgaagccaaagacatgtat

SEQ ID NO: 224194 - DNA, 2018 bp, Cannabis indica
cgctcattgttctcattcccaagcggccaaatcctgaacaggtcactgactatcgacccatcagtctttgttccactttctacaaaatcatttcgagtgttttagttaatcgccttaaacccatcctcagctgtatcatttctccatcacaaagcgcttttcttccctcccgtttaatctgtgacaacattatcatcggtcaggagatcatgcattctctcactcatcgtaaatcgggtaaattgggttggatggccttaaagcttgatatggccaaagccttcgacagggttgaatgggtctttattcgcaaaattatggaacattttttatttccaaagcgttttattgacctcattatggcttgtgttccactgctaccttttccttctcccttaatcaacaagtaatgggaacaatcaagcctaccagaggcattcgtcagggggaccccctttcgccatatttatttcttctatgctccgagggtctttcttcgctcatcaattacaaaacccagcaacggcaacctcagagtcattcccttggcattaaaattgcacggcgagccccaaccatctcccatctttttttcgccgatgatagcctccttttcagctcagcttcggttcaagccgcgactactatccaaagcattctccgtcactacagccatgcatctggacaaatggttaacttcactaaatcggccttatacttctccccaaacacaacccaagcgattaagcaagaaatagctacgctcctcggcattccagttcgtgacacgatggataagtatttgggtcttcctcaagcttttggtcgatctaaaaaggatgccttcaactacattaacgatcgcgtttgggcccatttaaacaaatggaactcgaaattttttccaaaggtggcaaagaggtcctcttaaaatcggtggttcaagccattccttcttatgccatggcgtgcttcaagcttcctgcatcattccactctaagattgaatctctgatggcccggttttggtggggtggcaatgaaaacaacaggaaaattcattggaaaacatggtcatccctttgcttttcaaaattccatggtggacttggttttcgttctatgaaagctttcaatcaggcgatgttggccaaacaagcttggcggctactccaatatcctcattctttagtggccatactcctcaaagctcgatatttccctcaaactagtttccttcattctggcaagggtcacagaccatcccttgtttggtctagtataacctggggtaaggaacttctccaatcagggcttaggaagtcaattggtgatggcactaccatcaacattttcaatgatgcttggattcccggttatggtaaactgcattacttgaggtataattcaaatgctgatatgacagtggctagcctcctcacacctgacaagcaatggaatcatgccctcatccaatcccttttcccttctgacatttcacaagccataacagctataccccttcaccccatctccactcatgatacttacttttggtcactaacacctcatggttcatacacggtcaattcgggttaccaccttgcacacaccaaactccatcaaaatgaaccttcctcatccgatagtaaatcctccaatgactggtggaaaaagctttgggcccttcccttgccacctaaactgaaacatttcctttggcgtgtttgttatgatatcctccctactagccgaaacctattcaacaggaaaacactacactcaccccattgcagtcgatgtcactaccacgatgagaccctagagcatgctctcttcaggtgccctgcttcccagaaggtatggaacttaactgattttaataattttataaatgcacattgttcttttaattgtatggatttattataccttgctgccactgaatttagtactggacattactctctatttgtttgtctgctgtggaagctctggaactgcaggaactcttggat

SEQ ID NO: 224195 - DNA, 1339 bp, Cannabis indica
tataaagaaattttataaacaggggatccctatattttaatggtatttcatacagaagttttatttcgattgaatcaaaaagtttttgattaagccccacttttcataaactaatagaatagctaggaataagttcgtagaagcacacacacgtggcgtccatgagggtcagggcgttacaacatggtatcagagcgaccaaggtttaaagatcctaaagactggcttgatatgtacattggctgcgaagactcgtttgactcatggcttagtaagtattaattgttaattgattaataaactatttgttgattgtttgaactgcctgcttattttaaatgtgtaaattattagagaaatatgataagttttgatataaagttgtgaagtttgtttaagcatgcgcggtaatgcttattgcattaatcttggttggaaaagattttaaccatgaaaaaaaaatggtcgtgagtgtactagaaggtgtactgggggcaatctagtaagaataactgcgagcttatcaggcttggagttggtagtgtgggtagaaatattccactaccacaagattatgaacaaatgaatgccataaagtaagagattagctgagtggcaaggtattagaacttacagagtttatcccgagcagcgcgatgatggcgaatgacactaagctggaccgaatggaaaagttttgttttaaagaagtggatgctaaggacgcttctttaaagagagattcatgaaagtaaatgatcaatgttggataaggtaaagggtgtttaccccaatgaactcaagggaaaggattaccaacccaccagttatgggtttagtaggaaaatttaaggtaatgatggggattggattgacttgtaaagtatagtgtaaacattgattgtgaaagaaaggtgtcaattgttgaataaaaaggtgggtatcaatttgtgttcttgggcaaggttcaagggtcccaaaatccattaatcacgacatttaaggtagaaagattagtatgtgatggatgtaccgacctttcagttggtgtggcaaatattacaaagggaacatcggtgggactaagacacaattttatggtccaagggtttgtagatggctttttcagaagagccaccagggttattgataaagcgggaaattgactctgaattgacttgttactggggtaaaacctgtatctaaagttttgaattagatgataactgtaaaattgaaaagggttaaggtttcgttgtagaaaatgttaggcttgaaattgctagtttgagtattttgtgttggagtatgctagttttacttgtgaagaagaaggatg

SEQ ID NO: 224196 - DNA, 2533 bp, Cannabis indica
actgcagttcattttggcactgtgataattcatggtggtgatgagattgatgaggccaattctttttcacaaatctccgatgctagaggatcttcaactgctccggcacttctggaaagcccttatgtcaatgccttgggagttgaatcagataaacacaggtgttgactttaatattgacctacccctaccctttctgtttcaaaaaatccctacttgataaaaatgtattctatatgtactcaattaaattgatattctgtcagggcgcaaactacaggagttgctgcctcaaataacaatttggttggagattcacatactacgcaggcaatacaatcatcttctcctttgcccccaagctctactgctcctgaccctaagacgaaaagcacttctcaagctcaggttgggagtggcattggcatgagtggtagtgctttgaagaatgaaactgttagccgaaaagcttttgcacaagacaaggtagtgtttctgccctcaattcatgtgtatatacaaaatgatttatgcttcttacatcttgccatttagaattacactcgctgtaaaattacataaattctttaattagtggtacatctttcgaagtatggaagttgacagtttagactcctattgaaagtaatagtaaatccttcttaaatggtagtattccaactttcttttctataggttgagttattcagatatcagatctgattcatgagaattgtgaattcaaatgcaaaccatttgatttgttttgctaaacaattttctcatagactcgtctaatcacttgaaatctgttatcatcacagcttttctccatttacgctgccggtaacacagtgcccattccatttttaagggcaacagatatctctcccattgcattgttatcagacaatgttcttggaggaatgcaacgtgataacggtggaaccatcgctgtggaagcacttcaggagcttttcaccggcgatggacagtccaaaaagggtagaagagggcaaaacgaggttcttttctctatatccgttacccttttttttgtgtgcgctttacgaatatcatcatcggttgctcattaaatgtgttatgctctgtagatgccccttcctcctagtatctaccaaaggctcacttcaagttcaactttgctgaacctggcgcaggctctagcttaccacaaaacgtatgtaataataagatttttccgaaactattgtgtttttttatgtttgattttcgtcggggtgatgtttattactgtgtttgaatttttaaacttaggtgctacgaggacatgccccttcaggaattgcaagccactcaagaacaacaaaccattcaaaacctttgtgatacactaagaacaattcttcgattgtagatttttatgtgtgtatatatatatatatatattataccatttctttctaatttcttactttttccttttgtttgattattattagcttgtgacttgtctatgtaagttgagcagaactgcatttaggtatatttgtcatatgtagggcagcagagctctagatgtatctttttcaatctctttgatcaacatgtgaatagctttctttttttattattatcattattattgtaacatttaatttgaaaaatatgagtgatttgtttagaatttgattataatttttctttataaatatatatttaatacaaaatttcagaaaaaaaaaaagataaatatcatataatttaaatttttattactttagaaagaaaaagaaaataatatataatccaaaacttaacaaatgaagcaaccatttggaagtggatgttgtattaatttttgaggacatacgataaaattggatccatgatacattatttcattattttagtgtttttattgattttgttgccgaaagaaaaatttaagaatgtttatatatagaaaaaaaatgtcaagtggaaattaattacaaggctagcttgacttatgccacttttatagttgtgacttgtgacttgtgcccccctaaataaaaaaactttgtcattacttttattttacaaaattaatcaaatattccttaaaatacgaagattttgtccaaaatatttttattaaaaaaaaagtggaatattgttcggtaagatgtggtatctattctctttcttcaaacacctttaaaatttttcttttatttggtgaaatgattgatgttttcatatttggtcatgaagataatgttctaagtaacagggaaagaaaatagcattagttaaaattgtcttgattaatgaatcgttctttaaagaataataataaattatctttaatatttgtctcttcgatatatctttatatattaaaagttcatatttaacggcaacccaataattaaaccaaaaaagtaaacaatctttttttaaattaaaaaaatatcttacccacatatctctctaacaaatcttacgattttgaaattttttttacacgactttattcaaatttcaaaaaataaacccaataatt

SEQ ID NO: 224197 - DNA, 1465 bp, Cannabis indica
attattatatagtatgcctgtgttgtctttttcaggtgtgttctgataggtttgcgcggtatagtcacaaccgagtgtttcgagccgaactgggttcggacctggaatgcaatttggattgaaattattggcattatattatgtgtggataatctgaaattaattgggtttaaattatgcatgaaatgactaaattaacctttgtgagtgtttatgcatgctttatggcccttgggggaaatgggtcttttggccatttaatggaattctaattaaattgaattttggtaaaatagaagagatttttctggttcttttgacctcctacctgaaccctctctctcactctcttaaactctaaattttttagccttgattttggttgaaaagtttgatcttgctacctttggaggttggaaactcaaggagagtcttgcaatacttgaggtagtttcttttacttttttagttgaagttgttgttgggttttatttgaaagaaaagcatgagattgatgtgtgttctgttgagatgcatgtgtttggatttaagtgtttttatggtactatattcttgactatgcttgaaggttgttatgggtgattttgggttgtgaaattgtaggagattttgagttagaatgattctttagttaatctttgaagctgtgaaattggtgtagagtttattcttgaattctaactcttgtatgagtgttcatgggggaatttcggtcaaagtgttgagcttgtgttttatgttgcttgatctgagttttggtgtgtttaattggtgaatttaaagcatgagttgtgaattttaactccctattgttttctagcaactctatttagtgatttgagagtttgattgtgttttggattgaattggtatggttttgggggctgaaaatcgtgatgaatgtggctggtttctggatttggaacccaggtgtcgcggcatggtttgagcatgccacggcccgctcctgttggtggaacctgggattttgtcccaggtgccgcgacatggcttgggcatgccgcagcccgccctcgagtttttgggcagatttgagttccaactttgaaatttcataacttttttattcgaactctgatttgcgagttctttatatcgttggaaagcttgttccgagctctatgtgattatttgaattttaaatgccatgagaatattttatgaatgtgaaatcagaggttaaccctattggtgaaaaatcctgaattgtgtgactaggattaccggcacctgatcaggagcacccagggatttggaatctcttctactgtgggacaacaggtaagacaatagttagcacgtagagtatgcgtagtggtgcttatgttgaataagatacatgtgagtaattataaccgagattagggttattaccctagtgatataagttgagtaaatgatatgccatgttaagtgtatgatt

SEQ ID NO: 224198 - DNA, 1637 bp, Cannabis indica
agagaatatggctttcaaacttagaactatttggaggctaagtgacttacaggtaacttaggtttctaggctagggttaaggactttatataagaggcctaaaacctagattgcaagtttaaatccctagatatttgcaatggtgtttagataattacaaaagactaaagtgcccttgaatgtagatattattcagccattctgttgggcttttagggcccaattcacagcccatacctgtgtccacagtttgggtttgtacacagtgtactgccaggtcaatcctggccggccatggtcctcccaggtcaatcctggccagccatggtcctgccaggtcaatcctggccagccattatcctaccaagtcaatcatggccagccatggtcctgccagggtgtggcaggtcgtgatcctaccaagatctagcaggtcattatagcatcaccaagaggaggcaagcctttgagtgtggaggccagcctttggcaagttgaggacagctttgtacatcgtttccttgaagacgtcaggttccttggtcgaacggaggctccttgttctgaaagtctctttttggccgacaagtttgtgcacaaaccctagccggcctataggctcccgttggccaacctataggattctcttggctgactaaggatgttcatacagctccttgagggctcgcttcactccattcagtcgttgcttgacgattttgctatatcttgtgtggaggctctattatgctattggcgaggctctactccacctgtactctatctttggcttacgtggacattccacatcaggtggaaaaactttaggataacaaagtgattgagaaattccctcataaatatcagtaaccatattcgattatagatatttatttaaacaattcaataataaatcaaagaatttaactactataaatagaagtatgatttgagaaatcttaacctaatttttgaaattaaggagagaaaaaggaaattagtttttctctcaattgttcttgctcatgtattgagaacttaacatgaacaaatgttacacactttatcttaatagcccacactattccttgtgtgtggtggatcgatttggaagacactggtgtgagtccaaattacaaattccttatcaactagattaagggattcaacgtatgcaaagtttcgaggataccctgataggcttcaagaggtatactttaaacttattatttttattcttttgatttatagtgtacaaatttggagatcctttgggcaatggtacaagcataatcagataatacaaaactcttctgtgcgtacctaatgtagtactataaaaccaacataaatcccaacaagaaattagagagagatgctctgacattatgggtaattttctgaatgtaaaaaatgagctagaggagctctctttgtagggaaagaggtcctattaaaataataataaaatattcaaaaaaatacatttaggctattcttgaccgttgatgatgatctaacaatgaaattgactccagaggtcgatcgtcaatttccagaacttgagtcgcattcgtgggacccactttgggtagttgtagcttaaatttgttactctcttgagggcaaaatttgga

SEQ ID NO: 224199 - DNA, 2241 bp, Cannabis indica
agagtcaagtttagagagaatccaatatcacaatgtgtgtggaggaatgtaataggagtattactcttgaagtgatttctctcattttgagacatttctttgtaattgtttattgtcttgagttgtattcttttacatatctcattatttactactaactattcaataaataaagatctatgattcattcattctcaagctaagtttaccacaaatggtattagagctcgaaatttagagttcaagaatcacattcaaccaatcaagattcatcttcaacattttgagaattcaagcaatcaactgattaatttaaatggctacaacaaggtttgaggtggacaagttgactagttctaatgatttcaacctatggagaatcaaaatgaaagcttttttaattcaccaagggacttgagatttgtagccaaacacaatgtcattctcctcagtcttagtgatgaggttttgagggaagtttcaaatgaagacaaggccttaggtctctagaacaagctggcttcaatctacatgaagaaatctcttgcaagatgattataacaaaatcattcttgatgattataacaaaatcattcttgatctgaataatttggcgatgaacattgatcatgatgaagaccagactataatcttgttgagtttacttcccaagatgtatgagaactttgttgatacaatcttgtatagcaaagaaactttggccatgacagagattataaagttgtgtcatgtgtgtcatggctgtattgaattctaagaaatttagaagaaggggccccgagaatgagaaaggagagaccaatggagaaggatttactcattgttaaggaaaaattccccaagagagaatacaagggaattcataactcaaatggctataaagtttattcaagatccaattctagaaactttacaatagggtcaagctctaatagagctgtaagaaagcaatgataatactggaagaaggagggccgccttagatatgattgtttagctttgaaggctaaattgaaaagagaaaatcatcataagtccaaaaggcatggagttgctgatgttgcagatgattatcagtcatctgattacactttttagtgtcatatgatgcacttgtttcgccaacataactcctttttgccaacgaaacaacttgccgacataagtgctcaacctgataattggaagaaaaaagttcacctacatttgtcagcaaaactaaaggaattttgccagtaaaaagtgatttttttgtagtgaaaacatctctctccgaacccctttaatctctcacaagcagaataaaatgactcactattaggtaaaattcacaaggtactgatcttgatattgcatatagatttaccttgtaggtcaaacacattcagttatcttaaaattaaataaaaaaaaacaaattagaatagaattcaactatattgatattaactagaatagccccggcaacggcgcaaaactagttgtgataaatctaacacgcaaaatgacatggcacttttttgactcttttaaatttttactaaacttgataattggagtaagtagttaatttatacacaacttttttttttaaagagtattgctattagatatttgtggtgcttagcactttctagatgtgtcattttgcgattgattagcgatacttcctaaaaattattatattaaattatataaaacttaatacttagttagactaataataatattaacaagtatgaaggtgttaaacaccattagtacccattagcatttctctttttaagttaaaagaaaagctatagtgcaattaagcatacacataagtttcatcaatcatttattatatgttcacaaatcaaagtttgagggctaaatcgacaatattacatcatgttacgtgtgcccaccagtctatgcattagtactgtatgtaatataggaaacaaaactaataatttttttttttatttttaaaattattggaaggagtcacctacttactaacttatttactaaattttcctgacggtaagttattaatttattttatgatatatataattagttagttaatttgtttgtcgactatttgtcataattaataatgacgatatcaataataactaaatatatatttagttaattcaataatattggtcgtatttgcacttaaaaaataatattggtcgatataatagagtgtactattattattac

SEQ ID NO: 224200 - DNA, 996 bp, Cannabis indica
atactatcttgctgagcttggcttacaggggtaaatctatctctcatctgccatgagtgccagagctcggtgatgtatgtacatgttcgggccacactagaccaagcgggttggggtctactagtgatgtgcctttgtaactgtaactctgattttgccgcttaggtcggctagtggaaaggacttgtaatattttgtaaataatttcttgggatctcgaaacatgtaattttgattgtaaagttaaagttattacaagttttattttcattctatttttcgtttaaagtttaaattttcccgcgcttatcttactagtaatcccatttaagggattagggttttttaatcacctcgggtagcgtgcctaattattagggcgttacattaagatagaaagagaaaatatgtgatcatcatattttcactctcataaaccatatatattgtaaaagtcttcctaggtctcaaccaataggattaggacactttgaatcaactttggagccaaaacacgtcttaaagtaaatgttgaaattttctttaaatggctggggcgacatgtcgcctaagactaggactaggcaacatgtcgcttggaactttcaaacagagtttatttttgtgttggatatctcatctcccaagtgacatggagcagtctgatggagtcaaagttacgtaaatgcatgacccatgcaatgtgctcaaggagacatgttgcgtggcctgggtgacatgtcgcttggacacaaaataactatgtgcgtaaatgtcctctttgacatctccaaacgatttcaaatttcttaggtaatcttatacactatataaagtcatttaaactttcaaaacataattattaattatgttatatcaaagttctcactctcttgatgtaaaacttttaaaagtataaagcaccacaattgtgcttacccttttattatatttaaccaatatacaacataatgtttagctctgaatttaattctt

SEQ ID NO: 224201 - DNA, 1887 bp, Cannabis indica
aagttgctagtcgctataagcgatttccgcaagagatatttgaggttaaacgccatttcttgaaagacgcagcctggcctgaacctctatatttatcttctattccactcgtgagacaaatatttttaaccaaagtcactgttactttttcaccaggtgaccttgaatttaacattatgtctactaggccttgtaagtcaaagaccctacaggatcccaatgtcacattcgaaattgaacttatgtaatccaagatcagatccattggagcatatgttggaggcatattaaaatcctgtggtattgaacaaaggtgtggatgtcgcagtaggtatgttgctcctagggaattcagttgtttccctcctgagatggtaattcgcgaggagtgtagtggagccagcactagtaactcgtcgggaataggcgcttggagcctcgaacatatcaaggctggagcggttcttcccttgagagattatttcaaagaattttgtaattacctccgagttgatcctttcaactggattcggccaatttcttacaaaattcttgcaagtttaaaggttatgtatcatattttaggattggtgcctagatacaagttggtagtatattatatgttatgtgcttatcttactgagtctgtcgactcacagttattactttcatgtataggtatagaaaagactaaggctgagcaacaatgagtctcttcctattttttgcttcggtcaaccattttagggagacgcattgaccgacgcaaattacacattagtagtgtttggtgcttgaaggtgattgtacttgtcaagacggtgtgacctggagagttcgatctcgggacaagataggcttattttgtatgcgtcatagttgtaaagtttattttgtagatgtaaacaagttttaaaagcgggatcctgacatatttctttggttataaagttatggttattaaatgttattattattcgaaaaagtttaaatttactacgatttttgaaaaaactctttgattagcaaagaagtacacagtaatcaaaagagcattgtagcgtgcctaattagggcattacaatttaagtcatccctgagatcatgcacggtacctaaccggtcaaagactgattcatcatcgagtatactatggctggcaattttaaactatcggccatagtatacacaacaattttaaaccatcagggatataccgttttaactcatttatgaattttaaaactgtgactgttttgcacagttagggattctaaatggttgtttaaaactggttggagtatttcggacggttctaaatagtcacgtaactttattaacaacggcccttaaaaaaatcgatttgagaaccgaaggaaataagtattttttctagtaatgtaaatatatatatatatacatatttatatgaagattaataaattgctgtccagctacagatcacattgaccaaaaagaattttcattgaaatttctagtactttaacaccacaattcacaagacatttctcttacatacatacctaataatacaagcacaacaactaattcttcatattaatataaataacttcttattcttcttcctaacttaaactctctactatacctttcatttttaccaaccaacgagataaccctatttatatattaaaatacaataatgaagggaataaaatatcctctcactgctcgatcgagaggcaatgatgaaagggtctttttaacatgtggcatatatatatacaatgacaactcattgctcctccctacatacaacttctacatatatataacaataataattagtttaatgactaattaatattcttctcattaaggaagtaatagtcttcctggggatga

SEQ ID NO: 224202 - DNA, 1394 bp, Cannabis indica
tactgattatttttaaaatatgtgtatggtatacgcatactgatattcatatcagtctgagctttaagtttttagaaatatggattaaatgtgtgacaagttgtacagtaagggcaattgaattgcctgaatggcgagttgtttggactcgggataaacggtaaggaagataatcctttattgtcgtaatactagaaacatgtaaattttactatgcatgatatgattagaggacaaggaaaaaatagatctgagatctgaaaggacaacatgctcgttttatgtttgttctcacactacagacacttcttgttgtaccactggatgtggtgaaagatataaacccaacttacgagcagatcataaggcaaaactaaatgaaccactaattatggaatagaacaaaaagttatagggcaactaggatagcggtcaaaatgagaataagaaatgacgaccttattctgagtgttcaatatacaaaaaggcgccatttgagctaatatagagccagatcttattattgtggggtagtgggtcatctaaaaagaacctatccacagttaagaaagactaatgttaaataagaaaagtgtacgggtcctgcccaagtgtcaattatgattcaaagggacccgagtatcggtctttggctgattcaagttagaattttatgggcaatattatagttactgtttcaattgatatcgatattaaacattttacactcaatgaggggggatcaaaagatctgaatggactgtgcatgtatgttattgagtggtagttcatttgatagggtagacagattagagaaatggcaatataaattaaatttgctgatattcccaagtggaatataggacatgagtagctaatggaggtatccatcttattgatttggggaaacaaaatcttttaattaaaagtgatctagtgttagtacaagtgggacaatttatgagtattgtctgaaaccttaggtaaattgaaggcggcgattgtatggttggagaaattcacttctagggaaagaatgagatcaaagagggtcacgagtcaagctgtgacaatcagagccccgtgatctgcgaaggaaagaccaggagctgtataaccccacgtcgcctaggggaaaggtcgtatgtagtgatactaagattatgtaggtgtgggactacataatggttaaggacttgagtgtttgcttgatatgttagcaagaagcatcttgtttttgtagcccaccatgaaggaactccacggttaagtgtgtttgacctggggtgatttcatttaggaagtttctccatgaagcgtgcgaatcagagcaaagcacgttgaaaacacttggattggtccgtggggccagtcgtcagtccaggaagcagcta

SEQ ID NO: 224203 - DNA, 1440 bp, Cannabis indica
ctcgtaacttaagcactcaactattgtgtaagagcatctcaaatcatgctctctaaacacactccatagctaaaatagggagtgagtctaaaaaaataagctctaaccatgaaaaaaaaaatggttctctataatagagaatagatagggtgttccctaaatgtagagagctccctatttttttgctaaattactaaagtagggagcatgcttggagcaaaaataataaaaatagttctcaactttaattttttagctattttaactaaatttgggtaagaaattagaagcaccattggagatgctctaaggtatgtaattgcgctactaacaaccccttcaaccgctgaaaacttgttattaccaactactaacaataatttgatgtcgagtcatcgaagaacaaagaataacaaacaatgaaacaaaataaaactatgtctcagagacaagattaaaacactaaaaatcatgtcacagaaataagactaatcgtagtaacaaaaatcgaattataatacaaaaacacaacctcgactaagctgcacctaaacccaaggaaaattagcgtgcctagctagagaaaaaaagacaattaatttccaatagttaaagatttaggaactaacaaccctaattttttttcccaatataaatagttattttataattattaatttttgttgatagatttaatccggtctacattctaaaaaaggtttaataataatttttaaaaaatgataaaaaaatttaaaataatatgtatatattttttttgaataaataactaataaaagattgaataatatgttttatataatattatctcaaaaaaaaaatatatgttttatattataattaaaaaatatataaatatatatttaaacggttaagttacgcgccgcgaagaacaactcctaatttagttatcactgcaattcaaattcaatttaaatctaaaaccctaaaatttccagattccgattcattgatttcacccgccaaattccaatctcttctctcttcttcgaatcgatatttatcataaattgacaaatttattcatttatttattttcaaaaatggcgatggctggtttgtacagacggctccttccttctcctccggcaatcgactttgcttcgccccaaggaaaggtacactctttcttttacatatataaagctttataatttccttttttgtttttgggtattatatatttccagcaactttattttcagttgatcaaattttcctggttaaagtaaattgagtgttcaaaattgtaggatatagattatgattctaggataaacaatattttagaatttgtgttttgcaaaagttaccgataggacttttattttgttaaatgaaaaattaaatactggattttttcatatagtaacctaaactgatcttttgtcaaaataa

SEQ ID NO: 224204 - DNA, 2326 bp, Cannabis indica
ctagtaaaaggcttaatcaaatacagttattgttcaacatttagaatagtacccctgaggaaacaatccttattgatacctctcgtggcaaaacttggactacccataaaacttttaaagtggtttaagcaatgaaaggccacctcatcatatgaatgtaccagattaccatgttggtcaacaaaagaggctatacgattgaattccttgtgttgtttaataatagcatgaaaataaattgtgttttcatccccaaattgcaaccaattaatcttacttttttgtctcaaatagctttccatcataatagaacaagaatttagggttgcctttatcactttttctttattaaataactccacaaaaagaatattatgttgaatatgaagctgaagttgatcaaaacgagccttagctgaagtataagcttattgggcatccaccatcaaatttttattaaactccccaagcactttcttcactctgtttagcttgaccaaaatttgaaataattagtacaaagagtagattgctgccaattgtccaacatagtctgtttaaaatcttaatgctctatccacaaaattaagaatttaaaaggtctaaaccctgaattcctactttgaaagcttctaacaatacacatgcagtggtttgaaagaatatttcattgataaaaaacttcagctaagggatgcagatcaagccaatcttcattcttaaaaaccagattaattctagaataaattcttatgttatcacgcttgttattctaagtaaagacagatcagaactcttcaattccaactaaaccaagagagagccaattgcaagagtccttaagttcaatagacgaaataggttgaccaccaactcgatcccccacatcaaaatagcatgagccaaggcttaacgaggaaaggaagagaagcaagatcctgccataactcctttctctcaatgatagagttcagcccatagactacagtaagacaaaactcatttttgatcccaaagtgtttaaccaaacaatgcaaatattggttattttcaaaaaaaaataacagtaatataagtatgtaaccaaaagagtaaaattctaccttcaacaatctgacaagataaaaagttccaaccatgaaaattggaattcatcataacatcaactttattaccacgaactttggcttccaacaaggcccatattctcactttattcaacttacaatgagaactaacattcttctgtttatttcctttctttagaccccgcacattccaacaaagaagattgcaacaatccattaaaaatgatgatgtgtcgtgcctccaccctccttaataaatctaggaggactctcataacgtgctggcaactttaccacaatttttttaaactaaaaaaaaaaaaaaaagaaaaagaagagagagagagaaagaggcctttgtcaaagactgacctttttcccgttatatatagataacctcacttgtggcggaagaataccgtgattacaaatactataacagaaaatttgaaacaaaaccaatccaacaaggcataaacaaatcaagtactcttaaacaacattacacaacaatctccaatctctagtcaaatctaagaacgaaaactgctcttatctcttagttttgtaaacccaaacagctgtccaaaatctgactttttcccataaatcttcaactaaggcttcaatcccttcaaaaaatttgttattcctttcgagccaaataacccaaatgattgctaggacagttgtcctccataggtatgatctacccttactcccccccaccttgctcatcattagagggactaatccgggaagtacccattgggtctcaaagacgttcaacagctttatccaaagtcttttgctcaaacagcaccccaaaaataaatgtgccacttcttcactacttttttacaacaaacgcaccatcccggggacaagcagataaatggtcgccttttttgcatcatagaatgcacgttaatttttcctaatgtcaccaaccatccaaagactttaactttagaaggacacctgcttttccataaggtcttcgtccaaaacaactcgccaaaattatggtctaaagtaaaccagttaaatgttgacttacgagagaaaatcccactaggatctggtttccgtaatctgatatcctctgatatgttgagcagtctaatatgttccagtagttgcagtaaaacaataaggttaggcatttctctctgcatcaagttccttctaaacttaaaattccagcttgcaacacaatttcctacctctccttcaat

SEQ ID NO: 224205 - DNA, 1379 bp, Cannabis indica
aggatttcttcctaaaaatatgttgcatctcaaggagtcatatagcaatgagatccttaatacgagacgtgctatgtaaattgtattcggagattaatgattggcagaagcttcaggagattagtcatctcctgaaggactttccaggaggatagtaactttgtctctgtctctttgcggatgaacctcgacccatagaggaaataggaaggtgtacgaagcatgacgtccaactcgaggctagggtaccgtgcatgaatttaatgcgacatggggtagaacattctactcgtcactctgaaaagatgtgcccaagaatttaaacccattattttctgatttgaacgcatcatagtaaaaaattctcttgaagcttcaaatttgtttttcaatcacaaacggagtgtgttgagcatcaaaaacttaaaatctttcaccccattatatcttgaaatctaaattccatgatatattcattatattcatctcatttaacatgtttcttctcattttaaaatttatattatgaatattaccattaaacctaaaacaagtagaaaacaaacgtaattttgcacaaaatgaatataattacctaaaacatacgtctaaaatatttcataaaatgaacctaaaactagcttagcgatcacctgatcgttaagtgtcaagtcattattcatgtgttattttttatttgtatatttaaactaattttttaaataaaaaatataaaaatttaaagacttagactaatcagggactgccacgtggccattgactcgacacttaatgactaggtacctacggaagttctaaaaatataactttgtattattaccgtcaaaaattaaacttaggtatttatctacaactgaaagttaaacttaaatatttatctacaatcgaaagttgaacttaagtatttatctgctattgaaatttacacttaagtatttatagtgcaaattactctttatagtttactttataagcaatatagatacgttatgaattactcattatttatgtcatagttatcaactaatctttatagacggtctagaataagttaggactaaaattactattttaccgtttaatataaaaacactccattctttgtaaataatttttcagtaaagtaataaaatttctaaattgagtattctatcatttatcgtttttaactaaactaaaatttctaaaatgatcatttcactctttaaccaagctaaaagaaaataatcattttacttcttaaacaaaaattattgatgtcaatgtctacgattaatactctttttctatagcactattgagttcgtaaaatataaatatgagctaatctataaggtaatttagtaagaaataagtta

SEQ ID NO: 224206 - DNA, 1831 bp, Cannabis indica
cgtggaacatatagagcgctctacataattgagagtgcaattccaaatctatagtggtgcaaggagaaattaataagttagggattttacttggtaaattctagatctacttgttggaagcttagttatataggtccatggtccccacactagttgagacaatactgcttgtaagactcagttaattgattttaattaatcaattataattttaaaattagactacctcttatttatgaattttcactaagctaaggcttaattatgaagaaaagagattttaaggtttatttgttacttaagagactttataaagtctaattaataaatatattaaatggacatttttatttgataattaattttaataattaaataaataattttgacatttaagtggctgactcggaaaatatagtatttgtgaaagaataggataaataattgagtaaaataacaaaattgtaattggtgggccaacatcctaatggacggccacttaagctcaatttagccatttatgtatcaatttttaatgccaaataatttaaacctaaacctaaaaagattccaataaatagatagtgatggactcaaagctaagagcttagaatcattagtctttcagtcaaatttgagtcttctctttctttctctaatttttgattccttctccctattctcttcttcaaattttgtccctctttatgatttagtacatgcccacacatagcaagtaagtactcaatcatagtgtgtaagacattgaagaatccaacacttgaaggagaatcgggctcagatcttgataatactctgcgacagaaaggaacaagggttagagatctgacttgaatgagtcatttaattttgctgcaactaatgtaaggtttcttgaactttatgtgtttaaattttattgttttagaaattcatatttaggatgttaaacaacatacatggaagtaaatctacatcctggtaaaataatccccaacagtttttatttatttgttgtctagttcttctcttcatcttgttttcatttttttcttagttttttgaattttaagtcacgtttttgaagaaaaaaagatttttcagaactgggcttgcaaatatagcatctattacatctggtgttgaggttgtgcagaagattgtattagttttttttaatccttttttcttcttattttttttatttgttttagtgttgttttacagttgttttatcatcgatttatttctggaattaatggttattttcaaggtgttgtcatgttgatgtggtccgtaggtgtggaagatggaggctataagtacattttttctttctttctctatggttatttttgtagtttttttttttacttttgtattctcctataaatacgttgacgagctcactcacaaaagagttttgaggtgtgtggttcttttatatttttctaagtggttatttctgtttcattattttacatttgttttgtgttggtttaggtttgttttagtgtttttttttaattctgattttttagggttgagcttgtaaataaagccgctattgcatatggtgttaaggttgtgaagaagaaggttttttgatcaatttttttgttttttttatttgttttagggttattttacagttgttttgccctgattatttttttaacgttgatttcactgtttttgctcaatctcgctggaattaatggttatttttagagtgtgttcgtgttgttgtggtagttctgtgtgtgagtatagaagatggagtcattgttcttgatatttgatgtctacagtataaaaaaaaaaaaaaaaa

SEQ ID NO: 224207 - DNA, 1332 bp, Cannabis indica
catccttttgttgtggtggagagtgattctgagagtgttatcaggaacctaaaaggtgttgaatccttaaggggattgagaactatacaagacaatccaaacttctctctacttttatgactaatttttcttttatttctagaaattttaattttacagctcataatatggctaaatgggcggttgccaacaatattaacggcatgaaagaggtatctactatcccaaattctatcttttgtaatgaccatgaggtctataatatataaacaattttattaaaaaaaaatttaatatatatatatttatatatatacgagacagatgccctctaagcccaaagaagacaaaaaaaaaggtgaaaaacctatccctttacaaacaaacaaaaaaaaaatcacacccaatcaaattgtgaagagatattttaaaaagcactagtgtctaagaagtatagattggagcaatttattatattattttgtataataatttgatttaataacaattatcagaagaaagcaccactcacaaagcattatgagtcaaattaatagtagatcaggttagtgtttttttttttgggagtagataaggttagttaaattaatatagcatggaatatttatttataaccacatccggacaactcatgtagacctatatcgccaaagccacagccacaaccacccatagccatattagaactggctgactaacaacataaccgcgttaataaaaaaaaaaatactaacaacataaaaacatatttgtattgttttctattttttattttaaaaaattacttttagaaataagaataaaaaataatttttgaactttttaaaaacaaatcatgtttggttagtattttttaaaaataatattgactaaaagtgaattagtttttaaaactgaaaataacatttggttgttttcaaaattcttgtttttttgtaattttattttctgaaaattgttttcaaaaaacaataccaaacaagccaaatattttcaaaaaataatttttgtttttaaaaactaaaaataattttttaattatgatgtcaaacatgcactaagtgactcagtcactatctacattatcattttattattattcactttaatggattgcattgtatgtatgttttaataagagcattgttatcggacatcagtagtactcaacactttttgggctcatttgaaatatcatattaaattgtattttatggaatatttttatgtaaaattatacgtggtattatcctttatacacacataaatatataatattttagtataaattaaagtttaacatagtattat

SEQ ID NO: 224208 - DNA, 1102 bp, Cannabis indica
ggcccagctccaagcactaaactcgtcggtgctccaggaagcgaactcctctgtgatcaacaatctgttccatactaagtccgggatgttacgaactccatcttccttagacaagttctccatcatcctgtatgaactgaacttgttagggttttgatccatctcccagatggagtcattataaaccacaagagaggaagacaaggcttttgctttgccctttccattgttatcattattatttatgttgatgacttgaatattattgtaactgttgaaaaattttctgaagttgtagaatatctaaagaaagagttcaaaataaaatatctaggaaaaacaaaattttatcttggtttacaaattgagcatttaaaagtgagattttcattcattagtcaacttatgttgaaaagattttgaaacgattttatatggataaatcacatccattgagtatcctaatggtagttagattacttgatgtgaataataatcttttctgacctagagaagaacgtaataggagcattgatgtgtcttgctaactgcacaagaccttatatacctttctttgtcagtttattagcaagatttagttattctccgacatataaacattggaaagagattaagcacatactttttttatgttcaaggtactattgataaaagattgctctattctaataattagatgccacaactcattggctacgtggatgcaagatatttatctgatccacataaggctagatctcaaacaagctatttgttcacatgcagtgacactgctatatcttgggatcaacaaagcaaactctggtggctacttccttaaatcaggttgagatacttgtatttcaccatgcaaatcgagaatctaagtggttgagatcaatgacacaacatattcggggaacatgtggattaacaaccaataaacaagtaccaagttctctatgaagataatattgcatgcatcgttcaactgaaagggtggtacatcaaaggagatagaactaaatattacaccaaaaaaattctttacacgtaatcttcaagagaatggtgatataaatgttcaaaaaaattgataaag

SEQ ID NO: 224209 - DNA, 4043 bp, Cannabis indica
tgatttcttcctcaaacaactcccataaatatctctaattgtatcccacagatgcggaatcgactgatctacctgagattataagagcttcaatagatcgtaacagcacattaaaatatagggatatttactttctcgttactccttttatggtgctaattgtaacaattttccccctatgaataatgaatgaattcacagggaaaggacctgagatcataatctcgcacttaagagcactttgctgaatattctttgtaaacatcttgagagttgtagcagaattcactttgtcttacttagtaatctgcacgacattatctcataatcaatacaactaaaagggaagtgagtcattacccaaatctaaggggactgaacctctataattctgtgtgttcattctatttatttattattcataactctttattggtgattacttcacatttattagactccgagtcagttgacaatttttccaactaccaattttatttgccgcgtgtgagaaaacttgacagaaaggctaatttaacactgtgaatagttcagatattatttgtaatggaatgaaaatacaaaattcaagggcacaataatacatagatcataattcggaaaataaaaattcttcatagccttaaaagaaaaataataagtgtccaatgtaatgtagaaatttgaagtaaaatttgagaattggaaaaaagggaaagtattttagggatagttttgaaatataattctgctaataggtgagcacatacagacacaaaagttacccgcctaagaactatatccatttcggattaggcctcattatccaatatcaatcaattcccagaaagaaaagaaaagaacaacaaaatcaaaaactctttcaatggctcttctcaacgtctccatgtcctcaaaactcccaacaaaacttcctcatcttcatccttatcctcatcctcatcctcctcaccacaaccacttctccctcccctcatatcctgcacctcatttagctacactacgcactcctcgctctcctcatcctctcttggaaatttctcgaacttctctcttttcttctgtgctccaatcagtctctaacgcaagtttgcttgctcttctctctgcttccctcttggtggtcgatcccgcactcgccttcaaggtaaacattctttttctttttccctttgggtgcccagaaatggaatgcgaaaaggaaagtaactttcaatttgatattttttttttcatttttgggcaatgtgtaatctgtacttgaaagggtggaggtccgtacggttctgaagtaacaaggggccaggatctcactggcaaggactttagtggcaaaactttgatcaagcaagacttcaaaacggtctgaaatgaattcgattgaagagttcgttctatctattgtcaatatttgcaattggtttagttaatgaaaatgtagacttggttttgttacttttgaaacagtccattttgcgacaagccaagttcaaaggtgccaacttacttggtgccagcttctttgacgctgatctaacaggtattttacattcttttacctcttaatttcttgatttttttttaatggttgaactcagtatgcgctttatctaaaataataatcatgaacttttataggagctgatctttcggatgctgatctgagaggggcagacttttcgttggcaaatgtggcaaaggtgattttttcttttttagtttcctagtaagctttcttctttagataatttcttaaaggaaagtttcttgttcttgtattagtttccctggttttctcgtttggatacaatgctaattgtataaagctaaacccaatagaaagttttcaaacgagtgagtttggtatttgcttttgcaaccagtgattctgatcatgaatcgagtttcaattgcaataaattacttaactccaaataagtaataatgtttgacttatatattaactgatttatcaatttttaattaagaaggaatttttaatatttttagtgtttttagtaggcctgttgatacgtttcattattttataatttgctcgcttaaataggaatcttttgaaactagactatttggtatatgatttcataacctaattggcactgaatccaatcacttttcagtttttacatggaaaatcactatgtaattcaattgtaactaatattgaatgtaattcagactaattataaggtttgacatatttatttaattaaataattagagtattatatggttactgtacaattatttttatgggtgagttatttaccatataatatcacagtaaccttatgaaaattaggtgtaattacattgtataattataaaatattattatttttagaattaatgttattaaattatttgattactaacttatttgtggaacataaaaataagaatccctatataattactatttaacttattggtatcttatttgtatttcgtgaggccaataaaatcgttcatgtattagccaattatgttttagttcacaaaattagtgtcgtatagattagggttaatccctcttgtgctaatcaagctattttgcttgatttgcctaatcctgtttagtgttgttgaaaaaaaaaccccctaaaaaaaaaaaatacacacacaaaatacacattatagtaactgtaagttaacacaagacattcatcaaacaacacaaaaataaccaaccgctaaattagtgtagtgatgtattatgaccaactagtttataccactatacagtgatctgtttccatggttatggcattgcttaggtgctgagttgttggagagggagttcctgatttttcatagtttggtttagaagggattcactttttccaattttcctcatttttattgtccaaccttacatacggataactgacacatcatttcaaaatcctaaatacaaaataattgatgagttgatttttagtttgtatattgtggtttgcattctttgttcgggcatggaattgtgtcggggaaattggaatatgaaattcttgtgttcaactgcctagcaaaaaactagaactagacagaaaaccaagctgctccataccaatattcatatataggccattttctgcaggtgaacttaagcaacgccaacttggaaggtgcccttgctacaggcaatacatctttcaaaggctccatcataacaggtgctggtatgtatatcactcttcaatcatgtgattttaagcctaaacattccgtagaaaatattgttggtgttgttgttggaattggaaccaagtacatcctctctgtttctcaacatattatttttgccaaacctactcatctatttagctagtttacgttttggtcgatattcttgtttgtggtcagatttcactgatgtgcctttaagagatgatcaacgggaatacctctgtaaaattgctgatgggtaatataatttcttttgtataattctcttcttcagtccattaaacattatttatatacattaattggtcaaccttttctctttttcttttttttttgtttttctttttccccaaaccagtgtaaattcaaaaactggaaatgcaactcgtgacacattgctttgcaattagagtacatcatttctccatgtttgtaacaaaagggatcagttacagctgctatttacaataaaaaagctataaacagggttcagtgaatttctttcttgcactgaacacaattatgttcagacactcaagtgtttgtatatcagatgacattatagacagctttatgttttgttttgaagacatctataaaggtttctccttacaaaaaaaaggctataaaggaagaaaacttctgtctgtaaaaattgaattcttcctttcgcaaagcaatttaacttcagctgtttaagctcttagttctttattcagtgcattatttcattatcctaaaattttgtttttgaaacgttattcagcaataatttttgtctggtgttcatctaattcaatctacactatttt

SEQ ID NO: 224210 - DNA, 3577 bp, Cannabis indica
gggggaatgatcggaagtagtaacctctaaattagtaagagtagcattaggaaaaacctggtgccaagaagatgtaacaagtgctttgtccaagcgaacttcgacccaattgttagtccctcgccctttctcccaggtgaacgggtgcccttgcaactctaagtccgacaagtcgcattgttgtagcatctgattgaaaccagtgatcaaactttgaggataaagccggccacccctcttgtcctcttgtctagcaacattgtttgcatcgccaataacacaccatggtaaccccgattgccttgacaaagttcgaactaaagtccaagtttcatgccgcctattccgatttggctctccgtacagccccgtgagtctccaattaccaaactgtgttgagtttattgctaaatcaatgtgatgttgggagaaacccaaaatagcacaatcatcattttgtttccacaataaagcaatacctcccgccaaccccaccgaatctacagtaaaggccccttcaaagcccaataaagaagccacactatccacttttgatttttgacattttatttcacacaaaaaaataaaattgggtttcttttgagaaaccatttctcgaaggaattgaacgttctgttggttcccaagcccctggcaattccagcttagtacattcataatgattggcgggcttggaaaccaagacccgccccatttgagttttttgggctactcaaccaaccttgcaaatctttctcactatctttggtaatttccatatcaacataaagtatattgtcatgggctttatactgttcctcatcttcattttcctcatttggcccaatagcatcactaaagcccattcttctccttttattctcaagaaaagtcaacccattttttgaaatctctccagttggcgccatcagttgcttatccccaattacttcccctgaatcaaggggtttctccttactcactccatcttccttttcttttccacgtaatctcctattcagctcagcatcattatcgtcctgaataataggcaataaatgagaaccctgattgttagggatactcatctgttgaccgaaattcccagctgtcaccggagaaactcctccaccaccattgttgctagccgaagcattattctgcggcaagacagattttatggcaagtcccgtttttaaaccatctagacccatcagcataacgccttcttctaggaaccgcacgtagtgaatcatcaaagttcttaactatgagctctttaggggtgtcaaataatctttcacaaaatctttcagtatgtcctaggactccacaaatgaaacaaaaagtaggtaaatcctcatatttgaatgtagcatggcataccggtcctccttgaatctcaagtttctttttcttttttaacggcatatccacgcgaatcttaacccgaatccttaagtaatcacgccaaactcccatgaaattgttcggatcggatctaatgaacgtacctatgtaattcccgatgccctttatgattctttccgacatgaatcctgttgtcatattatgcaattgaacccataattcaaggtgcgtcaaaaccacctgccgtggattctctcctgccttcactctctcaaacactagcggtgctctgtcaaacgtccatggactgccctcaattactctttcgatgtctacctcatgatagaattggaataagaacagatttggttctaattccttaacgtataaccctctgcctggctgccaaagtggctattttattctgcatcgcctggaagtcgattggtcgattcgttagaaatctcccaaccagcaaccacctgtcatcgatttccgatagatcatctgatacgttgtcaaataagagtccttcatcatcctcctcttcaatcgctaaaccagtcaaattccttccaccctgttctggcaggttctgcctattagccatgataggaaaaacaaccgaaccaagaagacaaacaaaacaataaccaatcgtaacaccagacaaaaatcaacagactaccatgtcaaaatgacaagactcgcagctaaagtcataaataccatatccttagatgtgagaagaggtgggaaaattattgtaagacttcactctaagaaatacaattatttctcttcctccattgttgctcaaagaatttctttaagtttttatattttcatattttaatcctcgttctaattctcgtgtttgagttttgattttcgatcgtaatttggttgacgagttttcactgtcagcaccgagaatctcacattagtacaaattagtattttaaaggtatcagaaattgttatggatagttaatattatgagattatatgggttatttagaaaatgacccttctacccctaagtttaagtttatgtgggtttgtgagtaggggaaaattgatagttttttaaattaatagacatgtcttttaaaacttatcttatgccatagtaccatagaattatatagaaaatagatgaaattagatttttttttctttacaaacccaattaaacaattgagatacccctttctctctcctctttagttggtcgaaccccatcaaaaactaagaacccaaattcttttccttcaaatctctaaattctctcaaggaaattgttaggagaaatgaaaattttgggaaactgcttggaatgtcacgacttagcaaggaatgatgcggcattcacttgttctctagaagaagaaaaaaagaaaactaagaaaatagcaaaaaaagaaaagtggggaacttcactttgaatgttgcggcactaaggcaatgtcgcgtcattagaagttcttgagaaacagtcctattttcgtatttaaaggggttgaggagctaagttttcaatgcattcaaacttggagatcaattttgagtataggagaatggctaggagtaaaagacaccattagagaattccaaactgtgttctttctcatctatctttatcttttatgtttttaattgaatctttgttgttttagaatgacttttatgagctaattttctttaaagattattatgtgaaccacttaaatttattttatggattatttagttattcaatttaatcttcttctcttatttcaattccatgtaatctgatttaattttgtaattattaactgatcacctataattgttatttataaattcaaatcaaaattctaaaatataagatttgaatatgatttgattggtatggatgtaaattaatttatgacaaaaatatctacattatttgtatgattttatgagttttttttgtttaatgttttctttgtgattaaattttaccataggaatatatgaagttttcatatagattgggtttgtaagtcttaaccagattatgaactacttaattcaacttgtcaattcaataggaagaagaaaaattgggtaattgcagtaagaagtaaataaagaatagctggggatcataataattcttgtttttttcattatttatttctctaatttttcaatattttctttattttatttattt

SEQ ID NO: 224211 - DNA, 2366 bp, Cannabis indica
tcgtctgcatagcccatgcatgtgttaaatttaactagcatgtcgtctacgtatacctccatattgtttcccaggaggcctttaaacattcggttaaccattctttgataagttgcaccggcattttttaatccgtagggcataaccaggtaacagtatacccccttgtcggtcctgaagctagtatattcttgattcgcgacatgcatctttatctggttgtattggagtaggcgtccatgaaggacaacaacttgaatcttgaggtggcgtccaccatttgatcaatttgaggcaaagggaagcaatctttcaggcagactttgttgagatcagttaagtgtatacaaacacaccacgtcccatttggtttgggtaccaacaccggattagccatccattttgggtagtatacatcccagattaggccattggttaacaacttatccacctctttctctaaggcgtctacttttaccggatcaagaggacgttgcttttgctgtaccgcaggcatgtctgggttaacatttaagacatgggtgatcacatggggcttatgctggtcataatcccttggcaccacgcaaaaacatctatggcagcctttaatgtttcgataatcttgcttttttcctcaagctctaggttttttcctagatggataaccttggtggagtcgaggtcacacacacttacttcctcattgtcctccataggttctacagctgtttcggatcccacacggggatccaactcgtcatgttccatcaatcttggcagctcacccctgtgcaccaccagcaccgaaaagtgcattgcgacgttgtagcattgccttgcttccccttggtttcccctcaccgttcccactctggcttcccgggtagggaatttaaggcataagtgccgaatgaaggtgattgctctaaaatcaaccaaggtcggccgaccaaggatggcattgtacgctgtcacgcaatctactaccatgaaggtgcaatatttaaaagtgcgtttatgggggtgtttgggcacagggtgacaggaagccgtactttcctaattcgtataagcgttgttcggttaaatcctctgagttgggagccgttgggtgacagatccctgcctgtgagtcctatgcctgttatctactactatttttgccatgactttattggcgatgggagtctctataactagaggatcgtggtgagggaaacgcacttgttttgcattgccttctgtgaaagtgatgggttggtccatgagccggggcctttgtgctgggaggttagtgacttcacatacttcatcgtgttttatcgccccagcgtaacgctttagctcgtttctggtggttcctctgatatgaggcccactgaagatcatggccactctcccatttggtcgtggtggcaatccaggtgcctgttgagggagtgctccttcggggggtacactgagtaattgttctctaggcataccccctggtcctccctgaggtaaagagcctcctactggagccgggtttagatggggtaatcggttcttgatccattcatacaaatgacctaatcggattaggttctcaattttgtctttcagttcttgcattcattggtgttgtggccaatgttgttgtgatattcacaccttttgctgagatccctccgggagctatccctatacaggggaggatgtttctggtaatgtgtattttttttggtggcaaagtatacacgctcttgcgtgtccgtaagcttcgtatattgagtgtttgaggggtgtatcccctccgctgtcgtttgttctcagcccgggtgcgccctttgaggaccttttgctctgggagctctgaggaggtcctgccaggctggcgccaggcgtagattgggacggggtttggacactcattcccgagggatttcccatagggccccgaagcgtgatgatgcgggaactagggtgaggctttgattatatcctgagacaccagaaaattgtattccgctcatttgaggagtggccggaggcagggctcctagaagctgtgctccaggtgcatatcctgatactccggttgggtagtatcctccgtaagccactatttgggcttcttccaagttgatgtacttttgcacccttttttggaaatcttagagattatctgctccttcttgttgtagttcattccaaaaaggagtccccgtgcggatcctagcctcgaggagggccagctattttctgtcatctaccttcttagtctttaagcctcttctttggaatctttttataaagttctttagagtttccaaaggtaattgttttatattagtcaaggcgctgacttcaaggttaatttt

SEQ ID NO: 224212 - DNA, 1879 bp, Cannabis indica
cttatcaggaattcaatttcctgcttcaaatttttgcattcgttgttgtcgtggccgtagtctacgtgaaatggacaaaactttgtcatgtctctcttgctgacatctttcttcatgggcccgggcttcttatatggggctagcaactgagtggccatgtgtaaacactttctatatcctcagtcgagatggtaaatgcagtgtactttgcttgattctcctggggagcctgctcagttatgttggtgaactttcccttcttcacattcccttgcctcttgttgttgttggaacgtttaccatttgagctttatttggtaatgggggagttgggcggacattctagtggaaggagcttttgtcttgccaggcttttgttcaccttctgctcgctgaatagcttcttcgagtttaatgaaaccttaagcacggtcgagaaaattgctcattaagtctaccgcgtcgttcttcattatgtccttccaaagttcacagaggacttcaatgccccctagtatcgggggcaactttcaatcttcagttacccgtgaaaccttggtcgccttcgtcatgaatctgctgatgtatgctcggagaggctcgcctgctctttgcttgacttagaccaggtctcctgaatgcaacggaagttggcgagaggaggagaattgtgcatggaattccaaggagaaggctttccatgagttgaactttccaggggccagcttgaaataccattattgggaggcttccgagagggtagcaggaaaatttttgcaacacatgtcccctcgcaccccctgcaaatccatttgcatctggaaatacttgaggtgggtaagaggatcttttcttcctgtgtacgttttccaggttggcattttgaacttgtggggcaacgccaggagattgatctcgggagagaaaggggttccacatgctcggtccaactcgagatcattgtttctcttccaggccatgccttggaacatactctttagttcgtctagttgtgcctacacagctggactaacctgttcgacattttagccaatttgagtcacgtcagtatctttctgagcgagaatttaagcacgggttgcagggtgtacgatcgtcgtgccaggttaatcgtctactcctctccttcgattttgatcgtttttgagatcatgattcatcaccaacctctcaaaaaaagaatggcctggctatcctagtgattgattaatttggttgacaggtggaatggcaccgttggcctggttggaaccatcggttatgacttctcctgatgaattactgcacaaggtctgcccacctactgcttggcccactggcagaacctatgaccggagatttggtggctgaccatttatagtctgggaagtattcatctctagatcttcgtctgtttcccccagggggatgacattcgggggttgttgcccgacaatttggtaggcttttcgtatcagcacagtagcttaccaactacaattgtaatctctgcatgatgagcccttaacgcttccatctctttgtccctccattcgacaaacatgcgtctttgttcttcgaacgcaagatttaccgcaactcaaggttcctcctgatcatgatgtagggtgttggtatgaccttgcatgagtccaagagcagcatgacccacgttcgacggttgttcaggattaatagctggcagaacccttgtgtttcctgggttctgcaatgcaggatccaccgcctatggatttgctggatcaaccatacccctacgagttgtaccaccatcgtacttgtggttagatttagaatgaagagcgattcttgattctgatctcaatgaaagcacaaaaatgttgacctcggttttagc

SEQ ID NO: 224213 - DNA, 2244 bp, Cannabis indica
agtttatttatttatttatgcatgcatgaatctatgattgaaaaatgaaagaaaaaagaacataatttttatgtatttgtttatgcatgtttttcttttaatactctacacatttcataaggggttttacacagtaccaattgcagaaagagtctagtgttttccaagttaatagtttgttttagtaatatctgtattcctaggtagaaattttcattaattaagttaagagactctatcatgaatttcagattggacagatcttccagaccatattttagacttgatttttgagaagataaaaacagtgagagattctttgatatttggtactatttgtgttaagtggtaccaaatatttatgcataatcgaagtaagttagtcaaattgattcgtcatttggaaccaaagctcttatttcccatcgaaagcgaagctcacaattcttggagtgtgtgtagcataaactcagaacacaagaatgtctttgggtcggatttgctactcccttcctataataaaccgttttcagggtcatcggaaggatggttggccactctggatgataattttggatttacattattcaagccatttatgagaaatggggaaagaagtactgttcaccttcctccattgtttcctccaagtgatgcattagttgtgaagaagttattggcttatcgtgaatactatgtcatgaagttcacaacatttacaccagatccggtattgaatccaaacgattttattattgtagcaatatatggaccttcgtgtgaattggcttatattagaacttctaaagatgctgcgtggactcatataccttctttacttgatacatactttagtgacgttctttactacaatgacacattttatgctctatatgacaagggcgggcttgttgcttttgacatttcagaagattcgtctcaggctcaaccaattatgaagctgattgttagaaatagaatgactccagcagagaaaaatcgttatgtttgtagaagatatttggtggagtcgtataaaggagaacttttgcaagttcagaggtatcgtgaaagtcgtgtcgctcatgtcacaaaagaatttaaagttttcaaacttagttttgatcagtctcagtgggttgaaattaactatttagaagatgaagctttatttattggtgatagtacatcggtgtctgttgatacatcatcaacttctacacaatgccagagtaattgtatatacttcgtcgatgacaaagatacaattggttttgatgttggacctttagattgcggggtgtacaatcttaaaactcgtagtgttttccgtcttttcagtattgatgtgagactcttcccaaaaatgagtgaaagaataccgttttgggttgcaccaaccgtattcagtagagggagtgaagctcagaaaggaacaagttcacatcatcgtcaacaaggtcagcaaaagttgtttatctcttaacaaagtgttctcacattgttaatattcagtagagagaaacactgtttgtcaatattctatttgttctttttttgttttgtgttttgaatagtgagatgtgacttagattttatcactggtgttaatatatatgacatgagagtacctttgttaatgattaataatagttaatggttgtttagatttcataatttcccttcaaaccttctgctatgaaaatagttaatatactaatttcaatatggaatattatggtatgaaaagaaaaaataaatttggaaacacattgtgaaagtccaagaaatcctgaaaaatcatttctccttcactgttatgaatgttatgaggcagaagacttttagcaactatgttgtatcaaactctgaaagatggcgatgaaagtttgtttcggtactgtctaatttggtcttgactgagcttgcataagcatcgatttatgtcatggctagctgtgcttgggagtcttaaaactcgggatagattgctttcgttggtgctgaatattttagctattattaatgagtcgtatactatatttttaaaacctgaaatgcggtttattgggatcatacatattaccatatagaatgttggactgtgagtgtaaaagaccaaaactggtttaggggaatggtgttgtgagtgattgaggtcgtttgttttggttgtttgtaaagttctctatttgatcaatggattatttatttactaaaaaaaaaaatacatcaatggtttat

SEQ ID NO: 224214 - DNA, 1511 bp, Cannabis indica
taaaataatgaaattaatttattaacgttcttatgggactatattattatatagtatgcctgtgctgtctttttcaagtgtgttttgataggttggcgtggtatagtaacaattgggtatttcgggccgaactaggttcgggactgacatacaattctcggattaatttatatcattatattaatgtgtgaataatctgaaatttatttatatttaaatgtgtatgaaatgacttgattacccttgtgtgagtaagatggtgttaagtggccctaagggcaaaatggacattttgaccattaagctatatttgataaaagtaatatttgaagaaaaagaaaatggaattttcttgttcgttcttgcttcagccgacctccccctctccctctttttccaaacctattttcttttacaactttgaatcttgttggaaattggtgtaatttggagctaactcttggagttagggatttggaggttattcttgctaagctttgaggtagtaattacagtttttaattgaatttctcttgctgaattttatggttggaaagcatgaatatgatgataatatgttgcatgatggtgttgttttgttaatttttgtatgtttatgcttgaatccttgacgtggtgtttgattgagctctagatagaatgttagggtttttctcatatcttgaattcagattattggtagtgttgctgctggaaaatataaggttgaatggtttgaagctcaagttcttgagttcttactaatttaaagcatgattttgtgttgttgtgcaatctaaaatatgagatttattgttggtttttaatgtttgaaattgggttttaaactctctgtatgacgattaaaaatctatttgatgatttggaagttttggttaagttttaggttgtttggaggtgatctaggggctgaaattcgaagtttttactggtttttctggctttggaacccatgtgccgcggcatggcttttgcatgtcgcgtcccgcccttttctttctgggtaaatccttttgcaaactttgaataaccataactttgtgatccggactccgttttgggagttctatagaccgttgaaaatcttgtttcgagctctatgtgaatatttgtgttttgaatttgaagtatatattttgtaaatgtggaattagggattaaccctatatgtgtgaatcccggaattcgtgactaggattaccggtacttggtcaggagcacccggggatttggaatctccatatttgcgggacatcaagtaagacagtagtatgcacgtagagttaagcgcagtggcgctcatattgtatgttgtgattgtgatcaattaagaactaggattagggttattaccctaaaatgagcggttatttggtctagggttattacgctagtggttaaaagatgttgaatgttatcatgtaatatgttggaataagatttatgcgtctaaggcatattaagctagactcggtaaactgtaccttgag

SEQ ID NO: 224215 - DNA, 1752 bp, Cannabis indica
acgtgatagtggctaatggctctactcaacccattttgtgaaataatctactgccactactgcatattgaactttgcctttccccttaggtagtgaacatacgaggtcgattacatagacagtaaatggtcaaggtgtttgcatactatggagttcgtttggggtagatctaggtatttttaaaactctctagcacttgtcacattttttgacatagtccgtccaatcttctatcattgttggccaaaagtacccttgtctcaagatcttctttgagagtctttcccctggcatggttgccataaaagccctcatgtacctcgaccatgagaactttggcttcttctttcgtgacacaccttagaagtggcattgaaaagcttctttagtatattacttcgtccatgatgatgaagtgagttgcttttctcatcaatctgttagcttcatttcgatcagttagaagaataccttattctatgtattgtgcaatcagggtcataattgtcgatcatcaggataggccccacgtcttcatgaatgctcctgttggttaggtatttgacgggaactacactgatagtatcaaaatttgttgtactagccagtttagctaatgagtttgtatgtgcgttctattcacacaacacttgttggatggagtagtgcttgagttgggctaatagatctttagctttgcttaagtatgcgatcatgtttgtaccctcgggctagatactcgtcaagaatctaattaacaactagttgtgaatcattgtagatcttgagtgactcagctttgattgctagtgctaatcgcagtcctgtgggttcgtaatccctctagacctggccctgtttctagggtctcaggaatgtggttttctccccaatttttgctcgaatcttcattatttcttatgacagaaaaaatgccctgaacacattttcgagaacttgattggaaacagcctaggttgacaatatgtcaacctgggcggtgggtcccccttttggcccttccaaaattctatttggtccccaaaattagttgaatcttaatctttgttgaaaacgaagatgatgtttggaagagttctcgaaaaatatcatcgaaatcggcccaggttgacaaaatgtcaacctgggcgctgggctttgattttggcacccaggaggtgcagtttcttcctcgaaagtacatatttccctatttttgatgaagacgaagaagatgcaaaagttgaattgtcgatttgatacttggaaggcgcccaaattgacaaattgtcaacctgggcgctgggtgcctgtgcaccgagtgctacgggtgctcaaatataaacttgctctgaatctgattctgatgcctcaaatacatcagtgtcatgtctagttgatgttccaatgcaaagtttgacccatttgcactaagtcctggaaagtgaaacgctagttgggaatgtcaacttggacgctaggtgaaaccctaggtgtccaagttggctttcggtgtgcaggttcttgtaatttcagctcccggggctttgatttaattgctccatgtcttcatggtaaagaatactaaaagatagtgagttagaattaagttattgaagtccaaacttccatcctgaagctcccaaaatcaacttgggtgcagggctaaggtctcctcctaagtcgactgctacaactcaagcctactcaaatgatgtcttctttcttgctacgtgtcaaataatgatgtcc

SEQ ID NO: 224216 - DNA, 3267 bp, Cannabis indica
catcaattcctagtgctggtggtaatgtcagtaaggggaatggcagtggcatttctgatcagaaaaaaagaatgatatttttggatcatctgggatgaataagagattttggggaaacaaaggcaaccctcaaggtcgtggtcatacattcaagtcatacccggaatgtcccatgtgtaagaaacaccatcagggtgttgggctaagacttgtttttagtgtggtatggtaggccactttatcagggactttcctcaagctaagaaggaggaacccaagaaaagtaacaaccataatctgggatgtgtgttcatggtaactcaggctgacgctgacgcttgtccatctgttgtgacatgccaaatatctattaatggtttcccttatacaatgttatttgattcttgagctacacactcttatgtgtcaagtagagtgatagaaagttttcataaacctcttaaaggttatgcttcggggtttggaaccttgttaccatatagggagttaatgatctctactagatggattagatccttatctttttggattgaagattgtgagttaactgccaaattgattgagctacagttgtgtgcttttgatataattttggcaatggacttcttatccaagtatggagcaacaatctattgtaagcagaaaatgttggtatttgaacctgatagtgctgacctagctgggtttggggtaaggtatgaggatcatgtatacctagaattacaaatttgaaagctagagacctaatgcacagaggctgcatatggtttctagttaaaattgtggatactagacaaacaattacgactggacccaagagtatgattcttgtatgtgaatttttatatgtactttttagaggatttgtctggattacctcttcacggggaaatggaatttgtcattgagttagttttaggagtagaatcagtatcaaaagcaccctatgaaatggctcttgctgagctaagggaattaaagattcaattacaagagtttcttgatcttggattcattaggctgagcttctcactatggggtactttagtgttatttgtaaagaagaaagatggattattacatatgtgtattgactatcaagaattaaataagctctttatcaagaacaaatatcctttacctagaattgatgacttattcaaccagttaaagggtaagacaatcttttctaagattgagtttcattttggttatcatcaattgaggattcaagaggaggatatcttgaagactgcattccatacaaggtatcgacattatgagttttttgtaatgacttttggactcactaattctccaataacttttatgggtttaatgaacaaagtgttcaaggattttctagataaacatgttgtggtttccataggtgatattctggtgtacttagaattagatgaagaacatgagcaataactcagattagcacttcaacacttgcaggatcacaagctgtatgccaagttcaaaaagtgtgaattttagttacctcttgtttctttccttggccatgtagtagacagaaagatgtgattatggtggattcgaccaagattgacttcgttcgggattggccaacacctaaatcagctactaaagttaaaagttttttgggcttagctggctattattgtcaatttgttgaaggatttttgaagattgcaacgcctttagcagagttgacaaggaagaatttaaagttcactcggattgatcgatgtgagaaaagcttacaggagttaaagcaatggttgattactactccaattttgactcttccttctgataggaaaaattttgttgtatattgtgatgcctcaagtaggtttaggcggtgttttaatgcaagttggaaaagtaatagcatatgcttctcgacaattgaaagagttgtagaggaatcctactcatgatttggaacttgcaactatggtatttgcgctaaagatgtggcaacattacctatatggcgagaaatgtgaaatatgcaacgatcataaaagtttaaaatatttcttcacacagaaagacctgaacatgagacaaaggtgatggctcgagttagtgaaggattatgattgtgaaatcctttatcatcttggaaaagccaatgtagtggtcgtttcctgagtaggaggggtcaaggacaaatgagtaaattgagacaaatttcaaagcagttgtcatatgagatgacaaaggctaatattgagctagttgtgggtcaattagccaacattaccctttaatccacattactggaaagaatcaaagaaactcagcatggagatcaggatttggttaagattgagaataaagttttaactgttaaggctaaagactttaccatggatgaaagtagtatgttacggtttatgaactatgtttgtgatcctacggatgctgatatcaggaaggagattgtagatgaatcccataccactccttattcttttcacctcggtatggccaagatgtattaagacttgaagaccatgtattggtggcgtggttggaagaatgatatagtggaatatgtttcagagtgttcgacatgtcaacaagtaaaagaagaacattagaggcttgcgggactgttataatcattgaatttatcagaatggaaatgggaagatattacaatagacttcgtggtcagactacctaataccacgggaaaatatgattctatgtgggtaatagccgataggtctacaaagttaactcactttatgcctgttagaaaaaatttctatattgatatgttagaaaaatagtttgtcttcatggtgctccaaagtctatagtgtctgacagagattcgaattttacatcaaaattttgggacagtctacatcgagctatgggtaaccaattaaagttcattacatcattttattctgttcttaaacagatggacagtctgaaaggactattcaaattttagaagacatattacaagcttgtgtattggattttgaaggatcttggataaagtcccttcccttgattaagatttcttataataactattaccagtcaactatcgagatggctccttatgaactactttatggcaaaagtgtagatcacctattcactaggatgagttaggtgaaacaaagttcttggatcctgaagctgttcaaaaatgagcgaggcaattgataaaattagggctcgaatgcttattgctcaaagtagagagaagagttatgctgatcc

SEQ ID NO: 224217 - DNA, 1349 bp, Cannabis indica
aggcgccgaaagcatgccccacctcccctgaggtgcttatcttggaactgcagggggctccgtcggccgtctgcagaaaggactcttaggagtctaatccgagaaatggatgcggatttcatcttcctctcggaaactaaggtgagggcggactctatgattaatataattaacagacttggctttctcaatatttgttgcattcctgctgtgggcttggctgggggaatgtgcatcgcttggagaagaattcaaataaatgttttggagactttcgattcgggattcaaagttaatgtgctagatatgccgggatgcgcatcttgggttctcttctgcatctatggtccaccatatggtgacttaaaacaatctttctgggatcggatgctctctaaggtgcaaggtagtccactaccttgggctcttatgggggacttaaatctcattcttgaagcaaaagagaagatgggtggtcggccttttcaagtaaatgagggcaacatgctgaaggagtttctgttgggttcgggtggaatcgatttggggtatgttgggcccccttgtacttggcagaatgcgagaactgctacgtatcatatacgcaaacggttagatcgagtaattgcagattcgcaatggtgcttactcttcccgaatgcttctgtctgccaccttcccatctacgggtcagaccatgctccgttttgtctaaatgtgtggggaatcaatgagaaactgtgctacccgtttcgatttctggaggtctggacttccagcaaagaatgtggagaagttatagatcggacgtgggcacaacatattcctgtttggcattctaacagatttcagaggaagcttcagatcactaagcaagagctcaaatgttggaatctaaataagtttggctttgttgatcgtaggctaaaggatttgaaacactcccttgggttgattcaaggggctccggtaactcaaagtttgttggagaatgaggctggcattcaattggaaattttagaattggaagcaaagatggaaagaatatggaagcaaaaatccagagagaactggttgaagtatggtgacaataatacgaagttttttcatgcatctacggtagtgcgccgaaggcaaaatcgggttagctgcattgaaaccagtcccaacgtctggattcgcagcagacacgacatcggccaatacttccaagataaattccaagaattgtaccaatctactaaccctgtcattaatgaagatcttgacactctcttcaccgtcaaggtatcgcccgaggaaaacttactcatatgcagaacaccggaagactctgaaatcagtgaagt

SEQ ID NO: 224218 - DNA, 1150 bp, Cannabis indica
tttccatctttgaaaacattatcattgacttatgttaggcttggagataatgtagtagagaagatattgatgggttcctcttcccttaagaggttgcggttgcatttttgttatttgtctagtgatcctcagctccgcatcaaaatacaacatagtttaagcctcaagtttttggatattatactccgtaaggatttggtggagcaaatcgatctcataaatcttgaatctttgttcctaacaggtgtttcctttgaaaaagagaaaaaaaagtctctgctctgcatgcaaggcaattagaattctcaagttagtaataaatcttgaatcatcatttgaacatctcatttctaatcttcctcttcttgaagaattcacttttaccaagaggcgtaaatgtaagttaaagcacattaaaatctcgaatcaacacttggaaaagctctttgtacataacccttataatgaagaattgaatgttatacttaaatcaactccgaaattaacgacagttgtttatactggttgcatcaaattgagtgtgtcaatggagtcttccaatttgttgtttggaacatttgtgattcttgtggcgcaagagaactatgacaccgattggtttgtcaatttcatgaattttcttttgaatctcaagtgttcttggagaagcatagatattcatgttaaatcagataaggtacgtttattacttgtcttatttaatttatttagtattatttaaagtttatattattaatgtatacttgacactaatacattacatttctttaattctatacatgaaggctcttttctttccagagaagttgaaaagggtatgtcgttcacctttggttgactggaaaaatcttacattttttactgaattggaaccggagagggaatcaaacttaaaagatgctctgcaatggatttctcctacattatctttgaagaaagggcgtcattattaccaacatgcttttaaagtttttgaaaagtataaagatgagttcttgtgattatattatattttcaatgtcttgttacttggctgactaaaaattcaatattatattcagtcgcctcattaggaaaggtgatgaaaaattagtttgtcaaatgctggacatttcttagctgtataata

SEQ ID NO: 224219 - DNA, 3145 bp, Cannabis indica
aattcaacacagaaaaaaataaaagctatagaaaaataaaatatgagcaccgcgttttttttacgtggtttttgcagttaaaattctacatagtccacgagtgaatcttattcatatttttgagtattttttgtagggcctctttcataagagttatttcatccccctcttttgatcttgtctgccactatttattgcatagtggcagttaattacaaagctgaccaaaatatgtttacagccattatccctaaaatcgaggagttgattacaaatcaagccaaataaatgaggtttttacacatctatgagtatcccacttttattgggccgagatgaacgcgtaataaaaaatatacgcaaagccttatctcatagggatgcctcgcggagaatggagccaagataactttaatagcgagcagttgcttgtcatttggcttctcgagactaatattgttataactctgataactatactttatggagtcgagatgatcttcctcgcatgcataccatcttctagagagataaatgcctcactcaatgttatcttgattcgtcccacaatctatagttcatttttatatcgtataatatacactcagtgtttttagtgttgttgttttctctttcacgcagcgaggttgaggcctcgtcatgaacgcgtgcacccacatggtttctcgtcaatacataagttagcagttcgtacgtttccatctcgctgaaggttattcagccagccgagttataaatataccctgcgaattatatttccgacaagttgttccatgttaagtatacttttcgtttgcgtgtttgagttcttcgttcttcccaactcgacacttgtcttcctctgatgtgcttaccgaattttgggtataacaattgccccttaaaaagttatttttaattaaaaagagctttttaatgattacaaagggtatttccatcatgttcctcttttttgtaaaagatgcattccctctaattttggcggttgtgcggtttcgaggtacatcaaaattaaatcaccatctttcctacttccacttcgaatcgtgtccattggatcaaatctttctctaatctaacaaaaccattttcatgggtttaaaataaaaaaaaggaaccacctttgcaccatttcagaaagtttgagaaaaacacttaaacttcttcgttaaagatcaccattaaattcgtccaaagactttcatgccatccttgcccttgacctttttcttgtgagtttccttcgacttcattttctaagagcgctccttgcttcattcgaaggtttgtagacaaaattaccaggtattgccccaagccctaactacaaatggtaagtcactttcttctttctcatgttcgttagatagtgtggatcagctacttgattcgtttctatcattatcatctcatatggttttggtagtttttttttagggataaacctcttcatattaggattcaggcaatatgtaggttgttttaagatctccaagtcattaccttttggtttgataaaattctctcgagagattgggactgctttttgctggcagcaatgccccactctggttcaggaatttatcgtccagaagttttagagtttgagttttctacaaaattggccatcccataaaaacccaacccctcaaaacccacctccaaattagagctaaacgatgcaagggctagggaacacacagtgagaacccaacaagaagatatttctagtcgctagaggtgcttcttgcaagaaatatccaaaggcagccgctgattcatgcgagaagcaacctggccagaaccacccagcgtgtcctttattctatgtggtaaaacctttgtttttaatcaacatcacaatggcttctgaaccaggtgaacttggattttgaaattatgcctcccaagccacgtacgtctaaaactccttaggatcccagcatcaccttcgaggctgagttgataaaatcgaaggtgcgatctatctcaggctatacgggcgagatgctgaagacctatggaattgcacttgggcaatcgtgccaggttaggttagtatgagagggtaaattcaggcctggagccttgagcatattcgtgcaggggccatccccccgcttcgggactacttcaaagacaacaaaatcacattggggttgccccattctagctgactcccatctcctacatgattctcgccagtttgaaagtcttgtacaaaattatgaattggggttgtcccacacccgtagagattgagtatctttacttaattaaggtcgttccatcgaaaaagaaagccacagtgggctttttctatcttggtactcacgctagcgagccaaaaattattgtagacttgccaaataaggtgtctttcaaggacaacttcttctggacgtctggtctctcccccattggcacaaccacattttgcaaacttcgtaagtgattgttctcttcttacttatatacaccagtcttcctttttccagtacttgattaatgttttgtttgttctgacaactcttctgatgagtcctactcctacccccaagatggttagtaggcataggcgcctgatgactctcccttacggtctccaatcatgcaaattccttttgaacgaagttaacttgcgattggcaagccttctcgctgataaagaatacacttgcgattacaaggtttccaagtattcttcttggtagcaaataattggtccacccgaagatcaagcctgggatcgcttggcccaagcacaataccttcaaagcactgcccctcgagaattcggtgaaggagcatccagaggtaatccatgtggctggtctactgtacttagggctaagcgtaatacattaattacattccaagactcctgtcttaatttttatacttggaattccattctcgtggaccgcattgctcataagttttacagttggtatcgtagattccacatctaaattaattgtcacgagtcattttatggtatagccaagcaatacggtactatggaagatagggtgggtcacatagatgcgaaacgggttttagaatcaatcgagccttttgatatattcaaaattacaggctgtagggattttagcgaatatta

SEQ ID NO: 224220 - DNA, 1506 bp, Cannabis indica
gttttgatccaaagttgactttttcccgagagttgactttgactttgacttttgacttttagcttttgaagtcctcttttggatagagtcttgaattcctgatctcttgataaaacttttgatcttattaagtatgaagtagttggtatacttgttgaatccacttctttgactatgtttgactctaccgagcaaatattgatactttgagaatttgcttacaaaatggtcaagaaaagattagtaacaaataataatcaaatatttttttatcatcaaaataagtgagtgattgacttttggtcaacaagaacaacatgtaattaaagagtaagctacaaaggatgtcgtcatagcatcgaatcctagtgtgggtggtagtatcaataaggggactgacagtggcaacccagatcacaaatggaaggctgaagcttctggaacactaagaaataacaaaaagttttgtggaaacagaggtggccatcaagatcacgggtctacattcagatcgtatctaaagtgtctcaaatgcaaaaagcaccatcaaggtgagtgctgggataagtcatgtttcgagtgtggtatggtgggccattttatctgagattatccgcaggctaagagggatgaaccaaagaagaacaacaaccaaaatctggggcatctgttcactatgactcaggctgacgctgatgctagtctgtcaatggtgataggtcagttgtccataaacagttgttcttattctgtattatttgatttaggagctactcattcttatgtatcgagtagagtaattggaagttttcataaatcgtgtgatgtgtatgctttgggttttggtactctgttaccctagacctaatcgtatctacccggtggattaggtctttatctttttagattgacggttatgagttaaccgccaacctaattgagctataattgtctgatttttatataatccttggaatggaattcttgtctaaatatggggcaacaattgaatgtaagcgaaagatggtggtgtttgaaattgacagtgccagtccagcagtgtttgtgggtaaagtacaaggatcgcgcgtacctagaataacactccgaaaagctaaagatttgatgcacaaaggttgtctaggattcatagtaattatagtggatactagccaacctatgtcatatgggcatgagaatacgagattggtgtgcgaatttctagaggtatttccagaggatttacctagattaccaccttcccgagaaattaagtttgtaatagagttagttctaggagcgaaaccagtatcaaaggcaccttatcgaatggcttcaacagaattaaaagagctgaaaatcaacctccaggagttacttaagttaggatttataagaccgagttattctccctggggtgctccagtgttatttgtgaaaaaagaaagacgggtcgcttcaaatgtgtatcgactatcgggatctgaataaactcactatcaagaa

SEQ ID NO: 224221 - DNA, 4484 bp, Cannabis indica
tcgatccttaagttatatagtgtatatatttgtttattccgcattttatatatacatacatatatttcagtttatacatataaatgtctaacactccgatcatcgagtagatttctactcaagtttctcaacacacatgattatgaatactaggcaacaaaagtattcagatgcacatgtttagatatacattttttatacaaccaattatctagtatattagagatacaagtatgaatgtacatagagttcatttagaaactgatatctagtgatattagagggtgtaagacagtatgatactgccatatagatagcatattagagatataaatatgtttgcacatagagttgcaccaggatactgatatctagtatgctaggtagtatggaatatggattaatgttataccaatatcaatacgactagagtgttggaattatgttggtattatggctaattatactaaggtgaaaatttcatgaaatagaaatctaatatgaattgatgctggtttgtgaaaattaactataaatttgtcctaactaaggggcgttctaggagaccgttgccaatgtctcaaaaaatactcggggacaaatatgactcttggattcaatccaaaaataaggccaaatgcttcatgcttgttagcatggacaatgttctacgtaaaatgcattgacaaatagagaatgcatctcaaataataaattctctacaagctatgtttaggcaacaatctaatcaaacaagacatgatgctactcatagctacatgaatcgtaagataaagaaaggcgtccttgtaaggactcatgtattgcatataattgagctaatgcatgaggaagagatacatgtggctatcattgacgaaaagactcaaagtgagtatgatccttgattcgctatctccttgcttcaaagctttcaccactaactatgtgatgaacaagctaaagttcaacacgactcaattgttgaacgagttgaccgtctttgagaaccttaacaaggacaaatgcaagaaaggtaaatcaaatattgtttgaacaaaatctagccctccttcttcttttgataagaaaaaaaaatgggacaataaggacaaaagtagtggcaagcccaaaccaagaagaaagaaggcccttaaagccaagaacaacaaggccagtcctaagtccaaagataagcaggcgaaaggcaagtgtttccactgtggcataatgggacactggaagagaaattgtaacaagtatctctccgatcttatgaaagtttgttcttaaagctaacttagtggaacatgataaatatttatggattattaattctggagccattaattatatttgttcttctatgtagatacttaatttgtcaagggagctggttgatggagaggtgaccaaacaatgacctctctcgataaaccagaatttggttgtctattggaccctctataatcagccaaaactatgcacaccaattcaatacacccatgttccttggcttacttccaccatgaacaacactatttcgtatatgccgcatatgccaagagataattagaagatgttcaaaggtagactgatctcataccttgtctaatttgattaaaaaggctcatacatcttccttaccatgtatatttaatcttgtcttccactcacttaattttcacacctctttatttgccttgcatccccatatggtgtgaaacatattctctgattttcccattacacatctattaaaagtagaatctgtcccaacacttcggtgaaattttcaacctccacaactgcctccaccattgcactctctctttgtcatctgactgtgctgggtctttactgagggaaatagccatacaatagcccctcttcactgtgtattcccaatttttggtgtagtgccacataagtttatcctcaaattccaacccgaagctagcaatttttagtaccaacttaacatcatcttaattaaacactgctctaataaattcctcattccatgttccatctatgttgggattcagggtccaggtctggggttcaaggttggggtccgagttcgggttcgggttcgggtctggggtggggttcgaagcccaaggtccgaggttcggggtttggggttcgggatctgggttttgatccacgtcaaggctgggatctgggttcgggtctaagtccatgtttgtgtatgggtctaggtctggggtccacggtccgtgtcgaggtttgagtctgggtcttgagtccagagtccagggtccaagttggggtccaggtccaagatccaaatccaagtatgtgagtgaaaaatataaaaagaatgtgtttgacagaaaaaatgtaaattgttttgcaaatagaaaatagtattttaatgtttttattttttaattttttaaaattcagtttttagaaaactattttaaaaaatttaatcaaagctctattaatttttaaatgctttttatgtttaaattaaaaataacttttaagttataaagttaaacattctcagtgtgtatgttttattaaggacttcgatcaaaaatttaattagtctaaaatgacaattttttatttatttattttattttttaaagtaataccacattttgatcggctgtcaatataccgaagattcgtttgtaaatttcgatgtatatttctacctaaaatataatcgaaaatgtaaatttcactcgtgtcgtgtttattattataaggtgggctctaccttccatataagatccaaaaaacatcaaattattagtagaaaaagtaaaactattacacactctatacaatttgctgctcattctgtcttcattattattatcattattattgttgttataatgataatgatgtgttttgctcgtggttgatcatgaatattcattagacatttctctcttttgacttgtgattaaaaaaaaacactaatctcagtccaaatttgcaatgtattcttgaacttcatataaaattcaaggttacataaaagttgacaaagatgtaccattttggtcaagtcaagttcaccaaactgtgtataaaagtgaacaaaaaaagaaaaagatggattctgccttttttttttcgctcttgaatataatttacagcaaacttggccgacaaaagaaaaatgctcaaaactccttcaatttccactaacttaacttgttaattaggacccggcttattctacaccaaatctccctcctttgaataatactctatacttttttttttctctgtacataaatattgttgttaatagttagtatgatgagactctaatgtgtagtccattgggtgcctctactcttggaaatttcattagtttatctcctccaacttcttcccacctgagaataaaattacagaatatgttaaaattacaaaggtaatcaacaaaaaggccttattaaatcaataaagtgttgggaagtagttaatcattactgacctgtatctagttacaaagtagtgtaggaatgtggagatttcagctattccaagctcttttccaggacactgtctagtgcctcctccaaatataaagaagtaattttgagactccaatctcttatcctgaattttatttatttttaatatttattagtaacataatgtaaacaaaacaaattgattataagatgaggaaaaaacagaaaaaaatgtgtcacctctagccatctccatggattgaaaattaaagggtctggatataaaaactggtcgtagttgacttcccttgtatatacatatattctccagccttttggaactaaaaaacctgaaaaagttaaatccaaaaaaattaatttacgggtatgaatagataacaatgaaatgacttatggtaagtttttttttggtgatgaactttaatgtgtatatagctagctatggcccacactatctaatcaataaatcagagccattgaaagaaagtcttccatgtacagtaaatcacactgtagagtctttctcctcgtgttaagggaaaaagggacattcccttttgtcaaaaattattctttaaccgaatggtctctctagctagatcatgggataattctacgtagatgattatatatataggttgtctgtgactgtgaacggttttacttattaaaaaaaatggtacaaaaaagtaaataaatgtcatcagcagaacagttccttgagcccaccaaaaaaaaaaatgtaaggaagcattaaatatatggctatgacctatgaatctaggcttgaaatcttccaaactcaccatttagttccatgtctttagtggtttttctaagaacaccattgacaatcgtagctaatctcgaggtttcaaaaatcacctgcaattaaaaaaattaaagcaaaaagatgttaatgctttaaattcttaagtgtctgaataaacccagatagagcatctttaaaaaggcattgaaatctct

SEQ ID NO: 224222 - DNA, 1298 bp, Cannabis indica
atagggagttaagtgctaacctagtggagttggagttaattgagtttgatattatacttgggatggactttcagtccaagcatttggccagcattgattgtaaatgaaagatggtaactttcagccaaagggtgacgaaccatttgtttatgtcgggtctatttagggttcaggaattttgattatttctattttaaaggctaaggatttattgcacagtggatgtgtataccatttagcaattgtgattaactccaatagatccaaaacatttgggcttgagcatgtaagagttgtaagagaattcctggaggagtttcccgaggagttactgggattaccaccacaatgggaaatagatttaatcattgacttggcaccgggagtagagcctgtctcaaaggcaccgtattggatggctctggcagaactcacggagttaaaaatacaacttcaagggatgctggatctagggtttacccgacccagtgcgtcgccctggggaaatccaattttatttgtgaaaaagaaggatggatcctttcgggtgtgtattgattatcaggggttgaataagctgatgatcaagaacaagtatcaattacctagaatttacgatttgttcgatcagcttcagggtaagactattttctccaagattaatttatgctcaggttatcatcagttaagaatttgagaagaagacattttgaagactacatttcggacaaggtatggccattatgagtttctagtgatgccttttgggttggcgaatgcttcagcagcctttgtggatctcatgaatagggtgttcaaggatttcctcaataactgtgtcatagtatttatcgatgacatcctcgtatactctcagacagaagcgaagcatgaacaacatctccgaatggttttgcaatgactcagagatcataggttgtatgcaaagtttgaaaagtgcaagttttggttatcacaagtgtccttcctacggcatattgttggaaaagaagaaataatggttgatttaaggaaaattgaatcagttaagaattggccaaggccaagaacagttactgaggttcaaagctttcttggattggcaagatattgccaaaattttgttgaaggattttctaagatttctatgccgttagtagaattaaccaagaagaatcaaaaaattgtgtggtcggataagtgtgaaacaagctttcaagagttaaagcagcggctgattacaacgctcgtgttagcattgtcctctgtaaagaaaagttcatggtatattgtgatgc

SEQ ID NO: 224223 - DNA, 1716 bp, Cannabis indica
gcggagtgctttgaaatattaagaaagtacaatatgaagcttaacccgaaaaaatgttcctttggagtttcctcaagaaaatttgtgggattcatagtcaacgcgaggggcattgaagcaaaccctgagaaaattaaggctttgatagagatgccatcaccaactaaaccgtaggaagtccaagccttaatagggagaatggcagctcttaacagattcatctcgaaatcaactattaagtgcctaccgtccttcaatgtattgtgaggcaacaaaaaagtttgagtggatagaagagtgcgaggagacctttaaaggcataaaaaggcatttgtcgacaccttcagttttagcgaaaccaataactggagaaacattactcctctacttcgctgtttcgaaaaatgcgattagtgcatcaatagtgcgagaagagggaaagcaccagcaacatgtttactatgttagtaaaggttactaggggaagagtcgaggtatccactcttgaaaaaacttgccttatgcctaatccatacatcttgcaaattaaggccttacttccaggcacatctgattagggtgttaactgatcaacccttgagacaagttttatcaaaaccagatgcttctggaaggttgataaaatggacaattgaattggggaagtttgacataacttatcacccaagaacatccattaagggccaagctttggtagatttcctgatagaaggaataactctagaagaaaatctgcttgttcagcgagacgtggatacttggaagctgcacgtggatggagcatccaacgagcatggcttgggtacaggggtgatactaatttcgccaaaaggcttaaagtttcactatgccttaagattacaattcaacacttcaaacaacgaggctgagtatgaagccttgatagctggattgaagatagctgaaatgttgaagtttaaaaatcttatatgccaaagtgattcgcaattaattataaatcaagtcctaggggaataccaggctaagggctgaaaatggcaaagtacctagagaaggttcggaagaacttggaaaagtttgattatttcaaaatcaaacaaatcccaagagaacaaaactctaatgttgatgccttagcaaaactgacctcacagaatgagttggatgaactgaacttggtaccgttggaagtgttaaacgagccaagtatatgtgaaaaggaagaaattgagatgatagatagcttgcccacctagatgacacctatagttgactatcttctcaacgggtaacttctgtctgacaaaaatgaggcatgaaaacttttgtattcagtgcctcgctacacgatggtagaagggaaattgaatcgaaggggctactcaatgcctcttttacggtgtgtccttcctgcagaagccaacgagatcatcaaggaaatccacgagggcttttgtggagatcatgcaggttggcaaagctagttgaagaagataacttgacaaggatattactggccaaccataaacaaagacacatacgaatttgtcaagaaatgtgataagtgtcaaagattttcacaaatacctcgcataccaccaactgaactgaggccattgagaggattcgagctcatatgcttgcctcatagagtagatagaagagctacgctgatatgaagcgtagagatattgaattctaggttggggattt

SEQ ID NO: 224224 - DNA, 2277 bp, Cannabis indica
tgtaataagcataaatatgaataaatcacaataatagggaaagaaagaacaatcaaatagaattagtccatagaatactctcagtcaatatccatcaaattcctaaatagagagtgtagcacataatcaaattcataattaaactaaacataaataaaacataagaaatcaagagaagagaataaaactagatggaggattgtcacggattgcccacactcgctccaagagtcttcttcttgtgtttctagggttctattttgtctatctctctataattcgcggcctcctctcattaaatagagttttttagcccaaaaacgagaaaagacaaagttctcctagacccgtacagagtcggcaccatggtggcccatagtctcaccgcggcgactgtagaaaagtgaaaaatgggatttcagtagtccctcgtcgcggccataaatcgtgctcaccgcggccatgaatattagtcgcgaccaaaatattcctacttcaacctctctcagtagaatatgcataactttcacatacaaactccaaatgaactgattcaagatgttttggaaagctaaaaaaagatctaaaacttttatgttttgacttttccaaaatctgatcagaacatagtcgaatttaggcttgaatttataagtttactttcttaaaaaaatttctttattttatagatcaccgttttttgaaatttgaccaatttatacattataagtgtcgaaacatgaaattaaaaaaactagcgtaattttattccaaagataataacaaagaagaaaaataactataaaaagtgaccggaaacgtaggctaaaaataacataataccaattacacacactgaggtaagaagctataaaaaagtagcaactagccaagaacaaaaatccccaaatgaaacaaataccaaaatcccacatttaataatgcaaaaaactcctaacaacatcatcatcgaacaaaatatgcaggtatgatagtctcaggtacccaatgacatataggactaaaggatcaagaataatacacttagggctcgtttggtaccccgtataaggatcgtattgtattaaataataaataacactatgtttggataaagcaatgtattgtattatttaatacaatgtatgttgtattgtttaatacataacaaatggtctgtattagcttgtattattatatttacaaaagatttggagtaaacaccaatctctgacccgaacccgaactcggacccggacccgagtctcggacccagacttggacccgaacccaaactcgaactcggactcgaacccgaaccaaggactcggacccggacccggaatcggacttggaccctaacccaaacttggacccgaactcggactcagactcggacttggaccctaacccaaactcagacccgaactcggactcagacttggactcggacccgagtctaaacctcgacctggacctgggacctgggacccggacctgggacctggacctgggacctgggacccggacctgggacccggacctgggacctggacctgggacctgggacatagattattgttatatattgtgtatttttattatattgattttttttttttttgtatgtgtgtgtgggtttttcttttttcatttgattgcctaatgaaatgggttttagttaactttattgtttagcatttatattttgttataacttttcgtagtgtcgaaattagttttataaggttcacaagttcgaaactgatttcacaggttttaagggttcagtaatggaattgctccattttatgatgttattgtatattttttattttaagtttcttttttattattttgtttctaggttcgaaattagttttcacatttatattttatttttgaattattgatgtgcagtgtgtgttgttttgattatatttgtgagtatttttttcccatttgattaattgacgaaactggtttcaattttcattgtatatcatttttgttttattttcataatctttattattgttgtgtgacgaaactaatttttgtttgatttcataatgttcattattgttgtatgatgaaactggttttcatttattttttgtgtttttgttcagatggaatataattcgtttagtaaaaatgtaatagaagatgttgctaaagattttaagtgctgactctaagaaaaaacttcctccatatcaagaagaaaaatagtaaattgatccaagttgttaggattcatctttggtatatata

SEQ ID NO: 224225 - DNA, 2108 bp, Cannabis indica
ttagggacattaatttggctcttctatcaaaactgagctggggattgcttgctagagccgacaagccttgggttaagctgttggaatcaagatactgtcaaggtttagatgcttggagggtggagaagagagcgggtgattcctgggtttggcaaggaattctggaggctaggaaaatttgtaagattggggccggggttcttattggggatggtggttcggacttgtgggagagaccttgggttcctggggtatctatggaggaagttcgaagtagtttcagttattctagaagacatgccttcgtcaaagtttctgatctttttgtggatgggagtcgtgagtggaattcagatcttatcaaagattgttttgaggagaatgtggctcaggctatcctgagcattcggcctttgatatcttctaatgataggttgttttggaaagcttctaagtcgggaaatttctcggtaaagagcagttactgggtgagtcagcaagataggttcaaggacccgaataaggtgtgggaaaagctctggcgctcatcgattcatcctaggctgaaattgttactttggaaaatctggtctgatgttttgcctactaagtcgcgaattgggaggttggatgaggactgtgtgctctgtaataatgcaaatgaatctgtcttgcatctgtttggtgcctgcagtgctcttaaggctgttttgtttcatagcaaatggggcattcgaattgatgatctgcattggaattccattatggattttggtttatggtggacttctgtgaaagatgagagtttgcagatgttcgtggcttgtacctgtgcgtcgatttggaaatggagaaacaatgtgatttttcggagccggcctttttcgattgcagaactaatttctgatgttcaggcatccgtgcgagagatgactgtgaatgattttgcagaccctggggaagtttcaattttgacttctcaggacttttctgatctctcttgcgcatccgacttgattccttttcacactgatgcttcaatctcaggcgaggaagctggtttggcagctgttcagagggcagaggctgacggggagcaggcttgggttgctactgatttcacaaaagtatctgggattctagaaggagaactgctggcaattcagctggctcttcaattggctcgtcagcttaacgtgcgaagaatcaaagtccattcggactctaaggttgctgtgatggctctcaatcttggttgtttgcctctcgcctggggcacttaccctgtgtttgaatcctgtcgatgtttgtgtaagtgttttgacaaggttgtgttttgcttttgtcctcgggctgagaatagtgtggctgatgccttagccggttgggctagagggtctaagtctggttctcaaggtgtgttgagggacattgccccctctgtggcaatgaatctgctttagtttttctttctttcaataaaatggactcatttaacaaaaaaaaaattacttttgtaacaataaagtaattttcaggtggtgttgtgttgttgaacacaaatcacctatttaacaccatataaatgccaatttaatagaaaactcattgttcacttttgtgaaacactagttgatattacttgttgtgtagttagaattttgtgacaatacattagtctttagatgctagaaatgagatttgctaaatcaattcttatcagtatttctaaagtttagaaagagttcatgtgatcagagaaaatgattttccagagtatttcttcttttcctttttttgtactcattgtatcttgtattattttgtcaaaagttataataatttttctcctcatgataatacatttttgtacttttaattaagcattatggttgtatatattactcctattattccctatgccctcatagaattccccaacaagcacctgcattacacgatagataactcttgtctctcaatgaaggcccaacccaaaaaagttgatgagtcacagcgatgtattatataattaatgactccatttatctagccaagcttgagaaatcagagaattaaaggataatttgtcatatatatatatatat

SEQ ID NO: 224226 - DNA, 1637 bp, Cannabis indica
atcacagtgagtgtataatgtaggaagagataggaaattgaagtatctactcttgtaaatgtatttattctcaatgtgagactatttttttacaattgtttgttcactgtgttgagttataatcttggacatatctgattgtgtactactgaccattcttaatcaataaagattcatgattcattcattctcgagctaagtttattcttgcctaattgtgtgttcttgaatatcactacatttgtaacagcaattttgagcaatgttttgagggtgatctttcaccacatttataaactttagaaatatttattgcataagtatgcaatatttagaatttgtataatacaaactcaatcttgtgtttcaaatattacattgttcatatgtgtataaatttatcacacaaaatatggagaaaagggcgatatgcgcataattcaaaatatataatattttcttttctttcaaaaggtacttataaaactgtaagatgatgagagattctcatctgccaaatgcctaatataatttgcattgaaaagcaaaccttatggctaattttcaatagcctgcgtatttgaggtccatcccagtagaaaattacaggtcaagaagtattcaaataatcatggagttttgccattgtcagatctcagaatacagtaaccaaagttgagactgtctcaaaggaatctggataagcatctttatccctaaaataataaagtaatggctacctatcattttcctctcttgtagaccccaccttgccttttttatatgatatatgatataatagcatataaaagccttaaatatttctgccaagctctcaagttatggtatatttatgtttttttaaggagacatttaggtaatcatgaacaaagcttaaaaggcatatatatttctttcaagagagcatgagctgatttcataaagatatgaatccgattccttctaattatgtccactgaacattgggaatattgcattgattgtgagaggtatagagagatgagaattagatgcccataatcccattattgggattccaccattccccctttaattctctaatgcaagaattaaaacttataattaagtagttaactagctaaatgattaggttattaattaggaaattaatatcatgaactttaagaaaattaagctacacaagtcattttcaagtgtagcatattgaaagtcaaaaagatagaaaagaattattattattgggtgtgatggctctaaacttggttcagcacaccaaaccaatgccagattatcagtgccaacccaccattacatcccatgttcatttgtttatcttcatgtctagaatcaaaacacttgttccccaatttatcaacaccaaacccatattgattaattctcactattattactaaaatcactaacttattaacacctagtacagaacctcgcacagtatatattatcattcttttgcaaattttacatgttagtttgacaaaatatctctaatatagcttgtaaaaatcatacttgaaggtatagtaatttaacaatgtaacacttcacctcattaataccttttcaaaaacgtaaatttaataagtagtcttatacagtctgcatgagaaagc

SEQ ID NO: 224227 - DNA, 1764 bp, Cannabis indica
gtcaaagagttccagaggggggagcttgtacggatctgatcagactaggaccccttcaacgggcgtggtggttagcacagaggctaagaagggcaaggacatgctccagtattacttgaatcgatcactttttgaagtgaccgatgaagatggcttacgcctattcccaagataagtccactcctaccaagaacttttccaccaccaacacattgcagagggaggtcgatacagctaaaaagaaagttcaggacgtgaggaaggagctcagggaagtgaacaaaaatctacttgctgctaacacccgcgttgaggagctgactaaggaaatgcaattggaggcagataatgacgccttgtctagggaggtcaatgagcttaaagacaagagggagaatctccgcactcttctcaaaaagttggagggggacgtctcgactaagcataccagagaggaagagcttgagaaggaggtggaaagcctggaaacggccgcccttgaggtcttctatgaattttgaaaggctaacgccacaagaaatttgattaccttggtgattccaaaggtatgtatcttgattactgtgcaggtcagagggcctaaaaaaacctcgaggcaaccacttctacagttctaaccgaccagagcaccgaaactcctactgctcaaaattttgaacctctggcacatacaaaccaaaccaatctgtacaaagagcccaggacccctactgtttaacatttttattattttttttatatatgtctgttcggcccataggccttttttagagacaaaaataacctgccaaacagtttttaaacttgggttatattttttattttaagacaattggcttaccgggcagcttttaaccttgggtttactgtgctttgttatctttttcaataattactatcccttttcttgataattatctatacaactgtctttgtttttttttttgagcttgttatttacttttaccaatactttgcacgggtatagttgcccccaaagtgaccgagcagtctattgactcttggtcacttgtatttcaagattatactttttatctgttcggttctttggatttgagcagacctttgtatgcatttaattgtaaatttataacttcctaatagaattgacacaatcagaatttcaatagacatctttattcattcattggtcagaatatctttgttactgtagtaacttacataaaagccattatacgatctaatccgatcattcgctaaatttaaacaaaacaaattgcacttaaaaggaaattgtactttcaaaggtggtcatctgacctgagtacttggtcatttcatccgaacccttaggcgagatctacccaaaaggccatttacttaagagtaaatgttctttggttttgtacttaaagtggtcatccgacttggtacatttattgatagtacttttttaaatgttcgccattccaataccttggcactagaacgagttctatatttttgtcatgccacccaagtttgtatgctcctcattctagaacatcgaccacctgatacggtccttcccagtttgctccgagcacaccagccgtgccgtcttttgttttcagaaatactctttaaaggaccatatctcccacaaaaaaatttcgtgcctttacttgcttgttgaataccgagccacttttagttgatgggctaccgactttaggtttactaaagcattcttttcttaaatttcgtcaagtgattctgcta

SEQ ID NO: 224228 - DNA, 3030 bp, Cannabis indica
aaatcatttccttaattagaaaataacttccataaataaaatattctaataaacactacttaaggtttgttaataggagccatgagagtatcctctacaagcaggggtaccctctctatgcagtgtttcagtctctggccatttactttgaatattctcccatagggcgagtcgttgacctaaccaacaccgtcgagaatgaaattttttacaatgtatgaccaatctacctagatctcaatttctcagggtggagatgcaggtgagtgtcatataggtgcactcgctgatttggctcaaattctttccttaggatcttcttgtcatgtgccgctttcattctagccttgtagatcctagagttgttatacgcatcattccttgactccttaatttcttatagttgaagcttacaattaaggcgtgatgcattgagatcaaaatttaggcttttatcagcccaatatattttatgttccaaattaacgggaagatgataggccttgccatagactagtctataaggaggcatgcctagcttatttttttaagcagtgcagtatgcccaaagagcatcgagaagtcaggaatacctatgtttacggtcagggttaaccgtactttctattatttgcttaatttcacgtttatctaattcatcttgaccatttgtttgtgggtgataaggcagtgctgtttgttttttatggtactaaattaggtcagcggaagagttttgtatcatctgattatcattgtaccatatctcattggatctctagatgtgtggacattaaatcaaaataataaaataataagtttagagtataactcttgaagcctattagggtatccccaaaacttctcatatgttgtatcccttaatccagatgatgaggaaattgcaattggactcacaccagtgtcttccgaatcgatccaccacacacaaggaatagtatgggctattaggataaagtgtataagcttttgttcttgttgagttctcaacagagcaagaacaattgagagaaaaatcgatttcctttttctctctaaattttgaaaatttaagtttgggaagagtgttctgatttttttaaatcaagcttctatttataatagttaaatccccttaattaaatcatatttaattatttaaataaataaatatctataatcgaatttggttactgatatttatgagagaatctctcaaccatttgagagtatatctcaacaactttgatcgagacggttaatggataatttataacatataacaatattgtttcaatcacaacaatcattgatcctctatagacggtttacattgaaacacttagctacttgtaaattactattttatccttcaatgtattttgtccttaaaacacatagctacttgtaaatgatattttatccttcaatgtattttgtccttaaaacacttagctacttgtaaatgatattttgggaaactaatataattaccgaaatgagcgctttcatttatcgcattaagccaaactctaagaaactgtcgttttacttctaatagacaaagaagctatagatgtccatatctacgattaacactcccactcaattgcactaccaagttcccaagatgtaagtattatgcctacatgtaagtcgtaacgaacaactcaaagaactcgtgcaatacatttaagttagacattaaccatctcaggattgagatcaaatgatctatgagaaactaagtgacattgacttagaaaggaaataacaacaagtttataatatattttccactatcaataccggtcaagttcgatgtatagccaatacatctgatcttggtttactttattaatgccatagaaaagacattccacttatctaagtataagtaaatcttatcgttgatcatcacatcagtataaatttagtgcactgataaatcttgggactaaataatttgaagcatataatcacaattactttccagtgttatgatatcactgtaattatgaataactatatgttcagaatttaatagaacttatatattaaaacctttaatcatgtataaaacatgtaaacaaagcatatgactaagtcatgatatgctttttggtctctcaaccattaatggataatttatagtatatttatatttggtatatagagtattctatgtaatcaagagtgcaattctgaatctatagtggagtaaggaggaattaataagatagaaaatttactctatagatttcaaatctacttattaggagcttggttacataggccaatggtcctaatattatctaggataatatcatcttgtggactcaattaattgacttaataattcaattagaattcagaaatagactatgtcttatttgagatttttcaccaagttttggcaattttaagaagaaaagagaaaaagggatttatttgttaattagtacactttctgggtctaattaataaatatatttaaattgtattttatttgataattatttataattataaaataaaattagtatttaaataattagatgagataagtggtaaaattagaaaagatactttagcttcatttgaaatgaagtggcaaaaatctaactctaaagcccatcatataattttggccttaagagattagattcaacttaagtctttattttaagcccactcttatctaaacctagccctaagtgaagtctatataaagaaagtgatgagaagagagaattaacctaagttttcaatgtcagacaactcttttctcttctttcttctatatttttcgaaattcactatgtaattatttcttttatatgtttgaaattcactatgtagttcaaaattcactttgtgggagactgtgtattaagagttagtcccacattgctaatgtgtggaaataaattgtgatatataagatgaaagggctactcctcccattgccaattggttttgggatggagcctgattcatcttattcctcaaattctaacatggtatcag

SEQ ID NO: 224229 - DNA, 932 bp, Cannabis indica
aaatgacctctctctctctcttgaccaagtttaagaaaatactaagtcaatgtattaagtgttttaaagaaaattatacaaagaaagaagatatgagtcacttctaaagctaataactactataattaatttgacaaaacaatttaagaacattaaaaaaaaaaactaccaatgtatgttttataggaaaattatattattcatctagtaaaagggtgcaacaatgcatttttatctaatttggcattcacgaaaattttttaatctatttttttttttttatgattgtgtatgttataagtaattaaaaaaaaaatttgagaatttttgaaaaattcagcaaaaattaacactccgaaaataagattcaaatagtctgctgcatgtgtcacatgtaaaataaattgttagaacaacgttttctatattgtaaattagtcttattttctcaaaattttataaaatattataaataattataacgtaaatgatcataaaaaaattattttattttttatgtcaaaatgataaaaattggactcttctctattttggtaataagcaccatatttaatatatatatttgtatatatcatatatgtcggcgaattattggtccttttttttaattttttaattaattattagttattataaatgacaaaaatataaattatatactgtcatagttatgtcatcacttttaaaataaataattcttttttttctttaaaaagaaataaaaatcttttacaatagttgattttgacaaaacataaaaattactacataattttgaatccaatgatcatttactacattaattttgtatttttaatttaaaaatatcaatgaaatttattaattttaggagttgggacagtttttatcttaaaaaaagaccaacaaagaataagtcagcagaccctact

SEQ ID NO: 224230 - DNA, 1531 bp, Cannabis indica
tttttttgttattttagattatactagaattcaacataagattttaatcaagtctatacaaaagtgatcacgtggctatgatcacacagaagaatgtaagtttttgacaagagaagcattatccttacatcagcattgttagtatcatatctttgatacactttagacctattatagatctgtgactaatcaaacaatactcacccataaatcacatgaacacaaccagtaattgaccacaaaccaaccatgcaacaaaaaattcctcaaaaccttttaacttaaaataaaccaagttcaacaaaaggcagctgaagaagataaattgtcaaagaacacaacaagccacaaatgtgtcccaagtcataaaatcactgaaaaactcttttgcaaatccactcaaaactaacctaaactcatccatattggaaatgaaaattacccgtaatcaaaaaatttccaaaagaactcaaaccaaacccaaacccaaacccaaaaccaaaaccaaaacccacccaccacccaaaatcaaaactttttctaaaaaattaaaaatcctaattaaaaaccaaaacccaaatcagaaaaatcagatttgtctttcaaggtttcttttggaaaattgccttctatatctttcctttactaactgaagaacaagaaaatgaaggaaggagaatatggtgtgatgagattcccaggaaccgaaccaactccctcttctcccacaatgaaaaattgaggttcttttcttggttctttctctctcctcctcctcttcttcttctttctctctcttctttttctctctattgggttgtgccaattgtgaaagtaagaaagaaagaaagagagagagacagaaggataaccgctggttcaaggagttagattaagatctgacggttgaaactttcaactgtttgttttatgtttgattttagttagatcattatttattagttttttttttgtttaatgtggatttaagttagatcattatttattactttgctttactcaaaataaaaattagtacattatgatatgaaggctagattgaaattatttagataagtgggaatttttacaatcccattaacataatagataaaaaatttatttttatggtaagaataatattttagataataaagaatatttattttaattttttatttaataaaatattaaataaatcatttctaattaattgtgaaataaataattataaaataattttttattttttaaagaataacaaaatgttaatgagttttgttgttcatacaaaaaaaatatatatctaataaaggctaattttgtaattacatagtagaagcccacaaacattctcacttttatagaggttatagattaaaataaaatttattgagttcaagctcaccaaaatcgaaaaagtaaaaacttaattaaaatttgtgtatactgttggattaaaaatcctatgtgggcacatatgtataatgtatatgctattataaagtgtgatacaaaattaagtgaccaa

SEQ ID NO: 224231 - DNA, 1888 bp, Cannabis indica
ggggtattttagggatattctaaaatgtgtcatattctacaaatattaaatgttatgtgtttagagaaaaaatattaggtatatataagtatagaagattaaatttctcttttcaaattcaatttttgaattaaataaatataagtttattatagatttgaaattcaattcgaaatctataaccatgacaaaagttgtcttgatcccaactaaaataataaatattattattttaagacaaaataataaacttgttataaataaatagtttatttaagaataaattaattaaaattattttgattaattaaaaaagtttaaaagatgtcttaaataaaaactttattcttaactaaaattatatttaagaatgattaattaaaaatatttttattaatttagaggtttacgacgatcctatgaaattacaaaaatactcttgcagcgatggagattagttttgtaatttaatttttaatttttcaaaggttgtaaaattagaattacccaattattaatatccagttcatcatcattgtttatgtattcattttaaataaatgttcattaatagttgattaataacatgctcatgcatttgtaaataacatgtcatatatagaaattccacacagttatattatcatgcatcttatagtagaagcatgatatattaagattgtcctctgtttatgtgtttactgtgtggcaaatgctgtttatattaacatgtcttcgaatgctggggttttgtggcaagagaccatgatggcagcttccttaaagctcaccaatcaagcaaacttggcctagttcgcgctgatattgctgaagcagtagcaataaaagaggcgctcagctggatcaaagcaaacaattggcagaatgttcaagttgaatcggactgccttaatgtcgtttctgcaataaacagcaaaatccatatgttctctccatatggaaacttaattaacgactccaaaaatctgctttctcttctctttaatgtttctgtttcttttgtaaaacgatctgcgaataatgtggcccatttccttgcaagggactcttattctaaagctgattgtactcttagtgggacttctattcctgctaacttatcgtccttattgttgaaggaccttgtttaataaagatttttaatttcaaaaaaaaaaaaaaaaagaattgtcctctgtttatgtgtttactgtttttgaaactgaaagcatgtatttatactgtcaaaaccgcctaccacttgctgcaacaacttaaaggaaattggggtgatgatcctatgtcaattttttggaattctctatggaaattacagctgcctccccgagttagagatctcctttggcgagcttgcagcaacagcttgccaactaaggtgcaactattatctcggcatgttttcattgacactacctgctccctgtgtcaaccagcccccgaaacatctctccatctgtttgtgaactgcccatttgcccaggattgtttgaggaaggctctcggttctgcaagagatagtatagaacaatcctttgccgcctggtttaagcatggtctctccaattggtcttcctcagatattgaatcaatttctatgctctgttggaccctctggcgatgtcgcaatgattttatctggaacaacactcaaccatctgtcaacaaggttatttcatctgctaaactcactttagatcaatggaaaagcgctcaatctttaactaagactctctccaacagtcggcctcccactgtagaaagtcttgagcgttggactaaaccgacataccctatgatcaaagttaatgtagatggggcaacttttgctgaacaaaaaagttttggctggggttttgtggcaagagac

SEQ ID NO: 224232 - DNA, 1054 bp, Cannabis indica
tgcatctatttcgagtttttagtgtttgcaggaattacaagaaaattgactaaggaaatagctcaaagttctagaaagagaaactagagagatgctctgatcttatagaaacttagtagaatgtaaaaaatgagctagttgaactctcattttataggcaaagaggtccgttaaaatattaataaaataatacaaaaaatgtggtcaaatatttctgcgatgatcttgaccattgatgatgatctaatggctaaaatgactctggataaaaattatcaattttcggagatcgaattgcatctgctgtatcgttttcaagattttttacgaataaaaactgcacttgacttgggacgaattttcgatttgaaatcttcagaactatgacatgagtgtgagacatttcttgaaagaacttaaaaatatctttcaaacgcaagttcaatcgcatcaactctgaggtcaacagtttggtgcttttattgagagtgagttgtcaatttatctgatcaaacaccatggttaacacaacgagaactccggctgcaagttctgcctcatcgggtcttcctcaagaccctatggcaattgatcctaatgtttgtgttccagccacaattggaatctccacaaacttgacgggtgtggccaaccctaccatatcggtagacaccacaaacatggccaccatgactggtcaggtggacactaccaacctggttgctcttaatgaacaacctttgccatgcagggaggaccttccactggtgcctcgtactgaaggaatggtcaacgtggagcaacccccaggcaccacgcctggatttggtcctcggtattatgttggagagacaaggccgggaattagaaagccaaccattggcaagccttatgtcccacaaaacaaacccatacaaaaagtcccattacttttatggcatgtttactaaaagggaataagaatgaactgtatgggattgattcctattcatttgtatactaaattttggaataagagaaactagtggggtccacacaaattaaggagaaaaca

SEQ ID NO: 224233 - DNA, 995 bp, Cannabis indica
tattttttttctgccaataacttctcatctccaagcaccttggagactttttagagcactaagattctttttgtactttctatccatagttcaaaatccacaatttcgtcgaacttttccaattcgaatctcaccattgatgatattcaaagtttctttaagaattgcagcgtaatgaatcatgatttcgcgttcttgatcgattaccaagctctaatttgtgagaaaattacgactaaatgtacgaaatcaaatcaacaaaatattaaacgatcaaacaattatcaaatcaagaacaacaattgaatgtaaaacgtgggcaaacagagtatataaagccagaaataataaatgtagaaaataaagtaatcaacaccaagatatatattggttcaagtctgatagatcgatgtaatctatggctctactcctagaacaccattgaaatccttttttatttattgagcaagaataggtacactacagtatcgggacgagagtctctgatgagttctcactaagtatttcaactctcacacttacacccaagaatcttattcattacagaagattcttcttacaaaacccaaacccaaactcaatctctctattttcttcgcacctctcaatctcatatctcaaaataacaagccaatgtggtatttataggcttaggatcaagatcctaaagtcggtggctgcaagaaacgaggctgttaaattagttagaaataactaccttaaccaactcctctttgagcgaagtctccacatcaacttaagtattagagccatcgagaacatatacgagcttccagactcagggattaaggacactcgttgatgttgcttctagataggatagagcatgttggagtcgactatccgtaactaccattccaggagggacaactagctaactaaaactccatctcgaagtgaggctagctttcctaaagactggatctgaaatggacatgatagtcatccgaaaa

SEQ ID NO: 224234 - DNA, 2832 bp, Cannabis indica
cttcaatcgcagaaacgacgagacttatattatcaacttcggaaagacatgggaaaagcttcagctcgctgccagggttattgttgctatgttcccatcgagaagtcccaacacgatacactttgcgacgtatttaatccacatacgccttgacccaataaaagcagaccaatcacagctgtgtgattttcaaataataaccgcatttattttacgtgggacgtaatcaaatcacacaatttcaggggatattgttgtaggatatcaatctgatttgtagttaactgtcctcttatgtaactataaataggagcaggatacactgaaaaacggacggaaaatactttagagaaaaggccctaattttgtaattgaaatctaataagatagactcgtggactaggcaaaattttaactgcaaaaccacgtaaaaaagcactgtgttctttctatttcttttaatactattatttctgcgcaattctatcacaaaataggctttcatttagttaacgaaaatctgctttaacaatcataatcgtcaaacaaatcaagcataaataaaaatttattaataacacaaatataattacaatatatagtgtactagtttaggcttacaaaattttacacacaattctaattttatcatcatcaacaatgaagcaaaaaagtgtttacaaaatgaaatatactctttaaaaattctaagatctcaacttcaaatatcgtataatattgctccaaagaaatacttaacaatgtacctgcacattctaaaaaaaaaacattaatgaataagcacgttaaacttataaagaataacctaccatattacaaacacatcaacataagaaaattaaagtttttaactattccaatatcaaataaattttgtaaaattaaatttaaaattaaaaattacctaaactatactaaaattatgataaactatactaaactttttttttttctaaactattaaacttacactaaaaaaatttatttaactaaactacattacatatatattttttctagtaacaaattaaacattaacattaaaattaaaatatatgctacaaaaaaatttatgaatcttttttaaatcaaaattttaattcaaaatatactaaggatattttctaaaattttttagctatacacactacaatatcactaaaaaataaaataaatttcacacaaaaaaaaaaaatcaaaatatacatagcttatattttcaaaaatataaacaatacctaattttatcaaaataaaattataatacttagaattcttaattatgcattcaaatcaaaatattcacaaatatataaacttgaattcttaaaaaaaaaaatacttgtgcatttttaccccaatctattatttttcctctaatatttatgaatttttagtaaaatttattctaattctatcgaaatttcggcagtataacaattataattggacgtttctgaaaatttcaaacatgcaaaaaataaaaaacaaaacgtacacaaaacaatacaaaacaaactaactaacattaagaatacaaaaattatctacccatctaaccgcagtacaattaatcgcagaacctacttcacgacagatgattatataagatattcaaactccactaaataaagaatttaaagttgtagtgattatatctttttctaataaagttagctacttttacgctcttctatcaacactaagaactcgatacctaaaaaataataaaatattaatattgattaaaattttaaattttaaaactactatcgacttatatatataaatatgtttgaactaaaaatatatttatatatatatatatattaccgataataaagagcctctctcgaaagactgccaaaattggaggaggagctcagtgaagtttggcaacgacaaaaaaaatcagtaatatatataaaagtttcaataacaatttaaataaaaataaataatctaaacaaaaaaaaattccaataatgatttaataaaaacgtaaaggaaaatctaactaatagctatataattaataaaaactaatttttttaattaatacttaaagaattaattgaatctaaactaaatattttttattacctaacaacaaataatctataatttttttattacataacaacaaataatctaaactaaatattttttaaaaaacttaaatcaaaaactaaataattaatctaaaccaaatatttttttaatactaaatataaaaataattaaacaattcatttaactatctataaattaaataaataggtataaatatataaagtaaatatttttttgatatgaaaactaatacctaaaaagttaatccaaaccaaataatacttttattacctaaaattaatatctaatcaattaatcaaaaccaaatatttttttataatacctaaatctataactaaataattgaactaaactaaatatttttattaatacctaaatttaaaataaattaaataattaatcaaaattaaatttaaaaatatatattaaataaataaatatatatgtatatgtatatatatataagtgtatataaattatttttaataaataattaaataatacctaaaggaggttgtgggcgtggcaatggctggtagtggagcgaacagatcaagagaagagagatagaaagtatcgccagtggtggagctcgaatggaagtttcttggtagttttcctttgtcggtggtggatgccgcttcaaatggggtttctcgatggcggatgggcgccttctgtggtggatatggctttcgtctttggggcttcaaaggg

SEQ ID NO: 224235 - DNA, 4531 bp, Cannabis indica
atcagagccttttcctccattaacggctaacatggcaaacgttagagctggaggcaccaacactcagagcaattcgattcccaacagaccaactgttcaaaccaatggagcttcaaatcccagtcgagcaagaaacaactctgatgagttcaatccggtatatttcaatcacaatatgtccattagattaaatgaccacaattttctcttgtggaaacagcaggttctggctgcaatccgtggaaacaggttacaaatgttcattcaagatcgaactcctcctcctcaattcttgaatgacaccgatcaagcctcgaacaacttcaacccagcttttcttgaatgggaggttcaagatcaacttttggtttcttggcttctttcttcaatgacagagagcctcctcacacgcatggttggatgcaacacagcgagacagatctggagtgctcttgagaaacattttactctgcaagtttcatccaaaattcttgagtttaggacaaaattgcagaagcttagaaaaggatctctgtctctaaatgattatctactaaaagtaaagcagcatgtggatctccttgcttcagatggagaagtcttgagctcaagagatcacattgctgccatttttaaaggcttgccccccgagtatgacactttcatcatatcgaccaatacaagaatcgaagaatactcagtagccgaaatcgaagctctcctgcttgcttctgagtctcgcattgaaaagatcgactttgatcaagaaaatgatctaagtgtcaatctcacaaccactgacatagatccatatgctgaagccaatatcgcctatcagaatgctcaaaatcgcatcaacagattctcaaactcaaacagaattcccccaacaccttctggtttttcacgagggaatggtcgaggctttcaaaatcggggaaacactacaggaggtaactatcctaatccatctccttatctcaacactaatggccgtggcatgtctggttatagcagaggaggcagattcaatacttcctcaaatcgagttcagtgtcagctatgccacaagcttgggcatactgttcttgattgtttttataggtttgacaagagcttcacaggagtttttccctcaaccaactctcccaatgctcaagccaacatagctgccacaactaccattgatgacagtaactggtatccagactcaggagcatcgaatcattgcactcccaatgtgcaaaatctgaacataagcactgagtatgaaggagcagatcaactctatgttggagatggctcaggtctgtccatcaaacacattggcaaatcttttattcatccacataattctcatcctcttgttttaaataatctattacatgttcctgaaatcacaaagaatttgcttagtgtttctaaatttgctcatgacaataacgtcttctttgagtttcatgctgacaaatgttttgttaaggatcaggaaacccgagccatccttctcactgggatacaccagaatggcctctatatttttaagccttctcaatttcatgtgccagcttctgcaccaaccactgccccatgtgccttcacaacctctgtgtcttccaataaagagtcagattcctctatttgtactcactgtaacagatcttccatatctgagtatgatctatggcacaatagacttggccatccatcaaaaaagattgttaaatctgttcttcaatcttgtaatatcactatcaataataaaaatcctctttctgtttgctcatcatgttgtttaggcaaaattcacaagcttccattccctcactcatctcttactgtctatagtgaaccattacagttagtagttgctgatttatggggccctgccaaaaccacatctctaaatggatacaaatattatatccatttcattgatgcctattctagattcacttggatctacatgcttaaaaacaaatttgaagccttaaaaaccttcttgcacttcaaaaccgaggctgaattacaacttggtaaaaagattaaatgccttcaaacagattggggaggggaatttaggtcctttactgaccatcttaaacaatttggaatcactcatagacacccgtgtcccacaactcatgagcaaaacggattagttgagagaaagcataggcatgttgttgagaatggtctaactcttcttgcacatgcttctatgcctctcaaatactgggatgaagcttttagaacctctgtttatctgtctaaccgattacctacacctacccttcaacacaaatctcctatagaaaaattatacaacatctcacctgactatactaccctaaaaacatttggctgcaagtgttttcccaacataagaccctataacaaacacaaattacaatttcggtcttctccatgcacattcttagggtatagtcttaatcataaggggtacaagtgcttagacacatctggcaggttatacatttctcgtgatgtcatctttgatgaaacatcatttccttttacttcaattcccaagttgtccactgattcatattcctatgctgaatttgctacatctgcactcattcctctcacaaacacatttagcaactcttgcatgcataatgttcctgcatacactactaattctgtgcccaatgtggcaagtactgatgtcccaacacaggaacaaggtgtctctgtctcgacttcttctgaaccttgtcaagacacaagtttgcccaactctgctccttccctgactcacaacagcagtgcttccataccagttcctctcagtactcttcacactgaatctgttccagtttctgttcatgaatctcccattgttgctgcaccagcatcaactcctgttgctgcaccagcatcaactcctgttgctgcaccagaaccaactcctgttgctgcatcagaacttacacctgcttctgcaccagaaactgtatctgcagcaacacaaccagttattcctcacaattctcatgtaatgcaaaaccaggggaaaagtctggaatacacaaacctaaagtctatttcactacaaagattccacgaaatgtcaaagaggccttacaacaagaacaatggaatcaagctatgaccgatgagatgcttgcattgacaagaaatggaacttatactcttgttccattaccagaaggaaggactcccataggatgcaaatgggtttttagggagaaagaaaactctgatggaacacacaacaaattcaaagcccgtcttgtagccaaaggctttcatcaacaaccggggttcgactttactgagaccttcagcccagttgtcgaacccgtgaccattcgaattgtacttacccttgctatatcaaatggctggtctatcaagcaacttaatgttaacaatgcctttcttaatggcacattaaatgaggaagtctacatgctccaaccccccagttttgagatcaccacagctcctaatctagtgtgtaaattgcataaagccctatatggactcaaacaagcaccccgtgcttggtttgacaaacttcaccattgtctcttgcaacttggatttattccatctaagtcggatcattctctcttcatccaacatacatctacacatactacattagttctagtatatgtagatgacatcttggttactggcagcaacaaccaatctattcaagatctcattgtttctcttcacaaccaattctctcttaaagatcttggagatttacattattttttaggtgttgaagtgcaccaaacctcctcaggtttacatctctcacaagccaagtacattcgagacctactgctcaaagctcagatgcatgatgccaaatcctctcctactcctatgatcagtagtcttcgactgtctgcttatggaagtgaacctacaccagatcctcagttgtatcgttctatagttggtgcactgcaatacctcttaatcactagacctgaaatttcattcagtgtcaataaagcctgccagttcatgaaagatcctcaacttagtcattggttagctgtaaaacgcattctgcgttatctcagtggtactatcactcacgggttgcatcttaaacggtcatctctgcaagaaattgttgctttctgcgatgcggactgggctacagatatagatgatcgacgatctacatccggttttgccatcttttatggtgacaatcttgttgcttggcaatgcaaaaagcaacacaccatatcacgatctagtacggaagctgagtttagaagtcttgccagtacagtagctgaacttatctggatacattctttgtttactgaactgcgaatcaagattcatcaaccccctgtgatatggtgtgacaacctcagcacaattcttctcacagccaatccagttcttcatgcaagaccaagcacattgaactagatctatacttgtgcgtgagaaaattctcaaaacctggtcaagtcaagcatgtaccagctcaagccaaacttgc

SEQ ID NO: 224236 - DNA, 1986 bp, Cannabis indica
tcaccttcaccaaaccctcttgaaacgagggaattagtaggaggcaccccgattaggcctccgatcgtaatctctgtcaaccgccaaggtcaacaggaggcatctgctgagatcaatgaacaccctttattagatgaggggtgtgggacacctttctccttcccaaagaaggctagaagcgatagtgtaagggttcccaaagcaagccctaactcattccgaaaagaacatggtgactggatgtttctccagggataccgaccaacaagggtcacctcaactattaagcctacctcctacacgggccttgtaactcgatcgagagctcgtgccatgcgtacaactcctaatcaggaatcagtgaatccctcttttcaaaaagttcaggaagaggggtgttgtacatctgaacactctttagaagacactccctttattgaacacatagagggggtgtctgctgatctcattactcagttcgaagcactaaccattggcaatgataaaaatatgccagtgttagtaactgggacaatcagtaatgaagagaagattcaggaactgcaaagattattggctgagagggatgaagacgttgtctgactctcaacagaattatctcatcaagttaatatgagacaaaaggagagtgagattgggcaacagtcctcgtcctcagtgccgcctgtaggcaaaacacaaccaccaccacaaggtgtgcaaccaccactagctggtgtccaacctcagcaggatctgaaggctcttatcatggagggtattcgggaatatcaggctgcaacaatgcctattcttggatatcataagccacacccggcttactatgaccaaattccatttccagcaaactacatcagacaaaagtttgaaaagtttgatggaattaatggttctccccatgagcatttgggttatttcacctttgcatgtggtgaatttgcccaatcagatgcactattgatccggcaatttgtgcaatcgctaaaagaggcagtgttcacctggtacactcaactacccccaggatcgataaattcttgggatgacatgcaaaaagcttttctagcacaattcgtgagctcaaagaagaccataaatctccatgacctggtggaaacgaagcaacgaatcagtgaaagcgccaatgagttcaaaaccaggtggagaaatctcaatctccaatgtccagaaaggatatctgaacaagcggcggtttcaatgtgtgccaaaaacctcaaccctaaggtggcagcttttgtgggtacaacaaaacccaaaactttcaatgagctcgtctcgaaggcctgcaacgttgaaatacaaatctctcggcaaaggggtggcaaaccctcaccgagattcgaaaataaaaagccattcaagaagggagaatcaatggaaacttttatcaataccggacacaaagataaagggaatgcacaagagccacaaaagaaattaactctcaaagaaaggaaggaagttaagtattcattcgacgatgatgacgtcgaccaaattttcgatgagttgttaaaagctaaggcaatacgactccccgagccgaaacgacccaacgaggttggtatgacaagtgatccaaattattgtcggtaccacaaaattgtgagtcacctactgttggattgctacatccttaaaaacattatcaaaggcatgatcaagagaaaagagattgagattgactcttctcttgggaaagcaacaacaaaaacaacttccttaactaagaatgaccaaataccaaatgatcccacacaaagggacgtaatttctgtggcatttgaggtcgacaaggaagttacaatagttcaagcccactcagatatgacaaggccaggaaacccaaatattcctacattatatgagctcatgacagagcctaatctagaaatttcggaggactggtatgatagtgaagaggatttagaaagtacatggcaa

SEQ ID NO: 224237 - DNA, 1279 bp, Cannabis indica
aattagaaacataattaactttttttttgaatgaaaaagatgctttattaataattgagatcaatcataacaatgttcaccaactcagaaggtaaatttctagcatcaaaagtgcaatctgacaaagaagaagagctacgcgcaaggaaatgtgcggccttattagcagagcacttaacaaaggacaaagtaacattagacaactcagataaaaggttttgacagtcatggaccaacatcccaaatgtagaaggaataaaacagttgttgtggattgcttggactgccatcagacagtcggtctcaagtatagtaaaagtccatcccttagtttttatccaacttagggcttccttaattccgattagcttaacaatttcaggggaagtgctacctgatctacacgaagtaacaacttcaatgatacaaccggacctggctcgagcaataatgccaaaaccaaaagagttatgagctttaaaacttgctccatcaacatttatcttcaccatatttgcaccaggtttagtccaatgctcctcctcttttcctatctcaaaacgagatataagaggatcaaatctatgatgttaagcacttttccattggtaaatattagatcttgctgacagaaccacatccaaagctagtgtacttttctggttccatagtaacttatttcttgcattccatattgcccatgtcaccattaaagcttcttcaatttgagttggattattgtccttcataacatcttgaaaccacttgtgaaaggactgatgagaagatggaatgatattaacagaggacctatgccaacaggacctaaaaggaacaatccaccaataaatgataaatggattctgctgcaacattgcagaatgtacactgctgagtaacaggtacatgtttggagttgagttggacttagcccaggttccagttagagctctccaaccaaaatgcaagacttttgggttgtacatttattttccaaaaagctatccaaaaatcagagtccaaaccagcagaaatatcatggttttgtaaccatttgtaagcactttttactaagtaaacaccagtcttttctttgctccaagtccatccatccttttgaacagttagaggcagaagaatgctgatgattaaattacgatctcggtcatcaaacatatcatctaaaatctccttgtcccactgatgtctatcgatacaaattaaggaagaaaccttatgattcacaagcccaagatgagaggtacggacaaaaggatct

SEQ ID NO: 224238 - DNA, 9445 bp, Cannabis indica
aagacaaacaatatcttcgtggccattctcatctatgtagatgacatagttgttgcaagcaacaatgacaatgccatatcacacttcaaaacatatctccatgacaaattcaaacttaaagaccttggcaccattcgtttctttcttggtcttgaggctggtcgcacaaagaaaggcatttcagtctctcaaaggcctttgacacttcatttactacaagatacaggctacattggtgccaaacctgtgtctactaccatggaaacaaatctcaaattaagtaaatatcaagggaagcttcttcccgatcctacagcctatataagtctcataggcaaactcatatacttgaccattacaaggcccgacatctcctatgctgtgaaccacctaagtcaatttttaacttgtccacgggttccacatctccatgatgcacatagaatcttgcagtacttaaaatcaaccccgggccaaggactttttttcccctcaaacacaacatccactatctcagcatatgccaaaacaagcctttccccatccaatgttcaagtatccttcttttcggatgctgattggggggcttgtcaagacacaaggcgatctatttctggttattgtctcttccttggcaactcactcgtgtcatggaaataaaaaaaacaacaaatcgtttcccactcttctgctgaagcagaatatagagcaatagctaatgccacatctgaactcacttggatcatcgctctcctcaaagattttggcgtcaactctgctactccagcattgctctattgtgacaacaccgctgccattcacattagtgaaaatcctgtctaccatgaacgcacaaagcatgtggaaaatgactgccacttcattcgagagaaggtccaacaaggcttgatcaagctactacacgtctcttcacaaaacaaccttgctgacattttcaccaaagcactattaccaactcacttctccaacattgtattcaagatgggcttaatcaacatctacactccatcttgaggggggctcttaggattagtttggattaagttagttaagctttggattaagttagttaagggttgttttggagctgtacaattctgttacaactcttcttgattatactgagctatataagctccttccccttttgtaaaatcagtttaagcataataaaatcaaatgctctgatatttttttctgctttttctctctattctttctcataacttataatattatataatattaatttattaattgttttttttttttggttttttgttgaataataagaatactcagtaatcttgaaacataactaattatttcacctttgataaatgatgatgttgttctattgaactttatgccttttgtttcactaaaacttctaatggctattacattaataaactaggataacaaaaattagaaaacaaaaggcatagcgtgcatagatgaaaatagttttgatactcaaatcataattagaaggtctaataataaatggtggagaagaagtaccgtgaagaagaagaagataagagggtggagagaaagtgtaaagttcgagaagaaatttttgcgtggagagagaatatataatatttaattattttttaaatccctatttacttgtttaatattatttatatagattttagaaattatctaatgcagtgcagatgtctagtattattatacacctagccaatatatgacccttagatcaataattaacggatacaaaaacgtctctaaagtagtgacaaaatgatggttcttactatagccttatcctatatttatatagcatttggattaggatacttttattactagtctatgtggaacaaacaaccatatgataagaagcatacaaattacataggagccattttgttatctgagctgaaactcaaagcttgtcattacatgccacaactcatgctaatgatgttgaacaactcatgctgcagctgcatctactcttcctattgacatcacatgccacagctcaatctctctccctaacaaccacctcacacacctatacacaaccgagccgacaagaatgcatttgcacagcagcgagcgcttcagcaagaaccgctacaaccaacattctttgtaaaatcttttggggcgaaaatcatcatccttacaatgcaacactagtgtcgcggaacaccttcctgaggatcataatcaatgacaagttacaatggtggataagtagaggacatttaaactttataaataggagtttgcaaatgaaaatcccataaaaacacttgtacaatattgttttaagtcaaagatctagacaacaacatagtttatgtctcagcaaagaaagaaaatgaaaataccttcatgagattcatcaagaatgataaaaacctttctagcctggtgaaagcctctccgaaacttcttgaacaacgaaataaatattgatcacaatttcatgtctattctgagttaattggcatggcatggagttgtaatgttgttcatattaccacaatattgcactcagcccatcatttgtaataactgatactgttagagggcatccttcgttgtctgtagacgatgaaaataaagaaccttaaacgaagaacactaagaaatgaaactgatctgagatgagaactacatatcaatagagcaaatatagcatcatagcatttacttagttttattacataatccaacataacaataaaagaaggaaaagaagagaatgtacctgtacatgatttgggaatttaattgataagctcatgatctaaccacacttctgtgatgtgttgaatcttaggccaatcttctcctcctttctcacagcgttgatttaacaaaggacattcaaatatgtataaataagaaagggaagtaggcagcccttcttcgggcaagcaccgcagcctttcacagttactaatatctaaggttgtaagggaggtaagctgttgaaaggccttgccgttaagggtttcaagtttactagaataccaaatctcgagtctattcagagtggtcggaaggagtcctcctcgggaaagaagtcatcttcccaatctttgatagttaagactttcaaactagagagtctatgcagatcccatttcttacagttctggaaagatgtcttggagtaatttagatgaagactccttactttcgagtgtgatgtcaagtctagaagcgtattccaacactggacaattacttattcttacatagacaagagagggaggggctatgacagcttgttgagttcttggaagcaaaaccactgattgttcgcaactcaagatacgaagagattccaaggatggaagataacaaggtaagacagcattaagctttgggcaattatgtatgacaagtgttttaagaagagggaatatttgaccttcttgcacaacttcactactaaatgaccaatctttccactccaacataccttcaatccttaacctttctagacaacgaaatagagggtccttgtcatgaatctcatcacctattaaaatcacactatcacatccaaaaatgaagagatctttgagaaactttagctgtcctagtggtggtaaagtgtaacaacttttacagttgaataagctgatgaatactaaattagaaattgaagagtttccaatccagtctgagaatattgtacctctataattttcaatcccgagatgctccaagtttgtgtgaggttgaagtgcatcgagtatattccttttctttttgcgaactatcagccacactaccattgacattccaaatcaaagttaaaattgaaaggcccttcttatccttcaaattagcttctgaagcttctgttgcattgttgatattttctaaccctgaaatgcaacgtaaatttgcaagctttgcaacactttttcattttaaatcctaccactatttttgtcactcaaaatcacattagataagaattgcaagtgtttcatattactaatatcttctggtatctcttttcaaaggcacaccatcaatctccaggtatcgcaagttgattaagcttcccatttttcttcggtaattgagaaagcttgtaacaatttaacagcaataaagtctgcaaattgtacaaagtacaaattgaattgtttaactcttcaattgcagtgcaagactaagtccaagtaccttattagcttcacttaagcacttgagagttctagcatcgtatttctcggtcttcatatatgataaatgacgaatcttgttgaaaggccaagtaaatcattactcttactccaatcctaaaaaacaaaaaccagatgatgcaaacatagctaaatcgtgtaccatgtcatgcatttggagaaaggattctttcttataacttgaatgttgaaagaatgaccttgataaaagatcttgaaggtattcctccccaagttcctccatctttttatattttttatcagtctccaaaaaaccttctgccatccacaacaaaatcaagtcttttccatcaaactcataatctttaggaaaaatagaacaatacacaaaacatcgtttcaaatgtgcaggtaagtgacgatagctcaaccataaagctggaagaatagaaccctctttcttgtacaactcctcccatgtgtcactcttaagtatgtcttcccattttttagaatctcgttcggaacgcaacaatccacctagagattttattgctaagggaaggcccttgcacttgtccactattttccttccaattacttgaaggtcttggctttcattgagatcaaccttgtttccaaaagcatgtttgacaaataatttccaacaatcttcattcattaaagtttgtagttgatgaatcttgcaagttgccatagtgttggctacaattgtgcttcttgtagtcactataattttacttccatttgccccagagttgaaacaacttttcaaagtgtcccactgagaataagactcattccaaacatcatcatgaacaaagagaaatttttttcccttcaattctttcttcaatctcctccgaatttcttctgagttctcaatatgacatttgtaggaaatgaccccctcatatatttctttcgttatcctagaaatatcaaactcatccgaaacagtaatccatacttttatctgaaaatatttttgaactcgatcatcatcataaacaagttgagcaagtgtggtttttcccacgcctcccatccctacaatcgggatgacagaaatcttattaccaccatcaacatcatctttcaacaatagatcaacaatgagttctttttcagcagccctcccataaacatcagcttgttctactaaaggagctggtggcctttgagaaagtttgttttgagcaccttctctcaagccaagtgcatccttttgatcaacgagaatctttaacttacgaaggatctccacggtgtcaagcctaacagattcatcaaattgggacaaaaaaggtaaccgggatttcaattgtttaaataccttgctcgaggagctgctggattcatcacctccaagcttggatcgcagagcttcatagtcgatcctatccaccaagtcatcggcttgatagatcacatcttgaagattgaaaagccacatcttgacctccgggttttgaagttgcttctcctcagcatcgttgagtagtgcatgagcagacaacaacacaatgttcaactcatctagctgctctaaaatcagcttcttcccctgaaacagccggggtatctcctcggaggccaatcgttgaaacaaaacctgaagtgaagcagagagcaaagcgccagcaaccatctcagcagccatgttgaagctagggaatgaggatcaagaacaatgattatagaagcaaattactggctcaatgggatgtaaaagttgtatgaatatgtcaccaacaaattacataattttcatttttgcttatgacaaaagctgttaacttagatcttattattattgttatatcatatgataaatttctaagtctacacacaacatgaaaaagacaacatagtaagtgataaggattcataaacaaacgacatatgcatttgaataatagctgacctcattcttagttttaagtttaaagtcaacaagcattttacttattaaattttactatatatttagcttagctcaccaacaatactaaattaagtgaccaataaataatgctttaaggaaccaaccatacctatcatctctcactcaacactacaaagaaaaatatataatgttagattttacgtaatagttaattgtttgtatctgataatatatattatattaaaaaaacacttaatcatacaacttaatgatcaaagtactattaagcttttcaatcaatacagaaaagtcttgatagtaatactgttcatttaaaattgaatagaacaacaatataatacaaattgtgaagaacaacataagcaaaaatattgctattataaaccaatcaacaagcaaagcacagagaactagagaaacaaagagaagaaaacaactacttgatttggaattttcggtatgagaaaactacatccaaggaagggattttatctctaattttcagtattagaacagacgtgatacaccctccaaagaactcaaattacaaactcaaaaatcctctcaaatcgattcggttttcactctctagaaacacaaaaactaacaaccagttcttatgaacagatgttatattaccaataggttagttaaaaggtgaaatgctgatgtggcaacataagacagcaacacaaactccaaactaaagccttgaatataacagatataactgcctgatgattaatggaggctttagcatttagagaatatttagataacaattgactagaaattatatagcagcagcaacatcttgtggcatacccattatgtagaatgaggtatgctcaacttcagagtcactctgttcttcataaacctcgttatcacatgaatctggggcatatccagctctcttcatctgtttggtaagtgacataagaagtgtatatatttccttccttttaggatgccttttatctttcactaagaaaacatgtacatgaccctttacctcaatccaactacaacccggctgcttgatcactcctcgttgtttcatcaattttcttatttttacaacatcaccccatcttccgagctcagcatacatgtttgaaagaagaacataaggtccagagttcataggttctatttccaggagcttttccgccacatacttccctaaggtaatactatgatgaagtttacaagcaccaagcagagacccccaaataacagcatcaggctgcattggcattgtctctatcagatttttagcttcatcaagatgaccagcccgaccaagtaaatcaaccatacatgtatagtggtccttcaatggaaccaaatgatgctcttcggtcatagagtagaaatatcgacggccctcctcaaccagcccagcgtggctacatccacacagtactccaatcattgtgacatggtcaggcttttcccccaatgccaacattttcctgaatagttcaagagcttcagtcccatatccattctgagcataccctactatcatggcattccacgaaatacgatccctctccaacattttctcaaaaacacgacagccatcttcaattgatccacatttcatatacatgtctattagagaattccctacaaaaatatcagactcttcaccattttggaaccgaaatccatgcttcaccacatgtgagtgagcctgcttcccaagctgcaagtcagcaatatttgcacaagcgttgagcagattcccgaatgtatagtgtgtaggccatattgactcccttttcaggaggaggaagagtgaaagtgcttcttcattttcgccaatctgagtgtaccccgaaataagtgcattccaagaaacaacattcctctcactcatctttgtaaacattaacctagcagcttccacactcgctgctttggcataaccactaaccatggaggtttcagagactacattcctaatcggcatcctgtcaaaaacccatctagcttcattgattctaccacatttcgcatacatatcaaccaatgcatttcctagtataagatcatctctcaatttatcacattttataacacgggcatgaatttgaagtccttcttttatagccaacaagcttgcacacgcacttaccacactggctaatgtaacctcatctggctcaattctactacaatccaacattttcaggaaaacttcaagtgcttcacttgcaggaccattctgctcataacaactaattaagctattccaagatacaatgtttcgttcttccatccaattaaaaaccatttgtgccaaaatcacactcccacatttagagtacatatcaataagagcagaccccatataaacatcagaagagtaaggagactttgatatcaaagcatggatttgaatacccattttcaaatctcttaaccctgcacaagcactaagagcactaccaaacgagtaatcattcaacacaaaatcctctctttgcatattaataacacattcaactgcttcttcatatcggtcatgttgggaaaatcccgaaagcaaagaattccatgtgcattgatcatgatcaggcatggactcaaaaatccggacagcctcatcaaaaaaaccagactttgttaacgcacatataatagagttcccagtaaaaatgtttctgtgaggcattttatcgaacactttgcgagcttcatccaaacagccacattttgcatacacatcaatgagcctattctgaataaaaatttcataggaaaattgagttttgatgattcgggcatgtacacgacgtgtatggcgagcggacttggagctggcgcaagaatccaggagcttggcgaagggtgtggagtcaacgaaagagaggtccccggagagttgtttgaggaatccacgccttgccattccattatttgagactctgatgataagtatacaaattacatagcagccattttgtaatatctgagctgaaattaggaatgttcatctaactctcacctcattacagtttattaattacactttaaattacactattatatattatgaaaatattaggtgccgtttggtaatacttttgtttttcaattttttaatcacaaaataaaagtaaaatttttgtttttaaaaaaattaattttgaaaaacaaaaatgcgttctgtaacaacttttgtttttcaattttaaaaacagaaaacaaaactgtgttttgtaaaatttatttttattttttattttatttaagtcgggtctagatctggggtcggattcgggtt

SEQ ID NO: 224239 - DNA, 1460 bp, Cannabis indica
atgatatcttcctcctcgtcgcgtttccacaaatcttgaccaggtataagcacttggagaacgactattagtagaagaagagtgagactcgacatcgtttacctcaactcgcggctgggcttggcttcgcgggttacgtcgctcggtatcttcctcttgtggtatctcgtctctaacgcgatcagggttttgagcgactggttccctatttcgcgtaaaggtatgcataggccggttcaagtcgagaccttactgttcattttcttgttccctgggagcacggatattgttagttcgtcgcctagtagttgttacctggggttatcataacatggattaagtacgcgaggtggacgtcgggttttgacccttccatcaacttcggcctgtaaggcccgcatttgctcctgtaaggtcgtatactgggccgtagtcagttgaataattccttcggacgccacgactggtgtgataggtgggaagtgtcccacggtggctgctggtgttgaagtttccccagcatgaccggtggcttctggaaacaggttgaggggagtgacagtagtccatcctaccccaccattgattgtgtcaaacgggattcactctgttgcccggaagtggaacattcattgttccgacattgaaagaacttgtgttgttattttcgttcgtctgatttccagctattttgattttcctccgaaatcaatagtaaaaattcttcccacagacagcgtcaaatgttgttggaggaattttgacagcaacgaataaaaattaaatatagttattaattaaaatgcgcgagtactcaacctagaatgacgagtattcaaagaaaagacactcagacgtactggaaaatataatgagcataagggaattatagtagttcagttagatcacggtctgcttagtccattgttgaaagacatttctctctcctttattcatgttggatcactcatttatatacaaagcaagtgtcctttggattatattgaacttaattaattatcaaaccattttacattgaatattaacaataaatcatgaaaaacgtaaatggaataaataaagaatagtttcgattcaatttactaaatatagcaacgtacgcgacctttatggtacaagttgtctgttcatattctcacataagctcgcagtcctaggatgcgtgacggactaatgagtctttgtgttaagatatccgcattctatctgagtcgcatatatggataccttgttaacgtcgattatttaggacgtgcgagtccttatcggatcatcgagcgcgttaggtcattcagaccggcttgctaagtaaagaatcgatctttaccaactcccaggagaagcctttataaacatcgcatatatcttgatatatgcagccttgaacccagccttctcagtcttacatcactcgaggcgtaataatgcgactagactct

SEQ ID NO: 224240 - DNA, 4158 bp, Cannabis indica
tagtaattatttattttgtaatagatattttatttttttcagattaattaaatagggaaaagacataagttgtcaggataaaagacacatcccttgtcttaaccaagacggaggaggaaccacctacactgtgtccacacacagtgtaggcaccactattgtagggtgtccctattaattttgtatttttagattaattaattaatttaatagataaatatttgaatttaaaaagtagctgagatattctctcaagtgcttgagagatttcctcaatcggttataagatataaatatctataaccgaattcgattatattatttatttaaataattaaataagatttaatacagaatttaaataattaattaagtaaacttttattgagtttatttaatataccgtataaatataattctatatagtttttgaaacaaaaaaaaatctacataacttttttgaaaggctaaaaaggattaagcagtaaccctttttttctatcacaaaaaaaaatatagttcttgctcatgtgttgagatttaatcaaaaaaattatatgcactattatcctactagcctacgctaatccttgggtgtggtggaagatatggaagatcaaggtgtcatttttgtcattatcgtttcgaggatacaacatacgaaaagactcaaggataccctgatgtgcttcgagaggtaaatattcttttcatctatgtactttcagtttaatatatatacatataataatattaggcatatggtacaatgataacagtaacaatcatctgttgtgtacctaatttagtaccataaaactaacaagatgtccatcatgtctaggaagtccataccttttttgggaatggtcccgtaaagagggataaccatcgagttagggaaggtcatgacttaattggggatggtcccatgaaaagggatgtccaccctatccatgaaggtcatgccttaatcgacgactgtcgtatgaagaggtatatccatcctgtccaagaaggtcacgcattagccggggatggtcccaaggtgcctaagccttggcgggggttaggacttagagtgaagttccttaagcctagaggtttgagattattcccaaggtatcttattcgtggggggcattaggacttagagggaatttctccttgctcaaatgtcttgggctaattcccaaggtacctaagaggtggcgggcattaagacatagaggaaatttttccaagcctgaaagcctttggctcattctagatgtgtgtaagccatggcagacgttaggaatcaaagacaatttttccaagcctgaaggtcttgggcttattctcaagattcctaagtagcaggcattaggacttgaagagattgtttccagcccggagctcttggactcattctcaatgtgcctaagccatgtcgggcattaagacatagagagatgtgcatcctgtccgagaaagtcatgtcttcgacgaggatggtcccatgaaaagatatgtccaccctgtccgagaaggtaatgccttagccaaaattaatttaatgaagaaggttgtccatcatgttcagcaaggtcatttcttcatatgggatagtcccatgtagaaggatgtccaatctattcatgaagttcatgcctttgtcagagatggttccatgcagaagggtgtcaatcatgtttggaatggtcatgccttagccgggaattgtccaaaggtgcctaatccatggcagcgttagaatttagagggttgtccatcatatcttggaaggtcatgtctttatctaggatggtcccttgaagagggatatccttcttgtctgggatgtgcaccttttccaaggaggtcatctcttaaccgggaatgatcccatggaaatggatgtttatcttgtccgtgaaggtatgcttatttgaggatagtcccaaaaagagggatgtccgaggagattaactattggattttgtatcttcttactcttctctactatcttgaaagggcatgaagcaatgcacaatgtgcaaatctttagcaaagaggctgagaacaagacaatggcaaatactacttcaaaaattgtggttgttgtctatactcaaagagttgaaggttgaacataaaggacttgttacacattactaccaaccctatctttcatttaacatatgggaattgattgccatttagtctcaaagaagattcaacagggcattatcaagaaatctcatatagtccattttgaggtggtgtggggggattctaaaagtaattttttttaattattattattttctttgaatcatataagctctataacgaactaatgcgatcacttccatattacatgtatccaagaatgaacctcttgatatctgaaatgaggccagtgtagtttaaaaactctgtaaactccccgtcgtaaatgtttaacaccaccccacctaaaaaaaaaaaatctagtgtttacaaaagaattgcagccttcagttgtgtttttacttctttacttttactgtcaataaccaaagatccatctgtatatgtatcatcttctgtttcatgcaattgttattcacattgacttaagtttcccacccaggaatgtttgcagtagcctcattcaccattgtcacaagtcttacctgcataaaaggatcagtgcatgatttcatattttttttttgttagaggaatgaatcatttaattaatgaccaccaactgacataatttaatataacatcgaaacttcacattcttgatgaaaaataaatttcaaatagctaaagatacttgcaagaagtattccacaacaaaagcaaatcaatgagaaacacatttttgactttacttcatactaaaataattaactccaattcaagactcataaatgggtatctatgagggataatatggcaacaaaccaccgtccaaaatggcattgttgagatgtggtaaatttaatggataatatgagaatcttaaggcatgaggcaacaggcagcaaaaggctgtttgacaaacaaagattaaaaaacaaattgtgggtatttgatgagactgattagtacatattttgttgcttgatagttgtgggcatttggtgttgtattatgtgacgcttctagtggaggttgtcattttatcatggtacacgagaagagctttaccgagagaattccttctgtatgtttttctcctagttatttcagtcctatgtgaccttcattaactttttatgtaatacaaatcccactgacttcataaagtcaatgggcattaggcttctgaagtcaacaataactctttaaaaaattaaagcatcagagaatgttcgctagttcaccataaaagctaatcggtaacagttgacaaatgttgaacaatattatgctaaaagacctactttagtccctgaataatttattacatatataacaagtctagtattagactcaaacttgcaatctctaaaagtaagaacaaacaattaaaaagcaaaacccaaacaaagttccaaaagagttgccaaatgtttgtgttaattacatccccctagtgattgtattagaattactagtcagcacttcaccagtattgtatgggaattatgatcaagagccatgaattgttcttttttctcttacgtataagcattgaaaatacagtcaaatttatgtgactgttttaaaaacagatcaatttcctaaattagccttaagccacctaacatttaatatcataaactaaaaattgatacttaccacactttcaggaactcctggaggaggtaatgaaaggtttttcggtggaggaccacttagataagatctcttatcaaaacgccattctccaattttcccataagtcagctctccctatatattaaaggcatcaaaagattaactttagagactaggtagtaaagtgcataagcatgtaagagaatgtttgtaaccataatactacataaagaaaaggtcttgtcaaagagaagagaaggttatgcaacagaaattttttatttgctaatattatgtaccataattatagattagtacaaccaaaaagaaacttgataatatttgtgcgaatgtcctcgctctctgagcatgtgtgtcttagagagagagagagagaga

SEQ ID NO: 224241 - DNA, 1185 bp, Cannabis indica
tatgaatactttgtcactttcatcgagataataaaatatttgtgtcaacatatactacttttcttgaacatgactatatgaaaagtcataagccacatagtcaagtggttatcaaggaaatcataaacgagatttttgaactaacaatctcagcaccattagtttaaccaccaacagaagttaccacagttcctgtaaaggaaactcaagtacatcgtcgtagtgggaggattgtgagacaacctatttgctatgaacatgaagcacatgttcttgtctctaacatagacaaggacaatctattgacttacaaagaagcaatggatgaccctgactcagacaagtggaataatgccatggattcagaaatggattctatgtgcaccaacaaagtctcggtatatgaaattccaactgaggatattacacccatagggtgtaagtgtattttcaagaagaagaaaaatgttaaagggaaggtagaaacctttaaagataggcttgtggccaaaggctacacacaacgagaaggcgttgactatgaagaaactttctctcatgtggttatgcttaaatacatatgcattcttctttccataactgcggcatataaatatgagatatggaaagtggacgtcaagacaacttttccaaatgggatcttgatgaagtcattcatatggaacaaccagaagggtatgtgttaccaaggaaagatcaaaaggtgtgcaagttgcttaaatctatttatggattgaagcaactctagatcttagaatatcaactttaataaggctattaaagagtatggattcaaacaaaatgaagaagaaacctgtgtatacatatacattaagggtaatgtagtggtattcctatttctttatgttgatgacattctacttattggaaataatatagaaaggttattagatgtaaagaagtggttagctgaaaaattccaaatgaaagatttgagagaagcaagctatgttttggggatcaaaatctatagagatagaaagcggagaacattagcactttctcaagcaacttatattgatatgatgttagaaagattctcaatggagaattccaagaaaggacaactaccgtatagacatgggattactctatgtgaggatcaatgtctaaagactctttaagaggaagaggacatgagaa

SEQ ID NO: 224242 - DNA, 1301 bp, Cannabis indica
gcaacgagctgcacagtacgttaaaaatcacgctaacacgcctatgctagttagggtgttacaatggaagtttaatgagcatttattaaacaaagtatacctacaaaaatcaacaccaccaaaaacaaaattatattagttgacgagaatttattcatatcgacaactctgtcaataatctatcaataataaccaaactcccaacttttttgcaaaactagtgaaaactataacctttcaagaacatgtctagattctattgataatccatcgataatccaacaatgataaccgaaataggaaaaaattaagtctaactcgtatcgacaacccgtcgataatgaatcgatagtcaagcgataataatttaaaaaataaaattccaattcttttgcaatgcttcacctatcaagaacatatcgataactcgtcgataatagctaatttcaataactatatcgccgataatagctaaacttaatgactacaaccgaaagctaaatcttattgataacctattgacaactcgtcggtattcaaacgagaatcaataaaaaaattataattttcatggcaatgcttcaactatcgataacatgtcgataacatatcaataactttttgataatagctaaacttaatgaccaaaagctaaaatatattgataacctatcaagaatctattaatatataatcaatattcaaacgagaatcaataaaagaaaaaagaaattataattttttttcaatgtttcaactatcaagaacctgtcgataatagataaacttatgaccctcatcacagcttgttgatagcctatcgagaagctgtcgataaaatacatcatttttatttttctcaaccaaattagaaaacaccataactaccattccaaattgaccaaaaatttagaaaaattgatcataactaagtgtatttcaacacaaatattaaacaatcattctaaatcaaccgcagcaaaaaaaattaaaatttaacaaacaaactggcttagacgggcgacaggtagtggatcggactggacgaacggcaggggaacgagctcggactgctgggatgggtccttcgcgcagctgggatgcggctaggacaaaacagatgactccttcattcgggcttcacgtggctgggacgcgacagaaagcttcgtcattctttgcgcgggcagagtgggggaccgggttgtggtagagaatgggatcaagactttggagtagcggaggtagaaaggaggatggaggaagttgggctactgatactaggagagagagagagagag

SEQ ID NO: 224243 - DNA, 2865 bp, Cannabis indica
tcaattgttatattttagttcattgtgataatgacacaaatacataaattgaattcaaagttcaaatcaatcaccatgaaagaaatatagtagtttgaactttctatttttcataaatatgtatataaattatatataatagaaacatatatataaacctcttaatcaggttggtcgggttagttcgggttgattgggcgggttggtattattttcaatccgcccaatataaagattgggcgggttatattttcgtcgagttttttggtttgcattttctgtcgggttatctcgatttactttggatgggttattcggatcgacgatttacaaaagtttatgtacaaccctacttctccacttttccagtgaagtcttacctttctaaccttttatggttttattttgagcataaaaggaatcagatataatgtttatgctctcaagagttgaaattcaatagataagttataattatcacatcatattaaatacgttcttagcttcattatgcttcttgtttcgataataatatatttttttttctttcttttgtagatttgttggtgggacataaacacttttaaagattttttttttttgatattaaagttttattgtctagctttctaggagcatctctttcttttgtaagtcacaatattaatgttgcgatccatagcttggttgccttagtagcgttttggttcggatgaataaaaatataggaatagaaatgggaatgggaattggaatatgaatgaaattgaataaaatttaaaatgcataaaaaattaataaaaaaattattaaattttttcaaatcttgcattggaatgttttttctttccatattaaaatagaatagtcattccaccaaaatgatagaaagagatatttcaatggttttaaatgcaaccaaacaaaaaaattatttcctttcccttccattccatttcattacctccaaccaattttttctaaatggaagaaatctcttcactttatacctcttgaagttgttttaattctttaacccataaccgttaccctaaaaaaacaatctaaccacaaaaaaatctagtagtatctacaatgaggagaagtgtgaaggcatataatagaagccaccaattccatgttagaaaacaaaatctctagtcaaaaagcaaccaaaatttcggagaagaatattaaacaagctgatgtcattcgtagactagtacaaaaatgaagtctctggaatgtattatcaccacaaacaaaacaatgttataatgtttactatcctaaaggcattgacttttgtgtcaccttattaaatagaattgttgacttgatgactagcataactagttaaatacttcttgagatgttttaagaacattatttcgtataatggaagctcgtaataatctcactctgttcatcttgatgatcataattacaactatatttcataaaaccacacttagtacaactactccttgcttttcatcttgtggaaatatacacaatataaccttccctttccgactagataccgattcacccagctgtgtatcaacggggctctaccactcaaataaagcttttgttctttcttgtaaaaacaaccacactaccatattgaaaaataatggaagaagctattaccatgttgaggcaatcaattacaacaactacacaattaggcttgtggatccaaatatccaaaagggtaattgctcttccatcccaactacctattcatcatcaaatactctcccttcaccatttgaattacaaattacttttcgaaagggtgagaggttttggtccacaaattttgtaacatatccaacttcagagcgtgtgttattcttaagctgtgaaaacaaagtgtacaattctttatacatagacacagctccttgcataaacacctctaatttgtctgaaaatcccaaaacaaggttcttgtacgttgcttatgctagtggctttaagtactctgatttggtcgagtcttgccaaatttaccaaactgccctcgtatcatcgaagaaagataggaattatacgatgatgactatgtcataccaagatgtacacgatgagttcagctatggtttcgaggcttcatggctccgaattctgcaaaaaaaagttgaagaaaatttttgctacattagtgagagttacaacaagggttattgtctttatcgttattgcagagcactaaaactggcacggaatctagtgtgtagtaaggacttctttgcttaaatcacatatatatatatatatatatatatttatactgaaattaatttgtgactttttagtaacaatagatagtggattacgcaggattctggtttatattcgagaaacgtctaatggtgtcaactgttcatcttactggtgagggtttctaatttctctagaactctattttgtttggaaagtaatatgttgctcatctatctttgaatttttcttcctggatgatttactcttcgatctcgttgttttaattattattaataatttttattttggttcccttgtttttgttgcagattttatttgtctacgatggagaaacataggtaattttctttttaatagtacacataaccttctatttttcattctaaaaaaaaaaattgacaatactattttttctttgttaattagtaattttttatcctaaactttgacatataccaaatcatgcccttgaatttttttagctgttaaaaattctccctgaatattgaaattgttagatttaaggacttttgtctagttttattcaattttactgtttcagtgattgtttatgtattaaactatgctccccagactttgatatctacc

SEQ ID NO: 224244 - DNA, 2560 bp, Cannabis indica
agggtcctatttttactattttagaaaatacaaggtccattttgtcatttagcaaaacacaaggtccaatctgtaacttttgcaaaagacaaggtccaaaatggtatttactcttattttaatttttttattcttaaattacattattgttattattgttaaaagctactattagatcagctattttattaaataataaattaattttttttttaaattagtataaaataacactcttagtttaattttatgataattttttttaatataattaatttaaatataatttttaatacaaacagataaaaaaatataatcttgtcatcacacctttaaattaaattattttatacaattttaaaatacaccatttaatttatgattgaaaatttcaaatttcaacttaattactctgcatacataatttacacacaaatatattatcttaactacaaataatttattagttaaaattatatgttaacctatcattactcttttaatacgagtttacttgaattattattccatctattaagtactcaaaatttatttaattcttatcttgtttggttaaatttttaaatttttttgaattttgtcattttcctaatttgaaatttcgaaaaatccaaacagggtctcttacagtatttcaacttggtagaaggatgtttaacactaatccaaaactaccaaaaccaacaaaacttcacatacgattggataatccgaacccgagttgacgggtactggaacggtccgctccacccaaaaaacttcataccgggtcattacacggtcccacccgggtcaagttacggcggacttaacgaccgtttcggattaggagacctaaacacttccgttatagctctctcacgtctctcactcatcccaaaactcgactcggccgggttacaccaactcaactcggaaacttcattcaaagcccaactcacaacccaacgagttcccttcttaacaaaacgactccctttctgtgtcgtatcggatcgtaagtacgattttcctccggtggggttcggtgtgccggtggcggcgctgtcgagtcgtggtccacttagtggagccaagtgtcggccgtgtacggcggcgtgccgcggcggttgtgtggcggaggttatggggagactttataaagggtggagttggactgagtggggaaatgggacacttgagctttgtaatgctagtgaggagtgggagaaaggttgggagaaggtttttgatggtgttgttggggagaaatttggtggtgaaaggaagagagttgagggtttgagtttgaagaattgtgttgatgattttgaggtgatgattaataggactgtggtttgggaagctcctttgccggagaagatttgtagaatgggcttgaaggcccattaaagttgttgttgtgtttgggcttgggcttgggcttttgggtattgatgattgtaaattgagaaatagtgttagtttattatacttttttttttggttaatagaaaaataagtatttattttttgggtagtgttattatagagtcatttaattaaaggtgtcttttttatattgtatgtcttatagagttatgccattaaaaatagtaagaaattgaaatgttttgtaattgaaatagtatttaaaaaaaaaatttattagcaaaataattttttatagtcgcaaaagtgaccataaattagactgtatgtataaacgattattatggtcacaaaatggttatagatttacattatgcaatcattaaagtaaattaaatgaaatcgttttataagttttagtatttaaaatggttagtttgattaatttaaccacttgattttgattttgtttgcaatatatttgagaagcatcattcccaacatcttaaactacacatgtactaatggttatttgtatacgataaataatttagagagatttgctcataagtgttaagtttatgtataccctttcataatgtttaatttgaacctcaattaatatacaatacatgttaatttaacttatcacattatacacttattaatttctcaatttaaataactaattaaaatttttgtcctataaattttaatatataccaaatgatattttttaaacttttaagacggttaaaaatttctcaaaactattgagattattgaatttaaatatttttttaattttagtaaaaaaaaatctaatatagataaaagtttaaggagtttgattttgtacaaaatcaaaatttagaaagcatgattgacaatcacaaaattagtaaaattgaataaaactcaacaaatatcattaaatcaaacaatcttaatagttcaagagaaatttttaataactaaaaaagttcaaaaaatttattacatattaaaattttaaatcctaattagcttaaacattttcaaaaaaaaaaaaactaaaatttaaaatttgttgaacctatcaatatctttgttaccaaaaaacctacgcaattattttgaacacaatttcaagctaatatggcaactttgctttttcatgtgctctttt

SEQ ID NO: 224245 - DNA, 1172 bp, Cannabis indica
actaatgactcataacctagttttcaactcgtcagacaactagagagttcttgagacatcttcttcttctttcttctaatttcgaaatcttagagtgttcttcataaaattttcgagctattagtgagtgagtgaatgcccacccatagcaagtctagtactcaattatagtatgtaagactgtgaagaatccaaacacttaaaggaggatcgggctcagatcttgatacaatagtactctgcgatagaaaggaacaagggttagacatctgagtgggatgagtcattatattccactgcaatcaatgtaatgttactcaaactttatatgtgtttcaattctattgttttagaaattcatatttaggatgttaataaacatacttgttagtaaaactagatcctagtaaaatataatccaacaactggtatcatagccatggtaattatttactttcaagaaatatggatttaaaacgatgtatgtatgatttgaatgtgattcatgttgatctatgtatttattgatgattgattgatgtttacacaatttttttacagaaaacaattatattcacgatctgaaattattttatttggatagtatgaaaaaaattaagcaattcattttttttacaaaactggatttcaattttatttgaattagttatgaatttttgaaaattgaaaaaaactaggaaggggaagcatcccctatgtgtgcgcggacacctcgtgacatttaggtgtcacgcgcattcgtacatgccctgtccgaggttgctgtgttgagatgggcagattttgtttgaacggggcccttacatgcacagagatgctgcatgcagccttcagcgccggcatttctcaaccatgcatctattcctgcacgcgcaccaaacccaattttttcaattttttcatgatttttcaaggaattaatttcaaaactttttgtgtaattttgtatgtagatttttatttttcatatttcaaatctaatcatgtttgaaattaattattttttttgaataattttagatattagtagattttgaacttgaaaaagataatatctacattcttttttgcttaattgattatcttatttttaaatttaaggtcagatattttatatacttaaataatttaataaaatgaccttatttgaa

SEQ ID NO: 224246 - DNA, 2310 bp, Cannabis indica
ttatgtaccttgtcgttgcgagtcctaccaaattgtatctaaccacaatcgagcatagaggaacaactcatcaatgtcaacttctctagatttaagatcccataagaaaagtaacctagtcccacattcgggctccttaatccagaacaagcataaccccccaaggagaagaccaccaaaggtggctcctcagcctacccccacaaaatagggcatgaaaacctcctccaaacccattctctttgcaagagaggctcttaagggtagagcattggaatggatattccaccaatggactttgtggcactccaaaatctttgagttccaaagtttgttccatagtgccggagcaatgttgcacaaagaagcccgatcaacggcttaaataagataggccgacttggttgaacacaggccatttggttcttttgtccagacccatctatcccttgcctggcttctcggattaccgcctcttaagatgttagtaatagtttcctggtcaaaaaggttgtgtagcatgggtgtgtccctatttccgtcagacaaaagtaaatctgacactttctccaaactcagctgttgacgataattgggcttagggtaaaaaccgtaccatggataacccaagggtcatcccaaatacttgtctctctcccatcagatattagcttacacgccccttttcttaaaatctctttagatcgcaccacatttctccaaaaccaagaatcagagctcttaacgtcacagtcaaaaaactgcttcccttaaggtacttaaatctgagaacattacagcacaacgactgttcctcagtaaccagagcccagccccacttgccgagcaatgcctagttcatttccaaagtctttctaaagccaagcccccacgggatttggggaggcacaactgttcccatgctttaagacagatgcctctattaccttgttcatagccccaccagaagtccctcaccatactatcaatcctagatgcaagctatttagaaagctttgtcctctacatcgtgtaaataagcaaagcaagcccccgatttgatcaacgtagcacgaccagcttttgataacgattttaattcccacccatggagttttgacaccaggttatcaaagatgaagttaaaatttgcatccttttggcgggatctaaaaagtaggaggtccaaatagtttatgttacccatttcacagttcagtcccagagcttgcctgatgcctcgtttcataccatcactcgtgttactgctaaagaaaatggaggttttgagcttattaattctctgaccagaacaatcataaaatttctccaggcaatgccacataccccttgcttcttcaaggtttgccctgcctacaaggatcagatcatcggcaaagaaaagatgggagagtttggggccatctctgcttagctttataccattgatggtaccgttatcaagggcgtgctcaaggatgcacgagagggtttcaacagcccagataaagatgtacagagatagggggtctccttgtctgatgccacactctggggtcaaactgttaaactttcttccattgagaaataggttgaaggacgttattgtgatacacgggcggaccgagtggtagaacttgacatggtcaataaattgccaacttagtttgtcgtacgtcttaacaagatcaatcatgatatcaaaaaacccttctttcccttttttcctcttaaaagagtgtatgatatcatggattaaaacattattatcttggatgttctggcatgagacaaaagctgcttgagtaggacaaattaatctgggcaggaacactttgattctatttgcaatgattttcgagatcacttataaatcacattgccgaaagagataggtctgaactaggacacttttttagggttagggaccttaggaatgagactaatatgtctagcattaaagcctctatgcatattccctaaaaagtccacatttgcatcaaagaaatcctttcccacaaagttccagtagtgttttaagaagagaactgacataccatcaggacccagagccttcaagcttcccatagagaacagcgtttgtctaatttcctcgtgacttgggatcacctcaagctcaggctactccaaaggggagagaagatcagggattaagtagtctaagctttcaaaagggccttaaggcgcgttttgaaaatgtcacccagaaaaacagtaaactcattaccaatctcttctttattagtaatccacacaccatccttgctcaagatactatccaccgagttt

SEQ ID NO: 224247 - DNA, 1024 bp, Cannabis indica
tagttcaagtagattctggtcatagaatacaaacctcataatccatacattaacatacagttcagatccattgtagaaaatggatattgacaacttgtgaaagttatattgtactatccaatgtattctggaaactgaaatttaaaatttctatttggaatctaaaattaattcaaagacttaaatttatactaaatatatcttgagttttattctagcttggaccaccactacttatctaactataagcttaagttgcctttagcaagcatatacaagtagaagattttctaagatcgaggatttatatcatttcaagatagaatatctagaatatagtcatctgcgccactcaattttatagaagaaaatagagtgacattgttgtctagatttttataagcttgacacgtagatcctaatctagaaaggctaagtataataagtagccagttaactctcttgaacactattcagggaagataggggccttatctcatggatagggcctctttgataggaactcccccacaaggtagcgatgcgagagacatccatggctagaagtctctcgtaaccccaggaattgaagccaactactctcgcaggacttaagtcaaaggcttctgtaaaagggtatgaatttctcgtcaagtgcccaagagtgtcttgcaaaacatctagctggctatatcctcatttcgtggaggctctgcttgtacatgtcagactacggacttagtagcctggcttttttaggtacagcataaggatttgtcccccacgatatgccatagtacagagcatgcgcgcccaatcatactagcctaaataattcaacgaccattgataagagaaattcaaaaaggaagacactgggacgacatgtgtatgatgcccagtctgtacaatctgacacccttaaatgccatgtgataaaacagccacctaccagattaatggtcagatctgctctaaatgtgatcaacctagccagcacacgaaagaaagctggcctataaat

SEQ ID NO: 224248 - DNA, 1560 bp, Cannabis indica
agtacagggactaaaaaagttaattattctaaaatatttgacttgatatatacagaaatataatttattatggcatgtatacttattgggaaaaataggacttgaacaatttgtaatgacaatcttcttaataataaaatagaaattatagtacataaatgtattcgattaggtttcggttactttgatcttaccaattttctacagtatttatttcttttttacttgttaaacatgcatttattgaaaaaaaaatatataagttacaaatctttagttggtactgaagacgtattgtggcaaggcaacaaggatcaattcaaatctattgctaatttccaagttcttacagcatttagcaggggtataaattgcttagagttcaatgggcttctattgtttggagcagattaaatgtgcctaagcacaactttattttgtggttagcaaatctaaagaggctccaaacaaagactagagttcggcgttttaacatcacatcgccatagttactagtttagttttattctactcttttgtcttttaatgaaactgattttgtatttgagctgaaatggatggtttggatgacttcaattagctatgtactagttagaaatgaggaatgatggatattaggtattattttggtattatattaacttattaaatctatctatttggtgattgtataactgtagggatattattgttcttttatataaatgagtggtcttgattttattactaatattttctaattaatataggagttaattcattattttaatttagtattttgtaatataaattaaacgatcatttataagttttattatcttacaaggatcaaagtgtgatatttgactatccaaattatattacatatctgccacggtctaagttcgagtcgtaacatatatatttacaatatatatgacataatttcaacttcacgtacgtaatctatatttatttcataaactacttttagttaattaatcacctagaagtaaacaagtagctagttactataaaaccatattatataaaagaaatgttaaaaggtattaatggttcttaatattaaagtatttgtgtagtaaagtattaactaactaattgtaagatgacatgaaaatattattagacgttacccatgtaattatgctgattatgtaattattagaaatgttggatataatattcaatccactttccacaaatttttaactagcgattctagcaaaattgtaggataatatcctactcgaacaacagtatagattctaattaattaatatcattgagaaagaaacatattagttgaaagccacaaggcccaaaatacagatgtagcgagggaaagatcaacatctgatctgtaatattaatctagctggacacctcattttttgttgtgtagtctagtagtagtatatttagctttatatatatatatatatatatacactaaatagatattacgtaccaaaagaaaagtcacgtatcttaattttattttagtttttaatttttttaatattataattttaaaat

SEQ ID NO: 224249 - DNA, 1217 bp, Cannabis indica
actatcaagaagaagctagacgctgccaaaggcagatgggttgacgagttacctcaggtactcttggcccatagaactaccaagaagacagcaacgggacacactcctttctcgctagcatttggctcggaagcaatgctgcctgttgaagtgaacatatcgactcacagaagagagttttataatcaagaagaaaaccaggaacttttgaaattgtctttggatctacttgaggaaaaataagctgagtcccaaatcaccgacgcagcaaaccaacactgagttacaagataattcaacaaaaaagtcaaaaaaagactatttaatgttcgagacttggtgctaagacgagtatttaaaattacgagagatgcatctgcaggagtgttcaacccgaattgggagggtccatatgtcatcgaagcaatagttggagtttataaattagttcgactcaatggttcgctaataaagaattactggaacgtggaacaattgcgaccctactaccaataaataaatgatgtaactcgtattcctgatgtaaaagttaaacttaagttttgaataaagagaatcatttatatgaagtaattacaaagttttattctttaaaaattacttatggggcatttatgtatgattaaccgaaattcatctggaaatacatggtataatgcaaacccgccatttcaattttttttttttgaaattcaaaggttctcgactaaacctctttgacaaaagtggagtcgaattgttataactccctgagcaaatcttgtggacgagagaggggtcgaatcgttataacatcttgatcaaacctttttgacaaagaagggatcaaacaactataatttttgatttaacacctatctaatgggaaaggaaaatcgaaagttataactcgcgtataaaactgaatactaacgattctcccgagctaggaaagtactaaacgaggcatcccgacaccttgataaaggtacttaaacctagaaaatagatagataatataactattcatctgagcaaattaaaaatatacaaagtgagagaatcattaaagtatatttaagtttgcttaaggcaaattataactgctatggcgaggcagaattgacaactactcgaacataaaaagaaagagtttggtagattactaactacttaaacaggaagattatgagcaacggaaaaacccaaaagtgcta

SEQ ID NO: 224250 - DNA, 1537 bp, Cannabis indica
atttatctttatagtaaggacctaaatttttttttacctataattcattccaacttaaagccggccttgtatatacataaaatataaagaactattaattacattaatgaatgtcaaaagagtaaatagattagtgatatttattattgtgatgtataatttggtccatgctatattttgtgtcaaattttacacaactttttacgcatatgctaaatttttaccacattatacactactgttggagtttaattttataaatatgagctaaaaaatgtttatacaccattggatataggggtgtatgtttggttggtttggacgatttatgctacattttattcagtttttcgtcaagtttttcagtttgtatttttcgtcgggttatctcaatttagtttaggcgagttgtttgggttggactttacaaaaatttatgtacaaccctattgatgtcacaattggggatgatatcatatcatctcgtgatatggtgaagaattatgagtggacgaatctattaatacacgagtcatatatcaaacacgtatggtatatttagtccttttgatatatttacttttagctatcaatttacatatttttgtatattcgaatgtgtgtttttaaattatttgtgtaggctttccatcatggaaccaggtgggaacaatgagtgaaatgattggttagattatgatggtaatgatggtctatccgtgccaggaggatctagtgttgatcctgaacaaccattcatggaagaagaatgtagtgttgatcttgaacaaccaacacagaaaaatactcgcgggagaagcaaacagagtgatatataacaaaaatagttagcgagagaaaaaatttagaggttgagtacaataactacgaacaattcaaaactagagaaagggagcgacgaaaaaaattacttgaattggaacatgtgtgcgaattaatgttccacttcgagacatatcgtggcctagagtgagtcagaacattaaaaactaattatgggatgacataaaggtaaaattaattttattatttgagttatttaatattgattataatttgtacttataactacgattgtcaatttgccaggccgagttcaatataccagagacagacaggaaattaaccatttctaaaggtggagagaggtggaaagattggaaaaataccctaacagatggtatttttaaattcaaaaatgtggctccccaacttctcgacaagccacccaaactatatgaaagcataattgatttgcaacaatggagagagtttgtggctatgagattgagtccagagtttgaggttaggaggaaaaaggccaaacagagcaatgcaaaaaatatttacaaccatcgcagacgaggtggtgtaaggatggttcaagaacaaatagagaaagaggcaggccaccaaattactgaatttgatagatctggtatatgaaaaagacttcacatgaacacgaaaggaaaagtggaaggcccaactgcagaaatcattaaactgattataa

SEQ ID NO: 224251 - DNA, 2291 bp, Cannabis indica
cattcactttctctttctctcttcatcttctcatttttttctcatctactttgtattattttataacaaaaattaatatttataatatggtattaataaaattatttaaaaatagaataataatgatttatctcttttattttataactaggcaacgataccgcgcatcgcgcggttatttagaaaatttttatttatgttataaaaaataaaatttatatttaatatattaaaagaaaaaagatgttaattaattaatatattaatattttataaaaaaaattataatttttatatgttaagatattaagtcagattattgaattgatatctatatattaattacaagtataattattttttaaaatatgtgaaagatttaattaagaaaaaaaaattattttaaactaaactaaccacaaaataaataatttaaaattaacaaatgttagagactcaaatcatcatttttgtagtttgcattatatatattaggagcattgaaaaataaaaacacaaaatctaataagtaaaattaaattagaggatgaatagtttaaaaataaatatatcatcaaatatacagaataatagaatatctctattttgatagaagcatatatatacatatttataggtatgagattagttattaagtaaatgtattataataataataatagtgagagttattaaaataaaaaatcaccattgataatgaacaattaattaaaaaaacaactaacataaatattatctttcattagcaaataacataaaaaaaataaagaaaattaaataaattcaaaataataagaaaatagagaacataaagtccaatgcgtagagaatgtcacatgacttatattatgctttcctttatatatataagattattattattattattattagaaaaaaaaaataaaaacttctgtattcttttatagaaatatatatttatagaatattaatttttataacttacttttggaataaaataaatttagaggaaaaattgtttagaaaatgaaatagtttttttagtatgttattattggttttaaatgtgttaaattatattaaagggcaaatagatggtaaattattaaaatggattaagaaaatgaaaaataataaaaatgatgagaatgcaaagaaattgaaataaagctcatacacagcacaactctgatactttcttttatatagatatatagatataaatttagcatttatgtcttttattataaataaacacccacatatttatatttttatatatatatatacatatgcatatagtaaaaaagaaagaaaaaataaaaaaaatgaatcttacaaagcaaaagtaacaaaagaaaaataataaaattactcaaataatataatatatatccaatttcaatttgttctcttgccatttgtcgtttttcttcgacccaagtagtgtttttatccatttgagagtcatttttgttgattctgactgcaattgagtttctcattggtacgtcaatcctgtaccttaaaataaatgaatttgagaataaatatatgagtgtgtgtcttgcaagtgcttgagaagatggatcatatgtgatctacccctagctactttatatatttcaaaagatgatattttggaattttaaattgataagtaataacacaatattaatataaaaataaaagagaaatgagtacttatatatacaaagaaaataaatactatgaatgataaaagttttagagagtagttatagcatacctagctacgattccaaaccaacttgatgaagaagttaaaagcatgtatcaaaaactttcaacaaattatatatattgaattcttgtatctaaaaatgaaaaagaataagttataacaatgtacaacttacatgtaatttagcaagatatatatcttattaaaacttaaagagaagaaattggtatggtgtaccggatgcacaagagtggagatgcataaacaccaaagaaatatttactgtcatcttgtttaaacttccatatataattggtggcacatactaccttttactcttttattttatatctatatataatatggtgcatcaaatatcacataaataagagttatacaaagaatataaattagttttttttttttaaatacaagaatacaaaaggtttttcttttcttttaataaaaagaatacaaatagtttttgtataataaaattaatgtgaaaaaaatcaacctataaaagaagaataatgatattgattgtacattaattatatttggg

SEQ ID NO: 224252 - DNA, 2464 bp, Cannabis indica
ctgagatggatttaatccttttagaaacatgagccaatcgtatagtatgtggcctgtagtgttgacaaattacatttcaccacaatggatgtgtatgaaggataataatttcttgttgactctccttattcttggagctaattcacctggtaaggacatggatgtatttttgaggccactggtagactagctaaatgaattggaggaaagaaaagcatgttttatgaacttgagtataggagtacaaatgagttgaaacacaacttagattttatgcatgtggaaaagaatgtttgtgatagtatccttggcaccctcttagataatgacaagtctaaagacaccactagtgcaatacaagatttgaaaaatatgggagtttgtcactccttatggatttacgaagacactcagtttagattgctgaaaccccatgccccttgtgtgttgactgctgaagataagcaagtattttgtaaatttctgaaggaagttaaattgctagatgggtttttttcgactttgaagaagagagtaactaataacaatattgttggattgaaatcccataactgtcatgtcataatgcagaggttacttctagtatgtattgacaagtttttgtcgaaggaagtatcaagcaccataatagaattgtgcaattttttttttttaataattttatgttctaggacattgaatgttaaagatatgtagaaggcacaaggagatctcattcacattttgtggaaacttttgaggatctatcctctagcattttttgatatcatgatacacttggtgctacattggcctgaggaagccatattacgtgggccagtttttatgagatggatgtatccatatgaaagatacatgaaaaagttgaaaaattatgttaggaataaagcacacacagaagaatctattgctgaaggatatgttatagatgaggcactgacattttgttctatgtacttcaaaggcgtgcatacaaaatttaactgtcttgagtgcaatgaatatgctcctcttctaatttgatacttaacagttttcaaatctcaatgtctttcactcagaaagcaaataataacaactcttgacgagaagactcacaaaagagctgagtggtacgtattagggaattgtattgagatcgactctttatatgacgtaagttaatcaaatgattacatggtgcttaatgaataaaattatattattctttttagctaaatttgtaataacttttttgtttaatagagagcacctcgaaataattagacgaaggaacccaaacgctaacctttacatgaaaaaaaatttccttcgtgatttcataagaaggtgtgtaaatttcttttcctaatatttacttattcctaatcatcaaatctctcaaattctaagtgttatatttgtataagctcgggtcattagaacatagagatcaattactagctttggcatctaggtctaatctcgttgtgtattcatatctagcatgtatagttaatggtgttcaatttgttgtacatagtcgagataaagttcgcaatacttaaaacaatggggtgtctattgcagggacaaaaagttttgattattatgggaaacttgaagaaatattgtatttgtcttttattggtgcatattcggtagtattatttcagtgtaaatagttcaacacaaattcgagaaagaaaaaattaattaccgaaaataacatcactatcataaatgtcagtggtgtatggtacaaagatgacttgtacattcttgctaatcaagctaagcaagtttttttttttccagatgatcttgttagagttcaaaactagagaattgttcataatgtacatcatcaccaaatttaggaaaatatttttacagaaggttctaatgagactgatgatgttgatattttacatgatgataactcatcaaattttacattgtttgtggatttggaggaattgattgtgcaacaatctaatcaaccgccaaagattgttgatgtccctcaaagttccaagatggttccagatgttgatgatattagatatgatgaagatgaaaaaattgtaaaagatgtggatgataaattgcttgtagatcgtcttgaagatgaaattgaagatgcgcccccgacaaattcaaattcgattagtgatgatgattatgattaatgtatttaatattgtttgtattgatgactaatttttgtaatgttattatgtttcgaggaatgactaattgtactattattgtttaatctaagttgattagttgttttgattctcttaaagtaagagctcatatgattttgttattccttttagcatgaaatgttggcaggttatcatgttggatatggtggaggggatgacccgttagattctactagtgtacctactttgtgcgagacctttagtgaatcgagaaaaggtcgtgggaggaa

SEQ ID NO: 224253 - DNA, 2368 bp, Cannabis indica
gagagagagagagagagagagagagagagagtagagagagagagagtagagagagagagagagagagagagagagagagagagagagagagagagagaagcttttgaagtttagattttctttctcaattgcagctgcttattggtaaagataggaaatgttagggtttttatatgttaaatgggagagagaaagataatagtttactatataataaataaaataattattgggtgagagtaatagtccttaaaatattaacctatacacggtagaataaattgataaaatagtcaattttttttattttgaaacttttttttatttctttttaaaaaaaagtgcctatgatcttttagtgtaggttatgaatcaaaacttatactcaatctgtatgtatattatttttaactttttttggtctcgtttattgttttagtttcagcttactaaccaacacctaaagtcattatagttgtcagttatgagccaatgccttagagttagggtagtctttagtgtcgtttttttttcaaaaaaaaaaaaaaaactagtcccttgaaccgataccaaaattctatcttgtagtagttcttcaacctaaatgaaccccaaaacccaactttccaaccatataaatccaaaacccagcaatctctcttcctctctcgggctcacaatcctctctcgtctctctctctttgatgtaaaagaataccgagccacaaggccccatctccgaccgtcaatgattgaagttgatgggtgttgcaactaatttttgaggacgacagagttgacctcaatctccaccaggtcgatagcaacggtgggcacctcgtcgatcagcttctgggattttattcactttggagagaccactttcattctcatttacctgttcttcttccatactctttgaattttttggtgaagaagcaccaataatttatgacctttcatttgcaaactcttcttgtgacagactcaacctcaatagactcagactcggcaacaaaacttgtatcactttcatcttgacctcagaattggatggaaatggaaactaggtaaccaatggtagaaccctagtgggttcgaaatggatgactcacttctcaaattaaagattttaaaagcgaacaggtggaatatgatatgggtattgttgtattgaagagttattaaaactccaacgattagcacgatttttttctatttttcagatctaaatttgtgtttttttccttttaaatttagatgaaatattggtggtggtggtggtagagtagtgatgataatgatggtggtaatggtatagtggtgatgatagtgatggtggtattggtagtgtggtggtggtaatagtggtggttgtggtgtgacggtggtggtgttaataattttggtgtggtggttaaggtgataatggtggtggttgttgggagaagtgtgactatcatcgaaggttgaagaaggaagaaaaaaaatataagaagaaaattcttttattttaaattttaaatgatttttataatatttaaataattaatatggtgtggaccattaaaaatttgtcatgtgtacatttgtatatacttgagaagtcactcttaagagtgttaatccgatttaatctgtactattttgctcgtagtgcgtttgattatattttagatccaatctattccgcacaagagctcaaattaaatcggttattttagattggttactttttaatattaaattatttaatatttataaaatataaattattttcacataaccaacaataaaataaaacatattattcttatttcatgtctgcagcaataaattttaataaataaaaaaaaattcaagaaagacaaaaatatatatagaaagaaaaattttgtttattttagattatatttttatatatatacataaatatatgtttgatatattaaattttgaaacatatattcaccataagttttttaaattattattttttttctttaaaatataaaaatacatttatactattttagatatatataaataggtgtagattggattagatcggttacttttacatataaatcaacatccaatccgcaagtgtcaattttagattttacaatccaatccaatcggcacaagtacgaatattcgtactttgtggattgaattaagttaaatcgtacgaattagattgaatcgtgcagattgaattagaatgcgtattttatgaacacccctcactcgagtacttacgagaaggttttcgacaaaaagtaaaaaagcaaaacaaaagtaagattttaagagttttaccactaaagctttatttattgaattaagtgtcacaaattgtataatt

SEQ ID NO: 224254 - DNA, 1608 bp, Cannabis indica
ttgtgtgagatgaatctgtagtctaagggtgatggagttcagtaacttgcctcagagacatttggttgagagacttgattgtctcgattgtatatctgagatggattggtctcagtaatgatggatggattttgattttttctgagatggatgagtctcagttatgttggagaaaaaattgtctatgtgataggtttgagagacatggccaaaaggataaatattttcatagaagagaacatctcttgaatgaaatattttcttggtttgaaggtctagtaaagtgcaggccttcatgttgggagggtaaccaatgaaggcacatgctctgggttgaggggacaatttggttgttgtagtaacacgtgaggcatatgcaaggcaaccaaagtttcaaaggtgtgaatattgaggtggtttgttatggagtagttgataggatgcttgattttctaataggacaaatggagtcctatttaaaagataaacaacaatagaaaccataaagcaccaatattgcagtagtaaattggattggaatgcgagcttgagcaacattgagtatgtgctgatgttttctttcaaccacgacattttgttgtggtcttcctacacatgaggtgtagtgtatcactccttttgtagcatagaaagtggtgagagtgagttcttcagcattgtctgtgcgaattgcttttatgtctgatttaagtagtagcgattgccaagtattttagctatcccaatcctcgatgtcagtaaagggtcctggatatcgcaactattatagtattaaacaaaaatgtagtgttggtgttgtgtgtgagtgcactgacagaaatgagattatacttaaagtcaggtacaaacaaaacattattgagtgtaatgtgtgaattaataataacagtgtcaattttgtgaattttggccttggaactagtaggtagttgaacaaaaaaaccagtagggttagattgaatgggagaaaagaattcaaggtgacaacacacatggtgtgtggcaccactatccataatccacgagaaagggttagatatacttgaaaaattgttcacaacaaccttgtcagtagatgtggaggcatctgtgggctgcaattgttgtgctaacattgaaatgagttgttggcactgagctggtgtgagttgagtttgagagatcaggtgtagtggaggtgacttttgaagcatgtggattggtgttggatgtggtaccagcatcagattttctggtattggtggagtcctctgattttcgattgccatagccaaggggaaacccgattgggaaataacacttatctttattgtaatggccagatttttggcaattggtacagtgtggtcttggtctcttgtttttggatactgcatttgctgcaggagtaggttcttggggaatagaagaacttgaggtagccattgatggaatcatgcgatggcctaatgatctttgtctttcttggttgattgccatagaaaagactttattcagaggagggcatggatcaagaagcaagattttatcacgcacgacctgatatgagtcatttagacccttgagaaattgaagcacttgatcatg

SEQ ID NO: 224255 - DNA, 1497 bp, Cannabis indica
tgagagagtagtacatatatttggtttgcctaaaaaaaatagtggacgcacctgcaaaaatataggggaatagttgtttgaattctgtgcatgagtagaactaggattttgggatgtatgcgatccagctgattgacgcatcggtgatgatggaaaagcactagcagaagactgcctagataattcataaggtatgttgccacccccagatactgttggcatgcacacgcgatctgaaaatggatgaccaaacgctagccaatctttttcaatgagtgcctagcaaaagcatatattgcaaaatttaggtaaaattgtaatgttctcttttttcttgaaatgcagcagcaaacaaataaaatttaaaacaaagaccaagatgatagtgtaattctgatacagacatcttcttatcaagtcttcaacatatcaatcaaatgtaatgaaacctttatagatacatcaatgtcatagaacttcaaaagcagtggcgaacacaatgagaaaattaagggggcaaaaagcaaccacaataaaaacatcacacaaaataatttttcaagtaattcttcattcaggagatttgtgcaagtgagttgcgataataaacgagctaatgttacatcataaaacttgaggtcaaagcagaacatactacaactgaattaatctattgttgctcagctaatacctgaaaccccgtgaatgtccgatagaatggatcaagcaacaaactggccagtgaaatcagctgagtggttctatcccagccatcactacaaaaatgtgtcatgtgaacctccatatggaataaagttataacaccaaagcagaacagtcaccattatgaatgaaatgacttcaaaaggacctcacctgcaatgaacaagcactgatgccgattctaaagcaacccgtgcagcaatccaagctgaaccagccaagatactttgtatatgtattaaccaaccactatcaccaagagttgaaactgaagcagacatactgctgagattacctccaccccaggtccatccaccatgtctctgttaatagatatagtacaaaatattcttacttctagcataagtttagtaagaaggcgtaaagaaagtttgcctattcataattgtttgaacccattcgcaacatatagtttcatttttaaatttaattttgaccaataggtttttactttggtgcttcaaaagctatatttgaacaaatgataccattgtatcatgatactagtctaccaaggcatttgtacatgaaaaaaaaaaggaataacacgatagaacaccacaacatagttaaaatacaagttatgagttctaagttcaaattttacaattgatcatacttttaatagtaaattgaatgtcacgataattgaaaaagtagtatattctatctcaaaactgaccaggaatgatgacattccatctgatgaagttgcaccatatgtatctaagtagtctctaagccgagcaaaac

SEQ ID NO: 224256 - DNA, 2166 bp, Cannabis indica
acttagcctgcgaacccacaaggcatgtaggttagatcgtagtcaaaacattcccaagactgcatattacagattttgaacaacttacaacacatttattaaagtatagcttaaataattttctaataggtaaaagcttatggaactgtgagtttagctcatctctaaccttgattgtacatattttgacggtcttcagtgaacaaccaggtgactttgatactaaaattgtaacactcaaacgtgaaaacatttctatttggatgtagacttatttatataaccatttataactttatatagacatatacatgaaaatataagtcgggatcccgagtgttaaaaaccacatatggaaaatacaaaatatacttataatgtcaattttttttaacatagggtgatatcataaactaaatccaaaacacaacatgatcgaaatcctccaggttgcactgttgcgatatgcacaatcattgtcgaccctccaactcactaatcctcctctttagcctttcctttacctacacagggtagcaaactgatgagtcagtggactcagtaagatatgcataaaatatatataaaaaattcaatatcgacttgtacttaggccctactaagccttagcacaaggcttaccaaatggtcaagaacattcttaacagaagtaggatcgctgtaccacatgcactgaagtaccatctccgtactagtgttggtagggccaaattgtacttctgggtgctactgggtgttgaaccacatgcactccgtacccacttatactcgtgctagtaacacaataacttacccttaaacacgatacactgtactaacacactcagtactacaattattctagtgttagtagtgtaaacaatataaacatgcataaattcacacatatacatactttatgctaatcttaccttgtttccaaatttaggtgtgccggtcaacttgagtggaatagcatctcgacaccttacacggacctatatcaaaatattcataaatatgatgagagacacgctaacatactttttggggacttaaaatcaaaactagaagtttccctatcgattggtaacatggaaatatcctaactatagggttcgcaaaattgcttcgaccagcagaccggttctgtggggttttttaaggtctaaccgaaattttggttcctacaggttccactgaaccagtcgaccggttcagtgtaggaaacaccaaaaacactcccaacacctcaaatcgaccccaaattgctcaaaaacttccggaatacctacttataccacaataaactcaattcaagcaatgacactcaataattagctcaaaaatgcaaaaaactattagacagaaaaacttgagttcttaaacataaaatttgctcaaacaccacaataatcaataaacttagctcaattcaactcaaacaaccttaatttaacctcagatcataaattcaaacatcaataaacaacacagaaccctgactctaacaattcatacactaaagcctaacttgaacctaggaaatcaaagggaaagagactaagaggttataccttgaactgcaacacccaaatcctactagaattctctgaaatgcagcagaaaaatccacacccctatttggttcttgaagattcgagagaaagggagagagagtgtgttctttgttttttataagtgataccttgtaaaagattaatatcaattatcaacctattttaataaaactagaatactaatgtccacaaaagacaaaaatgtcccatagcaaaaagaccaatatggccccctaacacagccaaaaacatatttgctttctaggggtaaattggtcatttcaaaaaatttggctagtcccgacacttccaatgcctaaccatgttgccccactattattaaaattataaactatatgaaaacgtgactctctaatggcccaacgtcgcgttccactgttaccgaacattaacacagaaaataagaaattcacatatatcataaataacacattcagaattcaaataaatctctataaatgggtaaatcatagttaataatctaatttcataatttaaccccatttgttaatccatcacataaaaattaagcggtctttacagctaccacttgattatccttgag

SEQ ID NO: 224257 - DNA, 1811 bp, Cannabis indica
tatatttcttaagtgttttataaatcttaacacgatcaacttcatgaccagctccgacctcataatccatcgatgcaactccaacaccactcttggcggttccataagcagctcccatacctgaaaatcacaaggcacgcttaataaaatctagatagatccaaatccaaaagaaccctagatccatatataagaagaagaaaaaagctcaatcccgcaaaattggataagtatgaaactaaaataggtaaaattgaagacgaagaaaagagggataataaaagaaaaacttaaaagaaaaatgctagaggatattcatgatacctagcactcttatgagatgtaatatcattattggtgcaactcaatatcggatcctacttgttttactttaataaatatggagtaatttacggcatgcatacctaagtttaactctcaattgcaaataaataccaagtttaatttttggcggtaataatacttaagttataattttgaaacttttgtaaggtacctgattaaattaattaccacttggcaatccttgattggtccaagtcattaaatttttattattttaaaaaaaaattagttcaaatatacccataagaaaatgagacgtggatataatgacttaacatttaacagttaagtatctacagagttatagaaatataacttaagtattattaccgccaaaaattacacttaggtatttatttgcaactgacagttaaacttaagtatttatggccgcaaattactcataaatattatagaaaatcgattaccaatctatatatctatatatatatataaaggagaagtatgaggcggtgacatgtcactctaaaattactctaaaagcgtctatctattctctccttaattctctcactattgtaattttttattagttttataaatagttgttgattaattctcctatttttagatttttttattaagttaataatattattttattaatttcttaaaaattaaaaatttaaattgaaagaaaaaccatgcacacgtaaatataattatttttattattaagaaacatttaaattgaaaaaaaaaaaccatacacatcacgtaaatattatccttttttattattatcataaatatctattataattaaatatatatacctatttataaatagttgttgattaattttcctatttttatatttttttattaagttaataatattatttattaatttcttaaaaattaaaaatttaaattgaaagaaaaaccatgcagacgtaaatattaattatttttattattaataaacatttaaattgaagaaaaaaaaccatacacatcacgtaaatattattcttttttattattatcataaatatctattactagtgaccacaacaaccggttgttagaaccggtttctgatgaggagattcgtcgcgctctctttcaaatgcatccggataaatctccgggtcctgatggcatgacgccgggtttttatcaaaaatgttggagcactgtaagtaatgatattatcactcttgttaagaacttctttgttgttggttcttttccaagagagttaaatcatactaatattgtgcttattcctaagaaaaaacatctggagtctatgactgatctgcgccctatatctctttgtaatgtgctctataagattattcgaaagtgttagccaaccggtttaaagaggttttgcctgtggtgatctcaagtcatcaaagtgcttttcttccgggtcgcttaatttctgataatattatggttgcttttgagattat

SEQ ID NO: 224258 - DNA, 1877 bp, Cannabis indica
acaaggcctcaatttagcgcttttttcgagccccatcttcctcagtagggctgtgcatgggttgtgttggccgggttgaggctatttttgtgggccaacccaataagatcggcctatgatattctaacccattcattttaagttttatgtataacccaacccaacccaagtcatcatgggttgggttacaacccttactaattttcacaattataaaaaattacaaaatttaaatctgcatatgaacacaagttcatagaaagttcaaacataaggtaaagtcattcaaaacttattacagtcatccaaaatcatgtcttaaaactataaaaaattttccttaataaattacctactagatcaactagatagtgtcataatgactacaaagatgagtaaaataacatctagtatttctattgtcatcaatcaagaatttcaagtcttctcttttggtaattccttgtcctcaagttcattacctacaattcaaaacagaaaattattcaaatttatggacaatctatataaaactactatatatcatctataagtctataactaataaaagaaaaaaaaaaaacaacaaaataacttaaatataattagagaccaaaaaattaataaacaaagtcagaactaatcacacacaaaaaatacaaataatatgttaatcaaatcaaagaataaacaaaattgctaaatcaaataaaaataactatagagcttttcttccttcattggtacttggtagttccaactttcattctttgagtccaatctgaaaaaaaaaaataaacaatataacatacaaacatatcccatgtttatatacaccaaacaaaatatatagaccataataaaaattagtatttttttaacacaaacaaacattacaaagaccagatcagattatgattgatcacatgcagtagcaaataaaattattattattattattcatataaaaaaaaactttaacagattcacttctttttaatcataagcattaggattaagtaacaattaacaacaccacaaattaatgagctcacaatagttttcttttagtaaatattttttttatcacaaataaacaacacaaagaccaaatcagattatacaagaaaacaaactgagatgttgagatttagacctgaatagtgagctatgacacttgacggcggcggtgacaaagacctgagcaaagaaatctgacgacgaactgagtttttttccaccgagccaaaagaaaaagaggaaaaccaaaatgaaattcagatattgatattctttcctccaagtttttacttctatcaaaggaaaaagaaaaaaaaatggagaactttataagaataggcaccgacgacctctgctacagcctaataaacagagtaatcagagatagagggaagaacacggggcggcgcagctgggagacctgggagtgggctatttgcttcttttagggtttttcaatttcaaaaatagtgtgtggctgcacttctagggtttggactaaggagaaaatgagggactaaatactaatgggtatggttgttaaaacttaaaaataatgtatattaatttttttttaatatatcttattgggccggcctgggttgggttgaatgggttagaaaacttccaacccgtgatcaacccaataataacgggttgtaagtttttcaacccaacagaatttcggcccactaaaagagagcatgctcgacccattttcagattgggttggccggtttggtcggcccattgggctaaatgctcacccctattcctcagtgtttccttataaagaatatttactgagctcctgttgtctatcaacaccctcttgatccttttattggtgagttgaa

SEQ ID NO: 224259 - DNA, 1617 bp, Cannabis indica
gaaacagagttttatttagggcataaaatccaacagtatttttttgtatgccttgaactatatagtctcttcagtcacgaagttaatggaaagcaacgcatcaccttatgatgcaccttttttgctcctgaattttttgaagttatccatctagtagtgccacaaactagacatgaatctttatttgcatgttcattgtaaaataaacagcaattatgcatgcacacatgaattgactcgttccccaaccctaatttcttcaatcttttcttggcatcatagtagtttgatggaattttattttcctttggaaaaggtagttttaataacttcagtaattcatcaaatatgttgttaagaatcttttccctaactttaaaatgcaataactttgccaaaaaattaagagaagatatccaatcacaaccaggatacaactcggcctcaatctcttcaaataatttgtagtgccattgatttgcatcaagattatcatccatttcaaatgatggctaaagaaagtcatccactatcagaatcatatcgtcaatttcaaggtcatcatcaacgccatcatggtcattgactatattagtggcgctagattctgcttccccgtggtaagcccacttctcctaaccagaaaaaaaccccaatcgaatatgtgtgctcttacaacaggtaaagttagaagcctattgttcacacatcttacacaagggtacctaattctaccatcacaatctttacattttgaggccatctctaaaaatgcatttagaccattccaatactgtggacatctacaatttcgcaatatggtctaagacttgtcgattgtcatctaaaattttataaaggcatataagattttatagtttaaagaaaaattgaatgataaaattttatgttattttatgatatcttatgcaattttataatatttttttaaaaaatcatgcattattacttatctagacaaattattattcaccatgtaaaagtttgttagcgcagatttttgttaaccaaatttaagcctcacaaatatgatttaatacagaaaaactatagaaaaataaaaatatgaacacaagatttttacgtggttctgtagtgaaaattctgcatagtctacgaatcaatcttattcagatttctgagtatatttttttctctttggggcctctcccttgttttgatcttatctaccaccttttataattgcagagtggcagttaattacaaagctgaccaaaatacatttacggctattatccctaaaattgtgggatttgattatatatcaagccaaataaatgaggtttttacatagctatgaatatcccacctttattgggccgagatgagcgcataattaaagatatacggtaaaccttatctgatagggatgtctcgctgaggagggagccaagatcactctaatagcgagtagctgcttgtcattttagcttctcgagactaatattgtcttaatcatgatggttatactctctggggtcgagaagatcttcctcgcatgcaaaacatcttttagcgagataatcgtctcgctgtctgttatcttggttcgccatactatctatacttagtttg

SEQ ID NO: 224260 - DNA, 1469 bp, Cannabis indica
acattcacatatatattttatgctatcttacctcatttccatgctcaggtgtgtcggtcagtctgagtggaactacaactcaacgctttacagggccctaaaccacaatatttgaaatttcgatgagagacactaaaatatacctatcggggacttaaaatcaaaattaagaacatccctatcgatggataacatggtaataacctaaacatcacaaaaacagaaaaaactagggttccaaaaatttttccaaccagcagactgatttccaactgaactctggttccctggggaccaactgatcgatcggttgttataggtccccctgaaccggtcgaccaattcaatgctaagaaccttaaaaatgtccccaagacctcaaatcacacccaaacttcttaatattctccagaagacctgtatacactccaacataaccaattcaagcagtagaagacaataaatggctcaaaaaataaaaacaccattagagctcaaagcttgagcttccaaactctaacttcacccaaacatcacaaaattcaaccaactcagcttagaataacctaaataatcacaatctaacctcaaaatttaaaatcaaaccacgccaattcataaaacaacttaaatcctaaaactcatgcatcaagatcaactttaagctaaagaaatcaagaagaaacaagctagagtattataccttttgttaaagcttcaaatcctatctgaactcactgaaatatggtgaacaaaattagaacccttggttggttctaggtgatttgagagagaaggagagagcttgggagaagaaggtgactttctaggtttttttcaataatgtggcatatatcttatatttcaaaataaataaaagaattcagattattatctaatatctaacctcacaaaatgacaaaagtctcatccaacaaaattaccatttgatccctagtcaaaactcaaaggttaagtgacaaccaagggtagtttggtcattttaaattctgccaattagaaaatgagaaattcacatatacaacataattaatacatgttgaaattaaataaatctccacaatcatgcaaatcgtaattaataattaaatcttataaataaaacctaattttttaataacccaatatattaaacttaaacggtctttacacatgaccagtcgtcatctcgcgtccctagatttcacgcaccttcccaaggcacgtaacacccacgaacaaaaagattcataacatgtgtgctctactaggagaaatgaaaggtttgcaggctttcgcaacctattgccttggaattttaaaaggccaaactcgttcacaatcccacattcaatagtgaatctggaaggaagttgcaagtctccgtgactcttgagccctaaagacttgggagtaaatgttatctgtgtttctggattaatgacacgtgtactttaatgcataaaatt

SEQ ID NO: 224261 - DNA, 906 bp, Cannabis indica
ttttttttttttgaataatttcagaaaaacacaaaatcaacccaaaaaaatttttagaaaaatacggtttgcacggagtttttaatatttttacgattttttagattttatttatataaaatacggtcttttggtgtatttttatgttatattcttgttattttgttgttaattttttgttatttgtatattttttttatttactttgttgttattttgatgttgttttcttgttattctcatgtgattttcttgtgtttttatagaataccataaatatatatataaaattatgtaataataccttgttttttttttaaatatatatgagtttaccttatttgtgtaaaacttatttaaaaataccatatttatatttatgtaactatgtttaatttagggctattttttatttttgcattacattcaaatagtttgcattggcgtttggttagatataataaaatagaatagaatagaaataaaataatttttattctattttttatttggttgcattttaaattctaatagaatgctttttccactgttttgatagaatgactattttattaaaatggaaggaaagatcattccaatgtaatgtatataaaaaataatgattattttatcaatttcttttatgcattttaaattttattctattctattcttattctcatattttcattcttttcaagtaaacgtcgtttaaatgtattagtattatatatactagaagggtcagtttctaattctatgtttgtttatttatttataataataaaaaaaaaagctttgaggatattttctctgtttgtaattgtctttcgttactactttccaatagctacgtttaatcattcacgttctaacatggaggatcattacacatcgatgacactg

SEQ ID NO: 224262 - DNA, 1845 bp, Cannabis indica
aaaagatcagaaattattttatgatgcatggttcatattattactttcatgatgggttcatttggtacgccgtattacaccatattgtattgtatagtattatattgaattgtatttatataatattttcatgtaacactatatgtagtattgactgttatgggcaaccaaatatacaatattgtagtataaattaaaggttaacatagtattatataaaaatatggtatataattcaattcaatataatacaatacaatacgacctaatacaacttaccaaacgagccctgtatgtttaatatataaattctattatatctttaacttataattattcatgattatagtgttgtctacacagtggaaaataatatgattatatgctttaaactatttagtctcacaatttatcagtacactagatttacactgacgtgataatcaacgatgtggtttacttacacttgtataagtggagtgttctttccaagtcattagcaaagtaaactaggattggatgtatcagctatacatcgaactggactgatattgataatagaaaagatatcataaacttattgttatatgtcttttttaagtcaaatgtcacttagctgatcttaggtcaactgatctcaatcctaagatggttaagttctatcttaattgtactatatgggttctctgacttattcattacagctgaccaataggatcgacacaatacttacatcttgagaactctgtagttcaattgagtgggaacattaatcatagatttagaatctatagcttctataaaaagtgaaacaatagttttctttggcttaacgcgataaatgatagagcactcatttcagtaattatattagtttcctgaaatatcatttacaagtacctaagtgttttaagtataaaatatattaaagggtaaaacggtaaatttattcctattcaatgtaaatcgtctatagaggatcattgactatttagattgtaacaatggataattcaaagcgtatctatatttggtatatagagtgttctatgtaattaggagtgcatttctgaaactatagtggagtcaaaaggaattaataagttaagaaatttaccaattacttggtaaatttcagatctacttattatgagcttggttacataggcccatggcccccgcattgtctggaataatatcatcttgtagactaggggtggcgaaacgagtttcaacacggcacacgaacacgaacactacactaattttatgggttagggtcgaaaaaattagatgcaggtcgaaaataagttgacatgacttgatacaaaataaaaacaggtgaaacacgatacgacccgcttaacacgaattcgacacgtttgacatagttttttaaatacaataaaataaaaagttattaacaataatgtaattatatataaaaatatatatatttagtaagtcttaaaaaaatttaattaaattttctttaatatgaaaaagaaaatattttaaaatttttaattttgattatatatataacaaaatatttacacaatcatttttttctacaattccagttttaataatagcaaaacggatcacagtgggtcgacatgaacacgtcacgattttttatgggtctgcttgttgaaaaattagacacaagtcaaaaaaggggtagacacgcttgacacaaaatataaaagcgggtcatataaaatatgacacgaacacgacacgatgacacattttaccactcctattgtagacttaactaaatgatttaataagtcaattagaattcgaaaaaaaaaaaagactaagtcttatttgagaatt

SEQ ID NO: 224263 - DNA, 1169 bp, Cannabis indica
aatcatgtgttgggtaacattgctcatactccttcagtcgatgagaagaataagcaatgaccctgttggcctgcattaggacacacctgaaaccctgtctggatacatcacagtaaaccataaacttttctttatctgatggtaaggctaacactagtgttgtgattagtcgcttttttcagttcatggaaattggcttaacacttataagactacacaaaccattggttcttcttagttaattttgtcaatggcatggagatcttagaaaatccctctacgaaatgacgataatatccagctaaaacaatcaagcttctaacctcaaaaactatctttggtctcatctaatctccaactaattcaatctttcgttgatcgaccataataccatcttcactgacaatatgacctagaaaggataattgggataaccaaaactcacacttcttaaacttagcataaagtttgttttctctaagtcgttgtaagaccgttccgagatgttgctcatgttctgctttcgactgagagtatacaaggatgttattaataaaaactatgacacagttatcgagaaaatccttgaacactctattcataagatccataaaggctatcagagaattagtcaatccaaatgacatcactaaaaactcataaagtccgtaccttgtacgaaacacagtcttcataatgctttccacttggattcttaactgatgataactcgagcaaagattgatcttatagaagactgtcttcccttgaagttgatcaaacaagtcatcaattattggtaatcgatacttgttcttcactataagcttattcaactccttataattgatgcgaattcgaggggatccatctttcttcttgaaaaataaaactggagctccccaaaaagatacagtgggataggtaaacccaatgtctagcatcccctgaagttaactcccaccataccaggtgttacagtgagaactcgtcagctaacttgtgggcaaaaaatcaactttacgcttcaagttcagaaatgagatgaagaaaaagataaaatgtaaactcaaattgctatgttgaaatggagagagtaactgagaaaattttattgcattcaatatggttttacaagtatgattttccaaccccctctcacatctgag

SEQ ID NO: 224264 - DNA, 1315 bp, Cannabis indica
aaaaaaaaaaaaaaaaagtaggcttccttacgaaaacatcaaattttatttatgaaaatgatgaattgaagagtggtagtagagcacatttactaatcaagctcgtcttccttgtgagtctgaatgacaacatcagagagaggcaaagcaacacatgtgagaacccaaccctcagcaatttgatcatcatcaaggaagctattgtctgactggtccactttaccttcaaccacctttccaacgcatgaggagcaagccccggcccggcatgagtatggcaagtctaatccctcttcttcggctctgtccaacacgtacgtgtcttccgggcacttgatttccttatccccatctggtgtaatcagcttcactttgtatgtagccatggctgtcacacgccctcctcggctagcctttaggccgccgaaaagggattgtcccacgttcggaaccgcccttagggaggttgccgttggctgtctccttacaaaggaggtgttcatcatggtagctgctgctgctgttgttgaggccatctttttggttgatagtcttctctctttggtgttttggtggccaaaaatagaatgtgtcaaagtttttgagtgaggcttgtggatgttgtgtggcaatgataggagagagtgtgcactggcatggattctatctgccacgtggcagcatgctagtggtttttatctttatctagtatcgattatcatccactgaataatggatatcacatgtatcaatcgtttattacattatcaactcaacaagatgtttttatcaacttgggtaataataacagttatttcagatagatgactgaatctcaattgcttggacaaataaaaacccaaccaaatattttaggaaaaagggacaaaaattactcatcttcattttcttttttctttaccagtaatgttatgaaaacaacaaataaaaattactctccccaattgacatgccaatttaaaagatgttatagagaaacagagaacctcccaacgagatgaggtatcacattatttatctcctaaaatcttagaaagtgcaaaaataaccaaccatatatcctagcacaactaaattaaattaaaaatgaacaaaattgtctaaagatgaggttttaaatgggtgcaaagaatttagaagaggtacaaaagaataataattgcacaaagtaacttacattgacacagaagcacaaaaattcatttggatgtcattctctcccccttttaagttcatacattcctaagaaaagcatatagcaaaacaagagtatcgggtagagagactagagaga

SEQ ID NO: 224265 - DNA, 1407 bp, Cannabis indica
tatgcaattcgtagtgatttgattagcttcaactctgattccaagattgttgcctggattttttcttcagctactggttctatttcgacttttgttagtaaaagttctttcaatttgctactaattatatctgttttttcctttggcacgctagaaatcaatttttttttcattagggatcttcccccttaccttatgcgattattgcgaacatgttggctactgttaatgaatactgcaggggtgtggagagacaggggtcttgttctaatgatcgtctggttgaatggctgacaacccatctcgttttgaaaaacttaatttctatgaaatgcggctattcgtggtgatatgacctttactgttactatggtatataacaatgatggcgactttattgatattgtgacggctaaagtcaaatgtggttcaacatttgaagttgaatgttggggctttttgccatgctttctccctgtgtgtgttgatgaattgtaaggaggccaattttttctcagattgttttaatatggttcatggagaaactcttctatcttttcctataaacttttttttttctaacatccctcctagaaacttcaaccttttttgtatttattttcttgtttgaactttgatgttaagagctgtgtgttttggatccatcgtaaggataattatgttgctcacaatatggcaccttgggctgcgtcccatgatgttgctcgatttctttttgaaggggaattagcaccctttcttgctactaatgactgatcttgttcttgatcttgcctcctttatttggttttatgaagttttgatttcagcaaaaaaaatcattagagctcatttggtaggttgtaaaagggtcgtattagattaaataacaaataacactatgtttggataaaacattgtattgtaccaattattatgaccataaattttaatataatgtgagttgtattatttaatacataacaaatgacttgtattagcttgtattataatgtttacaaaagggtatgtggtcgatgccaaccccaacctcgaacccatagcctgactcggacccggacctgaaccccgactccagacccaggactccaactcagactcgaacttggggtctgggtccatggtcagggtacaagtctgggtttaggtttgggacctgagtccgggttcggggttcagagtttgagtctgggtcaatggtcagggtatggatccgggtttgaggttcgggaccaggttggggtctaggattcgggtctgagtccagggtccaggtgtgggtccagagtaggacatgagctcgggtcccaaacctattataacacatacccacaccctgaccataaacctggaccccaaaccctgaacctagacttgagtcccaaa

SEQ ID NO: 224266 - DNA, 1309 bp, Cannabis indica
ttgcgtagtattgctagtccggaaccatggatagtattcggtgatttcaacgatattctctttaaagaagaaagaattggggatagagctaagataggaaactccacgactttctttgattgtgtgaatgattgccaactgactgatataaagagtagtggttgcttctttacttggaacaacaaacaataatctaaagatagaatctattctaagattgatagagtcatggctaatcaatcttggatggatatgtttgagagggctgaagcagtgtttctcacagaaggggcatttgatcatactcctgcagtattgaacacttacaagatttcccaagtggcaaaaaaccattcaaatattttcgcatgtggacttcttatccgagttatcatgtggaagtaaagaagatctgggataaaaaaataacaggcacaagtatgtactaggtaatatcaaaacttaaagctctgaaggttttctttagaaatctgaacaaggaacactactcggacatccatatagcagagaaaaaagcaaggctggaacttgaaaatgcacaaaccttgttacaccagaacccgatgaatgagcagctgcaataccaggaaaaataagtaagagatcgatttatcaagatacacaaagattactgttcgtttttacaacagaaatctaggctacattggctcaaagagggtgatgagaattcagccctttttcattcgagcatcagagaaagaagacaacacaataacattctctctatcgcggatgtgaatggattcggacatgaagagccagagaacattacaaaagctttcttagatttctataaagaattattgggatctaagatggtgaatagagtgcctgtgaatatcagtttagtcagaaaaggagcttgtgttactgaatatcatagccagatcctgactgctgcatacacaatggaggagctgaaagaagctgtctttggcataccagcagtaaaggccccggggccagatgggtacaacagctcgttttatcaggataattgggacttagtcaaacaagatgtctttgaagcagtaacctcgtttctccattcgggtcaattactcaaggagctgaactcgacgatcataaaccttgtaccaaagagtaaatgcccgaatgttgtaagtgattatcgtccaatagcttgttgtaatgtactctacaaggttgcaactaaaatgatttgtagcaggttgaaactcatattgccagatcttgtagctcaaaatcaaggagggtttgtcaaagggcggttcattgctcacaa

SEQ ID NO: 224267 - DNA, 1051 bp, Cannabis indica
taaaataatttccaacagggagagatgtcagaaagattatttagaacattgaggacagcttcagtgacatctttaccaacaacattccagtttttttgatagaattggttattaaaaccatctatacctggagctttgtcaggacccatttgaaacagagctttttccacctcagagggggagaaagcttcttcaagcagatgataatgcgatggctcaatcagaggaaaaggatcagaaagcgcagcctcaatatccagatcctgggggtgctgagaagtgaacaggcttgagtaatacgattggatgagagaaaggatggactcagaatcttgaaaaacagttccatcctcagaagtgagggaatcaattcgattaattctcttcctgttagaagcaaacttatggaaaaaacgagtgttcttatcccccaaatagagccattgtattcgagatcgttgcctccaataagtttcctcttttagcaagagagagtcaaggtttgcttggagagccttttgtcgagaataggaatctgaagacgtgtcttcagccttcctagcctgttcaagggcttgttgagcttgcttaatccttttctaaaacccaaagaaggctttgtgtttccaatttgaaagaaaggtagaacaagtggattgctttcgcagaagagttgaggaagggtcatcactaggaaagttagaagaccaagcttctaaaatgacatcgttccaatgtggctcagaaagccaaacattttcgaaaagaaagcgtttatctttttcctgggaaattgagaatgagggtttggattgagggagagttgtatggctcgatggtcagagccaaagaaatcaaggtgatgtaaggtgctgtttggatgctggcagtgccagatgctgttgccaacagccgaatcaagacgttccagggttcttcgattgccttggctgttgttggtccaagttagacgaggatcaactggatgcaaagcttggaaatgaaatttgttcataaaagtgcggaatagaggggaggggccattgcctag

SEQ ID NO: 224268 - DNA, 1907 bp, Cannabis indica
tattacctgattaacctataataaaccctaattatttgctattaggcttatcaggatattacagtttctgactctcctaggaatgcatattttagatctttgggtaaaacctttagatctaactttggtggttcaaggagtgactgtgattctaactagagaaaaggttcaattgattcaactttagtgttccactctttcgtgtttattaatggtgtagactctaacaaggaatttacactatcaaaagaattttcaaaattcataccaaaatgacctggacaattttcaaaagaactatatttattcagcatgaaatcatgtgtgacggaattaaataaaacttacctcatatacatcctcacattcaacaaatttattaacaacattaaaaatattcaactcaatagtcatatttctaaataataatttaagaacaccattacgatagtcgatgattgcatttgatgtggctaaaaatggtctacccaaatgatgggaatttgagaacttatgtcttcaacaaaatgagtatcaagaacaatgaaatcaacagaaaaataaaatttatctacctttatcaaaatatcttctatgacacctctaggaattttcaaggaacgatcagctaactgaagtgtcatagatgttggcttcagtttccttagaccaagttgcttataaacaaaataaggcaacaaataaaaactagctcctaaatcaagtaaagctttattaatcacatgatcaccaataatacatggaattgtgggacaccctagatctttgtgtttaacaagacttttatattgaattatagagatgacttgtttcgttaaaaatgcattttcagaatattggtgtttctttttacggtacacaaatctttcacgaatttagagtaggcaagtatttgcttaatgccatctaagaaagagatatgtatacttactttcttggatgcctttaagatgtcaccatactgactacctcttttgatcgggatcaatatttgtgggaatggaacttttggaatgaacgacaaagtttgacttgattgttcaaccgagtctttggaatatgaactttcagactgactcttttcattttctttcaatgagtctttgttcatttcagtatcaggttgaggtacgtaattaggttttttaataatttttcccgacctcaggatagaaattgatttagcttctttagtaggtctagatttacttacctcgtactgactctttggattgggaatgggttgtcaggaaagttttccctttcagctatggcagtagcaagctgacccatttgagtttaaagctttaacaggaattgagaagttgtgtgtaaagcttgttgggtggtttgcatgaactattgtagggtatcctctaacgatagttttctttgttgttgaggatatggcatattaggttgggcatgactctgattgggcgtgttgtacaggtgcccttggttcattggagcctggttctgtctcgatgaaaaatttggataattactcctatttggattgtaggattgagaatatgggctatcagatgatttctcataagtttgaagagtgtttacttctttagagaatgaatcttggtatataggtaatgatggacatgactaggcactatgacttgaactatagcataaggaacaaactttattcctatgtatagaagtattcatggactgacttaatgacatagcttcaactctcctagttagatttttaaatgaagttttcatatccacatcatctttgacattgtaaattctacctctcttaggtgtgttggaagctttcgatctaggatatttaaaattctactgtcagggctgttggaattatattttactaggaacttagatctactcacaagtat

SEQ ID NO: 224269 - DNA, 1284 bp, Cannabis indica
gtgtgtggtggatcgatttagaagacactggtgtgagtctaaaattacatattcctcatctcatcaactggattaaggaatacaaaatacgaaaagttttaaggataccctaataggcttcaagatgtataatctaaacttattatttttattgttttgatttattttatacaaatctgtagatcctatgggtatggtacaatgataatcagatgatacgaaactcttttgttgcgtacctaatttagtaccataaaaccagcacaatattctttggagaataacaaatatattctccccacacttcttttctcaccatcattcaaagttttctcatttggaaacaactccttaagaattttagaacaatgaggctcttctttgattacctcaagacatggaatttttatctcaattttgggaagagttttagggatctccttgatgggatcctctttattggatttttttcaatctacttggaaaaggtggaggagtgacataagttgatacaattagtttgtatggattttaaatgatggtggaccaactaaagtaggagattcaacctttggtggagatgatccttgaagagataaattgttgactcctttagttggaatcaacttatttacttcttgttgtggtggtaattcaagttgtgtacccctttgaagtgttatggcctttaaattatccattgggttactctctatttgtgctactaaagtatttgaactttgaattttgtacccactcctagatatttctattggctccgtaagattctctatcttttgtagagattgttgaaagcttgcatagtttcatgaaagctttacggaaactgtaaggtattttgttgaatctacaagttattagctgctatcttttcaatcagctcaacaatagttgatttttcactatatggcagaataggagtatctgttgaaaataagacacatagttttgagtgtatgtgtgagcttccagctaaaattgaatggtgttactcgccggagcctctatcaaatcttcagtagatggaccttgattatgtggttgtgaaagaggattgtagtaatttggcttaacatattgattaattttgccatataatgtattagaatgatcccccattgtgatgtgtaactatcatagtagggatcacattgatagacttgtggcgagatatattatggatcattatactgttgataatacatcaccatgtttcagcacaagatctgaaattgaaaccacaactagaagaacaaattagta

SEQ ID NO: 224270 - DNA, 2110 bp, Cannabis indica
aaaaaatataattttttttacaaaaaattgtgccttatggaattatcccataaaaataacaatataattatctattaaaaagtgcgagtactcaacctaatctaaaatagtgagtattcaaatgagacaacacagacaaattggaaaaactgataaacacaatgaacacgaagaagtatagtggtttagtcagatcatggtctgcttagtccactgttgcaaggatttctgtcttgttcttattcatactggatcactcctttatatacaaagcaagtgtccttttgattatacaaaacttaattattgaaccattttacattgaatatcaacattaaatataagaaaacgtgaatggaataaatacaaaacaattttaatttgttttactaaatacaacaacgtacgcaatcttcatagtgcgagttgtctattcatatactagcataagctcgcaggcttagggtgtgttcctgttaacacaagactaatgagtcttgtgttaaggtatctacgtcctaattgagtcgcgtatacagataccttgttagcgtcgacaactcaagacgtgcgagtcgggtcatcgagcacgttaggtcattcggaccaactcgctaagtaaagagtcaatctttactaagtcgcaggagaagtcttcatagacatcgcatatatattggtatatgcaagacttgaacatttccttcttggtcttacatcatgcgaggcgtaataatgcgactagactctgtcaaggtcacatcatctcgctgagcttggttcaggcgaggtttattcttgagaggccctcatctgatagctcagcaaccctcgagtgatgtgagtccatgtgtcattcttatgggagcccaatctcgagtttctaggtgaaaaattcacaatataacacatgcccctggtttcgcgattgacagccatgtcatgagagaaactataagagagaggcagatgagtggttgtcacgagatggtgactcttggttgtcttgtcgagggtttcgaaaagatggttgtaattattattttatttctttgaggtgccacatcattagaacccttcgaggtatgtgcaggcgtcttcactggtaacttttggattgagagaccttaggcattcctttaccacgtgtctccatcccaataaatgagggataccggtatttaaggccccatgatacaaaataatccttgatcatttccctctcatttccatctctccccttcccttactcaattttcaaattctcaaaattcctcagaaattttgaatttcttttaactgaaaacgattcgaaggtttcactacttacagatcatccaggaagaactgtatttcaaggttagtgatttaccttttctgtaaccattttctttttcttaagaattcgtatgcgttctgtgtttttaggggtagaaaatgcatgaaacaataggatttgctacttgcttttcgtagtttaggcaaaatactgtgtttttttggaaaataaatgcctgaaacttaaatactcgtgggtttcaggaagaacacttcaaatattcgcgagttttaagaagaacaccttgaatactcgcaagttttccttcaaatattcgaatgctcaaaataaccttatctaaccaatagctaaactttgtgaccccatttttttagagtttttaactcttatgcctttttttttagcttttagtttatatgtattttttctatgaaaactatctaagttcttgaaatggtaggtgtgtcacatcaacttaatgttcatgcaatcatcgcatgccccttgagatactgcaaaacgtgccagccatttcttgagacatacggctagtttttatttttctcagattttatttatttgttggaactgactagattctcgaaatggtgggtgtttctccgtgaattaatgttcatgtattgatatgacccttatgacactgagaaacacctagccatttctagagatacatggccagttttaaatttttttataacgcgggtgagggcacttaactcattcaaattgcactcacacaacactgaaaagattttctatctttcagatgagcgacttgtcagatagcca

SEQ ID NO: 224271 - DNA, 1589 bp, Cannabis indica
agatgggatagcaccgggccccccctacttagcttaattccatggatagctcccttcccaatagcttcttctaccagcctagagagcacatccgctgcacagatgaacaggtagggagataacgggtccccctggcggacaccacacgagggtaggatctttcctaccggaccaccattaagacaaatattgagggaagcggtggagatacactgagagacccaactgcaaaacttttgagggaatccgaaacacccaaggacatgatcgataaacttccaacttagcctatcataggctttaaccaggtcaatctttattgcaaaaaaaccctcttttcctcttttcctattgaacgagtggatgatctcttgaaccaacacattattatcttgaatattcctacctgggacaaaagcagcttgtgttggacaaatgagcgacgggaggataggcttaattctatttgcaatgattttggaaatgaccttatacatcacattgcaaagagagatgggcctaaattgattcggtcttttcgggttctgcaccttaggaatcaagacaacattcgtggaattcacacccttgtgcattctacctctttcaaagaaatcagcgacagcatcacagaaatcctctccaacagactcccaatagtgtttgaagaacagaacagacatgccatcaggtccaggggctttatgattgctcatagcgaacagagttcttttaatttctagccgggaggggcattccaccaccctaacctggtcctcaagagaaatcctttccctaaaaaggtgaccacaatccagcggcctatcaaagttagctccagtaaaaatattcgtaaagaaatccaggaattcctgacctattagatctcgatcatttagccagacattatgtttgttcaagatgcagtctatggaattccttcttcctctaatagcagcagatagaaagaagaatttggagcatttatctccatccttgagccactcaattctcgccctttgtttccagtaaacagcttttctggttcttgcttcattcagattccgacgaatgtcacactctaatctccagtctctagagccagcgggcaatgactggactctatcaagtttttcctccaaatcttttataacctcatcaattttaccaaattgcgttcgcttccactgaaggagcgccaccctggtagcaccaatctttttaaagactcgggcgggggcccaaagatggtgcaccgaatcccaggcgttagcaaccacaagcttacttctaccatccctcgtccaattttcctcaaacttgaagcaccttttgaacttgggcacaatcccaaccgtatcaagagacaaaggtctatgatcagaagtactcgtctggattgaacagagaatagctttgggaaacaagtgaagccaggcgtcattcataatgcctttatccagagccgacttcacgtggctgcctcccgagcggtggttgtcccacgtcatcatgtccccttgaatgctcatgttgattagaccacgggactccaccagattagaaatgaacgggataaaggggtctct

SEQ ID NO: 224272 - DNA, 1742 bp, Cannabis indica
taaaactaaaaatttcttctgaaacttgaggcgggcttttcctttagcttggaccgatactaattcgccatttccaactttgagctttaactccctagattaaaataatcctaagtttcaagcaattgcaatgatgaacaaacatggttagtagatccagaatcaataattcaaaaggatttgtgattctctaaaacacatgattcaaaaaccaaagcattaccttcattcgaattatctagaagtttgggacattgttcttcctgatgtcccctcctttcacaatatgaacatttgagggtacgactatctattgtttcaatattttgcagcaatgtcagaagcatcatacttaattactatcttcctttccttgtctacaaatctggaaggaggcctccttgtaggcaaagtctgctcgtaagcatacaattttgcatccagcttatttatgtcggatgagttaaaattgttgatcatataagatacaacaaatgcattatactcaggtggaagactattgagtaagaattgaacatgctgttcttttgacaaagaaattcccagcatttttgctttcatgattttcatattttacactagtatatgtgacctgatgctcttcttaggagacatcttcacatgatgtagttcatttgcaaaggcatgtaaaaagtgagaggaaagaggttcgggatatgggtaagccattttgacactacaaatatcaatgaatagaaataaattatttggttctatgaattcatacacaagttcagaaaataccaagtaagtaaacatgtttgtaaaaataccaaaataaaacatatttaattattttccaaggttttcaacaaactgatacagtgtcccgtttagggagagtcaaagatctcatccattgaatagagtagtcaactcatgtaaaatgctcactaatggtggtttgtgattttggttgtattggggtgttttattgcatatattatgttcattatggtgtaattagtaggtctggaaggtttggtgtgatttggggtcgatttgaggttgtggggtgattttgtgtgtttcctgcactaaactggaattccggttcagggggacttgtaggatctggtcgactggttggtccccgaaaaaccccacagaactggggaactgatctaccggttggggcatttttaggaaccctagtttttcccagttttgcaatatttagggtattgccatgttatccatcgatagggaaacttttagtttcaattttaagtccccgaaaagtgatttagtgtgtcacttatcagttttacgaataatgtgattaaggggcttgtaattcgttgagcagttgttccactcaagttggtcagcacacctaaactcgaaaatgaggtaagattagtatgatgatatgtatatatgcttacatgtttagcttacatgttagttaagcctattagattacattataatagtggtatcagtatgtttagtattacactagatatcgataaatgtatgttggtttactacttgacagcatcacatcggtacgactagcgttatgagtataagctaatattatagtcagtagtattgttgtacgaacgttcttgactcagcaccgtgttggacacagggatagggttatggttgggtgtgtgggcgcctaattataatccaagttatggctatattgttgattatgcttttctaactgtgtctgtcgactcacagat

SEQ ID NO: 224273 - DNA, 1486 bp, Cannabis indica
tatactcctataaataggggcagattccacagaaaaagggatgtaaaattttggagagaaattattattattcaaatgttgtattttgtattaataaagaaaccctaataaaaagaactcgtggagtatgcagattttaactgcaaaaccatgtaaaaatatctagttattaattttttattatttattaatttttgtagaatatttattgctaaaaggctatttaaatgttggttaacgaaaatctgcgttaacagtttggtgctttcattgagagccttagtgataaaactcagaaaaatcgctccttacaaacagaattctatccatattttgatggtcgataacaataaaaatgatggaaatcaacctaaagaaactactcactgccctggaaaagaaccaatggatctcaaagactccataccactggaacatcacgttcaagaagaaacgatggtggtgatagttaaaatccagaaaggaatgaagatacccataatactgctgggtatgtgcctagaagtgaggatgattatgatccaactaggtatgtaccattagtggaactaaaaaatagaaaactccgacaacgttttgccgagtctaaccgacgaaactctgagttagaaagagaggctgcagcggcaagggcggcacaaggaacaaatcctccgaatcaacctgatcctggagtaagaagatcacgaggcagacctcgaggttcaagaactaggagacaggaagcaaaccagggaaattctcaaaacacccaggaagaacaacctgggggtacaagggatgttccaatggataatcagatgaataatcaagagcaacgacgtgacgttcctcaaggatcccaaggatttacaaaccaaaggaacgaataaaatgacataccaaaagcttctcgcatgaatgaggatgcaagacagcctcgacctagggatcagggaatccctcgtggtaacaagaaaaatcctaggactcaacttaagacaagtgggctgccaccgagacaccgtcagcgtccctctcgattagagagggaagatgtatacacatatataaatagagtcacaaccactctcaactcaaaaataaggtgactaatcaaaggacaaaaagactaaaatgcccttacttccccgctaagtaacctcataaccctagggataaaatagtccaatattgttacctcgctaaactctaatattttaaaatcaacttattataataattccattaaaatcatactctaaaatcgatgtatcattttctgcctccgatcgggtccccaagattactaaacctgaaaatatttttattctacgaataacatacatcatacccacatatttcaataaaatctccgtaattaaaaaattacgcttatttattcacttatggcaaaatattctaattcatactaaattaattagtagaatcataatcctactcattgtaccctaattactccata

SEQ ID NO: 224274 - DNA, 1047 bp, Cannabis indica
gagaaaagtaagagccagagaagaaacgagagcaagagcagtaaaaaaatccgaaagaaccaacctggaaactccatgttgattgaaactgcactgaccaatttttcggcgcaggcattgcccttacaacacctgagggcagcaattgcacgaagtaatcgaatttggcttcaaagcctcgaacgatgaggctgaatagaaagccttaatagttggcctcaagttggcgcatggggtacgggctaaccacctaaacatattcagcaattatcaactagtcgtgaatcaagtcctaggtgaacacacagctcgaggtgaaaaatggtggcctacttgagaaaaatcaaaaacttgctaagtcatctcaaaggctataaaattaagtagatccctagagagcagaatactacaatagatgtacttggttgtctgggatgtagcaccattgctgataaagcaaacttggtgcccatacagttcctagaagaacctagcatttttatcccagaagaagttgacaagttgaatgacactcaaaaacagatgtcacctatcacaacttacctccaaactagagccttgcaagaagacaaaaatgaagtgcatgaagggagtagaatgatggcgcgaaccaagaaaattgtacggaaatcttcattgtctgacccacacattgctcgtcttgcaacatttcctagcacagaataagcccggcctgtcacagaagaggaggacacaactggggacgttgaagtccaagagagggaggagcaaggcgaggtccgtcctgctactcctcctaaggctgaaggagatgaagaggagggtgtagctcgggtgctatcgatcggtggctacaatgaggaaggagaacctctgtctgaggctcaggaggtcctagaggccggtgaggactatgttattgaagagtacactggacggccacttcccgttgagggaggcgaaggtcgttcgtaggagagtttgggtgggtcgtctccaccatccgtggtaaccatggcaaagatgaagtaattttctctaatc

SEQ ID NO: 224275 - DNA, 4072 bp, Cannabis indica
aattatcaaataatttaaataattcggaattatagtaaaattgtttgaacagaatttaactctgttctatcaaacacaaaatctgatcgaagaaaaatatactggcaaaagtaaaattgcagaaaataaaatgatacacaaaattttatacgtggtatcaacaactccttcgaatttctcctagtccacaagaccatgcctagtgaatgatatttattagtctcaagcgattacaaaaccaaattgacatatacaaataaagactctacttttgaatctgccacaactattgtaatctatacttttaatcaaatttctgaaataccgagaccttaaactcccttcaaatcgtagcacttgcacactttctcccgaacagtgactcacttgtaatcttctacccaaagaggtgtctaactcgcaatcttcctctcgaaaagtgactaacttgcacttttcctctcaaaaagtgactcacgaacaagacttctccaaagcttgataaacgatatcaaggtgttcaacctacacaatttcaacaaaaaataatacacaataataaaatactaagaatttgttggactcaagttcttcaaataacaatgaaactctctctaaatttaaaagtgattttagaaatgatacaccaagagagataacaataccaacaacctaagtgtgtatgtatacactttagaatccctctaggtcgtggtcagaaaaccaagaaataatcaggtcaacaagtgaaaaatattcccaaacaggaaagtcagaatttgtttaaacaaacagctagttcgttcaaacaggtacattgaacctaggttttcttatttagcaaagtttccataaataaataaggcaactttgacaacctttacacacacaactgtacacgatttcttggttaaaaaattaataaaaatgaaataaatatgattaatgttataaaataatataggatgatataaaatatatatgaagaaaagaagaagaatatgaacagagaaagagaaactaaatgagaatttatcaattgtttattctattaaggtaaacccctatttatacaaaagtatgactaagagaatgagaaactaaatcaatgtaataaagtaaaatacaatcaagcattaatgataataattgatttggtgatttggacatctatatataatatttcataacactccctggacgtctataataactgcctcattaaaaaccttgctgaagaaactcggtcaaaggaaaaagaaggtagtataaattaactcccctcatttaggtatttatggagatcttctaatcgacgaattctaatcttgtatgtcgtcttttcaaatattgatgctggtattaactttgtgaataaggccgcaagattgacacctgattgaatatgttggactccaatatgaattctcttgaaatgtataaagaagaattttggtgaaatgtattttaattctatctccttcattgtaccctccttttagttaagcgatgcaagcagtattatcttcataaagtattgcttatgttgatactttcttattgagtgtaatccatatgtttccctattatctgtattcccagatgaagtgcacgtggcaatcacggaagggtgccacgccagattatgcctggatagtatatagccttcgctcctcagagtcactaaaagcaatatatacttgaagctacccggaggcccttcttgttaggtagaaagaacttcaggattctcattgataaaacttctataaagaaggatcaaaagttatgagtgcttcaggtcagtagccggttagtttcgtcaggagggccttagctatgtattcctggatcctactcgggtgtgtcctatctagagctgcatgcaacggttgtataccttatgacaccaaattagatcttatcccatgcgtcagaccttggtagtgcatgtacatgctctgcagctcctttttgttcaacggttggtctagacaccaactttgcaaggtgaaacatttaggcgacacatgtccttaatcctacgagttggatggcatcaaccaaacaccacacgatgaggatgctccctacctaccaacggtcagattgcatattgtaaatgctagctattgtaatgtggctagtacaaattcctaggtgggtgaagggtatgccctcacccacacatgtgcctacaaatacccccattttttcatgtgcaaagggtgaacaattttcacttacagaacctctaccaaaattcttatgagatttcttcttctccaagagaaagcaaaggaatacagagttaatactcatactgtaaacacttgtaatatttaaacactcgccgacgaggctaatacaactaactcatggactagggatcattaatgcccaaactacgtaaaaaactatttgtctattatttactgcttaatatttccttaggcgcgaattaatccgttttcaaaaatctcaataactagtttggtactttcattgagagctgaagaaagtttactagttgttgcatcacttcaaccatggtgaatacctgaaagaatgtaagcaagaaaactctattggacactgttatggaggaggtagactcatttgcctctggcccccagtcgggcagcataagagaggaagacacgaccaatgctgaaaattgaagggacgacaccgagaaagtgtttgacaaccttcatgatgactagaaccttgaaggcaggaaggaagaatatgatggcaatgactacgtgaaagatgggtactacaaatatggtcattattatgaccacgatctaaacctgctgcgagtgaccaaagagttaaaagctactcatacggagttagaaagatagaggaatctcaccacaaaaaatgaaaagaatgatggaacgcctgcaaaacatgtttgatgacttggcggagtccaacaaggaacctttggtggaggtgatggctgaagagcgtgctcataaacagatggaagtagaaacctcaaattcttgcaaggataaaggtaaaggaaaagtaggtgagcccccacaaaaatttgtccctaaacctactcaaaaatatacgaatctagtcggccaaccctcgaggacacaagaggccaccgatactttcgagcctagatgctcttctgatcttagatgcaaaaccatgccaaggggaaaaaaaaatacaagagtacctatgcctaaagggccaaggaaccatcccagtgattttgtcaatcagaacaaaaggacaaccgtgggacattctgaggatagctggtccaccacagacctccgacaacgattagatgccaagtatgagaagtataatggtgaaaaagcaaggccacatgggggtgaccttaggaaccacttaagtgacaagatgaggggacatgatcttccgaagagtgacacaaagaggttaaaggaacagatagctgctctaaccaaattggtcaaaaaataaagtagagccctctcaaatgcggaagatgaagactcaaaaccttacgcaaggagtatgagagagaccttacttttggaaaactttaaaatggcccacattgggttttatgagggaaggacaaatctgcgaacacatttggcgaagtacaataaaatgatgcaagttgtctgggtccgcgacactggcaagtgcttaagtttttcttaaccttgaccaagtctgtagaagattggtggaaacgactagctgcaggatcgattaatagttaaaagacttacagttaactttctataatagtttattgatgcgcgtgacaaaacatggaagttggttctcttaccaatgtcaaacaacagcataatgagagctataaggttattcaaagaatgatggaggcaactaccaagactaaggttagcgatgacatgaagttgatggccctccaatctgggttaactattggctccctactatgggggagatatgtagaggaaaagaactgaaacattgaatgaatttatggcgaaggtgttggaaatattttacatggatctagatttactaccatgtatgtttcattaacatc

SEQ ID NO: 224276 - DNA, 2544 bp, Cannabis indica
tttcagttattacatagattctaataaaaaaaaaagtaatagcaaaactaccttatccttctattttgttgtagtcgtacccctaagtgataattaagtccaatgagtaccaactcaaaaatatgtagcaatatattattcgatattaaaaacctgtatttttcttatttttttcctacattagttttattattttacctaaattaaaataaaacaactaattaattttattacaataacaactaactttaaagtacattaaatttatacaataacaaaataaatatatataataaacaaaaaaagtatataaataaataaatgtatttataccgagctcggagagagagttagacggacgggaggtggtggtggtccgacgtaagagacagagatgggagggacatcgacgggaggtggtggtggttcaacgtatgcgacgaagaggagagggagaccgacgggaggaggggtgggtggagatcgatggacaagaaagacgagaagaaagggagatcgagagagggaggaagatagcgagagaggagggcgatggtgtggaggcatgggtgagattttggagagttaagattttcattttagggtgtgggaaatggagaagaaataagtgggcatgtgggaaatagaaaaaaaaagtaggtgggcacgtggaaaatgtggcgagaagtaggtgacaattttttaatgggcccttataccagacggtttaaaatcgtcgggtatagtatacgcgacgattttaaaccatcgagtataagtctctcctaaaaattcatattttattaaaaacattgcctattttgtttactacaattttaaaccgtcgggaatactaaatttttcccgacgattttaaatagttacttaatttttttagcgacagtcccccaaaaaaattatttttaggaccgtcgcgaattatgatatttgtagtagtgtatgagttcgtctttttgtttagtagttgatgattgtcgaaaactatttaattatatgaacatgtctctttattatttgtttattggtctgctaatagagttgttcataattttgctagagttatctattttcttttcatatcagagcttcagtaggcagggtcggccctgaggtgaagcaaccaatgcatgtgccttgggcccccaaatactcaggttccgaaattgtgaaaaaaaattattcgtacatagataaaatattaaataataagaaaatatattaaaatagtatttagcataattttagagagtgtcattttagagtaagaggtcaataaatcaattcttaatctcttcctcttttttttctctaatttgttttagaaatatttgaatgtatgtccatcaagattgatccttggagctttaaagaaagaaaaattttaataagcttgcattagagtccacccactaaccaaaaaatcacaccttaatacattctaccatttaatgcttaattctgtaacatcattgtcaaagtacaggtacttagcattttaatgttttcaaaatctctaactcactttctctctctaattccttcattctctctataactcctgaagaaacccacaccggcgttttaaccccaaaccaaacacacatcggtgtccacgcgcaatgacttaaattggtgtctacccaaaaccaaacccatgttagggtttatgccttaaaaaatctgtaaaaatatttatgattatgataagagttgaacattttgatatatgcatgaatattaatttattaacatttaatattgaataatttatatattaatatcggaaaattccttattcatacatgaggttgtaacatgtattgtatgaagaactaaaatcacttagccatgaataaaaaaatcagaaatatattaaaatttataaatctttaatcaatggttgctagtgcagttcaatgatgttcgttattcagtgcaagtaatctcgattcagattattgatgtagcattacatctaagagaaggtgttatatgtaatggagactatatatgacaaggagcgatatgtaattacgttgtcattatcaaacatgtcgtttactataaagacttaattcatattataatgatgatcaatggtagatcagcctaaatcctgagtaagtaccttgttatatgctttgttcacatgttttatacgttaatatataagatctattaaattttgaacatatagttattcacaattacagtgatgtcatcacagtggaaagtaattgtgattatatgcttcaaattatttagtcccacgatttatcaatggaatagatttatattgacgtgataatcaacgatgatgtttgcttacacttggacaaggggaatgccttttccaagacattagtaaagtaaagtagcatcggatgtatcagctatacatcgaattggaccgatattgacagtggaaatgatatcataaacttaccgttatatcttttctaagtcaatatcacttagttaattatagatcatttgatctcaatcttgagatggttaagctct

SEQ ID NO: 224277 - DNA, 1457 bp, Cannabis indica
catatctcctacaaaaaaatttcgtgctctcacttgtttgttaaaatatcaagctactttttgctgatgggctatcagttttaagtttgctgcagttcgtttctcttcgatttcatcaagtgattttgcgaggagtacatgattggcctctttgctatatgttaatcttctgtgggacggtggttcgagttctacgggaaacatagcttcatatccatatgccatggcaaatagagtctgtccggttgcttttttctcagttgtgtggtatgaccataatatttcaggaagttcctccggccagtttcctttagcatcctcaagtttcttctttagggtttccttgagtgtcttgttgactgcttcagcttgaccatatgtttggggatgtgccactgcggagaaactttttacgatcccatggtttgcacaaaagtcagtgaaggattgactgtcaaattgtttgccattttcagagactatcttatatggtaatccgaactggcaaattatgtttttcaaaatgaagtcgtgcagttttttggacgtgatggttgccaatggctcgacctccgtccacatagtaaaataatcaactatgaccactgggtacaacactccgcctttgcctttgggtaactatccgatcaggtcaattccccaaatggtgaaaggccaaggactttgcatttgagtcagttcgttggcggtgcccaaggtatcttcgaaaatatttggcatttatcacatttcttaacagaggcctgggagtcttcaatcattgttggctagaaataaccttgccctagaattttcttgaataaactctgcccgactgcgtggttgccacaaaatttgtcatgtacttttgaaaaaagtcatccagcttcttcttgtgtgacacgctttagtaatggcatggagaatcctcttctatacataactccctctacaatgatgtaccatgcaacctttctcctcattttccgagcttcgtttctgttaactaagagttccccagtgttgaggtaggctgctattggggtcatccagtttggggatgtatcaataatttcaatctcttccgtgtcgatgaaattgggtttttccagaaattcgatggggaatagatttgctttatcatttatgttgctgctcgcaagttgggctagtgcatcagcaattgtgttttcttcccttggaatttgcttgagaacatagtatgttgaattgtgcgagcagatcatatattttgctcaaatatggtatcatcttttctccccgagcctcgtactccctagatacatgatttacaaccaactatgagtcactgcagatcccaatgtgtttggctttcatctctcaagcaagtcttcggccgtcgataaaagcttcatattcagcttcattacttggatgccttaaatctaaatttgaccgtagcgtgcgaggtcgtt

SEQ ID NO: 224278 - DNA, 3647 bp, Cannabis indica
ggcataaaacccaacagttggtggcgactattatgtcatcaacatagacaaggagtgctagaaatgtatcttatttgtgtttaatgaaaagagagtggtcagattgggagtaatgaaatccttgtttaagtaaatggttgcctagttttgcataccattgtattgatgcttattttaaaccatataggctttttttgtaatttgcatacgacattctttggaatcacaccttttggagtgtatccttgaggtagagtcatgtacacatcctcatgtaaattaccatggaggaaggcattgtttacatccatgtgatgtaagtgccaattttttatggcagctagagaaaataggagttttaatgtgttgaattttgcaatgggggcataggtatcaaagtaatatatcccaggttgttgtgtatatcctttagcaactaacctggctttacatctttcaacagattcgtctgggttgtattttattctatagacccatttattactaatggtatgttgaccaaatggtagagggacaatgatccatgttttgttatcttctaaagatttaatttatgttcccatggcattattccagactttatatttgattgcttggctgtaagatgtaggttcaataatctgttctgcagcaaggattgcagctatgaatttttttgaaaatctcttgtaagacaagtgattggaaatgggatgagctgttgatgtttgtgttgatgtttcacacatgtaattcttgagatgagtaggtttattaatgtgtctgcccgatttagttgtgtaatttcggctgaaattgttttgttcaattaaagtagttggtatggattataaaatttcagtcgcagcagtattttatgctgcaatatttggttcatgtgctgcaatatcagttgcaggtatgggagaactggtttgggaagaaaaaaatcgagcaatgtcaatattttgactgttgctgtgaaatggataaatgtgttcatagaagataacatctcgacaatggaatatccgattggtttgtatgtcaagtagagtgtaagctttcatattttcaggatagccaatgaatgtgcaagctttggatcgaggagaaaatttatggtcatgagtgatgttggatgcatatgttaggcaaacaaagttttgaaggtgattgtaacaccctaactcgcataggcgtgttagcgtgatttttaacgtactgtgcaactcgttgctaatcaacgaggttattggaaaaacgtgaataattaaaattttgcttatttaattaaaatataacatataactttgataaacttccgagatcccgtttacaaaatactgttacaaaagtttactatatagttacaaaatacttgtcgcctagcgacaaaacaacaaaagccctggtgtcccgaggatcgtacgctccaggcctaaccgccccgacatgtacaatcttcacctgctcgctctcacgactcctcaactttagccttgcccttacctacacatagcaatagcactgtgagtcgacaaactcagtaagaaaatcataacataataaacatactaatatccctggttataatcaggcgcccatacacctaaccataaccctaactgaatcaggatcgatcttaacaaagtatgactaatagcgaatccagcctatactcagtacactaattgctctgatgtggtagcagttaatccatactatatgatagtctaacatatatctgatggcatctcggtgcaactctatgtacacctcactgatgccttgatatgctaatttgacggctatagatttgcctaacatatatctgatatgttattctgacggcaactaacatgtacgctaaacatgtataaacatatgcatgacattatactaatcttaccttgattctgaattcaggtgtgccagccaacctgagtggaacaactgctcggcgaattataggctcctaaatcacaacaatcataacataggtgagtgacacgctaaatcacttttcggggactcaaacttgaaactaaaagtttccctatcgataaataacatggcaataccctaaacaacacaaaaatgggaaaaaaactagggttcccaaaatttccccaccagcaaaccggttcccaaccggaattccggttctgtggggtttcctgggagccaaccggaattctggttcctacatgcccctctgaaccggaattccggttcagtgcaggaatgaccaaaaatttcctaactcattcaaatcaaccccaaatcaaaccaaactttccagacctattctatacaacctagagaacattttccaagcaacaaatcaagcacccaaactcagaaacaagaattgccatttgagagccaagcttgtgttctaaactcaaaacttgctcaaacatcaaactagccaacacaacaagcctaaaacaacatatctaagcataattcatccactgaaaacaacaacaaacacaagcagcaactacaacaacaaatctcaccaagcatgcataataccatagcttaagacccaagaaatcaaaaaggagatttctagagactataccttgacttggatcacctaagacttgttggaaaaagcttgaattgctgcataataatcccaaccctagctggttctagggatttcaagagagagaatgagagagttgagtttgagagagaaaatgagattttggtaattttctattattttccaaatattgagataatattgattttaatcaactaatttcagcttaacatcaactaaaaatctgatttaatacatcccataaaaagacaaaatgtaacttggcaaattgaccattttgccccttaacactaaaaatcactaaaagtcactaaggctaatttgggaaattctaaattctcgactatttttgacattcccaatgtctaactatatcgccctgctataataaaaatactaagatgtgattctactaagccatacaccgcgttccaatgttgctgggcactgaacatgcaaaattatgaaatttctatatatgacatataaaatgcattctgaattcaaataaaacatcttaaataaataatttcagtaattaaaccctaattatctgctaatttccaaatttaaactaagtggtctttacagtgatcatactttggtgatttgttatgaagaatttcatatgaagttacatctttaagtaagatggaaggggttctatttattaggtaggtagcagtgtgtaccatatagctccaatatattagatgtatattggattgaaatgctagagctcgagcaatatttaatatgtgttggtgtttgcgttcaacaacaaagttttgttgaggcctagcaatacatgaatgatattggttaacaccttttgtgttaaagaaatttgttaaggttaattccttagcattatccgatcccacagcttttatgctggttttatattgtgtattgatgagagaaaagaaattatgaatcatggatggtgcatcaaattttgatttgagcatatatgtccaagtataccttgatttatcatcaacaattgtcaaaaaatatctatatctttcaatggaattaaagggaaaaggtccccaaatatcca

SEQ ID NO: 224279 - DNA, 2894 bp, Cannabis indica
ttagtttcaattttaagtccccaaaaagtgatttagcgtgtcacttatcgtcgagcagatgttccactcaagttggccggcacacttgaatttggaaacaaggtaagattagtataatgatatgaatatgtgattacatgtttatcgtgcatgtttatgaattcctgtaagatagcataaataatagcgatattagtgaacatagagatgcattgaatatcgatagtatatgtttggctaagtactgattgatgctatcacatcggtacaactagagtatgactagcgtaccgagtataggctgatattaggcttaatagtactgtcataagaatgttctagatgcagtaccatgtcagacatggggatacggttatggttgggtgtatgggtgcctaattataatacgggttattgttatgttattaattatgcttttcttacagattctgtcgactcacaaatattgtttgtatgtgtaggtaagggcaaggctaaggttgagcagccgtgagagcgagcaaataaagattgtacatgtcgggccagttaggcctggagcgtatagtctttgagacagctgagcgtatttcgtatagtcactaggcaacaacttttgtattatgcactacaaaaattttgtaaatattttgtaaacgggatctcggtttatatatataagtacgttgttttgatatttataaatagttaaataaagttttaattattcacaatttttaataaactcgttgattagcaacgagctacacaatttagttaaaatcacgttaacacgcctaaactagtaggatgttacaatttggtatcagagccaccaagttatcttccaaagatcatcacaacatgtacaatcatcattagtgaacagctcgactcacggttcagtaagcatttattacattaatagtttatttgattagtaagttataagaaaagcatgataggaagcatgatagtagcctaatagctaagtaagttcatgttttaaatttccaaataagcggtaattagtaagttattcttgatcgcaatttgaccagactagctcttggtttcgcaggctgttctaatagaatggacgccaggcaaaacactaggacccacgataactcggtcagatttagtggcggtcagggagctcagattcccccaaatgtttgtggtcgaaggagcggccctagaggtagggcacgtggtcggggagatgttaacctgccgcaggctaccacgggaatgggaaaacatgtatgcagcaatgcaagccaaaatcaatgaacaagaagaagaaatcagacacttgaggcaacagggtgctccagcaatgcctgctcccgaaatataggtggctcctgccccttctgtgaaggcagggccaatttctgcggtgaactggatggaaccactgtatgaaaggttccagaagaaggcatctccattttttcttggaggacccgatgtaatgaaagccgagcagtggttgacggttattacaagaattttgaattttatgggcgtcaccggcaatgacagagtggcctgtgccacattccagtttcaggaggatgccctggtttggtagaacatggtgtccctgactcgtgatgttactactgttacctcgtaagagtctcaggagttgtttaacgcaaagtactacaacgaggcggtcagaagtgcgaaaagaaaagaatttacccagctaaccctgaaggggaacatgagtgttactgaatacacaaaacagttcgatcgatttgctaggttggcctcgagaattgtgccaaccaattttagcaagaaagaaaagtaccaggatagattaaacccgaaaataaaacaagatcttatgattactcttgatgacaacaccacctatgctgacatggtgggaaaggcactatgagctgagggcgcagttgagtgcacccaggagcctcgagggactcaagttgctggtggggcccctactcctcctacccctagttatggtaggggtggtagcggctcgaccactgatcagaaacaaaaggcaccatttgcactcggtggctcaagtcagaataagaggttcagagggaaccagtgttgaagaaactatcagggtagttctgaaacctgatacacttacccggagtgtcccagttgtaaggagcatcataggggggaatgtagaggacaaggatgtttccagtgtgagttgtcaggacactctacaagagattgcccgcaacttaagaaagaggaatagaagtcaacaataaaacccgctctagcaagggtgtttgctttaactcaggctgatgtagaagctagcccctcagttgtaataggtcagctctcggtcaacaacatttacttctctgtattgtttgactttggggccactcactcttatttggcagctagaatttttgataaattggatagaccgcatgatagttattatataggtttggaaccctactgcctggcgaagaattagctatctccaaaaagagggttaggtctatgccgatctgaattaatgatagggagttgagtgctaacttgatagaattgggtttagcaaattttgatattatacttggaatggatttcttatccaagtactcagctagtattgactgtaaacgaaagatggtgatcttccaactcgagggcaaggaaccatttgtatttgtgggatcggtttagggatcccagattccagtgattttagtattaacatctagagatttgttacaagaagggcgcttatgatttcttgtagtggtattggataccacacaacttgaaatagttcgactagatgatatcaaggtggttcatgaatttttagatgttttccctaatgaacttctaggtttaccacc

SEQ ID NO: 224280 - DNA, 1496 bp, Cannabis indica
tagctgcccaagctcaccacctcgcctgaacacccatcttcgttcaccatctctcagtcgaacaccattcaagctccattccactatgtgcagcatccttcatggcccgatctaacctttccaaaagttcgccctcatctctacatgccataattctcgtactttgggggttgatttggcactatactagtttgtatttttggattaaaatgatatatttgtcgagtgctctgtgcattgggagagctggttagttgttagccttggtgactattatagatacgttttggtgcttgggaagtgcaatttttgtgagtatttgttatggtagttgctacatcaggatccaacaagcatttcgttggttgtaatttgaatctgatgaggctattttgaagaagtatctcaagcctgattcaacccaatattgaccaagcatttctcaactctactctccaatttactttcatttaattattttcctttatattgatttttatgtattgtgttggtggttgtaactattgttcatgttggtgttattactctttgtgcttttttttgtgtgttgagtaggtactgcacctctccaagtgtggggtgttgattgcttagttatgatattaattgaatcacctatctcagtttttatttttgagtcattttgttgattttgtcatatttttgtaggagtgagaaaattccatttgcttagtgtgatcttgacattgtgctcaatgattaaccacatttttaaaaagaaatcatccattcatttctttattgtcttttgttgtgtaattggctaattatattcatgattgttcttggagtgaaaaaaaattatgatctaattgtttctcccaatctcatgtgcatagcttgactaaatatattatttgaaattgtataaatattatttgaaattaagtttggggtgtagtgaaataaatttttaaaaaaagtttctctttctctttcttattttgaaagtggcaagagtggtattaaatgtttgtggggatattcttttgggaaagtgattatgtgctcttattacttgggtcataaaaagattgagatgtttaaggtattttcaaccaaaaataatatcttttatcttaccttcaccttagcctaacaatacaagcttgataaattcctattaatccttggttgagtatttgtctacattagtggagagggaagcattgagtcaacttatggagacaaaatgttaggctttaggattgaggtcgagcttgttctaagaaaaattgagtttgttttgggaagagctatgcattagctattgggagaaacacttgcattataattttatcactttattaacactttagtaaattagtcaaagacattggcaagaggcataatcatcatcatcatcatcctccatcctcattttaataaagttttgagagcatttatcattgttaagttgcatgctaagtgaagatctcctctctttgtctcga

SEQ ID NO: 224281 - DNA, 911 bp, Cannabis indica
acaaattatagtttctattttgagctttaattagtttctattttttgaggttaaatgattttcattttcaatgtgaatcgtttttgtttttatttttaatcataatatagaggttagatgctagttgtttccatttcacaaactatagtttaccatttcatggttaaattgtttctattttttagttgtttttatttcacaaactatattttgaggttaaatgctagttatttttttttcacataaaatgctagttgtttccatttcagaaattatagtttccatcttaaggttatattgtttctattttttgagattaaattaaatataacttaatgttagttatttctatttttgatgatatttgtttctatttaacacatataaggttagttaaaaaaaatatatatgaggttaaatgcttgttgtttccatttcacaagctatagttttcatttcaaggttaaattgtttttattttttaggtttaaattttttccattttcaattttatttatttatattttttatgatatttgtgtcaatttcaaatatacaaggttaaatgatatttgttttcatttcgaggttaaattatttctatttttaatgtgagttgcttctattttttattatatttgttccattttacatatatgatattaaatgctagtcatttctattttatatactatagtttccatttcgtgattaaattgtttccatttcaagattaaatgctagttgtttccatttcacaaactatactttccattccgaagttaaatggtttctattttgtgagatcaaatgttaattgtttccatttcacaaactatagtttttattttgtagattaaatgtctagttgtttctatttcacacaaatgaggttaaatgttagttgtttc

SEQ ID NO: 224282 - DNA, 2805 bp, Cannabis indica
tcatgacgagagttgatggagataatgaagatatcttaatcttgtggtaatccattaaagatggcagatatatgatcttttgcagaaagagactgtctaacagatccaagacgatcggctagagccttgactccaagcagataatcattgatcgatttggatcctttcttgaagtttcgaagctgagtctgatactgatcgatctttgctgcagattgagaggcaaagtattgatccagaatactccaaacagcagagcacgtgtcacagccaacaatacgcataagaattgtatcagacatagacgaaagtaaccaggcatagagtaattgatcttgcttgatccaaaaaagataagcaggattgatagtacctgatctttcgtcattttcagtgaggaacttccttggaatctgaggtgttgctgcaagaaaaggaagtagatcatggcctcggactgcagctaggacttgaggacgccagagtaagaaattttgattgtcgagcttcactgaaagtttgtgagagaagataactggaggagtagttacagtattggcaggagcagaagccgccattgatgaatcaagaaagatcacaaaggttgatgaaagagacgaaaaatatcaaagagagaaaaagagctctgataccatgttaaagtaaagatttgaggaaaaatgaatagtcttattattgctcaaaggcagagatgaatatatatacaagagtaagttagaagttacagctgtataaataacaaactaactaactataacagactaactaactattctgttcactaacaacgtgcttttactcttcatggaacagtcgagtagataatcattataagaagaagagattcgagttactcaatctgaattggaaacctaactgatgattcagccataagcgtttttttaatttctattttcgttttctgaaagtattatcgttttacgtatatggtattgttttgataacaatgttgtcgtttttagtagataggatagtttttcgcattcaatgtcattttaataatattaaaaattcatttttggtaattaattcacattcacatattttttgaatgaaagtggataattcattaaatagctaaatctactattacaattgactgaagaggaggagggacattactctcgataataagacgatcagaccaataacaagcaccgcgagtcatacaatgtgcgactttgttaccaaatcgtttaacatgacaaatcataacattatttgaaatagattaaagcaactgaaaatcttgaacaaacaaactaaagattgaaggtagcaaaacaaagctataaattgcttgcacaaccacgatgcaattggtctcaattaccacattcgaatggttcttttttctgtatccaacttagcgcctctttgatgctcaccacttctgctactaccggttgacaaatgccactggtcaaagtagaacaagcttcaatcaacttttcatgccaatcccaagcaataaaaccaataccatactcattgttagcttcaaaaagcgcaccacccacttttgttagcctcgatgaaagttgatgtatataataagattaaagagaataaatgtatattttaaatttgatgaaagttgttaacccaaaaaattaatagggctaatccttgaaattaatcaacgattaatctcgagaagggaaaaaaatcagctttaagagtcagccaagtaaaattaatggcctttgaccaaaccctagctagcttgggaaccactcggccaagtaggactgctagtcactcggccatgtatggtgatgagtcactaaatcttacatggtggagagtcactcggccatgcatggttttaacctaggtcacttggccccatggacgaaaccgcattattctaggtggaacaatttcttcacttcaatatcaacaaaaaataaatgtgtatacatacatatacatgtatgctaatacacatacgtacacaaattgagtttaaaatattaaatttatggaatgttaaattaaaaggtaggtaccatgtaccagttaggggtggcaattcgtgttcgcaggtcgtgttcgtgtcatgtcgagacccatgtataacacgtacatgcttgacccgaacacgacctgtttaataatcgtgtcataaaaatgaaacccgaacacgatccgtttataaacgggttgacacgacacgacccgtgtaacccgtttataagtatattttgtttaaacatgtcaatcaataacacgtttatgaagtattcaacacgtttgtaagccatttatgacacattaaactactaaaataactttaaataggtcattaacgggtcaatttcgtattagtcgtgtcaacccaaacacgacccgcttattaaaagggttagacaagtcaacctgaacacgacccgaacccatttaaagtaaacccaaacccactaattctcgtgcagatttcgagtcgtgtcatcgtatctgacccgttttgacagccctagttccagttgcatgatcaaacacaaaaactaataataataaaataagtttttaaattgaggggtcgtgctaaagaaaaaatagaggttttgtaaaggggtcgatattagaaataagaaaaagtaaataaattttggggtaaaggggtcaacggggtctggtctgagactgagactgagactgaggggcgtttgttggttggtgtggtctggctttcttacaactcagatccctctccacactccatcctcaaccacagctcttagcacagttgctttgtat

SEQ ID NO: 224283 - DNA, 1913 bp, Cannabis indica
gtaactcaaaatatgtgttggatctgacacgtactttttcaacatagagatttggaagatattacgcaccccaaacaacgcaggtggtaaggctaatcgatagaccacctggcctatccgctccattatcttaaaaggactgatgaatctagggctcatctttcctttcttcccaaacctactcacccctttcataggtgatactcaaagaaatatagagttttctgtctattttgtgaaatgaacatacgagatcaaatcttctcaatggcttcactggttctttggaccaattcgagccgaagataacatctctctccagcctcatcctagtggataagcgatcaacattttctaccataaagcatctcataatgtaccatactgatggtactctgatagttgttattatatgaaagctcaataagggtaagaacttactccaagatccctcaaaatctatcacacatgctcgtagcatgtcatccactatctgaatggttctctcagattgaccatcgatctaagggtgaaaggctatactaaatctcaacttggttcccatgactttttgtaaactctcccagaacttggaagtaaacttgggatcacggtctggaacaattgactttagagcaccatgaagtctcactatttctttaatgtacaattcggcatactgatctacagtataagttactcgcacacgtaaaaagtgtcctgacttggtaaatctgtctactatcacccataaggaatcatgcaacccagtagtcctaggtaaccctactacaaagtccatgattatgtctttccacttccactcaggtatcttcaaaggttgaagtaaacctgttagcctatggtgttcagccttctttcttagttaaatcaattcgggatcattctactggccaatcttattctttccagtaaatcagattgcaatgtaatattttccaacttcctgactacaaactcaatctcagccttggccatatcctcgaccaatcttagagagacttctctcaatttatagatttgccatagacattttcggctaagcgcatttgccactacgtttgctttgccgggatggtagaggatttcacagtagtaatctttcactaactctaaccattgtcattgcctcatatttagatcctttagagtgaaaaaatatttcaaacttttgtggtttatattaatttcattttcattctcataactcctacccatttgattaatccattttattactataatatgataattaaataaattaatataaacttattattaaacccataatattatcataatattcaaacttaatataaataattaataataaattattctattagtattattaattatttagtgacaaatgtataataaaaaaataaaaaaaaataaaaaggcataaaaatatacttttacaaaagtattatattattagtaatattaattatttagtggcccattggatcgagagaagttgtaatggtgtcgcccatattgtggctcggtgggcaaatcataacaaacagttggttgcgtcgatttggccgattttgacggctccctgcaagcttggattacagatggctgtgtaggtaccctactctaatttagttagcttgttagtttgttatttttcttttgtttgtcaatctgttagtgtagtctcaggtttaggctagtttatgcccatgttttgcctatctcttggagtgttatcccattttttgcactgtgacgtggcagcagatataagtcacacgtgtctgtcattctttacacttgggcggagaaatgtgttgggttttgtgccctaaataaaactcatttcaatataatcagatctacctattaataaagatcagaaataacatttttatgttgcatgg

SEQ ID NO: 224284 - DNA, 3026 bp, Cannabis indica
tactatattttttttctaaataagggcctaaaatattttctttttctatggtccactaaaagtcaggactggccctgattatagatatatagatattataactttgaaagtaattgtgtaattactaaggtaattatgataattacataatttagtaattacactatattttaaaatgacaggtgtgtttagatatgagatagtaattacatgggaaaataatattttttagtaattaatgtttaatgtagaaagtttttactaattacgtcaaattgtataattacctctaattacctccaattgcacgcaaatccgattacctttccaaaggcaacccaagttttgtttgaaaactatttcaatttgagagcaaaaattgagtaagacattgtaattttatttattttcagtctcaaaccctaacaaagtaacaatcgtcgatcggagctaacagtctttaacgaagacggcgacaatgccggcgaacgacgacgtttgcttcaccactactccttctatcaaggttcctttaccttcacggccacctcccttcgaccttttccttctcttaaccagaaccagaaactccttctctcaacttgtagactcggttaaaactcacccgggactccaacgactcacccctaagctcctcccttcatcctcgatactaccgccattgcttgatagtcgaaccactgagtcgactaaagggagtggttcgctgagtcggtggtcgaggccaggaatcgatggacatttgatcggaaaattgcttcctttatgttcagcgtcgttgtcgctgagtcgctctgaacctggaactcggaagggaaaagatggtcattcgattgggaagtcgccgcttctctgttcggcctcgttatcaattgctcgtccggacgaagtgtcgcaatccggggcagagggaaaggaaatacaacagcagcagaagcagcactctccgagtcgacacgacgaagagagggtgctgataagtgaagtattggtgaggaataaggatggcgacgagcttgagaggaaagaccttgaaatggaggccttggcggccctcaaagcctgccgacccaactcagcgcttacggtgcgtgaagttcaagaggatgtgcatagaattattggaagtgggtacttctactcttgtgtccccgttgccgtcgatacaagagacggtatcagattggagtttcaggtatggataaaaattaaatagaataaaataaaaattgatttatttatctgtgttgggctaattgtaatttatttgtttattttattgtgcaaggtagaaccaaatcaggaatttcaaggtctggtttttgaaggagcaaatgttcttccgacaaagtttatagaggattcatttcgtgaaggatatggtaatttgttctaattgttcatatgtgaaacgcactttaaatatgttgcttctgagattatttttcatcagggcatgcttgatttttagtattttggtgtaacgttgtgcaggaaaagttatcaaccttcggcgtttggataatgtaatatcttctatcaataattggtacatggagcgcggtctcattgccatggtgggtttgtcagcttcgagttttattatcattatttttcatagtagtccatcaatagacttgatatgctttatacccttaattgcattggtttgtgataaactgtgaagacctgaagatcataacatacgtttcttttcttcattgcttttaggtattaggtgttgagatgctctctgggggtatgcttaagttacaagttgcagaagctgaggtcaataatatctccatacgttttcttgataggaaaaggtaagaacaagtaatcaatttgatttctgtctgcttaatcatggctaggggctacaagagaattttagattcgtataaaggtgttcactgtttataaaatcttcttcagtggcgagccaactactgggaagacaaagcctgaaactatactatcccagcttactaccaagaaaggacaggtactttcctgagtcatatttttgtgaaccaatataacgtactttgcaatgcaatatgtttatagaattggggtgcttactctgaggaaacaaagcattacctcttgaggtcattttcgaaagtgttgtacccctcattttttatgtactacttaatgaaaccatttattttgtgaagtatttgtagaaactaaagttgaatgatgtgcccctggggttccatgtctttttttctttttgaagaagcctggtgaaactggagtggttttagctaaatctcaagagttttctgatttgtatgctcttgcatgtgtaggtctacagcatgcttcaaggaaaaagagatgaggaaactgtatcaaccatgggaattgttgaagatgttaggataattccccaacctgcaggtgaaaaatggatgatagtcttttaaatttttcagttgtgtttttgcaataaattttgaataatgctttttctaaaaactgatgtggaatatttgctaattttttattcagtattttgaaaaaagtttagctggttagaaggttttgaaaaacttaaacagctgttgaggagttttcccttagtctggcaaggtgtaagcctcgaggcgtttcgaggtgtacgcctcaataataagaataaaaacttcataaaatatcataaaactcataaatttcataaaaaacaacacataattccataacaaagtaataaaattcatgaaaattactaatgaagtcttaaaatcataaactaaattcattacaggtttaatttgaaacaaaaaattgtaaaattctaaacatataaagaagacgtatgcataaagttgacgaggattgaggaatgaaggacgcgactgagaaggagaattgagagatgttgtacgagaggcttacactatttttggtaggaggtagaagtggattgatggggaggagaggagggagagaggtgggaggagatgacaaattcatttgtttggcaagag

SEQ ID NO: 224285 - DNA, 2009 bp, Cannabis indica
ttatcaatctaagagttattctacaacaaggttagtaaacaattacgactagagaaatgtgaggcaacgcgaccttgatctaaccgagcatttgaaccgtagacaactagacttgcgtgagaacttgatctgcaatgttccaaatctttgagatcgattgaatcagaacgcaggtcaccaataacaagtcaagtaacaacccatggatccaatttaattaagggtaatataattagaagacaagtttagatggtaccaagatgagaaatatgggaaattatcaaggtatgattcagatgaagagacatagccttttcatcctgatatatcgaatttctaattcccttagggattcaagaaaccacacgttgcacagtatgatgggacaaccaatcctgtggcacacctgaacaattttaatacaataatgtcagcgagcaatgtttttaacaacttgtgttgcattctatttccaacttttctaacgggagcagtgagcagttggttcgataaattcagcaaccattccataaccactgggaacaattatctaaggatttcaagaaataattttaggttgcgagggacaggaggccagaggcatccttgctgactaatataaagcaacatccgggagaatctcttaaggcttacatgagtcgctttcgtacaaaaacagccaaagtgagaaatttaaatgatagcatttagttgacagccctccaagccggaataacaaatgatttatcaaccgcgggaggagagctatgggatgatctatagggtttccccaccaaaaacattaatgaatttaatgaaagatcacaaatctttgtgcagaaggaagaggcggaaagccaagtgaagatgctcaaatctagcccaagagacaaacccagcacaagtactaactaaagcaagaaattcgaaccacaatgggtcgatggaaaaaggaaggacgagtcaagagattcgtcaaaagataagaaaaagcaaagaaacacgataaatatatttcgatatacttggtatatacgcgattaaacaaaactcgtgaaattatctatcttgcaaataaaaattgggtcgcattttgaagacctgaacctatgagacatgctaggaataagcaagatcccaataagtattgatgtttctatcgagatattggacataccactaaggaatgtagccaattgaaagatgaaattgaagggctcatttctctagaatatttgaggcaatatgaaagaaatcgaggaaatgaacataatttacccaataaccagaatagcaaccaagaatacaacctcccctagcggtgttcatcagatccaatccgtactattttattcagagtgcatttgatccacactaagtacggatttcatattttggatccaatccaattcacatagtaactcaaatttatccaatctgcaaaagtgcagattggatcgattattttggattggttacttttaatattgacttatttaattgttatacacgtgtcaacctcagggaatattaaccagcaaatataatgacaattatatttataaatattaaatagaataactctttaaagggagaagtcaatagtgtatatttataacttgcagacttcacagtccttcgtgagacaaaggtgtacgaactgttgacacacgtattgacgagaaaccattttgtgttagaagacataatcgcaaggacgatattgacaatacatagcgaggtattaacctcgcaatatgtagagaagtgttgacgaagcgaactggctgttagaacacttagcgtatgatatacattatactaactaagtgtaacaacatgaaggcacacttctagtaccttcactaatcagcttcacacatcttttaatgagttcaacaactctgtcgcatcagctctctcagaaagaagctgacattcaaatgaggtagggtgctgaagttcatcttggcaccaagaactgtgattttcagatggaacgttatgtc

SEQ ID NO: 224286 - DNA, 2812 bp, Cannabis indica
gagtcatattatttcgctgcacctaatgtaaggtttcctaaactttatatgtggttatttcatcgttttggaaagttcatatttagggtgttaatcaacatacttgtgagtagatctaagatcgtgataaaataattccaacactccaaagcctgcattttagtaaattcattccccaaattaaactcgaccaaagataagatgaaccatcttttttagtggcgtcaaggatagagcaatttggaaaatatttatgttttaaaattcgagcaggcaatgaattttgatataaaaataatctccatacttgttcagccaaaagggcttgattaaaaagttgaaaatcccaaaaaccaagcccgcccattgccttatgctgacatactatttcccattttacccaaggaatcttcctttgatcaccacatgaaccccactagaattatcttacaatagactttaatttttcacaagttgtcaccaagatcttaaagatactcatcatataagttggaatagcttgaagaatagatttgataagcacttctctcgcaccagctaaaaagaaatattgctttcatccctgcatacgcttcctaacttctcactgatcccctcaaacacctacttttgtttctaccaatcaccgtagggaagcccaggtacttgtcatgagtagtcacttatgtcaactccaacactctcagaacccaatcctgatccacctgttgcacattttgactaaaaatgatagcagacttcttaaagttaatcttttaactagaggcagccttataagttcgaaagatacactttatagtttcagtatcacctctattagctctaccaaacacaaggctactgtccgcaaagaataagtgagtatcacgcggtcccgatctagaacacctaaaccacattagttcaaatctggcctgtggaagagagaacaactaagacattgattttgcacagaagaggaataaataaggagataaaggacatccctgtcgtaacactcatgttagaatcacccgacctttaggacgaccattgattaaaaaagtgtactccgggatcgtcacacaatccataataaccctcacccagccctcagcaaagctaaactatcgcatcatattggctaagaaccaccattccacctggtcatatgcttactcatgtcaagcttgagtaccataaatcccatttttctgttatttcttttaaacaatgaatgaagtagcacacaactaacataatgttatcatgtattgaacaccttgggacaaatgcactttgaaaagatgagatgagggggtcaagaatacttttcatccttagtgataaaattttgaaacaattttatacattacacaaggcaataggttaatactctttaaccaatcttaatttttgtacttttagtttcaacaccacatttgacttattaaactgtcacaccgaagtaccgtcatttaagattataaggcatacttggcttaccctctcacccacaatatcccaaaatctttggaaaaaataagcatgatattcgtctagtcttgaagctttagtggcaccaatggccgtaacagcctggtgaatatcctcctgagtgaatggtgccataagacgctcattatcagctaccaaaatatacaaattaacaacctttgtactatgctggacttgctcatttgtcaagttggctgtttgaaaaatatatgtaaaattctgctccacttcaccaacaatctcttcctcaacacacaacttttggccagttttcgtcatatatagtctcaataataacatttttcttctttctccccgatactttgttatgaaagtattttgtgtttctatcaccagtcatcatccacttcgatctcgatctttgctttcaataaaatttctctctattcataatagaaaaaatatgatttgtttttaatatgacgatattagaattcaaaatcctattatcgacacctacaataaaatttaggaaaattatcctataaactatattttaacttttctttttaaatttacggtttgggtcgctcctgtagtttctatgtaggttgctacgtaaattttgattgcgatttaagttgtttcgttagttgttataagagtttctgtgtgaaattctgtaaaaattaaaaaaaaaaattattttgaagtataaaaataaaaaaaaaaaaaaaaaaacatttaaaatttaactatttgaactagtaggggatagaagatattgaggtgtgtaggggttaaatcgaataccaagtttgtaattaaaaaaatgtaatataaaaagcttaaaaaaaaaggaagaagacacctacaataaaattctataataaataactgttataaatattattaattatgtggatgtccaaatcttttatttattaccattaattgtaatcaacattcatctttttcttagtttccctttttcttagtttcttaatatctcactcttgtatttgtataaataggggttcaccccattggaataaacaactcagaaattctcattcactttctctttctctcttcatcttcttcttctttcttctcatctactttatattatattatattattttataacacgttatcagcacgagtctctgcccaagcttcaagcatgagtctctgcctaagacccaatgtaagtattttgttaaaattcttgaattgtttcaaagtcacgatacactaaatatatatttatatatatactcatctgactgaaacaatttcaagaatcatttgcgtttcctttttcttttta

SEQ ID NO: 224287 - DNA, 1254 bp, Cannabis indica
aagagctctgcaatatatgaatttggatggtgagaggagctaagttcgttttgatataaccaaggctatatacctatggttggaaaaattgaagaacaatatttcattatgtgatttttctttaggtaatagataatgaaaacaaacaatgaaattcaagtctttaatgtatttgaaagttacacttatacttacaaacatatcataataaattaattacaaaaatgaatggaaaaacttcactgtaaacataaaagatacacatgccttcactatacaaccttacacctatagaaatcatcaaatccaaaattttgggcctgcgattagcaacaaaacaatggcttgcttgcttctcaatttttattaggaaataggacaattggctctatgatagaattaaataggaatttctagctatttgagggatataagtagaggaagagaggttagtagggttgtggaattattttgtaattgtaggaattcattagaattcattgggaggcttaagggatcctcaaatttctccttctatcttgaattttctgtgtttgagtatcaatagagaaggcttaatagccattttcagatctgagttcctatcaatttcatgtttaattgagcaaaaagcaccaaacaatgagccataatattacaacaaatagagcatctatatttaaattatgaaagatttatattagttgtaaagtttaatatgcccaatttctcaaaagtgaaattagatgtatcatctcaaatcacaattgtaatatagaaaccagtgagcagtaaataagcttgcaataaatgtcagaattagacaagcacaaacctttattggtggaatgtgaagtgataagaacttaataatacaaaacatagcacaacacaacaaatggagccattgatagaattttatatgtgtgggtgtttatatttatgttgttcagttgttgcatcccccaaagattctcattttgtcaattcagcgaacaccttagctacattattttaccaaaagttgactacatcatatattgaatatacaaagattaacccattaaggagtttcccttgacagtgttaaaattatcatgtgtatacattttaatagagtcaccactcatacatcttttttcattttttacatgctataaaatcaataataaggccaaaagaatccataatttgaaaatgcactactactactgccatgaccagaggcaaagcaagaaccccaaataacttttt

SEQ ID NO: 224288 - DNA, 1691 bp, Cannabis indica
tgaattctggatcttcacttgaatcactatgctcttcctgtcgctctctgctgtgttttagggttccaaattgcctcccctgacttccaatcgcagctttctatttataactaatttttagggttcgatggacaaaaatacccctgggtcgtacgggatcttaccgcggccaaataagtgcctaaaatacacggttctgtaagtctcaaatggccgcggtgagggtgtatctcgccgcagcgactgtagcctcaataacctgcttccctgcttcgtgatctagccgcggccaagctatatctagccgcggccagatatgcatctttcctccaaaaagtgtttttcttggctcagctcgtcttttattggactttttcatctcgagacctctattattccaaagaacctgaaaacatagaaaacaagcgtaattctgtcccaacacagtgaaaagtgcacataaaatcgatccaaaatataagcttaaaatagcctaacaggtggcctcgtgaacccatgggttctttcccacgacgatgattagtctctttaggacgactgttatcgttttgatcgtgatcagccatggaggaaatatttggttggttaggagggattttttgagttttgttaggctcttaatgaaagcaccaaactgttaatggaaatttttgttaacgattaatgagcatattttgtaataaattcaacacaaatataagaaaattaataaagataataataacaacaccaacctttttacgtggttttgcagttaactttgcatagtccacgagtctatcttattcaagatatttttggatattgagtattacaatttgggatctctctctctaagattttttcgttcctttttctgtataagttgcttctatatatagtaacatacgttggcagttatttacatttaaatttgaattacataacagtttttcataaattcatgggctttgatcacatcccacgtaaacacgtgtaattaatactgaaaaattgcataaccgtttatccttcttatcttcaaagcggttgatgcttacgtgagtagagacatctcgctctgtacatagattagaggtatctcgctttatacatggatgaccaatgtgacctgctttgttcatatgccttccaccaatggcatgagcactagtttactgagcaaacttaagaacttctctttgaccataaggcttcgcagactggacaatcatgtcctttatgttctcaagttgttatacttagttattataatgtggaaaatacgctaagtgtttcaagggccgacccacctcgtcatcacttccttatatgtagcgaggtggatgtcttgttataccctatccgtagtctcttcggaattttgccctccgagattagatggtctctcgtcaatacagaaattgatagtttgtgtatccttgtctcgcttaagactttacagtcagcgagttatgaatatagtctattaattctatatttaatgagttattccattttgcataaactgatataatcattattatatctggtggttcatattccgcttgtttgacacatgtcactctctgtagtacagccaaatttcgagtataacacctataaagaacttttggtatgcaaccaaataggttataaggaatttatgaagaacaaaatactatatgttc

SEQ ID NO: 224289 - DNA, 2545 bp, Cannabis indica
acaagtggtatgttaattcgaacccacaccccaatccgggaaactaaatcagttgctgcttttccccattgttgtccgaggttgttgtactcaatttctaattttttgccctcgcttgccagcctcgttatatctagtcttttggttctacccctagtatttttctgctttggtgggggttcttcaacttcaatattaggttcttcaacttcaatattaggttcttcaacttcattattatgttcttcaggcatgaatgattcttcatattgagcccactcatcatcgtcatttggtgctggttccataataaatagtcctacacaaatttaaaaatctacattagaatatacaataatatacaaattgatagccacaaaagaatacatgttaaaaagaataccaacacatgttgaaaaactcatggcttgatagtttcattcacccataacccctccccatcatcacgagatgatacgacatcgtcttcaaccgtaataccttggaattaagaaatggattaacgaaaccctaattagataattataaatagttgaggaattatattattatatagttcaatatctgtgaattaatatgatttttgacatattaataccccgttggtgagccaggggcattttagtaattttgactcgagaagggtaaaacgatgaaattaatttaattatgtgcttaatagaactatattattatatagtatgcctgtgttgtcttttcaagtgtgttctgacaggttggcgcggtatagtcacaaccgggtatttcgggccgaacggggttcgggcccgaaatgcaatttgaattgaattatttgaaattttatttgataatatgaaatctgaaattatttggaaataaatgagtgtggaatgacataaatacccttgtgtgggtgaataagtgtgcattggccctaagggcattttggtcttttgaccatacttaattgaatttcaataaatggaatttttgaggaattgagatcaaactttctggtttttctaacccaaaaccgaccccctctcctctcactctcaaactttatttcaatcttgattttggtatggacttgcttaagaaattgggaagaattgtggctaggcttttgcttggacttgaggtagttcttttattgattttaattgaaattattgctgtaattcttgttgattgaaagcataaataaggtgttaagttgctcttgatgcatgtgattagagtttgagctaatcttgaaaagtttgagtgtgattgtttggttttgtagtgggttgtgtttgttgtactctagatgaaattctagggtgttttccatgtgtaattttagatgtaaatgttgtttatttgctggagatttaagtttggagctagtttgtaagttctagcttatgagcatgaaaattggagtttaagtgattgttgtacaatctgaaatttgggattgaatgttggattttgatgcatgatttgttgctcttaactccatgtatgatgattaaaaacctattttatggttttggagttttggttgtgaattggggtaaaaagattggatttttcttgctgaaatcgtgttcttgctactgtttttcaggattttgaacccagatgtcgcggcatggtatttagcatgctgccgcgtgcccatttctttctgggcagatcctttttacaacttcaaatagccataactttgtgatccgaactccgatttgggagttctatataccgttggaaagttcttttcgagctctatctgaatatgtgaattttaaataccatgtaaatattttatgaaaatgaaatcaggggttaaccctatttgtgaaatcccagattgtgtgactaggattatcggcacttgatcaggagcacccagggatttggaatctctgtcattgtgggacatcaggtaagacagtagtatgcacgtagagtttagcgcagtggcgctcatattgtatgttgtgattgtgattaataagaacctggattagggttattaccctaaagtgagcagttatttgatgtagagttattaccctagtagttaaaagatgttgaatattattccatgttaaatgtgttggaataaagagttatgcatctaggcataattaagctagactcgataaactagtaccttgagcttaattttaatgcggtcttgggttaataccttagaacattatgaaagtgagaaagtattaatatatggtaatattattaatccagtgaaaatatgagttaaataaccctaagattttatataatgtggtaaatattgaatacatgcggttatgttaagcgttatgtgtataagacataactgggttagacctggtatatatcaccaggataaaccaccgaaagaacgtaatgtgcggattacgtatatatatatatgagtagggttattggagcaaggcataaccaggttaggctcggtaaccagaactgaggtaaaccctattaaggccttattgtaattagacgtgtgagagcaacacgtaggtctacg

SEQ ID NO: 224290 - DNA, 1076 bp, Cannabis indica
ggcacgcaggaatagtaaaccacctgactaatctagtcaacctgtcgatcgcactagttgcgaccaccgaagtagtgatccctaccaatatagcagtagttgctgccataccagcagtgacttcaagccaatcacatgttactaggaagtattgaccagaaagcctcttgtgggcactaaggatgatcgagcagtagagaaagcccatttacaaacttcatgggacgtcgccctttacaaaataagtgcgataagcaaggctcccaaaaggctttagactatctaaatccctcaaatacaaaggtactactaacccaatcgattatttagataaattgaacatgattatcaaaataggccaggtaccacaattatcaaaatgttgaatactcgctatgactctacaggataatgctcatgattggtttagccaattacctgaggcatcgatatcaacctgggaaacctttgtagacctattattaacgcagttccaagccatgttgacatacaaactgtcatacacaatgttggccaatattaaacaggaagtcgatgagtctttataagattattttaaacgttttaatgctgagataacaaaggtcgagaaggcccccgagtcttcgttggtctgtatgttgattacaggtgtcctaccaagaaccaacttttggaaagaattgcaagggcgaagacccgagtcgttggtggaattcttcgctatggcagaaccacataaaagaattgagaattcttggctgaagttggaaagaggaaaggagaagtgcgagtctcctgtgccaagattgcgttcctgaagcccaaaaggaaagaattccagaggtcgaagccccaaaagacgcagtccatctagtcgacgaagtccaaagcacgccaaatcccccactaaaaaagaaacatccccaaaaaggaaaaggagcccacattttgtcaattacaccaagttttctattcctcgcgaccatatctatgcaattgaggaataaaatggcatttttaggaaatcacctctgatccggggtaatcgtgataagagggaccctaagaaattt

SEQ ID NO: 224291 - DNA, 990 bp, Cannabis indica
ttttaaaaaaaagaaaaattatatacatacataaaaaaaaatcagttaatagtgggcattctttcatgtcttctctttataaaatattattttataacctcattagccccagttagagtagctccaatgcaagctaatcaaagtagcttggcaaggctgtttcaggtggtgagctactctctaaagtagtttatgtattgaagataaatttaatggcagcttgggtggttggacaggagcaacgtgttttttcaacaataataataataataaaatataacatttgaaataaactaatagtaaaaatataagttaatattaaataatagtgtgtgggaccatggtggtaaattttaaaattgcttagtattggaacatttttagtagtaaagtagttaaaaatgacgtggatgagagataaaataaaatattatattttgagatgatgtggatttttatagcaattttaaagattgcccaaattagagatgagctatatatgtggtgtatagctattttttagaatactttgctaaaagttaacgccagtggtgatctaaaatgcgtgccaaattagacacaatctaaaaattatgccaaattttagccaataaatcacacatttttaattacttaatttccattcattaatactattcattaatgaaaagtgtttttatattataatttattaaaataatataaataaaattaattgtttgtatattttcaatgagtatttaatgttgatattaacttttagggtaaatggcgacaaaattttcaaaactttcattttggtttcatttaacccctaaactctaaatttgggcggtaaaacccccaatactcgagttctgttagcaatttaacacttccgtccaaaattaaattgttaactgccatggcggattgtccatgtcgacataatgtacacgtgacacaatattattgtcccacgtaataaattatttaaaaaattataaatga

SEQ ID NO: 224292 - DNA, 1927 bp, Cannabis indica
ttttactttaaattcacttaatcttacgcttatgtactatattaataggtctttaacaataaaatccttaaacaatattattttcggattaaaaaaaatccaaaatacaaaaaatataatgcaaggtaaaagacatcaaattaaagtaatttatatctcaatacaagctaaaagacaacatcaaaatcattaaaattgatgccattagttgaccgtcgttgtctaaaaaacctaaaaaatctatcagcctaaacgcccatgtttgccctcaaatcctaaaataaattaatttttattgtgcatatgtatttttgagtgaggaaactagaggatttaaaagaaaaataaggaaaaacgatagtgtatggagaaaatagatatttaggagcattggcagtgatttttttcattgagagatagctggtaaagaaagaagaaatgaggattttagatatgagattagggttttatagacctatgttatcgattatattatgaaataactgaagaaataagcctccatgtgtatttataggcaatttctacaaagcaatattgtctttgggtccgatagattaataacatttatatgaagaattgagattttttgttattttctcctcgtttggacacaatctagtactttagaaaactcatcaattttagaaatattgttgacaagcatgagttgttgggtgctggtagctcatggaagtttaaggctaaaaaattctacttgctccttattttaaaagaatcccgaagcatcgttttatttgtggcaggcagttaacgaacatgtcttaaattgtgatatccttactaggtttattaatgtggagtctttatcatgtcctatttgtgagttaactttagagtctcatattcatctctcttttttaaacgtgcttttcctagaaaagtgatttatgaggtaacaaactggttgggccaaattaattggcagaaaaatcttgatgagtggctgaatagagcagttgagcctctaaattgggtaataacccgcgtaaccccgatattctaactagtaactacccataaatcttgtcccgctaattctaagatactaaatcgtatttaagtgacataattggccaaaatctccatttccactattactggacataaatcgtgaaaaatactaaaattcacacaacacatctaaaatttaataaaatttataatcgagaaattataactcttatgcctttttatgacaatatggcttatttttttcctaatgcacaaataatcatatattattaattaaatcaataatattctattaattttcatgtctagttatgcggtcattatattaataatcttagccaacagatctgttcttttaacacctacccaagtaatctagctagtaaaggataaggtccaagctttaaatcacagccacttaaaaaccaactccatagctctttgagaaaaattacagtaaaaaaagagatggtcataactaatatttatttaacaaagttgaaattatgatttttaaatttagaaaaaattagtgaacttttcaaacccacttaattttgttagtttaaaaataactcattttatgttttcatctcaaagttatttatttattttatttatcaacataaacttacaagtttaaacttatttttcaagaaattatttttttttaatttttgttagaagtatcatcttaaaatctattctcatactaacctaacgaaaatgatttatgactcatcaaaattttgctaatccaattgagatgagaagaaaaaaaaaatcaagaaagaagaaaaaaaagtgataatacataggagagaggagagagaaagataaaaaataaaaaaaaagaataaatgtgagtaattatataaatgggtctcattatattaaatattataaaaaaata

SEQ ID NO: 224293 - DNA, 852 bp, Cannabis indica
ttattccctctatttatagagaatgaacttgtcacctccacaactaatacaatctaatagccaatgataaaaaagcacgccactctaaacaattagtcataatcggcctacatggcttttcttcctgtggtacactaaccagatgggaggtttatcaaaaaatcagatatttggtatcaatttggttattatgtaaaagagttgaaaggcatttgtactaactcacggactgcgaccaattttttttactaggatccccgtctaaccctacaatatttgggggccggaaaaactatagcaattgctatgtagatacccaggagagactcgaatctcagacttgtgagagcaaaccacatgcctttgtaatttgtctttaatcatgtgatgatggtggtagtttcactttcaccaacaaaatccttaaaaggttctattatcatggttagacacctacacactacagacactgaacaaattatacgatttaattatactatcatctctcatggttaggattattatggcctatacaatgagaaccaatagcagttatcgttttttatttgttttctataaaaaagttgatcccaataacattacaaagaatgacttgaactcaagttgatcccaactcatgcaatacatatgccatataacctaataatttcattatgtatatccttcctacacatgaagaagaagcacatacaaggggatttcattttaaatacacttgtagaaaatatcttacactaggtaaatagcttggtaaaaatctaagagaaaattagaagaaataaaggactgaactagaaagaaagagcatttttaaatgcaccacttacaaat

SEQ ID NO: 224294 - DNA, 2629 bp, Cannabis indica
taaattaatatatatatatgtatctatgattatgagtggctcaccgacaaatagtggtagaggcagtggttgtgggtggctcaccgacggatggtggtggaggcagtgagtgtgggttgcacactgagagagagagagatcgagagacccatgacgggtctcgctgttcattgatatgagtctcgccaaaatggagatccacgacagagaaagggcaaggagggagaaggaggaggtggcagtggttgctcactgttcaaacgagagagtgaggagggataaggtggctgtggcggtggttgcatgcgcttgagagagctgagagagatttgagagtgagaatgaatgtgagatctcaaacgctaaagggggctttatatttacatggaaattcccgacggtttaaagctgtcgggcattccctttacgttctgtttcaaatttatctcgtaactgttttaaattgccgagaatactaaacaattatttaaaactgttgcaacactcaaatactacagctgacagttttaaacaatcacttacttttattagcgacggtcctccaaaaaaattaatttaatgattgacggaatagtattgtttgtagtaatagtcgatatattgcattttttttttttacaatgaataatatatggaaaaatttcctaaaaaaaaaaatatatggaaaaataatagtatagtattagtacatttttttccatataaattatagtactagttcatcttaaaattacccaaaaaaaaatacatcttaaaataatataaattgaggaaaatcttctaactaaacaagttcatcaagcatgtacaaattaacaatgagtgaggttatttcattatcactatcttacactaaattctaccataaaataattcatttaagaagatcaaacaagctatatataatttggagtgctatcattgcagactgattcaaccaattaataaagtaccttgaataattactccatttcacaagttcaattagcatataccaataaatcaattaatgaagatataattaaataataataataacaataataataataataataataataataataataataataaaagtagcaatacacatattatacattgtacaagaaagaaattttgtctacactgaaaataaaaaatttatagagaatttaatatgtaattagttttggtgagagctaggaaggtttgtgtttgccattggtttcgtacagtttgattgtattcaacttgtgattaatgaaggttttttttttcttgatcgaaaaaaaaatagcaacataaataaaaataaattgcaaagacacaatacatctctcccatacttgaagtttggtatagtaggttagaaattcccttaagaatctacagggggacagggtaatttgcaagacatgttacctatacccttcacttcaaaagcatatagtatatgtgtatatatatatatttatatgatcaccacatacttatatgtatatctatatctatatctcaattcaaatgtctaattaattaactatactctatttccttgttgaaaatgaatcccaaaatcaaatacttaagtttgacaattgcaatttctgcaatacttatatcatcaaccagggatcttataacaagcactgctccaaaacaacaattaccatattctctgaaatacatagctgatgttgtcctgttattaccatcatccataatctcatcacctcttatatcattcccctttagtaggcaccatcgaaaaaaacgacctgataagggtacaacgacatcaatttgtgatgattttcacccacaatttccttcagtagatccaaacacaaccaccattctgtgtgtggatccaaacgggtgttgcaatttcacgactgttcaagccgccattgatgcaattccaaccactagtgctgttgctgctcctactcagaacagaaccataatatggatcaactctggcctttactagtaagtataatattattcgtaaccattttgttttttcatttataaaatatttatgtatatgttttgttaattaatagtgagaaagtggtgattccaaaaacgaaaccaagcataacattacaagggcaaggatatttaaccactgcaatagcctggaacaacacagcaaactcatcaggtggaacgttctatagtggctcccttcaagttttctctgacaattttatagctaagaacataagctttatggtgagaaattgatacaatatatacatagttttataaacttatgtacatatatagttctataaacttattacatgtttgttgtaataaatgtatgtatagaatgtggctcctattccaaaaccgggggatgttggagctcaagcagtagcaataaggatatcaggagaccaagcagcgttttggggttgtggattttttggagctcaggacacactccatgatgacaagggtcgccattacttcaaagattgttatatccaaggttccattgatttcatctttggaaatgcaaaatctttatatgaggtacctgtatatacaattttatgtgtttctatattatttttttttccaactcatgatatatctcttcaactaacat

SEQ ID NO: 224295 - DNA, 1129 bp, Cannabis indica
gtattaaagtttgttgtatatatatttaaactatatgacataatttaatcaccaaatattttttatatatatattaatcctacattaatacatatatatatttgtcacactttaatatttttatttatattatattataccaaatagtataaaaaattaatccatctcattagaaatgctgatttgtcaattttattgtaaacaaatatcactccacatttttctcacacataaaatgataataaaacatatattatttatgaaataaatgatatatataattctaagaagatcgatgcgcaaaaatatagagagatacttgaatattttacaacacaccactacattaataatattttaagctcacaaacaatgataaaattaagcagaaaatattattattattggacatattaaatattaggtgatctatatatatatatatatatatatatataaatatatttaagttttaattcaacttagaattttagatgagagattggcagtgggtgaaatccatgacgaagagtggcttcccaaactttgtgaatatcagtaatggtatggaagccacactcatgctcattccaaccttctaacccatgtactattcccgctatacgccatgcactcatcactcttcttggcaaccaattctgtccataacatatatatatataattaaagtactatatatcttgcatgcatgatcatatatacttaattatttaatagattattattattattattattattattacctcacatgaatgaagattctggagagttgaaggagtgtgccttgctggtgtgtaatggtaaagcagtctttgcgaaatggtttaggtgggaattgagagaaaggaatgaagattgttccctttcgagcttttacttgttcttctttactcaatccatctcccactaaccaaatctgcattattacgtaaatcatgttattatgactattattattattgatcatactattagatatatcattataccttttcagaataactttgggagaacaccaaacattcattagtggtagaattattggacatattgattgatgatttcttcagtttcttgtactcctcctccttagaagaagctacct

SEQ ID NO: 224296 - DNA, 1933 bp, Cannabis indica
aaaaaaaattgaagaaaaaaataatatatccattttagttagttacaacatataattataaataaaagtgatatctatgcacataaaataagctttggtataatggtaaagtcattccatacatgtataggaggtcatgatttctaatcaaataaaagtatgtttactttaatatttttattttactttttgaacttctatcaataatatttatatttaatctcttaatactaacatataaatttacattaatttttaacatgttatgcaatgtagaaaaaaaaaagatgcacccctcacttataaaagaatggtgtcaccacacctcaacttaaatcctgaatccgcaagtcatggtgatcctcactaatctacacacaaagttgttagtaagtgtatatctatattatatatgtattatattacatatattgtaatcttttttttttatatatcatatatatatatataatatatattgtatatatgggttgttgtaacatatatttaatctctttattgatctgtgtattgtattataatgtcttgatctctaagatatatacgataaacgagaatcattttgactacaatgtgtgtctttatataatacattgcatgtatataatcaaaatgataaatggttttgtatatttgttaaaaaagaagagttttgtatttagtttccagatcgatatgttaccgacaggaaaatactgtgtgtctcccaggttaataatacatggttttattgcaaaatacagatttgatgcattaattaattatatgaactccaacttaattgtatgttgtatacattaattataattaccaattacagtaccaactgttcatatataataatttgattatattttatttatatatagatatataaagtagtacatctgcgaatcgcttcattataattccatgttttctggagttgttcccttctaaaaggtcattatcagactaattgaaattacataaatcttatcttaccaatgcttcgtaattagttcacataagttaaaatgatcttcattattatataagattctcaaattggggcctggtcgccagattttaacgcgtactcatatgaaaagcaattaattttagagtgaaagaaaaaagctttggctctatctataactcgatatatagcaagtttagctaggaaacaaatcaaagtagtgtattacccgtggcattatttgcacatgcaacatggtactttatatatcaaccatatattaatgacgtggtttaatgatgaaatgtcaaaaatttattttcactttcaaaaaagtgttaaagaaacatttggtgcttgtaattaattcttctcattttagaagtcttgatatgaattgttattttgaatggaatacataccaaacgttataattcacatatgtaaaataatatataagctaaaataaactaattttttagataaattagtttaattaattcttgttaccttagatttttcccaaaatacgtggcagcagctgagggtgacacgtggacttaaaagagcatccactcacgaaaatcaattaagtcttggccaggaaagtacatcttatggagtgagcctcccggaggagagcataagacacgccttttctccaggaggctagaactgtaacaaggcatctccgggaaggaaagagattgttcgaacagtcacttcgcattcaatgccgcatggggggaaacgtataaaaggatttgacagatggcgtaagcccctttttacggcgattacacaacaatcgacgagtctagtgacggctacattgaggactcacatcaatcaagggaggataaaagattatatccacctaatcgctaagatacctacggtataggtcatgtatttcttattttggatctgctaggaatttgtgccattaagagg

SEQ ID NO: 224297 - DNA, 1488 bp, Cannabis indica
atgttccagaagcatcaaccttttgcttctgatcagggttaccaccgtcggtccccttacggacattaccactagcaggaggattcgatgccatggcggcttcctttgcagtctgctcttttgttacatgctgctcagccacttcagcaattaaggctagctctgccactttcttgtacaaagtgtcatgttcagtggtaattttcaagtcccgactgattgtggcattcagtcctctcacatatttctgtttcctggtgaaatctgtgggcaccagatcaccagaaaacttggacagccgatcaaactccagagtgtactctgccacaaacatttttccctgagttagcttcacaaaatcttccatatgtgaagtcctcacaacaatattataaaatttttcttcaaaaaaattcttaaaatcatccctagtcattacattgacgtcacgagtctgtcccacaatatcccaccagacgtgggcatcatcttgtaacatgaaagctacgcaattcactctctttgctccagtcactcccatattatccaggatacgggtgattgtactcatccactgctcagctttaattatgtcagtacctcctagaaaagttggaggtttaagcttcacaaatcgttcaaacatggaatctctatacggcatcataaacccctggttacccaccactggcacaggcactggtggtaacacttgctcaacatgggcagccggtgccggttgccttaatcgacgcaactcttcctcttgacgaagtatgatacctcgcatttcatggaacatctgctgcagtcagcaggaggattagcattgccaacccccgcattatcccccggattctgcggaggtgcaggcggtgccggtggattggtttggtctacaccatgctctacttgctcgccctgtggtctagatgattgcggagggtccatttttacaagtacccctgtaaccaacaaccccagcgagttaagcaccaataccacacttatgcacttattaccttaaaccctaactcaactatttacttcatataattaaacacttaacatatagcattttaagcatggcatcatatatcacataaatactctagatgcttacatactgcctaaaatggaaagcggtaaataattgatcaaataagcagtaaagtatttactctcaacacttactacaccatgaatcgagcttaactcttacgatgattgtaggaagtttaaaaaccttggcgctctgataccaaactataacaccctaacatttaggcaccctacccaagatgattaagaaaccctaatcccctaaatgtgattactaataaaatgagcatggaaattaaaatttaaacgaaaataaaataaaaataaacttgtaataattttaactttacaaacagaagttacatgttttgggatcccaaaaattgttttacaaaatattaccagtcttttcccttagccgaccta

SEQ ID NO: 224298 - DNA, 2024 bp, Cannabis indica
acaagaactataattatctaagtgaaggggtattttaaatagagaatgagttgttcgaccgccatgtaaaatagaagctgcaatacccaagatgcaacagctagtgctatcatttttttgaatgaactgtagccaaaatggtcgtatacaagaaagtttttccagttcctccaggaccatcaataaagaaaaggccagtttgattgttgaaaatcgtatttaatattaagttgaatgcatttttctgtttcaaatttaataaattagcagctaatatgccatcttcggtaacaagaattgctaatggttcaattatctctttatattgtttatcaattttgttgtcacttatgtaattatcaactaagttataatcattgatatcttttcccattgaatatagaataaatttgatgtgatttagaacattagttcttattgtaggttgggtatccgttatagtataatagtcttcagacattggttgttcaaatttccgccataactctttagggttagtaggtttacagtatactaagatggtagcaaacaaacaatgtaagctatagggcatattaaatgatgaggcttctgataaacattgttctaaatttgtgtcagcttctaataatccactacgtaaagtagcttctcgaaaagaggttacatctttacctttaactgtctttaaatagtcaaatgaggttggcccacgaacatgatttaataataaacataaaagaatacctctcaccttctattgggttaactgtgacaagcctacctaaagtttcaatgcgctttctaatagtccaaattttatattgttggttccaaacaaaatgttctggaaactctctgtaaagtaatgttttagctttttcatcaattttattcatttgaaaaaattctgtcaacatagatttcgatatattattatcacttataacattatttaaataagttgtatccttaaaagtaacagattgtttattttcaagatgaacttgtaacacttgtacatgtggatgcatctcatttaatgtaaatgcatatattctccatgtagcttcaggaggagagacccatctaccaagttggtagagatctatttcattaatatcattttgatcattttctgaattaatgtgaacaacaatacgatcatgtcctttatagacatatttgtataaatatttgacagctttaatagtgaacaaatttctacattaagatgacagttatattttgcaagtagataaggattataagggataacccaacgattatctagattgctacctcgtattttaactgatacgttattatctcttcttctataatttggataagaatcatttccataagttgtttgagggcaaaatgatttcggataacgatttcgacatttttttatttttcatcatgcatacatttgatggattaagttgaccacaaggaccatgcatcatatgtttaatgacaatggagaaaagatattgatttatatttttatcgggtaattcagcacagacaaatctgtcaaaggattctggcgctataatttttgattgtggttttaagataattagaaaatgtgcatgtggtaaaccccttttttgaaattctatgacataaatataggcagctacaagtccaaaaatttgtcgtttaaatagatctatttttaattcttctaattttgctctaaagatccttgcaactaaatctggtctattttgtacttcttcatttggaagtaattcttctttaatttctggccagtttgaattacatgttattgttaaaaaaatatctggtttcccaaatctttgaactaatgacattgcatcgacatatcgttttctcatatctctaggtccacctataaaggaagctggtaaaataattcgtttgccaacttgtgaacctcgattttctccaagttgtatactatcaattacaccttgatatagttcacacctaatttgatcttgttttttgcgaaggaaatctagtctaga

SEQ ID NO: 224299 - DNA, 1153 bp, Cannabis indica
ttgttggttaattttttgtagttgatttagagtgattatatattgtttgtgttaaaatacacttagttttgatgtatttttttttttttaatttttagtcgatttaatatggtgtttatggtattttcagatctagtgtggtggtggttgaggaaaatgaaaatggtgtatgttctcgattatttttcaaaaaaatctcgataggttatcgataagatttagcttttggtgatggtcgttgaagatagctattgtcaataggttatcgatatgttgtagacaggttctctatcgataaaagattgaaaaaaatttgtaattatatctttttgattaattctcgcttgaatatcgattaattatcgacatgttgtcgataagagtgatagtcattaagtttagctattatcgaaatattctcgacagttgaatcattgcaaagaaaatataattttgttttttattgattctcacttaaatatcgattaattattgacgagttgtcgataggctttcgatatgattgagaattttttttcgctaagttggttatcattgctggattatcgatggattatcgacagaatatcaatatgttcttgacaagttatagtttttaacttattttgcacaaagttagaatttttaatattatttatagattatcgacgggattgtcgatatgaataaatgctcatcaactaaagcaattttacttttgatcttgttgtttttataggtatgcttaatatttggtgattcaagaatccaaatcaacttaattggattatgtaggtattattctataattttaatttatttaatatataatcaatattaaaagagtttgaatatcttagatattcatctgtattgaagtaagttttgcgattacttatactgcggttggatgggtggaacaatatgtctgttacatgagtttgaatatcttaaatattcatccatatcgaaataggttttgtgattatttacactgtggtcagatggatgattattttttattgttatgtattgtttctttttttatatagtaattcaaaatttttgggagcattaaattatagttgtgatgctgccgaaatttcggtaggagaacaactataatttttttgtcatgttggttattgttgct

SEQ ID NO: 224300 - DNA, 1679 bp, Cannabis indica
atggtcagaagaagataccttaagattaataagtttagcccgtgggaacagttggagccacctttctgtcaccaaagcacgatctaaacgaacctctatccagttatccgtgccacgacttttctcccaagtgaactgatgccccacaatgtctaagtcaattaacccacactcttgaatagtgtctcggaagccatcaactaaccagtttggatagggatgtcccccttttttgtcctcctgagataaaacattgttcatatcaccaattacacaccaaggaagagtgtttccatgagccaacgtccgaagttgctcccaagaagccccacgcaagcttctcttagactccccatagaaccccgtaagacgccactccccaacatcactaggccgaacctccacatcaacaaaatttgtggcatagttcaacactttgacttcttccttattcctccatagtaaagcaactcccccactcctaccacatgcatcaaccgcaaacataccttcaaacttcaacttagctcgaactcgctccaacacatccttacgacacaaagtttcacataaaaagatataatctggtttcctatgggccacggtatcatataggaattgtatcgctcgtgggttgcccatcccacgacaattccaacttaatgtactcataatgcccggtgggcctggaaaccagaacccacctcgaactcgttttttgagagtccattaacatccatatcagcactatcctccgcatccatgtcaacatattcaggcccaccaaccccttcatgttggcgccttcttttggactcagtagaaagcccacggcctccttgtcctccatgtgggccgataattccaccaaggaaaagagaaggttgacctttcccacttggcacatgatttccaaacacaaccgactttcctctttcattgacactagatttggaaacattagtcttattgccattattattcaacttctcattaagaggaatattcccctcatccaccaaatcaggaatatcatcaaccatttttgactgggggttattctcaaattccaaacaaggtaacttcccagtttgcatggtcggcaggtgaacctcctcctcatgtctcaccggggatgcatggtcaaattgctcatcggcctccgtacccgtacgcagatactgagagctcaataaatagttcttccttcggggttgcgcacgcataaagctcccatatggtttaacgatctcatcctcaggtgtatcaaataacttaggacaaaagttttccgaatgacctatcaaactacatataaagcaaaacgtcggagcaaattcgtatttaaagttggcataaaaccactcaccacccgttttcttaagtttcattcgtcgtttcaatgggacatcgatgttcaccgttactctgactcggagataatcccgccaaagaccattatagttcttaggatccgattcaacaaaggagccaatgtagtttgcagctgtaaagacaattttctctgtcataaatcccgtagaaaggccatgaagttgtacccacatatcaagttgattaagcttttatggccttcggatctccaccttcgtggaactctaccaaactatcaatggtagccgtacttgtaaagtccaaggactgccattgataacacg

SEQ ID NO: 224301 - DNA, 2261 bp, Cannabis indica
ctccttagcctcccgaagctcacacctagccttggcaacgacctcaccctccgccttcagcgcctcccgatgcctcgcctccagctcagcctcccttcgttgggtctcctctcggtacttcgcctccgcctgggcttccctctgtttagcctcctcctcgagcttcgccttagcaagggcctcccttcgatcagcctcctcctagatcgcccgcctttcagcagacaggtcccgcaggatcctcacagcctcgtctatgccccaaaattcggacatgacgaagccatgattaactatggtcttggaacggcggttggtctccgcagtaacctgaaaaaggagacaagagtaagatcaaatgccttggaaaaaatgtcaagggaagagataaactgcaagtacataccgcagccatggtgttgctgatgtcttgaacctagtaaacggagttcaaggaggcgcaggcggcatatcgcttaggggggaactgagtcggatgggagacatactcgctggtcatctccgaggcaaagggagccaaggtgggcccaagaaacgattgaaccagtccgtcagcgggtccatgttcaggtcccacgcatttcggaaggcctcctcgtcgagagtgttttgctgctcctccagtaagattctcttcaaggcctccacctcagcatgcccccggctgtactcgtcaagggcgtaattttatttggctatccagagattctgcctctcctcctcaaccgggaccggagtcaacactatgccgtgaggcacagtgtattcctccgcctcgaaaggaatcctggagtcatggctcggggtcggagtgtccaccctacggggccgcttagatggctcctcctccaccatctttccctttcgcttacgctcgagggcggccgggtcctcttcttcaccttcttcaacttcctcaagaacctcctcctcatccaccaagacaatagtgcccgaaggggcattggaggaggacctcccgggagtgaccaactgagaagcagcaggaggtggggaagccccaggactgtgagctccagcaagagtggccaagagttcatccataggcctggctgctacaacaagaaaataagtcaagtgtgagaacattcatgaggacagtatacacttagcaaaaatgcaataaagctagtcctaccctgactctctaatttggccctagaaaagtcccgaatcatagcactggcttcatcatccttgagaaagctgtccgagggaaggaaccaactagaggataaatgtgttgaatggtccaagggaatgggcgtcggaggtccagcacccatctaggaccgacctaaataatggcgtaagtgggagaaataatactccttggcatgatttccccaccgggtggagggcatcctaaaccttcggagacgttcatcgaaccctataggcctaaggcgggtatactcacggacgggaggaacatagtgtattattaaacgggacttacaagaacccaaagtcctggcatcgggagccctagtatttggtactgggaccacaagcttgggtctgggggtccttcgctccaacggagctccaatacgaagggcccttccggcggtcgcctgggccttaatgtaagccagctcctgttccctcttgaagaggtacttctggtatttgtcctccgccatggcgatgatgtcatcccggaacaccttctctgcggccagagccctcacgttcgggcagatgactttggaaatattatagtcatccaccgactgatgccccacgatcagcttggccttccgacagtgctctgtcgtgaccaactccccgacgtcaagggccttcttgtcgtacgtggcgaaggtcttggcccgttgaagaaatattagagtgggttcattcatcatgtaaggcggatcctaaccaactccgtgagaagctctggatgatccacggccatgaaaccggaggagaagaagaagcggtgatgatattccttcaagtgcttctgctggttgtgagggaccgggccctcattcaaatgatgggccaggagaccgtaaaaattgtctttaagtttatctcccattttagggatggaaacaagttcaaaaaatacaaaatttctgccggactgggcgagccccagctccaggcatcataaaaaatgaacaagcctgaaagcaggcgataagcttgaggaataagttgatatgtgttggaaattattttaccacgatcttagatctactcac

SEQ ID NO: 224302 - DNA, 2158 bp, Cannabis indica
taggatctgacaggttgtactcaatacaaactttctccacctttacatatccttaatcacaaaatccttgatattgtgaaattcctctctatatgtctactcctctaggtatactggattctttactttttggcaactatttttgtgttagttaggaagtaacactagtacttaataaatttattattggtacaatgccaaaaactataaagaactttccataggttaaataagtagctttcctgcaactttaacattcagtctcactggtagagttagagatttcagataggtttttacacttcaccaaaatcactgctccaccccagagtaatcaccatctcattagtagactttctagcatcaagcaagtctagaaacctgatttggtgtagtataagagtattaaaataccacccttatcaactaacatatagtttctcttcttgatcttaagattcacttgattttcttccaatgttcctttccttctctaaccagcctattgacctcgatcttcagttgcctacactcataagtgtcatggccatgctccccatgaaaggcatagtactggctcttatccctttttgtcgggatcagtggtcattttggcaggccactttgtttccttcattcccctcagccgcctcattagctcggttaaagtaatggtcattcgaggtagctcctcctcgctctgtggagcattcagttgccttgtctgtcccatatttgtcatcactgtcccacaggcgtttcttttgttagccgatcgaccctcatttctactgtgaggccgtgcagccggcattcgatctttggtctcgaacaggaatgtatctcccattgctgacgtttcccgagacacctcctcagcgtgtcgtttttcttctaattccaaagccacgtatcctcgtgccatggtcagggcccttgttaatgacagacctagttccactattattgccttttttcatattcgagccattcagcaacccttgcattagtgcctttgtcgccactgaatcagtgcactttgggatactgacgtattcttcactaaatctgttaatgaacctttccaaaggctcatccggtcgtcgatgtattagcattagatctgtgtctactttcgcggtctggacacttatcgcaaagtttgtttggaaccttaggatcaggtccagatacgagtttatcgttccggatgccaaattatggaaccagcgtagagcggggcctcttaatctctgagtgaaggttttgcatttgattgcttctaggtcttccaacgggatagacacgcttaacattttctgttcaaattgacatacattctctgaggggtcccctgtcccgttatattccggtaactttggggctatgtaaagttgtggagcctctacacataaaatatgatttccaaaaggcgagagggttgatccttcgattcgtgcccatttactgtgtactcccatctgactctttgcttccaaggccagtaacttattccacatcatttcttgcagctcttctgtttctttattcgccattgatggacttccggtaatcattggctctgtggttcgctttcgaggtgtcgtgcggagtgcttctgtttctgttatttcctccacctcatccctggctctcctttgctggtcctgcgaatgtgttgaagcttccaatactgctgggttttcttttcccccaagttcttcatgcatgcaccggatacggttgctagggtgattactgttaacgttgttttctttctcagcaatttctcccagctgatggttgtcggtttcttccgcatgcggagtgcgctggtatccttcgaggataactttcatctgtctgttttcattttcaagcctctgaatgtgttccttcttgagggcaatttccgcaccttgtgttgccattttaccctcttgttgctttaacctctccagaatctctcaccatggtgggatcgggtgcaatgtttcaccattaacgttcccagtgttcacctgggtttcgcgagtgctatttggatcatcatgcaggacgaggtcttcctgttcattcgccatgctttcaccttcttcccagaactttcttctccttcttctttgttcgaatatcgatcgtcccacgaaaaggtttt

SEQ ID NO: 224303 - DNA, 1888 bp, Cannabis indica
attaaataatttttctgtaaaaaataatatagtgtcacaccacaccaacctaacccgcccaggctcggacggctcgcgcgtgtgtggtgggtcaagtgtgtgtgtcctcacccattcacacaaaaccaaacccaaatatcaaagttgcactctttatacccttgtaaatgagggttcatatcccatgtgagactttttccacttcacacactaggacacttacatatttttcttaaaatattcataaactttccaacaataaattatgcttaatttgctcatttcgtaaaataagcctattatattaacttagtaaaattataatcttactcattttattctcgcaatacccatattatttcatatttcataaaatatgctttaattaattataattaattattgaaatattacaaaataggtgttctatatttttaacatcaactccacacatcaaacatatcgactcatcaacacatatattaaaattaaagagcgtttcttttgtttgcaatctatctaaaattgctaaccacattataaatctctgtataataaccctgccccacactttgccataccacctcactgggtactgtgttggaagtagagacttgtagccttgactaatagtacttggtcatgaaattttcttgagcatttaccacctgcttgaattgctctttacttttactatttgctttcaataccagttgcaatgagtgatagagttatagtcctaccagcttgcatctttaaatagacaatatgtacccaattgactcaaagattgtcttgctttgaaactattgtccatacatatttctcaagaatgttacttggttccattgcaaattgaaacttcttgaaccctaatccttcatctttacatggtttacataattttgtccatgaaacataattgggaccaacatattctacacttttccataaaaaggaaagtaacataatctaagtctaatgtgaatgaatcagaattaggactaaattaattaaagttactcttctaccaaatgatagattcttggaattctatgctcttatctgagctactattttctcaatcagtcatgtacattcagcaaaggacaatcttttagagtaaattagtattaatactcctatgtacttaaaagccatttgactccttacgaatccagatgcatttaatattctttgaatttcactttgatggattccacaatagtaaaccaaaagtttgtgaaaacagtttgataccttgaagcaagcatgagatagacctatcaaaaattaccattgcagaataataaaatatcgtttgcaaaataatgatgtttgagttcgtttggaacgtcgtattaggtcgtattgtattgtattataataaattagattatatatcatatttttatataatatactatgtcaaactttaatttatactaaaacattatatatttaggtgcccataaaagttaatatcacatatagttttatataaaaatattacataaaatataattcaatataatactatacaatacaatatgatgtaatacggcgtactaaacgaaccctttaaaatcaatcccgaaatcctctcatgaaacataaagataatttttggtatgataaaaaaataaacatatatgtatatttaaatttttttaaaaataaataaccgtaagtaaagaaataaatataaaaaaaaattattaagcacctttgtgaattttttcttctattaatctttctattaattttagggccatttggcacaactatgttgtaggaaaaagcaggtgtacctatgctgtgagaaaaagcagctgtagcatgtgctgtgagaaaaagcagctgtagctgtgttgtgagaaaaagctat

SEQ ID NO: 224304 - DNA, 1354 bp, Cannabis indica
tacataatgtatgaattctattgttttggttcctttgatggttccaattttgattgttgttattggtctgaggttgactgttgcggtttggattcgctttgtgattctgattcttaaagtttttttcattaggtttcagaacagcagtggatcttttattagtgttgttgttgtttccaacaacaagcacctcttccttttggtcttgtttcaagcttcctcctcaattcaaagacaagtgatcagactttccaacaaaaactcttttgttttgttcataccttcagacagaattttggtgagctattttctgaagcttgtgagactggacttcaactgatttatcattggtcatttgaaacttcaggtagcggctcacagcgtatttttttattcccgcctcctcggtatcatattttttgtataatgcttcctatatctccttggcagatttgtcagaattataataatcatacaaatcatcagacagaccattcaaaataaaattcttacacagaaaatcattctctacccaagagtccctttccttaacccgcgattcgtacttctcgacttcatccttcttctcggcaggagatggaatctcagatacaactggtttcaaaatattaagcaccaatgcaacttttttcatggtcagaaaaaataacatcttctgtctccaacgtttaaagtgcgaaccctcaaaacaaaaagacttgttaatgtcagcagtagaaccatgacattcatcggtagtagtcatagcagaacgaacgtcttaaaatagttaaataaactgctagcaaaataaaagaggaacgatattaccgaatgaaaaaaattctaagttgagtcacggactaggtcgctctctttaagacgttcgcgacacttcccaggagtgtgtaagcagtctgaatttttcgatcgtccccaggataaaacaatccagtcgcgctgtatcggaatcccactgcactgtagagcaccgtcgaatacacccaaagatatttggtactgcagatggaattttagtatttatgaaaactgtatttttttttctgataagaaaagatgtattcttcccatcagttcaattgcattatatagacgaatggattgaaaaataataacaagaagaagaacattttctgaattgtggagtgagttggtttgaacgtgtcccattaattgatacgactaagtaatcagttttaattaaacacgtttcttaattaaattaaaaaataaaaaataattattttattaaataatttttctgtaaaaataatagagtgtcacaccacaccaaccaacccggcccagttcggatcggacggcgcgcgcgtgt

SEQ ID NO: 224305 - DNA, 1900 bp, Cannabis indica
agatgattctggagaaaacagtgcagagatcaaggaaagactggtcaagaaagttagatgacgcactgtgggcctatagaacagcattcaagacgccaatcgggatgtcaccatatcggttggtgtttggaaaggcttgacatttaccggtggaattagaacacaaggcgtattgggctatgaagactctcaaaatggatttaaaggctgctagagagaaaagattaatgcaattggatgaattggaggagtttcggaatgaggcttatgagaacgctaaaatctacaaggaaagaaccaaaaagtggcatgaccaaagcttagtcagaaaggagttttaacctgggcagcaagttctacttttcaattcaaggttgaagttgtttcctggtaagctaaagtcaaggtggtcagggccatttacagtggtcaaagtgtttccttatggagcagtggaactgaaaggtgaaagccccgacactttcaaagttaacgggcagcggttaaagctctacttgggaggtcaatttgatcaagccaagtccaccatgattctggcgccactatgaagaactcggtcaacgtctagctgtgcgacgataaagacagcgctaattgggaggcaacccaaatttattttatgttttagttgaactctcttatgttttagttgttattttcttttctgttctttctaattttgtttagaaaactggtaaaacaattttgcttttctttaaatctttgtactgtatataaaaaaaaaggtttttttttcgagaatcgacccagtggccgcggccaaattggtggctgccacggccttatgatttgggcagaaaggcatttatgggaccttatctggccacggcgagggagagtgccgccgcggccatatgatttgggcagagagcacatttttttcgacctatctggccgcggcgagcccattcttggccgcggcgagatagcatcaggtggcaataaaagggcacgaacatttcaaaattcaaacacccaatttcttcaaaatccctaacctccacctccgaaaatacctgtcaaacaaccttcttcttcatctaatcccatcctacaccctttttctttaaatctaaccacaatcttcatcccaaaccattctaaatcattaattctctcatcaaacactcttctcctttcaaaatcaaccccaaatccctaaaacctcaccaaaagttcaaaaaccactatgcatcttcttccttctcaagaacttcaaggtttccttcgatggaggttgaataaaggtggattctcattgaggtaacaattctaagactctctatacaattttttgttggataatttgtggattgctggagaattttggaatttttagttggatttgtgggattttgctcaatatattgttcaatagagttgttgtgattagaaattggtttatttgtgagtggtttaattcctgggaagtggatttttaaggggaagtgctgccaaaatttttacaaattttgaatgttagaaatttggtgagatgagtcctaaaagagctagagtgggtgaacaagggggagcttcatcatccaacccacctaggggtcgttctaatcttgatagagtgaggtttgctaatatggatgcccaagagcgatttttgaaattgaaagataggccattcattgaagataggggaataaacattgttaacctgagccaaactgcaaacattcctgctacatttgcatccatcagagatcaaatcttaaataggcagtggactaagtttgtggatgtcactgggcgcagcaaccaaaccttagctttataattcctagccaactggccagaaagagaggatgacaaagtgagagttagggggttaaagtgcctgcttcca

SEQ ID NO: 224306 - DNA, 1716 bp, Cannabis indica
tttaatcttcttcgaagatcatttgtggagagacttcgactgttgccgtctaagaccagatatgcctcatcaacatcatcactttgattattagagtcattgcaacaatgcttgtctttctgggaagtagacttcttgtctctggcattagtcttatcattctgcgtagctctgcctccaaaattagtttggttaccctgccttgaagcatggtttcctttctttttctgtgaaggttggctgacagttttagacttcttttgttgtttagatgaatgatccttcttcaaagtttcatctattacccttttccttttatccttgtgaggattataagttctaggatctttaggatcaactcttctgagagcatcagttgttggagctgtttgcacagcagggttccttttggtcaggactgtcatcacgacttccatcctcgtcattttcctaagcagtatcacattgagctggtcatattgagataacttgctttcagttaattgaagctttctggacataatgaccataggatctaactcgttgggtttgtccttttctccagcaacatcattagcgatcttgtcctagtgatcatccttcagtgtgtcttgaggatcatctttcgaggtgtcttgaggatcatcttcaccatcatcaaaactattctcttctgattcatcatctatgaatacatgagcatccagatctgtgtctttgccaagttaatcattgtgacggttggtcacctcattccgatcttttgtatcccctgccttggcattaggatcagtaaagtgaaaatcaaacttatttcgagtgagtaccaggattattgagcgtaatcacctgatggtatcattgcttccttcagctctcaatgaaagcaccaagtttttatgtggttggggcgttaacaagccttaggccacgagtcaatattattatgtatgtttagatggaaaagcctttaggaatacaatgagcctaagttctctattttttcttgagcaagtattgcaagagaattcaacccttaatctaaaggatttgttgggtatttatagtgttaagtgaattatacttagtttcccttttccctctaatggggagtttatatgaaaatacataagttgagctctctttgtgaatctcaacccattagaggattggtgtgctgactaggcagattggatgtggttaatgctatcaaactgtgtcctataattatgggaaattaattgtaaattaattgcttgatcttcatttaggtaagtttccttttttggctagatacgatcttttgtcgagatttgagaagcatttattttcttattttttgcgcttgaataaaaagagaaactagactgatcttctaggaacataatgtctgaccttccgacaacacggtactagggctacatttgaatacagactatcattggcggaagctcttctagtcacggagctaaggtgccttcctagaaggtcttgtatgacttggacttggcccaaattatcttctttcggactcactagtgggcttttggtgctgacccgggatccacgtgtcccttgccggaaatacgaataattggtaccaacaggcttaggcatacttccccttgtcgtttgctggattgaagatcctgtcgcatgatggttaaactttcccactggtgggtttttagtgttaaagttgttggaaattatttt

SEQ ID NO: 224307 - DNA, 1138 bp, Cannabis indica
gtggtgggttttagggtgggagttagtgggtggtggttttttaggtagcgtgtgaagaagtagaacgaagaaatagaaaaaggaaaaggaaaaaaaaaaaagcgaaaaaataaaagaaaaaaaaaagagaaagaaaaaaaatatttttttatatagttttttgattttttaatttttttaatttttaatttttttaaatttttaattattaatattaagtagcccaataatatttctccacttgtacacttgtgtgcacattgacatgtctatttggcacttaacaaccaaaaactattagaatgagtgctgaccaaaacgattatagaggttagggagtttagccataattctttttagtctagggggttaaaccgtgccaaacttcaaagtttagggagtttggccgcaaattacccttgttttttaaagtggttctaggtcggataagggacgataggggcctgataggggacaataggggcccgacttctagttcaaaaaataaaatttgggcctacatcgggcctttaccttcaacctctattttcatttttacaacacatggcatcgacctacatcggtccttgcattgggcttacatcgggcccaacctaaaaaactagatttcttaccgataacacaaatctgatcccaaatcaaacctaaattctaactcaaactcacaaatcacagacaaattaataaatttataaatttctaccataaatcaacaaacttataaaccctttcactaaaaaacacaacaaaatgaaaaaaggagggtccgaaaacttatcttagtcattgggatggccatcagtgtcgtcggtggtcgtcggtccgattgttgggtggtcatgagcgtcgttggggcagtagatcatcgtggatggtcgtggatcgttcgttagggcagtggattaaacgaagagagcgagagagaaaatgaaagtaaagaaagtggggagtttgaaaatgaaagaagtatttttgagtttaatataaaagggacttattttaaaaaaaaattatacacaaaattcaggaattaattttccaccaatgttccatagataatcaaatttcctttttataataacaacttttctaacaaaaaaacacaaacgcatagatc

SEQ ID NO: 224308 - DNA, 2183 bp, Cannabis indica
ttgtgattggaatttagatcaacttttaactttgagacactactaaaacaaatattttacagcaggtagatgaggaaaaacgaaggcaagatgcaatgacgtgttgggcgatatggaggcatcgtaatgaattactttggtctgagaaaattcccacggttgagagcgttgttcatttagctaaagccctcctcacagattggactcgggctcaagatacaactatgattcccactgctgttaataccttgaagattaatgttgatgctgccattttttcagagaatggaacttatagcttcgtgagggtaattagagacgaaactggtgccttggtagaggcatttagctgctgtcgttcaggagtgctgcagcccgaaatggtggaagccttgggtgttaaggaggcgctgagttggattaaggtaaaggattagaaggaggttgtcattgaaactgatagtcttacagtggtgcaagcattacgtaggtctcttcctatggtttcatactttggaagtattatttctgattgtaagatgatgttaaatgatttgagagatgtttctgtcaattttgttagacgttctgcaaatagtattgctcacttcttagttcgagcatcctatttagttgttgatcgtgttatgaggagtagtgatgttactccagattttaattatgtaatccctgtagattgcaattaataaaaatatgatttttattttttttaaaaaaaacaaatattttacaaataagctatattttagccataaattactaattactaattactaatttgcatttgcatggagattctctaaactactcagattagccaacaatataaatactggttacctttctttcaaaaaaaaaaaataaataaatattagcttaccttaactattttttttccaatcaaaaataaatacgtctctttttaactggccgaattccgagatccaaacagacaatagtattgtcttttctcctgtctcgtctcatcttattccaaaagtaaaattttgacgagacaaacaatgcgctcttctgcgcttaagctgaaagagcagaaaacaaatattccacaagttccatccatggcgacttctgaagatcacagctcgaaacaacattcattatcatcatcttcacctgttgttgtggtaatggttcctttcccagctcaaagccacctaaaccagcttctccagctctcccatgtcgttacttcattatacgacatcccagtccactacgttagctcagctcttcacaattcccaggtcaaatctcgagcttcaacccttcttcaccactcccccaaaatccattttcatgatttcccaactccatactttctctctcctaagccaaccaagactcctgacaacttcccttcacatctaatcccagccttcgaagcctctgttcaccttcgccagcccttttcggctctcctcactaaactttcaactacagccagaagagttgtcgttatacacgacaacttgatgagctatgtcgttcaagacactgcttctctagcacccaactcggaagaatatgttttccattgtatctcctccatttcaagattctcctctatccgagacgccatgggaataggctttgaagctgatcaagataatcagcccaaggttccatcattaaaagggtgtttggatccaagatttatagctttcaaagataaacaaatgccatttatgaggagaaacaaatctgggcatctttacaacgcttgcaggtttatggaaagagactttctcgaattcattctcgagaaagagcgcgaaaaagatgagagtgtgaagatatgggcaattgggcctttagagactgtaacaacattcaagaagatcccacttaactccatcaataacgtttcagagaaagtttattgcttagagtggctggagaaacagaagcctaaatctgttctgtacatctcttttgggactacaacttttttggaggacaaacagattgaagaaatagcaattggtttggaaaaaagtaaagtaaacttcatctgggttttgagagatgcagaccgaggagatgtttttgatgaccagaaagttggaggacgtcaacttccaaaagggttcgaggaaagcatcaaaggaaagggattggtggtgagggaatgggtgccc

SEQ ID NO: 224309 - DNA, 1251 bp, Cannabis indica
agctgtgaaggattttgaagcattcgtctaggtcctccacatgccccccgtcctttttggacctttgacatgtatgtcgtccacataaacttccatgttgcggccaatgagatctttgaacatcatgttcacaattgatatgtggcccctacatttttcaacccaaaaggcaatgattttgtagcagtacaggcctagatttgtcatgaagctagtgtgctcctggtctggcgaatgcatctttatttgattgtaacctaaaaaatgcagaaacttaggatttcctggtcagctgtggcatctacaagctggtcaattctgggaagcagaaagcagtcttttggacatgctttgtttaggttggtgaagtcgatgcatactctccacttttttttgggtttaggcaccagtacttggttgatacccataatggatagatcgcctccgttatgaagtcatgggctcatagcctcttgacctcatctttgagtgcttgggcacgcttcttgtccagcaacttccttttttgttgaatacgtcagatattttggatcgatgttgagtgcatgggtcatcatggaggggccaatcccgaccatgtctccatgtgaccatgcaaaaaggtctaggtttgcccttagaaatcttatcaatattgatttaatttctagcgctaaacctttcccaatctttagtcttcttgttgggaaaatgggatcaacctccacttcttccaactcttctacaggtccaaagcttcctataggatcccgaaagcgaggatctttgtctgcatccctgctttgggcttgacttcattactttttactaggcccatcttttgggcccttggcgggcatcttctctttcttgaccttagacaaggtcaggttgtaactgtgacgggcagactgttggtctcccctcacgcatcctactccataccttgttgggaatttgaggcataggtgatagatggatgtcaccgccttcaggtcattgagggctggtcggcctatcatggcattaaaggctgatggaacgttgattacgacaaactacgccattagagttttggtggttggttctctccaactgtgaggggtaatctgatatacccgatgagagtgatgccttggctaaagaagccatacatcacttggttgcagggcgccagctcgatgagttggagccccatattttatatgttgacttgaaaagaatgttggaggaggctccatcatccaccat

SEQ ID NO: 224310 - DNA, 1517 bp, Cannabis indica
aatattactttctctaaaataatttatttctctcttatatattatttaataatactattatatttaactaattaatatagttttatccaataaaactatatagttaaatattattaattatacaattcataatttccataaataatcaaaatattaatttcacaaattatatttttcccttaagaatttatttcccatagaaattaattcttactcgaaattcattcattaaataaaaccttctccgatacaatattgtatagaggtgactcagggaccatgaatctatatttcaaagctctaataaacctaagattattatcaatctcatgaatataataatctaatttattaattatattattaatctactatgaaaatggaatttcactctttgacagtatataattatgtttactaaattcttacttgtagtttatatatatataatcaatataagtagttcaccctttaattattagttcataattagagttggtcaaaataccactttactattctgaatatctcttgattccttatgtaccattaatttaatgtgaacagttaatctataactcattataagatttggatctaactgttagtactcccagaattaacactagaaggaaattaatattcaatccgttaagaaatcttcgattccactattgtataacatgttttttgccactcatgttattaagatcccaaaatagaatttataagaatcatcttctcttagaaactttaacgagtgaatcaaagaactcaatacaaaagtaggagttcatatatattcaggattcaggttgatctactaatgatcatcattgtgatatgaataacttttttcatggtaaatgccaagttaatgaaagatgttttttacatatcggtctagtcatgcataatctgattgtacacagtacctttactacatgtccatctacatatgtgatctgaatcaaaatcacacacactagaagtacagtgtatagtaaatcatacttggaagttccttattaaagattctcaaaaatttaatacactaccgacttattttatttatatcgtataatcataattctcttgtacatccatacaagattatacctcttccatatgaataaggaatttttagatatttagtaattatactcttataattaatatatcatttatcttataattgtatttcatatattctctaatatattatctattacttacttacttttaaggcataaatcccaataatctctcacttgcactaagagtgtagctgattctataactcttatagacattatatcttattcgactgttcagactaagtcatatgaatgagaccctccacatgatgcagtcctagatcacgaagaccaccacttcattattggataaatatacagaattagattctagtatattttgtttatttactcttatatttctttcaggttcactttgtttgattaatcatttaatattctaaatattaaatatgttta

SEQ ID NO: 224311 - DNA, 1920 bp, Cannabis indica
tgacgggatttacattatcaatctcgaaaagacatgggaaaagctctagctcgctgccaggattattattgctatgttcccagcgagacgccccagcgagacgccccagcgagatgcactttgcagcgaacataaatcaacgttagcattgacccattaaaagcggataaatcacaactgtatgattttgagaataaccgcatttatttacgtggtgtgtaattaaagcccacaattttggggaaatattattatgggatttgaatctgactataattaactaccaccctatgtcactataaataggggtagaatgtactgaaaaagggacaaaaaaaattcttgagagaaaagaaccctagtttgtatcagaataatctgaataagatctactcgtggactatgcaaaatttaaactacaaaactacgtaaaaagctttgtgttattttttcttcttttactttttattatttatgtgcaaaatttatcacaaaaataggtttaatatcgttaacaaaaatctgcgttaacagtttggtactttcattgagagcctacgtgaaataagctcagaaaaaacccttctaaccaaaagaaaaatctttctccatggctgataacagagaaaatgtcgatactcatactgaagagactactcaccgtcctggaaaagagccgatgggctcaagtaggcctcccaattcacgaaaaacacgatctacacggtccatgcgttcaagaaggacccaacctgaaggtggccaaaacccaggatctacacggtccacacattcaagaagaacccagcgtgaaggtggccaaaacccagatcagggaatgaagaacccaacataagtgttggtggtgctcaacccatggatgatgatgcctatgatcccacgagatacgtaccgattgttgagttgaaatatcgtcatctcaggcgccgcctcgaggaggcaaaccgagaaacgctgagttggaaagggaggcagctgcaaccagggcgacacaggaaaacaacgcacaaaaccaacttgatcctgaagtgaggagaccgcgaggcagacctcgcgtctcacgaaccaggaggcaggagacggctccggagaaccctcagaacactcaagaagaacaacctggggaaattgagggtccccttgaaaatgaacaaccaaatgaccaaccaaagccttctcatagaaatgagaacagaaggcgacccgggaccagggaacaggaaatcccttgtgagaacgggggaaatcctaggactcaacttgggactggtgagttgccatcgaggcatcgtcaatgtctttctcgaaccaacagggaaggggcacatacaaaccccagtagggggaatacaacaacttgtacccaaaggagaaggtcaatacgtgacgagacgagtgtcagcttgagacgcacaagaacccgtagtcaatcaatgcaaggaggggatggaacccatcgcgacactgatcgagagagtataggcacaagtagaactgaaagttactcgaggacgaggtacatgagtaggacgaggtccatgagtagaacgagatccgtgagtaactatgaccagcgacagccggatcttcgtaactacttgaactagaaaaaacctgaccttcgccaaaaactcagtcaaaagcaagaggatcctatccaattgcgaattaatgaatttaaggacaaattcaggaggtatcaagtaggggaacaaggaaaacagtctggatacgactcggacgaggaactcaaacctttccatccaaacattatgaataatgaatttcctcagggattcaagaaccctcatgtcttgtcatatgatgggaatacagattcgatcgcgcacttgaataattttaatactatcatgcaagccagtaatgtggcgaataatt

SEQ ID NO: 224312 - DNA, 960 bp, Cannabis indica
ggggctggcctcgacgggaacctccaatctagggcctcctgatcaggaaggtttctctcagcctgagacccctctacccagtcatcccccgcgggtgtcggctgaatgggacgagattcctgccttctggattaaaaaggatgttccgtttgaggagtaggctgagaattatttcaaaactgtcctggacgccgtcagaaaacctgatgatgatttctacatctcccacgggcgtgattctattttaaaggatactgccatctcgggaataaaggtattttactctttgcatgtgcctcgatccgttttagtttttgctttacttactattactcatacgtacctctatttttgctagacggctttgagatgtgcccatgctatgaagttcgccccacaaactgacagggagagggagagtttggccaagggctattctcgctacaagaagaattatgaagcggctgttgctgcgaagacggctgctctcactaaaattagcgctttggaggtcgacattaagattttgaagagcaaagccgacaatcttgagtcggagaaaaggagttgggaccttactcggtcggcccttgagtcagaaaaggggactctaagtggcaaggtggcttccctggagactagtctgtcagcggtgaatttggagaaggccactttgttgcaagaacgtgatgcttttcattctgaggccgagacggctaaggacaaactctcttccttgagtggaaagttgtccgaagccgagaaggcgtcggctgaggcccaaaaggttctggttgctgagaaggaatccttggccaaggagattaaaatcctgacgggccaagtcaaaaaggcattccttagtgggagttatcagtcgtcctttaaactgtactccgagtttaaggagggcaagtccgatacctggaatctggacgagttctttgcgaaatactccga

SEQ ID NO: 224313 - DNA, 1555 bp, Cannabis indica
agtcacaatgaattcgtactactaagtcatgaatataaagattggacttgcattaaatttggttaaaatatccacctaattaaaaaaattgaatatatccttctttttaaagttttttcttactcttccattcgttagttttctctcaaaatctcactctacacatctcaaaaaatcttgaaatttcacaagcacaaaaccaagaccattgtgcatcacttttctgttacttatattaagagaaaaagtagttttcaagcagtaataatcattctaattgaaatagttaaaatctcacatttctgatagttgtacccctttgtgaaatgtggcccggacccatctcgaaatatttttccccactagtcatactgaattcgtactactaacacgtgagtatgaagaatagtttgaagttaaattttgttaaaatgactcctttttcaaaaattgaaatattcttttatttaggataaatttcaactagttttttccttacgcttacagtcgttagtgttctttcatagggaaatagtgaaatttcatagggacaaagcatagactattgtctataacttttctattggggtttgggggtttacgatttggggttttgggttagaggttcgagggttttgggtttaggatttggggtttgtggtttggggtttttaggtttgggggtttggggttaagttgttttacattaggtgtttgggtttggggttttgggtttttaggtttgggatttaaggttttggggtttgggattaatggtttgggttttggtgtttaaagtctttggcttttgggattttggggtttgaggtttagggtttggggttttatgactagggtctagagtttaggatcttggaccaagtatttggggtatgaggttttaagtctggggtttggtgtttgggttttagtgtttctggttttcgggttagggtttggggtttgggatttggggtatggtgtttttgtgtttggggttattaggtttgctatttttgggattaaggtttggggtttaggatttgatgtatggggttttaaggttttacggtttaggggttggggtctgggatttgggttttagggtttcgggtttgcggttttgcagttttggcatttggggttttggggtttggggaatcgttatgggaatgggctagggagtgggaatgggaatatgaatagaaattggaatgggaatgggcataggcatgggcatgggtcgatgaatgggaatggggatgagaatatgaataggaatgggaatgggcgagggaatgggaatgggcacgagaatggaaatggaaatgggtcgaggaacgggaatgggaatcgcaatgggaatgggaatgggcttggcaatggaaattggaataggaatgggaatgggaataggaatgggaatgggaatacgaatgggaatgggccagggcatgggaattggaatgcgaatgcaaataggaatgggaatgggaatgggaatgggtcggggaatgggaatggcaatgctattgggaatgggattgggaatggg

SEQ ID NO: 224314 - DNA, 1366 bp, Cannabis indica
tgctgatgatattggagatctcaatgaaatccataaaactactctgctggaaatttctggtcctttcttacgtattcaggttctcttagatgtctctaagcctattcgaagggggatgcaggtgttctttcgaagccttggtaggaccaaatggcttatgtttaaatatgagggccttcagaattattgctatttttgtggaaaatttgatcatatcttttctaagtgtggttcttttctgcaacgttgtgatgatggatatcaccctcctgttctgccttttaaggagaatattagagctcctctcaagtcacagtttaagcgtgacccttttgatttggctaactctattccctttgaggagatgaatcttcgatccttggcccataatcatgatcttcaggatgctattaatcagtttcttcctcaatcaagcttaccctgttctcaggtttcttctattactttagctcctactgatcaccaggttcattcctcgtctactatttcctctcaggacgctgtgacatctgattcccagtttagtggtcttcagagtcttctctgtgctgtttctcaggcttctttgcatgatccatccactattgttcatactgataagggaaaagggattcaagcttctgactcctttgttcctcattgttctcctcgaactttatctataggtgatggttcgggtaccaagagatcttttgttaggcaggaggtggctgttggttcctctgttcgtggtatgttgaagagggccagggccaatggtgctgatgttatggttctttctgatgattctgatcatgttgtactggcggggttgctctggaaaaatgagtcttatatgttggaatgctcggggtttggggagcccccgagcattccgaaacctttcccttttagtgaagcagcataaaccttgtttactttttgttattgaaactagctagggactgggtctagttctagttttaagtctaggttatcttttgattatgttttggaaattcctagaaaaggtttaggggggaagtttgcttcttttttggactgctgctgttgatgtatatattaataactactcctctaatcatgttgactattttgtatctatgaatgataatattaatactaaatggcatctctcttgtttttatggctctccttatgtttcaaataaaatggatacttggactcttttgcatcggatgtatgatattgctcctagtatgccttggtttatatttggtgattttaatgattacctcactttaaatgataggtctaatgcttctaatcctcctatgtatgctatgactaattttcaacactttcttaataaatatagtctgct

SEQ ID NO: 224315 - DNA, 2368 bp, Cannabis indica
  modified_base (2357)..(2357): a, c, t, g, unknown or other
taggagtctggtttaatgcatacgcatgtgtgcatttaacctctttagaattggtacttagggacatctttttgtgacattttatctgtatctagaacaataagttctttctagactaagtcatcaacatagcattctattattaacattaatgtaaaatcatttctaaagatcaaataatcactagagaccataaaacatttcataaggaccaagaattgggcctcaatcttaagaatagaaattgcaaaatttcctatcttatcctcataattctgttaggttattactatccatatgttatcctaaattttgtgcacctaacgtggcatgtccacataagccaagacggagtatagccttttcaatagcaagacaagatctccatagaaggtatgtcaaaaccatcaagcaccaacataaaggagtgaagcaagctatcaaggaaatgtagcaacatgtttggccagccaacagaagcctataggtcagctagggtgcgcttgtatggcgggctaggatctgggcataagctggctggccaaaaggtgactttcacaccaagggatcttctgttcgatcaagggaacctgacctttgtaaggaaaaggtgtacaaagatgtcctccacttgccaaaggctggcctccacatccaaagactagactgctcttggtaaagctgacaggaacatgacctgctagaccctggcaggaacattacctgcaagaccctggcaggaacagaacctgccagatcctagcaggagcatggccggccaagcctcaccaggcaagtgtatgactggccaagattgacctggcatgactctctatacagactgatacgtggactacaagctagctgcaaattgggcccttaacagcccaacaaattggatggaaaatatctattttaatggggcatttcagtcttctgtatttaataaatttatatgtaaatatctaatgattttagctgtaaattagggtttaagctctcctatataaagagccttaactcaaccctaaaaagttaagtctaattttagcctccaagtcattagctctcaactctaagtctgaaaccctagccttcttctctctctcctctacatgctcaaaagggccttctctcttcctctctctctcacgcctctaaggccatatctctttctcattatagatctgcctacatgatctatactttgtaaccttaaagagagatgtatcaggtcccacctatagttatctgaatagtattatctataggtatcaatacaacataaaggagagtaggtcattacctgctaactaagagggtcgaacctctttaaaagtccttgtcttatttactttattgtatttattgtgtaacacatggaaaacataagattaatatgacctcgctatcagttggccactttttgagattaatagtttgttgctttcattaagagctacttgatatcatatctaatccaacaccacggttaatacaaggagagctctagttgtaccatctgcatcatcatatcttcctcaagatcctctgactggagatctcaatgtccatgttctaaccacgactggagttcacatgaatacacagcaggcaccataaatctggccactataactgctaggatggaataaacttcccaatggatctaaacaattggcccccgcctctaagggaggggcccccacgggcatctccatcagaaggaaggacccttgggggaaccctcaggaacaacaattggatctcgtcctcagtactatgcaggagagataagatcagtaattggtaagcttgctattggcgagcctcgtgtggatttgggagaagatcacgagttagccagacttagagagattgtctgccaagtcagcctaattgaagaaccacacactgctgattgtgatgtattcactcagtagagacgcaaattcttgagatagatggatggccaaaagtacatcattcaatctcaccaggaggagctggattgctgcaacagagaggccagcaacttgatgaagtagtttaatcagagaacaattggaagaggccaggatctcatgagagatctactccaaggaagactagttggtagattagggagggtctaccagcaagctaactaacaaccagatctcggtagccattggcctgggggttggccaggaatctctggcacgtataactcccccatgtccaactcatggcccgccagcatcccaaaagtgcacctatggccagccaacaaggagaagtcctatcttaggacatctgggagtgagtaacttaaaggcaaatctttaactagcgaggcttaggaacaggtggaaacncctaagacaac

SEQ ID NO: 224316 - DNA, 1793 bp, Cannabis indica
  modified_base (40)..(40): a, c, t, g, unknown or other
tgtagctgatcatatgtatcgaatgggttggttatggtcnctttattagctaaagatattcctggtagttgatagagacaagttagtgttaattttttactgtacttgatgtgcttttgttttgtgagactcagattgttgttctggtactgtttcaggtgtattaaaatggctattgttcatgatattgctgaaggtgagataccacattttcaattcgaatgtgtaaatgcttgtttaaaacaaaatgacttaaggattaacattttttctcttctttttgttggtttatgtgttgaaatacaaagtaaacataatgtaagtgatgttttgggttatgtggcttactataaatagttggcggttttcttttatcattattaaagtaaaataactgagatccgatattgaattgcaccagtagtgatatgacacctaataagggtgctatgcattatggttgtcatttaacatttctcaaaaatgggatgattgtttatgcaagcaaggagaatgtggattttgatgattatggtgaatagaaattcttgtcttaatggataaaacaaaggtttgtttgtgtataggcatgttctagtattggctaatgggcaagtgtttatatttataaaattgatcggttcattgttgatgtgtttattgtaagtttaagctctttagttaggacttatggtgtttttctttattggaatagccattgttggggacattaccccttctgatggggtctcaaagactgagaagagcagaagagaaagagaagcacttgatcaaatgtgcaaactacttggtggaggatcaagaggtaattcattgtataagaacaatttcgtgcgcgagcagaagtaatcgagtgtccgtttggatgatttgcttttgtttatagacatgctttgattgcttttcacatttggatagtaaaataagagaaacaaaacttcattcttttttaaataatttttcgatagtctattttaaaagtactcattaacaaaaattggggtagtccgtaatggtaacatgtaatatctattattaggagacgagaaaaataagaaatatcaaagttgcattaaaactcaaaatcatttcatttttttttcaaagatcatctaaaacactcccctaagtgagtggtttttggtctattgaagaactttcaaagccatgtcaaacatgcccctaaagattgttatccaaatgaacaaaattggaatatctgaactttcaaagccatgtcaaacatgcccctaaagattacatagcctacatggtaatattaatttttttcttgttatctgacctctttacctgaactgcaattgccagctgaggaaataggtgaactatggatggagtatgaacaaaattcttcaccagaagctaaaattgtcaaggactttgataaggtacgtaataaatttgtttcgtttgtctaattctcctataaaactaaactacttattttaaatatagtattgatctcatcatgttaatagtagtatacattcagctaagtatgatttccatttaaatgatgcttagtatgatgaagactagctgcttcctagttcctagtgtcttgatgactgtggtttagcaaattagttagattgttagaaaacattagaaaacggtgtccacatacattattcgtctgagtttgcaaatattacttttatattatcctgaagtttgtttggcttggtttcggaaactatctttcaatctcataagcccaaaagtagatttgatagaaagtcaagctcaca

SEQ ID NO: 224317 - DNA, 1380 bp, Cannabis indica
aaaaaaaatgacaaaaatcaaatttttgggtgcaaagcactcttcctgtgcacattggctgtgtgcagccacatccactcgctcaggttgttgatggtagcctcgttcctgcacgctagatgttgtttaaagcctttgtgtgtgcagctagggtgctcggtgagcttcagacgcgagtgatgggcctctgacatgggcggactgcatcaccttgtccgaattttcgcgcctggtgcttgagtgacaacactcaatgaccaaaattttcaaaacaccatatctctctcgtttttcatcagaattgagttctgtaaaaattaaaattacttaatttttcacaaggaatccaaataaaatatttttcatggaaaaatacgtaattcacattatatcagtaattcacacataaaccaacatgaacacatccaaattaacaaaatcatcgttttaaatccatacttcatgaaagtaaagtattaccatggctctgaggctagttgttggaaattattttatcatgatctagatttactaacatgtatgttgattataatctataatctaacatcctaaatatgactaccctaatacaatgaaagaaacacacataaagtttagaaaaggttacattaatggtagcggaatgtaatatctttttcggtttagatctctagcccttgattcttttctgtagcggagcattatcaagatctgaacctgaatcttctctccttcagtttggttaaccaccgtcttccccactatgattgagtacttgacttgctatgagtgggcacggtactctatcactaaaggctaaaattgatgaagaacaataataataaattagaaatcactatagaaggaggctctccattttctagttgtctaacaacgaataaaaactaggttttgagttggatgagaatgaaagcatcttatttcctttatggtatttcaactagggtttaggattttaaaatatattgcttaaaaaaaataaaataaatggctagaaaattgctttagtggtcggccgcttagtgggcctcactagttataattttgccactttatttcataattcatcttttctttcaataataccacattttctaattttaatcctattaatttcaaaattatttatttaaaaattataattaagcatccaataaaattgacatttaaattatttattatttagactttacaaattctctcaattaataaataaaccccaaaaccacttttcttcacaattaagcccttgcttagtgaaaattcataaaaaaaaaagacataatctaattttagaattataattgattgattaaaactaaataattgagtctacaggtagtattatctcaactagtg

SEQ ID NO: 224318 - DNA, 2203 bp, Cannabis indica
agaaaaataataatttttttataactatacagagtgttgtgtttctattgtttcaaaacaatgttattttgacgttattgttatgggaaaataacgtaaaaattacattttttctagaaaaaaaattctaaaataaaaatttgtaaaaatgtcaataaaaaaagtaaaaatatattaaaaaaaatctactttaagtgtattttgtaaatttctttattatatatttggcctccccaaatttcttatcttggctccgcccctggtcatcaacaattcttctttgtaacgcactattcttctttgtaacgcactagttagaaactaattaacaatagtaggaataaatgtttctctaacttatgcattttttctttttatttttaggagtaatttgatttataagtacatatagttggattgggtaatttatatttagtaggtataattggattagatgggataattgggaatgaatttgagacaccaaggtacttagcactactatgaagtggcattgggtagacggtttcgtataatttttattaaattaaaataaattagttaaaatattaaatttcatcaatagcaatattatatctcacaaagctactatgcaccataggttccttttaacatttttctttagattgggaaaatactattttacctttacagtacaactagtttgaattttttttaatgaatcagctgagaaattcattactaaacttgatcttatacaacatgtatgtaccttcaaataggttggatttttttgtgttggcaaaagttctaataccagtgttgatttgccaaccctttttgtcaacacatcagaagtaaatttcattttaccagcgcaataccaaatatttgccaccacaaaaatgtgctggcaaaagtgacatttcttatagtgtagtgataggatgagtcattctctgctatattactgttgaagtattctaatacttaaggtgtttagtttcagttttaaaaaaacatgttctggaaattttgatatttaggttaattgatggaatgcataaataagattcttgtaaacaaaaggcaacccgttagaaattagaccattaaattttagtagaaaacatgcatgaccaatcattcaaacataacatctaacattgatctatgcatacgagaaaaaaattacacatgaaatgcattttacattacattaaactaatacatcaatttgcaaatgagatgtggaataggccacaaggcatttgcctagtgacacttaaattcttaagagagaaggtaaagagcatttcaaggaaatcatattgtggtcaatgtggtgtggcaaaaatctggagttaaatgaggaaaatattacaagaaaaaatgaacccacttcaatcaaaagtaatgtggaaaaaggggacaaagcttgagcttctcatatgtcaaaagatgatcctaaagaaaatgtttcacaaattcctcaacaaatctaccagggaagctaattacaaagccacctcaaccctttcgccaaagatttcaaaagcatcatcaagatgactaacttttcgattacttgatgttctgaacgaatttcacattaatataccattggtggaggctatggaacaaatggacaactatgtgaacttcttaaaggagatttttaataagaagtggaggtttgatgaggttgaaactgtggccctaactgaagggtgtggtacaatgttaacgagtaaaattcctcccaagttaaaggatctgggtagcttgacaaatttctattaggggtggagatgttaagagagctctttttgagagctattatcaattttattccatgcacattttcaaaaaattaggaattagataagcacggtctacaactatcactttgcaattggtgaatcattccatggccaatctggatggtaagattgacattgtctagtaaaggtggatcagttcaactttcgacaaacttcattcttcttgactatgaggaagttagaaaagttccaaacatcttggggagcccatttcttgctactaggaggatgttgatagaagttgaaaaatgagaccttactatgagagctcaagatgagcaagaaactattgggttttgtgccctaaataaaactcatttcaatataatcaaatttacttactaataaagatcagaaataatattttatgttgcatg

SEQ ID NO: 224319 - DNA, 1898 bp, Cannabis indica
acaataaagaacacaagattttttaaagaggttcgttccctttagttcggtaatagcctactccccttagattgtattgacttgagaacaaagaacacagtgtttcctctctcaaagctctcacaatgaaatctctgagtattctctcttatatctctctctaaagagattctttggaccccttttacaatgatgctagatcactatttatagggctcaatgcatgagggaaggtttcccttttgcttacaatatctataattggtaagaacatacattacatatttagaatacatgaaatgggagattgaaacagcttgccatatccctttgatataatcccatgattataggaattgcttttgtgcttgagcttcacgatatcagccttggaatgattaagtcttgatacatggctcagatcactttttgctcgggtcatctacccttgccctgctcggtcaagcaggctttgtgtgtgcagatgtattactcgaagtctgttcgaaacatttctccagcaaagtgtaaagaatagatgacacgtgtcactagtacatagtgccacatcataatgcaaaaaatgggataacattttccccccaagtctgcacgagatttccgaagtcgcgcgtagacttcacttagtttgaattcatgtttgaataggtggcacgtgttcgatacgtctgttggtaatttgatgtgattctaaccaaagatctcttcaatattcgctcataaatgctaatcaatttgtacctcgaaatcctctagagatttgcatgcttttgacggtttctcttcttcaggtacttgattacttgattttccaacgtatacttttgagaggaaatcgaggcatttaaatttcaaaatgattacaatccttcactaattttcttataaatagagcaaaaagtcctaataaaccacttttagcatcttcttacttggacgatttcagagtaagaacaccttttttttctctcaaatccttcaaagaatttcgagaaagtgccaatcagcatcattcgaacaacctcaaagcttcgaacagtgagtaagttcttcatcttttcctcctttaatatttgaatctttgattttctgtatttcatttttagaaaatttgatagtcttgaacttgttctaggaaaaccgtagagaatctagatttaggaataagagattttgaatgtaatcgaccgtataacttgattgtaattgcattctgactttaatttcacaaaattcgggtttcacttgcccattcggggtttagtgaaaactaactcttaatctgaagtcttgaaattttggggtaaacctaaatcatgtaaaatttctccttttaatcctttggtcggacctggtgggtatactttatttgtttttgttcgatatcccggccaaacactcatctcgtgtcctaccttttgtagatgaaccctggtgagttttggggaggagaacatcgtatcgactaggatcttctccaacttctgtggaccaacctcgtctctgcgttagtccgtcctcattaagtgacggtctctctaattcaaaaatcaaaatcaaaattacacaaaataattttgataattagatttgaaatttctaaacaagtgacggtctttctaattcaaaaataattttattctgataattagatttgaaatttgaaaaataaaaataaaaataccaaattacacaaaaaaattaattccatgaaaaatcatgaagaaatgaagaaattggaaaaaattgcataccatccacgcacgtgctaagcggaggctggccgagatttcacgcacaagaaggctgctaggagcattcctgcacgcgcatggccccgttttctgacaaattttgcccacctgaccaagaaaact

SEQ ID NO: 224320 - DNA, 3011 bp, Cannabis indica
gggtgtttgtggtgcgggcagtgtagattgtgatatattattcaaaacaattgcatatacagtttttgtaatttttcaaaccgcaaccgcaccgcaagatcttaacactacaaaaatcaaaaatgcagtgcggtttgaacaatttacactattattattatcaatcattataatagaaattcaaaatcaatttaattaaattttaacaatacaaagaaaaaataaaatttaacatcattacatatatactcatcttcaagacattatattatattttgttgaagaaattatgtaatatattacgtatatttgcacatatatttcaaaaaataaaaattatattgtaaaaattagtaactttataatatatagtgtggagcagttttaactgcaaaccgtaccgcgtggtttggcaaaaatgcaaaccacaaccgcaccacataggatttcaaactgcattttttatgcggtgtggtgcggtacaggtggtttgtggggtgtaggcagtttgatgaacacccctagtagatatggcattttactaatttacataaatctaaggaaccaaattataatcaagaagaatctaatgcgtgaagttatgaacataccgcctggccctgataaactttctctattgcctcactggcagcactagccttcaaaatagcatctcctgaagcactggattcaacatcatatcctgatgctcgccatcttggcaagccgccatctaaaacccaaattctatcatggccaaaaactcggaacatcctgttcatgtcaatcaaaagcaaatttgttaatctatccaactgagctagaaaaaaggaaagattttgaaggatttcaacttctaagttaaatgttaatccaatccaacaactcaccaccaaacccgagctgcactaaaaatccccttcccgtcgtacacaactagatcatctttgttcttgatgccaagagcagaaacagctgcagcaaaggcttcctctgatggtaacatgtgtggtaactggtgcaataagattccacattttataaaccagaagaaatacaaaaggatccagagaattcatagcaatggtttaaatctattattgatgataggcccctcatcgaaaccccaatattcaaattaacttggtttgcatcattttccagcaaatatcaacaaaaaacaaaccatgaacaatagatgcaggaaaattatctcacttttgttgtgcggtctgatattccatctacgtcaaagaaaagggcaccgggaatgtgagcaacctacaaaagtgaaagactaaattaaagaaaaagttgtgacattacaacgaccatttaaaatgttacagaaaatcagttcatggttggcacctgatactcttgaagtggattcctttgttcatcgggcatgtaccaagatgcatccaacacctgaataagataagaaacacaatgaataatcaacttatagaatctaaaggaatacatgttactgttagatacattacttcaagcagactgagctgaataacaaatggttcatgtaaaaatagacaatttaggagcaaccgaagtgggtaccttcaagttagggtccttgatgttagcacgaagccaatcaacagaaacaacagggtcattaacagacacatattttgtcgagaaactagttctgtcccctgctactgaggaagccatagcgcgatgaatttgaaacgttttaatcgttgtgtgagcagagtccgttggtaagtgagataatgtctttagctgcaataggaaacaatatcactaatccccatatgaatcattataaatctatatctctgaacttggcattgtctaaacttaaaacaaacatccctaaaaagctaactttgactaaagttggagttataacttaaaaacagaaaaatcatctaaagtgttacacaaagtaaacaaatcctaagcaattccattgccataaattcatgagaaaactttcttgattttaatatgaccttcatacctttggagaaaaccacaatttcagtaattttacaacatagagactatgccccaaactataaaaccaatatctatagataacaaaatcacatatattttggcaaaggataccaacacaaccaattatcatagatatctcttaatataattgttcttaatcctaagattccaataagaacttttaagaacattgtcaataatccaaaccatatacaacacacaaacaaagttaagtttcttcacaccataaacaagaaaagtcacttaactaattcaaacaacaaattagatattttcccagattgtaaaactcacaattaacacaaaaaacccaattaaaatctcagaaattaaaacaagcaaacattaattaaaatttagcgcaaagatcaaaattttaagagaaacccagaagagaattgattgagaaataggaataaaaggacttacattaagaaaagaagagaaaaatcgggggtttcgaacttgagagggtgaagaagagtgaatgaaacgatgggcgccaaagagagaccttgctaaaagggatgaagccatttcaatcagagaccataaggatggacgaaagagagtgttttgagtcagaattttgtcagcgaaaaggggcgaaagtgacaatttttggttgacgaaggtttctttctagttttcactgttacagctcaatacccattaaccagttactagttagtagtgaaaataattgaatagaataaagcttcaatctttaaccttcttaagtgtcataaaaataatttttatatatatagttgaaaattaatgagaatattaagaggtgatttttagtagtttcccaaaaagaaataaggtgatttaattagtaactattgactttttaaagtttaattatttgtcattttttaaggatagatttcaatgagcattaatctagtagggtttaggcctttttttttttgaatgggaatgggaattttattagcaaaccaaatccgcaatta

SEQ ID NO: 224321 - DNA, 1721 bp, Cannabis indica
ctattccttggtcacttagaaatctggaaaaaggcctgtactctccccccccagtcagcttggactcgtttaattggcaagttaaactgtttttccaccatgttcttaaactttaaaaacacttcaagggcttgagacttaagggtgagaggatatatccaaacaaatcgactaaagtcatcaagaaaatgaatgtaatagctatagccatctttggatttgatgtgtgaagggccccataggtctgtgtgaataagttctaagggctgtgaggcatgggaaactgatatggggaacggttgtttgtgacttttgcctaattggcaagctttatagaatggaagctgctgtatagtgcctgtgtgaggtatgttgtggagaactttactcaagacagtgtgggagggatgccccagtttgttatgccaattagtaacattggagttatgacatacagtattgacattaggagagtaattggacatatcagaagagtcatttttattcatagtgacattgttacagcagtaaggagatgatacaatatcagaaaaaaaatgactagaacaaactaaagctgagggattacacacagaattgatttgttgtttgagggtgggtcttgagtattcttcaagcacgtacagtccatctttaagtgttcccttgagtagtaccttcccagtgtgcttgtccttgacaaagcaacatgtttaatgaaattcaagaaacacataattatcatgagttagttgagacacactgaccaaatttttggtaattgaagggacatgaagtactgaatttaatttgagagggaaagaattgaaagactttaaagaagtggatccaatgtgagaaatggatagtttcttaccatctccaacagctaagccttcattacccgtgtatgtagcagctgtctcaagattatcagtgcccgaagtgacatggttgattgcaccagtgtcaacaaaccaacacgaatcatctccaaagtcaggcaagaatgtcgaggcataggcttggggatcatactcgacttcttgctcagtaagataagcacggggagtggactgattattagtgccaggcttgggaggcacccaatttctgtcgaatcgatagtgacacacgggtgcagtgtgcccaaatcgaagacatatttggcacagtgggcgattgtgctgagttgagccacgataacctcctctagtaggattcttggttgcaggaggacgatagggaacgtttcttgaaccagatacggcaatgttagcttgaagcttcatgctaagatctgcaacagagttgtgatgatcgattctactttcatgagcaagaagtagcgattgaacttcctcaaacgtgagatcatcactacgcgcggtgatgccggagacgacagagtcgtattcagggcccagaccgtttagtagttgtaagatcagatcttgatctggaataggagaaccggctatggccaaggaatctgcaatagactggaccttgtcactgaagtcagagatggattgtcctcctttccgaagcgtagaaaactggcttttgagttgaagaagacgagcctttgattggcttgagaatctctgttctaaggcacgccaaacagagtgagaggaggtgaagtttgcaactgaagccaagaccgcttctgtcatggaggcacgcaaccaagagaggagtaattgatcttgacgctt

SEQ ID NO: 224322 - DNA, 1275 bp, Cannabis indica
tgaagcgaatcaggtaaggcttaagtgactcacctggttactgcttatgttagttagggatgatgcttcaagttgcctgtctctagtagcttgaaactatttcttaaagtccttggacaactgttcccaagacgttattgaatggtgagtaaacttgtggaaccaactacttgctgcccagttaaagaagtcaggaataaaatgcaacgtaaattattccagacgttactggctcgtattatggtattaaagttattcaagtgagcgactggatccctagtcccatcatactacaagacatgtggttttttgaatccctgaggaaattcagaattcaaaatattgggatgaaatggctcaatctcctcatccgagtcataaccaggtaatttcccatgtcccccatcttgatacttcctgaacttatcctccaactcaatgattttcaataggataggatccacctattgttcattcgcattaagttgattgtcttcgattcaaatgtttgcaaagatcatgttgtcttcgctcataattactcatagatctcgtttttgagtaactctcatattgatagcttcgcgtattgctcatgctttcttaatcggcataacattgaggtctacttccttctcgcattttcctgcctgatcaactgtgtcctcgagacattgagtgtcacgaactagaactcgcttcgacttgtactggtcttctcctttgaaagaggttggatacatgtcccctagttagatacatgtatacactttccctctctgatcgagaggggcgctgagggtgcctcagtggtagcccacttgtcctaggttgagtcccaaggttcctctcattgccccaagggatttcctgatccctaggtcgtggctgtctcgcatcctcattcctgcgagaagcttatagtacatcattttgttcattcccttggttcataaatccttgggatctttgaggaacgtctcgatgttgctcttgattattttgttgttcatccactggaacatccctagtacccccaggttgttcctcctgggtgtttttgggatttccttgatttgcttcttatctcctagttcttgaacctcgaggtttgcctcgtggtcttctcaccccaggatcatgttaattctgagtattggttccttgagtcgccctagccgatgcagcctctctttccaactcagcgtttcatcagttaaattcacctaagcgttgttggagttatctattttccaattctactaatggtacata

SEQ ID NO: 224323 - DNA, 2404 bp, Cannabis indica
gatatagtaaattgaattaccactacgctacactaaaagaaaagcttctattgggtgcgtgcgtttcatccttttgataaattgaaaaaagataaaatgactatacaaggcttctcagtcgtggggattaaagagaggagtgtgttattcagttgagaatggatattttctgtttcaaagaacaacaacacaattttcgagatctcctcaccaatactagtctaaagagccttgaattttttttagttgaaggcattagagtctggactttttaaatcacgaatactaaataaagttttgttgatatcagaactagtaaaaggcttaatcaaatgcgtctattttttaacattgatagtagtactcatgataaaataatccttcatgatatctcttttggcggaatttggactacccataaaacctttaaagttgtttaagttatggaagaccacctcatcatagttatccaccaaattatcatgttggtcagcaaaagaggctatatgattggcttccttgtgtttaatattagcatgaaaataagttatactttcatctcaaatctgcaaccaaataattttgcttttttgtcttagatagctttccatcattttagaacaagaatttgaggtcacctttatctggttctcttcattaaataactccacaatcaaagttggagctgatcaaaaagagtcttagctaaagtataagcttgttggacatcccctatcaaagttttattaaactccccaagcactttcctcactttggttaccttgaccatagtttgaaataatccagtacaacgagcaagctgctaccaattttctaacacagtctgtttaacatcttggtgctctgtccacatattgaagagtttaaaaggccgaaaccccaaattcccaacctgcaaacttttaacaatacacaggcagtagtctgaaataagaccccattgataaaaagcttcggtagagggatacaaatcaagccaatctttattcttaaaaacccaatcaattctagaataaattcttccattgtcatgcttgttatttcaagtaaacacataaccaaaactcttcaattcatcaactaaactaagagataaccaattgcaagaatcatcaagctgatcagtggacgatacaagtcgaccaccaacttgatcctccacatcaaaaacatcattaaaattacccattatgagccaaggatcaacgacaaaaggaagagaagcaagattctgccataatccctttctctcaatgatagagttcaatcaatagaccacattaagacatactcatttttgatctcaaagtgtttaaccaaacaatgcaaatattgcttatcttccagtaaaatagtaatatttacatactcaaccaaaagagcaaaattctacctttaacagtataactttgagtgaaaattccaaccacaaatattaaaatttatcataaaatcaattttattaccaccaactttaatttttaacaaagtctctagtcccactttattcaacttgcagagagtactaagagtatctccaatggtaatattttggagaatgcttgatgaggtgagaaagcttatgtggcaaaatataaggatgctataccattggaaataaaagaatgctattcttgaaatttgcattgatgccacacaatgacattgatgctatgttttttttaaacaataaaaaattaaaagtacaatatataaataatagtttaataaagaaaaaaaattatatatatataataatgtgtgatatcataattatagcatttttaaaaaatattataccattggagtgtttttagaagtaaaggtgccaaaaatgatatggaagaaaaataaaataaaatattatattttggatgatgtggagatatagagcatcttcaaagaatgctaccattggagatgctctaatatccttatgtttatttcctttattaatatacccctaacatttcaataaagtagattacaacaatccattaagaatgatgatgtgcaatacccctacccttcttattaattctagaaggactcctaaaatatgctggtagcttcccttaatttttccttttaggtatcttctcaattgaagcctcaagccagcaatgaagataatgatgaaatttctgtaattgtattaatttcaaaatagatgctccttaatttcaccatgtcaaaactaatatttattttctgaatgaaattttatctttttttttttaaatacaacaaaaatgtgggtagttttgataaaaaggtggtatgttgtattgaagccctaataatttataattttaccataaaagtgagagcccaatagctcaactcttggcctctcgtttctcaatctctctctctctctctc

SEQ ID NO: 224324 - DNA, 2444 bp, Cannabis indica
atttaatactaaatatcttttttttttgacaactaaatatcttttttgttataataaacttactattttttatttatgaaaaaaaaactccatattttattagtagaattttaataatttacaacttcttaattatcgtttttaaaagattattcaattttattcaaaaaaaaaaaaagattatacaattatttattaaaaagagtaaaaaaatctgcaaatcttatgatttttttttcttaaaagaaaaataaaaattaaatatggtaagtatatttttaaattatagttaatttttttaacatcaaaatctttaaaaaataactataattaaatgtggattctaaaattttaatgcaatgaacgatagtaaaagaaacattaaagtttttgtacttaattttactatttaattaaaaaattctctccttttatcccgcatcaaaattatatttatatttaatattatttttatcccactctctctaactcaaatttaattttttttctctagtctgatagaacaatcttaacaatataattattatattttttagggatatttacggcataaataccatacgttttcagttttatacatttaaatactacataatttttttcgacggattaaataccttaagttacatttacgttacttccgtcactacttttttgttaaatcctattcaaacttagagtatttgcggcataaatacttgatgttataaatttcatactcttatataccacatgttttttcttctaacagattaaatacttaaagttacatttacattaccttcatcactacaagactcttaaatcctattataaagattttttttcaatattatacctaaaattgattttatttacaaatatatcttcaacaaatttatttgcacaaatacgaagaaataagaaaagatttaactatgaattcgatttatttttattgttattaattaaataaatattatttaattattttttttaactttaaaattatttaataactttttttattgaataatacttagcaaaaaaatatattttttatgttttatttacagtttaataaattttaaaattatttaataattttttattgagaatttattagtggaccactaatatgttgacaggtgtcaacttactttattttaatagaatttaacaaattgataataatgacaaaagtagcgtaaatgtagctttaggtatttaatccgctaaaaaaacatgtggtatgtaagtgtatgaaatttaaaatatcaagtatttatgccgcaaatactctaagtttgaataagatttaacagaaaagtagtaacggaagtaacggaaatataatttaaggtatttagtcggtcgaaaaaaaacatgtggtatttaagagtataaaaccgaaaacgtatggtatttatgccgcaaatatccctattttttatgaccgttacaacaagttattatcaagtaaaaaatttatttttaaaattaaattaattataattaactaatacttaaaataaattattttataaatttaaaatatttaataagacctttatagcaattaatatgtatatgtattattaaaaaaatttacaatacaccccttcaacactttctttgcagtattgacaagtttatggttattttcaattgatgcaatactatcaatatcaataaaaccttttgaggaatacaaattgtagcacccacctatacagagaatttgcaatggtaacacaaaactaatacatgtaataaattgtttatcttgaaaaagtgagaaacttatttggagtttcccaattattaatctaacatctcttaactgtagaagcattaaaataagagtatagatattgaaaatgttaagataaagaactcaattcttttccttatgccataagacctggttatacagaatgacacacgtcacctagaaagtccctacaaaacatcaatttcatatacgaaatgaatagaaaatgttacatgcatatttttgtgatacttggctcaacatttggcataatccgattacaatttcaatagagaaaaacttataaggacacgaaagacttcgaaaatcatagaatgttatggcataaaatgcactaaacttttaaattgtaaaggcaagaatagaagaaaagaaactgctttgcaaaagtatgagaatcttttcttggagtttaggaaaatagcttctatgttatagagtgattcttcatcacgcaagtcaccttggaactgacaaaccaagctctgaatcattacacaaattagtcagagcacaagaattaaaacactgttacaagttatcatgcaacattatgcacattgcaaagttcatgaatcaatctcagtaaaaaattatactattctctaagattctttgagttacagtactaaaaacaaaaacaaaaaaa

SEQ ID NO: 224325 - DNA, 1912 bp, Cannabis indica
aaaattaaataaaaattgaaaaaaaataataattatatatttcttgactattggattaaatgattaataatcatccaatggtcattattattattattatttaaaaaataaataagaaatatatgaagttttgtaactcccattacactaggctataaataagtgtttgaaattttgagttttcacgtggcaaaagaaatttaactaattaataaattactaaagtaatattttaactttttttttatttatttttttacaaaattaagtgactaaattcaaagagttagcgacttaaattatctttaccatataaaaattattttttagcacatcaatagttacatcatattaaataagatttttatgataggttaatttcacttgtatatatattttagagaataatgatggaaaaatatgattttttttcatttttatttattaaaaataatataagcttgtcatgtttatgtttattaaattgtataaatgtctatactttttaattattttaatgtttttttcatataattcctcataaatattcaataggctaatttagatttttgaccactgaattacgtaccaaatcatgctcagaactaacgagattattagagttaagaatttttgtctaattttactaaacaaagtctaacgtggatgaaataccccctacttaggataagcatgtaagatttactccacattgtgtcggtaggtcttgatctataaagatcgagtaagttttaaagcatatcatcatagagaattacagttatttgagcaatccactgagtagctagttcttgctacctgatcagactctacaatcgttctgaaataccccctaattaggataagcgtgtaagatttactccacactgtaccggtaggtcttgatctataacaattgaaatatatgggtatcgtggataccatttctagaataaatgttttcgaggcggcgatcgtgggaatttgacggagtagtcaaatatgtcacgataataaaatataaattagatttttattctggactagtttaaagtgttgggttgtcggttttgcggattagttagaattaccaaaatgcccctaggttattctatagcttcatttttatggggaagggtaaaatagtcattttaccctattttatttctatgtacccttctagtaaataggctgattattaagttaatattaatatataaaaatttaggttatcaattatcttatgtaattaagggataaagccgaaacatagaaaattcttcccctccctcttctaccattcgaaaccttaagggcagccacaaccaaggagttttcttccattttcagctggaatttatcaagagtaagagtgtttacacaagaggtaagttcttggtgcttttcctttggatttcttagacttagattaggttttaggttagggtttcaagacttttacaattaaagaataattgagattaacatttgtttttaggttcagattaaagcttgtttaagttagttttgggtagaaatgggactgctggtgttaggttagagaattgaaggtttgatatgaggcaatttctatgtaattatgctattgatctttaatttgatgaactgaagtgatatggtgctttgtaaatattgtgtatatgttattcatctattctagagctgttggacaggtttggaggggtttggtttgaattttgggaagaaaactcgaatttttggtatgccagaaccggtcgaccggttgccctgcagggggaaattttggatttccttcgagttttgttttggcttggggtggtatcctagtaccttttttagggtatttatgtgccgtgttacctattttgggattgttggaagttgggttatgtctggtttcaaatttagg

SEQ ID NO: 224326 - DNA, 3929 bp, Cannabis indica
ttttaattaatcacgatttccataaacctcgttgattagcaacgagctgcacggtacgtttgaaaatcacgtaatacgcctatgctagttagggtgttacactagcgatgcctctgacaaataagttgttatttttgttgatgaatatgacaagttcttgaggtatcaggaatcacttaagtttttatctccttatgtcactgcgatagctaatttatgtaattccaatgcatgccttctttccacatcctcaaaatgggtcattgattctggtgtcacgtatcatatgatagctaattctaatatcttttctacttttcagtcacatagtcccacttctattgttactttagctaacggatcatcatcttctgttcttgtgttttacacttttgcgtactctgtcattagtcttatatttacctaatttgtcctttaatttgcattctgttagtcaactcactcgtaatttaaactgttcaatctcattctttcctgatcattgtttgttgtaggatcttatgaagaagaagattattagtaaaggacgtgaatctggcggcctgtatgttcttgatccagttccaccatcctttattgcttattcgagtgttgctttcgcttttgaggctcaatgttgtttgggccttccctcccttcctctgctcaagaaactctctccttagtatagtaaggtgtcttcattagattgtgagtcatgtcggttttccaaacatcatcgtgttagtttgagtcctcgagtcaataaatgtgctagtgttctatttgagttagttcattatgatttttagggtcctcctattttgtctcaacctggaattaggtattttgttacttttgtggatgattattctcgtgtaacttggttatttctaatgaaaaatcgtttgagttgttttctatattttgtgctttttgtgctgagattcaaaatcaatttaatgtgtctgttcgtcctttgcaaagtgataatgccaaatacacatcttctcaattttaattgtacacgacctctaatggcatgcttcatgaaacttctttttttgatactacacctcaaaatagcgtagcaaaacgtaaaaatagacatcttcttgaaactgcacgtgccctcttgtttcaaatgaaggttcctaaacctttttgggccaatgcagtttccacagcgtgccttcttattaatcgcatgtcatcctctctactcaatggtgagatcccatttaaaattgtttttcctagtaagtcattgtttccagctgctccttgggtatttggcagtgattgtttttctcacgatgtctgtccacatgtcaccaaattagaccctaaggcattaaagtgtctttcttggttattctcatcttcaaaaagggtatagctgttagtgtcctgatctcaacaaatatcttatttctatgatgttacctttgtggaaaatacactttatttttccccttcacccactcctactcgtcagggggatgatgatgatttattagtatattctttcacatcctttgcgcctaatacatgttctaatgttccttcaaaaaatacatgttccaatgagtctcttgttccttcttctgcctcggtcatagctcccataatgtttatacctccaccacctccaccagttcctaagtctcctataatgtataccaggcgtctacctcctccacctctcatttcatgtcctgtacttgcatcttcgtcattagattcggagctcaaagatgatctacccattgcactatataaaggtaaacgtcaatgtacatatcctatttgtcttttgttacttataatcttctctcctcttcttctggctcttttattgattctcttgactctatcgctattcctaaaactgttcgtgaagtaatgtctcatcctggttgtcttgctgcaatgataatagagatgaatgctttagttacaaatggaatttggaaattggttaatttatcttgagaaaaatgggccataaggtacaaatgcgtgtttttggttaaattctatacagatggaacaattgctcgcttaaaaatctctcttgttgctaagggttatgctcaaacctatggagtggactgttatgatactttctctcctgttgctaaactcacatctttttgacttttcatttccatgacagttactcatcattggcctttgcatcaacttgatgttaaaaatgattttcttcatggagatcttgaggaagaagtgtatatggagcaacctcctgagtttgttgctcagggaatgttagggcaagtttgtcatctttgcaaatctttgtatggattgaaacaaagtcctcatgtttggtttggtaaatttcttcaaactgttgagaaacttagtttgttaaaaagtaagtcagatcatattgtgttttataaaagatcaattgttggtattattttattagtggtgtatgttgatgacatcgttattactgaaaatgatactaaaggcatctcttcccttaaaatctttcattcatacgcagtttcacaagaaggatttaggggtgctcaaatatttcttgggagttgaagttactcgaagtaaataaggtatttgtttgtctcagaggaagtatatactttatttgttaattgagacaaaaaaaaatgggagcaaaaccttttgatgctctaatgaatctagctgcgcatcttacacgtgatggggaaccatttgaagatcttgagaaatattgcagataggttagaaagttaaattatgtaactgtgactcgtctagatattgcattctcagttagtgtcgttatccaatttatgtcttctccaacaattcattattgggcaacatcagagaaaattttatgttccttgaaaagtgcaccaagacgaggcataatttataaggatcatggacatacccatattaagtgtttctctgatgcagattgagcatgctccaatgagcaaagtgatgagttagaacaatcaaatccacttagaatgcaaactcaatgtaaatgtcataaaggaatgcattagtaattaaatttggttaaccagaaatataaatgaacatatgatttttccaaatctatatgttataggctctcaagattaaatcaacatattcctatgcaaatgtagacttagagaatacaaattaagcaccaattttccatgggtcatacaacctataaaatctaaaaatcactcttttacaaggtgataatcttgcatcatttaagtatttttactaatcatatttttttccaaaattaagattagctaacaacctattacaattggtgatcaagcaaaagtaggtagacaaacattaaacatccttgaatgaacaaaacttcattaccaaaagtatttataaaacatcaataaaattcacaatccaaggttcattaaaagttctaactaaaagaagttagttcatgctcaaaaacacaaaaatacccaaaatgaaaataaagaagtataaaaatgaaatacaaaagattaaaagagtagaagaaactatatggatggcttcttcttcttcttcttcttcattcttctaggtattttcaataatggtggttgccaagaattgtgttccccctgaatggtctaatggaggctaggttcaggagaaagagacggtggctatggctgctttgtttgggaaggaggacgaagggaaagagaagaatatcgggtcgggccttgctagaaattagggattttttttatgggctctctaatttctctctttttttttaattgaaaatagttggttgacgtaagaaaagtcccaatcacgcttgctgcaacaatacttttgcaaaatttttgcaaaatcatatgtgacttgttaggttttatgccctaaataaaactccatttcaatgtaatctattttat

SEQ ID NO: 224327 - DNA, 1479 bp, Cannabis indica
ctttgtaatctctttggtatattgatcctcatgataacttttgaatctgtaatgtgtgactttttgattgataagatttgattttggccttcactatgatttgactctttgagtcataaagaatacgaggcacatgttcgagttttgaaagaaaaatacacaatgagattccaagctaacctttaccggcataggaggtcttgcttgagacgtagctgaccctaaggcttaatcatgggagttggccaactttagggttttaacctataaagctttcctgttcatgcctgggttttgtgaccctggctaattcttggttgagtcatgggaccttggccaaccctttcaaggcttgagatcttggcctgcatgggccttggttccaactgagtagccaattttctgtcctcttgtgacttcaacaagagtttggctctataggcatatacaaccttagcctcatatctggtttcctcagaaactctatttgaagcttaatggtgagtctattatagtcaaatgttcaacttaagactcaacatggcttggttcttgtaaggaactttgccttagtggcagcatcgtatgtggcccctatgggagctctgtctagttcttttctggctatgtggttctagcaaggccttggcctcatgcattcgaactgatcttatatccagccttaaggctttcatgttcttgctttggcctatatttcctctatattttgaacgctactattatttagccttaaagccatctatgaaggacatatgaccatcctggctatcttcttgtggccttgataggtaagggtccaaatttactttgtcaacctgaagtatgcctgcacgagttagaggcaggtttagtagcttattttaatccttaaaatttctgtacataagttctttgtgccaattcgatgcgttatacaatatgggcacccctcaagcgaccatacaggcaagtctcttgatcacttactattcaccaagttttgcaaactttgcctgggttcttccttgaggtggtgtccatagtacgcatgtggaactgaaagagttactttaagaagttaatcttgtgagcaagtggtttagacacgatcggtctaatttgtaacaaaagcttatagcttagtgttcgcttttgaaatcacatagtggctacccctgcgtggcttagcaaaccagaggccaccattgaagaacggtgagagaccacgccgagaaggccgtgggtactagcgcttttatggatttctacacgatgaaatgttagaggaacttaccaagatgtttcctatttcagtgtttgggtagaagttctgacttcaagttctcgtcgtactcgctagacttgtatgcacctttaccattatcttgtaacatggtgtggacctttttaatttggtctgaacatgcttgctggaagggatttgttgttaaggaatattcttcagggagtaattctctt

SEQ ID NO: 224328 - DNA, 2118 bp, Cannabis indica
tatacatattacaagtttgccttattttattttataaattaatggattattcaccactttaatgattatggatataatcaactagagttgcacctatataaaagtatataaaaatgaaaataaatatttcattaacagtctttaaaattatggtaatgtttggtttgatgtaatggaaaggtaatagtaatttaatagaataaaaattgtaatggtaattaattataatatttagtttgttgttggaataaatactacactcaaaattattgtgtttggtgtgggaatataataaaataaaaaattaattgacctaaatattcctattatttttatttttataattataatttataaaatatataatataagatagaatagacttttgaatttcttttattatatttttaattgacatgtaatttcttttataattaatatattaaatataatttcacataacttaattaaaattagagtcctaaatgcacattataggaatatgatttataaaattatatataaattaaagagtaataaaaaaaataaaattcaaaataaaaaataaaaagtgagtatatagtttaaattttcaaaaaaaatatatatttataagtttataaatattttattttagatagtttatttataaagaatatggagtggatgtagttgttagcctagttggtgagagagaagcccattaaataactttgggtgggaaatatgagttgagttggtcaataaaagaagaaaaaaaagcccactaaaaaactcttattttcttcttctttcaacttcaaaaacgacatcgtattaataataagaaatttctattcccttttaacgaggttcttcttcttattcacttcaccttcttcattgaccatttatatagatatttttgtctctctgggtatttctagaatttataaaccactaacatttgtctctaatttattaaaaactcactctttaaatttcaataacaaaaaacaaagaaaaaaccctaattttgattcttccccaatttgaaaacctcaaaaaacaacaattgagggtttccatggaagaaacccaatttcaatccccaccgactctcccactcttcctgggtttcttcttaatcatctacctttctgctcagttcatcgtcttccgaaattggagtccgaagatccgacccgaagcttcaagttgcttaatatcattcttccacggtacaccggcggttttcttagccgccggtgcgatattcgccgacgcaaatcgtgggttcgcttcagccaatactgaatttcagaacattgttctcgattacagcatagcttattttctaatggatcttcttcactacctcaccttcgttcccggcgacgttctcttcatcggtcaccacttagccacgcttttcgttttcgtcacgtgccggtacctggtctcacacggggctttcgctattctcttcctcctaatactggcggagatcacaagcttttgtcagaacacgtggacactcgccaacgctagaagaaacgaccttgaatttgcagccaaactgtatgatcttttgtctcctccattttatgttttgtactcaattgttcgtgggtttgctggtccttattttctctacaaaatgggtgttttttacttgagtggcgctgctgatggtgtgattcccagatgggtttgtgtgtcttggattgttgtggtgtttactgccatttcagttagtattctttggataattaatctttggattgagttgtacagagtaagaagaactgagaaattggagaagaagaaacttagataaatttatatgaaagtctttatgcattttggtttcaacttcaataaacctttttatttttttggctttactttttcaacaatgtcaattggttaggggggttgttctgtatactgaattagaattatgggtttagaagttagaattgatttaagtatcaaaatttgcagttagctttgtcttttttttctcttttgtactttgggggaaaatattgaatgtatatgtcagaagaaaagcattttcctctactaaatttgttttttatcttttgtcctctctctctctctctctctctctct

SEQ ID NO: 224329 - DNA, 3083 bp, Cannabis indica
gcctcattttaaactgtttcatcttagacactgacttggaacatttttgagccttctccaggctgcccccacacttcctttaattcagattcatacttcggatgtgatttccacatcttgaagtatttaaaaggcttcttcccactaaccacattaggataaagagttaaaattccaagtgtatggtcgaatataccttcattgagaaataccgcttcagcaagatcatacttattgatccatgattggttggccataattctatctatcttcaaaaaattctatcttccccatgttgcttgtttgaccaagtaaagaaattaccacttgctttgacatcttccacttgacaagcattgacacattgcaagaactctgtgtccggatgagttttaacccgatgccctattctctcctctttggcaagaatatcattaaaatcccccactaataaccaattctcatttgttttcagctcacataaatccttccataggactttcctttcatctctattgtttgatgcataaaccacagtcaaaagactattaaatccttcagttgttgtcaactttaaatgcattagttgactagtgcatttaaggatgtcaatggtaaatctatctggattccaagcaatgacaatcttaccacctgcatgccatgctatattagatgaaaaacaccaatttacaaacacattcaagtataaggctccgagcttcgaagccttaactcttgtttcaaggagaccaacaaaatcaactttttgagaattgataaattgctttatcatttgatgcttatgttgactgttggctccccaaacattccaacataataatttatccattagacagagagtgatctaccccccccccctcctgtcttgaacaaatcataagccttctcatgttcatcagttccagcaaccatttcctcttcctcaagcacctggaacgtgtttttcactttagtgctattagtcttaccagaaccagaaactctgttctctgcatcatctcgaatagcactacctttcttgctatgcactttagtaaaaccttcttcatccacctgaggtagttgtcttttgtcactcttaacaatccactgctgttccccattgctgttctttttgcactctgtagcagcatgcccaacccctgaacaatgtgtacaagagataggcttccattcatatttaattgctgaagtgttcaagccaaactcattctcaaactccaacagatctggcagcttttgatccatttgaacctcaactaaaattctagggtaactcagtctctctctttctctagttacactatccaccataatcgggttcccaacttaagctacaatcttgaagagtgatttctgaccccaatacttcaattctaattcctccagctgcacccaaacaggtaccttttgaacatcttctttcttatagttttcatttgggttccaaggtttcataatcaccggccttcttttaaagaatatgtacccgccatttaagatctgatccctgtcctcaagagagtgaaatcgaatgataaaaatgccataagacaacattttcacccgatctactttcccctgccaaatcctgtgcacaaatccatccaaaataaggagtgggggattcactcttaacacatagcatactatggatggtttccaaaaatgaattttcatcttcaatgtcatccattgtaatcctcactttttttacattctgattaacatgcttaaaagaattctcaaggtttcgaactacagaatttgacctcaaaataggggggatcgaattcttaccagctgcaatttcactgttgcattggttgtttgcttggataaagtgtgcaaagtcattacgaaaatcctcttgtttgttaatcgcaaccagagatgatcttggcgagagaggttggaatacatcgttcagagcaggatcatcgtctctcgtcgcatcctcatcagataactccagggcttcaattccagctaccctttccatcgaaccagcctgtaccgcctcagttacctccttccttccttccttctttgagagtttcattgcagatttaggttttccatgattcttggatcttgttttagccatggcatcggctgaaccagctggaagagcagaaaccgtgaaaaacctacgtattttgaaaatttaagaaccatgcaccacattaccatattcatctctcttagttttaaatatccatttacaaacaattggttttatacattctggtgggacaactttcaaaatcttattgtcttgcatagacttattttctttattcatggcatcattccacttttgagagttagaacttttcatggcctgatgcaagttgattggatcatcttccatcattccaaatccatcctcatgtctttaaatacaaaataatcatctaaaatggcatttcttctctctcttgtggacctccttaatggctcttgttcttgaaggtgttaaatttgttcttctggaacaataacctcatcttgatttgggagttgttcaacattgtcttgttgaggtttcaaattcatttcttgatcaatgacaggtgtggaagcctgaacattttctaaaatgatagtaggaactgagtttgaattcaattcctcctcaaaaccaatgtctctaacttatttgtcccccctaattcaacatcctcaaaaaatgttgtagttctcgtctcaaaaatatttttgacagtggaatcataaaacttatagcccttagatcgctcagaataactaataaagtagctactcattgttttggagtccaatttattttcacgtggcttataaggccttgactgagctggacatccccaaattggaaatgctttagactaagcttttgacctgtccaaagctcataaggtacctttgcaactgctttagttggtactctattcagaatgttagttgctgtctttaatgcttctccctagagggactcaggtaaggtagaatgagcgatcatgctccttcccatatccttaagagtcttatttcatctctcaacaacaccattcatg

SEQ ID NO: 224330 - DNA, 1740 bp, Cannabis indica
tccgttattaactcataaatatggacacgtggagggccaaaatgcattacatttatttattttcttttaaaatttaattttttttaatatcaaaaactaaatactacattttttaaaaaaaaaaaaataagagaaatgcaatattaaattactataactgagtgaaccagtgtagtatatgaaacatgattatcgaattgaagtgccaatatcatgtgaaaattgttatgggaaaattgtgatattaaaaatattaagttttaaaataaaataaaaaataaatataatgtatctgaaccctccacgtctccatatttatgagttaacgaaagtggtagtaacggtgtaagagaattgtaacattaggtatttaagtgtaaaaaatctgaaacattaggtatttatgccgcaatttacccatttttctaataataaaagattaatattttgttattatggcaaatgacgattctcaataaaagcgctttcttatttttttttttggtacaaatattattttggacactgtgttttgtaaaagttatcgattagaccttctgttttgataaatgataaaattgaccatgtattttacaaaatagtaaaaataggaccctaaacttaatttttgacaacttttttttattttatatatatataatataaccaacttgaagacaaacactaatagatacagaaaatataaacaattttgtcataacacctttaaatcggattattattaaattttattttaacaaaaaatcagttcatggttctatttgtaccattttagaaaatacaagtttattttatcatttaacaaaacagaatatccaattgataacttttatacaggatccaaaataatatttaccttttttttcttttattattatagcataaattataaacaaacaaaaaaatgtttagaatcaccgatttcttaattataaaagattaatgtgtttactactgcatagggattcttatgaataattataaaagtataacattttttataaagattgtttcttttttgttcacaattgtaatttctgtttctacattgccgatagatcatgccctatttgtggaatggaggaggcatggagcacctctttcttctttgcgacatggctttccacctttggcggtcctcaccttggggttcttccctgtctttggatcagggatccatatgtgggactggattaaatttttatggaacctaaagagcagaaacataaatattgatgaggtgtttctttatgcctctattgtgacagacacgatctggcgggttcgaaatgataagatacataaccagaggatagataatgtgaatcaatgtattgactctatttctcactcctatgcggactacagagattctctcatcccacctcctgcaccgaaccaactcgttgttgggagcctccccctcaggactggattaaactaaattgtgatgttagagtgggtggggagcattgatgtgtagcagtcatcgcaagagactatctgagtaaggtgatttgagtgtacacgacaaaactggacttttcagacgctctttgtggtgaagcagctgcagtttgtttggcgcttgaagtggcaaaggacaaaggacataatttcatcctagttgaaatcgattctaaggtagtgatcaattcactcaatgacttcgaccctagatgggaaattgagaactattccttattttgtaatagaatc

SEQ ID NO: 224331 - DNA, 916 bp, Cannabis indica
acggcagctcctcaccatgattctgacgattcagtctctctgcttctcccgcgtctcttcctccactagcggcctcccttctctttttcgttgtctcgaattcaatggcacctcggattcaagaggacgcggtatacctctctctctctctctcttagaatcatagacaatgaatccatttgggttaaatagtcttcagttgagttggtctgtaattttatttgattccaaagtttggctgttttctactccatttctaacttcacaaatatcaaaaccaaaccagtcaagattcttcttcttcttcattgtaacacaaacaccaaacacacacttcactctgttgataatctaatgccaacaaaatccccaaattccaattttattggaggaatgtgtttgttaattggagagattaatttccttgcccaaatataagcccacttgaaaaagttcaataccataaattatttaacattgtgtgaatccatccttaatttagttctatatttctctctttttaattttgtgctatctgatttaattcattctttaatctgtaatataccaattgctgagattatattgtgaaatattttctctagagtgggtatgaaggagggtagtattattgaaaagagaatagtaaagttaaatattaatgaagagacaataatagtatattcaagcgagacacatttaacaatgggtaatgatatataatactatgaaggaaatcgttgatgccgaccccaacatcattcaatttcaaacaaaaaaacctcactgtaaggcaataataggcttatgcaccatatatattatgatggtcttggtgtctcgctccagtctttataattattaccttatcttttgtcttgacacactctattctgtatcttggatcgcaacaaac

SEQ ID NO: 224332 - DNA, 796 bp, Cannabis indica
agggaccctagacccgaagtggaataagattgagaaccaagatcgggatctagatctagccccaggcttcgaccagacccgtagtcggtgtctgcatctaggacccagacctggtcccgaacacagacccagaccgataccctgtgatccaaaacctaaagcacaaccgaaagcggactaggacccaagaaaggtaccaagacaaggacctggtcccagcgtggaccaataatcaaaatcgaaccaggacctggacccagacccagactaagactcgggacacaaaccagaacccagacacggacttagactcagacccagacccaagacccggaccaagattggggactcagagccaaactcaaaattgaaatcgacacctgaacccgggactgggacccgagacccgatcccagtcccaaacccagacctagacacgaacatggacatggaccgggactcaggaccaaaacctgagcatgatcgggacccaagattgggatccaaatcttgatccaggacccgggacccggggaatggacccaacccgtagtaggtgtctaggaatagtgacaggacccaaaccaagacccttaccgggaccgaagactgaggaccgggacccgggacccagactaggacctagacccagaccaggacctaaacccaaacccagactgggaccaggacctagacttagacccacacccaaactcgaactgggattcgagacccagaccttaacctaaacttggacgtggacctagatggggaacctagacccaggacccgggcc

SEQ ID NO: 224333 - DNA, 1954 bp, Cannabis indica
caactgaggggctagcttctgcatttgcttaagttagagcaaaaaccttagctggagcgtgttttgctgcagtcttctgctcttctttcttaaactatgggcagtctctcttgtagtgtcccggaaacccacactagaaacacccttgctctctacactctcccagatgatgctttttataacttgggcattctgggtaagtgtatcgggtttcagagctaccctgacagttacctcaaccttagttcccttgaaacctcgtgttttgacttgagccaccggttgcagtaggtgcctttcttttctggtcagtggtcgagccactacctcccctactaatgcctgaggtaggaggattaggagccccaccaatgacctgagtccctcaagactcctgagtccactccactgcgcctttagctcgtagtgcctttcccaccttatcagcataggtggtattgtcatcaatggtgatcatcaggtcatgtcttatattcaaattcagtccgtctaggtatttctctttcttactaaaattggatgacactatttccgagaccaaccttaccaatcgatcaaactaagttgtgtatccagtaattttctttctaagttagttgagtaaattcttttcttttcgcacttctgactgcttcattatagtacttcgcattgaacaattcctggaattctccttggtcatcgtagtaccatcatgggtcagggataccatgtcccaacatactagagcgtcttcttgaaactgaaatgtggcacatgccacactatcattgtcgatgacgccgataaagttcaaaattctgataatagttgttagccactacttagctttcataatgtcgggacctcccaggaagattggagatgcctgcttgcgaaacctttcatacagtggttcctttcagttcactacaacgactggtcctgcctgcacaacagggggaggagctacctgcatttctagagcagggattgcaggagcaccctgctgcctttaacgtctgatctcttcctctttttgttaattctagcttgcattgttgtaaacctattttcccattcttgggcaacctgggcaacctatggcgggttaacatcaccccgacctcgtgccctgcctctaaggcctctactccagccacaaatgtttgagggaattaaaactccctaaccgccactgaatccgaccaagttacactgactcccggtgtttcgcctggcatccatactactagattagcccgtgtaaccaagagttagtctagtcagattgtgatcaagaataacttgctaattaccgcttattttgaaaatttaaaacatgcacctattcagctatcaggctaaaaaaatgcttcccatcaggcttttcttaaatcattctattaagataaactactaaagtaataaaaccttactgaaccgtgagacgagctgatcgttgatgatgattgtccatgtcgtgacgatcttcgtaagataacctagcagctctaataccaaattataacaccctaactgttttaggcatgttaacgtgattttaaatttaactgtgcaacatgttgctaataaacgactttattaaaaatcgtgattatttgaaattttacttaattaattaaaacataaaataccatacatataaaaaatcgggatcccgtttacaaaagtatttataaaaatttcactgttcatatacaaaattctatcgcctagcgactatacaaaataagccttgatgtcccaaagatcgtacgctccaagcctaactgccccgacatgtacaacctccatctgctcgctctcatggttgctcagccttagccttggccttacctacacatggaaatagcaattgtgagtcaacaaactcagtaagaaaagcataacataaaacataataataacctagattataatcagtcgccca

SEQ ID NO: 224334 - DNA, 1700 bp, Cannabis indica
gatcctcatttattctaactttgcttccatcagtcacgcgccaccgtgtccccttcaaaagaagttctcaaccccaaagaatgcccctccaaacattagagcaccaagtacctttgctcgcctcaagaaactctacatttggaaaatagagagccttcaacacctgagcaaataatacgttcggatttgtaaccagtttccaaccttgtttcgccaatagagcctgattgaagtcttccaagtctttaaaccccatgcccccagaccatttgtcttcgcataacttctctcagtccccccaatgaatttgatgcttagctgttgtagatccccaccagaactgagcaataaggacctgaatctcgcgaatcagaccttttgttattctaaaacaactcatgacataaatcgggatcgcttgagtaactgatttgatcaacacctctcgaccggcccgagagaagagtcccatcttcgacccttggagtttgtcctagactttgttgtgaattaaaccaaaagcttccttcttgttcctaccaacaaaggcaggaagacctatatactttgtgtgattttctataaatgtaaccccaagagaagctgctagtctctgaccttccgtacttgaaatcttctgacctacacataaattagatttgctgaagttaatgcattgacccgacaaggaagaatacacctgaagcacctccgcaagagcttcctcctcctctattgtaccatccataaaaatcagactatcatcgacaaatagaagatgtgtcaatcctctctcaagatgaccccaaacggagcccatgaattttgttagctcggcttgcttcattgattaagcaagacaacccctccgagcaaattagaaacaagaacggagatagagggtccccttgcctcaaccctctctccgggatgatgtggcctcgagcttccccattgagcaaaaccgagaaggttactatcttcacacaacccataatcttggctatccatcgctcttcatagcccaagcatctcatcattccttcaagaaaactccattcaactttgtcgtatgcttttgacatatccagtttcagagccatcttcctaccattcccaaaccgacccttcttcaagcaatggaagctttcaaatcccaaaatggattatcttgtatctgtctccccttaatgaaagcactctgattctcagagatcaccttatccatacttatattcatcctattaggaagacatttagagatcactttatatgctacattgcatagacttaagggtctgaagtcacccaccattgtcggatccttcactttggggataaggcataacaatgtgtcattaatgcagctacagtccttattgctgctcaacaccgccaagcaagtagctataacctcattccccacctcatcccaatgattatgataaaataaacccagaagaccatctttcccagagctttgaggggatgaatttgatcaatagcgactttaatatcttcctttgtgaactcttcaaggagcaggatattgtcatggtatgagagccggtttggaacacaccggttgaggatttctgccatgttaagagtaggccccaaagaagagaaaaggttagagtaaaagcgaaccaatagatcttcaatctcgctgtcctttgtgcaccatctcatttgctcat

SEQ ID NO: 224335 - DNA, 1219 bp, Cannabis indica
tcgagactgtgatccaaatctagacccagggcttggacctgacccgtagtcagtgtttagatctaggacgcatatccggactcaaacccagacctggagtcggaccaagaccctggcccagacccaaacccgtaccccagacccgtaccccagaccagggttcgagtctgagtttgggcttgaatccgggaacaagaatctgactaggaccaagacccggatcgggactcgcacccggatcaggacgcagatctgaatcaaaactcagatcaggactcgggactcgaacagagacacggacttggacctagacccaaacccagaacccgaactgagatgggagactcagacctgcacctaggacccagacctagattggggacccaaactcaaaattagaaccagaataaagactcaggacaaggactgagaccaaagacccaacctcggtctcggtcccagacccggacacggacatagactgggacccaggatccgaatggaaatgagaccgggacccaagattgagatccggatcttgacccacgactttgggcttggacccaacccgtagttggtgtctagatcttgcaatcgtaccaagacccgaacctggaacaatgtctagaccaggacccaaacaaaaactcggaccccgagacccgaaataggaacaagaaccaaaataaggaccctggaagaggaattggaccttgatccaaaaccggatcaagacacagaaccgaacacagacccggacccaaacagggatcaataccaggacccaggaccgaacgcggacccaaacttgtgccaggacctggggcctaggacccgtgtcccgagacctggaccataacccaatcctgtatcagaactcgaacatagaccgagacctagacccaaaccaagacccggacacagacacggacacagactaaaaactgggccaagacccaaacccagaactagacctagacccagacccagacttgtaccaaaacttggactcaaacacacaactcatacccggacatagatcaggactcgaacttagacccaaactaggaccgagacctcaacttggactaggactagaagtcagactgggtccgggacagggacccgatactcaaacgcgggacctcagaatcgaacctttaaataaacccagaccaggccaagacccgagacaaggaccaatttcgaacatggaccg

SEQ ID NO: 224336 - DNA, 2086 bp, Cannabis indica
agagcaaacacaacagcatcaagagctaaatcatgtgttggataatgttgttcatatctttcaattgatgggaggcataggctataaccctgccagcttgcatcagaacacatcttagaccctattaaatgcatcacagaaacacaaacttttctgatgtgatggcaaagctaacactggtgttgtgatcagtccattatttcaactcctgaaaacttatttacacacttgttggaccatataaactgctggctcttcttagttgactccattagtggcattgaaatcatagaaaaacctttgaaaaaacgtcgataatatcctgccaacctgagaaaactttctacttccataactgttcttggccttggctaattttaatggactcgatctttcgaagatcgaccgtaattctatcttttctgacaatatgccctaaaaaggacacttttaacaactagaattcacactttataaactttgcatatagcttatgatccctgagtcgttgtaaaaccattcggagatgttgctcatgcttttcttctgtctgagagtgtacaaggatctcgtcaataaacactataacacagttatcaaggaaatccttgaacactctgttcatgagatccattaaggttggtggagcatttgttaatccaaacgacatcatcaagaactcgtaatgaccatacctgatctgaaatgcggtctttggaatatcttcctctcgaatcctcagccgatgataaccaaaatgcaagtcaatcttagagaatacattcttaccctagagctgatcgaacaaatcatcaatcttgggcaatggatacttgttcttgattgtcaccttggttaattccctataatcaatacacattcgaagagatccatccttctttttcacaaacaaaactggagctccctagggtgatacattgggttgtcgagtaaaccctaaatatagcatctcttgaagttgtatctttagctccttaagttctgtcggggccatcttgtatggtgccttagaaataggttttactccaggtgccaagtcaattatgaaatctatctcttgctgtggcggtaatcccgaaaaacatcaagaaactctcttagaactctgagatcctcatgcccaaatgtttcaggtctactaaagttaaatacaactgctaaaaatcctacacatccactgtgtagtaaatctttagcccttaaaactgaaataatcgggatctaagaaccttgaacagatctaacataaacaaatggatcttcggccttaggttggaaagttaccatcttccgtttgcagtcaatactagttgaatacttggacaaaaaatctatcccaagtataatatcaaactctgttaattccagctctactaggtcaacactcaactccctattttcaaccctaactggcatagacctaatccaccttttgaagataactaattctccactaggtagtagggttctaaaccctctttcaatgaaatcataaggcctacccaattgattaattactctcgatgccatatatgaatgtgttgccccagagttaaacaatacagtaaaataggagttgttgacaagaagctgacctatcaccacagaagggttggctgcgtcatcagcttgagtgatagcaaacaccccagtaggtacaggatttgcctcttacttctgtttttctttctttgtttaagggaaatctttcttaaaatgcccaaccatgccacactagaagcatattttttggttgcattctccgagacgatgtttcttacatcgacggcacttagggtaagaataactctggcatcctcctctaccttggtaccctcagaaccttttgttttatcccgaaccactagatgtcaggaaagtcttcctcttctaatcagcagtggaatcaccagtgtccctaccatatccaaaagtaggaagagtggtggtcccaccaacacttggagtctctcggggctcctgaagaaatttcacgtcacccttagcttgaagagccttctcaacaatttcagcataagtcattgtgtcacttgtagtaatcact

SEQ ID NO: 224337 - DNA, 1571 bp, Cannabis indica
tagaaattagagttattttcacatgtttttgtatgtttttataattattttattataatatgttatgtggtatttatttttaattttattttagttttctaattaattttatgaatttttaggtgtatttggtggaaaaagtatggattagtttgaagaacatctgaagaatttggggtcaaaatgtaattttaaaagcaaaatcagatcagcccattagaagccccattttcggtcatacttttgacccaatctgagccgtccgtgctctgatccaacggaccagatgggcgagtgtatctcaccccaggcaggtgcaagtgacgcctggaaatcctgccagccttccttccacgcgggtccactcccgtcagcgcccaaccaaccagacaacgccacataggtctccgtcagcccctcctccattcaagccacgccaaatgtctcctgctaagaagaaaaaaagagttgttattagggctgaacatttgaacccggaaacccactaacccgccccgactcgctgccaaaaaagccgaaagaaaacaaaacccgtatgatcaggttgagtctcacccgaaaatggtatatacgggtatcgggttcgaatttttaaaatacatattttagaactcgggtgtccacccgaaacctgaatcaataaacattttttttaaaaaaattatttttcatccttaaatagtaaataatcctaaataagtaaaatatattagtaaattgattcctccccaaaggatatggaagagaagaagaccgaccgactcatccctgaatcgaatcgagcaatcatcatctcatctcctccagcaacggcaagttctcatccttgcaggtcacaacctgatcaattcgattcttccaagcaagctagtccactgctactgctatatctcctttctctctttctttagtagtttaagtttaaagttaaattttatatattatatatattatatatattgtatatgatttagatagtgcatgttttgtttgttaattttaagttcgttacttatttttctatgtgtttctctatatttgtatctgtaatatcactgattcaatatattatatatttgtttctcaatattatttattttcgactcattgacacaagtgaagacacccttactgttaattgttaaaaatagaaaaaatggtatttttaaaaacaaattttcatttgggtgcaaaaatctttcatccgtacttagcctattactatctgaacccgcccatagagaacccgatgtacccgacccgaaacccgccagactcaaccacccgaaaactgggttcggttatacattttaaacacccgacatccgaaaccccaaacccgactacccaaaaacccgacctgtgtgcagccctagttgttatttggttaaattttatccgaaaattacactcacaaacaccaaaaattcatatttttctttcacactttacacctaaatatccattttatcttcctaatttatttcacctaaataaacattcctattttattttaccctatctttttcactatttttccatccaaacaa

SEQ ID NO: 224338 - DNA, 2823 bp, Cannabis indica
ccttagacatcaaagttgatggaaaggaggtaaggcacacggtttttgaaagacactatttttgggcaagtgtgtcttatgccattaagaccacaaaacctttagttgaagtgttgaggctagttgatggtgataaagagccagctatgggttatctctacaatgctatggatacagcaaaagaaaaaataatcaatatctttaggtggagaagaaaaggactacaaaaagatatgggaaatcatagatgagaaatggaaatttcagttacataaaaatttgcatgtcgctgcgtactttttgaatccccgttgtcattattcacaaggattttccaaccatccagagatcaagttgggtttgtttcattatatggacagacttataccggaccccgaagacagaatgaaagctgaccttcaatgtagcaattttcacaagaaggaagggttctttggattgaccttagctcaacaaacatttcaaaaacgatcagcaggtaattaaatgtctaaatctatttctagtagtttttcaaaatgtgtagtagtatgaataataaaaataagtaattattctttcttttagtggaatggtggactcaatatggagatcaaacaccggagttacagaaatttggcatcaaagtattgggtcttacttgctcggcatcgatatgcgagcgaaattggagtactttcaatcaaattcatacaagaaaaaaatcggctgactaccttaagaatgcattcattggcatacataatgttcaacaaaagattgaaacacagattcttgaagatcaattcaacaactcaatcaattgaagaagatcctttgttgatcgatgagtttccacctgatgatgaatggcttgttagtgaaagtgaagatgaaaatgtgagtgggacaaggccaaggaataaggatactcaacttggagaattggaattgactcatttgactaaaaattcaaaccagtcagaaagtagttcaaaagggggttcataaactctaattcttattttaatttacatattgaattatgttaatcaattattgattattagtttataatttttttttcttagcaaaacaaaagctcttggtaaaggttgatgaatatgaatgggaggatattcacgatcacaatgggggtggtagtagtgacgattatgatggtgatgatgatgagggcaacaatttctcaagcaatgatgagtttggtgatttctaaatcatcaagtcattattgctgaattattctaattttagaaacaaaaatatatttatttacgtttgagttttattagacatttgatgctacgttattattttatgagacattttatgatatgtttggtattttataagacattacttatccttggtatttttagttactttaaaatattattttaattaaataattgaggcttacgcttcaatttacgcctcaatgcaccttgaggcttacgcctcgcctcacagaaaaaaacaccatgagacttaaatctgcaatcttaaacattagttttgagttgggctttttttaaagttatttgtttaagttttattggattttgattatattttattgggcctttttcttaaattgtgttattaggctttttttttaaaaaaaattattaaatgaaaatgggctgaaaacgtcctatagtattggtttttcttttgaggcgtgcgcctcacatgtttttacgcctcaagctattttttatcgcctcacaagtctaaggcgtatgcctctcccctaaatactgaggcgcacgcaatagtgcatttattttgtgcctcaaattgaggcgcgcaataaaaattttaattttaaacattgatttgctcttgtaattatctaaagaaatcacatgtttaagttaattttctgccgatttcgaagatacaaagcaataaatatccttttgctacacttgatagataaatccaaatcaatactaagagaattgaataaaagccatattctaaaattgtattgtgatcctttatttttattttttttttgtagaagaagaaatacaacatcacaaatgacataccataagttcttgagataactagctttgacggtcccctcgtttgagaattggatttggtacttccttctagagaaaatggagctcaagcatgtgaaacaacaaggatcaagcatgtgaaatgagatacaattggtaatcaaaatttaaaatcaaataatacaataataaaatccataaaatagctaaaaaaaaaggtttagtggtttgtaaagaaatgaggggaaaagtgatataatacatttaagatatatatgaacacacatcaaacaatatatatgagagtataaaaaatacattttattaatttttaagcatgatacgcttagaattatttaatcagtacgacaactacatatctaaattagaaactcaaataaaaaaaaataaaaattataaatactcaatatatccaaacgatacaatcttggtgctccatgacttgtttttagtgaactcggtttctgcaagtctatcccctcgcaagtccatacatgcaagaactaacatttgcaatatctagatcaaaaccaagaaatgaaggagaaaaatatacaaaggaaaaataagaagaataaagtgacttacccaaaagaaaaatggggaatgattactcgatgaacaaattgtggattgataatatagaaggaggattctattttctatctattgtcccttcgtagccttctcatgcccattttcatatggatttatctttactaaacagtcgacgatgagggcggagctc

SEQ ID NO: 224339 - DNA, 2014 bp, Cannabis indica
ttttaaaaataatttcttaaaaaataaaaatatattttataaacacttttattttctaattttaaaagccaaaaataaaattgtgttttgtaatttattgttgtttttatttaagtatggaataagaaagggtaataaatatcattttgaactctgcgttttgtaaaagttatacctctctattttgttaaatgacaaaatagatcctgtatttttcaaaatggtaaaaatagaactctgagcttaatttcgatattttttttttaatatacaacaactggaaaataatttctagcacgaacagatgcaaaaaatgcaatcagttttgtcatacaatcggtttattattaagttttattttgacaaaaaaattagttcatggtctttttgtactattttgaaaaatacacgatctattttatcatttaacaaaataaatggtcaaatcagtaatttttactaaacacatggtccaaaataggactctacataaacttttgtaaaccaacccgaataattcgctcaaaccaaaccaagataacccgacgaaaaatacaaactgaaaaacccgacaaaaatataacctcgcccaatctttatattgggttcgagttctaggtctggttccgggtccaggtctggatttgggttctaaaatattaatgatagaaatacaaatagagtataattaaaaaaattatttaaataaattttgaaagtgacttttttttgtcgaggtacaaatgcatcaacattcaattcaaatttatttactaaagttgaataccaactgaccgtctccgatgatgacattgatttggctggctctcaagacaaaattgtggtggcttgtcttcagtcccgcgctcaactataaaaatcattagttgaaatgctcagagtttgggcaacccgagtgctttccgtcatctttggttgcttgccaaagagcactctcctcatgtttcattttaaatggagactaaacttagtagtaatatattttttcgtttttgccaaaatttatattttaataagggatttgaagtctctcgagtaggtttaagtagaggtcttatgttgttatggaatgatgatgtcgatgtaactcgttttatctttaatgcaaatatttttgattgttacatgacttttaatgtgggattaagttggcactttactgctttttacgacgcaccacaaacacatcaaatagtgcatactcagactcttttggaacgtttaaaaaatctctctccactggtactatgaatagtcattagagatttcaacgagatcttatccaaccaagacaaacaaagagagcttttaaggaataatgctcaaatgaaactttttcgaactgttcttgatcacttttcattttataaccatatacaatttgggatctttttacttgggcaaaaagcaaatatttaattcacacaataaaaaaacaacttcattggtgttttgtcaatgatcattgggcatcaattttccaaccaattattacaaatcatctttttactttggatcatagagcaatcttggtagaattcaggccttagactcatagattcaacaaaaaccaagaaaaatcaaatttcaagaataaaatatataaaaaatttagcaatattttcataaacaccaaaaactaacaaaaggtttacaaaaagacaaatagttggttttcagttattttcacattattattaataaaaataacataaataatattatttttcttaaaaaagtacaagtgaaaatttgaaaaaaaaaaatattcttaaaaaaaatataaaaaaatgtaaaaaagaaaaaaaaagtagcaaactttaaatactttaatgtaaaaattccaaaattatatgaaaacattgtgaaggaataacaataaaaatttactaaaataaggtaaaaaatattaaaaaagaataaagaagccgataatttaagctgtaaaaatataagtggaaaacaactaccttcattagacaacaatttggtc

SEQ ID NO: 224340 - DNA, 1249 bp, Cannabis indica
ccactttagaattttatacaagatcttcaaactatcgataattctgtaagagataggagtcagctggaatgcggcaaccccaaggtggtttatgttatccttgaagtagtcacgaagaaggagtatggcccccgcactgatatgttcaaggctccaggcgcccatgccagttgagccactggtactggtctcaccactggctcctggggtatcgcctaaaagacgcgcaggggggtaacaactaaactcaccctctttcactgacctaacttggcatgctcgcccaagtttgattccacaagtcctcaatatgtcacctgtgtagcctgagatagatcgcaccttcaattctattaattcagcttcaaaggtgacgctaggatcatggggagtctttgatgtacgtggcttgggagacattctttcaaagtccaagtcaactggttcaaaagcaatcgtgactttgggtaaaaacaaaggcttagccaaaggaataaaggactcactaggaggttctggccaagctgcatcttgcaagaaacgacgttcgccttcgatgatttcttgcaagaaatgcatgtggcgactagcattatcttcctgataggctctcactaaatgttcccgaaacctagcatcatttaactctaatttggatgtgggttttgaaggattgggtttagaagggattgctaattctgtaggaaactcaagttctaagtctcccggacgataaattttttgaaccagattgggatattaccgcaagaagaaagcaatcccaatccctggaaagaattttatcaaacctaaagatggtgagttgagggttctgaaaaaacctacatattgcctgaaccctattgttgacccaaacacagttcaaccttaaaaattactaaaatcaaatgagatggcaatgatacaaacaaatgatgcagcaattaaacccagaagtgcaacataacaagcatttaagatattaagaagagaagttacttactgtttgaagttagggcttgggatgatatacaacccttcagcctatgaacttttgaatacaataaggatctcttcaaaaatatgaagtccgaggaaactcgcagaaaaaatgtcaaggtcagggatggcatgcaaattctcgagaaaactcgatgctgtttctttacaaagaagcttaagagtttctcaggatttctaaaatggaggaaatagtgcaaaggtggttcctttttcttactttatactc

SEQ ID NO: 224341 - DNA, 1238 bp, Cannabis indica
ccccatattgtcacaccaagtgactgcagttgaggttggaaatctaatttctttgagcaaagactcaatccaagctatttcggctgcaacatgagccaatgcccgatattcggattcggtgcttgatctggcaacaacactttgtttcttagatgaccatgacaccaaggtattaccaaaaaatacacagtaaccggcaatggactttctgtcatctgggcaacaagcccaatctgcatcagagtaaccggtgatgttcaatggttcatcgcagctgatatgaaggcctttgtgaattgttcccttaagatatcttagaactctttttgctccactccaatgtactgttgttggagcctttaagaattggctcaatttgtttacagcataggagatatcgggtcttgtgtggcataaatactgcaatccacctataacacttctgtactcggttggattaggaagaagatcaccatctgtcaaagacattggttttccagcagtagctggtgtagggcatggctttagattgatgaatttggtcttcttcaatagatcttctacgtatttggattgagtcaagtagagcccggtttgatctctgaagacttctatgccaaggaaataatggagagggccgagatccttcagagtgaaccgtttgttgagttcaccgatgaagcttttcactttgttgctgttgtttcccgtgactataatgtcatcgacatagatcaagatgataataacatctgtcccgtgtgtgtaaaagaacagagaattgtctgacttggaatttttgaagttccaatcaaccaaggtgctcttcaacttatcgaaccacgctcgcggagcttgttttagtccatacaaggacttgtttaacttgcacacatagtgctcttttcctttctcttcgaaaccttgcggttgtagcatatagacatcttcttcgagagttccatttaggaatgcattattgatgtctaattgcctaatgtcccagccgtgtgttgctgcaattgtcaaaataattctgacagtagagggttttataacgggactaaaggtttctccaaagtcgatacctggtctttggtggaagccttggcaacaaggcgtgctttgcacctttgatgagtaccgtctgcattgaacttgtggcgaaaaatccatttgtttccaattaagttctgatgtggagaaggcaaaaccaggacccatgttttgttggcttt

SEQ ID NO: 224342 - DNA, 1503 bp, Cannabis indica
gatgtcaaagttttggtggcaatattctaatagttcatctaaaggtatccattggatgtcttggaaaagactatgcaaacacaaatcgaatggggtatgggctttcgtaacttgagagattttaacttagttgggtaaacaaggatggcagcttctctccaaacctgattcccttgtatcccgtgtatttaaagccaggtattacccgcgaggctctttctttactgctgatattggagccaatctaaggtttgtttggcgtagtgtccttgaagctcaccaactagtggctaaaggggttcgttggtctgttggggatggcataagcatatcgattttaggtgattcttggttaatcgatgctgtcaaccccttgatttattcatcgcaccttgctcttattggtgcaaagatatgcaacttgttttccatggatggtacgggttgggatgaagcgcttttggcagatttatttgaccagtgtgatcgagatttgatcctccaaactctacttcaccaggatcatgggcatgattatcttacatggataggagaaaattctagtttgtacactatcaagagtgcttacaaactggcacaagatgttcgtggtgataacattcaagaggagacagtagttgacagattttgaaagaactgttggggtttaaaacttccaccataaatgaaaaatttgttatggagagttggaaaaggatgtctaccaaccatggtccaacttcagactaaacgtggaggtgcttcccaatatgcaacatagaggaagaatccatactccatgccattgtttcttgcccagttgctaaactctgttgggaaagagttggaatcggcactatagtgcagccaatttcctccattttggactggtgcgtgtctaattttctggtgcttgattcggacatgaaaaaactgttggttgccttttgttgggctatttggaatgcgataaatgataaggtttggcaaaacaaagtggtaagtgtggataatatagtgtctcggctagaagttaccttaatcaatggctaattgctcatagttcagacttagaattctctggtcttggtttcttaccaagtgatggagctgagcaatggcaggcaccacatggagatagcattaaggttaatgttgacgatgctatattttttgagacttaaccaatatggggtgggtttcgtggttcgagatgcaaaggcatgatttagaaggtggtaccaaacttttaaatggctcggttacaccaaaatttgttgaagcattgggggttaaggaagctttgagttggatcaagaagaatcgaccacaccatactatccttgaaactaactgtttatctgtcatacaagccttgcatagtttacttgttatgatttccatatttggtcaaatagttaatatttgtaaggctttattgaaagaattatgaaatgtttctatctattctattaaacgattagctaataaggtgatttataa

SEQ ID NO: 224343 - DNA, 1687 bp, Cannabis indica
tcacacttgtctgtccacagaaccgctgattctttttagtgagtttgattaaaggtgttgagatcttagaaaataacttaacaaaatgacgataataaccagccaaatccaagaaacttctgacttcgatctcagctaatccctgacgaattcaatcttccctagatcaaccttgatcccatcctcactgacaatgtgtctgagaaaagacaactgggatagccaaaattcacactttttaaacttggcatacagtttatgttctcgtaatcgctgcaaaaccatccgaaggtattgctcatgctccgcttctgattaagagtacacaaggatttcatcgataaatactataacatatatatcaaagaaatccctaaacaccctattcatcagatccataaaagctgccgaagcattggttagtccaaaagacataaccaaaaattcataatgcccatacctagtgcggaaagcaatctttggaatttccttctcttggattctcaactaatgatagcccgatcaaagatcaatcttagaaaagactgtcttcccttaaagttgatcgaacaagtcgtcgatcctaggtaaaggatacttaaagcacatgcatagggatccatctttcttcttaacaaacaacacgggagcctcccagggtgacacactaggccgtgaaaacccttggtcaagcatcccctaaagatgaatctttaattctttaagctttgttggagccattctataaggtgctttagaaattggctgcgctctaggtgctaatcaataacaaaatctatttcttgctgcggtggtaaactcgaaagttcatcaggaaataatctaaaaattcctgaaccactttgatgtcttctggctaaactgattcaggccgtgtggtatccaataccactgccagaaaccctaggcatcatcttgtaacaaatctctagcttttaatactgagatcactggaagtcgggatccctgaactgatcccacaaataaaaatggttccttgccctcaggttagaagatcaccatcttccgcttacagtcaatactagcaaaatatttggacaagaaatccattccaagtataatataaaaatccgctaagcccaattccactaaatcaacactcaactctctatcctcaattctgatcggcatagacctgacccaccttttagagataactaattctctgccagacagtagggttccaaaccctttatcaaaactatcaaacggtctacccaatttattaagaattttggccgccacatatgagtgagtggccctagtatcaaacaatatagagaaataagagttgttgactgagagctgacttgtaataactgaaggactgacttctgcatcaacctgggtaagaacaaacacccttgctagagcgggctttgttgttgtcttctgctcttctttcttgagttgcgtgcaatctttcttgtagtgtccaggcaaaccacactgaaaacatcctttccctttactcacccagatgatacttcttacagttgcgacattctagataagtgtatcagatttcagaactaccttgacgattaccacgaccttagttcccttggaacttcttgttctgacttaggccacaaggtgcagatggtgcctttcttttttgatcagtggtcaagtcactaccacc

SEQ ID NO: 224344 - DNA, 1167 bp, Cannabis indica
tgctcgaattggctccaactctatttagctacaattttacgttgaacagatgaggcaccaacatattgaagataaacagtacacttgtcttgaaaattactgatgtaacaagccatcatcaaaacaaaattacttatagatatatacagtctaactacttcaacttatgtcggcccaatcattctagatctaaaatcacgctacagccactctgagtcaatcatgcacgcctacgagtaatgctctttaatttgagtataactcaacttaaagagcaagggacaaactgtagtggccaaaaattgctctaagcccaacaaaaaggcccaacgatcgaagtacttacaaagcccacttataagtcagaaataagaaacccgtaagcccaatggctcacatgggccacgcccaatccatgcctttcgggtcatacccatattcgaaggtccaacccacaataaatcttcatcttaaagtgtaatattagggttgacacgtggaggaagaagaacgttaagttcccaactaacccacgaccatagcgatcctccctagcatagcggagcgagaatatcaaccctctaagtgatgcgttgatgtgaggacgctcatccaggaacaaacctaaaagatgacgctcatccctggagaagtggaggaagatcgtttctctagggatggaccacgtttcaagagagccgttttcctaagataataattaggcccacgctgggactgagggggagattgaaggatatacgaatattcactctctttctatagtttttcgactaaacttatcatttctctacgatctgacgtactctttctcattccggtgagcaaggtttgaccgccaatcatcgcacataggaagtatttgtttacatttcttattatcttttctacttcgcactataaatttactgatttgaccgtcggagtgtcttcgaccggcaccaccccggtgtcccaaagtttcacggtcatcctttgtctttgttctgcaggttgtcggtgcccacaaacgctcattccgatcattgtagattttagcctctacaactgtaaatacgtatgtattgtactagttcaatctatattattcgtgctttttaaaatacaagtcgtatcgtactgagtcataggggtgtacatcaaaccgct

SEQ ID NO: 224345 - DNA, 1300 bp, Cannabis indica
ctaaaattatttaatcttaatattatcgtcagtctctaggtttactagagaaaaactttgtaatactattactgaactttgatgataatatatgatttgaatggattatagtcctgtgaattttttttttttgaaagaaatctctttattcaaaaaactaaacaaggtcaggcttctctgcacttaataaggcagcagcacaagagggtaaatcctctaaccaaaaagaattacatctatgagtaaaagcccacttagctaaagagtgagccaccatattacaatctctattcacaaaatgaattcctattcaatctttaaggagccaactggaaaaaatctccatcaaaggcactccccaatccgcccgaggagtggtcttcgactgaagctggtgaatggcagtgctgctgtctgaagctaaaacgaatggtgtcgccttcattctgtgcaccagttgcagcccaattttaattgctgacatttcagcaaccagaacagaggcaatgccatgcttaaattctatttcagcaacaactaacctgcctccttcatctctgattacagctgcaatgctaaaacccggttggccatgacttactgcagcatcacaattgagcatataagttccttccttaggagctacccacctgtccctcttcttcattgtcttcatgatcttattttgagtaccccctgcagcatgctagaaatgtattcaagagcccaaggagtccaattttccattggaattttcttattttgaaaaattctttgattccttctgttccaaaccatccaactcatccctagaaatatctcaaattcctctcttgagcagttttttctcatgtaaattaggaattcaaccatgtccttcatcaaaccgagatctctaggaaataggtgccagaaactggtttctttccacacacttttcaacattggacagttccaaatggtgtgcccaattgtctccacatggttccaacaccccgaacaaattctatcaattttgatccctcactttaacaactcacttttagtaggaatccagttgtggcaaactcgccacacaaagttcttcactttcggagttaacttcgagtgccaaactgtcttccaccaacttctcactatctctttgtttgatgtttccgctgtttgtttctcaagttgagttagtgcatacccgctagctaccgtgtacttaccattgattgtgtagtgccaaagaagatcgtcttccccacactctcttcgagtttgaatccccaaaatccaagggatgtcatcttcg

SEQ ID NO: 224346 - DNA, 3496 bp, Cannabis indica
tttgatatttcctaatcttcttctattttaatttttcaaaaataaaacataaaaagcgtaaaattgctctaaaaaagggtaaaactaaataaaatattttaaaaattaacctaaaaataatactaaaaacaacctatatcactccaaaaacattaatttttcgaatattctattagagcataaatttacaaaataatattttacaattattgacctcaataagtgatcaaccgacagcgtggtcgtataagatctgatgattgccacatgtttatacaatcaataatgaaaagtaataaacacaagatttgttatagaggtttggtgatagcaagtaatgaactactcccttattagttgtattaataccgagggttaatactatcaagatcattatagatgggatctactatagcacccttaggaatacaatgcatgaataaagaatggcaaaactgaagtgtagagatgatgcttgtatggacatgtgagagaggaagtgaagaagagagaagttgctagactcagacttagatcttggaggcaagtgtttggcttaactgagctcaggctttctaggttagagttaatgtctttatataggaggcttaaaccctagattacaacttgaaaccgagatatttgaatgttttattagctaattacaaaagacaaaaatgccattgaatctagatattattcaactattttagtgggcttttatggcccaattcgcagctcagaggatgttgtccacgtgtagaagtgcataggacacctcttggctagccatggtacattccctatgctggctagccataaggctagctaggggttgctagccatctcttatgagggagctggtctgtcacttaatgcccttttgagggtcggggtctctgtttgcttaggtgctgacttggccttcctattggtgtgttgtagtgtcacgctgcactgtgttttctatgtaagcatgccacatcaaaaggataaaaattgggataacattttccatccatgtccctgtgcaaacgtctgtacgaatagggactttaatagctatgttgaggtggtcgagactattgtagcctttgctgaataaaagttgatgcatttttagccttttgaaacactttgtcttgactgtctgatctcattgctgtagaaaaataatagctttatttatatttttgttgtgtagtggaagtaagtaaagaaaggcccccacatgcattacataagtgctttttagagggaaaacctatttttacttcttactttttgctttttactttatctcaaaagaaatttgcgttagaaaaagctcctccttctctctagtagaccaaacctacaagcatcatcttccaaggatttttatgtcgctttgatgatccgagcttcccaccttcttcttcaacaacatcttgtagtgggtaagctttctatttctactatttcactattttggttgattttgccatggatgtgtgaacattatttcttcctttaattcttacattagagtgttatccttttggtattttgatctgcatgatagccttaggatacataatgtgtgaattcttgataaaaaaaagatctgaatttgaagttcactatgattcttggctctctcagtcatgaagaacacaaaaaacagtttaagttcttgaaaaaacacaagttctgatccatgcatatcttggtcggctaaggaggccttatttgaagtctggccggccaagggtcgctgtcaaggggtctggctggccaaaggggccgtacccctaggttggccaacttatgcttggaattagggttcttggccagccactagactaggtctttgggtctcgccggccactaaggcctggaaccctggccagctaaggccaaggctccaagtgggcaacaagttttcttccctcttttgacatcagctagggtcttgtgacagccttagaggcatatacaactgtggccttatgtgtggtttctcttcaaaactttgtataagtctaggtagtgaatccataatagtcaattatacaacttaggattactatatgtcttagtaggtgtacttaagatggtacttggtgatgattgaccttgtacattgtgttttaccaggaaggtaccgttaggtactgttaacttgaatgtgtttgtagctttttcagttggatcacctccctttatttcttccatacaggtagcaccgattgttgaataagggagttgatagtcgcgtaggtccacgtttattttgtaactatggctagcacaaaacagacctgttgtggaatgactctatgcgacccccatgcagttaggttggctatacgggtttgaattgagacggtataaggggatacccagcctattgttgatgttagcctcagggctgaccaaggagatgagagtcccatgtcgagtttgatctcatggaggtcatactggttacgaggaaggcacacagaccttgtgtcgtcctctcaaactaatctttggatcgttatgatactgatggtaatccgctgaacaggcccagtgagcctttggcacttggtttagataatgtcttagatcaatcctctgagcttgagattctagatgtgagttcacaaggaaacaagtggatttcccctatatcttctatctcgatagacagttttaagagaatacaagctactttgctagtgggcagtattcattgtaagatacccctggaagatcaactagcacatagattggccctcaactggatagtgtggtaagagtaccacattgatcaaggagctgtgctacctctttatccgtacttctgagatgttgctgcctaattcaggatgtctccaacacaaatcaccccggaaggtatcaagtaccttgcagtgatgtctgttctgtacaaggagctagggtggcctcagcccactctttatgagatttgatatgactttgatttggagtctgttttgcagcaacatcggtctggatacttctactttaactaagttggccaccagtggctagatgatactaattgttcatctatcctaaagtcggtgagtgtgctaataaatacttcattgcttgggatgttaaagaggtttgtaatcgacgcttcaagagagtgccatttttcaagcgttctatccccacttttcaaataagggatagggcgaaccacctctagtctctttcggaagagactagaattatatcgaggttgactagtgtggccaactttcaaaagtatggcttgtatcctcctgttcttggagttgcaagagcaccagctgtagatggggcctaccttagagatgggaaagctcttaacttggacgatgaagtacctttatctcacattgcccagaatctagagaggaaagagagggccctccgtctgtgcttggttagcggaggtccagtaggtgatgcttctctctcaatcggacctagaggctaggcttttaagggacct

SEQ ID NO: 224347 - DNA, 1419 bp, Cannabis indica
tttttagaattgattgtctcccactctccttgtatggtttattttcacctactttttttttggcagtttatttttcactggatagaactcctatgaatattaaagctttgcctacaatcatgctggtgttttgagaacaacattgcattggtggtatcatagtcctcgatcccttttaactgtttttacttttttagtgtattgtttagttttcctttcttctttgaattttcttgttttggacttcgaataacattgcagctcttatgaaaaataagaatgctagtttacttctcattgtccaattgactttctttcccaatatggttgtaattctcatttggtaaatgcattgtatatttcagcttcttgagatagctaccatggtttctcatagtcaacactgaatttcctacatcgtgaaaaataagaatttcagctctgcgtacttgtcctttattaggttgactgtatccctttccccctatattttttctcatttggtaaatgtgtcgtttatttcagtacttatttgatttcttactcgatactaatcttgtgaactaattaaagctggcctgcaatggtggggtggtctttcaagaacaatattgcattggtggtattgttttcattgtacccttttacttactactttactgcaacgtatcatttagtttgctttcttgaattttcttgatattaggatgaaaacttgtactctgttaccatcaagttacacaagaaattgggttagtgtgcttgctccatcaaattgttttatgaattctcttatatggctggtgactttatcagtgctgtttgctaaaaaatttcgtctactagcttttcgtttgttaaacaaattttctggttgtttcaactttttgacattagtcaaaattgggcgggctttgttttgacataacatattaacatcctcaaccttgcattttatttttcatttaatgtgttacattgtttggattttggtctgtctttatataggtgatggaaaatggttcaaggctatcttcgcttatgcatttgttcattattttaagctcttgacttgcttgagtattcctatcttaacatgcatcttggcaccttcgaagggagttatctcgttcttgtatttttctttaattgattagcatttgctgtattgtattttgagtgtgtgaatatcagtctgcaggtgaattcaggtatgtcactcgagagtgcaatgaagctgtttgatagtttgcttcacctattttattactttgtttatttctgcatgtatatggtttatttatcctggcttttcagggttttcctttcaatgtggacatgttttcagaagatgtttcaaacgttggagtgttggtcggtattcaacttggccaactatttactgatagtttcagtctt

SEQ ID NO: 224348 - DNA, 1664 bp, Cannabis indica
aatagcttgtccgaaggccacaaccagtaatggatctgatgtgctacagaataatggagatgaatttggggaaacaactaaaactcagccagttaatggacagtgttagtttaatgggatggaacattagggggtttaataagaaggagaagcagcaagtgcttctagaggtttgtaaaataaacaaggttggtttcttggctctttttgaaaccaaaataaatcatgacatggtgttagatgtgatggaaaataactttaggagctggaatttctactccagccctattatttcttatagaatcatgttattatgacaagctagctatgtaaatgttgagattcttgtggaagattttcaattcgttcattgcaaaattagaaagtttggggacaaagatagttgttatgttacaacagtgtatggaagtaattccatgacaaaaagaatttcactgtgggacaagctctcggctcttggtcatctaaaagatccctggattgtttttggggattttaatgctatgtttagctatggagatagaagtggaggtcgtcaggtcactcccagagatattcgtgatgcttaggattggttagcaaaaggccaggtgggggagcttcacagtatgggtggcaaatttaccgggtcaaacaatcatgacttgggggacagaatttattctaaatttgatacagttttctgtaatgaaaagtggctagatgtttttccgaaaatagttgttatgaataaatgggatgctatctcagatcatagctattgtataataaaacatgtggaggctgggaacttagggaccattcccttcagattttgtaattactggatgaacagagaagggtataaagaggctattctttgctgctggaataatcagactagtagcaagggtctcaaaggtattgttcaaaagttgttgagaaccaagcatgtgctgaagagatttcacagagacaatcagggagacataattggcacttacaaagcggctaaagaggaattcaacactgctaaagggaatgtggcagcaaacccgagtaaccaaagtcttcaagttgttgagaaaagcactcaacaagtgtatatttcagccaaaaaggattatactagctatatgcagcaacatgcaaagttaaattggatgaaatttggcgatgagaattcaagcttctttcatgcctctttgaaagaaagaagacaagaaaataggatattatcctactgcagcaacgaagaagtaatagaagactacccgaaggttattgagcacttcctaaaccattttaaaaattttggggaaagggaatttagctaccagaagattagatcagacaattcttgctcggggtaagatccttgacatctagcagcaagtaaggctcataagacctttcacgagggctgaagttaaaaaagcaatgtttgatatccattcttccaagagtcctggtccagatgggtatggttcgggtttctttaaggggctttggaatgagattggggaagatgttactcaaggagtgttggagttctttcaagatggggtgatgcctaccatgctcaatgaaacgataatatctcttgttcccaaaacagatagtcccatagatgcaaatgattatagacctattgcgtgctgcaa

SEQ ID NO: 224349 - DNA, 1149 bp, Cannabis indica
atagttgcaattttctccacacaccattccaaaagcgatccgacagacaagattcaaactccaaaaattgacaattttcatcaagaatcaattttaaccgttagatcatcatcagcggtcaagatcttctcaaagtaattttttcatattttttgtattattttattaatattttaatagggcatcctttcctataaaaggagagctcacctagtttatttttcacagtactctaagtccccataaggtcagagtatatctctgtactttctctctctatgaatgggaggtcttgccttagccagttttcttataattctcctgagaaataaatactcaaagtagacgtagctccattaccattgcgacacggggagtgaactactataaatttcttgtgtctctttttattatacttaactctcattacatcttgccaatctagagagcaggtgtggccatatttttgtgtctagatttttacatcaacaagtgctttcattgacagcgaaaactcgagtccctaatcaagatggttgcaattagatcaataagtattgaaagaagcaccacaactggtcaacccactaggggcatgccaattcctggggctgatgatggtgatggaacgacacctgcatctcaaatgtcaggtggaggcctggaaaccagttccacaactcatcctctgagaccaccaataactactagttctgatgttagtggccaaattccacctggagagccactcgtggagttagaagaccctgaggaagttgatcctcaagttgagttacttagccaatttgtggctaacttacagcaacaactatgagagtctcttgagaagcaacatgaacagttacaaacctggttcatggaacactggaggaacattgagaatcaacgtgctgaacaagagcaatgaagatcacatcttgctcaatgaattcgtgaagcttatagatctgacaacgaaacggtttctccgagggtttcttcaactagaattggaaacaaccctcgtgtgccaactggccacatgggaacaagcgctcaaggggaaaccattaatgggcgtggtacttcttgttgggaatattttaccaggatctagatttactaataagtatgtttcattaacatcct

SEQ ID NO: 224350 - DNA, 2057 bp, Cannabis indica
aataaatttggagccgatgtctaaggctacagacaagcagattcctacatattataatttaaaattattaaaaaaacgactaactactagtgtacgacactatctcataataatgttggttactattggccgggccagcccaaaacaattgggtggccttgagcaaaattcatttaactggacttcacttttttttcttttttctttgaaggaaactggacttcttctgaacagaaaaattatgataactttccattttacacattttttagcaatcttacaaatatactttgacccatcttttttttttctccatatatttgattcactgttatgtctttctatctgaccttcacaacattaaaatttaatttcaaacataccgctactgctagtgctagttggttggacttaaaaatggtaccatctctacctatttttcaagaaaatcactttaagaggtgtgaagtataacttttcttttgctgccattggaattaaagtgtaaccatttggttatttacgtttacaatcatatagtgagtgctcagtagttattcttttagaaaaacttctactgtagttaacacaactatatttttaaaatttagttgagttgtttatgggtctataaaactaaaaaggactcattaggtaacactaagagatgcaaagcgagacttgttgctaaaggatttactcaacaagaagaaattgactatacaaagtaccttttctcctatatcaaaaaaaaaattccctcagagtcatcttggcattagttgctcagtttgatttagagttggagtagatggatgtaaaaagtaatttttaaatggtaatctagaggaggaggtatacatgaaacaaccagaaggattctcctctagtgaaggtgagcatttagtatgcaaacttaagaagtcaatctatggattaaaacaatcatcccgccaatggaatttaaaatttcatgatgtcatctcttcctttggatttgaagagaatgtcatggatcaatgcatatacctgaaggaaagtgggagtaagattttctttcttgttttatatttagacgatatttttcttgcatctaatgataaaggtttgctacgtgaagtgaaataatttctttcaaagaactttgagatataagacatgggcgaagcattgatcttatgtcataggccttaaaattcaaagagatagataccgaggtatcttaagtttatctcaagaagcctacaccaatagaattttagaaatatttcgaatgaaagattattcaccgagcgttgctcccattgtcaagggtgataattgaatttaagcttgtttcaaagaatgattttgaaagagaagaaatgaagaacattccttatgcttctactgtcagaagcttaatgtatgtgcaggtgtgcacaagacccgacattgcttattttgtcggaatgttaggaagatgtcagagtaacccaaggatagaccactggaaagctgcaaagaaggtaatgaggtaccttcagggtactaatgattacaaacttatgttcaaatgaaccgacaatctagaagtagttggctacttagattcagatttcgctggttgtactaattcacgtaaatcaatatctagttacgtgtttatgtttgtgagtggagttgtgtcttggaggagtaataaacaaactttgacttctacttctactatggagtccgagttcgtttcttattttaaggctacatcacatggtgtatgctaaagagtttcatttcacgtcttagagtgattccatagcaaggccattaaaaatgttctatgacccagctactatttatatggctaagaacaaaaaaagtagaagtcaaagcaagcacatcgacattaaatacttagctattagagaacgtgctaaagaaaataaaatggtcattcaatacattcgcactgaattgatgattgtcgatctaatgacaaaagacttgccacctcatatatttaaggatcaagagactttggttcccttatgtaatttgtacaaataaagttattatta

SEQ ID NO: 224351 - DNA, 1409 bp, Cannabis indica
taagagcccctacaaaaatattaaggcagaaataagagtcaaataaactaaaatatacactataaattaaaaaatttaaattgatttgataaatagaaatagaaaaacttatttcatcaacaggatctctgaatcttcaatagaatttttaagatatgcaacaaatctttaacatgactatattgatcttgcaatatcccagtaagtctaatagtaaataattagggtttatatttatattatgagttaattagataataagtcggattatgatcctattaatctatttcaacataaaatttaaatttactataagtgagtaaataggcgtaatttataaattacggagatttatatagtatgtgtgaatgtaatataagctatatgtagaataaaaatattttcaaatttgacgacattagagactcgatcgggggctagaaaaatcataacatgtttaattaatagaattaatgaaaatattgtgataagttaataatgtaggtattaggataattaggattatgtggaatttaacttagcgctctaaaagtggagatttcttagtggttaagaaatgataagataatattaataataaattttttattaatattattataattgctaatattattataatattctttttttatatataaaaatttatcagtatcgataagtttgatgtatattataagtttataaacagtaaaattaaacagaacgaaactctcctcttccttcgataaactttcttctcctctatttattttttcgtatttttaatctgaaatctagcgatctaagctctgatattagcggaacaacaatccttagagagagaaaagttaagataaggattaattttgttttaagttaaaaacaattagttttgtataagggttttgtgaattagaatggttatgaatgttttgaccttataggattgttctcaggtagtcatgggactagttctgatattttcttgttgaatctgaggtgatttcgagttagaaattgagtttaaaacttttatagcttaagtccgaacattagtggtgtttaccaattaagggctcgattttagtttctattacgtaagaatagttgtatgtatggtatttgtgtgccttgtgaaatttagagtggtttggacaggttttgatagcattttggtgagtgcataaattgagaatagaggaattttgcccctgcccaaccggtcaaccgatcctggtggaagcggttaaccggttctcaactggtttgccatttctaggtattctcagaatttaggaatcgtatttttgtcgtaactttttatttgggtgtctattttggacgtttaataccgtttcgaagcttgcagcaagcttacgatatggtgtatgttttagagccaaaat

SEQ ID NO: 224352 - DNA, 2444 bp, Cannabis indica
gcaagaccgacagtcccaagaccaaagatagcaacaatggaacctggctctacttttgcagtgttccaaacagcaccaagacctagaaaaaaagagacatacataacagatcaagatctttcattcatacaaaggtcatagagggttttgatccggttcaagaacacaaacatgttagtaaagtaaggacaagaaagtctaaccggtaggaacaccacatccaagaaggcacactttatctaaaggagcttgtggattaatctttgcaacactaacatcatgaacaactgtgtactgactaaatgttgaggttcccatgaaatgaaagataggttttccatttatagagaaacgacttttgcggtcattcatcatgactcctgctccagttgcaacacgaaccttgccacataaatttgtcttccctgatttgcagaacttgcattcccggcattctgcctggtaacaaggaatgacatggtctccagcctgaacttcagttacaccttcaccaacactctccacaatcctgtgtcaaattcaccaaaactctttccactcatcaaactaaattaatggaaaaaatatcaacactaacatcgaataaccacgtttatacataccctgcagcctcatgcccaagaatacatggaaagagaccttcaggatcctgcaaaccatatgatttaacattataacattaaagcaaaatgtgtactaaccgatcatcatgggcttttatgaaattttgctacaagagagtgttgtgcaaaaatagtcatattaagggtgtgtttgaaagtaattatataattactaagtagtgtaatttctaaggtagtaattacacagtctagtatttacaccacattttaaaaaaccagatgtgtttggatatgaggtgataattacataaaaattcttaatatcttgtttggcaaaatagttagtaattacacgagaaaataatatttttggtaagcaatgtttcaaatagaattggagtgtaattagaacccctcaattacctctaattacaccgttagagtgtaattacatggtcacacaaacatgtcaaattgtgtaattacctctatttacgcacaaattcaattacactgtgactttctaaacgcgctgtaagaaatgtattagcaaaataacttcctaaaaaatttaattaccaaaaataacgaccattaccatcattttgcgactataaatttacacttcgcgacaacaaaacaactattattgtcgttttgcaactataaatttacactttacgaccataatggagacttaattcaacattttcatgttaaaaagagccattatacagtgaccataatggttattttgcacatttaacattttcatgttattagtttggccaatttcccatagcaccccaattggaaataaataaggttaatatgaacaagatacaaataatctgtcaaatggggcttcactcttcagactcagtaaacacttcataatagttaagaagactcattcattaccaaactaatcagctcagtgtcactataattaaatgattaaaatttgaattatacaatataagcgttcatcaatataataatccccaaaaataagtaaactaatttataataagcagcagaaatgtatagaaatatccaaaccttgccgccccaagtataagcatcggtatggcaaagagcagtgaagagaatcttgatccgaacctctccggcttgtggtggagccacctgaacatcttcgatcaccaagggcttattgggttcccaggccaccgccgcttcaaaaatttcaccataatcatttcagactccgaccaaagaaaaacacagaaatggagaaatatcagtttttagtaacaaaaatagtacctttgcaggtgattacttgaccttgcgtagccatggatatgaatgagcttgggagaaccacaaaaatggaagagagaacaaaaaattgaagcactggttttgatttgggagagtttcagagattaaagaaaaaaaaggtaaaacaataattgaaaatgacgtggataaatgtggaccattggatggaaataattgtggagtttgactaaaagtaagctgtatcgacgttccaggatgttttggaactacagtgtttaagataaagacgcacgtgggtgattttgaggtgaaggtgacagttggcagtgttagtagttgtaattgtcgatgttagggacagatgcatatggcgggcttacttatgggccctacattgtctcgtgggcttttgttttgggaaactcgacccaactagcccatcttataagaaaatgtgggccttgttgtaaatgcccaattcttaaggcctcaatatgtccctttaaggtaaatactatttggagattatttttgtggtttttaaaggataagtttgtaaaaatatgattt

SEQ ID NO: 224353 - DNA, 1002 bp, Cannabis indica
gtaaagtaaggtaaaatatcggggcgttacactttaagcattgattgtgtaaatggtgttaaatgaaattatgaggcatgcgtttaaacgtgttcgtgtccgtgttttataaatttttagtgtcacgtgtcgtgctcgcgttagtaactttttaataaatttaagacctcagcacaacatgaacatgaaacaccaacactaattgccaccctaactataaagcatgacgagcacaagaaagttcaatcccaatctaaatagcacatttaacattattttcaatgcatgattgactacaatatgtactacttgattagcatccctacaaataaaattcaaaccaattatacaatcacgtgtaatattaatttattttaatatgaattaaaaatatttagtaatttattttgagtaatttgcggcgtaaataactaagtttaactatttattgtagataaatacctaagttatatgtttggaactttcctagttacatggtcattaagtgttaagtcattaccacatgccattttttgttagtatatttaaattaatttttaaataaaaaaaaatttgactatttcgactaatcagggtctggcgtgtggctattaacttgacacttaatggccaggtacctagggaagttttagaattttagcttaggtattattaccgtaaaaaattaaacttaaatatttatataaaattcagggttaaacttagatatttatgccgtaaattactcatttattttagtatgaattacttgattatatgcttatttaaatgggtaaattgcggcaaaacccccaatatttttattttgattgcatttaactcccaaaatttaaattttggcagtaaaacgccccaaactcacattccgttagcaattagcctttttcatctgttatctgtcaagtttgcagtacaagtgtatacaaggtactgttcacatggacatagcgtacacatagaataatattattggtccacata

SEQ ID NO: 224354 - DNA, 3412 bp, Cannabis indica
ctggtttagtggtttttggagttgggattttagtgcccaagaagttagaagaagagagcaatggattagtgatagacgccattgttgaacgcacaaactctgtatgacccttataattctgtagctaaggaaccctttaaattcaagtctgtgaagatgagagttccacaagaagttgattttttgtttgactaaaatggaggagataaaggaacaagtagctcaatctcaggccatagatttctagtgtggatactcgctagggtcgcttccacgtgttgtgttttgtttccagtcatcctatctttgatatatttaaaacgaaaactcaataatatattattatttccgttttttttttgttttttttttggttatagaaaagctattttttttgattaaataataaaaccatattagatcttttggtcattacaaaatagttcagtaggaatagtttgaacaactccaaacctatggcccacctaacctcattacgggtaataaaattacaaattctgttgatatgagaaaaaatacaactagaaaaccgagaagagtaactattacaaaatgagacataattttctaaagtccattgagaatccatcccattaagagcattgataactaccctcgagtcgctctctacaataacaaacttgtagcccaagtccatggcaaccgaaaccgccaaacaacaagtcgtcgcttctccgcaaagcgcatcagagaaatccaaaagagaagtgtgaaccccgaccaccctactaaggtggtctctagcaactacagctatacacatgctttgaagctccactttaacatcgcaattcaatttgatccaatccataggaggaggagaccagacatccttccaacataaagcaggggaagcaaaaagagaagcatgtaaatttgcaaaagaattacaaatattatcaatacacttattcatatcaacatgacgattattataaaccttttcattttgggtacgccatagagagtcaacaacaatcaaagcataaaggaaaacctcatgagtatcaatttccctgtgtttgagattccagatgaatttgatccaatcccacatacgaataccagtatcacaaacaggataaataccccaaggggaggccctccaaacatgaagtgccacatcacaagagagaaataattgttctaaagtttcctcccccatcccacacaaaaagcaactagcatctttaatatgaaaccgtttcttgatcacagatcgaactggtagagcattggaaagaattgaccaccaaagaaccttatgatgttccaaaattttactgttccacagcttgttccatagcgaaggagccacctcacagggaggagctctttctagggcctaagtaaggtaagcggatttacatgaaaaacgtccattacgttcaagagtccaaatccacttatcattaccttggccagtgagaatacccccttttaaaattgcagacacagtctcccgatcacagagactattcaacttgtagatatcccaacctccatccatagtgaggaggtccgcaactttgctaacagtagaagaagaagctcccttcgatattgggtggaagtctttgatatgagaaatccaaggatccctccaaacactcgtgtccctcacattagccactagtttacaagcacctttcttcaaaatggatttggttttaacaatattcttccaaaaccaagactccgagtctttgtaccggcaacttagtaactcctttccttttaggtatttggatgccaagacccggcagcaaagagactagctaccattaagaatattccatccccatttagccaaaaatgcctggttcatttctttggtcttacgaaagcccaatcccccccgagattttggaagataaagcttatcccacgcgttaagataaagcccatgattacccttttcgaaacctcacaagaaattacgcactaaaccatcaattctggaaacaagtctgttagagagtttggtagtttgcatggcgtaaagcggcaaggaaagacccacagacttaataaggggtggccctccctgccttagacagggttttagctttccatccctgtaatttagaagtgagattatctaggatgaaattgaaatcagtatctttttgtcttggtctagagagagagagacccaaatacttaatgttgccctcaaacgaaccaattcccaacatatctctgatctccctttttaagttatcaggagtatatttactgaagaagatagaggacttaagcttgttaacttgttggccagaccaagagcaaaatctctcaaggcaatgccagtagcccatagcttccataaggttggctttgccaactaaaattaagtcatcagcaaagaagatatgggagagcaccggcccacccctgctaagtctgatgcccttgaggaccttcttgctcaaggcctcctcaagtaatcttgataatacttcagccgcccaaataaatagataaggagaaaaagggtcaccctgacggaggccacaagaaggtttaattgtgccaaccgacccccattgaggcaggtgttgagagtggtggtagtaatacactgagagacccaattccagaatttttgaggtataccatagcacgaaagcacatggtctataaatctccaatttagcttatcataagctttcataagatcgatttttacggtaaaataaccttctttaccttttttccggttaaacgaatggatgatctcttacacaatcacattgttatccaagatattcctacccggcacaaaagcagcttgggtagggcaaatgatcgaaggtaaaaaaggtttaattctgttggctatgatcttggaaatgacattgtagctctcattacacaaagaaatgggcctaaaatggttagctcttttcgggtttcggactttaggaatcagaactatatttgtagcatttactcccttatgcatcctgctagtcttgaagaagtcagagacagattcacaaaaatcatcgcccactaagttccagtagtgctaactccataatatattatagagaaatgctaaagggacttactagtatttttgtacgcatcaatattattattagtatatagtttagagtaatttgcggcataagtacctttgaaatttttgtaggcacctgactgttaattgttaagtaaattgccacgtaggaattcttgattggtccaagtcattaaattttatttttaaaaaaattaatttaaatatactaataaaaaaaataacgtggataatgacataatatttaacgattaggtacctacaaagttccaaaaatataactgggtattataaccgctaaaattaaatttaagtatttat

SEQ ID NO: 224355 - DNA, 1774 bp, Cannabis indica
aaagtgtataatacagtaaacaaattgcatattttcatgcatgagaaattgatcaaatttctgctctcttacaaaggttccatccattctactctctttcctacctaccaaacataacgtaaatcccaagaactccaaatgtaacacaatatccctagccaatactgccatcttttgatacgaaaagatggcacatatctctggtcaaaggctctgttttcagtatccacgaccaccgtttgctccttgacgcctccggtatccccgtcatctccctccgccaaaaggtttcaaatgtacaaggtttcgatttatgttcaccaccaaatggtatttcaatttcctttcatgtgttaataataaaaggaatgccctcttctaaataggatatacttaaatttcactatgtatactctgcaccatattatacatatatatatttatattgagttcctgtatatatttaaaatatatgtgcttatttttattattattaacttttctgattattttagtctaagttctatctcactcttagaattctcgtattagcatggttaaaatattgagacataaaaataacagtgttgtggtggaatacaatggttgtgtcggtgtggtgattgcggtaaagaatttatcaaagcaaaggggtcctggtggcggtaaatcagtggcaaagggaattgcaagaatgactggagatcaaatagtcaatggttcactttaagatgaattcgttggagtgtcgttcatagcggaagccgccggaggcgatgaacatgatggggcattcatcaaggtgttgccgcattaaaccgacgcgtgatttgcattttttttttctttttttctaaaggtttgctatttttatggtcaatgattatgtatattaagtacaagttttttcgttaattgcagttttatattaattttgatttgtccgttattatgtattgtcggtttaatgatatgtctgaaaatttaattttggttgttttattcctttcctttttctgattctaggtgtcttgggtcttaattttaatttacaatattgtaattgatcgattagggtaagtaaattttattttaagtcttaactatttacacagtggactttttcttcttaattctattttttatgaatttattatttttactagaactatataaattttatttctttttcctttaatttatttgataattattttatttttatttttctatccttaaagacttaattctcttatatttgtcagcaaattaattttatttattataattttactttttagcattctacgttagcagatctttttctatttcaatgtttgtatctctggattgtgtttagcttttttcagtaatcaaattgatttatcttaaagtcagtatggccaacatagctagttttctttatacggccaatgtggctagttttgattttgtaaagccgatatggctagttttggttttgtaaggctagtatggctagtttttggttttgtaaggccagtatggctagtttaaattttgtaaggtcaatatgactagttttagttttgtaaggctaacatgactagttttggtttgtaaagttattatatggctagtttaattttgtaatgtcagtttggtctaataataacacatcaaatttttatataagaatactactttcgaaaaatgctttaaaataaaatcaaaataaatcctggaaaaattatcttaattttatgttggcccaaaattaattaataaaattaat

SEQ ID NO: 224356 - DNA, 1458 bp, Cannabis indica
agagagcagtggtgtgtagattttgttttaccagaatttatcatgaacacttattattttttttaattgatatttattaaaataacaatttaactagtttcttttattggtatgtttatgttctcttattagttaataataattttaggccttcctttcatgccacaaattataataattatctaaacataaaatatcataaattttaatgtttaaaaaagtccacatgaattcaataacaatacacaacagtacaacacataatagtacgactaaattaaaattcatttttaacctcggtaggtgcaagtgcttctgttgtgcccctttgcaccgtacttgccacaatttcgtggtataataatcctttcaccattacaagcagttctttttgacttaattcttgcaaccttttgattcttgggttgccctactggttgcttctcaacacgcactccaactgtcatgttctttatgtcatcaagtaattcccaatcatcctcgtcaccaactggcataattgtaccttcatatgtgctcctccaatattctgttgtgtaatatggcgagcatagtgcgtacatgttaatacttcgttgctgagttgcagcacatgcatgaggacaagaaaacctcatgcactggaacaaactgcaagtgcaagtctgtacctgcaagtacactatgcaaccggtctcaactgttcatccagggtgaacctacaacgtgtaaggtccacatgtgtcaacatccaaattccgtgatttttcaaattgcaatgccaagtcctcctccatttctagtgatagggtcttcgtcaacttttcagctttttcttttcgtgtagcataccactgttggactttggacctcaggaatgctatagcccaattgctcgttattacattgtaacgtacccctagaaagtacgatcgaacccatttttcaaatccaatttcctcaagatattgtgcaacggcaacattcattgccctaatgttctcaaattctctgtgaaactctaactttgaatatatatatacgtgtaggcacaagtgtaaatgtgattcgtgaagacgtcagtcttgaacttttggttgacgttcataataatatggaggtagcatgcactatggtgtgcatccagggccattgcacacaatattttcccaccatacctagtcttcaagaaagacccatcaacgcatacaacaggtcagcaaaacctaaacccctggatacaaggacctagagagaagaaataatacttgaagcgaccatcctctaccacaaaatccatgatgatacctggatttctcaactttagcatgtgcaagtaactagctaatttcgaggtatatattgtacgcgaggtttttatatgttagttttttataaaatttttttaggaatgtacaatgcatgcatatgttttttaaggggaattatctcatatac

SEQ ID NO: 224357 - DNA, 2142 bp, Cannabis indica
actgttttttacataatccttttataaagatatctgccacttgttgttcggtagggacttaaggcatacaaacttgaccactctcaattttctccttaataaagtgattggctacttcaacgtgctttgtgcgatcatgaagcactggattatgggaaattgcaattgctgccttgttgtcacagtacaacttcatgggagttgactgtgatgacttcagctcttcaatcaatcgttttatccaaatcatttcacagataccatgagcaacagccctgaattcagcttcagcactgcttctagctaccacagtttgtttcttgcttcgccacgtaactagaacctgatgtagatcttctatctaccatacttccagcccaatctgcatcagtataagcttcaatttctagatgtcctcgtggtttgaactagagaccttttccaggcgttcccttaagataccttagaattttgtaaacagcatcgaaatgctttgaaccaggtgaatgcataaactgacttactatgctcacagagaaagctatgtctggtcgtgtatgagacaaataaattagcctcccgactaatctttgatacaactctcgatccttcacgttcttcagatctataggttcaagtttaacattaggttcactaggtgtttcagcaggtttgcagcccatcatacctgtctcatttagaagatccagtacatacttgcgttggctaacaaaaataccttctctggaccttgcaaactccgttccaagaaagtatttcaaattacccaagtccttgatttcaaactcttcaccaagtcttattttcaactttttgagttcactataatcatccacagtcagcacaatatcatccacatatacaattagtatagccaccttaccttcttctgaatgtttatagaacattgtgtgatctgcttgactctaagtatacccataacactttaacaccttaccaaaacgttcaaaccaggctctaggagattgattaagtccatataaggacttttttcagcttgcacacttttcctgctccatagtgatcttcgaatccaggtggaagactcataaacacttcttcttctagatctccattaagaaatgcattttttacatctaactggtgtaagggccaattagagttgactgctagagataataacacacgaatagaattaattttagcaacaggagcaaatgtttcttgataatctattccatgtgtttgagtaaatcccttagccacaagcctagctttgtatctctcaacacttccatcagctttgtattttattgtaaatacccacttacatcctacaattttcttctcctctggtaacatcataatctcccaagtaccattcttttttagaacattcatttcctcaaacactgctagcctccatttcgggtcatctagtgcttcctgaatatttctaggcacaaccagttcagaaattttaatagtaaatgctttataggattctgataggtgatcataggatatgtatttggcaataggatgtttagtacatgcacgagtcccttttctaagagcaataggaagattatctacttcaagatttcctggggctaactctggggtaggcttaggatcagaatttgaatttaaaataggaatagaagatgaagaatcacctggaatatttgaagaaccattgtctagggctggcaattggctaggcacagggatgataacatgatctctaactctttcaagacattcttccttgaataaaccacaggttcaaggttgttacgatttttaatcaatcgtagcatttcttaatctgacagaccaaattcagatttaacaattataggattaatcttttaatatcagtgtcaaaagtcttaggtaaaggttcaaccgtctcccaaaaatttgattccactaaattctccccctgaattaaattttgcgaaaaataagggatattttccacaaacaacacatctatagttatataaacacgtttagtaataggattaaagcatttatatcctttttctattaggaggaatcccaaaaaaaaaatacatttttcagctctaggatctaacttagacctagaccttttaggaatgtggacataag

SEQ ID NO: 224358 - DNA, 1183 bp, Cannabis indica
tcaagtactttgcatgtgtagaccttaccgatgtcgcccgcgccaatttctttgaagaacttagagtggtcgaatgctaggccagatacccgagtatcagagaatggtagagtaggtgaaatctgagatgtatgtggctttaatgaaagctccagtttcctaactacttttgtagggagacgaagaagatatagttagtgaatagggtataagaggagaaagtaaatgcatatattacatgtattaaatttattttaataagttaagaatctatttactaacactttcttttacatttaaaaataatgagaattgttataaaaaaaaaatagctagcgcatattttcttggacataatatataatctatgaaaaataagtattagccaagagatcataaattcaatatcaatttagttttatgaaaaagtatgattagtttcataaaatatcgttacatatattttaccgatccaaaaaaaaaaaatacacatgtttaatttttcttatctatatatataattatatataaatacactagaatgacattaagtttctaggactaaacatctgatctaatttaatatttttatttttatccgattcaatccaattagtaattaaaaattaaaaattaatcatccgatctaatccaattagatctcaaaattcaatttactcctatctaattactaatttggtttggattggttttgtaattaaatatccaattacacacaaattttttatataaacttaaaaataggaaagaaaaaataatacaaaatattattaatattgagaacctgatgaattttgagattaacatctaatagccgatccaattcaattagacatccaagtcaaagtaattgtaattggatatctaatttttgtaattagattagttcggttcaactaaatcgaattgaatctcatccagccctataaatattaactattttatgtagatgattgtgcatatatattgattttattactatattattaaaatttcaatgaaattaatgtcatttaaaaaaatagttaaaataaagtattggtgggtttgtaatgcatttcaaacctttttcgtactatgcaagaccaaggcaacaaatagttttgatattaatattttcctactgtgccttaacgccccacattcctccaccactacatgc

SEQ ID NO: 224359 - DNA, 843 bp, Cannabis indica
tggtaatttttgtaaaatatagaatttaaaataatatttatgccagaaaaagacattcttatttttgtatagagaaaaaaaaaaattatggtcaaccttctatttcaacctctttctcaatctccattccaaaacacatgccaaaatatttttttctattttttttttttgtaatgttcattgtagttgtaatatcaaacaagtaaattttcaaaaaaattcaaataatttacaatatcaacaacaaagttcctaatattttaatttaccatgcgtgttcaaaaatttcaaatctattttaaacattgtaaattattcaaaaatttacgaagaaatgatgttataagtataaaaaaaatcgtcataaaataaattaaaaataatatttcaacatatataagttaaggaatacattttttttgtgtccattaataaaaaatgccctcatattatattttattaaaatatacctacttttgtgagtgagttgtccaatatactctcttcatccacttaagtctaatacataatttacattaacctaagggtataataggaacatcatctacaaaagtaggtacattttaaagaatacgaaaaataaagataaaaattaaaataactaaaataaaatagatatacaatgtaatttcaagacaaatatttagaaagaagttgtaataaaaaattgtaattaaaacttctcatatttatggccaacaaatataggtacaattgaatcacacgttaactgtcaacttgaattgtttatgtatccactcttgtacacctgacacaaccacgtttatattaatacacttaatattattattatttaaaatt

SEQ ID NO: 224360 - DNA, 1369 bp, Cannabis indica
tattggtacccaatataatggtcgtgaagggaggtcaaatcaaagaacaaatagaagacaaatttgagtttggatttgattcatttatggtttaatttttattctgatgtgtgtgttaagttttaggctcaaattttattgtgtatgtttttaatgtttgagttttagtgttttattggtattctactgtttgagtttgcgtttatgagatctattttttttttatttatttattttcataaatttttagaacttaaaatttgatgttgttttcatttgatttattagaattgagagtttgatttttcatatgggaatttaaagtttgtccttttcgtttcattgattggaaaatattagaagaaagtttatggaatgagaattttgaatatataaaaatagcatttgaatcgagaatcaaaatttagtgttaatctccttaaaaaaaactctattgttaatatgtaaaaataacatagctggaagaagatgaaatataataaataatttgaggatataaatatgaactgcaatgatgacatcaactttatatgatcgagatataaaaataatacattatgaaaaagtttgattcataatctcacacctgtttttttttttttttttttagtttcaattcataatgtttgattcataatacatttcttttataaaacaaacaaccactcttttatattctgtaaataaaaaaaactacttcacgtatatatatatatatatttatgaatacgtatatatataatttaataattatttaatttaatattaatatgcaattattattaaatttcatatgcaatctactatgatatatatacgtatatatttattattatatatattcttttttaaaaaaattaattaatttatcatagatatttttaaggaaaaattattaaaataataataaaatattaatttataaatttatgttataataaaatattaaaaatgagagaattaaagaaaaagaaaatagttttagagatattttagaccgccacgtcactccctcattcttttcctttatatatataataataatatataatttatattttataaatttaaatgaccataatttaatgatactatatcaagttgactttattttatatttaataaacatcttaaatttaaaattttagtttctaactatattatagtatgtaatacgtttatctatatttcacttaattctaattttttaaataatttaataattgattaattaattaagaaagatattaaaaaaaaatgattcctaattttttttcaagccattaacttctttaactaattctattatttaaatatctctaatttattataacaaatatctcttaaa

SEQ ID NO: 224361 - DNA, 1436 bp, Cannabis indica
caagggctagagatactgaacggaaggagtcattttattccgctgcatacttgtgagtagatctaaaatcctggtaaaataatttccaacaattgtcgatcatcgacgatggtggattgccatcttgggatcgagtggttggcctggccatggaagctgaaggcctgtgttcttctgataccatatgagaaagagtagagataaaagcagagaaaatattagagcatttgattttattatgcttaatctgattttacaaaaggggaaggagcttatatagctcagtattgaagaagagctgtaaccgaattgtacagctgaaacacaatctttgtagtaaacaaaacaacccttaactaacttaatccaaagcttaactaacttaatccaaactaatcctaagaatcttcaattctaaatgaatattattgaacacataagattaaggttcactgaggcaatttaacaaacgtatagtaattcataatataaaatacattcattattacaatttcaataatgtctatctaatctaaaagtcatacctataagaagaaagatacaaatgaatgaacttaattcatatttttaacattatatatagatatgtataaacccatccattattcaattaaaatgtgaaatgaaattgcacaaacacaaatttattttccagagacttgcaagctaatattgttatgcataactactcaaactagcatttgaactacttaaacgtaaatgctaattcaaagagtgagtgaaaagccatgattgaagctcgtaaatgggagcgacttcaaatagtcttcagctataccttctcatcattaaaaatttaaaaaatgcagataaaagtttgtaaaaaagaagagcaagagaaggatgataggagcctagaatcagagtacaaatgcgaggaacatgatgatagtctcaccataatgttgagagaaataggaggaagaccaaaaattgaaataatttggaagaagaaagtaaaataaaataagaaaaaaggaaagcagtgaagaaacataaaaaataaaaaaaaaataaaaaattaatagtttaatgtagaaataaaaaaatgagaatacagaagtgaaaataaaataaaataaaaaaaaatgtaaaaaagaataaaaagtataaaactctatactagaggtgatttgcttatataatatataatgtttaataataatatgtagaatttgaatgtttttaaaatgtgatattattagcgggagaacgtgtttttatgaaaatcattgtagtatatatatataaatgaaaaaaaaacttaaagtgtggtaaaaatgattaaaaagtctctatacgtattaataaaaacatcctatactagaggtgatttccttatataatatcatgtttaatagtaatttatataatttgaatgtttttaaaatgtg

SEQ ID NO: 224362 - DNA, 1960 bp, Cannabis indica
catagataaaatctcattgaaatacccccacaaatccatggtagattaaaaaattcatttatatgacgaaaaagtaacaaagactctttttggaggtgagttttttgggttgccataaaatcccatgaatttccacaactaactccttggacattttacaagagcatcaatatgttcagtagagtagcttttaacagtaacatcgcaatctccatttcatatccataagagtccaccactactcccacacaataaacacgaaagctataagaaaaattgatataaaataaagagtaacagaagaaaaaaaggatgaagagagaaattgaaagtggaatactttatttcaatgaagtgattatttatttatacaaaaatgtgagccatataataagaaactaaaaaaaataattataattacaataaaaaattgattaaaatatttgaacatccatatatatatattatttataatactcacccttagatatccataataactatctcattaataacatgcccagaaaacctagtaggataaaaacttggtcaagggaaaaatagtgcagtgtgtattaaacctctctcattttggcattcatggagatctcctaatcgacgaactttgatcttatgtgtcgtcttctcaaatgttaatgatggtaatcattttgtgaatacatttgtaagactttcacttgaaataattcattgaacattaatcgatatcaccgcttgttggaacttattttaccaggatcttaatttactaattgttatcccaattttttccacctaatgtagcatgtccacatagtcaaaactgaaaccacgtggaatacattctataaataactggacagggttaccttgtgcagttcaccaattatcaagattttaagtctgtcaagcaggatccaacaagaagaaaatgacaagccatggaaccctagcaagaccataactggccagccaatgaaacatcacacgtcggctaggccctaagaataagggtggccaaccaacacgggcagacagcgtcaagtaggctgaataaattgcagggtccacaacaaccttctaaaagattctcaagctggccttcattaacgggagagacccaacagcccataaagatagggttattctctcaagatattggtcttatattttagggatttaattatactttttttgtgtattttaaataaaatataaaaagatgttaataccctattttaaaggaatatatcttcctatttgaataaaaatatcttgtaagtcctacactatatataaagtatagatctagactcccttccacacgcccatagttctctctttctctaagttccatacgccatttatgcttcctagacactaagtcaattttttacttaagttcttcacaagatctcacaaattctggatctgtaacatattgttctcacaattgtaatacataagagagccataactagaaattacaaggttttaacctgtgatctgcgtggtattctctcaagagtgaattcaaactaaaaagggagtaggtcattactcattcatcaacgggagcctctataaattcgtgtgttatttttactatttattattcctgtttacacgtggtgatcatcaacaattataaggcttcatcgtcagttggctaaatttcaagtcaacacgaatcatatatgttgattataaatattataatctaacattcaaaatatgaaaaatcctaaaaataataattcaacatgtattagtttaagaaattttatattggttgtagtagaaatagtatgattcctttgttcagaagaacaattttgggtgggattggcccactttaccattaatgagggtctcattgatgggtgtggaatattgaaatggaatccacctgtctcattctggaaacgtggataacagggtcgaacctatataaaaatcc

SEQ ID NO: 224363 - DNA, 2217 bp, Cannabis indica
tgtttagcataggaacaagtaaaaaatagatggtcatgagtttcgaactctacctcacaaatagggcataaagtgctcgagatggtcagatgctgagaaaggaaatctctagtaagaagctaggtattagctatttgccagaataggaactcgtgtttaggcacaataagcttgtcccaagctgctctagcataatcaaccttgtcctcctccaccaacaagtcataatacattttagctctaagcttattccctttcaccgcaagacacattctagcttagccattgtttcccgaaggctaagaatctttttgaaatatcagttgtcatccatcttttgtgggtaattccaaatgtcatgctctttcagataaacagagttgatccatttaacccatatgcaatcttgtttactagcaagagcccaaaagaatttagccaagagagccttattctattttttaccttctcggaacccaacccctccaaggtttttagggagacaaaccttttcccaagaagcttagtgaagcatactcctattcccagctcttatcaatggcagtcgtaatctttgaaggcatgatgaagatactcatctagaagttccttattccaaggagcaccgagttaatcaattaagcaggacctgcaaaggaaatttttttactagcccagcagttaagattcttatttactttacccaggataacatcacaatcagttaccttccactttgttggccgaagattcaccccaaggtatttgaacgaaaagcaaccttcttcaatttgaactaaatcaaggatcttggatttgacttcctcactaacccctccaaagtaaatatgagacttttaggtattagctgacaaacctgtagcactgtaaaacttctagaatgcttcaaaagtaagcctcaccgaattatagttccctttgtagaaaataacaagatcatcagcaaagcacaagttagtcaatctcagatgcttacataaaggatggaagtcataacccctcttatctgcataaaaagttagcaaccttgtgaggtagtccataatcataacaaagagtaacggtgacattggatctccttgatgaagcccctttttccccttgaagttgtcttggattccttccatttatcagcagatggtaagtggttccccttagacacgtcattatccacatgatgaatctagagggaaaacatagcatccgaagtaaatcttctacaaactcccagtcaaccgtatcataagccttgccgagttcaattttcatgatgcatctagcagagacattcttccttgtataaccctttagcagatcttggaaaatcatgatattatgggctagcaacctattcttaatgaacgcaccttgattatcactgacaatcgagggtagcacttctgaaagtctagaacagatcatcttcgaaatgcacttgtagacagtgttacaacaagcaatcggtctgtaatcctttgttgaagaaggattttcaattttggggatcaaagaaattatagtctcattcaaagtttttggcaaatttccatttgcaaagaaatctaaaaccgctgtagacacatcattaccaattttatcccataagtctttgtagaatccagactcgaacccatccaatcctgggctcttagttgcgtgaatgctgaaaaagagctttcttgacacccccttgttaaaaggcttaatcaatttaatttgttgctccaaatctaggaatttaccccgctttaaacaatccccatcaatcaagctagaagttgaacttttgctgcccataaagttttcgaagtgcttgacaaagtgtttaaccactttctcaaaatcatcaatgatagtgtccccctccatgtacgttgtgatcctgttttcaagtcttcttttcctcataaccgcatgaaagtaacttgtattatcatcactaaatttaatccaattaaccttgctttgttgtctaaggttctgctcaaatctgtcctttgcagcctgaaacctctactgcttgatcgaaacttcaagttgctgttgtctgtcatttaaattcaaggccactgcttcctggatttcacaataatcctctttagccttcctgtaatctattgtaacatcccccacctcatatcttttgaaaatttttagagcatgtttcactctaaaaagtctctgcatcaaactatc

SEQ ID NO: 224364 - DNA, 1118 bp, Cannabis indica
taggtgatgtgatacatggatgccagactatggcataggcttacctgattaggtaatgtgatatacacgcacacctgattaggtgatgtgatacatggatgctaggctatggcataggcttgcctgattaggcaatgcggtatatgaatgctagattatggcatgagcttgcctaattaggcaatgcggtatatggatgctagactagaccataggcttgtttgattaggcaatgcggtatatgaatgccagattatggcatgagcttgcctgattaggcaatgtaatatttgaatgccatgctagagcataggcttgcttgattaggtgatgcggcatgttatcctattttttgcatcgtgacgtggtgataagctggatgaaacgtgtcctacatttttttcctatctgggcggaaaggagtattcctagcaactcatgaatggctaatttaaacatttgtaacactcagatgtttgaataggttaatcaagaggacgtccgatcaagatacagacatatctatactgagcaaggcgtataagttggcgattccaaagatcagtctcatcatttccaagacacgaagataatccctatattcgtgggaatgagatagagaataaagacaatacgccttagtttcctatttctttacattgttattatagaattaatatatttttctattttatttaaaaaaaatatttaggtttaaaatttaaaaatataattttatactaatttttggaatttttaagcttttattttattaaaaacgaatttttaataaaaaaaaaacactaaaaaaattgaatttttggtgactggttaccatcaaaatctcaccccaagcgctaggacaagtcgtgattcatttaccgcgtttagccaagctcaaagaaaactattatgccacttctaaatagttatagaagttatagattccatatttgtgattaacgctcctactcaattgtactactgaattcttaagatgtaagtatgagctagtcctacgggtaagcgggtaacaaacaagtcaaggaacccgtatagtacaattaagctagaacctaactatctcaggattgggatcaattgacttaaggccgact

SEQ ID NO: 224365 - DNA, 3398 bp, Cannabis indica
ttttttcatgattatgtatgttgtagtttttttaagatatcctacaaaattttgataaatttgaaataagttaacatgccaaaaatagagtttaaagagtctgttgtacgtgtgattcttttatttatatgcatgtgaaataaactatttgaacattattttctatatagtaaattattctaaatttcttaaaattttgtaagatgtcttaaataattataacgtcatacaactatagaaaaaattagactaattttattttttttagatgctgaaacaaataagcggtgcatcaatgtacctctttttgggatgcatagttacaatattatcatttataaattttgaaaattttttattagtttacaatatcgaaaatagaattcttgtgttcaaaaaacttcaaatctatttttggcactatagattatttgaaaattttcaaaaatttattgatgttgtaactataacgaacaccaccgtataaaaatattctcccatgtattttcagacataaaagttaactaaaatattgtaaaaaaatgttaacgataatactcctaaaaaaatatataaaataattaaaaaattaaacgggctccattggagggatgagtgccatctccattactccatcctacctctgtttgatatttggaatggaaaattgttgccatcatactctgtgtaatctgttaagcaaagaatccctgctccattagggtgggttcttgccaggaaaaaaaaaatcatctctattctctagtcactacccctacatggtgacataacaaaacttggttatttgcatcaagagtttaaggaccttgttcaagacttacaaaattaatcaacaaaaagtaggagctttggttttagcacaccagaataaagataagcacaaatgttttagacaaaaattaattgtcacagaatagtgaatagtaataatttgtattcctaatataatcagtgccagatgtcagtagtactagtaagacggttacaatagactattattggttgttaatttgatacactgtatgaaaacgagtcaatagcaatataacaaagtttgaaaattaaatgttggatacgtacttaccatttacacacaaattacagcctatacttaccttgtattgcttctcatttatttattgttacctttctttaagagaaagagataagcatgaccaaatgaccaatagccttagcaagggtttgttgaccaaagtaaattgaaacaattcaaagtttagtcattaaagtaaaaaagatggtattaacatgaaaataaaggagaataatagaggagagtagggattacacaaatgaacatagataaaacaataaagtagactcaaaggggggcgctaggggttctaaggcttggcctaaaatgaacatggcttgaaattgaagatggccatgttaaaagctgatggaaaagcaatttcaatccaccaagaaatgagaaaaacaaaaaattgaacaaggagcaaagagaaatttagggaaaatagtcttcaaaacatacttcaaattataatcccaataaacaaggtttacaaggtagtttcgataatgtatcagactaaactctctcaaaatcaagtccttgcctcactaattaaaacaaaacatacaaggctttattaaagatgccatagaaacttctcacttaaacttcagacacagacacccagcggccaataacatcagcaacaacaatttcagaaatctcagggggaggtgtattagaccagtatatagcttcacgctcaccagagcctatggaggccatcttgttcgcagccatgttcctgggaacaggcacctgggtgatctttgcatgtcggaaagcctccaagaaattgagacacctgctaatgattttctcaatacctggagatatgacttcaatcttgtaatggagaacttcaaacacaatgccacagtctccctctatctccagatattccacaccttggttcatagcaacttcaaggccatgacacaaagctgtcagctctgctgtaactatgttatcacaattggacaggggctctgcacaaccagctttgaatataccattctcatcacgaagaatgaaacccagaccagcagtcccagactttcggtcagaaatcacaccagcaaagttgagtctccatgagtaatcagtgggtggaatccaagcaacatgatagacaagaacatctttgttagtcgttacaaacattggatgagattcatcgggggaactcattgctaaggctgagactgttttgtaataactaatcggcctttataaacactcgaaaacacaaaacctaatttatagatagagcaacctcaattttccgcatgtatttgtcaattagagcgacaaaatttattccttttttgagattatagatgataggccagcgcttccgctaaccgaatttattacttttacccattcatttttaacagagatgttcaagcatgattcagcaatacaattaaatgtcaaggaatttgttgccaataaattcaattttttgtgattctaccattaaatacaatacactcatactctaaaagttgagattcactattaagtaaccaacccactgcttaaatcctaatttaaaggaaccatgccatttgccaaaactacaaatctaactttaaaacttagatattattaagtaatgcttgaggatacaagaattataaatataattcaacttaattcaaatgtcatttacacctctatgttgaaagtggaaatattcatagaaaatttaaattactaataaccacttttcaccatatataatctcaaaaggaatgaaaattacattgaagaataatcatgcccaacttaagtttgctcaatctataaattagattctgtgttccaaattaaatactactaaacaattatttctctctattttgataaatacaaaatacaaaattggattatatgttagtaatgtaggaagaaaaggtaagaaaaacagcactagactagactacccaaaactaggcagtgataaatcagtgaagatcttgcttgttttctatgacctatattactaaatcaattctactaccaatctcactactatgaggaaatgttgatgataagtttctggaacaattattaactaatcagcaatgtagatttcaagcatacaaactgctaaagatgaaattattaagtaataaacaaacctttctttataatcaatgcaaaatataaaacttaaggctcgtttagtacgtcgtattgtattgtaatgtgttaaattgtgttgtgttgtattgtatagtattgtattagtattattaatacaatactatgtttagtattgacttgtattaatagattgtgttgtatt

SEQ ID NO: 224366 - DNA, 2711 bp, Cannabis indica
gtaaagagttatttttgggaaatatcctaatagtaaccttaatttctaatatttcaaggttacttctcttatgtcattggaaaattataaaaatatataaatacaagtgtcatacatgcatatgtactagtcaaatgtttgaaaaaacttgttccaaattccaattaaatatcatcttaaaatatagtaattaattgtaaaactaataatattcttagaaaatagaatataatagaatataattaatatataaatatatatttgttttttagctacaaagaacataattaatatttaattgactggtaacatccaagaaacaaatatagaaaattgagttgtaacgtatgttcatttctatacatatcaaaaatcaattaagctcaacattacaataatgaaatttagttctcttgtaacataaaattgtatataattatacaactaaaaatattctttttttttcatatataaaacttcattcattcattgataataacaaatcatagtcaacattacaattattgaaactctatcataacataccattttagctcgtttgttatgttgtattgtgttgtatagtattgtattggaatattgaattgtcactaacaaaattttttacttttagtcataacaaaacttgtgactaaaagtgaaaaagttgtaactaattataaatcattaatcttatattgtgactaaaaagtctgtagaaaaagatattagtcacaaaaattaccatttgctgtgactaaatatgttttttagtcacaatatttattgtgactaaactaaattagtgacaacttgtatctaaagactatgttttagtcatgagtaacattttgttgtaactaaaagtcacattccgtcacaaaaaaatatgttgtgactaaaaaattgtcactagaagtagtaattttttgaagtgtgtattagtattatttaatacaatactatatttggcattgatcacttgtattaatagcttgtgtaaaattatattatctttaccataaactcgaccccaactccgattcccgttcgggttggggtttgggtctggggtctgaggcccgaggtcagagtctaagtcgcggtctgaggtcagagtttgagtcgaggtcggggttcgggattgggtctggggtcgggattggggacccagacaatctgggttctaaggtcggagtccaagtcggggtccgggtctgggttcgggaccgggtccaggtctgggattgggatcaggatccaagtttgggtctcagaccgagtcatggtcagggattgggtccgggtctgggtttgggtcgaagtctgtttttgagttggggttcgggttcgggtttgggttccatgtcttgggtcggggttcggggtttggggtatgggtttggtactaggtttgagtctagatcggggtctaggtctaggtcttgtttggatcagggtccgggtccgcgatctgggtctggggtcgaggtttgggtttgggtaggggtggcaattcgtgttcgcgagttgtatttgtgtcgtgtcgagatccataggtctattcttaacgtgaacacgacccacttaataatcggatcagaaaataaaatccgaacacaactcgtttataaacaggttgacacgacacgactcatgtaacctgtttataagtatattttgtttaaacatgatggcttcaacttggaaaagaccatgatcaaattggatatggccatcaagcatatttagtggtggattgaaagacttggctacatatattgattgggaaggagaaacttacagtcaacttattagttaaattagtcctccaatggggtttggtttacttataaaataagatactcattatgatgcatattgtagagaattaacaactataaacaaggcgcacgtacaagaagatgttaaaaatacaaaaatgtcttctattgatattgacttttattttgttaaatattggagatttcatcgtgactttagatatgttatgatatatggtggcctggttctagataatttctgtacattgtactaccaccaaactatctttttcaggataaaaaataaataaatgtgtctatttgtgcttttgatagacttgaatataaatatagttcaacccaaaatagagacattttaaatattatactcttaagtgcatgataatgatactcaaaaataatgtgttcatataagtaacaggtcaaacccaaaagagagttgagtaacatcaaaaaaaaaactattttaatcaaagtaataaaattttacctttgtgatgtatgtctaaactatcttggggaagcatcattacccaattgctctcgcatttgtctattactctcctccacctcacggagtcgtttctctatctctaacaagcgatcgttggcctcatcattctttttcctttagggtaatgagtgtggaaaaattgggtttgtgtcactccataacccatggctcggactcgaccaccatgctcatttgtctcgagggccatggtcaaaattttattcttcccttccatgcatatccttccctctcctacttgctttcgaaagtcatcctacaaacataataaattgaattaaaaataaattatgaaaaataaaaatataaatgcaattatatatttaaaacttacaatctgtttagcgatatccacagttgggccctccacctca

SEQ ID NO: 224367 - DNA, 2873 bp, Cannabis indica
cttaagttatgaagttttggagctccaagcaaatttgttctatgaggaacaaccagttcaaatccttgataggaaggataaggccctctaaaaagtaagaccatagttttggtcaaagtactctagagaaacaacaagatggaggaggccacctaagagttatagtcgatcatgtgggctcaatatatagaattgttcaagttagatttcgaagatgaaattcttttaacgaaaggataattgtaatgactacataattagacataaattagcaacttattagtaattaaattactatttataattatatgtgcattaacatgaaaataagccctagaaaaagcattagtgatataatttcttaattatggagactttattgaattctaagtgcgtcatacgtgttatttatgaattatgatatttttatattttatgcatgataacagttaaaatttggcggtttggccattaatgtcaccttgatacgatttagtatcttagattaagcgagacaagatttatggacagttaaaatatcaaggttatgcgaagtattttgttataactatttcactcctagttgtaaagattacttaaggttgaagtaagggcgtttttgtaaaatgctatttaagttttaatatttgtctttagtggatttctgtagaattatatgagttatatgttgaaagtattagaataatcaagaggatattagataacttaaaataaaaactaaaatcacattctccctccctcttgctcggcctagaatgaaccaagagaaaccaagataagtttagaccaaattcatctttaacatggattttagttagaattgaggtggaatttgtagctaattcaaggtaaaccttagatttatctattttgatagttttgaagtaagaagctaggtttttgtatgtgattttgtaatttcgattctgtgtgagtttgagtaagctagaacgttttttggaacttgatttttgattgtttttggctggtttttaagtatagtagcagatgtagttgtcagaaccaagttttgaagtttggaaacttaaaacttggtctttaatggtggattttattttaggggtttattgatgcatttaagtgttggaatatgtttagaacatgatgttagggtgttctgaaaagtttgagcaaatttggggtataattgaggaagagatgttcgagtttaggatttttgcacagaaacggtgaacagtttcatcaggcaaaaccccagtaattgggttaccttttggggatctgattaaccttttgtgatgttttgggtacctcaatttttgtgttttctcaatatttagggtatttccacgctatttatcaataaggaaacttcagattatgagtttaatgcacatgtttactgtatatgttttatgtttgccaattagataagatatcagtaaaagcgatattggagtacatagagttgcacctagatatcgatggatatatgtttagtaatttttatagagtataaactagtggtaccaacactagagtattaagtgcacgtggtattatggctagttgtacttttagtatggattaatgctatgacattagtacgactagagtgctgcattattgactgatattatggtcaatcatgctataatcaagaatgttcgagactcagttatacacgttcggtgcaagttatagactcatggtaattaggtgtatgggcacctaattacaagttatacacataaaaattagtatgcagttataacagattaaaaccacagatacgactagactcactattaatataatttgtcaaaacaatgacccttacagaatatatgattatgttttatacttttcttactgagtctgtcgactcataaatatattttcatgtgtaggtaaaggcaggttcaaatctgaacaacaatgagtttggaacttagtgaaaattgtacatatctaaatggttagacctagagtgttcagatcttcaggacaacataaattcagttttattagtcgcttggcgacacttttattatattgcattatgttcatgtttgaaaagtagattcgggatcccgtattttgtaaacaacttgcatttatgatgtaattttatgaaagtattttattattataaagttttaattaaacataattttatattaaagcctttggttagtaaagattagcacactaattaagaaaacacaataacatgcctaaactagtagtgcgttacatgatacattgagacagtttgatggaaactttgcaaaacatcaacaacgggcttgttggtgcataccataagtcagtagtagtgggtgctacaactatttttgaggtaatttggaagtacatgaacactttgcaactagagaaagagttgcatgatagatacgtttaatttaccggttctaattcccatggaagagagttaagcaggtgtttgacttcataacttaaaaactgttttcactttttaaaactaataagggggtgttcgaccaatttgagttaaaaaatacaaaaaataagaaaacatgaaaaatattgttttctatttcaaaaataattttttttgtctaacattctttttatattttctctcacatactcgggtttggggctagggtctggggccaaggttcacgggttttggggccggggtggggtagggtttatgtcgtggtgtggtgtgaaatattggagttctttttcttattttagtgaaaaaaaaaatctaaaaacaatctttaaaaattattaactaaacgcatagtattttaaaaaacattagctaaacgtatagtattttaaagggtaaatagtggcataagtacccaaagttt

SEQ ID NO: 224368 - DNA, 1557 bp, Cannabis indica
tttcggcttagggtcatgttcgacgtggctcatcctttgccacgaggattacctatccacttctccggcataaacaaagtggtctggcttgaactgaagtatgaaaacctccaggatatctgcttcttctgtggtagaatgggtcacagctacaacaaagggtgcatggattatatgaaagcttgtgatgaagccccgttccccccggatctaaggtatgatatcaaaactatcatgggtaaagttaaggttacaactaacgctttgttatgccatgaacagctcaactttacaaatcccccggtggcatcattcatgacctcaaacccagctagcgcagtttgtgttgcacccccggagaactcccctcctttaaccaccaacggctctcttgagcaggcccctcccacggtcaaacccaacaagtgggcctatacaagtccagccccacgccctacattcaagaccctcttcccatggcccaaaccgaaacctatgcaaacacaaacaccatcatccaacccatttgcacccaacccgagaccattaacccctcatacactgctctcctcaatgccacaatgagtaactccagtgtccaaaaagcctctcctatctccaacccgagtcacactatcacaccccaaaactctagcagctcccactccaccagctccaaatactgtcatgttcctcttccagaaaacctccccctcctggacacaagcaaaaaactcgaatccatgaaccttacctaccaaccaggcgtggccaccccctcgggctcgaaagcctcaaggaaaagaaacaagcccgactccaaagacaagttcaaaaggcagactgaaatggtcaatggggatcttaggcaccaaatcaagcgctcccgctctgataatccgcaagccaacgaagtctctactagtatggcaggccatgcctcagagcaggcctgctcgcctccatgaagatagtgagctggaatgcacatggaattgggagtgatcgtgcattccggaatctctcccgtttagtgtctactagtagtcctactattttatttcttatggaatctcgacttgtaaaaaatgctattaattatgtgaaagccaagctccattttgattcgggcttagaaatgcctagggttggtagaagcgggggcttacttttgttatggactaatgatgtaaacgtcaatttatgttctcaatctattagtcattttgattgctatgtgtcgtgtgcctccactaatgtttcgttccatcttacttgtttttacggctctcccgttgactctctcaagcctcacacttggcaaatcctgaaaaggataggccgggataatccccgtgacccttggcttctcattcgggattttaatgctttcctcttctcccatgataaacaagggggtaaccctgacaggggcccttcttcggatttcagacagttattggactcctttaatctttccccgattgaccccgtggggcccttactcacctggaacaacaatgcggcccatccaaaaaatattcaagagcggttgga

SEQ ID NO: 224369 - DNA, 1633 bp, Cannabis indica
tgcccactttgagagcttatgagcaaactaattccgagaacgaggctgccacactgcctccacctcagggagataatccaatagctccaccgagctccaaaagacacctgtcagccgccaatttagggccctacgcgcctgtaaaccctgcaccagaagctggcagctcaaaacaatcaccacttgcctccaaccccaagtttgacaccacttaatcgcatgaaagagggcccaagattcagcttccaacggaagatgtgcctcaaagttcacaaccagtgcctcggatacgagatcttctgattcaaacaccacaatcccagcaacggcacgcgtgtccttgaaggatgcatccacaaataaaaccagtttgtcaaaataaatctccctgtgaacaagctgcatcacaccaaaattagcttgagtatcccatgcagcaagaagacaagaggctgccttctgaactccagccaatacacccctccaagatgggttaacgtgatcatgaaatgcacgatctgagctgtccatagctcatcaaccaagcagataccaaatatgttaaattcatcaataattccttcatcagcaccatgcaaaagtcaggggatcaaagccactcaaccatctctctcggggaatcaaaacaaagggtctcacttctaatggaccaccgactagcaaaccacacagccttggtaagggggcaactccagaacaaatgttgggccgagtcattcgcctcgccacatatagcacaactgtaactattgccaaagatcctttcgaggcgacatccaaatgggagaatatctttgcagagtttccaaaggaacaatttcaacctctccgtgatcttaagcttccaaatacagacaaaaacagatcagaatcaccctagtgacacttgataatggacttataagccacactaggggaaaacaaaccattagttgcatctttccacaccagcatatcatcctgagaactaggcagtcgcttaataagattcaaggagcttacgccacttgggacaaaccacctgttaattaaattgggtatccactcaccatccgcaccaatcaatgtcgaaaccttaaccgaattgtgctctatcaatggattaaaggcagctctagacatattccaatcaagccatgggatccaaggggattgccacaaatctgccctcctcccattcactgtaagccagcaaacttcgttcctgatcaaatctcgcatagccatgattcctttcgcgccaacggaggccttttttggaactttaacaaaccaaaaggattgatcccctttacccaatacttagctttgaagactttacaccacaaggagtcatcctctgttgcaagtttccacccaagcttggaaataagagcgaggttaatatcctcaaacttcttgaagtttagcccacccctatcgagaggcaagcacagagagttccaattgagaagagctagaaacctatctttatccacattgcccgtccaccaaaacttgcggacagcttgatccatttcattacaaagtgtcttagggataaggaaggctgccatggaataaaccggggagctttgggccacggcacgaatcagggtcgaccttctcgctt

SEQ ID NO: 224370 - DNA, 1299 bp, Cannabis indica
ctactaatcagagcccacttctctcagcccaacacccaaccctaccatttcatcatcttcatccatcaccaacacacacacagccgcacttcccttcaccaacgtgacccagccacatgaccactcgcaccaactccaagctcttcgaaccgcaccatcgcactgcccgcagccaagcaccagtcgacccaacctccatttcacctgaaaccgaacccaaaatctcacctaaacccgagcttccatttcctccattgaaaccgtagccatagaaatcgcaccagctcccatagcctcaatccgaaccaccattgttaactcaacccatacttcaccgaactcatctcaacaacattcaacttcgaactgcaccacaatttcccctccaacgagttcaaactcaccttcaaagcaccccagtcgactgagctccaccgtgaccaatatccagcaatcacccttaaactcgcaccacccacggcttcaccagaacacaccttcgagcatcacagtccctgcacctccacggatccagcagctcgcacgaaccagctccagttgctactttcaagtccatctttgtttcgagcactcaacggatccacctgaagtcaaagcacccaagcacaacaaccatctccgtccactgcagtccatccattttccacttcgattacccagctcgagctaagtttgttttggtgatttaatttgaaagttattttgggttgaattgcataattggtggctgtcatggactgttaatattctgttaaagggtgctaaggattgtcattgtgatttaagtgtggtagcagtgtgataattttggcttggatggcttgaatggaaatttggtggaattgttgaagaatattgggctgaaaaaaattggtgaatttgagaaaaactgtgattgtgaacagattgatgcatggaagagggtttatttggtataaaggagttaatttggatacattgatagtttgaaattggggttgtaatttggaaatttttggtgtggttttgaatgcctaactgttctctgccgtgtttgtatgatggtgattattagtgaaatggtgttgaattggcagtgggagtgttagaaatattgcaggtttgaacagattagtggtgttggataaattggacattgagtgagttacacaggggaagttatcatggccaagtactacatggagtgtgtgtaatgtgtcaatatctgacttagtgtggtatggtcagagaggggtgatttttgaacaagattgggttgggaacagtgaagtgcattgt

SEQ ID NO: 224371 - DNA, 1357 bp, Cannabis indica
aaaataattttatttttgttctgaaaatattttatttggattccttgtgaaaaattaagcaagtttgatttttacggaactcgattctgattaaaaatgagagagatatggtgatttgaaatctggatccattgtgtgtcgagggtggtgctcatgcgcaccaagaccctcggagaaggtaaccccccgcgcgcataacctctgacaaaacgcctgtctgaaactcggtcacgcctggattcagacacggagcctcgcccagatgctgcatacgcacgcacacaaaccttgtagctgaccgagaattctcgatcaaggaggttacaactctcccatccacgcgcgtgtataggttgtgtgcagccaagatgattttcactcaaaaatcaatttttttggtaaattttccaccaaattttgattttttctatttcaaaatcactaaatatctgtacaaaatattatttttaacatttaaacttaaatattaaattttgaaattaataatatttaattatttaatagtttattattaatttctcatattttgaagtttgaatttaaaattggttattttatatttaaattatagttagattttaaaattttgttaatttcttaaatttaaaaattatttaataatgagattagatattttagtattggatttattttaaattaaaagatatcattatctttttaatttaaagtattatattaaaattatcttatatgataaattaaataataataaatttgaaattaacctaaatatttttatagatatcctaactatcttcaactcctacttttagcaagagagcacacccaaatcccttgctcgaaaatctgtaaggaacacccaattgcccaagactatggtgtctcaagacttggcctatcttctctttcaaatcactacaggagaaaacattaatttggcttcactaatcatggaacaaattatttctttccgtagaggtaaaaaatgtagccacaagcttatttttcctatcttaatctataaagttctttcttctcaaaagaatgtggcctattcaaatgagactcttgagcctcccctcactggaaccatttttcaaccttcagattactttgatggagcttttcctaagcgtctaagatttctattagtgcacttccaaccgttgctgctgtaagttctagttttgcatcgacagatgtgcaggaagtcatcttgataaataatcgcttggctaccatggaggaggttcagcaagaaatgtccaaataattgtccacattgatcaagctttatggggcataagatttgtattctctttcctttcctttaacctatctagtgtttgttgtt

SEQ ID NO: 224372 - DNA, 3297 bp, Cannabis indica
ggaaataagaagtttgaatgaacagaagaatgtgaggaagcttttaaagggacaaagaagcatctatcaacacctccagttttggccaaacaaataactgtagaaactttataccttcatttagctgtcttggaacatgcaattagtgtagccttggtgcgagaatagggaaagcaccaacaacctgtttactatgttattacaaggttactggggaaagaatcaagatatccacctcttaaaaaacatgcattatgcctaattcatgcatctcgcaagttacgaccatatttctaggcgcatccaatcaaagttttgacggatcaaccactaagacaaggattatcaaaacatgatgcttcaagaagattgataaaatggtcaatcgagctgggacaattcgatgtaacctaccacccgagaacatcaatcaaaagccaatctttggctgactttttaattgaatgaataatctcaaaagaagacccattcattgagcgtgatggagaaacttggaaattatatgtagatgggccttcgaacgagaatggcttgggggcaggagtcataatgatgtcgcctgacaacttcaaattctactacgcattgagatttcaattcgatacctcgaacaatgaggcagagtatgaggcattattggttggattgagaatagctgaaacattgaaggttgaaaatctcatatttttttgcgactcccaactaattataaatctagtcatgggagaatactaggaaaaaggcttaaaaatttcaaaatatttagaaaaggttcggaagaacgtggaaaagtttaattattttaagattgaacaaattccaagggaacaaaactctaacgttgatgcactagcaaagttggcatcataatcagaactcaaaaagttgaatgtggtagcagttaaattcttaaacgacccaagtatatgtgaaaaggaagaagttgagataataaatgcttctccaacatggatgatacccatagtcaagtacctactcaatgaggaacttcctacagattaaatcgaggcatgctaactcttatattcaatacctcgctacacaatagtcgaaggaaaattgtacagaagaggttattctatgcctttcttatgatgtgtgttaccaacataagccaatgaaataatcaaagaaattcacgaaggctttcgtagagatcatgcgagttggcaaagtttgtccaagaaaatcatctgtcaaggatattattggccaacaataaacaaagacacaaatgaaattgttaaaagatgtgacaaatgccaaaggctttcacatatatttggcgtaccaccaacaaagttgagattgatgactacaccatacgcgttcgcaatatgggagattgacctgattggggcattacccatagggtgagcaaaatacgcggtagtagcagttgacttctttacaatatggatagaggttttgattcgctactttaagctcttcttgaagttttttacggccctcgcgttgatccttggcttccttttgagcactctcgagcttagcttgtggttcctctttagttcccttgcatcgttagtcaggtgagtattcttcttctgggcatttgtccactgcttcgcaagaccctcttgttgttcaatggattttcgaatataagattccaattgtttggattttttttaaggctctggtattgtgccatgtgagatagaaaagatgcctggaaaaagaatatataagtttagaagaagaataagggagaacatataataaaataaagaatgaagaaaggaactaactgagagactaaagtttagggtcctctcaaacaactccttgaagttgccattgttgaccaaatcctaatcgccagattgaaaggatttgaaatggtgccaacttgaggtggcatactgcaagcagaactgcaagccaataattccttcttcatgaggaaaggggcagaaaggttccaacaaaaccatttcaggttcttttcccaaagatttaacctggtgagttgaaccattggcttgctcgccagtatccacaataactggagtttgagagtgaaccttatcatgaactggctcgatgattatttgctgcgaggcacgtgttttctattagcagtggtcttccttgacctcttcatgggctctggattcgctcccaatgaagtttccgaggcaacaatcctcttctttccatttttgctagaggtattgagaaggttttccaaatccatatctacgaggcaaggaaatacatcaacactcattaaaaaataaataataaaaaggtaggtaataaactcccacgaaaagaaagttaccataattatcagatgatgaagaggaagaactatggtaatcactaaactccctagacccggtgatcatgtatatatcataagggtttattggagataaatccaaatttgaatccagatgactcaccctatccaagttagtaccatactgctcaggaatatcaaagtaggaactagtgcaaccaagttggacatgaaattcagggtaccaactattaaacctatgtgttatgcaagctatacaaaaatttccttaagtataaaagttgtattggctatagttagtgaccatccacattgattacctcgagatgcttcttctttagcttcccgagggactactttgttgagataatgggtacgagccacataacctttatcttcctcgtcggttggaactgggaccctttgccacttagaatattttggaaccttacagtcgcaggtaaattggtcatcaccaagaagattgacggtcctcagattggtctcgttcaaaagaaaatctacttaccgcagtccaaaaagaaggcctaacaagattttatgctgctcggccatctcgggggatggaattggccttcgagtgatcgctgtcaacacaataagtgaaataagtaaacgacttcaatttaataaatccaataagtcaaaaccaagcttttgagaaagaaatgacacttacgtataatatgaaatgtcattgtgttgatgggcgagagaccaatagtctagaagaaatcatccttgaactcggccttgttttgtaatgtcacagtgatcctttaatcacttgtgtgagtaatgaggtaataaaaacctcctaaacaccatttatttgcatgaatagcttttacagagtaaaagtacacaattttgaggggagtaggacactcgcaacctaaaattttatataggacctttaagcaggccaggattctgtaagaact

SEQ ID NO: 224373 - DNA, 1679 bp, Cannabis indica
caaagaacatgtgtgataacacaagagcccctctagcgactttgcaaccccgaatcttccccaaccattcatagtctcttatcaatatgctgagaatttgcagaatattgtgttgcattcccaaatggtggaagctttgggtgttaaggaggcgctaagttggattaagaaaaaggattggaaggagattgtcattgaaactgatagtcttacagtgcgttacgtagttctcttcctatggtttcatactttggaagtataatttctgattgtaagatgatgcgttaagtgacttgagagatgtttaagtcaatttcattagacattctacaaatagtgttgctcacttcttagctcgagcatcttatttaattgttgatcttgttattaggagtagtgatattactccggattttaatcatgtaatcaatatgaattgcaaataataaatatgataattttattcaaaaaaaaaaataaaggtggattatattattattattatattggttcaataaaaaaaaatggtcaaatataaggatgttcaaaatttaatcgagctaatttaattaatattctcatccaaaagaagaaggttcattatggcatattggatattcttgtgaggcattcttggaagatctatctaagagatatccaaaaacgaaaacttatgtagaattacctctaatatcggatcctactaaattagggatttaccttgcaacatattatgcaatatttattttatgaattttgacagcaaattaaaaggatccttatggatgatagtgatcttgtaaattacgttattcttaatttatccaaagtcaatattaaatgtatttactccactagtgaatttaacttcatataaatcctttaacagtctaaaccctagcttaaagatatgagactatatctttaggtaaagggtttgaaaatcattattcaaacactaatctgaaattagggttcttaagctcgagcaagaacataatcattgtgtaatgcatcaaagcttttcagctaataatattagctcgcgaacttaatgccctaaccatgtaaaatttttggtcttcttctttatattattgatttttgaaattttttataatcaatttatgaaaatctcagtaaacatatatataatattcaaataaaaacctaaaaactacaaactatgcaaataatttgatcttaccttcaaaaatatcaaaaaatccccaaatgtaggaattctccatcaaaatctaacttcaaatcgtaaagaataatatcacttataatgtttctaccaaaattcagcctatatatcaaaataaaatacaatataagttatactcatagctctaaacaaaatctcataaaaaattaagataacttacctcttacgtgctcaaatcagactactgcagctcgttgttcaaaattgaaaaggagctaagaagaataagggctcatgcttagtattgattttagtataggcccacgtaaagctttgttggacactttaagagatttctttgtagtagtgaacccttctcggacctggacggtctgaccttataataatgaatttaatatattactgaacatagagtcgcggatcaactccctttgtatggattttctagtcgtaagtataggtattcgaatcaagtaatagactcaca

SEQ ID NO: 224374 - DNA, 1916 bp, Cannabis indica
aaataaattccaacacatatttctaggagatacaaaataggaaatacatgacctataccgtaggtatcttaggagttaggtggatataatcttttatcccctcttgattgatgcgactcctcataaagtagtcgtcactagactcatcgattgttgtgtaatcgccgtaaggagggcatacaccatctgtcacgtcttttatggaggttctaatacgtcttcccccatgcggcattaaatgcgaagcgattgctcaagtaatctctctacctcctggacatgccttatcatggctctagcctcctggagagtaaggatgtgtcctatgctcttttccggaaggcaccttccttgtagtgttcctcttttgtccaagacttaattgattttcgtgagtgatggtgctttcagatccacataacacctttatctgcgtccacgtattttgggaaaaatcagaggcgacaattattatttttatattttttaaaaaaaccaaaaacgttaggtatataatgttgattgatattttatgtatataaataaaatttgcgattaattatatttgatgttttgatattttttttaaaatttgttttttattttctaattttttaaaatatttttgtatttttatagaaaaatatttaaaataaatagtaaaaatcaatttgtagatttatactttttttatagaaaaattattaaaataatagtaaaatatctatttatagatttatgttttaataaaatattaaaattgagaaaattaagaagataagggaaaaataatttagagtgattttagaatatattgattataatagatatttataatactaaaaaaatcataattgcacgtgtgtagtttttttttcaatttaaatttttattttttaattaataacataatattataaacttaataatatatataatttttttaaaaaagaaataatagtgtagttattttttttcaatttaaatttttatttttttaattaattaataacatattattataaacttaataatatatattgatttttttttaaaaaaaatatcatttttaaatttagaattaaatttagagttacgatatatataaaaatatattttagattaattgatatttttaaattaataaaaaaattaaaaaaatgagagaattaaggagagaagagatagtgctatttgaagtgattttgaacaatcacgtcatcggctcatacttctcctttatatatacagggaaattttcatggggcacctaaatttaaaaattatttaaaaaatgacaatgtttttgttgtgttaattttgtttatatgtagttgccgtttttattggtagtttcctctttttaacgttttttagattggactttttattccctactttttcgttcccattttttttaaaatcccttctttgtttgcgtgcgcgcgtgacgtgaggctgagcagctacagcctacagcacgtcaatcacgtaggggggactgatggttttgttagtttccctctttttttcttttttctgttcagtttttcatttcatttcaaaagttttcaaacctgttgagcgaatataagggttaaggtttcgtcttcaataatattattttcttttagctgtaatggcgatccttcgatcatctagttctccttctctgttgcctttatctgattgtggtgcaactgaaaaagatttgtcaatgtgtgtccccggtggttcgaagccctcgagttcaggaaagagtgaaggttttgctgcaaagaaaaacgaaataaggagaagatagtcgagaaaggaaaggcatctgaagatgaccgtgttgtgaaaagagttaggaaatgtgttgctctggattctgattctgaagatgagttaggcatggatatcttcaatggagc

SEQ ID NO: 224375 - DNA, 2969 bp, Cannabis indica
tccatgaatctaacaacctcaatagttcgaagggaatttttaacagtgtaaaaaatttagggatatgatttgatacatgttaaagttcataaggtaaaaatcctaactggccaaaagataatttctgttgttagtgtaattgtaatggaatgaatgttactattctatggcttggttattgtttagtgtgattttaaaaatattgtattatctttaataaaaaatttgttagaatacttaatagggttatttacaaaagtatgaaaaaatattagtttacatatttatggggataaaatttatgttacaaaatatggtaatattagacagaaaatgactagaaaaatgagaatcccaacataataccataaaaaaacttaaaaagatttacaagagcaattatccctgaaaaaattcactggagttgacatcgtagtcggaaaaagttactgaaaaattactggaaaagtcatcatatttgtcatcgtagttggaaatgtgacaagtgttttcatcgttactgaaaaagtgatcatagttgttatcgtcagcgtaaaagttttcaaacaggtcattggagtggttgtcatcaccagagttagacattgaagtcgtcagcagtgttggacattataatctgacactgagaaactaactatgtgtattagctagctaagaaaatgtgacatagagaagccagttatgtaaatcaatcaaattaaaattaaatcataaaagctaattatgcttgttagctaattaaaaatctaacacattatgtaaaataatcaattaaaaactaagaaaaaaaaaacaagttaaataaaataacttaatcaaaactaattacttgaaataactaaataaaaaatcagttgataaacaacacaaataaaatatacttgtattaaaaaaaaatggtaactatcatgcacttatgaatattgagaaattgattgctagaagaataaaaatattacatatgctataaaaactaaatatattgggaaaaaatctcataaaaatgtaaaattaaaaaaaataatatacaaaattttgttattttgtaagccacaaaaaaaaaaatcatattttgtgcaattttgtctatttgatattgactaaaataattaaatgttgctcatgcagtgtcattattaacatataaagataatggtatatataattggtattgcctgtattactattaggtcatataagatggacataacgtactaaaataattggggtctatggactcactctaaaatgtctttgaatagcccattgactcaagacaactaattatctcttattggacatgtaggtccattatgctccgccttgtggactaaaactctttaacacctaaatcacgtaaagatcgtgtattattttattttctaatctattttgttcagctcaatctcttaaaatatttagttccaaaaatctcagtaaatattttggttctttgattaagaactaaaggaattttctaccatttttgtcatctacaacaatggtagctacgaggcatacaactacacaatcacctagctaaggagttcgtaataccactaaagaccctattgacgacaccttgaattctctccctccgatcaatgttgaggcaacagttggtgggagataggaggcatccgtcgtaggtggcggacactacgaaaatttctaccaacaacaaaaaaaaaaatccatgaaggagatgctaatgaataagatgatccaaacagatactatgaaaatgaagaacaaggtgactacaacaaagaagaagaagaaaacatggaggaggacccctggaagatctagaagcggtgcgaataagacaattgatcctagaccaagaagtaaaaatggagaagcaagaagaagctacccgaaaagtataagaaacattgttccagttgcaaatactaactgcaataaggggtattaatctgtaagttcctcctacaaatcatacccaagctgttggagttcaaatcaataccaatctgaaaccggctatgggaaagttcggccaccctagagccgaaccatcacgaccaccaaatgacaaagggaaagtcatgaccaatgatccccataagaagatcaatttgttgaggcccacacgtgcagcatcacgagcatccagaaccggggtgaatcttgacctccgaagagaaagggttgaccgatgctactttcttaaaaaagactatattcttgaccatagaccatgaagcaaagtgatattagaagaattagagcatagtttgatttccaatattccatcgtcatcaactcaggttgaaacgatattctcactttttcttgtgaacctactcatgtcgataatgaagaagaacttatcattgattttccaagtcagtcacttaaacaaccttattgtaatgggagggtttctaggaatccatctcattacggacttgatagtgaatccaacttggtggttgtaaatgaaagtgatgacggtccattgacttataagtaagcaatggctagttttgacaaacgtttgtggaacattgccatggattaagaaatggtttccatgcacactaattctgtctgggatcttgtacttgcacctgaagactttagggtcatcgaatgcaagtggatatacaagatgaaacgaggagctgatggaaaggttgagacttataaagctcgagtagttgctaagggttacacccaaagagaaagtgtggattacgaggatacctttagtctaattgacatgcttaaatccattcacatactcctctccataggagcttctctcaattatgagatatggcaaatggatgtcaagattgatttccttaatggggaacttgacgaggtcatttatatggagaaaccataaggatatattgtttagggacaagaaaagaaagtttgaaaacgaagtgcatgttcggcatcataactaaaaa

SEQ ID NO: 224376 - DNA, 1481 bp, Cannabis indica
catgcatctaactttgttcattatagttttcaactaggtcctttcttttgaggttgttttttctaactagttttgtgcctaactattccaagtttgatggataaatcatcaaattaaaagttgcaaaactcaaggccattatttgtcctaatcttttaaccttcctagaagtttcttctcaaccattatcaaccattttttgaatttaccaaaatcctctttctaagtttccagaaaataaatctagactttcctagagaagtcatcaactattgagagaaaatattgagcattacaaagagataaaggtacatgtggacatccacatagatcaagtgtgtacataatctaaagtcccttttgatgtatgcaatgcatttgtgaacttcagtcctgtgtgccttaccaatcacacaattttaacagaattgaagatttgtgactttttggatttcagaaaaccttgcttgcaattgctaagttcaacgagtcccttgtgactcatgtgtcttagccttctatgccatacctcagttacatattgtaatctatagttgacactctagctagatcagttacagtatctacttgtaaaataatatagagcccttactcaggaacaccatggaactttttttcacctacaagactatacattttttcttttagttgtagccttttgaatctagcacgtcaagagacaaaaaatttcttttagtttaggaataaatctcacattagtaaatacctcaaaagtgccatctctcattctaatcttgattgagccaatcccttgaattccacatggactgttgttccccatcatgacttgccttgatctctcttctttgagatcaaagaaccactcttatcttagtcacatgtgaaatgtgcaccctgaatctataactcattcattttgaaaatatgtcatagaaacattaagagcatcatcataattatatgaaatattaaagacatcaacattatcaaaataatcaaaaacatttgcagaatcattattggaatttgcatttcattttgtaaattatttttcctttgaggacaatcctttctaaaatatccttcttagttgtagatccaacatgttctccttcctcaagatttagatctagaatttcctcttcccttgccaacttttttgttagtttccccctttgctaatcttcctctgacattgagtctttaacatgattctttccaattttttggttttctttcaggtttaattccttggcgtatgcaactccaatcacctcttccagagtcaatgtctctctcccatacttgagtgtatctctcatgttctcataggctataggtagagaattcatttaagaaaaattgtttgtaatcctcctccctttaatcttttttttttgatgaatcaggaatttcattgcacaagaaccttttatattacaagctatagctcacagaagagcaaccatctatacatt

SEQ ID NO: 224377 - DNA, 2081 bp, Cannabis indica
agtacctcttcaagaggaacagaagctagcttatagttaacggcccaggcgaccgccgggaagggcccttcgtattggggctccgctggagcgaaggactcccagaccaaagcctgtggtcccagtgccgaatgcaggggcttctgatgcaagcacttcgggttccggtaagtcccctttaacgatacattatgttccttccgtccgtgagtatactagccttaggcctgtagggttcgatgaacgtctccgtaggtttagcatgccttccacccggtgggggaatcatgccaaggagtactatttttcccacttaggcaattatttaggtcggtcccggatgggttctggacctccggcgcccattctgttggaccattctgccatttatcttctagttaatttcgtccctcagacaactatctcgggaatgatgcagccagtgctatgatttaggactttactagggccgaattagagagtcagggtaggaatagctttattgtcttttgctaagtgtatgctgccttcatggacgttctaacacttgacctattttcttgttgcagcagccggacccatggacgaaatcttggccactcttgctggagcccatagtcctgatgttttcccacctcctacttcttctcagttggtcactcccgagaggtcttcctccagtgccccttcgggcactattgtcttggtggacgaggaggaggttcttgaggaagttgaagaaggtaaagaagagcaagaggtcgccctcgtgcgcaagcgcaagggcaaaatggtggaggaggagccttctaagcgcccctggagcgtggacactccggccccgagccatgactctgagattcccttcgaggcggaggaatacacagtgcctcacggaatagtgttgacctcgattcctggagacgaggagaggcagaaccttcaggtagccaaataaaactacgccctcgacgagtacactcgaggacatgctgaggtggaggccctgaagagggttttacgagaggagcagcaaaaaaactctcaacgaggaggcctttcggaatccgtgggacctgaacatggacccactgacggactggttcaaccgtttccttgtgccctctctggctccttttgcctcggaaatgaccagcgagtatgtctcccatcttactcaattcccgcccaaacggtacgctgcttgtgcctccttgaactccgtctaccaggttcaagacatcagcaacgccatggctgcggtaagtacttgtggtttattcttttctctatatttcctctaaggcatttgatctcactcttatctccttttttaggttactgcggagaccagccgccttcccaagaccatcgtcaatcatggcttcgtcatgttcgaattcgggggcatagacgaggccgtgaggatcctgctggacctgtctgctgaaaggtgggcgattcaggaggaggctgagcgaagggaggcccttgctaaggcgaagctcgaggaggaggccaaacagagggaagcccaggcggaggcgaggctctgagaggaggtccaacggagggaggctgagctggaggcgaggcatcgggaggcactgaaggcggagggtgaggccatcgccagggccaggcgtgagcttcgggaggctaaggaggccatggaaaaaatggctgccaaggtgaagtgcctagaggagttgcaccaggcggacttgcagtccaaggccaacttggccgtggagttgaaggagctgaaggacttctgagaccaggccttgaagaagactaaaaaagatgagctcctatccccgtctcctgcaagcgctgcgtcaagcgcttcgacgacggcgtctacatggcctagcagacaaatggacaaagcatcaatctcgacttctatcctaagcctgaggaggctattgccaaattttgggagaagaagaagaagcttgatgccatgcttgaggcgcgtctcggtcctcgccttcctcctcgtattgactaggcttcggagtccagcccatttcaccaagattatctctttttctcttcttttttttttatttaca

SEQ ID NO: 224378 - DNA, 3802 bp, Cannabis indica
ccctgaaaaaaaaatcgggaaaaaaatatatatgcattttagttagttacaacatatatttataaataaaaatgatatttacacacataaaataagctttggtataatgataaagtcatttcatacatctaaaggaggtcatgagttctaattctaataaaaacattgtttactttaatatttttattttactttttgaatctctaccaataatacttatatttaatgtcttaattattgaaacaaatatattttattgttattttctttactttatactatatttaatactaaaatataaatttacattaatttttaacatgttatgctatgtaaaaaaaaaaaaaaaaaagaatgcacctctcacttataaaaaaaagtgtcgccccacctcaacttaaatcctaggtgcgccactgcatatggttcaagtgggtgtagaaggttttggatggtgtgtggggttatgggatctaatctcatagtaactaaaaaaaatgtaatatataaagacacttttataatgtgtacgattttgtctcgtgatgtactttcacgaaatgtatttcgtggtacattagatgggtctcagggtacgttaccattttttttaactctaattatccctagatcaacccagccctcagatcaaataattcccccatctaacggttgtacatcacggaatacattccgtgaaagtacatcacaagacaaaatcgtgtccctatatatatacaggatttgcaatcaatcttgaggtaaggcgaatatcatgagtgcacctcagtcctctttagggccttgaaattgcaaaaaaaaaaatagtatatagattaatattaaataataacaaaatacagtgtttagagtaataatagaaagtatgattttaaggaaagaggtcaaggaatttgtggtatagtttctctaaatgaaaaagtctccataagtttttttgtcttcctggaaagttagttttctcttgaaagagctttcctgaaaggcctttgtgaccatccaaaagaggtctttaggaaagctagtcttcctctataaaggagttttgaattgctagtcgttctctcctgaaagggagtcctggatagtcaggtgtcacttttcctattcgggaacacccttcaccgtgtacttcaattcttagtcctggaaagtgttcgcttcatccaggagcactatgacttaagctgatgaggatattctaaagagtttgttaattatgtcgtaacaacttagcgttttcatccaccgactttgggatccatatcccaaatttataaatactgtcgacacttatcattttagaagagaataacagcaaggatggttatgctgacttctcagcatatgcactgtctgttgctgatgaagtggatagcacaattccctaatcttaccaggaagctatcaacaacaaggatgaacaacaaggatgatgccaaatggttgcacgccattgaagaagaaaaaagtcacttattaagaacaagacctagaaggtagtcaagagaccctttaggcaaaggttggtcagatgcaagtggatatttagggtcaaggaaggcattccaggactagaacaagttaggttcaaagcaagattagttgtaaagggcttcactcaaaaagaagggattgattacactaacatattctctccagtggtgaagcaagcatccatcagaatcatcatggccaaagctgccaaaattgatcttgaggtggatcaaatggatataaaaatagcattccttcatggaagcttagaagaagacatctatacgaccattcttgaaagctttgaaagcaatgatccataagaagtgtgcctgttccaaaaatccttgtatgatttgaaacaagcaccaaggcaatagaacttgagattcaatgaaaccatggagaagctgttatatgccaagagcaactatgatccctgtgtctacacaaatgatcatctgtatttactgttgtatgtagatgacatactgattgttggtcaaaatagagcaaaaattgacaagttaaaggtgaaactcaatgttgaatttgacatgaaggatattcggtaacccaagaagatccttggcattgacatacaaaggcaaaggcctaacaccatcaccttatctcacaaagaataccttgaaaaggtaattgaaaaatatggaatgagtgactccaaaccagtgcaaactccactggctcctcacttcaaactaacgaaagaccagtcacctacaactgatgaagaaagggcattcatggatacaataccatatgctaatggggtttaagtctaatgtatgtaatagtttgcacaaggtctgacttggcctattccttaagtgttgtaagcagatttattgttgatcctggagaagagcattggtcagctttgcagtagattatgaggtatgtcaaaggttcccttgacataggacccacctttggaaatgagtcacatacacaagaggaagtatatgagtttgtagactcggattatgctggcagcattaacaccataaaatctctcacatggtatgcattcactgtggtgggaggttgtgttagctagaaatccagtctcaaaaaggttgtggctctctccttcacaaaagttgaatacatgtcagccactgaggctgtcaaagaagttatttggcttaagggactcacaaaagaactggaatttaattcagatgatgtcacagtatattatgacaaccagagtgcgctacatcttatgagaaatctcatgttccatgagaggtccaagcacatagatagtagacttcatttcattagagaggttgtggcaagcaaagaagtcatcatgaagaagatcaatactgctcactaccctgcaaacatgctaaccaaatgtgtcactcaagttaagtttagacactgtctaaacctgttgaatgtcaatagccgctgaaatcgatcaaatctagctatcaccattgatgtgattctctttgtcttcttcaagtgatgaaagcaaggtggaattgttggtgcttccagctttgagcactttaaagaagtcaactaactgtttttcttaaaaacagtgcagcaagggtggttatgagtgtctcttaactgtcataacagtataaatacctacaccactagctcaatcaacacaatttttggaggataactactacaactgaattaagttagttttgtcctagttgagagagagctttacaagggagaaagcgttagagataaatcgagagatcactagtgtatagtttcagcttgtgttttgtgtgagtggagggttgtaagtagagattgttcactttcgaagtgacttctctcatagtgagttgaaattgtattctgtatcttgtatattagtgatctctcttgtactattcttctcctcaaattcttatcacattgttatgaaaataaagattcattcattcattatgttctatttttgattattgagttatagtcactatgctattgatttcttgagttctttattatgacattcttgatgagatttgattagtctttccctcctctctttcccatcttcatagcaaaaaaagaaaggtatatatatgaaggaagaggtttcaatggttacatttttattgtaaccattatagttacatattttttaaaccattggattactattaaatggttgtgattaatttggaaattaaataaaaataaataataaataacttgtaacctaaaagtgacctactcatttatttccttataaaactttaattaagattaa

SEQ ID NO: 224379 - DNA, 1923 bp, Cannabis indica
aaaaaaaaaaaaataactctatatgaagtcattttcaatacctcaattaaagcattatcctataaagttatatatgtgtgtttgttttgtgttgcttacaaattttttaagaaattatgattgaactgaatatataggattaaactaatatatgagtttagaattttatatatagatagtatgttttcttttttgacatttaaataacacagtactggtctgatgttgtaatttgtttctttttagaagtttttaacttttttggaacttaatttttgttcctctgttacaatatcaatcttgttcatattgttaaataatttggataacattttagaaactgcaacataatttatttttataatatatatataatttaattcacttgaacttagactagacatgcttgatgtatgttacgttatgttctactctgctcagtcttttttcagtttattcctttttcttgggagagtttcttatggaccaaacaagattgagtgaatgaaatggaaaaggcacataccttagctgattttttttgatgaaaaggcacataccttactgtttagaccaaccctttcggtttgaggaaacaaagaatgtttggaagtggatttggagtaaagatatctatccgagaatctcagtcaatctttggaggttcttacaagaggctatccctatccgtaacaaactgcctttcatcctcgaaaaagactgtctattttgtggaaaagatgtggatgcaggccttcacttatttaaagattgtagtcttgcaaaagccttgtggttttctggtgttatccctatttgggttgatcagattacttcaaattccattgtggagttcgtggaggtaatcctgtctaatgtccagggtgaggataggttgaagattctaaacttcatgggcatttgatttgctgaaatttggtccctgaggaacaaagtattgatttttggagacaaagttgagatatcaagtgtaagggagagaattgcagtaaagtttgatgagatggttgatgtccaccaaaaacctgaacattccccttctgatgtggatgccctaaacctgggacgtctgagactctcaaaggctgtgtttgtggatgcttcatggaaggatggtctcatgggaacggctgcagtgttggttaacttggaacaaggatcgtggtttttcaagtttttgcgagaaccttgctcctctgctttggaagctgagtcgagagtagttctagaagctttgaagtgggcagtgcaaaaggagtggctagatgtaactatgatttctgactcgcagattatagtgcaggctctggtgaggaggaaatgcattcatgattggtctttaatgtgtatttctttagccatcttagattgtcttaatatgtttagtagttgtgacttttgtatgttaaccggaagtttaattccttagctgatgggttagctaaaagggttcggttgtctaaccaccctgctggtgtttttgttggggagggattaccccctgtttttcccatctctctttcggtttaatgaacttttgttcttttaaaaaaaaaaaactgtgagtttttttcttctccaacaaaataatttttaagttcttgtattctttctctctctttcttttctgagtttggtgagagagtgaagtgatgactgtagcacaaattgtgcaatgagagaaagtttgaggctttatatatgagtgagagaggaatataaattttgggaagaagtttcatgcaaggaataaaaaagaaatatgtgagtaaggtggtcataattacttgagctttcaaatatgactccttcttcacccttttcaaattgaatttttataattgtttagtcattagtcgccatgggtatgagtaatatattttagggaaatttgattttcta

SEQ ID NO: 224380 - DNA, 2190 bp, Cannabis indica
acccttgtaccgcttaaaaaagtttagcaaaagtaatattaaagtaaaaaagctaagcattgggagcagtaggggcagtaggagtagtggattcatctgcgactttactagcagccttgtccacgacttctttagtatccgcagcattagcgtcctcaggaaacagatttcccccacctccttgggtctgcgtgggtgacatggctcgaaaagcctcggccatctcagccgcctccgccccaaggattgagaagtcgaagtctggaatcttggaaagagttgtgtagatgtagtcagagactgcctggtcgtattgcttcattccattctccttctcgacctccaggttgcgagacatctcctcgatcttcgtcttcgaattcttggcttcgagttcgacttgcttacgcaattcctcatgctctttgtccttgttagccgcttcctgtttcagcttcttgacactctcctgaagctgggcattctgcttctttgacagttcgacttccttggagctagcaacaaaggccttccagaacatggtcatgaactgcgaagccaactccgcagaacgaggcatgagttccttagagggagtcctctcaaccttggatatgaactcctcgcccatgaacttttcctgaagaactaggaaatcgcgagctcgaacagctggatcgatcacgactttcttctccttgtcctgcgtaggcttagctagcttcttggaagaatccgcggcagggataaccaagacattgccttttctcttctagggaacgataggagacgtcgtcgctgttctagtctttggcttgcggttgagaaccggtgcggacttcaggaatgtcatctctgcaaggacaagaaaagataagttaaaataacaataaatttaaatgcattagtctatatatgcgatatattacttgatgtcggccgagaagtctgcttagaaaggcatttttctatctgctccttttgcttttcagacggctccttgtacactggctccctttgaaggctcgcgttctctggaattagcttatgttctcgtagcttcaaggtcgtgcacagtaatcactagtcacgatcttgaacagggaggcttctgagaatttcagcggtttctctgcgagttgcgtctagcacaggtcgagccggtcgatctgcgaaactaaggaaaagcgggttagctcaaaatcacaaggtaacatgaaaattaactaaggaaatgtgcgacgtactaggtcgacgattaaagtcagtactaattcctgggactttaaacacgtaaaaccacttaaattttaaatcccccatattggaaaccatgccttccaccccgttgatttcagaagtggcccacttgctaaaacaatagaagccgttgtggagacccacattctttatgtcataaaagtaactaaactcctccatcgaaggctccctatgcgcgtactccatatacatcgcataaaaacctaaagctatgcggtagctatttggggtcagttgaaaaggggacacatcataccgcttgaggatagcggaaatgaatggatgaaaagggattgatactccacatcgaagaatgggaatggaaactacgacgtcctctgagggtatgatcgcggggtttatgaagggaaggtgcggtctttgagtggggcgaggacgcatggtgccgagtcgcaataagtttaacctcgaaaaggtggacaagtcggatttagtgactcgtgagaccaattcctcgcatgagaaaggctcattcagttgggtgttgtccactgaatcagtcccactcccttcggcatctccctcctcatctgactcgcgatctggagcctcccagtcctcgtccatctcctcgacttcagtgtcaggagcatgcctagaatgaacaagatgttcacgagttgataccgtagactcgctatcacgaatctcgatggttcctggtttagcgagctcctgaaccatcctccccatatctacagaggatagcgggcccaactccgtgtctccggcagtggtgatctcttcttctgagatcgaggttgggatgaagctatcttcctggtggtcctggtcgccatcgaaagcgttgcctccagagccaagcatttggctatccgacagatcgcccatctaaaagatagaagatcttttcagtgtggtgaatgt

SEQ ID NO: 224381 - DNA, 2106 bp, Cannabis indica
agagacattaacatcatgaagaaagaccttaatggctctatggtccgagccataaaaaggaaaatgatgaattagcagtactaggaaagagagtcctccaagacttagacccaagggcccaatcaagacgctcacaaacagagtgattatgccaagtgaacttatcaccctcaaaagagaggggagaaaggcaaaatgtgtctagaaattgggcaaattgatccatgtctttatgattatagtatatgctacctattttatcattaaaaaacaaaaaactattgaaatctcccataataaaccaagggaggttgggagcattggagaaagttttttcaagcaaattccaagtaaaagaacgatgagaagtgagaggagaaccatcatagccagtaaagtgaaacatttcattatctttaaagttaatattacaatctatatgattactagaaaaagataaaatatttacataaacagtcgctctccacaaaagaagaattccacctccaacatacttcctagggacttcaaaaccattatcaaaatccaaagctactataattctatctacaaccttcataggcaaacgagtttccatcaaaaaaaccacatctggtaatgatctttaaccaaaagggagagcctcctgaatgcacgtgtactccccaatccacgtgcattccaactcaacacacaacagcaagagaagaagatttctcctccctatcacttgaacgagcacgtttgagttgggaccttacagagtttccaaccacaacatgttgaggttgaaaaagaaggtctcttgataccagaggttggagccaggcccttcccacgaacagtagagtcaggttggccatggggagagttagctcccatagcagaatcaccaatacaggcagaacttccagaaatagccacaggaaaagtagggccagaggacaaagtgtccatttggctaacagggctatcaaccacaataagagagtcaatagagtacgaggtaaaagtagaaggcctaaggaaatttcaaaggtaggcctagcagattgtgaagtaatacttgaaatattgggattcaaaggtgtaggcatcatgagaacagtagtggatggaggaggagcaaaatgaccagtgaagtgagcattgaggttgaggaaagaagggaaagtgatggaatgaccagagaattgttgaggtggcaggttgagattcacaggttgttaattaaccatagtaatagttggaggatggggatattgaaagggctggggtttgtcagaaatcttttctttgcctctaagaaggatgttgtaagggcatagaggttcattcaaaagctcatcacatttctgcaagaaggctacacaatattttttggtatgatctaactttccacagaaaaaacagaaatctaggagcctctcatacttaaagtcaagccatttaatgaaactcacaccccactcctaatgaacttgatgttcataccctcctaatagccaagttaacatccagaaggactctaagacgcaaatagggaccagtaccctccttaatggtgtccttatccacctcaatagatcaccaattttcattgctatgaaacctgcaagatcataggatttacacataaaaagggtgcagattttcaagagtaagggggaaagaactatctggagcagcaaagatagtgatacactgggcaaaataccaaggttaaccctctaaaactctacccttgtccccttcacagatagtaataacccctagagcatttaatgcactgagaggaaggaggattaagcaaatatggatatctgtaatgtaacaagtaagacaaaccaccactgaacagtgaagggtggacgaaatcctccattagagggaccaaactcagtgaaagagaagagatgcacctcatacctgctagaaggctccaaagagaaaagtttggcgatattcactttgtatttctaattaattaaattttttacaaaaaaaaaaatactcattctttgtttaagaaatagttaacttatttctttaaaacgtttttttttttagttataacattgacttttagtaaagaataattagcaa

SEQ ID NO: 224382 - DNA, 2926 bp, Cannabis indica
tatgaacttgtatctgtcccgaaaaaggggacgagtttaaagacggttttttctttcttcgagcccatccttctaatgagggcctggtccctttttaattttcaaaagaatgtaaaggaataccgccatcgctttttcttctctttcggcttccaagtcgtggaccgcctggagcttctcacgcagtgggttaggattcctcctcttctccacactgctcctacccagttgttcctccagcatgccaagactttctccacttatgacaagaaaggtcttaacgtgggagacttggtcacaacggagaactgccggatggccaagctcatctccgggagtcagtcagtggatgacttcaacctctcaaaggttctctgcccaaacattcgtactccgtccgctgagaagacgctctgggtggacatcatagcctcggcagaggaccggcactagaagtacctcttcaggagggaataggaataggcctatatcaaggctcaggccgtcgccgggaggaccctgcgtcttgagacgggcaaagatcggatgccttctaggcctaaatcgctggtcctggttcccaatactggggctcccgacgccagaacatccggctccggtaagtctcctttaacggttcatcatgttccttctatccaagaatattcccggtgtaggcctatagaattcgacgagcgtcttcttaaatttaggatgccccccactcggtggggggatcatgccaaggccttttatttttcccacttaagtcattttttaggacggtcccggatgggtttcggacctcctgcacccatccctctggatcactcagcttatctgtcttccagctggttcctcccctcggacagctttcttggggatggtgaagccaatattgtagttcaagactttgctagggctgagttagatagtcagggtaggactagctttaccgttttgttttcatgcgcatactttcttatggccattatgacactttgtttatttttttttgaagcagccaggccaatgggagacctcttggcaactcttgccgaaacctacagcccggacccttcccttcctccggcgcccgcccacgacggtgccccggggaggtcatcttctagtgcccccttaggcacaatcatcttgatcgacgaggacggggaggccaaggaggaggaggaaggcgagattatagcccgctggaacggaagcgcaagagaaaaatggtggaggctgagtcttctaagaagcctaggagaaaggacactccggccggcagctgggactcaaggattccgcctgagacagaggaatacgttgtacttcccggcatcatcctcactccggtccccgccgatgaggagaggcagcagcttcgagttgccaaacacaactacgccatggatgagtacagcagggggaatgcccaggtggaaaacccaaaaaaaaggtcttacaggaggctcaaaaaaattccttgcgcgaggaggccttcaagaacgcatgggacttgaacgtggacctactgacagactggttcaaccgcttcgtcggccctgcccttgctcccttcgcctccgaactgactagccaatttatttcccatctgacccaactcccggccaaaagatacgcaacctgcgcttccacaaattccatttatcaagttcaggatatcagcgctggtatgaccgtggtaagtctttgttactggttttttctttttgtttgtgctccactctgtggcatctgatctctcatacttaactcattttccttaccagatcgctgtagagactggacgtttctcaaagactttgatagatcatgggtacattatgtctgagttcgggggcatggacgaggccatgaagagtctgagagacctggcagctgagaggaaagcgttctagaaggaagcccaacagagggaggcataggcggagaggaggcatcaggaggcgttacaagacaaggcggaggagctgaagacccaggacgaggtcatgactaaggcgaggcgcgagctgagggaggccaaggaggcggtcgaggatctgactactaggctgaagtctatggaggagctgcatcaagcggacttggagacgacgaccaatttgaccgttgaggtgaaggagctcagggattttaaagatcaggctctgaagaaggctaaaagagatgagctcctagcccctgttgtctgcaatcattgcactaagtgctttgatgacggtgtttttatggcctgatagactaatggcaaaaacctcaagctcgacttctatccaaagcctgaggaagtccttgttcgcttctgggagaagaagaagaggcttgatgccctgctggaggagcgcaggggcctcgtcttccactccgtattgattaagccaaccatcatccattactgcttttattactatcttttttcccttttttaaaaaaattttatcttttttctttaaggggagacaatttaaggctcgtcccttggcccttaatatttttttagagctttctactgggtctgaacatcttatatctatgtttaaatacatactttgctttgctttttaacgtcgttaaacttttggcctgttttacatttgtccgtgtggtatgccttattaccccctgagtgtcatgaaaattatttttagggcactcatctttacaaatattaatttagaggttgcacatacttgtctggtacatatttactttacagagcataagtttacatttcttgactattggtaatactttcggaggtgatcggtgttccaggccctaggcaccatggttccgtccattcttttgagcttgtaggtcttggagctgatttcgtcctcgatttcgtatgggccttcccaattaggcccaagtacccccactccgggttcttgag

SEQ ID NO: 224383 - DNA, 2242 bp, Cannabis indica
accattgattagggtcgaaataccctgtagatagttattgtaagcataaactatgaaatttaggtgatatgaacggtgatcgttacaaatctaagtcttttgactaagaaagtcagcaagaatattatcgattattgtaataattgatcttagaacatcctgggtggcgatcaagccattgattaggtcctaaatactctgtaattagtcaacgtaagcttaaaatattaaatctgagtgagatcaacgataatcgataccaatctaagtcttttgactactaaagtcaataagaacactactgattattgtaattgttgatcttagaacatctaaggcgccgatcagactgttgattaggtctgaaataacctgtagttagtcaatataagcataaactatatttgggtgataatattaaaaacttgactaaattaaaatactaaaaatagacattataacagcataaaaaagcgtattttggggatccctattataaaaggtttacaaaagattacatatgaccataatttaaaacacaaaatcaaaatacacagcatatacaacccaaaataactcttggtaactcgacacataggccgatggggtcaatatgtacattgcttgagaagactataacctcatagttgatttagagagggaaaaagacgtcgagagaggagggcaatggtgcggatgcgtgggtggggttttagagagttaagattttcgttttagggtgtgggaaatggagaagaaataggtgagcatgtggaaaaaaaaaaagtaggtgggcacgggagaaatgtggcaagaagttggtaacgattttttattgggctgacgatagtggcaaccctgacgacttttcagacaatctttgttttttttatttgtttctatttttttttaaaataaaatctgaagggaattttaatgtttcttatggtaatacaagtggcatgtcccatttttgctgagtgttttagtttaaatgtcatattttcttgtattaagttttcttgatatatttatataaactaatttttattttactatatttatataaatagtcccataaacttgacatttggttgagatcaatgtcgatcaatacaaatctaagccttaactctcaaagtcaacaagacactactgatcagtgtaattattgacattagaacatctcgggtagcgatcggactgttaattgagtctaaaatatcttttaattagtcagtgtaagtatatattgagagatttaggtgagatcaatggtgattgataccaactgaacactaacaattagtgtaattattgatattataatattatgggtggtgattacactattaatcaggttggaaatagttcataagtagtcaaggtaagcataaattacaatatttgggtacaatcaatgttgatcgatataatatataactctttcgactactaaaattaaaaaaacactaagattaagtttttttaatattaaaagtgttgacttcgtttttaactaatgaaaatgagtttattttacaaatgataaaggatatgtagtaatagatatacgataaagcaataataagacacatgaattttatagaggttcagccccgagcagttcggtaatagcctaatcctcgttatttgtattgacttaagattaaggaagaagaatctttttcttaaagctcttacaacaacatctatgaatatataattcttagataaaaatatagtcttagcttagctgtttttcgaccgatccatccttttgcccagtgaatatgcatcactatttatagggctaggaaacttgaggaggaagagtttcctctctcgttacaatgcgtataaataaaaagatcgtgggatcaatgctgaatgcaaggattgtgagatggatgctgaatacactgatagtgggatcgtgtgtatgccgtgtccacgtaaattgatccctgagttatagggattgagctgatgactcatgatgcgaaagatgaattcgctaagtgttgattactctgcacggatcgctgaatatcttactctggacatgccagctcggcctatcttcccgagcagatgctccaagtggactccacgtgtcaccattctcgtgatgccacatcagagtgaaattttttggataacatttgcccccaagtctgtacgggacctctgaggttgcgtgtagacttcttccgagctggttctgtaaagcccgcttagt

SEQ ID NO: 224384 - DNA, 1303 bp, Cannabis indica
aacacaagattttaaaaaagttgtttagcgtaatagcctactccccttgaattgtattaactcaagaacaaatgatacattatttcctctcttaaagctctcacaatgaaatctctgagtgttttttcttagatctctctgaagtaattctttcgtcctttattacagtgaggatggatcactatttataaggctaaatgactgagggaaggtttctcttttgctcacaatatctataattggtaagaacacacattacatatttagaatacataaattgagggatttggacagcttgccatatccctttgatacgatctctggattgtagggattgcttttatgcttcacgaggtaaatcttaatactgctaagtcttgatacattgctcggatcgtctacgcttgccctgctcggtcaggcagactctatccgtgtagatgtacgttgagctctgttcagaatatctcttcagccagatgtaggaaacaggagccacgtgtcaccaatatgtgttgccatgtcatagtgtaaaaaatgggataacatttgcccccaagtctgcacgagacttccgaagtcgtgtgtagacttcactcatctcaagtctatatctgaacgggtggcgcgtgttcgatgcgcctattggtgatccgatgtgattctgaccaagagtcccttcaatttttggctaattaatgctctaattaaatcgtacctcgagacacgccacctattcacatgattttgacggttactcttctccaggtacttgattgttttgattttccaatatttacttttagggggaatcaaggtgtttacgatttgaattgatttcacattttcactaatctgcttataaatagggaaaaaagtcataacaaaccatttttagcatttttctcgtttagtgaattcagaaagaaaaacccttttctctctcaaatccttcgtggaattaacagaaagagccgatcagcatcatccgagcaacctcaaagcttcgaacagtgagtaagtttctcatctttttctcctttaatgcttaaatcttcaattttctgggtttctattgtagaaaattcaatagtcttaacttatttttggaaaatggtagagaatctaggtttagaacacaaaactttgactgtagtagattatataacttgattgttgtggcattccaaatttaacttcacgatattcagttttcactttgcccattcgaggtttagtgaagattaacccttaattcgaggttttcaaaattctgggttatgaacctaaatcacgcgaaatt

SEQ ID NO: 224385 - DNA, 1832 bp, Cannabis indica
gtggagccaccctcgtctcatattatctcactactacaaattgcacttttagtgtcagttttaaactgacacttatacttttggtgtcagttctaaagcgacactattaagtttttatgtcgttttataactaacacttaaagtatacacatatggtttttcttttattgtcgatttaaaaccgacactattgagttttgatgttgttttataacttacacttaaaggttttttagtgtcggttataaaacgacaccaaaggtatgtttatggatttttttttttaatttgagttaaagtaagttcaaccataaatgatagccaagaaagaaaattcatttggccgataaaaataaatcataaagcaaaactgagagaaagagaacaacaaatcgattctatatcttttattcatctatgcattattttacaaaaatatatatatagctatcggtcaatataaacaaaaggcttgggaagttgtacatagactattatacaacagatcacgaactaaagtagagagcttaagaagtaacagagttgttccccgaaagaaattgggtgttgatgattctgtatttgtctcttcctcatcatcatcttcttcagagtcccaaagaaaccgagcatatgatgctaaacaaaactgcacattccatacaaaaaaatcagattaataacgcaaaccctaaattaagttcaatcaaaataacatagaaaaagtatacaaattaacaattactaacaagtatatacgagtctaccaaatttagttcaatcaaaataacatagaaaaagtatacaaattaacaattactaacaagtatacacgagtctatgaacaaagttataaaattttcaattgagcgtgaaattaagtcttaccaatcatctggggaggctttaacagcttgatcaaagtctgctcttgaagcaaccttgtgaccttgccgtgtaaagtctccatacatggtagaacttctgcatcccaaaacttctgcatcatagtgcttgcaacctcattgttaactccaccagtacttccaacatatatgtaaaatatgataaatacaaatatgataaatacgtaaaaccaaaatacttaataccaatgaaaattgtttccacatgttaaggcaacacaattactttaaaaataactactccattctaattaattacaatttcacaacttgttaggtttgtattaagacattcaacaacataaaccaaaacatacctgagggtgttgtgttgagaacatgtacgaaagggaaaaaatgaacctaaggcatctgttaccttgtaaactagagtacagttatggacgcaatgataaaagtatagttaccttgtttgcaacgcatctgttagcttcccaacatacctctatatatcctcacctaatagggggcaatggtaatttacagttagcaatataaaggttataattaaagagattaaatctagcagagcatttgcatccaaagtaaatgacaactaatcgaaggtaacttacaaacaaattataaacaaggaaaacttaaccccataaactaattcccaaaagaacttgcgcaaacctcaattagctagcgtaattacaaatgtgcaaacaagaaaacaaaacaaccaaaatggttcaaacactatttcaaacttacaggaaagtaaaaaaaacagctttgaggattaagatagtacctctaaaacccagatgaagacaacaagaaaagcttttgcaaatgaaaattacaaatagaaaaacatagactcaagacctttcatgcatcttccaaataataagtagaatacgttccccttttaaa

SEQ ID NO: 224386 - DNA, 1279 bp, Cannabis indica
agggcataaaacccaacaaagtcttggcagactttgtgcctgagtgcacaaactcatctcttgaaatctctcaagatttaggagaaagtcaagagccatagaagaagtgagagcaagagtagcagtaaaatcttgaagaaataacatggaaactccatgttgacagaagttgcactgacaaaggcattgcccttataacatataggggcagcagctacatggaccaatgaagtttggcttcaaagcctcaaacaatgaggctgaatacgaagccttaatagtcggcctaagctagcacatgaagtacgggttgaccacttaaagatattcatcgactctcaactagtcgtgaattaagtcttgagtgagtatacaactcgaggtaaaaaaatggtggactacttgagaaaaatcaaggacttactaagtcaaatcaaaggctacataatcaggtcggtccctagaaagtagaaagctacagcagatgcacttgccggtctggcaagtagcaccattgccgaaaaagcaaatcttatgccaatacagttcctagaggaacccatcattaccgtctaagaaaaagttgacatgttggatgacacctaatgcaacttaccttcaaaccggagccttgccagaaggtaagaatgaagcaaaaaaagataagaagaaaagctgctaggtatctaatcctagatagagtcatgtatagatggaacttcttcatgctgctcttaaggtgtgtcaccaaggctgaagctgaacgactaatgataaaagtgtatgaagccttctacgacaaccatactgagggcaaagcctatcgaagaagatacttcgacagggttacttttggccaacaatgatcaaaaactcgatggaccacgtcaaaagatgtgacaagtgccaaagattcttaaaaattccaatagctccacccaacgagttcacaatgatgtagtctccttggcccttcacaatatgggggatagacctgatcggtcatctcccaaagggaaaaggaggggtacagtttgttgtagtcgtagtagactatttcaccaagtaagtagaagttgaacccctagaaacaatcacctctaaaaaagtccttgactttattttcaagaacataatatgtcgattcagacttccccagaagattttgttaaacaatggaaagcagtttgacagtgaatgttcattgatttctgcaacaggcatgacatcatcaaaagcttttctgtcgtggtccttacttaagaaaataggcaggtag

SEQ ID NO: 224387 - DNA, 1682 bp, Cannabis indica
gccgacctaggcggcaaaatagagtcacaaaatacatcactggtagaccccaatccgcttggtctagtgtggcccgaacatgtacatgcactgtccagctccgatactcatggctgatcagaaaaagctttacccttccttcacagtagagcacccgtgagccaagtccagcaagatagtaacatatatcaatagcatacttatcacactatataaacattaatgccattctcatatgtctgtatgacacagatctgcatgttaagctcccatgcctatttatgtctacgtaacgtagacctacgtgttgcgctcacatgccttgaacacataaccctaaatctcaatatattcatatactcagcacggcatatcatttacacaacatatatcactagggtaataaccctaggctattaaaccgctcatgttagggtgataaccttaatcctggttactaattactcacatatataatttccaatgtatgcgccaccacacataactctacgtgctaactactgtcttacttaatgtcccgcaatagtagagattccaaatcctagggtgctcctgaccaggtcccggtaatcctagtcacaataccgggatttcacaaatagggttaacccctgattccacatttataaaatacatacatggcattcgaaatacatgtaatcacatagagctaagaacgagctttccaacggtatatagaactcccaaaacaatgttcggatcacaaagttataaattttcaaagttaacattccaatctgcccagaaactcgagggcgggccgtggcatgcaaaagccatgccgtggcacctgggaccaactcccaagttctgcacaaacgggcgggcctcgacatgctaaaagccatgtcgcggctactgggttacaaacccagacacgagcaagcaaagcttcgaatttaaacttctaaacacattcaaatcaatccaaaactcccaaagaaacaaatatatttttaatcaccaatcaagtagttaaaagcaatatttcatgcattaaaatccagcactaaaccttaaaatttagattgcccaacaagcataaaatcaagctctaaattaacaaaattgaagctctagaacttgagcttcaaaaccattcaactctattaatttccagtagcaaaatataaaatataacatgaattctaacctagaaaattccctaaaatctcagtcaaaacttatcaatacaatccacaataatattatgcaatccatactcaaatctatcaagattaaacaccaattctcttaacatgcaatctcaagaacaactcaaccacttcatactctttccataataaaattcagccaaaattctaaataaaatcaattagaaagagctacctcaattcaattcaaagccaagctcaatcaatccccaagtacaaagctccaaaccaagcaaattttcaccaaatcaagtttgaaactcaaagagggttgagagagagagagaggaggggtttgggtaagtagggcaagaaagcagaaaattcatctctttacttaaaacaattcttcttttattacatataatccaagggtcaaaatgaccattttccccctacggagaataagcacacacataacccacttaaggccatttaagtcatttcacacataaataaacccaa

SEQ ID NO: 224388 - DNA, 1912 bp, Cannabis indica
tttttgacatacaaagaggaaaaatattatgattaattacaataggttgttcaacacagatgatatcagagacaatgaagaggcaaggaagatgttgattgtatttgagagttactggtaatttcatttctgatagacactatgactctgcagcttcattcaagtgttgctgcaccttgagcaactgacgagcaaaccagaaaggctgcttctttaatgaaacgtatcgacttgagagatttttcagtatgccatttcgctaaccctggtatatttcccttttcacaactcttttctaatatgaaaccctttctatagctgaattattgcccttatagaatggctgagtgtgctatgatagcctttgactattatgagcagagacggacacagttatttgagtgtgggggctatagcccccagtaaaaaaaaaagttagtgtgaaaaaaaattaaatatcttctatttagttaaataattatacaacaaaatagtaaaaagcccccacaaaatagttataattttaacgtaaagtaaataataaatatttttataacagttaagccccttacagatcaaaaaattctgggtcgatcactgattatgagatagtagattaccaattgtgtttctctgtttttctttcttttttattttttctttttagaaaaaaaataagatgcttcagtacccacgtactgtttttgttgcagctttgaagcgacattatgcggttttgcagactcttgctttggaggaagatgagatgccagacatcaaagatgaaagagtacctgatgaggaaggcatgcctaggtaaatatgtttgggtacaaccactcttcttgtaagaaaattgtgcataccaaaaggaaatccagctttagaggataataaatgtttgtctgctcgttgcatcctgttagtaatttgtaattaattttatatattgtagattacctcacagaccaggcgcgattaacgctttgaaagagtttaagctttccatctatggggaccattatgatgaggaaactgaaaatgctggagacaagaaggaaagtgatgcctccaaaaagagaaaagctacttctgaaattgcagttcaggagtatgcaaagtatgattggactaaacttgcagacaatggagaggttggagaattgttttgcttcagtgatctatgaatctatcttgcagacaaggaaagagaacttagacgtattaaaagtttgcatagtttatacaataatggtggcttttttaaaagaatccttaagcatgtagaaaatgtataaaggctaacagtttattttagattacaccttagatttcagaaaataaaaatttcatgatttttgactgtaacagagttaaagtactcggtaagaaggaagctctgatcagtaggatattgagtcatatggggcgtatgttttttcatgtataccagtaatgttctttgattacatacacaagctgttcaccaggggtcattttgtatttgtacttgactgtttgttgacacttgccttagagaagtgttcatgtatatacttttctctttaatagtacaatgaagcgaaaaacatttaggtgcattcctctatatttgtgatatgaactaaaagctaacaatcttttcagttttcattcactttctttcttggaataattacataagataccattttttgttaaatatttacatttttacgtttaaagaatgtttttttttacatttttacagttttccaaaaaataacacgaaaacaacataaaatcaaaaagaaaacaacgtaaaagtaacattaaaataacaacaaaaaaacaacaaaaagtaacatacatataacaaaaaattaacaacaaatgaacaaaagttcaacataaaaagaccgtattttatgta

SEQ ID NO: 224389 - DNA, 2206 bp, Cannabis indica
catgaaaataagtttttaggtcacttatctttgaaaattacacaggagattgcatatatttgtccggcacaagttattttacagaatataaacttcgtttttaactactgataatattttcggaggtggtcagcattccaggccctaggcactgtggatccatccattctttttagcttataggtcccgcactccaggttcttgggcggctggaaagaccctttgtaggactagttcgccaatggtgaattttctatctttgaccttggcattgaaatatttagccacctttctttgataagctgccctccgtacctgagactcatcccggagctcatttatttgatccactgcttcttgtaataaagctttgttcgttgcaggatcatatgttgcccttctgtgagatgggaataaggtttccaccggtaccatagcttcacatctgtacaccattgagaatggggagtgtcaattttttattcttggagtggtctgataggcctataagactcattgcagttcttcaggccagttgtttttgtaagctagcagctttttctttagagtgacttttagtattttgttgacggcctccgcctgtgcatttgtttgcggccttgcaaccgtggagaagcttttgacgactccgtgttgattgcagaagtttatgaattcttcgtagtcaaactgctttctattgtttgagactattttgtcaggcaagccgtatcgacacacgatgtttttgataacaaagtctaatgctttcttagcagttatggtcttcataggctcggtgtctgtccattttgtgaaatagtctacgaccactatggcatactttacccctccctttcttgtttgtaaggatccaatgagatctattccccacactgcaaagggccaggggctagtcatcaaggtaattttgttgggcggggatctccagtatgtttgcaaatctttggcacgaatcacattttaagacatagtctacacaatccttcttcattgttggccaaaagtaatcttgtcttaatattttctccgagagactcagacctccggtgtggtctccacagaacccttcatggacttcctgcatgatccatctagcttcagggtctgaaaaacatcttaagtatggcatgttaagccctctgcgatgaaggacattatccatcattacgtatcgatgcgtctgatactgtaacctcctggatacaaccatttcctgaggcaactctccttgtgttacatatttgatgatggagtccatccaactcggtcctttctcattagtagctaccgtctctttcgctttgatgcttggctccacgaggtgttcgacaggtactaccccagtctttctatttcgctgtccgaggctagcttagccagacagtctgcatcaccgttcttttctcgtgggattctttccactttgtattctgtaaactcgtggagcagttctctgacaattgctacgtaagcggccattttttctccacgtgtttggtattctaatgatcctggttgaccactaattgagaatcactgaacacttctacccttgcagcccctacaactttgcccaagcttagtcctgcaattagtgcttcgtattcagcctcgttgttggaagctggaaatgcgaagcgtagggcagcctggagccggagtccgtctggcgatatcattgttatcccagcaccggatccattttcatttgacgacccatcgacgaacactttccacgccagcttctgttgggctggcctactagagcaggcctctgcttcattacattatgttatgaagtcagcaagggcttgtccttttatgaagatgcgcgggacatagagtatatcaaactggctcaattccatggcccatttaaggagtcttcttgaggctttaggtttctgcaagacttgtcgaagcgggtgatttgtaagtaccttaatgggatgggcctggaagtagggtcttagttttcttgaagccatcaggaggcaaaaaactaatttcttgattaagggataccgtgtctcggcttctatcatgcgcttacgatcatagtacaccgagtgttggatcttgtcctcttcctagagcaaggccgcactgacaaaattctcggagacagccaagtataataacaagtcctctccgtgaatcggttttgacagtactgatagtt

SEQ ID NO: 224390 - DNA, 897 bp, Cannabis indica
agggcataaaacccaacagaggttgcaataattatagaagaacgagtcaaccccgatgtaccaccgggcgaagctttgactttgtatgttgatggggcatcaaatagtgagggatcaagaggtggaataattctcataagccccaacaaattcaaagtacacgttgccctgaggtttgaatttcccacattgaataacgaagctgaatatgaagccttaattgtagggttaaagctcgctctcgaaatgaaagtcgaatacctcgaagcagtcagcgacttgaaaatcgtattttgccaagtcaacggagaatatttggctagaggagggcgcttggccaattatctttcctacacttgtgagtattactaaaatttaaaaagataattgttaatagaatacatcgtgcttacgattctcatgcagatgccttggcccgactggcctcgacgagagaagcagaattactcaacataattcatgttgatattttaacccatctgactattcatctttatgaaatgatggaggtcgatgcgatcaaaaaggtcacctggatgaccccaatcattaactacttaaaaacaggagtactccctggcgacaagaccaaagcccaaaacttcgagatcgagcctcccgatatgtcatttacgacaaaaagctctatcgcagaagttttagccagtcgttgcttaaatgcatcgacaggaatgaatgccactacatactccgagtagtacatggtgggatttgtggcaaccatgccgaaggtaattcccttgctttaaaaattttgagacaaggatattactggccgacattccgggcatatgcaactagcttcgccaagagatgcgagaagtgttagcaaataacgacctatgtaaataggcc

SEQ ID NO: 224391 - DNA, 2428 bp, Cannabis indica
atatattaaaaattccccaaaatattagggggcatggccaccccataccataacatagttccgccactgacaccagtaatggtttacaagagctaatagttgttaatggagagtaagattacaaaacaaaattcatgtacatttagattatatttcttcatttttgttaataatttaaagctattatactggaaaaaatcaatttgcctgacatggtggggacattttgttgttaatgaatgtgctgcaattacaaaactaatagctactacgcctatcattgttgctagacgtctgaaagtcacatcatttaatggtagataattatctcattttattctttgatttcccattactttttttaaacgttattgttatcttccaaatttacatgtattatcatgcttaccattttatattttgtatttaagaaatctcattatcaacaaagataggcagctctctcatgatcaatccaaatgttgctaaagttcaaacactgaggcgttggtaagtaacacttacctttaccttcaaatatatataacataaacttgacttacaatttctcatttacacttactttcaggtgtactgaaaatgaaacttttcttgaagacctcagaatgaataggaaaacatgcttagaatccatgtcccatctaataaaacctcaactacatcttatgacacctataaattccaataaaccagtggaggtaatttatttgttaaactttagttatctttgcatttgtttaccactccaaaactcctaacaaaactgattaatgttttagggtaagacatattggaccacagcttcaattactatcacaaatccaacacaaacactttggtacatggtatgtagcgagtgcaaaagatttacaactggtgacttcaatcaaacgttcacttgtataaaatgcactaaaaatgcaacagctgaaccacggtttgtcttacttttaacgcattctacattttctgttttccatattttataaattatttataatttctccatttcactatattataagatcaaatatgttttattttataaaaaataacttcagttcaaattcacacgtgacacaacattacatatagtatgctacattgcaatgtattaagaactagaatcactgtacaacttatttactcaagtggttccttggaggcaataatgtttggtaaaaaggctgaaatgttcttatgttgctgcacctcagaccttgtcaaatttacaactcaggtaataaacacaacagcatatcttcatttccattatatataatataaatgaatgactttttttttaacattattgcaggaaacaattaatagactacataaaataaaccatgcaccaggtaaaaaaaagatacttcttttacttgagaactatgaaactaatacttggttttccaacagatataaaatataccatcagtactctgctgccaagtgaaaaaatcgagcaactaaatcgtcaaaatgcaaccgatcacgaagtttctcctaccttatatgcaaacaaaaagcttaaacaaaatgttcaatctgttgatgcttcactatcttcattgaaaaatccctcaatcacaataaatcctgatgaagacaacagatttctagatgcgtcaccttcttcactagacaactcttccccaacttcgaatgacatttcatcggattcatccagtgaagtaacaaagaattaattactgcctctgatatttctttttgaatgtgactgttaatttgagtaactgacaaccttaaagtagtatctgtaaattcttttgattgtcaatatcgataactaaccgcccttaaatagcttttgtggtttctgtatattttgttgaaagtgtttttttatgtggctgtcattttagatgattgacagcacttaagtagtttctgtatatttttcccatacttattttctatagttgttttacaatttcatgattatcaatattttgattatatggtggttactattattaagtattattaagtcaatcatatttttattgtacagtgtttagtatgtatattttactactgctgcctttttattttttagtctacataacatatatatatacaaaaggttgtcaattgcaattataacacttcaatgtaacaagtacgtgatttgcacgtacacctaactagtatatatatatatatgaagttatcaatgaaacaaaatgaacgaacgaacgaaaccctcgttctctcccttcgatgaaaccttctcctcttatatctattttctttgatttttaatccaaaacttagcgatctaagctccggtattagcaggatagcaaatccttgaagagggaaagcttaaggtatggtttaatttccttttaagttaaaataataattagttttgtataggagt

SEQ ID NO: 224392 - DNA, 1810 bp, Cannabis indica
gtagagaagaggtgcagagaaaaaagagattgggtttgaatttcgtaagaacaatcttctgtagatgaaaaagattcttgggtgtaagtgtgagagttgaaacacttagtgagaactcaacagagaatcttgtctcgattgtattgtacatattcttgcttaatcaataaagaaggatttcagtagtgttccaaaactggagtagagccatagatcacatcgatctatcgaacttgaacctaaatgtatatcctggtgttaaaattctttaatttctgcatttactattttttggttttcattactctattcacctatttttttcatccgattgttgtttttgatttgataatcttgtcattgctaatcattttttattatttagagtttttttgatttgattatgcacatttagtcgtaatttttccacaaatcagagctaggtaatcgatcaagaacgcagaactaagattcattccgctgcaattcttgaagaaatcttggatgttatcaatggagagattcgaattggagaagtttgatagaactagagactttgcgctatggagagaaagtctaaaaggaatcctagtgtaccagaaagtgtccaaggttattggagatgagaaattattggtagaaaagaaaccaaaggaaaaagtagaaatggaggagatggcgtactacacgatcatcatgtatctatcaaatagtgtttaaaggaaactcatcgcagaaaaggtagataaacgagtttggaataaattagaagagttatacttaaaaccatcgatagctagcaagatcaatttgctagaaaggttatacaggttctaaatgacttcttctctttctttacatgataacattgatagatttaataagattattgtaggtttggctaacataaatcacaaggttgatgaagaaagccagatcatcatcctgttgagatcacttccaatcgcatatcaagaggtcaaggcagccatcaagtatggcagggatgttattgcattggaagatgttcttactgcacttaagtcgaaagatttggaattaaagttaggaaaagaaatccaagaaagaagaagtgtatttggcaagaagaagatcacccaagaaagtgagttcaaagagtaaataccatcactctcaatcaagatcaaagtctagagagaaggaaataagaaagtgttacttttgtggatgatctggacacttgcaaagactttgcaataagtacaaggagcaacaaggcttcaacaaatctcacaatggagataggaaggacttccagcaccatcaccatgggaaggattctgctacaatagcagaagatagtgatgattgctccactgatggagagttgttctctatctcagagtcttcaatgaacagaaaatggattctcgactccgaatgtacttatcacatgtgtccaagtcgagagtaattttttaattatagatctattgatggaggtagagttctaataggaaataatcattcttttagggtcattggaaccgagaaagtggacatcaaacaacatgatggtggaatcaagatgctgatgaacataaggcacatcctagaccttagaaaaaatctcatatccctgggtgcgcttgaagatgaaggatacagatacaagtccatgcatggaaacttgatgatcaccaaaggttctttggtagtaatgaaaggtaaaaagataaatggcatgtacgttctccaattggagaaactgtcccaaactagaattggatatgaagttgtggcatcacagacttggacatatcagtga

SEQ ID NO: 224393 - DNA, 2232 bp, Cannabis indica
aattttttgtagctgaatatccatttttttgtagtgaagaccacgaggcaaacctcgtggctcacaaaccaggaggcaggagacggctcacgagaatcctcaaaatgctcaggaagaacaacctagggaaactgagggttcccctgagaatgaacaaccaaatgatcaaccaaagccttctcacaaaaatgagaatagaaggcgaccataaactagggaacgggaaatccctcgtgggaacgagggaaatcctaggactgaacctgggacacgtgggtcatcaacgaggaatcgccaacatccttcttgaaccaacaaggaaggggcacgtacaaaccccaacagggggcacacaacgaaccacaccaaagggagaaggatgggacgtgaacaggcgagtgttacctcggggcacacgagaacccatagttgatcaacgcgaggaggagaaagtactcgtcgcaataatgatctagagagtacaggcacaagtaaaactgaaagttactcaaggacaaggttcattagcaggacgaggtccatgagtaggacaaactccatgagtaagacgaggtctgctagcaaatataaccaaccacatctacgcaatcacataaacctgaaaaaacctgatcttcgccaacaactcggtccaaagcaagggaatcctatccaattgcgaatagatgagttggaagataagttcaagatgtattaagtcggggaacaaggaaagcattctggttatgactcagatgaagaactcgagccattccatctcgacatcattaatactccattcccctggggattcaaaaaccctcacgtctcatcatatgacgggaccacagatccagtctcgcatttcaataatgtcaatactataatgctagccaccaatgttacgaacaatctacgctgtattttgttccccacattgcttgttggagcagtgagaaactagttcaataaatttactcatcattcaatcattcttgggagcagttgtctaaggacttcaaaaaacaattttaggccgcaaggaatagccaacctgaagcatcatcactcaccaacataaagcaacagccaggcgagacacttaaggccttcttaagtcattttagcatagctcatgtgagggtgagaaaacctagatgatagtacccagcttactgctcttccggcagggatcactactgatatctccactgttggaggcgagctatgggataatctacaaggtcgcctagtaaaaaacattactgagttcaatgaaatggctcaagtatttttttgaaaagaagaagctagaaaggagatgaagttgttgcagactggctccagaaacaaacatagcaatgtctcaataagtactgtcttgaccaaggctgataatctaggagcctctagttcaaagaggaaggataactctaaggagtcatcgaaggacaagaaaaagcaaaagaagcacgataagtatgtgtcaatctacaccatttacaccgagctcaataaaactctggaaaatatttatctcgtgcatgagcacagggtggcattttgtaaacctgagcccatgaggtacgcgagacataagagagatgcaaccaaattttgcaagtaccacaaagacattgggaatacgacagatgagtgtcgtcaacagaaggatgagatagagagcctcatcacttgagggcacttcaagaaatatgtgaaaagacaggacaatggatacaaccagccaaatccacccaataaccaaagcaacaagggattacaacctcctcctcttgaaggagaggatatcctggttatctcgggagggccacatattgtaggagagagcaataatgcccaaaataggtatttgaaggaagtaaagatcgagcagtctgcctttgctccgaaaccttctaagaaagcaaagacttaagaacctccgattatattctcagaggaagatgaaaaagatgtgagacatcctcacgttgacccattggtaatcaccatccagctcaccaataagaggataaaaaaggtgttgctggacaacggaagttcagtgaacatcctttatagggaaacacttgagaaaatggggcttgaataacctaaattaagaccttgcatggtaaatctttgcggatttacaggcgacagtgtcgccagtgaacgaataattgacctcccattaacattgggtaaagcacctttatccaccacgat

SEQ ID NO: 224394 - DNA, 2349 bp, Cannabis indica
cctctggtcatttctgataatcagagtgcttttattttaggaaggctcatcagtgataatatcatgatttcctttgaagtaatgcattacttgaaaaggaaaaggcttggaaaggatggttacaaggctgttaaacttgacatgagtaaggcttacgattgagttgagtggtcttttctgtgtgatatgatgcttaagatgggttttgatagccgtgttgttaaccttatctatcaatgtatttcaacagtcacctattcggtcactcatggtggtcatgagttggatcctttcactccctcccgcggtattagacaaggtgatcctctctcgccatatttgttcttgatttgtggtgaaggtttttcatctcttattaaatcttctgaggctcggggagagttgcatgggtgtagggtgtgtaatggagctccggttatatcacacatgctctttgcagatgatagctatctgtattgtaaagctatcgatagggaagccttgaatgtcattagattgctgcagttatttgaacaagcctctggtcagcaggtgaattttgctaaatccaccattttgtttagttcaaatactacagaatctatcaaagctagaatgtgttctcttctgtgtatgattgaggccccgacaaacagtctttatttggggcttccttgtactatgggtcgtaataaaaatgctatccttggattccttaaggataagatggagaagagaatttaaagttgggagggtcgtcttttatccaaagcttgtaaagaaattcttttaaagacggttgctcaggctcttccctcatatgctatgtcggtctttcttctccctgttgatacttcaacaaacttgaagggatgatgtccaagttttggtggcgttctgatagttcaaattcgcatggtgttcattggaagagttggcagaatttggcaaagcataagcattttggtggtctgggctttagagacttaagagattttaatctctccatgttgggtaagcaagcttagtgattggttgtaaatgagtcttctcttgttagtcgcttatacaaggctcggtattttcctcggggttctttcttcaatgctgaacttggtcacaatccaagttttatttagaaaagcatctttgatactcagaagctaatcttgtctggggttcgatgcaacattgggtctcgtacttcaattaatattcagcgggatccttggttacctgacgcattcaatccctttgtaacgtctcatttggtggggttagatgattttcaagttgctagtctgatggaggttgataatagatgctgggacttggatgtgttgaatgatttgtttaatacccgtgatcgagaattgatttgtaagctccctatctcttcggctccttctgatttctagtattggtctttcaattcttctggtgtgtataaagtgaaagatgcctataactttttacataaggaagatggcttgcacctgtcaattgatgagaagagactgtggaagatagcttggaacattaatgtccctccaaaggtgctacatttcttgtggcgttctctctctgaaactcttcccacgaaggttcagctggtctcgaggcatgtcccgcttgatctgaaatgtcccatgtgcaattttgaggaggaatcgattgtgcacttgttgatagaatgctcttttgctcaaagttgttggaatagatcatccttaagtgcggctgttttattggggggtaagttctcaaattggtttgagttgtttgtcttaccttctagtgccaatgtaagagaggaagcagtcatgatttgttgggccatttggaatgcccgtaatgtgttcacatggaaaggtaagagcacttcggcttcggatgtaattttatctgctagagtcaaccttaatcaatggaaaaatgctcaattgaaaaagaagggtcctttgtttttggcttcgggtgagaatgaaataagagagcattggtctaaaccggttaataataagattaaggtcaatgtagatggagctattttcgattcagaagggtggtataagactggtttggtggctcgcaactgtcatggccatcttgtcgaagctctttcttgtagcaaaccgggctttttagaggctgctatggtggaggcgataggcattaaggaggctcttagtgggatcaaagacaagcagtggaatgatgtgcaactggaaaccgattgtcttctggttgtccaagctttgcattcttcggttctattgcgttctccctttggcgtggtgattcaagagtgtaaggagttgcttgcttctttaaaatctattcagattc

SEQ ID NO: 224395 - DNA, 1646 bp, Cannabis indica
gcttataaatagggcaaaaagtcgtaataaactatttttatcatttttttgtttagtgagttcagagcaaaaaacacctttctctctcgaatccttcgtagaatttacagaaagagccaatcagcgtcatccgagcaacctcaaaccttcgaacagtgagtaagtatctcatgtttttctcctttaatgcttgaatcttcaattttctagatttccattgtagaaaattcaatagtcttgacttgttctaggaaaactgtagagaatctaggtttagaactatgaaactttgactgtagtagatcatataacttgattgttgtagaattctgactttaacgtcacgatatttggttctcactttgcccatttggggtttagtgaagattaacccttgatttaaggtttcgaaattctaggttatgaacctaaaccacacgaaattttcgtctttttaatcttttgattagaccaggttggtacattttgcttgtttttgttcgatatctcggccaaatactcatcttgtgtcatatcttttgtagatgaaccctggttagttttggggaggagaacaccatatcgaccaggatcttctccaacttttgtacgaggatcaacctcgtctttgtgctagtccgtcctcctcgagtgatggactttctaactcgagttctgaagattgggaagtaagtagtgagggtacaccttcctaagaacccgaggtgtagcaccacttttatcccgagcagatcgcaggagaaggttatgggagtttcatttgggaactcaggaaggggtggagacgttatcttccgtccaactgaacatatatcgtccgaccagatgtcgctgataccattcctgtgggccgcccaagctttggtgcctttggcattcccattgctgctcctgttgtgaccgttgcatggcataccaaccaaccaccgtccaggggtaggatgatggcccgcacaaaacaaactatgcggaagattactgcagctgaccctcacgtggcctagcatgccacgatgccgagcatcgaataggcccagcctactgttgaggaagaggattacgaggggaacgttgaagtccaggaagtggaggatcagggcgaggttcgtcttgatagtccctctaaggccaaggaggaatgagttgctcgacctttgcgctttggaggctataatgaggccggggaaccagtgtttgaggctagtgacgtcttggtggaaggttatgactacgtcaccgaggagtacgccgaggcggttcctcaaaggaggcaaggtgcctttagggcttggtgggtgtgtcctccatccattgtaactcaagcccagttgaggagtttagagaatgatggatacttgggtggtgttgaatgctttttcccttctccaaatcatcgggcaactaatccaagggaggaatactgtgcctggtcaggtgctcacaccaaacaaggtgtgatgttgcccctgcatccgtacttcaaaaggattgcaaattattaccacctctacccgactcagttcacacccaagggcatcaagtaattatcttccctgttcatcctctatgcgactcaaggatggggtgagccatctccgcacgacaccaactggctctttgatttg

SEQ ID NO: 224396 - DNA, 3972 bp, Cannabis indica
ctttttgcggacgacagttttcttttctgcccagcttccattagatcttgtaacgtcatcaaggaggttttggatgtgtacgaaagagccactgggcaaaaagttaatttccaaaaatcctccctgtacttttcgcccaatgtagaactaagggaccaaaccttgatttctgacttcatgcggatccctgttcgcccgtcctttgaaaaatatcttgggcttcctcaacacataggccgaaccaaaaagcaactgtttcattaccttcatgacaaagtttggggccatcttcataactggcggaataaaatcttttccaaaggaggaaaagaaattctcttaaaatcggtcattcaagccattcctacctacagcatggcttgcttccgtattcccgtcgccacctgccgctctctcgagtcaaccatggcaaatttttggtggggaactaatgaaaacaaccgtcctaaaacccactggcaaagctggaacaaactctgtcgctctaagaaagatggcgggcttggttttcgctccctggtccatttcaaccaagccatgcttgctaaacaagcctggcgcatcctaaagcaaccaaactccactgtctccagaattttatctgcccgttactaccctcagtcttccttccttagtagctccacggggcattctccgtcctttgcttggcgtagcatttgctggggaaaagagctgctccaaaaaggtctcatctctaaaattggcaatggacagaacacttgcaccaccacagattattggattctgggatgtcgacagatcaccactttactccctgtccctgacagagtagcttttttcatcaccccttctttatcctgggacactgctgaaattcatcgttgttttcccccccatgtggcccatatcatcctttctatccctctcccccttaccccaacccaggatgacctggtctgggaacacacaacctctgggatcttctcagtcaaatccggctatcaccttagtttctcatctgctagctctcttgatatcccttcctcctcttctccctcgccttggtggaaaaacctttggcatctcccgattcctcccaaggtgaaacactttgcttttcgtgccacaaacctcaccctccccaccgctaaaaacttagccattaggaaaatcatccaatccccgggttgtaaccgttgtggaaaccatgaagaatcggtgtcacatgcattgttctactgtcagaatgtccggagagtctggaaaggtacgcaatttcaaccttatattttttcctgctcttctgaaattttgttccatgatttagcttaccaaatttacacatctttctccaagaacgatgttgctctttttctgtgtatctcttggtttgtttggtttaacaggaataaagctctcaaaggtcaacctccagaccaatcgcatgcaattatcagtctggctcaaagctttttagcagattacaacttgacgtcctcagcctcgtcactctcaggccggccaatacgacccctgcccctgctccctggattcccccgaacccggcactctcaagctcaatgtggatgcggcagttcccaagaatggcggaaaagtgggttttggtggagtaatccggaatagtgaaggtttagtggttgcagccctcgcccaaccctatcagggcggtggttctgtcgccactttggaagctaaggctctcctctctctgcttcgctggtgcattgacgagcactttctggtccaagaagtagaatcggactgtaaagctgtaattgacgccatttgtcatcacaaggacgatatctcagtgtttggagatctcattcggcaaatcaaggaaactttgtctcttctacctgacgttcatatcttccacaccaatcgtactgcaaactctctagctgataaattggcacattgggcctcaggttcagatgaagtagctgtttggataggcgatgacccctgcaatctagtggatttcctttctccttagcgggctccctttctctacaaaaaaaaaaaaaaaagaagtttctttcttctactatttttttttcttcaataagtcaattataaggacaatgttgaacgacaaaatgacttattctttcttaaagctgctttttacttcagtactaattaatttacaagctgatctgcattaattaatcatttagtacttaagtctggcagatttttgctaaattttaacagtaattaattttgtcagctactaaattaggcatggtgttttttaatttatattttatctctttaaaaaacaagttttaatattatggttacatgttcggccgatctattaatttttaaggatgcatgccctacaagatcgagaaaaataataatttctttttttattttactttaaaaaagaagaataaaagctttggttaatattcctttgtaaattgacagttacaggttacagttaacgttagtgaataaaacgatatataaggtcaaaaatatatatgcttggtggtctatagtataaatgtactacgtgttggtgtatatatatataatctcatatattcttttccttataatgtaattagaacctaattataactacatggagagtgatatgaatatatataaatatatatatatatatatcattttcttttaattatataagaactaaaaacacttgataataatattatttgttatccctagctagcaaatagtaatccagcgtcattttccatgtctaccactctagttcttccttaaataaattatataataatgtaattaattgcaacgtgcatgaatgaatggtcacgatcatttaatcaacttattacgttattacttggaataatttggacttaatttggcatattaatcaaattgtcataaattataaatatatgtactacttgagagctactagggtaatttattataattttaatattttctattttaatgttaattatctcttcctcaatatgagtaattttgtactatacgggtgatgatcaacttaatatatatacatttatataccaaagtcctatttgtacacacaattactttactagcttagttctgtccaataatatcacatgatcatcattgcgtgatcatgatgacctattgtatatatatatagagacaaatgttacctaacttaaggtttatatataaaaaataaaatagttgtgtgtgaaatacatataaaatattaaccccatctcactggaaaaatacgtagaaatcaataataatacatataattgtgaataaataaaggagtagatgggtaaacgaaagtgtattttgaataaaatggtagtagcactgttccctttcacaaacacacaattatagagtagttattaattaaataattaataaattcattattttaaaagtcttaattgggtttagtggcaatgagatataatttacaattgtgatgaaagatatatatccctacgttttaaacaatagactttaatttgttggactgagtaaaactctttttttttttaatataaaatggaaatatgaaaaatcattattaatttgttcttagcaaataagatctcggagttgacaaaacgagacttatatttatattatacatgtacgacatgatcaatattaaatgttttgtattttttttttaaacatattatatgttgtattcaattgaggggtatgcacgcgcaaaatgttcatgaaattaaaataaatataacaccacaaaaataaatataaaagtatttttttaaaagaaaacaaaaatacatttatattttacaatttttttaatgtatatagtacatatacaaaaatggaacatacgatattaatatctaacagagtttttttttttttttttatcaaaataataaaaagaagtctccttaccaatattcatatgaaaaaaacaaaaaatacaat

SEQ ID NO: 224397 - DNA, 1535 bp, Cannabis indica
aagcaagcattttattttgtaagcttttataaataaaaaaaaatgtacgttggacaacaaaaaaaactaatatttaagatcagttaatgaataaaaatggcgtttctgttcaatattgtgtcaaacaacttgctaacaaggtaagttcttaaaattagtctttaatttttgttctatatgcgtacaaatgggtctctccaaaaaaatacacagacaaaggtctatagtacttagtgtattgcaagtgaccaagagaccttaagtctgcttgatcactttgggggcacccacaccatacacgcactgaatacacacagctatacttgagcaaaatttaaagcttttataagtaagaaattaaaaggtaattaagtacaaatgacatacttcagattaaacatgaaaaagtaagtatagacacttatgttcaataaaagaagataaagtagggattaaagatcgcctggctggtcatctatccaaagtaaaaggccttaaggccatatacaaacattgttcgaaagtaaaggacctacaagccatgcaagaacaaaataatagtgcacaaaataaaaggataaaaaaactaatagtttctaaacatcattaagggtaacagaaggagtagacgaatttaggctggctggaacctaggcagcaacatcagcttggacgagtgaagcctctgaaaaggcactacaacctgattttgaacaggctggcaggtcattatctcagtagcctagccggccactaactcaatagcatgtccgaccactatctatacaggtgggccaaccatagtcttcataggttagccgattgatacctctatggtttggcaagccatcacctcaacatcttggctagcttactcctccagaagtctactcttataaagctccctccctccattatgtaaactctcacaaaatggcaactcaatatactttaggttgacattggtttattgggttgttcagatagaccttgtaaagaacctctaaggataagccaatgtattcatccttgatggcctcttacccatcaagggcttcctccttctccttgtgctcctttgcaagttccttttccaatttggaggtctcaacgattagcttggtcacctcttggttgcaaagaccaagtagctcattcaggccatcatattggtcctaaagtttttcgaagcaagtcgatgccgagtgcagctcagcttgcacctttgtacgagaatctttctttgccttgagttcagcgtctttccctcaagttatttcttgagagtcatggcagagcccttaccccgagcgtgatcatggttgagctttggaataccctaaaaccaaagagaaacgaagttagtgaagctgtaaaaaaacttgcatacacatagttaagcaaattaacaacttacaaatgaaaagtctcagagagtgcttaatgtcaagcaatccagggcctgaacatctaactcttggagcacctcatcaacgaatggaaaaactttggccaaggtagctttgggaaacctc

SEQ ID NO: 224398 - DNA, 1653 bp, Cannabis indica
gcgtattgcctttattctctactcaatcccacgattatagggattgtcttcgtgtcttggaaacgacaagactaatctctggaattgccaacttatatgccttgcttggtacaaatatgtctatctcttggtcgaactaccccttgattaacttgttcggacatttttgtcacaacagacattaagattaactgttaatgggctactaggaatacttccctctacatcggtagcaaaaatgtgggacatgtgtcatccattctcattaccacgtcaaggtgtaaaaaataagataacatttgcccccaagtctgcgtgggaccttcctggttgcacgtggacttcactcagcttggagtcttgtttggatgggtgactcgtgtctttgatgatggatgctgatctgataggactctaactgggggtctcttcgatatctgaccatttaatgcctattgaaagctatacctcgaatcacggttcgatgtgtgagcacactttgacaattatacttctagtaatgagtacttaacgtctacttttgggaggaaacccaaatattcaaattttaaaatgataaattttcttttcagattgcttataaatagaactcaaatcctttggtgatctttttagccatttcgactcttaaagaactaaagcaaaaatttccaagcaaattttctctcagattctttgaagaattcatagaaaaactcataacgataccatcagaacaaagaaagaaagcttcgaatcagtgagtaagttcttcattcctttctttatatgcttgccatgaaattcatgcattatttctgaattctctactgtggatttttcctgttcttgaactgttctaggttaattgtagaataactaggtttagggttacgaaatttaattgatgtttaaccataacacctaattatctgactgcgcttcgattttaacattaaattgttcctccccacccgtccataagattttgacaaatatgaggttccaattgaaaatttgaacttccgggattggaaatttcatttctgggtgaaatcttttcttttgattcttaatcaggcctggtcggcatatacaatctgttttcattcgttatcccgaccaactcttattctcttgtctcccaccttttgtagatgaaccatggtaatttttggggaggcaagcatcatatcaaccaagatttgcttcgactcttgtacaaagatctgttgggaatattttataaggatctagatttactaacaagtatgttgattgtgggattctttttctttctcaatgtcatttagctattttactattataataatgtgtagaaattagaattaaacatcacaattatcattacttgtgatcaaccttagctatttggcgaagtcatgtcctctgacatgtgatttgtctctatccctataaagtttttattcttttgtgtcaagtgtttttgtctgaatctcaccatggcgtctagtagccgatccaccgctgatttggaacaacaatggaaagacatctgtttggaataagaagaagaaaatgaggtggcttacgaggaagaggaagaggaagagattgaatttgatgatcgttggtgtcttgtcgggcgtttattgctgggaaagtatctga

SEQ ID NO: 224399 - DNA, 2069 bp, Cannabis indica
taacgagaaaccatatggcttcagagtaaaaggcgaggcatcaaccttgatatgcattagtagacgagacatggaggatggtaagacacttagtgtataatacaccttatacagtctaagtataacagtcaagcaactaatagcgaggcacctatctcaccataggaagcgcgctcatggtatcttcattaatcagctcccaacacctttcaatagggttcacagcttcgtcgagtgagctctctcagatagaagttgacatataaatgatgttgactgctgaggtccactttgtcaccaagaattgcaattttcagatggagtattatgtcttcgagcgcaaggacgacgagacttacatcatcaacctctgagaaacatgggaaaagctccagctcgctaccaaggttattgatgtcgtgttcccatcgatacattcccgtatgttatgatttacaatgtgtttaatacacaattaccttgacctggtaaaagcgcacccatcacacctgtgtgattttcaaatattaaccacatttattttacgtggtatgtaatcaaaccccacgatttcaggggataattgttgtaaagatatcagtcaactatgtaattaactgccttactatgtaattataaatagaaaacactcctagaactgtatcagaaatctaataagattcactcgtggactatgtagaattttaactacaaaaccacgtaaaaaacgtttgtgttcttactttgtctttaccagctttttatttttgagcaagtttatctcaatttcggctcaaatatagttaacaaaaatcagcgttaacattccgcaagtccaaagctttttgcaggatccccaaattgaggatctatgtctacttccctactttgggccggacttcattgctctttgccggactcttggtcagagctcttagcaagaattttctcctatttggctttagataaagccatgttgtaatagtgtcgggcagactgttggtctcccatcccttgttggaagctttaagcataggtggtagatggacattactgcattcaggtcgtatagggcaggtcgatctatatagatcctgataaaataatccccgacaactagcctcagagccatggtaatgatttactttcataaaatatagatttaaaataatgattgtgttaatttggatatgttcatgatggtttatgtgcatatttgatgattttatggaaatcgcaattttacaatgataaatatttttagtttcgttctaaacttttcctggaatgtagatgaaaaataataactttaactttttacagaactcaatttcgattttttatgaattagttatgattttttgcatttgggaaaaaatattccaaaattggtgcacacgtgtgcgcgcgcggatggaggtggccactcggtcatgaccgagattcaaacactaccctgtccgaggtttctcggacaagggctgtctgaagcccgtgtaacgccgaactggcttagccaagtaggctgcattgcagcctctccctcgtaccttcacccgtcaagggctgtttgtgatattttttaattcaaaaatcatttttcagtgaaacaaaatccaaattttgctagaattttgtgtagaatctaaatttttttaaaaaaatcttcttattagaattttttattattttatttgttttatttatttttagttggataaactaaaataaactgttttaataaactgaaaatttgaaaaattagttggatatgtgaatttcagttagaattttagatatttaggagatttgttagatttcaaatattttgaaatattctctaacaacctaaaattttaaattctagttaagatatattttaaatattttattttaaaatataagtatcttaacctactttctaaatatatgttacatgtttattatgttttttatttatttattcaaaattatttttacaaatctattatttatttgatctaaattactatgattaacttgttcacaaatctaatatctgattttaatcatagtccaattgtcaatag

SEQ ID NO: 224400 - DNA, 1760 bp, Cannabis indica
tcctcttgtatgatcatggtaaaaacccgagaaagattggggatgggtttgttgagcaagatttgtgctctaacggaagcaaaggattccttaaggccagtcaagaattgaataacttaattctggttatagtaatctaaaaaagatctttattgcaccacaagtgcaggtagtaataggttgaaattatttcaactcatcccaaagggatttcatctaagtaaaatagcagaaaaccgattgttcaccctgttgcaatcgggtgagttgagtttgtaattgaaagattctagggccattgccttcattgaatctttcagcaaggtcattccacatatcaatggctaaatcaaaatacatgatgctttaagcaatttcttgagaaacataggttactaaccaagacattaccatgttattgctaagccaagagttgagagaaagattatcgaattttggccgagggagggagccatcaataaatgcaatcttgttcttggcgacgagggccattgtgatacctcttttccaggattgatagttgctgcatgacgaatgtagacacgagaacaagccctggatgatcgcatctggtcaagaagaaaggactagaaggatcgtcattgatagggcaatttgtgtgaaccagagcagtggtgtgaagttcgtcgataatggtggactgatcctgggtctgaaccatttctgggttccagtttggcggaggttgagatcgtggaactgggtttctacgaggagcaacagaggaggtgagattgagagtagcagggggatcagatgtgatctcagctgcagtgttgtcgactgatgatggaggaccgccatcttgggaacgagtagttggtcttgccatggaagctgtgggcaaggtttcttctgataccataagagaaaacagagcaaaaatacctttcttttatatatctgtattaactgagctgaagacaatgaaaatgggtttatataggcaataagagtcggttaaggatataattgaaataaccaattgaagcaaagagtaaacctaaacagatttatctaactaactaactaatacttatgctaatatgtttggaggaatgaggtttcgagatttggaactgtttaatcaggctattctttggaaaacaaacttggtggctctctttcatagctatttagttcttgttgggcaagttttgaaaactagttattttacttattactgacgtgttaaaatgctaatgccagctccaaagcttattattatgtctagagaatatgaagaatggatctcgagagtgaattggattttataacttttcaattactttaaacactaattagtagctacacaaatagatttttctaaactcatagaagagcttagggataaaagtgtataatcactctcttacaaggggcgatgttgtgcaagaacacttctttaacaacacacaagaactgtctaggaagaaaactattacaccaattgaagaaaacaaaaagaaacatagttcgaatggaataacatcaaatccacatggaacaatacaacaccaaatatcacgaggttcagcccaagtgcaatgacttacattctcaaggagcaatacatatcttgatacaaattctcgcctagaacggttttaataacttctaacaatctccatcatcagtcttgaaagctctcaactttgagttccactatataatgagctgagaatcccttctacaattggagtaacttcaaaacaccc

SEQ ID NO: 224401 - DNA, 1089 bp, Cannabis indica
gtctatattttggaaatgcatgtccgctaaacttttaaaaaaaaaatagtatatgtacatattagtaaaatattttaaactagtattttgatactcgggatcccgatccgcatgtttattaatatataaattattaaaattaatttccgagtttattattataaaatgcgggcgttacataaaataactttatataggtcatatagcggttagtttcgtgttagccgtgtcaacctgaatatgacccatttattaaacgagttaaatgagtcaacccgaacacgaatcgaatctatttaagacaaacccaaacctgctaactcttgtgcggattttagtcatgttatcgtgtctgactcgttttgccggccctactttgggctaggtagaccttaggcacaggcctagcccgcctatgctgagggttaggcctaattgctttggtgcctagagtattgtgactaattaccgataaaagttattacattaaactatataagacacgatacttaattacacaaataagcatataacatcttgaaaagtgataagtatactggtgtctcttagcgtttctctttaaatagacatgttcgtaaatatcttaggaaaaagaatcctaaagaatatcgaatctctctacgattaattcaaactaacaagttcttacatgctaacaaagtgttcaaatataagaaaaagatcactttatataaagcattttgaaaagtaacattttttgtctcattcatctaagacatgacctccatagggacatacttttgccctaatagaacaaaatccatttttgacatgtgaaaaacttagaactataattttttttcagttcataatgatgtattatgttgtagatatagtataccttagctattatgtataagtatctttattctcttaattgtttagtttttttagagagtaaatatgctctattattaatcattaaaatctgtcatctaaagagaatcaatatccttctaaaaacatatctagtaaaaccatgtgctgcaaaattaacaattttacgaatatatttaataaatacattaagaaaagagaataaactga

SEQ ID NO: 224402 - DNA, 2163 bp, Cannabis indica
aaacacttagtgtataacgtacaaataaagtataacagtcgagttggcacgagaaccgataagagaggtgcctatctcgctatgggaaggttcattcctctaacttcccccagttaacttcagacatcttctcagtgaggcctacaatcctgacgagtcaaaagctaacattcaaatgagcctcaaagaactctttgttaataagaaccgcgatcgtcacaaatgaagcgttaaactttcaagtaaagaagcgacaagacgtacattgtcaacctcgaaaggataaggaaaaaggctccagctggctattacgatcactggaaccaagatcttatcgagacatcctcggacgtacacaattaatgacgtattaaaacacacaatcactttgaccaagtaaaagcggaaaaatcacagctatatgatttttaaataataatcgtatttacattacgtgatatgcaatcaaaccccatgattttaggggattattgttgtaaaaagattacagtcaactttgtaattaactgcctactatgtaattataaatagtggcaagtaagatccaaaaagggacgaaaaaatcatacaaggaaggccttgagaaaactataaaaaatctgaataagattgactcgtggactatgcagaattttaactgcaaaactatgtaaaaaatcctactttttattttacagcctttattttttctgtgtgagatcgtcactattaggctcaaatttggttaacgaaaatctgcgttaacagtttggtgctttcattgagagcctctctgaaaaagctcagaaaaaaccctcctttcttttgaagaaaaatcacctctttcatggctgaaaattcaaaaaatgttaataccccacatgaggaaagtcatcatcgtcctgggaaagagcccatgggctccagaagatctaccaacccgtagtccagacggaccacctgttcaagaggactcaatttgagggtggccctagcactcgggccacacgttctcagaggacccaacctgacgttggtcctagtacgcgaacaacacgctcgaggagaactcaacgtgggagtgaccagaaccctaggacgagggatgaagagcccaatcgtggaggtacccagcctatgggagaaaatacttatgaaacggaaaactgccacctaagacgccgtctagaagaggcgcagaggcggaacgctaaattagaacgtgatgcagccgcggccagggtggcacaggggacaaatgctcaaaatcaacttgaacttggagtgataaaattgcgaggcaggcctcgtggctcacgaactaggagacagaaaaatgcccgggaagaacaacctagggaaaatgagatatcccctgaaattagaatgatcagctagaaaccctctgaccgaaatgagaatgggaggcaactgaaaactgatgaacaagaaattcctcatgacaatgaggagggtcttgggactcaacttggagaacgtaggtcacctgcaagaaatcaccagcgttcttcccgaacccataaagcgagggcttgtacagacactaatgggggaaatacgacaaaccaaactcagggggaaagaacagagcgtgaagaagcaagtgtgacctcaagacggtcaaggacccacagtcgatcaactcgaagaggagagagtactcaacgagctaatgatcgagaaagcatgggaaccagtaaatccgcgagtcactcaaagacgaggtccatgagcaggacgaagtctatgtgtaaaaaacccgaattaaaaatttactaaattcaaaagttaattttataatattataaactttataaaaaaatggatcgggatcccgaatttcaaaacacggtttaaagtattttttactattacaaagcttactaataatatattatcactactatttttttttactaaacgataggcaactaaaatataactcaaaataattgaaagaccgaaaccctccaggttgcattgccgcgatatgtacaatcactgccgagctccatctcactgttcctccagcttagctttccctttacctacacaaggtagcaacctgatgagtcaacagactcagtaagatatgcataacatatatataaacaatgcgatatcggctttatgtttaagtcc

SEQ ID NO: 224403 - DNA, 1398 bp, Cannabis indica
aattaattattattagcatcggtgaaaaatcaaagaaaaaaagtgagggttggtttttgtgtcggtcagccagattgattgaatagttgaccgacgcaaaaacctctttttgtagtagtgttgaaataatagataattcatagtgtatctacactaagtgtatagagcgttctgtgtaatcaggagtacaattctgaatctatagtggagttaggagaaattaataagttaggaaatttactcggtaaatttcaaaatctgcttattagaagcttgattacatagatccatggttcccacattatttgagataatatcatcttgtagactcaactaattaatcttataagtcaattagaattcaaaaataaaccatgtcttatttgagaattttcgccaagtttgggcgattttgagaagacgagtttatttgttaattagtacactttgagggtctaattaataaatatatttaaactgtattttatttgataattatttataattattaaaataaaattggtatttaaataattagctgagataaattttaaaattaaaaagaacacattagtttcattggttgaaataaaatgacaaaaatctaactctaaagctcatgattgaattcaaccctagtattagatttcagcccaatactttatttaagtcaatctcatctaaatctaaccctaagtgaatacctatataaagaaagagaagagaattgaaaaagctaataaaaaatgtctcatctctctctttcttaattattttcgaaattcactgaatactctatcaaaatattgttcaaaggtcatttgagtatgaacccacattattcaagttgatactgaggccattgtggaagactgtgatgaacacaatcgaaagagaagaagatgcagattcagttcttgattatactttgcgacagaaatgaacaatggttatagaaatgaacggaaggaaacattatattcccctgcaactactgtaaagatctcttaaaaccttttgtgtttattttattgttttaagtttatgtattaggatgttagattagttataatccaacacacatgagtagtaaattaacattctagtaaaataatttctaacacttatatgtatattttaatagaccattgctattggttggcactaatagtgtctaggactacttaagagtaacgtcttgcaattagttagcgatattttttaaaatttattatattaaattatatgagatctaatatttaattgaacaaattgagatatcataacaagatccttttacatttcttattttaataatagtttcgaaatttttttagcaaataattgaagttcattacccatattttcggtgtgatagttaattatatatgagcatgc

SEQ ID NO: 224404 - DNA, 2280 bp, Cannabis indica
cacttagtgctaatactttctttggaaatacaacatatcttgttgacaaccttttagaacatagtaaaaataatttaaaatatatatatctttccttttattttgtggtttcattgccaatagaaattacaattaacaattttatatttaaaactgcagacaataattttttaatgaaaaatttacttttacatatttatttaaaatttgatattaaacattcttaggatgcgtttggaaatctaggaggaaattagaattgagtgtaatggaaggtaattacacaattttatgtttttgtttaatcatgtaattacactgtactgtataatttggggtaattgagagacttcaattacactttccaagatctcacatcccatgagagttgggtgtaattatattatataattactaaaaactttctattttaaatattatgtactgaaaattaatatttttttgttgtagtaattactaactattttgtcaaataagaaattaagaattcataagtaattactatagcgtataatccaaacatatattgtattttaatatgcagtgtaataattactatactgcgtaactactagtaattacacagttacttccaaacatactcttagtataatattattatttatattattcataatatcatttacaacatataatagaaaaaacatagtagtatttagcatttatttagtatatatataaaaattaataaagagtaactaaaattattaaaaaataaacaaacagaggtgtaataataatttataaaataaatagtaattaagttgtgagacaaacagctgacaacacaaacaaataaataataaaggaattgataaattaaatcaaggaaaaataaacattaaacaaaaattaaaattttgaaacgatggaaggcaacaatgaggagagcagcaatatatatatcttttgtagaagtagtcatgcatattctagtgtagatccaaaacgactgttatagaattgaatatcggtttcaatgtcatgatcatgttgtttcggttcttcgataaaattggttgttgttgtcgtccatgattgtcctgtttgatcttgaacatgatcactatcatctacatcatattgcagagttgtattactcactatctgtgatcttgtactttgatcttgaattagattataattcccagtagcaccattaatattattgcatccgaattcaacatctgcacacattgataagatatcaactacaaatttataaacctaaatgtataaccagctacattgtacatgtaatgtgcaattatatatatataattatgaatataataagaaatgtgatgatgtagtaaagtaaaatgatcgtctcaaatattttatcttgattgataattataaattaatataatatacctaagtttgggtagtgtggaaagatctgggtaggttgattattgaaataattaggcattatttggttcattgataaatactcttcatgatgaggcaatgatggtgcttggtaatggtggtggtattgttgttgtacatgtagttgttgttgttgctgcttaaaatagagtaccctcagcctattcacttctgctttattcttctcgaattccactgaacaatataattaatattatcaagagagtaatattattattatcatatatttaagcaagtgaaatattatataaatatgtatatatataatataccttgtccaagtaattcttgattcgtatatacagatatctgatgagtcaacttagtatgctccaattgtaaaagttgatgctcttttgtgtacaatgcaactcgaggagatagcgatgatatttggctctacatttatattaattttttttcattaaattataaatatatatctttttatctcatatgtacatatacataaagctaatcaaatagcatatatatttgattagtgtatatggttcgaagatatcttaggagcaagaagagaaataaaaattatcactgcaaaatttttcgtgcttatctttggaaagacggtgagatgctaaatggccctaaccgtgtggcttggtaagaaatttgtagtgataaaaaagtgggatgtcttggtgtcaaagatattacattatggaatctttgtgtcacaagcaaacatgtttgggctatcactaagcataaggataacttttggattaagtgaattaactctatttaacttaaaaaaagatgattggttggactatagagttccacttgatgctagttggt

SEQ ID NO: 224405 - DNA, 1134 bp, Cannabis indica
gtgttgaggataaaatgatgtgggattaaactaaggatggtgagtatacggtgaagagtggatatcgtatggctcttgaaatgaggaaggaggttgcaacttcagatgagaagctagtggtggagtggtggactaagttgtggaggttgaagattccttccaagatcaagcactttgtgtggaagttggctaatgaatggttgcctactaattcggctttggcacatagaaaggtggctattgatccgatttgtcatcgatgttcgaaaggggtaagagagactattttccatgctatatgggggtgtcgggaaaatcggggtgtttggaagcttagtggttttaaggatgctactcaaaggttcggtaaggaggatataatttctttgctcatgagaagggccaaaggtttatagtcaaactatgtttgagttctttctggtgctgtgttggcaattgtggtacattcggaatagtacaaagcatgggggtaggatcccgcggcctgctgatgttgttgaatggtgtcatacttatttgcaggaggctcggggaccatgtgcaggtggaagtggtcgggttgtgagggaaaaggcgcgttggctgcctcctccgaatgttgaagtaaaaataaatgttgacgctggtgtgaagtgtggaggggggcattcaagtttcagctgtgttattcgggatgcgggggggcagtgtttgtttgcttcggctgctgctatgccgagggagtatttaccattacatgtggagttgttggctattcaaaatggcttgcaagttgggatacaacggggactacatcgctttagtattgagtctgattgttaagctgctgtccatttaatccatgctaaggaggacggctgtcgagacattgatggcatacaaactggtattagagagttaatgttacatgtttctgttgttggtatttcttttgtgtatcgggaggccaatgaggttgcccatgctttagccaattacgctttgtttaacaaggtgagagctatgtggattggggttgttcccccttgtgcgagacttgcggtgttgcaagacttgcctaatcctttgtaattgttttgtggtattgaagactttattttcaaaaaaaaaaaa

SEQ ID NO: 224406 - DNA, 2700 bp, Cannabis indica
tattaccctaaattctcgtatttcaatgggtgtccatttaataggatttagcctgtgaacccataagccatgcaaattagacaacgatcatggaaacttaatactgctcttatggattttaaggcaacgcattagagtaaacaactataaactaatatgcttcctaacatgctttaataatcacatataatactaaagaagtatgggcttactaaaatgtgagccaagctttctctaatgaagattgtacatgtcttggcgagctttggtagacaaacctggccgatctgataccaaaattgtaacaccctaatgctaaggcacgctacagtgatttttcaattatagtgctatcttttctaatcgaagaactttctccaaaatcgtgtcaaattaaaacttttatattaaatattaaactttataactttacataatcatttaaaagtatcgggatcctatttctaaacttttatacaaaatattcaaaatataatacccatgtcgcacagtgacttcaaagtaaccaccctagatgtcccgagaccgagcactccatgttgcgctgccatgacatgtacaatctcatccaagctcgagctcactccttttcatctttcgtctttccattacctccaaataaaagtagagtatgagtcgacagactaagtaagaaaagtatacaatatataatacaataccgacttgtatcaaggtgcccatatacctatttacaaggcttaacagctgagtaagaacgttccatactagggtacaaccactataccacatacactacatacctcactgtacaagtgttggtagggtttgtttcataccctgagtatcactgagtgatattacacacacaccttgtaccttcccgtacttgtgcgggtatcaccataacatactccttaacaatacacactataccaatgcactctataccataaccgtaaaagtgttggtagtgttacaaacttataagcatcgcatatacacttaacatatacatacattggcatattcatattacacattatacacagttcttacctcctttctagattcaagtgagttggccgacctgaacgtaaagtctcatgctggatggatgccctaatcacatattagaattgggtaactcacatgtccaaaaccctaatccggaaaacccgaacctacaacccaaggttttgttataatcactaaggactacactatcttaggaaatagggaaacacctaactaaggccgtgatatggatcagaattgagaaaatgggttgtctggggaacctgccgaaactagttaatcggttttacaggtagtggtaaactggttaaccggtttgtaccagtctccccccaaaaaaccaaatattgctcaaaactcaaccaaatgctaccaaatcttccagagtacctaaacagagtatatacaacatattccaaccaataacactctgaaaagacacactgaatcacaacatgccattagagacctcagtttgagtttcaaagctcaaacttgctcaatttcatcacaacacaacaaaaccaatatccaagacctagaatcaactcaaaattagcttagaaaacaaattacacaacctttaaaccctaacaaccctaaaactaaaaatcacatacccaaaccaaacttaaaagcttcaaaagtacaaaactatggtttagggttgctagaaactatggtttttgcccctaaaacttgattatctctgaattgcttgctagaaacaccttgaatcagcaacaattcttctggtctttggctagttcgaagagagagaaagagaagagggagagagtcttcttcaattttttggtctttttcttgatttttctcatttgaataaactaaaggctgaataacaatgaattggccatctgccacttcctacaacagccacttaagccctcgtttttgaaattacaaaaatatcccttgatgcttaaattaggcaaaaaaaagtcaagggacaaaattgtcaaatttcataaccttgctcaaccccggtactcaatttcctccaacatatatcgcacaaagaaataaagttgtaaacctaccatgtgatcgtagccatccattgcattttccgttgtcgtcgagcaaaaattataaaaattgcacaattcacatataacacaaataatacacatagagtttattaaaatctttggaattgataaattataactctaatgcccatttctaataatggggccaacgattaaataaattcacaaataactacaaaaatattaataattagtgctaattgccttttctaatctatattatgaaatgctgtcattacagttgagcaattgttgaatcaaactcttgcaatattcttgcatgcaataagaacgacaagagagaaactttatagtgaaaaaattcgatgtcttgtgtggaaaaagttaaaagaacgtcgttaatgtcaatttatacttcaagaagacaatcaatttctgcaaaatcaatggtctagatatttcattagatctaatggctggggagttaaaagggccaaaaacatttatcggtaatgattttcctcaggtccattaagccttacagacaggtcttttcaaatcaccccgtcgtcaatttcacctttttctgatagacgccacctgatacatgcataatgaattaagcagc

SEQ ID NO: 224407 - DNA, 4382 bp, Cannabis indica
aaagaaaaactattagtgaagggaaggtcagtttcaaataaaatcttcgagttaagttgccttattgagtttactccctgtgtaatctgaaccgagttgactaactcaaacttatcaaggccttaagagatacaatctacaaaatcaacaggcttattattcgttgctgaacttatttcacttctgtcatgagtaaatagcatccggaaagctagaaggctatgatgcaagagtagttttaatgaaagctaaaataaataaataaatagaaaataaaactcacgttatgaggtaggtgaaatttctctggaccaattctccaagaggtatcccttcttctttggagtacctacaaaatacagtatcactcttgttacctgatacacaaagcttaaacgcgtcattgactgctgagcttgtactaaaatatgaagcaatttactagttctttcatcaaatttaataagttgcaatttatttggttgcagatttcggcagcgactttgggtgtttgacaatttaaatttgaaattattgttagaaaagtgaagtcatttctttatttagaaagttcttaatttagctttttactaaattaatgaatgatttatttttattttaattgttaattataggatagctaatattttgtggttaatacgcttagcagaaatctttaaattaaggcatttcagaaactatattttcctcttttatatgttttgttctcatttcttagagtgaattgtattttctttctgaactagtaaaatcttttcgtcattatttctattttagcaaaactaaattaaataattgtttgtactaattgttaattataggataactaaatatttagtggctaatatatttccgaaaaacctataaattatggcattgtattctctccaagattatctcatttcagaaaataacttctttactcttacatgtgttttctcctcaattttgggagaattgtgttatcttccaaatcagcgagatatttttgtcattatttccaatttaaatatctcaactctcttacagtgatatgaaagttagttgcaggttattattcacggtgaatacagaagtcagttcaagttagaagcagatcatagtcaagaaattgaccgccaaatttgaaattgaaaagtttaatagaaataatttcttggtatgaaaatgaagataaaagcaatcatgatgaaagataattgaagatctcatgattgcctttatcttcttttttcataccgagaaattattcctattgaacttctcaatttcaaactctgctgtcgatttgttgactataatttgcttctaacttgaactcacttctgtattcaccatgaacagtgacccacaaccaataactttcattctcccaacattctccccaaaattggaaataatgaagaaaaaaatttactagtttggaagaaaacaacatttctcccaaaaatcgaggagaaaacaaatgaaagagtaaagttattttttgaaatgtgataatgttggggacaataatcccttaatttatattagccacaatagtataaaccattctttaatttagttttactaaattagaaataatgaagaaaaaatttcactagtttagaagaaaatacgattctctccccaaactgagaacaaaacatataaaagagaaaaattaagctagtttctaaaatgagatgatcttagagagaatacaatgcctaatttataagtttcttctaagcgtattaaccaccaaatatctaactatcctgtaattaaaaattaatagaaaccattcattaatttagtaaatattaaagtggcgtttaattaggaggaatagaaacataaaaatatgaatgggaatagaaatgaaaaagtcattccattagaatgacattccaatactttaaaatgcaaccaaacaaaggaatgaaataaaaattgtttcatttccattccattctatttcattacctccaaccaaacataacctaaataaagaactttcttaataaagaattacctaaatatgacttcacttctgtaacagagttcagttctcatagtcactaaacagttctttgaaaatcagtaccacacattatcaaatcatgcatacatggaaaaattgctaaatttattgaaagtcaatctttctaaaggaataaaaacttatcatctttaatgtttctaagtgcataaagcggaaaaagaataaaaaaaatcagtatgctaaaaggaaagtatctgaacaaatttgattaagctatgatgtaccccatccccataatcagcaatctcacaaaggataaatacttgtgtagatttgttgattttatttcactttttatattaaaaaaaaaagatactttatatggttatatgctaaaactcatgcctgattaaacgtattctccaatttgaattcgaattgcaggcgattggaaaagaatttaatatttttaattaactaacatcatcataaatattaaactatgccagaattgtatatacctccaaggaaagtcgttttcacaaaaacgagatattccattcattgctgaaaatgtatcaatatgcacccatttttcctttgtatggttagcaagatgacctgccacaagtcttattcagcaaaaggaagcacaattcaaccaagcaataaagagaatgaacagaccacagtttgagatcatagagaatgactgttggaaaccaaagatataaagacgtgagcaagaaaagaatataataactactacaagggcttgccataaaactacagttgaaacttagctagtattcaaataaaatcaattgatgaagatcatcaaaaatgtattctactctttcagtgagaatatcagaaatagcttattattttaagctttgtggaaactaattcaatcgagaaaaggggaaaaaaatgtattaaagtgcaccatgtagagaaaattatatgttaaaatcatgtgctcaaagtcttataaatcacaagggaatgaaaatttcagataacgaaaaaaagagggagggagagagagaagttgctaatggaaaaccgcaggctcaacatctctgaaaccctcaacaagaccatggcagtatcagtgagagaagaggcataccaatttgatgcaaatttctcaaagcatgaccgctggggtaattctcataggacgccatgaaggttatagcagtacatcctagactacaaaaatgagaaataagtacatgagaaggatgcaaaatattactccataaattgaacagaataacttcatacctgactaaaagtaacccgagcatcataaaatagagtaacttccagtaactttttcccctattgttataactgtaagaagtggagaaattcatccttttgttagctgtagtatgtgttaaataaattgaacaaatgttatttgcattcgtgaccaactactgaacccacccaataaccgaaaaagccatgagcaaaatgctctttacaggtcttgaaatttgttaacttttttcatcattattatacattctcatataaatcaaatgcacaaccatgtgaaagatcttttgcagaaaacagcagcaccctgctctcgtgacctacatatcagttcttatattatcttttctttttcttccccactgcccacttcccacagaaagccagataagtgcacatttagatccatggaaggaaaaaaaaaaaagagatttataaaattattacattacaacaaaacacatcacaataaagcagcaactaattaggcaaaatgatcacatgtgcaaagaaatcaaaatatatcatatttatacatatatattgaatatcaatcaatttaaaacagattccacgtacattctattagcagcaattgcagcagataagttgaagattggaactgagctaataataaaacgaagctcctggattacaaaatttacattgttaaaaactctcaaacttaatcaaaataccaataacttcacaaattcataaactttataccttgtgagggagctttgagtaaactaaaacaaaagagaaaacaggaataatgaataacggaacccttctatcaaggaagaccccgaactgcaagagaatgcgtgtcaatttacagaagaaaaaaatggagtacggacaaagaaacaaaataactcaggttgcatacaaataagcataaattcccatattgacttgttttataatcgattcattttttggttcaactaagagacaggtggacatcatgaagtttaaggaaaccagtaaatttaacgtggaaagcattgtttagaaacaaagaacaatgtctctatcatgattcatgaaaacacttcttatagcataagatatt

SEQ ID NO: 224408 - DNA, 2115 bp, Cannabis indica
tttaagatgcgccaggcttgttgcaagcagagcttggttaaaatgaacaagagaacggaaacctaacccgccatcccgctttgacttgcagaggtttttccagctttaccagtgagtcttagggcgattattttcgttgacaccccaccaaaaattggccataatggactcgagagaatggcaagtagctgcggggaggcgaaaacacgccatcgaataggttgggatagcctgaatgacaaatttgagaagagtttcttttcctcctttagaaaaaactttattcttccagttgtgtaggtggccccagactttgttatgaagataatgaaacaattgcttttttgttcgtccaatgtgctgggggagtcccaagtatttctcaaaagacgaacggaccgggatgctcataaaatcagaaattaaggtttgatctctgagcgcgacattgggagaaaaatagagtgaagatttttgaaaattcactttctgaccggtggccctctcatacaagagtaagacttctttgatggtgttacacgagctgatagaagctttgcagaaaagaaaactatcatcagcgaacagtagatgagagattgggggggctcgtcgggctactttgaaacccacaatggcattgtttctttcttgttgatgcagaagggaggagaaaccttccgcgcacaagaggaagagataaggggaaaggggatcgccctggcgaatacctctggtaggaatgacattgccaaccactttgccgttaagattaaattgaaacgtggatgtggaaatacaggcaaagatcaaatgaatgaatcggtggggaaattggaatttccgaagaatggccacaataaatggccattcaactctgtcaaaagctttggccatatcgagtttaactgccatccaacccgatttcccttttgatttaagcttaatggagtgcgcgacctcctgggctatgatgatgttgtccgaaataagtctgccagggaggaaagcactctggttgggagagatcaaactgttgaggacgagtttaagcctattagctatcgccttcgagataatcttataaacaatattgcaaaggctaataggacggtactcagagatagaagtgggttgcttgactttagggattagagtaatgagagtggtgttcaagggagccacatcaccatttccattgagaaaacttgaggccgctttaaggacgtcaattcccactgttgaccaggtagctttgtaaaagttagagttgaatccatccgagccaggggctttgtccaggggaagttgaaaaaaatgctttttcaatttcgtccagggtaaagtcttcattcaggagagttttttctgtatcagataaataacacgagatgccttccagagctttttgcgtatccttttcaacaggttgcgaggatgagaaaagtttgtcaaagtgagattcaatctcccgagtgatatcctcctcactagaaagaactccgccatttggcaaatggagcttgtggattgtgttgatctttttccatgggaggcgtatcggtgaaaaaattttgtgttcttgtccccctgagctagccattgagtccttgcgcgttgtttccagtaagtttcctccttgtacaagagggtctcaagattggcttggaggtctttgatttttgctatagtgctctcgtcccagacgggagaagagcgggccctttccagatctttctcgatcttaggaatgtgctttttgaaattgaaatctttcttgtgattccaattgctaaggcttgtagcacatctatcgagagaagcaactagattggggatcgcatcaaggtgggtcgagggtccgatctaggattgatcaaacacatggctccaattcgagtcctttaaccaagcattttcaaaatgaaatcgttttcttctatccttctgcagggagtccggaagggggaaggtgactaattccaaggctcgatggttagaaccaaagaaacccaaatgagaaagagtggcctcagggaagatgtcagtccaagcactattagtgattccccagtctaaacgctcttggatatttctaggggcagccacattgtt

SEQ ID NO: 224409 - DNA, 2363 bp, Cannabis indica
gaatcttgccaaaaaagtaaaaggcccccccgagaccctgcctaggcacttctaaaacactatcaaaacggagcttgtgtttgaggtgtaatccacgtctagccggcaacttagtctccatgacaaacaacaacaaaggctgatgctgcttcacaagcagggagagatttcagaatgctcgaggactccctaaacctcgagcattccaactgtagagactcattgttctcggcggggccgcgtagcagcacccgctgttggctcgtcatcggacatagaaggattcacagcatcatgagaaacagccgccctggcatgcttcagcatactgcgcacagaatcttcaacttgtgaatgttcatgtgtgaaggtcgctcgggtagcaagggaaatagcaatagagatagtggggcagggttcattaataaccactcccttacttcctctgaagtgggacggatggctggtaggagagagagcaatagcttttccttttgcagcgtgggtggtaactgaatcagtcataatgggaggaggaatggaagtttgcagtgtttgtggggtaggtaatggactggaatgtggcataggcaatgtagagatgaatagggaaggttgggtacaggaagctgggacttgagtagtaagagaaacaggtgtagaagtgggagattccacatggagaaattggtcaatagcttgttgcaagtcctggtcatcagtgcgggtacgaatacgaggaaagaactcctcgaaagggatagagttagagatttcgaacgggttctttttatggggagaagatggggatgctcgaagcgtatccttatatcaggataggagggacatgaaaattatcacaacgaagcaggtacttggaacacttgttgtaggtatggtccatcaggccacagaaataacagaagttggggagattttcatacttaaaattgatccatctaggattgggaataccacgaaaacgaatagtcatccctcggcgtaatggcttggttatgtcaagcagaactcgaattcgaaggtagggaccaaagttttccattaaagaaagaaggaatatttcaatgagatcaccgacctcatcagcaatgaattgtgccaattgagggcttttccgaccaaaggggatcctatgggcttggagccagaaagggacatacctaacaaattcaagggtaggagtaggggacacgtcaggatgggtaaagaccatcagaaatttatcaaagtgccatggctgctcttcaagaacacgacgtcggtcaccatcgcattgaaaagaggccaagaacaatccagagtgacattcagagatttgggtagggaacctaagggtccaggcctcagacatcgctttctcaatccaagagggtttggcagatttgggtgacagcagtttatagaacagacagaaggagttggtatcattgggcgaacggatggaaatgtgatcaaactcatcgacaagactgtcttcatcatcaagagcagtaataggattagggtttctggaggaggatgccattgttgatagagaaaaggagaacacagtggaggtagtagacaaaggtggtgttggtggtgtggaaaggcagaagaacaaggcatataaatagacaaataaagaaatagaccatagaagatagtacctggagaagaagagccgcctcgaagaaggaaacggtgtctgattcatctcttcaatgcctgaagagactgtctggattctgagaggatgcgcaatgatggtttttggttgtgagaggaggagaaaccaagcggcggttggtttatcattacaaaatcgatctgagaaggagaggaagtctaaattgggtagaagcattaaatggtgaaaagattgagccgccagaattaaatgaaggtgtgagagagaaatggtgttgaaaagtaattgagctcgagaaattagggggagatgcataatgattagtgtgacgtaaaggaaaataaatgcaaaagacagagaaatgtaattaatgaggactgcaaattcgacaaagaaatggtttgaggtgaggaagaggggtaattaaagcaaaaagaaaatcgaatgagaactcaaacctggttgagagtggatcacagcgaaaagaaaaactcagcaaacctaacaaaggtggaaccagagcagagcctgtaggaagcttccagaagaagattataaatccataaattgatgtatacttctttttgcttttataattgaatacacaatattcttagctaatattgaatagacggcattgtttgctaacgtgtaacgtaatttttgttgattatttgtctaagattattatgtaaatagttttgtaattatg

SEQ ID NO: 224410 - DNA, 1954 bp, Cannabis indica
agaacgatcccggcggatctgccgccgagaaagcttttccggcggatgagaaaaattcgtcggagccggtaacggcgtggcagccaccggcgattgaaccgaagagtgtagagagaggaactaaaatcgttaccggattagcttctctactcaaataaaaaaaaaaagttttgcattttcatctttttgaaattttcgagataaaaaaaaatgaatacataaataataatataatataaaaacatatataaaatgaggagatcaaatattagcacacgtctcctctctctcttcgttttttttttcctttttgccccttaactcatgtatgtatatgttaagaaaagagaaaacaatctccattgtaataaaatagttagaatttgaatagcaaaacaattaaaatgttacactaacttttattttaattttttttatttacataagttcatgattgaatcttagattatcaattagattacttgataagtaaatagattagtttgaattttggggcacggaaaaaaaaaaaaaagaataaagttaaagtggagcaaccgtttgttgaaaggtgaacaaaaggaggatgagactttcttttcctaattttctattctttcacttttcgaaattcatctcatggaccatttttctctctctttctttttctttttaaaaaaatgaaaataaaaattacttcgtaatatttaataataatggaactttaagtcccagcaaaataataataatactactgaaattattttaaaaaaatgaaataataataggaaagggtaaaggtaaaggaacggtttctgattattgatatggtgacatcagaaggaaagggctcgtggcgtttcgaaagccgtgaggcagaggcaatattgaattaattaaaataataattctgcaaaaaaagaaaataataatatattaataaataaattcattagaaatgcgtgatattctcttcgtatttatttaatatttttgggagtgctgaaaatacttatttgtttttttttttattttaaataaataataataataaatataacagggatcgagatgacggtcttgaaaactccgttagaggtagattttgactgatggaaagaagaaacctaggtatatatttggagtcggtggatgtaattgagaagatctaaaatcaaacgacaatacttgtatacgacacgaaaaaatttgtgctttgggatgataaattacgacatctattgagtcaaaagcaatcttcttcattttaatttgggcacagtatactagcccggcaagatacgacgaaaccaaacaaaataatatttttacaatacagcctcagtaaactaatgtaagaattttttaattaaatttcttttcgtacttacacttaattgtttaattaaaattgttaaaattattattggtacttaatatttttttttagtatcatgccattattagtataattaaatatttggtctaatataatttaaaaaaataacttttaaaaaatattactaataagtataaaaacttatctataaaaagtattgaacagctattacctaataacaatgttcttatttaataaattttgtaaaactttgagaatttaaaaaaaaattaacatgaccaaaactattttattttacacgcgtgtaaaataaaatttttgaatcttattttcgacgtattaaaatttttataagatattttgaataactacaatatagactatcatacaaaaaaaaaaaaattagatgaaatttttttccaaaacagataaaaatatattaatatgcatactaaaattttcctaaagtcaaaatcttacctattatataaatggctatctaaccatttttgttgtgcatttaacatattattatgctttttaacagaatattctccaataaaaagttaattttaacagaaatataaattacta

SEQ ID NO: 224411 - DNA, 1547 bp, Cannabis indica
atgaaacgcaccgccgtgtacccacccgcggaggacacaaacgacatgcaaacactgttggggcagagagcatgatcagaaaagcacatccgtatctgggtcccaaaagatcgcatacggctcccatcacaagcctgcaggagaccaattacataaaccaatacattatattagtacgtacaattactcaatacacacagcgtgaaaaagtttggatgcttattaattacgtacctagagaagatacttccggacacagaggcaacaccggcgtttccgatgtcaactttggtaagattaaggttgtctcgtataatgggaacgagaggggccgctgcgaatgtagagacgaagcaggtgaagaaggaaatccaagagaggtggaaggttctcatgtggggattggccattgagaatagcttaaacactttagccttgtgttctgaatccactggcaaatcgaacttcgcagttgtatcggttgggaccatcggagaagccaccgagaaagcaaagctctgctctcttccggtgactccatgcatcgagcttccaggctctcctaaaccttcattagtgtgatcagccattattattttcttttatcactttattacaataataagttgcgctagctctagctcgctagctagctagtagcagtgcttattaggagttgttattaattattggaatgaagaaaaagtagggaagcttactctatttataatagcctcatttgcttaattaaggacagagagccgttgacaatatgtatatatataactagttcatattacatcatcatacttgtacattaaaatgtcctttgataagaatataagccaattaattctatcagagattgccttaattatagtaattatataaacaacggagaatcatccattccgccgcatctgccctcaacaagggaagagtctcgtcgtgtatcccaaaggatcattttaccttattatagactgtaactcaagcaacttgataaaattattaatagtaattatcatatgttttatgatcactcttaaatacgtttttgacaaaataagactaatttgatcatcttctctatagtacatattaagaaacatatgtatcacaaataaatgtttatgcttaaattggataccgtttaccacattgatcaccatgtttttatttattttgttctctctttcacttcattattattagattttgattatcggtatttaaggccatgattcccggccgtatatccaacctatttattggaaagtaacacatgattccatgaatatgcatgtggatacttttgttatatctataaccccaaagatatatgtgtcgtaataattcaagtctcggaccaagtcttgtatgtcctatgcagtagtagtctaccaactgatcacaattgacatatttattttgcaataatataccaaattgcacaaaaacaattataaaaaataaaaagtcaaccattattatcagtgtctaatgagatggagatgatgatgaaaatataatatatatatatatat

SEQ ID NO: 224412 - DNA, 1655 bp, Cannabis indica
acgtataacaacggaaataggcaaggtaatgggaagaagggcaaattcattagatatgccaaactgcaacctagcgaaaatgcctcaaaatttattaccttgtcaatcctaacagatgacctagagtgaatctacatgacaacatactatatggtcccgtacaagaaaccttctcccttgaagaaggatgtaagtaaaagatatgcatccaagttttgtcgttttcgtgcagactacggccacggcatgaatgaatgtaataatttaaagcgggaaattgattttttgatcagaaggaataacccacacttacagaaatatgccaaggcgaacctgaattagacggccaccaaagcagactataatcagaaccagttgatgcctccaccaatggacacgcatttacaggtcattattgggggtccacatcttgccggagactcgggcaaagcttgagaatagtatgatcgagccttacaatatgaacaaaatgaaacaatgttggccgtagaggaaagaataccaaaaataccatgcgtaggggaaccgacagtaaccttcactgaagcagatgccagccacgtccatttcccgcacaaagatcccctaattgtagaggtacaaattgcaaataagacattggcacaaactatgatagacaatggagcttcctcgaacatcctattgaaaacaacttacgagtagatgggactccaacttaatgatttgatcccctgtacccaactcgtatatggtttctccagtcagagcgttgtacctctgggattaacccatctacccctcactgatgggcatgctctgaggagcataactatgatggcacaattattgacaattgatgtttcatcaacttttaatatcatgttaggccgacttaccctatgtgacttgaaagttgttgcatcagtgttccccctatgcgtcaagttcccaacaaagaatggggtggggtgcctcagaggaaactaaagaattacacgggaattctataacctccccctaactaaggtgaaaaaggaaagtacctccaactagggtttgggcaagggcaaaagtattgcccaatatgaagttgcccaaggggggacgaggacatggatccctgactttaggagtcaaatacaaatgtagggctggtaaaagaactagaagaagtgaaaatcgacccgattatctcgaccaagaaactcaaaatttttaagggtttgttgctcgaaataaaattactttaataaaaattttgatagcaaatctagaaaatttttcatggtcacatgaggatatgatcggtattgatcccactataatgtctcgtgccctaaacatttgtcccatccagcaaaagagaagactactggacaaagaacgggcgcaagcacttaaagaagaggtagaacgactgtgtgaaaatgggttcatcattgaagctttctacataacttgggtagctaaccccgtactagtacccaagcctagcaaaaaatggctagtatgaattgattttaccaacctcaacaaggcatgccccaagtactagtttccacttcaaataatcgatcagcttctggatgcgatagccgggcatgaaatcctaagcttcatggatgcctctttggggtataatgaaatcaaaa

SEQ ID NO: 224413 - DNA, 4667 bp, Cannabis indica
taaaatactctcacaaaatactattcaaaattactactcaaaatacttctccactagtcgttgatactgtttgcatagtccataatccctcagtaagttggtgccatttgttggggtgtcctttgctacaatgaatgacaaaatgtgattattaatgcacaaatagttggaaacatttaaaatgaatgattatttgagaggagtttgatattgtaccattgttgctgagttgcttggttgcgaagaaggtgtgacagttgttgaacttactgattgatgaggtgtaggatcagtatttctagcgtagtgtccagggtcttcaagttgtgtgtcattaacctatgagtatcaataaacattaaaagtaaattagtataaacacacaccaaagacagatatgcaatgtaaaacaagataaatttcattgatgtcaacaatataagacctttaaacatgaagtgtagaccacaaaatacatgtaatttaagttttttgaataatttaacacaaatgtcacagatgtccaaaaactgccaatgttcaaaactataataaacataaccactgctgcaaatgaccatatatctatagagcttcgaaaaccgacaaacaattaatttgaacaaagaatgtttcatattttgtaaatagctaaacggttaggacatacttatggcaaattatttttttctagttttatttcctaaccaatgcattaaaaagggctcaatgattccaccatagagcttcagaactaaatacaatatggactctacataaaaagacaattatataaactctcataaactaccacaattatcagtcaattaccacaattttattatatctatgtttgtaccctctagaaaacctattacttaaattacaactcaaagctaatttttctaagttataaaattagtattagctgacatattacataatcaaaaccaaggaatttagcaaaaacaaaaagactaaaaatgtcttcaatgacaaatccaaaataagacaagtttagcatagaactccttttttacaatatgttgggtaaattgcttaatggtattatatattaaacatatttaaccaacttaatatgtatttaacaagtgttgcaccaataactaaaacagagaagaaaacaggaaatacaagacctaattgcaaaactagacctagttttccctattattttccattaatacgtttagacctttttggggtattggtgtcaacctgaaaatgatccaaaactatttaaaaaaaaactcaaatacatttacttcttgtgagtttgagtcttgttatgtgtctgacttattttgatactatatattgctggcaaaagtaaacgtggattatatattgcagggtctaaaactaaaaatccagttcttatcaatgacatagagctctccacataatgaatacactacccaaaagtcagtgaataataaactacataaatccacagtaactcacagaccccttagacccatcccccaatagattccaaaaattattctctatctaaccatgtgcaatttgaccatacaaacagagaaattaccaaaaaaaaaacctcaactacttcctataaagcttaaaattattctacacaaatacccacatatgagaccacttttcatattcagttgaaatgtaccaaaaaaaaaacaaaaaaaatacaaacttaccataaaatggaggttcgattctctgcttagtggggaacctgaaccccttcttctttgacttggccaagcttttctttcccatgagtatttcagtccaccaaatttcttcttcaccaccaccggtcgcccctaacgaaccaggcctgcaaccaccgtcacgtcagtcacagacctccaccatcaaccaccgtctgaattgcctaaaaaccttcgaccccaccagccaccttcgacccccagagcctcatgatttttttttgaaccgtctgaaaatttttgaccaccaccagccaccttcgaccgccaccagccaccttcgatcagccctagccctcttcttctcaactcacggtgtaaaaatggtacattttcaattttttttaaataggagttgaacaacccatttaattttccaactcacgttttattttaattttttagataatttttatttattaatatttttggaataatttgtaatttgataattaaattgtaatgccatgtcattacataatttctctacatgaaaaatgccacatcatcagttttaaaccaaagtgaaaaggagagtaacaaaaggatgaaatttaattagtttaaatagtttgaggagtatttttaacaagcagaatattataagggataaaatttggtagggtaaaaagttcggggagcaaaaatactatttattcaaaaccatccaaaattgccaaacctaaaaaccaccaaaaactgccaaaaaccgcacggttgattttatacgcttatagtttctaaacggtcggttataaaattgtaaaaactgaccataactgactcattttcacccctagttgcagatcttcagactgagaatgggaatttggatctctagaagcttcactacttgtttgatcaagggaccattgctgccattttaaagggggaaaaccttctggtaggggaagtgattcttaggtttggactaaagaaagtagtggcaagttctcttgcaagtccgcttacttcaggccctctaatgggctcctcactatgaggtctcgccctccctctagaataattttggaacagtaaattcttaaagcatcacaagatcatgtggtggagtatcctttcaagcgcgcttctagcccgctccatccgagcaagagatttcttattgacaacccccttttccctatcagtgggaatgaggatgaaactatggagcaccttttctttcagtgcaatttggcatattatttatggaggtcatctccgtggggtatcttcctatcttaggcactggtattcatatgtgggactaggttaagtttatctggagcttaaaagataagagcatcgatgtaaatgaggtatttatgtatgtgtccattgtagcgaacattgtttggcgggctcgaaatgataaggttcataataataatttgggtaacattaaatattatattgactctatttcttgttgttacacaaattatagagattctatcattcttactcactctcgactcgtctggatgtttggcgtccctctctgcttgactagatcaaattgaattatgatgtttgagtggggatggagaacatgtatattgttgttgttgttgttagagatcatcagggtacgatgtgttgggtagttacatcaagactaaactttacaaatgttttgtgtggagaggttgttgcttgttgtttggctttggagacaacggctgaggagtaaaattttgttattgtagaaagtgattctaaggtggtgatcaactctcacaatggagtaaatttcaaatgggagattgaaaactaggagtgttcatctgatccaatctacactattttactcatagtgcatccaatccgcacttggtgcgaattttatattttgaatccaatcaaattcatatagcaaataaaatccaatctgcaaaagtacaaattggatcagttattttggattggtaactttttaaaagtgagttatttaatattttattaaaaaaaatattttttttcacataactaacgacaaaataaaacaaattaatgttgtttcatgtctctaacaataaattaaaataataaataacaaattcaaaccaagaagaaaaaaattgtatgtataaagaaaagtttaactttgttttagattatattttccttataaatacaaatagaatctattatattttaaatatatttgtattgtatatattaaattttttaaattgctattttttaaaattaagatattagttgtatatataatttttttttaaaatatatctaaatatgtgtggattgaactgaatcagtttcttttacatgtcaataaacatccaatccgcacaagtgcgaattttaaatttttccaatccaatccaatctgcacaagtatagatgtttgcattttacagattagattagattgtgcagattgaattgggtattttatgaacacccatagtctttatcgatgtcagattgtactggctgtactggcggtgttttggacgcgtgtcattccagggtcgttctcatttaaattaccctatccctagtcattggatcgttttgcacggtacactaagacatgcatgctctgtatggtagcgtggcgtgggagacaacctctgacatcgtacataggaaaggtccaatcggtgggcccgtagtttggcatgtgcggaccgagcttctgcaggttaagagagtacccctaatcaatgtatccgaaaggaaggtccatatcctttgcaggaatatagggtcccatattttggaatggaaagagtagccaaaatgcagacgttttccttgtggcccgcattcggggaaacttctctcgcggaggctggttctgcgaagctggggcctctatcctttgaaatcgcggagcgaggactttaggcggcttaatgactccatagccttttctgattaatttccacgtgtgatgtt

SEQ ID NO: 224414 - DNA, 1785 bp, Cannabis indica
tcttgatcgtaagttagtcttctgtggggtaggggttaaaactccatgggcaacattgcctcataacaataagccatggaaaatggtggcttcccagttgtcatcctttctgttgttctgtacaaccacaatacttcttatagttcctttgacgaattccctttagcttctttgagttgttttttcatggtgtgtttgagtgtcttatggacttctttgagttacctatttatttgagggtgtgctactatgaagaaactcttgatgattccatgtgtcgtatagaagtttttgaacatctggctatggaactgcttaccattgtcctagagaatcttctacagaagtgcatacaggcatgtggcgttcttgactacgaaatctagtaccttattagatgttattgttgctaaaggctcgcattctgtccatttgatgaagtaatttaccacgagcattgcatattgtactccaccttttcctttgggaaaccgtccgataaagtctattccccatatggaaaaaggccatagacttttcatctatattaactcatttggggattctcaaggaatcttcaaaaatctctagcagttgtcccacttctttacaggggcaattgaatctccaccataataggccaaaaatatccttgcgttattattttcttttataaacttgtcaacttctcatctccaacgtaactaccataaaatccttcatgtacttcagacaggagtcgtgcagctactcttttcgttacacatcttaataatggcatggagaagccgcttctgtacattacaccttccactatgatgtatcgtgcatcttttctcatcatcaattgagcctcgtttctattgcttagaacttctcaagtgttgagataagctattatgggagtcttttagtttggtgcaatatctatcatttatatgtttcctacacacaagtgataataggtttttataagaatttaagaggaactatattggccttatctgtcaccgtgctagcatcagcaattctattttcttcccttcaaattttcttgaatgtttaacccttgaattgtgcgagtagctcctggatcttgctgagacaagccatcattttttatcgtgagctgtgtactcccccaagacttaatttaccaccaacaatgaatcactatagacgtcaatgtaatcaacgtgtacctctcgagcaagctttagtcaatctattagtgcttcatactctactttgttgttagaggctttcaacccaaatttgattgctcattgcagagcttgtcccccaggtgtgatgagagtaactcatgcacgagaaagctagtcggtggttgatccatctggtagggactcctgttctgtgtttggcccgggaccatcttttgaactatctgcttctttacatgtgccttctaccatgaagtgtaccaaagcatgcccttttatagctgtgtggggttgaaagattatttcgtactaacccaattctatagcccacttgagtaaccatccagaagcattaggcttctgaaaaacttggtacaagggtttgtgagtatgaacccaaatatgatgagcttggaaatagggccttaactttcttttggctaagatcgtgtagcaagttagcttctaaagtaaaggataccaaccttctacctcaaccagtcctttgttgatatagtacactgaatgctagatattgttctcttctcttatcagcacggcgctaatagcgtattcagtgactgccagatgtatccctaat

SEQ ID NO: 224415 - DNA, 1663 bp, Cannabis indica
aaataattggttttatatagtgacattgtgatttagagtagttatagagattctgacttcatagaattattcttgggtagctatgagactagtttcgatgtttacttgttgaatttgaggtgattttgagatagaaattgagtttgaaacttttaaagcttaagtccgagctttaatgacattttccgtttaatgattcgcttttaatttcagttacattgggactatattatatatggtatatatgtgtcttgtgggtttggaatgatctgaatatgtttcggtagtgttccagtgagtgcaaaatttaagattttcgtgccagaccatttttggaaagtcttagggaatcagaaatcgtttttttatcataactttttacttgggcgtccgtttttggcatagttttggcatgtattataaacaagacacaaatgtgtcttgaaaaataatacataagctaaacttatgaatagaggattaactattcatatgagcaatcaaagaatattcaaaatagttccaaaggtgaattattcaaaatattataagtttgctctaaaaaagtgtgtgtagtaaattatcaactgctcgcgtataacaaggcagattagaactgctcgcataaaacaaggaaaattaaaaattgctcgtaaaagatatggtacattattatctacttagaaaatgacattggggatacatgcaaatcaaagtatcttaagctaaattgagatacaaatgcttagattgtaaaataaaacgcaataaacgaacatatttaactcaaaagcaagatgtgaggcataaaaagtaaaaatatataaataggcaaagttggccatccaattatgcaaaagtttttacaaagtgccacaagggtcaataattgtctcaacctaatggctatttttctaaataaataataataaccaagtctatatggttggagacttggatacttcttcttcttcttcttcttcttcttcttcttcttcttcttcttcttcttccttggcatccatagcttcatctatcttagtctgctcgcaataagccagcatctctgcgacaccactctccaagaagcttaaatctatattgggattggccagccaagctctatagatagaacgttttgcaactatattgcacctatctttggcattggcctcagtgccttcaagttttttattggcttcgttaagctcctctaacctttttgtgggattcttggtgattcttggcttctttttaagaatttccaagctcagccttgagatctctcttctgctcctgggcttccttggtcaattggatgctctctttttgggcatcagtccattgctttgcaataaccttgcgttgttcaatggatttacgaagctcgaattccaactgtttgactttctgaaggcctctttggtgtgccaagtgagacagcagagatgcctacagtaaaggtaagataattaaggaagagcatataaattaataaaagaagaaagggactaaccgcgagactgagattcaagctcctctcagacaactcttcaaagttgccattattgataaaatcccaaccaccctgttggaaggattcgtaatgacgctaacaagaggtactgcgagcaagcctacgagccagtgatacctgcatcac

SEQ ID NO: 224416 - DNA, 1401 bp, Cannabis indica
gaagcattggaacttcaacaagatctatcatacgaggagcaactagtgcaagtactagacacaagagagaaagtctagagaaacaagacaattgcactggtcaaggtattatggaggaacagtaaagttgaataggcaacttgggaactagagacggatatgcgacagaaatatctgaagttgttcaggtaaattaggaggggataattgtaataccctaagttttaataacggaattagtaaccctaactaggttaattaagtgtaaacgagaaattacattattatatgatttaattggtgaaattattatgagttatttcattttaagacccccattgatgtgtcaggggtatttttgtaattttaacccgagaagagtaaatcgtaattttatggtagattgtgctcatagactatataattatatagtatgtttattctaactttctacagatatttctgacaagtttgcacgatagtcacaatcgggtattttaccctgaactggattcggggcccaaaatacattttcgagatttagttatgaattttatatgttaaatgggaaaatatgatgtatgtgattaatgtgtgtgagtggaaatggcataatgttcctttaatgtgaatatgcttatcagtgtgtcttaggggcaatttggtcatttgactaaataatgcattattcaacaaaatctgattttggcaaaattagaaaacacttttctgagttttgcttctccctaaccgcctctctctcaccctctccatttttatatttcaaaataattttggaaggaaaagcttggaattttgggtgtgactttgtgctagttcttgcttggagcttgaggaatttgtggtaaagatttttaatttctttttcttatgttaattctagtatttgaagcttcataattatgtttttggaggttcttgatattctttgtttgtggatgcatgattattaaaattgagggaattttggtgaatattgtatgatagtgttattaggtctttggttgattcatccttgttgttttgggaggctttgaaatgttgtgttgatgcctaaattctggaaatgggtttgaatttctaggttaagctttaaagcttagagtttcaaggcttgtgaaataatgtgtaatattattatagtgtagcatgctgtgggtatgttttggctttgatcttgagctttgttttaggcttaagttcttgctaatgttggataaggatggtgtggaatagaacttgaggttaggagtggttttggttgagttttggtttgaaattggttgatttttgaagttataaaaaattggaaattttggggttttagagcccgtcgccacggcgagggccttggtcgctgcggcgaggcccttgttttcc

SEQ ID NO: 224417 - DNA, 1916 bp, Cannabis indica
gttagagttgtctctctcgtcgagataacgcttttagggcatagggcaattcttgtttctaccctcggcgttttctcctcttctttctcctttttttttactgtcgctgcctttgggattttcgcacccgatgtttgttaagggaagtcctatggagtttccttatttggcaagcatccggagggggactctttccagcggttaggggacccccattcccttttttaacattagggtttgttttggggcctaactgctcgatttcttattttttcagaaacaatgtctgcccctacctccgggacgaaatcttctaagaagggggcagccatcttggccactttggaggaagttatgaagggccctgttgcccaggagaactatacttctcgtgccaatggctgggaagtggatgagctccgttccaccttggtctgtgcccatcaactcgagaagatcgtaaccgtggcaggcatcaaaccatctgcgtctggggtctttcaccgcttgcctcgagacgacccaatcacaactatggggggttcggagcttggagccaaacccacctcatgtccggggccattctccctcttcaagactactttatcaattttcttatttttgttggcctcgcgccttatcaaataattccacaagcttaacgtctgctctcaggcttgtttattttttacgttgccggaggttgggcttcgcttagcccggctaaaattttgtatttttacgaacttgtttctgtcccctagaagagggacaagtttaaagacggttttttcaccctccgggcccatcctttaaatgagggtccggtctcttttaatcatcaaaagaatgtaaaggagtaccgccatcgctttttcttttcttctggattccaagccgtggatcgcccggagcttctcacgaagtgggttaggattccccctcttttctacactgctcctacccggctgtttctccaacacgccaagaccttctccacttatgacaaaaaagatctcaacgtgggagacttggtcatgacggaaaactgccggatggccaaactgatctccgggagccagtcggtagatgacttcaatctctcaaaggttctctgccctaacatccgcaccccgcccgcagagaaagcgctccgggtggagattatagcctcggtagaggaccggtaccaaaagtacctctttaggagggaacaggagctagcttatatcaaagcctaggctgccaccaggaggtccgttcgcttggaagcaggcacggatcggatgccttccaggcctatgtctttggtcctggttcccaatactggggctcctgatgccagcacatccagctccggtaagtctcctataaaggtctatcgtgtcccttcagtccaagagtattcccggtataggcctataaagttcgatgagtgccttcttaagtttaggatgccccccactcggtggggggataatgccaaggccttttacttttcacatttaggtcatttcttaggccggtcccggatgggtttcggacctcttgcacccatccctctggatcacttcgcttacttgtcttctagctggtttctcccttcggacagctttcttggggatgatgaagctagcattgtagttcaagactttgctagggctgagttagatagtcggggtaggactagctttattgttttgtttttcaggtgtatgctttcttattgccattctaacattttgtttatttctttttgaagcagccaggccaatggaagaccctttggccactctagccgagacctacagctcggacctttctcttcctccagcacctgcccagacggtgaccccggggaggtcatcttccaatgccccccttagcataattgtcttgatcgacgaggatgggga

SEQ ID NO: 224418 - DNA, 1528 bp, Cannabis indica
gattttttttttttttttgagaaattaacattatattaatttgaaaatcaaattacataacagccatagaggaggtggaagttcctccaattaaatacatctcgaatccaccgtaagagcaaacttagccaacaagtgagcttcgttgttagcagatctataaacatgagagatctgtgctcgtgggaaatcggataacagaaaagtaacatctttaagtatagtataaaaagctgacagacatttagctgaagactttaatccattaacaaccaataatgagtcagtctcaattagatcaacagtcaggcaatgagacaccagcaatttgagactccaagccacagccaacgcttccatttcttcaggtttgatacaccctttaatggatttatccattgcagcaatgacatcaccattagagttacaaagtagagcaccaagtccatacataccagaagaaatattgacagcagcatctgtatttaatttaagcctacccgatggtggagcaagccatttaggcttagttggaggcaccaaagtatgttgtgaagttgcagcaacaggaacctgagaacttgaacaaacagagtcttgctgatgggtagatgaactcttagtcggagcatgcctgaagtcagataggtaattgccagcaaagtccaaaatttgagaggcagacttgggagttttagcatgagtttttgtattcctttccgtctaaatgcaccaaagaagtgtaatataatgttcaaccttatcagtcggaagttgagacgaaacatagattaaaaattcaaagaaggaacaggtcttcgacatatgccaattaattgttgaatcccaacttttccagacttgtttagcacgagtacaccagaaaagtgcatcgttaatggtctccaaactatgcttacagagaggacattgaggagatgctgcaatatgtcgatgctgaagagttgcatcagtaggtagagcttcatggaatgcacgccaagcaaaaatacgaattttagaaggtaattttagagcctagaaagtctgccactaattttcagaagtatgggagctgcttggatgtgagaaatcaggttcatctgaagccaatttatagccactctttaccgtgtagatcccagttgtagtgtagtgccatgataaaacatcttcacaagaaaacaagctcaaagggatagaaagaattctatcaatatcaggttgacagaaattggattgaagcttgtcaatatcccattgtctcagatcagtaataagatcagcaaccttaatatttggatcatttccaaaaaagaccagagccataaaatttgaagggccttggatccaaggttgtgtgttgcagaaaacatcagtacccgtaccaattctccatctcaaccctttcagtagtaattcctttccccaaataattgatcgacaagtgagagacaaagaagaaccaacagtagcatcaaggaaattgccattcgaaaagtatttattcttgagaactctagcaaga

SEQ ID NO: 224419 - DNA, 1610 bp, Cannabis indica
cctccgttcagcacgtgaatttttattcagattgaccgacacacttgaatcaagaaacgaagtaagactagcatagaatgtatatgtatttgtgtatgtgtgttatatgcatgttgtttatatgattcatatgctatcaacactattacagtagtggtattgagtgcattgatacaacatatgatgtttaagggtacaatctggtgttaccaacactagtacagttaggtacgtggtgcatgtggtataacactcagtggtacttgggatacaattcaaaccctaccaacactagtacagtagcgctacgtagtgcatttggtatagaggtcgtacctttattaagaacattcttaatcatctgttaaaccttgtgtataggtgtgtgagcgcctagatacaagttggggattatgctatatgcttttcttactgagtttgtcgactcacagttattacttgcatgtgtaagtaaaggaaaggccaaggctaaacaacaatgagtttggagctcaaggatgattgtacatgtcaagatggtacgaactagagagttcggtctcgggatgacttaggcttattttgtagtcattgtgcgacaaggttgtaaggtttatttgatcatgtaaataagtttaaaagtgggatcctgaccttttttttaaaatatatttataaaagtttaatgttaatcaaaatttgtaatttatcacgactttcgagaaaatcttttgattagcaaaggagtgcaaagtaattaaaagatcactgtagcatgcctaatcattaggactttacaccaactttctacaatggtaacaaccatttggatctttaggtccctttgttggagaccttcttcttccattaccggggcctttatttggttctcaactatggcttgtacttctgtaatgcttcttgtatttgttctttccttgactgtaatttgattcaccatttgaggagcttgttctttctttcttcatttcaagatccttagatttgagagctaaaataacctcttacaaggtgattgatgttctgccatgtttgatagcagtcttgacttccttgtatgtttttgatgaggaattcaatatgatgatggcctaattctcatttctcaaagcttcattttctctcgagtttaaagctcgatgtgaattctcaaaaattcatcaagattctattttaaggacatggaaggactcatcttgaagccaaagatcattttcttcatatagatcttattggtgagtgatttctattagaaattttcttccaatctcttccacattttagctagcgaatcttccttatctaccaatcgaatgtctgaatctgaaagattgaagataatgaatcttgtggctgtttccaagagttctttttttctaaatctttgtaagatcttctgcccactattaaaaaaactagtttttcctaacatttttaaacagtcaggtaaagtattcctctcggtttctataatcgccacctatttgattgtcgcaaaacgagtggaatagacgacagtttgaaaccgtcaccaatcaagcattttttactgtttaaaaccgtcggctatagtcgatactataggcgac

SEQ ID NO: 224420 - DNA, 2222 bp, Cannabis indica
tgggcaattggctcagctacatggcaagcataatttggtgtcttattcaatctatggttgttccgaccggattattctcgtaatttggctcttcaacaccggtagtttgcatttgcgggcagctgggtgcagtctccactggatgctgcgacatcatgggaggtaagcctgttgcaattccatgctacaaaacaccaccaaacatcatgatgttatacactctatcacaatttgttttcttctttgtttagattgatcaagtactagacgtgagtaccttgttaataggagaaggaatcaatgaggaaggtgacattaaggctgagaggagttcagtagttgtatagttatgatgccaagatgttaacccttcacttgtctcatttcccattgggcatcctcccacgttgcatgtatcaacgtttagattggtcccgtgaggaacaggaatttcgtatattgaagaagattcaggtctgaaattatatttttgttgaataaaaactttattgattagtacgtatgtagtattttctaaaaaggtattacattcttgataaaaatgcataccgtggagttgggtggacataagatgattcggagccaacacaaatttggtttggattttgtagactatcgtttggtaaccagttaccaacttcattctcaaaagaggtgggaaccccctcttgtgcttcaaagtatacctaaataaaagtcaaataaaaagaaatcagacacacatatattgtctaagaataccgtatagaaaactgagataaaacaagaagctttatggtggactacctgtacacttgatggatcaaaagttgaaaaatggttacttaataaatctttctgcgaaaaaaaaaggtatttatataataatattaaggaatatatcatacataccaaataataataactgaaaacaaaatgtgttacctttctttctgttacacgtgataatgtatccaagaggttgttctcacacgattcaagctcctcaatagatgtaatggacaaggcgtctggctcaaaaatcctttaataaattaaagtagtttaaaactcaagaaaatacaatcactcaactttttatttttattttatttcatttagtaggggtataacttttaggtacttttttttttgtttatttttcaaaaagttccggttcttatttttctttgcattttatattaattgagaatcaaaagtcagttcgtttatcaacttaaaaacaaagtgtaaatttgatgagagcatacaatttgtagccaaagacgtacctcagttgttgctcaaccatttgaacttgatgttgtaaatttctagtttctagttgtagttcctatatagggcacacgtataatactattaatccttcataatttatataaatatatatatatttacataaacaccattaatatatataaaaataaatatatgtatgtatctattcatcaagataaaaatattcttcaatcggcatacacattaattaagaaaatagtatatatgttacctcaaggtttgaattaactgctgtaggactgcatatacataataaaataaataaataaattaaagtgagtagagttaaaatatggaaaaaaaaaaaggactattaatattgactaatttgaattttatattaaatatgtttctaggtcattagattattagatttaaggatttatgtgtaattttattaaaaaagtctaaaaattttgagagtacaatttgttacatattaaagttcaagatgtatgatttgataaatatcaaaatttaaggacacaatttagtatatggacaatcgccgcattagtgaaattgaataaaattagataaaaatttttaaatttaataatttcaatagttcaagaaaattttaacaacttaaaagatttatgacataatttaatacatataaaagtttaaagataaaaatggtaattagcctaacacatgatacaaaaatatttagagcattcaaaaaagagaataaaaaaaagagagagtactttgcaatttgaagagcaatatcgctttccatcttgagtgtcttcaaggtgccgagtaaaaactgtttgtttttatttaaaaacaattgaattaatcaaattataattattttgtagaatgatcttcatcgccatgcaatacctaaagtcatgtatatatctactacctccttatttcgtaacaacccc

SEQ ID NO: 224421 - DNA, 2298 bp, Cannabis indica
attaaaccttctattttgttaaatgacaaaatgaatcttgtattttttaaaattgtacaaataggaccctgaactgattttttgtcaaaataaaacttaataataatgtaatctaaatatgttatgacaaaactggttatattttctgtatctatttgtgttagaaattatcttaaagttggttttaattaaaaaataaaattgttgaaaattattaagctaagggtcttatttttaccattttagaaaatatatggtctattttgtcatttaataaaattgaaggtctaattgataatttttgtaaaacacagagtccaaaataatatttactctattattacagtatctccaaccatacttcaatcatataaaaaatgactctatataataaaaaatagataaggagctctttaaatgtaatagtttcctacttttttgctaaacttttttaataatattctaataaaaaacactattacttttcattatttataaattaattttatttgaaaaatttaaatataaaatactattaaaataacaagaggtatatgttattaacttatattttatgttttgatttaatgcatacacatctagagatctattggtctatggtacaatgataatcaaataatttgaaactcttttgttgcgtacctaatttagtaccataaaactaacaattggtatcagagcagttccatgaatgtatgtacattaaatattgtgtgggttttattcaattatatatatgatatgtatgtgaatagatggttacactattgtgaatgtatgagaggtgatgaatcgttaattatatagtataattgggtgtaggtgtcgtaattatttttcttaaaaaataatgtaagccattgtgggtgtaggaatttttaatgtaattttaattttatgaaaattaatttatacataaattatatacctctgtaatgtacattgcatgtgagctcaatttctaaacttaaaatccaaccatgcacgttaaaatcacatgcatgtgagctcgagaatttattccctgaccatgcacgatgataccattgcctcaggtaccgtgctcgtgtaaaaaatccatgcatgcgatgcatgcgtgtgggacgtgagtcctttgaggagcaaggtggttcgacctcatttaccatgactgtcacagtacaaggaccttcggtcctttcttctctgacgtcggccaaccatgaaagttgatcgcaccaagggactatagtccttacgattgacatcgaccgaggacaacctaatggtccgaccactagtcgacgacaaaaggaccatcgaggtctttgttttgtggctcgggcgtagcatgcaagggacatgcaatgtcccttccccatgcatggtgagactcgactgcgtcttttcgggtcgtgtgtgaccgcgactgctcctcatcgtggcctccatggccatcataagccatggtggctgtcaaagctgctagccacgatggtccatggaggtggtcagccctattctattgacacgaacctaattatatatatatatgtattcggttatgtaaatatattatataatgtatatagctatatatagtatataaaataattaattattattttgggatatttatttgaacttgaattccaaattaatatcatagttattatttaaaaatcaaatttaaattgataattatcttaattattaaatattaaataatgaaattgttttattattttttaataattaagataaaataatacaattttgtaggatatttatttttaaattaaataaatataaataattttaggtttgaaattcaaattcaaatctataaccatattaagataaaatctgtcttaaccctaattaaaataataaatattattattttatgataaaactaatatgataataaagttatctaaaataaatagtttatttaagaataaattaattaaatttttttttaatttttttgttgattataaaattatcttaaataaatagtttatttaagattaaattaattaaaattattttaattaatttagagggtttataaaggtgttttaaataaaagtttattgaataataattaattaaaaatattttaattgattttgaggcttacgactgcaatgatcgcatttttagaatatggattagtaaagataattagcgttaatcattcacatttttataattatttatgaatttatttaattgtagatttcattattagaaataggtattagattataatttctcaattccggagatttt

SEQ ID NO: 224422 - DNA, 1488 bp, Cannabis indica
tgaatattcagaataccaccaaactttaaacagtccagtgatataccttgagtaacattgctcttcttttgaagtggctgaaatagtgattaataactgagttatagtcatcaataatttcaccattcctgacaaaagtagttattctattcttaaactttctctttttcagcaaagcatggaaaaaaaatgagaaatttcatctccaaattgtaaccaagtaactttactgagttgttgaacatagcttgcatatttcaatttggctagattaaactcctggttctttaaactttcctgctgttgcagcagcaaacaagaagggctattagtaagatttccttgagacaagctgagtttctctttagcctcttgaaacatagcaggaatttaccccgaaacatttcaaaaattagccttaagaacatgttttagcttgtataatttgcagatgatgcctccaagacctcttttatctgtaggtaagtaccatttctctaaaactttggctttgtagttactgttaagcatccaccaattaaaaaacttcaaaaggtttgacaccaacattacaaacatcattattttttattatgcagtaactacggtcagaaatatcatcccacttacaaatagcctttgtattggataaatgatcacaccagagttcactcacgaaaactctgtctagctttgaatggatcctatttcctacttcatgtttgttggtctaggtgaagctagaaccggagtacttaagctcttccacttgaccttgagccaaccaattttgagcatccagaacgtcaatagccgtgatttgtctcccccaactctgtcattataactgaacatagcattgaaatcgccaaaaacaagccaaggatgactcaaacatgcacccaaaaccaaccaacttttcccagagaattttactgaccgtagcagaattagctttcaaaataataaaaagttatataaaataattggtatataaaaatggtagcttattatattacatgacaacttattaatttcaaaaatatattttaaggttacctaaatgtattttaaattataatctaccataatataactttaaaataactaattaatcattaagatgtatacaaataagttttagaggtaaccgaaatgtatctcaaattgtatgatataaaaataaatttttttatataaaggtaactaattagtttcttatcaaccctattagtaaccaaaaagttacttttaaaaatacaagaaaaaaaattaaaaaaaaaaatacagaaaaagtaagaaaacttcagctgtggctgacgtgatacacccgtaatagtagtaacgttactattgtaaattaggtacaaaaaaaatatattgttgtaaactttactaaaaacagaagaaaaaaaaattatagattgttaaaagacaacatataatatagttggagccctaactttcaaaaactagaaaatagaaaaa

SEQ ID NO: 224423 - DNA, 1483 bp, Cannabis indica
ctccactcctcctttgcctttgggtaattgtccgatcaggtcaagttccccaaatggcaaagggccacagactttgcatctgagttaactcgttgggcagagcttgaggtatctttgagaatctctagcatttgtcacatttcttaacataggcctttgaatctttgatcattgttggccagaaataaccttgccttagaattttctcaaataaactttgcccggcagcatgatttccataaaatctgtcgtgcacttcagataggagtcgttcagcttcttcttgagtaacacatctaagcaacgacatagagaatcctcttctatacataattctctctactaggatatactgtgcaaccttccttctcatctttcaagcttcattctaattatctaaagttccccagtattgaggtaggtgactatcggtgtcattcagtttgggaaagtgtcaatcatttcgatctctttcgtgctagtgattctaggctcttcgaggaactggataggaaccaagttcgccttatcacttacattgctgcttgccaatcaagctaacgcgtctacagttgtgttttcttcccttagaatttgtctgagaccgtagcttttaaactgtatgagcaggtcatgtatcttgctcagatatgatatcatcttttctccccaagcttcgtattctccggatacttgatttaccaccaactgtgaatcactgcagattttaatgtgctcagctctcatctgccgggccaactttaggccaacgattagagcttcatactcgacttcgttattagatgctttgaatccaaacttgactgcaacatgcaagtgttgccccctaggcatgacaagggcaattcctacaccaggtagctgatctgtagccgacccgtctaagtgtagtttccaagtcagcttatcttcactgttatttggcggaggtgtttgtaccagctcggggttgctttctggtacgctttcttctttgcctgtacattctactataaagtctgctaaggcctggcctttgattgctgtttgggattggaaagtaatttcatactaacccaactccaccgcccacttgagtagccgtccagaggcgttcgacttttgtaatatttggcgtaatggttggtctatgtgcacccgaacattgaaaatagggccttaactttcttcttgctagaataaggcagtaagcgagtttttctatcaatgggtatcggccttcggcctcagtgagcctttgactgatgtaatagactgggtattatatgttgttctcttctctgattagcgcggcgctcacagcgtgctccgtgacaactaagtatattccaagctcttctctgtctagaggttttgagagtacaggaggaattgcaagttgtgcttttagctcttggaaagctttttcacattcctccgtccactcaaactgcttgtttcctcgcaggatattgaaagaatg

SEQ ID NO: 224424 - DNA, 4251 bp, Cannabis indica
tacgtttaaaaatcacgtaatatgcctaaattagttagggtgttacaggcaatgtgtcataattaggtaattatttccttttcctttctgttatacgtgttaggaaaaatattctcttgtagtttgtgaattccaagtatctcggtgaggtgtcccctctaaaaagctctgtagcttctaccattatgttataaatgaaaatctcagtgcacaagctataattgacctaatttcatcaattaccgttactctcttatattttaagttggtattagagccattgtctgcaccatgtcgattggcgatcagacttcccctttgagaaatagttcaactcctgcacaagattgtagcaatatcgctaatcgatcttcaaccacacaaggtgcgtggagcgtctgcctctaatgttgttattccacagtttgggagcactctaaatcaacatttgctctcaagctggataggagtaattttacactgtggaaaataatggttagagtcattgttaaaggacatcttcttgatggttatttgacagacactagagtcaaaccatattaactaatactagtacccaatgtcgatgaaaaaccatggtttggttttgaagtgaatctggatgttgagcaatgaattgttcatgactagctacttattggatggttgtatggatccatgatagaaagtatttccacagaggtgatgagttgttcatcttatgcagatatatgttgtgtaattcatactttctatggtgctcgttccaaagctaagatggatgagtatacgaataagagatccagaatatgagaaaaggatgaacaaagcatgaaagactatcttaggcaataaacgcaagtgggctaatgtcttagcactcgatggagaaccttattctgaactactcttggtcacaaatgtgaattttggcctagacatcgaatatccactattgtctgtcaaattgaagcaagagcctacactacctggaaagagctgtaagattttcttcttagtttcgatagcaagattgacaggctaactgctctctccaataacagaaagttgtctaatagcttagtttttcctactgtaaatcttgctaacgaaggtggttctagtggaaattctagtccaaaggtagaggaggctaaaataatgataattgaggtagatctagtggtattcgaggtagaggaagtagatttaaaggcttaaaatccacatgttagatttgcaagaggtatggtcattcagcaccgtattgctacaaccactatgataaagcctatatgggatctgctccacttggtttttaatttgataagtacagaattctatagcaacctttatagccactcaaaaaatggtggaagatgatgcatgctatgctgacagtggagctaacaaccatgtcacatttgagacaggaaacatgaattagaagaaaaaatacagtggtaaggagatttgactgttgaaaagggtaacaaactctttattcaccatgttagttctagtgaaattttaattaattttagagaacctctaattttgaaaaaaaaagcttacatgcgcttgaaataacaaagaatttaataagtatttcaaaattaaattaatgataacaatcttgtagttaaattctcatctaataatttttgtgtgaaggataaaacaacaaagaagaagtttctttaagggacacttaaggaggggctctatcagttagaatctacctatcccaagccacacaatcaaattcatcattgttctttcacttgctctgttgttctatctaagtttagtcaatttgttgttcttacttttgtgtttagctcgaatgtaacttataacaccactgagaatgtgtctagttaatttcaatcaaggacatatggcataagaggttaggccattcatccaatcttgtattaagtgatgcatgttgtaagccgtaccaaatttactatacattttctcaatttttaactataacagtatagtgataaatagaggtcgatctcacgaggaataggtatcaatttattattcaagaattagaactaagaaataaaatggggattttagatttggaatgaaaaattaaataagataaactggaaagaaaataaagataaatatttttctattaagaaacagttaagagttaatctccaccctcaacaatcattcaagagcattaataataaacattattttgatctctcaattaaactattaatcccgcaaaaaaatgctagagcagtcaatttttttaatcttcctattacaattaatcaaggcaaaatgctcaattattgaatctttttactgagcaatagatccatgaagcatgcagtctatttagcataggaaaatcattaatttctatggagataagttaatctaaggaacaaattaatgaagcatataattcaattaacctaggttctacttttcataacaatcaataatacctttgacactactattaatggaaaattatcattctacttagaattctaaacttttaagtgagaagtaattctaaatgataatagaataatgtaaaaccttaattagttgtataactaacaagaattcacaatattcataacattaaattagaaaaataaaaacacttaatataagataaatcaagaacaacatttattgtcactaatcaagaattcatgttttaagattttaaaataacccttaactaaaactaaactactccatactgatcatcataatcaaaatcataactaaagattaaagagactagggagaagaaaagaactatattattgaacaattggtgatgtaatcttcctcttctcctctttctttgagtttctctctcaaaaacgcaatctaaagtccctcaaaatgaagtctaaatgccctatttatataaccctaaatttaactaaaaacttaattttttgtaaactatacagacattgtatgacctttggctgccccagtagtgcttaagtggcgtcggggcagaattggatgggtaatttgtgtcgtgtgctcagatcaaaattttggccataactcattcaatacaacttagaattggacgattcaagatgtttcagaaagctgagaatgagatatacaacttttatgtttaggttgaagcccaattcttcctttaaagtcgtcaaaatgtgcaatggcgtttagatttgttaaatagagctctttgacttttgctatttttctaccaaaatatgttaaaatctctccaaatgattccaaatccatgattagtcttcaaaatatcctaaaaaattaaaattacactaatcaataatttaaagaatcattttgataatactaatacataaaattagtcatattagctaccaaactaggatgtgtgattaaacttgacatttagaaggcttacgatatactgaattgggattacctggaggaaattgtgcatgcgtctaagtttccccacaagtttataaagttgatcatgaattgtgtacgaactcctagatactccctgatgtttaatgggactatgaatggctactttgaggctagcaagggattaaggcaaggagatcctatctcgcctttgctttttgtgcttggcatggaatacttatctcgaatactgaaaaaagcagaggaaaaggaggagttcaaatactttgagagatgtaaagatcttaaacttaaccatctttgttttgcagatgatgtgattttattttgtcatggagatttcagaagtatctactgtctattgcaagctttaaaattgttctcttgctcctctgggttggaaccaagtccttcaaaatcaactatttattgctgtggcatggaagatggggaaattcaaagagtggtggacatatcaggcttttgtaggcaagaagctccattcaaatacctaggcatccatatatgtgctaagaggatctcaagcaaggagtgagaaatattggtggaaaagatgactgctaaaatcagagtttggagctcaaggaacatctcatatgctggtagagttttaattaattcagttttactagctattcactcatattggagccaaatcatgattttgcctaagaaaatactaaggaagatagaggccatctatagggcttatctatggaagggtcaaagcacatcacaaggggctggtttggtggcttgggaatcggtttgccaatccaagacaataggaggaatcgattttagaaaggt

SEQ ID NO: 224425 - DNA, 3076 bp, Cannabis indica
aggaattcaatgtttgtcaacttgtctacttttgctttcattgcttctgctctttcaggatctaatggtcgttgcttatgtcggactggatctgtcttgggatctacgttcaaagcatgtaaatcacatgaggattgatcctaccttgatgactttggtaggatcctcgtgattgatgcatactttttctacctcctccatgggttcgattattatttcatgcccacacgtggattcaattcatcttcttcccggaccaccctcagtgctggctgagaagacattctgggtttgtctatgtttacttctcaaaccatcataatagtcttggacgagacgttgttaaaatttcttgcactcttttgattaccttcaattattttaaagtttccagtatcacttgggaatttcatacataaatgtcagactgaggttacagctctaaaatccactaagaatggtcacccaaaaatgacgtttgtatgcagttgggcaatttaccactacaaaggtacactacttgaaagttgaggcgacattattcccaaattttttctccattcagtgtaattggtagttgtgtttgttctattggaacaagtgtatctccattgaagccttggagctgaaccgaacaagatgtcaaatttgtctccaccaaacttatggctttaaaagcttccttaaaaaggatgttgattgagctttcattgtccacgagaactttgaaaactctcttgtttgcaatttgagcttctattaccaatggatcattgtgtggaacatgcttggcatcatcttctatgaatgttatgagaagattcatcatttgaggatgttgagcaggtgattgtacaagattgcatgtttcatcttgttccagttcattcatgtatctcttctgtgtatttttggtacttgcaacaatgtgtggagctccatatatggaggctacatggcccgttggtggagcaactccgggtgagtatgggttcctaggtccaggaacaacaataggtcttgccgctagggtagtttgtatcccctgaggggcctgtatagttagagcttgtattacaggagctaacggaaggcctactccttgaggaggatttatggctttgtgttgtctagaaataaagagttgtctgtgcgctacgccctgttcagaatagataactagtatcctcacccaattagataaatggccattccaaactagtccttcgatttaatccttcaagtagtcacattcattcgtcatgtgtctaatatcaccatagtattcacatcttttgtttgggtctcttttttgtcttccacctttgtacattggctgatgctttttgtaatggaccatattacatgtggccttataagcattctcacgaatattaatcagattagtgtctttggagtatcttgattcttgagtctttctcttctttgcagattcattttaatgaaagggggttacgaagtatagaaggatagacagaatggaacctacacaagaagaagaagaagaagttgtgatcgaacgtgggcgatccgtgacaatcctccatctagtttctttctcttctcttgatttcttatgcttttatttgtgtctgtttaattatgaatttaattatgaactaaactccctatttagagatgtgatgtatattgttcgacattatttcatggattcatatttagttaattattctttttttccttgattgtgtgatttattcatctttatgtttaacacatgttttagcctgatcaccttatgcatgattcatgatcttagtgtgaaatttgaaaagtgaatgttaagaatgctctaaatgaataaatgttttgatgtgaaacgtaggcatttacatagcttatgtgaattttagattattccttagtacaaattgtatgttgttctatcttagagatgcagtagtatgcaattcaggacatttatgatctgaaaaatagtttaggttaatttatgatttatcagcacataagaggaagaagaatggttaattaatgttaacaaatggataatcaaattaattgaaatcatatccctaatttcacatccattgttaaaccttttatttgtttgttttatttaattttttatttagtttcaaaatttatttactcgattgccaaatagaaacaagaatttaatttattggtacttaaatacagtcctcgttaaaataacttcacttacctgagtattacttgaaaaaacaatacgtatacttgcgtgttagatttttcacaacacctagtgattccgttaatcaggatggtgggatagaataacagttcttcgaagacagttgttatacccaaattcggctatcaaccaaaagctgacacgtgtacttcaagaggaatatgaatcaactaaatgattataatattaaattatattattaaatgcgacttaaataattcgttttaataaattacaattgatagaaatatttaaattcgctgccacataaacgcatgtgagataagaataataactattaataggtacaactgacgagacaatatgtccatgttgggatagacagagtatataatagaagtgttcaagacgagataacaaagagcttgcaacttatcgactgacatacttgggagtaagagcttgtaacttattaatccacatatttgcacatggagagaataactaaattcatccagctcgccctctatatgttgaagtgactacctcgctaatatcatcatggcaaaagaagactgtgagcagcagtataccaatacttagcatttttcatacaaagacggtaaataaggacaactcacacacttagcgagaaacaaccttcatagtcagcataaccgttcaaggataaaaacaaaagagtggttggtggttattaaatattattctatgtgcataaaaatgaaatgtggggaatgtccactttacatgagcagtcatgaataaatagagctcaagaaaaaataattgtcaccctatacacctacaaataggaaaaaaaaatccaagataaaagggacaacaaatttgagagaaaaa

SEQ ID NO: 224426 - DNA, 1656 bp, Cannabis indica
gtgcggtgcggtgcggtttgcagttttgaattgttaatatgcggttacaaaccgcagcgcaccgcacattaataaaaataccaacttttatatttatttagtccaatatgtgaatgtctaacccaaaacccactaattattgtattgttgaaagttattagtttttttttttcatattttatgttcaacccttatggtatttttgacaaatattgctcaagctttattgtatttgtgatagtttaattatttggtaatagtccaaaccgcagaaaccgcaaagaccgcaccgcaccgcacctttttctgcggtgcagttttttagttttgcggtgcgggtgcggtttgggaaattagaaaaaccgcatgtgcaggttggtttgaaaaaatggtcaaaaaccgcaccatccgcactgcgaacacccctagtagacttaccaaataactttaggtaattttacaatacaccctcttaaaagggatgtactaatgcacccctacttgttttggtatctagaaaagaaaaaaaaaaaatagtctaattttttttcatattcatatacgttatagctatttaagatattctacaaaattttgagaaatttgaaataatttacaatatagaaaataatgttcaaacagtctattttacacgcgtataaaataaaatagtcacgcgtgcaacacactgcttgaacgcaattttcagcgtgttaaactttttctaatttcttaaaattttacaggatgtcttaaataactataatctacatgaccatgagaaaaaatttgactaaaaaattatttcggatactaaaatagagagaaatgtatcgatgtatccttttgagagagtgcattatagaatttcccaataatttttactatctatttttttattaaaataagaattttttttttaccatatatgatatccacttagttttattattattcaaaaataaataaaaataaacatgattaatatcatgttattatcattcggactaattacttaattagttcataattagattattgatttttagtaaaggagaatacttcattgaataatacattcccaaaactaaaacaaatatagcactcagtaaaactacgaacagcaagaaaatgagactcgctagaaagtgtgtattagcattatgtttaataaaatcaaatggcatgtttagttttatgtaatttaaacttttaaagcctcctagttactatattgtaatagtcattacatcttgtattgtaatttctattacattataaaactaatgtaacgataattatattattagaaaatatttttttgtcttttttttatttttatttaaatttaaatattaaaaataataaaattaaaaatatttttattaatatactactttaatatatttgattataatgtattaattaaattaaatattataatataatattattctcattacaatttttattctattaagttacaatactattaatattttcattacattatattacgttacatcaaattaaaaatcacataaaaacacatccctcaactaaaaccaaaatatgattccaaaatacttgacacaattgtggttaaaacattcctatattattatctaaaagcacatttgtcaaaaaaaaaaaaaa

SEQ ID NO: 224427 - DNA, 3505 bp, Cannabis indica
aaggttatttctggccgaaaatgatcgaagattcaaaggcctatgctaaaaaatgtgataaataacaaagattttcaaagagacctcgagctccgcccaacgagttaactcagatgcaaagtccttggccttttgccatttggtaaattgacctgatcgtagacccgtaccccaaacttgggtctgagtccgagtctggatttgagtccaggaactggaatctgactaggacctagacccaggcccggactgggacgcagaaccgaatcaaaactcggatcggactcaggacacgaacctaaaccccaacacagactttgacccaaacccggaccaaggacccagaccgagataggagactcagacctagaattaggaaccagacctagattggggaagagccagaatcgggaccaaggactgggactaggacccaagacctgaccttgatctcgatcccaaacccgaacccagacacagacagggaacaggatgcaggattcggatcgaaacgagactgggacaatagattggcattaggatcttgacccacgcctcggggcttcaaccccacccgcagtcggtgtgtagatcttggaatagtaccaagactcgaacctggaaccatttctagaccaggacccaaacaaaaactcggaccctagaaagaaattggaacaagaaccgaaatcaggaccttggaataggaattggacctggaaccaaaactggatctagacgcgaaaccacacacagacccaaaccaagaccgtgatcgaaactcgaacccaggcccgaacctggacccagacttgtgccagtacctgcgacctaggacccatgacccggaaccttgacgagaacctaaactcgtaccagaacccggacctaaacctagaccgagacacagaccaagactcggacctagacacggactgaaacccagaaccagacccaaacccaaacccagacccagacccagactcatactcgaactcggactcggacctagatcaggaccgggacccagacctagactaggaccgaggcctgaacctggactaggacttgaactcagactgggactgggaccgggacccgggacccgatactgagacataggacctaagaacttaaccgtgaccctgacccaaactaggccaagacgcgagacaacgaccagtaccgaacacgcactgagacctgcactcagacttggacccagaccgggaccgacatccggacccaaactaggccaagggcccgatcccagacccagactcagactcggacctagatagggatctggatacgaacctgtactacaacccacacccaaactaggccaggataagagacaaggacccagactgggaccgagacccggacctagacctagacctaggacccgatgccagaccccgactcggacctaaatagggatctggatacgaagctgtactcgaacacagacccaaaccccgactgagatcgaaactcgggacctagatccaaactgagaccatgacacagacctagacttggacccgcacctgggacccgaactcggagctggacccaaaccaagacccaaactgggatctggacctaaatctaaactcagaccaggactcagaccccgacctacactcagacccaaacccgaacccagacactaatcgaaatcgaaactaggacaaggacccaaacccgaacatggaccgagaccgagacttaggactcagacctagacttgggccttggaaccctgacctagatcggaactcaggactcggacccatacctagagctagactcaaaccgagatctggacccaagccaagatcagaactctgacccagactcggaccaggacttgaaccccgatcgggtcctggactcagaccgggaccttggactcgaacctggattggggacttggacttaggacacaagcatcagaactaggactaagacccagaatccgaccccagagccggaccaggtcctgggacccgaagtggaactagactgggactcgagaccgtgatccacatctacactcggggcttggaccttacccgtagtcagtgtttggatctaggacccatacccggactcaaaaccaaacctaaactcggacccagacccagacccaaacccgtaccccaaacttgggtccgagtccgagtctggtttgagtttgagaattggaatctgactacgaccaagaccaaaacccggattgggatgcggacttaaatcagactcggatcgggactcgggacacgaacgcgaacagagacacagacttggaccttgacccagaccgggattggagactcaaacctagacccaggaccaagacctctagattgcggaccaaaactcaaaattagaacagacccaggactaggactgggacccaagacctaaccccattctcgatcctagacccggacccagacacggacacagaccgggacctaagatccaaattgaaatgagattgtgacccaagattgggatctgaatcttgaccaacgacccgcggctcgaaaccaacccgtagtcggtgtctggatcttggaatcataccaagaccagaacttggaaaaatttccagaccaggacctaaaccctgacttggacccgagacccgaaatcggaacaagaaccagaatcaggaccctggaataggaattggacctagacccaaaactggatctagacgtagaaccgaacacagacccagacccagaccgggatcgatactaggacccaggcccaaacctggagccagactttcaccaagacttgtgatttagaacccgtgactcgagacctcgaccagaacctagacccgtacaagaactcagacccagacccagacctagaccaagaccacgaccaagacatagactgaaacctggactcagacccaaacccggacccaaacctggactagtactataactcgtactcgaacccaggactggacccggactgagatcaggactgggacccaaacccagactaggaccgagacctgaacccggactaggactagaactcagattgggacagggactgggacctgggaccgagactgggacctaggactagatactcagacttgggacctcagaatcgaaccgtgacctagacccagaccaggccaagaatcgagacaaggacaattactgaacacagaccgggacctacacgcggagtgggaccctaaccaagaccgagaactaccactttgacttgaatcggggaccaagacccatgacttggtcctatgacccgaaccaggacccaagacatgagttggaactggaccaggatctagattttgacccgggacaggacccaagacccgaggcttggacccgacccatagttggtgtctaaattagggaattcgacctcgacctagacctagatccggaccaaaagcgaaacccatacaagaacttgaactagactagacatgtggttg

SEQ ID NO: 224428 - DNA, 1869 bp, Cannabis indica
actttgtcggacagatagctgaaaacgccttcttatttcttccaatagtactgggtagacccaagtacttgcttcgctcatcagcctcatgaatacccagccgttggcaaatagaatttctcaccattggagtagtgttgctactgtaaaaaacggtggacttgtcaaaattcactcgttgccccgatgccttggcgaaactgtccagaagatgaatgatgtgggatacttcttcatgcgttgctttacaatacaagaaactatcatcagcgaagagcatatgggaaaccaccggagctccatttgccaccttacacccatgaatccatttgcgttcttcatatcttctcataagagctgacagcccttcagcacagaccaaaaacagataaggcgatattggatcaccttgccgaagccctctactaggaacaatgggaccgagagtgtatccactacttacaacattatattgaacagtagaaagacatccatagatgagacgaacccatttatcaggaaaacccaaccgagagagcattgcacaaagaaaattccaatccactctatcataagccttgctcatgtctaacttcaacgccatgtacccatctttgccaacctgcttccttttgagatagtgcaaaatctcaaaggaaaccattatgttatcagtgataagcctccctggaatgaacgcactttggttaacagaaatgacctccgaaagaagacccttcatcctattagcaagaaccttggtgataattttagcaacaacattacataaagagataggacgtagctcactcatcatatctggtttctttttcttgggaatcaacacaatattagtattttgcatccccgcgggcattacctcggttcgaaaaaattccttgacagagtttacaacatcattcccaacaatatgccaatacttttgaaagaatttaggattcataccatctggtcccggggacttatcagggtgcatttgaaagacggcatccttcacttcttggtcactaaccggccgaagcaataattgattgtgtgcctcattcattctcggctccacacattgaagaacatctgcccaatctccttcttcagctttaaaaatgctagtgaaatagtccaccataacgtcccccagcccattatcccaactccgcaacacaccattagtgtctctcaactgaacaatttgattgtttctctttcgagcggatgctttagcatggaagaacttgctattgtgatccccttctttcaaccacaattgttttgaccgttggcgccaaaaaacttctctttggttaagcactcggaaaagctgctgcttcgcttgtttgaatcgttgctttccttcctcatctcttctcttcttaaattgcttcatggttttgttacactgctttatctgtgaagaaaaattccccgtcactcccttaccccaaacttgtaaagcttgaccacattgctgaattttttgctctagccgagtaccattggttgtaccccagctatctctgatgatagtttcacactcttgatgactacaccagcaattttcgaatttaaaaggacgcggttggtcacgaggttcacggtgctgaacatcaagaaggagaggacaatgatccgaaggtgagacttcaagattaaacaaccttgctgtcgagaaaacattaagccaactctgagaacacatcgccctatcaagcttagcctcgatccaattagaagtatcccgacttttctcccacgtgaaaggatgcccaaacatgtccaaatcacataaaccacattgttgaacaacctcctggaatccatcaattagccatgttgggtaaggattaccac

SEQ ID NO: 224429 - DNA, 1847 bp, Cannabis indica
ggaagattgaatctgtcagggatttgccaagaccaaagacagttacgaaagttagaagtttcctgggtctgactggttattaccatcggtttgtagagggattttctaagatttcaacaccattaaccattctctcaaaaaagaatcagcagtttgtgtggacagataagtgtgaagcaagctttcatgagcgaaaacagagattgattacaacttcagtattagccctaccagcagataaggaaaagtttgtagtttactgtcatgcatccagacatggtctggggtgtgtactgatgcaagtcgatcgggacattgcctatgcctcttgtcagttgaaatattatgaacagcgatacctgactcatgatttagaacttgttgcggtggtttttgctttgaagattttgcagcattatctctacagagaaaaatgtgagatttatacttaccatatataagagcctcaagtacttctttactcagaaagatttgaatatgaggcagaggtgttggttagagttggttaacgattatgactgtgaaatcctttaccatcctgagaaggctaatgtagtggttgatgccctaagcagaaagggtccaaggcagataactagtatcattaagatttcatcttggttagcaaaagacatggtaagtttaggcattgagtttgttgtaggaaaacttcataacttaacgctataatctaatctgttagatgagttaaagctgcttagttagctgatccaaaattagtgaagatctgagaagaggtttcagctggtcataccaaagattttacagtatcagatagtgggatgccgttatttaagactagggtgtgttccaagtagtgcggaacttggaaatgagattctttaggaggctcagaccactccatactcattgaatcctggcactaccaagatgtatcaagatcttaaaccctacttctggtggtgcgggatgaagaaggatgtggtagaatttgtatcctggtgcttaacttgtcaatagatcaaggttgaacattagagaccgggtgtaagtgggagggtatcaccatggacttggtggtttggttacctagaaccacgagaatgtatgattccatttgcgttgtgattgatcaattcacaaagtatgtacattttctgccagtgtaaacaacctttatggtggataagtatgcagatttgtatgtgaaagaaatagtgaggttacatggcattccaatgtccattatatcagatagagatccgaaatttacttcgaagttctggcagagtctgcaacgggctatagataccaaactgaaattcagtacagcattccatcctcatactgatggacaatctgaaagaacaattaagatactggaagacatgtaacgagcctgtgtaatggatttcgagggctcttggagcaagtacctgccactaatagaattctcgtataataacagctaccagagtacgatagggatggctccctatgagatgttatatggcagaaagtgtaggtctcccatacactaggatgaaacgggagaaaagaaatacctaggtctagaatcattgcaatacactaatgaagccatagaaaagattaagaccagaatgcttgcctctcagagtaattgaaagagttatgcagatccaaagcgcagaaatgtggaatttcaggtaggagattatgtgttcctactggtgtctccattgaaggggatcagacgtttcgggaaaagaggaaagttatgccctaggtttacaggacctttcgagattcttgagaaagttggactagtggcgtatcttctagctttgcctccagctttttca

SEQ ID NO: 224430 - DNA, 1511 bp, Cannabis indica
aaaaaatttgaatggactgaagaatgggaggaggctttcaaaaaactaaaaaagtacatggcaaaaccaccggtactatcaaaaccagttcacggagaggacttgttactatacttggccgttttcgagaacgctgtcagtgcgtccctagtccggaaagaggacaaggtctagcacccggtgtactatgttagcaagcgtatgataggagccgagacacggtatcccttaatcgagaaactagttttttgactcctgatggcttcgaggaaattaagaccctacttccaggcccatcccattaaggtacttacaaaccatccgcttcggcaagtcttgcagaagccggaagcctctggaagactccttaaatgggtcatggaattgagccagtttgacatccactacgttccacatatttccataaaggggcaagccctggcagacttcataatggaatgcaatgaggtagaggccagttcaaatataccagcctcgaagacactggcatggaaggtgttcgttgatggagcatcaaatgaaagtggatttggtgttgggatagcgatgatatcgccagattgacttcggctccaggccgtcctacacttctcattcctagcttctaacaacgaagccatgtacgaagccctaattgcaggactaacgttggtaaaggttgtaggggctacaagggtagaagtcttcagcgattcgcagttagtggtcaatcaagtgtcaagagaataccagacgcgtggagaaaaaatggctgcttacgtagaaattgttagagaactgctccataggttcacagaatacagagtggaaagaatcccacgggaaaaaaatgctcacgcggattgtttagccaaattagcctcggataaagaaatagagaaactcgatgtggtacccgttgaaggtagctacaaatgagccaggaccggggtggatggattccatcatcaaatacataatgaaaggagagttgcctcaagaaagggctgtatccaagaggttacagtatcagacgcatcgatatgtaataatggataatatcctttacaggaaaggactcagcatgtcgcacataaggtgtgtgtcggatcttgaagctagacagatcatgcaggaggtccatgaggggttctgtggagatcacatcggaggtccaagtctcacaaagaaaatactgagacaaggatatttttggccaacaatgaagaaagataatgtagagtacgtcctaaaatgtgattcgtgccaaagatttgcgaacataccaagagccccacccaaagaagttactatagaatcaggggcatacaaatcaggtaagtatgacgaaaagatgcaactcattctagtaccaaggtattggaacagggaacacctaagaaaatactaccactaaaagtcccaggtcagatgacaatataaagtacgaaataaaagaacatttactcttaagtgaatggccttttgggcgaatcacgcccaaaggtttt

SEQ ID NO: 224431 - DNA, 1888 bp, Cannabis indica
cttgaaattatctttcaaattcaagttcaaccaaatcatttggataaaaattatgagagttatgcctattttactaaagggcagttcctgtgattttgtcctagttgtgagcactgacatggcaaaatggcagttctcggccataatatattggaagccatggatggtatttcttgcttatttcagtcatatggatgttagaaaactactttggtcacattagttcttagccaattgcttaggagagcactaccaccatttttgccaaaaaagtggcaatgatcacataaggcgtttatgtagccttgggtgacttttctcactttgattttacacatgcatgttggaaatacaatttggccaatgaaacttctcctcctatgtggttgacgaccactgccgctaattgtgccaaaattctggtagtggtctaccgagtggtttctacaccacttggttgcttctttcacttggttttgacatatttttggtgaaaatgtatttttggcaagaaatctcatcccctttcttcatggccaaccacagtcactcattgtaccacaaagatggcaatggtcagctatgcttgcttcttgttgacaaatggtttctttcacttgtgttgcattccttggtgttgagggaacatatttgaaagtttccctttagtgctttgtaagtggtgaccactgccatctccttgtggtgaccacttccatctccttgtggtgaaaccctctaaaaactagagaacactgccatctccatatggcactgggtgcataggctctattccatgaaattttatgccattttgactctttgcacaaatataagacttttcaagcccaaattagtcgagtccttgttggtttccatggtgtattgaggtctctaggatgaaaatgcttgtgtagactcatgaaccctagtttgggcaaacttgggtgtgtgaatcctagaaccaattggtttgtcaatgtttttgtgtctcatagaggtgccatgggaccctcacgtaggatggcttaactcattttgactctgtaagtcttggtcaaagtcgtagggttgactttagtgtcttcaaggcactcttggcatgtgggcccttgtgcaagagtagccattttattattttttttttgcaaaaattgggtataacattttccccccaaaagtatttgcatgaatgccttcaagttatgcttttgcacttttcccaaggcttgcaaaaaaaaaaaacttctttatatagtgcatgaatgttacttctctgtttgagatgtgtgcctgggcatggccaatgtccttaattgttgtgaagaggtctgcatggacaagaccaatgtccttggacttgtattggtggagttcttaaagcacgtatcttctccatagaatgtgagctgagttatatctcatgtggtagtcgagtagagttgtgtctttgctcgattttgggactcttgcaaggtataaaactttctgctataagttttttaatttagagtagagttatatctctttcttgaatttgaaacttttatggagtttgaaatctctccttctcaagtttttgagcgttgagtagagttgtctccctttctcaaactcatcattgagtagagttaaatctcttgcttaagttggttggcaagtaaggtttgccatgagcagagttgaattttctcattctaaactttttggttgtgcattaaatttaggacccacatgtgtggatttgtatatgtccacttgtcgtggaattcatattagttaggactgacaagtctttttcacatctttagaactttttacgcatatataacttagtttatttcgtagcttgggtctattatctcatctgtatactgactttgccccc
